(19) United States
(12) Patent Application Publication
(10) Pub. No.: US 2007/0083945 A1
(43) Pub. Date: Apr. 12, 2007

(54) Nucleic acid molecules and other molecules associated with plants

(76) Inventors: Joseph R. Byrum, Des Moines, IA (US); Conrad H. Halling, St. Louis, MO (US); David K. Kovalic, St. Louis, MO (US)

Correspondence Address: ARNOLD & PORTER, LLP, 555 TWELFTH STREET, N.W., ATTN: IP DOCKETING, WASHINGTON, DC, 20004, US

(21) Appl. No.: 11/497,489

(22) Filed: Aug. 2, 2006

Related U.S. Application Data
(63) Continuation of application No. 09/521,640, filed on Mar. 10, 2000, now abandoned.

(51) Int. Cl. A01H 1/00; C07K 14/415; C12N 15/87; C07H 21/04

(52) U.S. Cl. 800/278; 536/23.6; 530/370

(57) ABSTRACT

The present invention is in the field of plant genetics. More specifically the invention relates to nucleic acid molecules and nucleic acid molecules that contain markers, in particular, single nucleotide polymorphism (SNP) and repetitive element markers. In addition, the present invention provides nucleic acid molecules having regulatory elements or encoding proteins or fragments thereof. The invention also relates to proteins and fragments of proteins so encoded and antibodies capable of binding the proteins. The invention also relates to methods of using the nucleic acid molecules, markers, repetitive elements and fragments of repetitive elements, regulatory elements, proteins and fragments of proteins.

### CROSS REFERENCE TO RELATED APPLICATION

[0001] This application is a continuation of U.S. application Ser. No. 09/521,640 filed Mar. 10, 2000, which is herein incorporated by reference in its entirety.

### INCORPORATION OF SEQUENCE LISTING

[0002] This application contains a sequence listing, which is contained on three identical CD-ROMs: two copies of the sequence listing (Copy 1 and Copy 2) and a sequence listing Computer Readable Form (CRF), all of which are herein incorporated by reference. All three sequence listing CD-ROMs each contain one file called “15750E seq list.rpt” which is 190,044,160 bytes in size (measured in Windows XP) and which was created on Aug. 2, 2006.

### FIELD OF THE INVENTION

[0003] The present invention is in the field of plant genetics. More specifically the invention relates to nucleic acid molecules and nucleic acid molecules that contain markers, in particular, single nucleotide polymorphism (SNP) and repetitive element markers. In addition, the present invention provides nucleic acid molecules having regulatory elements or encoding proteins or fragments thereof. The invention also relates to proteins and fragments of proteins so encoded and antibodies capable of binding the proteins. The invention also relates to methods of using the nucleic acid molecules, markers, repetitive elements and fragments of repetitive elements, regulatory elements, proteins and fragments of proteins.

### BACKGROUND OF THE INVENTION

I. Sequence Tagged Connector Nucleic Acid Molecules and the Bacterial Artificial Chromosomes (BACs) Containing these Sequences.

[0004] Sequence tagged connectors, or STCs, are sequences of insert data generated from both ends (at the vector-insert point) of a BAC clone in a genomic library. These sequences, and BACs containing these STC sequences, can be used, for example, for marker development, genetic mapping or linkage analysis, marker assisted breeding, and physical genome mapping (Venter, et al., Nature, 381:364-366 (1996), the entirety of which is herein incorporated by reference; Choi and Wing, on the Worldwide web at genome.clemson.edu/protocols2-nj.html July, 1998). STCs can represent a copy of up to a full length of a mRNA transcript, a promoter element or part of a promoter, can contain simple sequence repeats (also called microsatellites) repetitive elements or fragments of repetitive elements, other DNA markers, or any combination thereof.

[0005] Markers have been used in genetic mapping which can be a step in isolating a gene. Genetic mapping or linkage analysis is based on the level at which markers and genes are co-inherited (Rothwell, Understanding Genetics. 4^{th} Ed., Oxford University Press, New York, p. 703 (1988). Statistical tests like chi-square analysis can be used to test the randomness of segregation or linkage (Kochert, The Rockefeller Foundation International Program on Rice Biotechnology, University of Georgia, Athens, Ga., pp 1-14 (1989), the entirety of which is herein incorporated by reference. In linkage mapping, the proportion of recombinant individuals out of the total mapping population provides the information for determining the genetic distance between the loci (Young, Encyclopedia of Agricultural Science, Vol. 3, pp 275-282 (1994), the entirety of which is herein incorporated by reference).

[0006] Classical mapping studies utilize easily observable, visible traits instead of molecular markers. These visible traits are also known as naked eye polymorphisms. These traits can be morphological like plant height, fruit size, shape and color or physiological like disease response, photoperiod sensitivity or crop maturity. Visible traits are useful and are still in use because they represent actual phenotypes and are easy to score without any specialized lab equipment. By contrast, the other types of genetic markers are arbitrary loci for use in linkage mapping and often not associated to specific plant phenotypes (Young, Encyclopedia of Agricultural Science, Vol. 3, pp. 275-282 (1994). Many morphological markers cause such large effects on phenotype that they are undesirable in breeding programs. Many other visible traits have the disadvantage of being developmentally regulated (i.e., expressed only at certain stages; or in specific tissues and organs). Often times, visible traits mask the effects of linked minor genes making it nearly impossible to identify desirable linkages for selection (Tanksely, et al., Biotech. 7:257-264 (1989), the entirety of which is herein incorporated by reference).

[0007] Although a number of important agronomic characters are controlled by loci having major effects on phenotype, many economically important traits, such as yield and some forms of disease resistance, are quantitative in nature. This type of phenotypic variation in a trait is characterized by continuous, normal distribution of phenotypic values in a particular population (Beckmann and Soller, Oxford Surveys of Plant Molecular Biology, Miffen. (ed.), Vol. 3, Oxford University Press, UK., pp. 196-250 (1986), the entirety of which is herein incorporated by reference). Such traits are governed by a large number of loci, Quantitative Trait Loci (QTL), each of which can make a small positive or negative effect to the final phenotype value of the trait (Beckmann and Soller, Oxford Surveys of Plant Molecular Biology, Miffen. (ed.), Vol. 3, Oxford University Press, U.K., pp. 196-250 (1986). Loci contributing to such genetic variation are often; termed minor genes as opposed to major genes with large effects that follow a Mendelian pattern of inheritance. Polygenic traits are also predicted to follow a Mendelian type of inheritance, however the contribution of each locus is expressed as an increase or decrease in the final trait value.

[0008] Markers have been used in physical mapping studies with BAC libraries made from plant genomes. Such mapping studies have been carried out in rice (Kim et al., Genomics 34:213-218 (1996), herein incorporated by reference; Hang, Plant Mol. Biol. 35:129-133 (1997), herein incorporated by reference; Zhang and Wing., Plant Mol. Bio. 35:115-127 (1997) herein incorporated by reference; Chen et al., Proc. Acad. Sci. (U.S.A.) 94:3431-3435 (1997) herein incorporated by reference; Wang et al., Plant J. 7:525-533 (1995) herein incorporated by reference) sorghum (Zwick et al., Genetics 148:1983-1992 (1998) herein incorporated by reference; Zhang, et al., Molecular Breeding 2:11-24 (1996) the entirety of which is herein incorporated by reference) maize, (Chen, et al., Proc. Acad. Sci. (U.S.A.) 94:3431-3435 (1997), and Arabidopsis (Kim, et al., Genomics 34:213-218 (1996) the entirety of which is herein incorporated by reference.

[0009] Repetitive elements have been used in physical mapping in cereals (Ananiev, et al., Proc. Acad. Sci. (U.S.A.) 95:13073-8 (1998), the entirety of which is herein incorporated by reference; McLean et al., Mol Gen Genet 253:687-694 (1997), the entirety of which is herein incorporated by reference).

II. Sequence Comparisions

[0010] STCs and sequenced BACs can be compared, for example, to sequences that encode promoters or proteins. These homologies can be determined by similarity searches (Adams, et al., Science 252:1651-1656 (1991), herein incorporated by reference).

[0011] A characteristic feature of a DNA sequence is that it can be compared with other DNA sequences. Sequence comparisons can be undertaken by determining the similarity of the test or query sequence with sequences in publicly available or propriety databases (“similarity analysis”) or by searching for certain motifs (“intrinsic sequence analysis”) (e.g., cis elements) (Coulson, Trends in Biotechnology, 12:76-80 (1994), the entirety of which is herein incorporated by reference; Birren, et al., Genome Analysis, 1:543-559 (1997), the entirety of which is herein incorporated by reference).

[0012] Similarity analysis includes database search and alignment. Examples of public databases include the DNA Database of Japan (DDBJ) (on the Worldwide web at ddbj.nig.ac.jp/); Genebank (on the Worldwide web at ncbi.nlm.nih.gov/web/Genbank/Index.htlm); and the European Molecular Biology Laboratory Nucleic Acid Sequence Database (EMBL) (on the Worldwide web at ebi.ac.uk/ebi_docs/embl_db.html). A number of different search algorithms have been developed, one example of which are the suite of programs referred to as BLAST programs. There are five implementations of BLAST, three designed for nucleotide sequences queries (BLASTN, BLASTX, and TBLASTX) and two designed for protein sequence queries (BLASTP and TBLASTN) (Coulson, Trends in Biotechnology, 12:76-80 (1994); Birren, et al., Genome Analysis, 1:543-559 (1997)).

[0013] BLASTN takes a nucleotide sequence (the query sequence) and its reverse complement and searches them against a nucleotide sequence database. BLASTN was designed for speed, not maximum sensitivity, and may not find distantly related coding sequences. BLASTX takes a nucleotide sequence, translates it in three forward reading frames and three reverse complement reading frames, and then compares the six translations against a protein sequence database. BLASTX is useful for sensitive analysis of preliminary (single-pass) sequence data and is tolerant of sequencing errors (Gish and States, Nature Genetics, 3:266-272 (1993), the entirety of which is herein incorporated by reference). BLASTN and BLASTX may be used in concert for analyzing STC data (Coulson, Trends in Biotechnology, 12:76-80 (1994); Birren, et al., Genome Analysis, 1:543-559(1997).

[0014] Given a coding nucleotide sequence and the protein it encodes, it is often preferable to use the protein as the query sequence to search a database because of the greatly increased sensitivity to detect more subtle relationships. This is due to the larger alphabet of proteins (20 amino acids) compared with the alphabet of nucleic acid sequences (4 bases), where it is far easier to obtain a match by chance. In addition, with nucleotide alignments, only a match (positive score) or a mismatch (negative score) is obtained, but with proteins, the presence of conservative amino acid substitutions can be taken into account. Here, a mismatch may yield a positive score if the non-identical residue has physical/chemical properties similar to the one it replaced. Various scoring matrices are used to supply the substitution scores of all possible amino acid pairs. A general purpose scoring system is the BLOSUM62 matrix (Henikoff and Henikoff, Proteins, 17:49-61 (1993), the entirety of which is herein incorporated by reference), which is currently the default choice for BLAST programs. BLOSUM62 is tailored for alignments of moderately diverged sequences and thus may not yield the best results under all conditions. Altschul, J. Mol. Biol. 36:290-300 (1993), the entirety of which is herein incorporated by reference, uses a combination of three matrices to cover all contingencies. This may improve sensitivity, but at the expense of slower searches. In practice, a single BLOSUM62 matrix is often used but others (PAM40 and PAM250) may be attempted when additional analysis is necessary. Low PAM matrices are directed at detecting very strong but localized sequence similarities, whereas high PAM matrices are directed at detecting long but weak alignments between very distantly related sequences.

[0015] Homologues in other organisms are available that can be used for comparative sequence analysis. Multiple alignments are performed to study similarities and differences in a group of related sequences. CLUSTAL W is a multiple sequence alignment package available that performs progressive multiple sequence alignments based on the method of Feng and Doolittle, J. Mol. Evol. 25:351-360 (1987), the entirety of which is herein incorporated by reference. Each pair of sequences is aligned and the distance between each pair is calculated; from this distance matrix, a guide tree is calculated, and all of the sequences are progressively aligned based on this tree. A feature of the program is its sensitivity to the effect of gaps on the alignment; gap penalties are varied to encourage the insertion of gaps in probable loop regions instead of in the middle of structured regions. Users can specify gap penalties, choose between a number of scoring matrices, or supply their own scoring matrix for both the pairwise alignments and the multiple alignments. CLUSTAL W for UNIX and VMS systems is available by anonymous ftp at ebi.ac.uk. Another program is MACAW (Schuler et al., Proteins, Struct. Func. Genet, 9:180-190 (1991), the entirety of which is herein incorporated by reference, for which both Macintosh and Microsoft Windows versions are available. MACAW uses a graphical interface, provides a choice of several alignment algorithms, and is available by anonymous ftp at: ncbi.nlm.nih.gov (directory/pub/macaw).

[0016] Sequence motifs are derived from multiple alignments and can be used to examine individual sequences or an entire database for subtle patterns. With motifs, it is sometimes possible to detect distant relationships that may not be demonstrable based on comparisons of primary sequences alone. Currently, the largest collection of sequence motifs in the world is PROSITE (Bairoch and Bucher, Nucleic Acid Research, 22:3583-3589 (1994), the entirety of which is herein incorporated by reference). PROSITE may be accessed via either the ExPASy server on the World Wide Web or anonymous ftp site. Many commercial sequence analysis packages also provide search programs that use PROSITE data.

[0017] A resource for searching protein motifs is the BLOCKS E-mail server developed by S. Henikoff, Trends Biochem Sci., 18:267-268 (1993), the entirety of which is herein incorporated by reference; Henikoff and Henikoff, Nucleic Acid Research, 19:6565-6572 (1991), the entirety of which is herein incorporated by reference; Henikoff and Henikoff, Proteins, 17:49-61 (1993). BLOCKS searches a protein or nucleotide sequence against a database of protein motifs or “blocks.” Blocks are defined as short, ungapped multiple alignments that represent highly conserved protein patterns. The blocks themselves are derived from entries in PROSITE as well as other sources. Either a protein or nucleotide query can be submitted to the BLOCKS server; if a nucleotide sequence is submitted, the sequence is translated in all six reading frames and motifs are sought in these conceptual translations. Once the search is completed, the server will return a ranked list of significant matches, along with an alignment of the query sequence to the matched BLOCKS entries.

[0018] Conserved protein domains can be represented by two-dimensional matrices, which measure either the frequency or probability of the occurrences of each amino acid residue and deletions or insertions in each position of the domain. This type of model, when used to search against protein databases, is sensitive and usually yields more accurate results than simple motif searches. Two popular implementations of this approach are profile searches (such as GCG program ProfileSearch) and Hidden Markov Models (HMMs) (Krough, etal., J. Mol. Biol. 235:1501-1531 (1994); Eddy, Current Opinion in Structural Biology 6:361-365 (1996), both of which are herein incorporated by reference in their entirety). In both cases, a large number of common protein domains have been converted into profiles, as present in the PROSITE library, or HHM models, as in the Pfam protein domain library (Sonnhammer, et al., Proteins 28:405-420 (1997), the entirety of which is herein incorporated by reference). Pfam contains more than 500 HMM models for enzymes, transcription factors, signal transduction molecules, and structural proteins. Protein databases can be queried with these profiles or HMM models, which will identify proteins containing the domain of interest. For example, HMMSW or HMMFS, two programs in a public domain package called HMMER (Sonnhammer, et al., Proteins 28:405-420 (1997)) can be used.

[0019] PROSITE and BLOCKS represent collected families of protein motifs. Thus, searching these databases entails submitting a single sequence to determine whether or not that sequence is similar to the members of an established family. Programs working in the opposite direction compare a collection of sequences with individual entries in the protein databases. An example of such a program is the Motif Search Tool, or MoST (Tatusov, et al., Proc. Natl. Acad. Sci. 91:12091-12095 (1994), the entirety of which is herein incorporated by reference). On the basis of an aligned set of input sequences, a weight matrix is calculated by using one of four methods (selected by the user); a weight matrix is simply a representation, position by position in an alignment, of how likely a particular amino acid will appear. The calculated weight matrix is then used to search the databases. To increase sensitivity, newly found sequences are added to the original data set, the weight matrix is recalculated, and the search is performed again. This procedure continues until no new sequences are found.

### SUMMARY OF THE INVENTION

[0020] The present invention includes and provides a substantially purified nucleic acid molecule, the nucleic acid molecule capable of specifically hybridizing to a second nucleic acid molecule having a nucleic acid sequence selected from the group consisting of SEQ ID NO: 1 through SEQ ID NO: 304905 or complement or fragment thereof.

[0021] The present invention provides a substantially purified nucleic acid molecule comprising a nucleic acid molecule or fragment thereof having a pair of defined ends, wherein the pair of defined ends are selected from the defined ends in Table A of U.S. application Ser. No. 09/521,640, which is herein incorporated by reference in its entirety.

[0022] The present invention provides a substantially purified protein or fragment thereof encoded by a first nucleic acid molecule which specifically hybridizes to a second nucleic acid molecule, the second nucleic acid molecule having a nucleic acid sequence selected from the group consisting of SEQ ID NO:1 through SEQ ID NO:304905 or complements thereof.

[0023] The present invention provides a substantially purified protein or fragment thereof encoded by a nucleic acid sequence selected from the group consisting of SEQ ID NO:1 through SEQ ID NO:304905 or complements thereof.

[0024] The present invention provides a transformed plant having a nucleic acid molecule which comprises: (A) an exogenous promoter region which functions in a plant cell to cause the production of a mRNA molecule; which is linked to (B) a structural nucleic acid molecule, wherein the structural nucleic acid molecule is selected from the group consisting of SEQ ID NO:1 through SEQ ID NO:304905 or complements thereof or fragments of either; which is linked to (C) a 3′ non-translated sequence that functions in a plant cell to cause termination of transcription and addition of polyadenylated ribonucleotides to a 3′ end of the mRNA molecule.

[0025] The present invention provides a transformed plant having a nucleic acid molecule which comprises: (A) an exogenous promoter region which functions in a plant cell to cause the production of a mRNA molecule wherein the promoter nucleic acid molecule is selected from the group consisting of SEQ ID NO:1 through SEQ ID NO:304905 or complements thereof or fragments of either; which is linked to (B) a structural nucleic acid molecule encoding a protein or peptide; which is linked to (C) a 3′ non-translated sequence that functions in a plant cell to cause termination of transcription and addition of polyadenylated ribonucleotides to a 3′ end of the mRNA molecule.

[0026] The present invention provides a transformed plant having a nucleic acid molecule which comprises: (A) an exogenous promoter region which functions in a plant cell to cause the production of a mRNA molecule; which is linked to (B) a transcribed nucleic acid molecule with a transcribed strand and a non-transcribed strand, wherein the transcribed strand is complementary to a nucleic acid molecule having a nucleic acid sequence selected from the group consisting of SEQ ID NO:1 through SEQ ID NO:304905 or complements thereof or fragments of either and the transcribed strand is complementary to an endogenous mRNA molecule; which is linked to (C) a 3′ non-translated sequence that functions in plant cells to cause termination of transcription and addition of polyadenylated ribonucleotides to a 3′ end of the mRNA molecule.

[0027] The present invention provides a transformed plant having a nucleic acid molecule which comprises: (A) an exogenous promoter region which functions in a plant cell to cause the production of a mRNA molecule wherein the promoter nucleic acid molecule is selected from the group consisting of SEQ ID NO:1 through SEQ ID NO:304905 or complements thereof or fragments of either; which is linked to (B) a transcribed nucleic acid molecule with a transcribed strand and a non-transcribed strand, wherein the transcribed strand is complementary to an endogenous mRNA molecule; which is linked to (C) a 3′ non-translated sequence that functions in plant cells to cause termination of transcription and addition of polyadenylated ribonucleotides to a 3′ end of the mRNA molecule.

[0028] The present invention provides a computer readable medium having recorded thereon one or more of the nucleotide sequences depicted in SEQ ID NO:1 through SEQ ID NO: 304905.

[0029] The present invention provides a method of introgressing a trait into a plant comprising using a nucleic acid marker for marker assisted selection of the plant, the nucleic acid marker complementary to a nucleic acid sequence selected from the group consisting of SEQ ID NO: 1 through SEQ ID NO: 304905 or complements thereof, and introgressing the trait into a plant.

[0030] The present invention provides a method for screening for a trait comprising interrogating genomic DNA for the presence or absence of a marker molecule that is genetically linked to a nucleic acid sequence complementary to a nucleic acid sequence selected from the group consisting of SEQ ID NO: 1 through SEQ ID NO: 304905 or complements thereof; and detecting the presence or absence of the marker.

[0031] The present invention provides a method for determining the likelihood of the level, presence or absence of a trait in a plant comprising the steps of: (A) obtaining genomic DNA from the plant; (B) detecting a marker nucleic acid molecule; the marker nucleic acid molecule wherein the marker nucleic acid molecule specifically hybridizes with a nucleic acid sequence that is genetically linked to a nucleic acid sequence complementary to a nucleic acid sequence selected from the group consisting of SEQ ID NO: 1 through SEQ ID NO: 304905 or complements thereof; (C) and determining the level, presence or absence of the marker nucleic acid molecule, wherein the level, presence or absence of the marker nucleic acid molecule is indicative of the likely presence in the plant of the trait.

[0032] The present invention provides a method for determining a genomic polymorphism in a plant that is predictive of a trait comprising the steps: (A) incubating a marker nucleic acid molecule, under conditions permitting nucleic acid hybridization, and a complementary nucleic acid molecule obtained from the plant, the marker nucleic acid molecule having a nucleic acid sequence selected from the group consisting of SEQ ID NO: 1 through SEQ ID NO: 304905 or complements thereof; (B) permitting hybridization between the marker nucleic acid molecule and the complementary nucleic acid molecule obtained from the plant; and (C) detecting the presence of the polymorphism.

[0033] The present invention provides a method of determining an association between a polymorphism and a plant trait comprising: (A) hybridizing a nucleic acid molecule specific for the polymorphism to genetic material of a plant, wherein the nucleic acid molecule comprises a nucleic acid sequence selected from the group consisting of SEQ ID NO: 1 through SEQ ID NO: 304905 or complements thereof; and (B) calculating the degree of association between the polymorphism and the plant trait.

### DETAILED DESCRIPTION OF THE INVENTION

Agents of the Invention:

[0034] (a) Nucleic Acid Molecules

[0035] Agents of the present invention include nucleic acid molecules and more specifically BACs and STC nucleic acid molecules or fragments thereof

[0036] A subset of the nucleic acid molecules of the present invention includes nucleic acid molecules that are marker molecules. Another subset of the nucleic molecules of the present invention include nucleic acid molecules that are promoters and/or regulatory elements. Another subset of the nucleic acid molecules of the present invention include nucleic acid molecules that encode proteins or fragments of proteins. In a preferred embodiment the nucleic acid molecules of the present invention are derived from Glycine max (soybean) and more preferably Glycine max, genotype A3244.

[0037] Fragment STC nucleic acid molecules and fragments of BACs may encode significant portion(s) of, or indeed most of, the STC or BAC nucleic acid molecule. In addition, a fragment nucleic acid molecule can encode a Glycine max protein or fragment thereof. Alternatively, the fragments may comprise smaller oligonucleotides (having from about 15 to about 250 nucleotide residues, and more preferably, about 15 to about 30 nucleotide residues).

[0038] The term “substantially purified”, as used herein, refers to a molecule separated from substantially all other molecules normally associated with it in its native state. More preferably a substantially purified molecule is the predominant species present in a preparation. A substantially purified molecule may be greater than 60% free, preferably 75% free, more preferably 90% free, and most preferably 95% free from the other molecules (exclusive of solvent) present in the natural mixture. The term “substantially purified” is not intended to encompass molecules present in their native state.

[0039] The agents of the present invention will preferably be “biologically active” with respect to either a structural attribute, such as the capacity of a nucleic acid to hybridize to another nucleic acid molecule, or the ability of a protein to be bound by an antibody (or to compete with another molecule for such binding). Alternatively, such an attribute may be catalytic, and thus involve the capacity of the agent to mediate a chemical reaction or response.

[0040] The agents of the present invention may also be recombinant. As used herein, the term recombinant means any agent (e.g., DNA, peptide etc.), that is, or results, however indirect, from human manipulation of a nucleic acid molecule.

[0041] It is understood that the agents of the present invention may be labeled with reagents that facilitate detection of the agent (e.g., fluorescent labels (Prober, et al., Science 238:336-340 (1987); Albarella et al., EP 144914, chemical labels (Sheldon et al., U.S. Pat. No. 4,582,789; Albarella et al., U.S. Pat. No. 4,563,417, modified bases (Miyoshi et al., EP 119448, all of which are hereby incorporated by reference in their entirety).

[0042] It is further understood, that the present invention provides bacterial, viral, microbial, insect, fungal and plant cells comprising the agents of the present invention. The BAC nucleic acid molecules of the present invention include, without limitation, BAC nucleic acid molecules having inserts with two defined ends (STCs) as set forth in Table A of U.S. application Ser. No. 09/521,640, which is herein incorporated by reference in its entirety. It is understood that fragments of such BAC molecules can contain one or neither of the defined ends.

[0043] STC nucleic acid molecules or fragment STC nucleic acid molecules, or BACs or fragments thereof, of the present invention are capable of specifically hybridizing to other nucleic acid molecules under certain circumstances. As used herein, two nucleic acid molecules are said to be capable of specifically hybridizing to one another if the two molecules are capable of forming an anti-parallel, double-stranded nucleic acid structure. A nucleic acid molecule is said to be the “complement” of another nucleic acid molecule if they exhibit complete complementarity. As used herein, molecules are said to exhibit “complete complementarity” when every nucleotide of one of the molecules is complementary to a nucleotide of the other. Two molecules are said to be “minimally complementary” if they can hybridize to one another with sufficient stability to permit them to remain annealed to one another under at least conventional “low-stringency” conditions. Similarly, the molecules are said to be “complementary” if they can hybridize to one another with sufficient stability to permit them to remain annealed to one another under conventional “high-stringency” conditions. Conventional stringency conditions are described by Sambrook, et al., Molecular Cloning, A Laboratory Manual, 2nd Ed., Cold Spring Harbor Press, Cold Spring Harbor, N.Y. (1989), and by Haymes, et al, Nucleic Acid Hybridization, A Practical Approach, IRL Press, Washington, D.C. (1985), the entirety of which is herein incorporated by reference. Departures from complete complementarity are therefore permissible, as long as such departures do not completely preclude the capacity of the molecules to form a double-stranded structure. Thus, in order for an STC nucleic acid molecule, fragment STC nucleic acid molecule, BAC nucleic acid molecule or fragment BAC nucleic acid molecule to serve as a primer or probe it need only be sufficiently complementary in sequence to be able to form a stable double-stranded structure under the particular solvent and salt concentrations employed.

[0044] Appropriate stringency conditions which promote DNA hybridization are, for example, 6.0× sodium chloride/sodium citrate (SSC) at about 45° C., followed by a wash of 2.0×SSC at 50° C., are known to those skilled in the art or can be found in Current Protocols in Molecular Biology, John Wiley & Sons, N.Y. (1989), 6.3.1-6.3.6. For example, the salt concentration in the wash step can be selected from a low stringency of about 2.0×SSC at 50° C. to a high stringency of about 0.2×SSC at 50° C. In addition, the temperature in the wash step can be increased from low stringency conditions at room temperature, about 22° C., to high stringency conditions at about 65° C. Both temperature and salt may be varied, or either the temperature or the salt concentration may be held constant while the other variable is changed.

[0045] In a preferred embodiment, a nucleic acid of the present invention will specifically hybridize to one or more of the nucleic acid molecules set forth in SEQ ID NO: 1 through SEQ ID NO: 304905 or complements thereof under moderately stringent conditions, for example at about 2.0×SSC and about 40° C.

[0046] In a particularly preferred embodiment, a nucleic acid of the present invention will specifically hybridize to one or more of the nucleic acid molecules set forth in SEQ ID NO:1 through SEQ ID NO: 304905 or complements thereof under high stringency conditions. In one aspect of the present invention, the nucleic acid molecules of the present invention have one or more of the nucleic acid sequences set forth in SEQ ID NO: 1 through to SEQ ID NO: 304905 or complements thereof. In another aspect of the present invention, one or more of the nucleic acid molecules of the present invention share between 100% and 90% sequence identity with one or more of the nucleic acid sequences set forth in SEQ ID NO: 1 through to SEQ ID NO: 304905 or complements thereof. In a further aspect of the present invention, one or more of the nucleic acid molecules of the present invention share between 100% and 95% sequence identity with one or more of the nucleic acid sequences set forth in SEQ ID NO: 1 through to SEQ ID NO: 304905 or complements thereof. In a more preferred aspect of the present invention, one or more of the nucleic acid molecules of the present invention share between 100% and 98% sequence identity with one or more of the nucleic acid sequences set forth in SEQ ID NO: 1 through to SEQ ID NO: 304905 or complements thereof. In an even more preferred aspect of the present invention, one or more of the nucleic acid molecules of the present invention share between 100% and 99% sequence identity with one or more of the sequences set forth in SEQ ID NO: 1 through to SEQ ID NO: 304905 or complements thereof. In a further, even more preferred aspect of the present invention, one or more of the nucleic acid molecules of the present invention exhibit 100% sequence identity with one or more nucleic acid molecules present within the genomic library herein designated BAC#1 (Monsanto Company, St. Louis, Mo., United States of America).

[0047] It is understood that the present invention encompasses fragments of such nucleic acid molecules and that such nucleic acid fragments may contain one, part of one, or neither of the defined sequences.

[0048] (a)(1) Nucleic Acid Molecule Markers

[0049] One aspect of the present invention concerns nucleic acid molecules SEQ ID NO:1 through SEQ ID NO:304905 or complements thereof, that contain microsatellites, single nucleotide substitutions (SNPs), repetitive elements or parts of repetitive elements or other markers. Microsatellites typically include a 1-6 nucleotide core element within SEQ ID NO:1 through SEQ ID NO:304905 that are tandemly repeated from one to many thousands of times. A different “allele” occurs at an SSR locus as a result of changes in the number of times a core element is repeated, altering the length of the repeat region, (Brown et al., Methods of Genome Analysis in Plants, (ed.) Jauhar, CRC Press, Inc, Boca Raton, Fla., USA; London, England, UK, pp. 147-159, (1996), the entirety of which is herein incorporated by reference). SSR loci occur throughout plant genomes, and specific repeat motifs occur at different levels of abundance than those found in animals. The relative frequencies of all SSRs with repeat units of 1-6 nucleotides have been surveyed. The most abundant SSR is AAAAAT followed by Aₙ, AGₙ AAT, AAC, AGC, AAG, AATT, AAAT and AC. On average, 1 SSR is found every 21 and 65 kb in dicots and monocots. Fewer CG nucleotides are found in dicots than in monocots. There is no correlation between abundance of SSRs and nuclear DNA content. The abundance of all tri and tetranucleotide SSR combination jointly have been reported to be equivalent to that of the total di-nucleotide combinations. Mono- di- and tetra-nucleotide repeats are all located in noncoding regions of DNA while 57% of those trinucleotide SSRs containing CG were located within gene coding regions. All repeated trinucleotide SSRs composed entirely of AT are found in noncoding regions, (Brown et al., Methods of Genome Analysis in Plants, ed. Jauhar, CRC Press, Inc, Boca Raton, Fla., USA; London, England, UK, pp. 147-159, (1996).

[0050] Microsatellites can be observed in SEQ NO:1 to SEQ NO: 304905 or complements thereof by using the BLASTN program to examine sequences for the presence/absence of microsatellites. In this system, raw sequence data is searched through databases, which store SSR markers collected from publications and 692 classes of di-, tri and tetranucleotide repeat markers generated by computer. Microsatellites can also be observed by screening the BAC library of the present invention by colony or plaque hybridization with a labeled probe containing microsatellite markers; isolating positive clones and sequencing the inserts of the positive clones; suitable primers flanking the microsatellite markers.

[0051] Single nucleotide polymorphisms (SNPs) are single base changes in genomic DNA sequence. They generally occur at greater frequency than other markers and are spaced with a greater uniformity throughout a genome than other reported forms of polymorphism. The greater frequency and uniformity of SNPs means that there is greater probability that such a polymorphism will be found near or in a genetic locus of interest than would be the case for other polymorphisms. SNPs are located in protein-coding regions and noncoding regions of a genome. Some of these SNPs may result in defective or variant protein expression (e.g., as a result of mutations or defective splicing). Analysis (genotyping) of characterized SNPs can require only a plus/minus assay rather than a lengthy measurement, permitting easier automation.

[0052] SNPs can be characterized using any of a variety of methods. Such methods include the direct or indirect sequencing of the site, the use of restriction enzymes (Botstein et al., Am. J. Hum. Genet. 32:314-331 (1980), the entirety of which is herein incorporated reference; Konieczny and Ausubel, Plant J. 4:403-410 (1993), the entirety of which is herein incorporated by reference), enzymatic and chemical mismatch assays (Myers et al., Nature 313:495-498 (1985), the entirety of which is herein incorporated by reference), allele-specific PCR (Newton et al., Nucl. Acids Res. 17:2503-2516 (1989), the entirety of which is herein incorporated by reference; Wu et al., Proc. Natl. Acad. Sci. USA 86:2757-2760 (1989), the entirety of which is herein incorporated by reference), ligase chain reaction (Barany, Proc. Natl. Acad. Sci. USA 88:189-193 (1991), the entirety of which is herein incorporated by reference), single-strand conformation polymorphism analysis (Labrune et al., Am. J. Hum. Genet. 48: 1115-1120 (1991), the entirety of which is herein incorporated by reference), primer-directed nucleotide incorporation assays (Kuppuswami et al., Proc. Natl. Acad. Sci. USA 88:1143-1147 (1991), the entirety of which is herein incorporated by reference), dideoxy fingerprinting (Sarkar et al., Genomics 13:441-443 (1992), the entirety of which is herein incorporated by reference), solid-phase ELISA-based oligonucleotide ligation assays (Nikiforov et al., Nucl. Acids Res. 22:4167-4175 (1994), the entirety of which is herein incorporated by reference), oligonucleotide fluorescence-quenching assays (Livak et al., PCR Methods Appl. 4:357-362 (1995a), the entirety of which is herein incorporated by reference), 5′-nuclease allele-specific hybridization TaqMan™ assay (Livak et al., Nature Genet. 9:341-342 (1995), the entirety of which is herein incorporated by reference), template-directed dye-terminator incorporation (TDI) assay (Chen and Kwok, Nucl. Acids Res. 25:347-353 (1997), the entirety of which is herein incorporated by reference), allele-specific molecular beacon assay (Tyagi et al., Nature Biotech. 16: 49-53 (1998), the entirety of which is herein incorporated by reference), PinPoint assay (Haff and Smirnov, Genome Res. 7: 378-388 (1997), the entirety of which is herein incorporated by reference), and dCAPS analysis (Neff et al., Plant J. 14:387-392 (1998), the entirety of which is herein incorporated by reference).

[0053] SNPs can be observed by examining sequences of overlapping clones in the BAC library according to the method described by Taillon-Miller et al. Genome Res. 8:748-754 (1998), the entirety of which is herein incorporated). SNPs can also be observed by screening the BAC library of the present invention by colony or plaque hybridization with a labeled probe containing SNP markers; isolating positive clones and sequencing the inserts of the positive clones; suitable primers flanking the SNP markers.

[0054] Genetic markers of the present invention include “dominant” or “codominant” markers. “Codominant markers” reveal the presence of two or more alleles (two per diploid individual) at a locus. “Dominant markers” reveal the presence of only a single allele per locus. The presence of the dominant marker phenotype (e.g., a band of DNA) is an indication that one allele is present in either the homozygous or heterozygous condition. The absence of the dominant marker phenotype (e.g., absence of a DNA band) is merely evidence that “some other” undefined allele is present. In the case of populations where individuals are predominantly homozygous and loci are predominately dimorphic, dominant and codominant markers can be equally valuable. As populations become more heterozygous and multi-allelic, codominant markers often become more informative of the genotype than dominant markers.

[0055] In addition to SSRs and SNPs, repetitive elements can be used as markers. For most eukaryotes, interspersed repeat sequence elements are typically mobile genetic elements (Wright et al., Genetics 142:569-578 (1996), the entirety of which is herein incorporated by reference). They are ubiquitous in most living organisms and are present in copy numbers ranging from just a few elements to tens or hundreds or thousands per genome. In the latter case, they can represent a major fraction of the genome. For example, transposable elements have been estimated to make up greater than 50% of the maize genome (Kidwell, and Lisch Proc. Natl. Acad. Sci. (U.S.A.) 94:7704-7711 (1997), the entirety of which is herein incorporated by reference).

[0056] Transposable elements are classified in families according to their sequence similarity. Two major classes are distinguished by their differing modes of transposition. Class I elements are retroelements that use reverse transcriptase to transpose by means of an RNA intermediate. They include long terminal repeat retrotransposons and long and short interspersed elements (LINES and SINES, respectively). Class II elements transpose directly from DNA to DNA and include transposons such as the Activator-Dissociation (Ac-Ds) family in maize, the P element in Drosophila and the Tc-1 element in Caenhorabditis elegans. Additionally, a category of transposable elements has been discovered whose transposition mechanism is not yet known. These miniature inverted-repeat transposable elements (MITEs) have some properties of both class I and II elements. They are short (100-400 bp in length) and none so far has been found to have any coding potential. They are present in high copy number (3,000-10,000) per genome and have target site preferences for TAA or TA in plants (Kidwell and Lisch, Proc. Natl. Acad. Sci. (U.S.A.) 94:7704-7711 (1997)).

[0057] Insertion elements are found in two areas of the genome. Some are located in regions distant from gene sequences such as in the heterochromatin or in regions between genes; other repeat elements are found in or near single copy sequences. The insertion of an Ac-Ds element into wx-m9, an allele of the waxy locus in maize is an example of a repetitive element found within a coding region. The effect of this insertion is attenuated by the loss through splicing of the transposable element after transcription (Kidwell and Lisch, Proc. Natl. Acad. Sci. (U.S.A.) 94:7704-7711 (1997)). The BAC nucleic acid molecules of the present invention include BAC nucleic acid molecules having inserts with two defined ends (STCs) containing complex repeat elements as set forth in Table B of U.S. application Ser. No. 09/521,640, which is herein incorporated by reference in its entirety.

[0058] The genetic variability resulting from transposable elements ranges from changes in the size and arrangement of whole genomes to changes in single nucleotides. They may produce major effects on phenotypic traits or small silent changes detectable only at the DNA sequence level. Transposable elements may also produce variation when they excise, leaving small footprints of their previous presence (Kidwell and Lisch, Proc. Natl. Acad. Sci. (U.S.A.) 94:7704-7711 (1997)).

[0059] In addition, other markers such as AFLP markers, RFLP markers, RAPD markers, phenotypic markers or isozyme markers can be utilized (Walton, Seed World 22-29 (July, 1993), the entirety of which is herein incorporated by reference; Burow and Blake, Molecular Dissection of Complex Traits, 13-29, Eds. Paterson, CRC Press, New York (1988), the entirety of which is herein incorporated by reference). DNA markers can be developed from nucleic acid molecules using restriction endonucleases, the PCR and/or DNA sequence information. RFLP markers result from single base changes or insertions/deletions. These codominant markers are highly abundant in plant genomes, have a medium level of polymorphism and are developed by a combination of restriction endonuclease digestion and Southern blotting hybridization. CAPS are similarly developed from restriction nuclease digestion but only of specific PCR products. These markers are also codominant, have a medium level of polymorphism and are highly abundant in the genome. The CAPS result from single base changes and insertions/deletions. Another marker type, RAPDs, are developed from DNA amplification with random primers and result from single base changes and insertions/deletions in plant genomes. They are dominant markers with a medium level of polymorphisms and are highly abundant. AFLP markers require using the PCR on a subset of restriction fragments from extended adapter primers. These markers are both dominant and codominant, are highly abundant in genomes and exhibit a medium level of polymorphism. SSRs require DNA sequence information. These codominant markers result from repeat length changes, are highly polymorphic, and do not exhibit as high a degree of abundance in the genome as CAPS, AFLPs and RAPDs. SNPs also require DNA sequence information. These codominant markers result from single base substitutions. They are highly abundant and exhibit a medium of polymorphism (Rafalski, et al., In: Nonmammalian Genomic Analysis, ed. Birren and Lai, Academic Press, San Diego, Calif., pp. 75-134 (1996), the entirety of which is herein incorporated by reference). Methods to isolate such markers are known in the art.

[0060] Long Terminal repeat retrotransposons and MITEs have been found to be associated with the genes of many plants where some of the transposable elements contribute regulatory sequences. MITEs such as the Tourist element in maize and the Stowaway element in Sorghum are found frequently in the 5′ and 3′ noncoding regions of genes and are frequently associated with the regulatory regions of genes of diverse flowering plants (Kidwell and Lisch, Proc. Natl. Acad. Sci. (U.S.A.) 94:7704-7711 (1997)). It is understood that one or more of the Long Terminal repeat retrotransposons and/or MITES may be a marker, and even more preferably a marker for a gene.

[0061] (a)(2) Nucleic Acid Molecules Comprising Regulatory Elements

[0062] Another class of agents of the present invention are nucleic acid molecules having promoter regions or partial promoter regions within SEQ ID NO: 1 through SEQ ID NO: 304905. Such promoter regions are typically found upstream of the trinucleotide ATG sequence at the start site of a protein coding region.

[0063] As used herein, a promoter region is a region of a nucleic acid molecule that is capable, when located in cis to a nucleic acid sequence that encodes for a protein or fragment thereof to finction in a way that directs expression of one or more mRNA molecules that encodes for the protein or fragment thereof.

[0064] Promoters of the present invention can include between about 300 bp upstream and about 10 kb upstream of the trinucleotide ATG sequence at the start site of a protein coding region. Promoters of the present invention can preferably include between about 300 bp upstream and about 5 kb upstream of the trinucleotide ATG sequence at the start site of a protein coding region. Promoters of the present invention can more preferably include between about 300 bp upstream and about 2 kb upstream of the trinucleotide ATG sequence at the start site of a protein coding region. Promoters of the present invention can include between about 300 bp upstream and about 1 kb upstream of the trinucleotide ATG sequence at the start site of a protein coding region. While in many circumstances a 300 bp promoter may be sufficient for expression, additional sequences may act to further regulate expression, for example, in response to biochemical, developmental or environmental signals.

[0065] It is also preferred that the promoters of the present invention contain a CAAT and a TATA cis element. Moreover, the promoters of the present invention can contain one or more cis elements in addition to a CAAT and a TATA box.

[0066] By “regulatory element” it is intended a series of nucleotides that determines if, when, and at what level a particular gene is expressed. The regulatory DNA sequences specifically interact with regulatory or other proteins. Many regulatory elements act in cis (“cis elements”) and are believed to affect DNA topology, producing local conformations that selectively allow or restrict access of RNA polymerase to the DNA template or that facilitate selective opening of the double helix at the site of transcriptional initiation. Cis elements occur within, but are not limited to promoters, and promoter modulating sequences (inducible elements). Cis elements can be identified using known cis elements as a target sequence or target motif in the BLAST programs of the present invention.

[0067] Promoters of the present invention include homologues of cis elements known to effect gene regulation that show homology with the nucleic acid molecules of the present invention. These cis elements include, but are not limited to, oxygen responsive cis elements (Cowen, et al., J. Biol. Chem. 268(36):26904-26910 (1993) the entirety of which is herein incorporated by reference), light regulatory elements (Bruce and Quaill, Plant Cell 2 (11):1081-1089 (1990) the entirety of which is herein incorporated by reference; Bruce, et al., EMBO J. 10:3015-3024 (1991), the entirety of which is herein incorporated by reference; Rocholl, et al., Plant Sci. 97:189-198 (1994), the entirety of which is herein incorporated by reference; Block, et al., Proc. Natl. Acad. Sci. (U.S.A.) 87:5387-5391 (1990), the entirety of which is herein incorporated by reference; Giuliano, et al., Proc. Natl. Acad. Sci. (U.S.A.) 85:7089-7093 (1988), the entirety of which is herein incorporated by reference; Staiger, et al., Proc. Natl. Acad. Sci. (U.S.A.) 86:6930-6934 (1989), the entirety of which is herein incorporated by reference; Izawa, et al., Plant Cell 6:1277-1287 (1994), the entirety of which is herein incorporated by reference; Menkens, et al., Trends in Biochemistry 20:506-510 (1995), the entirety of which is herein incorporated by reference; Foster, et al., FASEB J. 8:192-200 (1994), the entirety of which is herein incorporated by reference; Plesse, et al., Mol Gen Gene 254:258-266 (1997), the entirety of which is herein incorporated by reference; Green, et al., EMBO J. 6:2543-2549 (1987), the entirety of which is herein incorporated by reference; Kuhlemeier et al., Ann. Rev Plant Physiol. 38:221-257 (1987), the entirety of which is herein incorporated by reference; Villain et al., J. Biol. Chem. 271:32593-32598 (1996), the entirety of which is herein incorporated by reference; Lam et al., Plant Cell 2:857-866 (1990), the entirety of which is herein incorporated by reference; Gilmartin, et al., Plant Cell 2:369-378 (1990), the entirety of which is herein incorporated by reference; Datta, et al., Plant Cell 1:1069-1077 (1989) the entirety of which is herein incorporated by reference; Gilmartin, et al., Plant Cell 2:369-378 (1990), the entirety of which is herein incorporated by reference; Castresana, et al., EMBO J. 7:1929-1936 (1988), the entirety of which is herein incorporated by reference; Ueda, et al., Plant Cell 1:217-227 (1989), the entirety of which is herein incorporated by reference; Terzaghi, et al., Annu. Rev. Plant Physiol. Plant Mol. Biol. 46:445-474 (1995), the entirety of which is herein incorporated by reference; Green et al., EMBO J. 6:2543-2549 (1987), the entirety of which is herein incorporated by reference; Villain, et al., J. Biol. Chem. 271:32593-32598 (1996), the entirety of which is herein incorporated by reference; Tjaden, et al., Plant Cell 6:107-118 (1994), the entirety of which is herein incorporated by reference; Tjaden, et al., Plant Physiol. 108:1109-1117 (1995), the entirety of which is herein incorporated by reference; Ngai, et al., Plant J. 12:1021-1234 (1997), the entirety of which is herein incorporated by reference; Bruce, et al., EMBO J. 10:3015-3024 (1991), the entirety of which is herein incorporated by reference; Ngai, et al., Plant J. 12:1021-1034 (1997), the entirety of which is herein incorporated by reference), elements responsive to gibberellin, (Muller, et al., J. Plant Physiol. 145:606-613 (1995), the entirety of which is herein incorporated by reference; Croissant, et al., Plant Science 116:27-35 (1996), the entirety of which is herein incorporated by reference; Lohmer, et al., EMBO J. 10:617-624 (1991), the entirety of which is herein incorporated by reference; Rogers, et al., Plant Cell 4:1443-1451 (1992), the entirety of which is herein incorporated by reference; Lanahan et al., Plant Cell 4:203-211 (1992) the entirety of which is herein incorporated by reference; Skriver et al., Proc. Natl. Acad. Sci. (U.S.A.) 88:7266-7270 (1991) the entirety of which is herein incorporated by reference; Gilmartin, et al., Plant Cell 2:369-378 (1990), the entirety of which is herein incorporated by reference; Huang, et al., Plant Mol. Biol. 14:655-668 (1990), the entirety of which is herein incorporated by reference, Gubler, et al., Plant Cell 7:1879-1891 (1995), the entirety of which is herein incorporated by reference), elements responsive to abscisic acid, (Busk, et al., Plant Cell 9:2261-2270 (1997), the entirety of which is herein incorporated by reference; Guiltinan, et al., Science 250:267-270 (1990), the entirety of which is herein incorporated by reference; Shen, et al., Plant Cell 7:295-307 (1995) the entirety of which is herein incorporated by reference; Shen et al., Plant Cell 8:1107-1119 (1996), the entirety of which is herein incorporated by reference; Seo et al., Plant Mol. Biol. 27:1119-1131 (1995), the entirety of which is herein incorporated by reference; Marcotte et al., Plant Cell 1:969-976 (1989) the entirety of which is herein incorporated by reference; Shen et al., Plant Cell 7:295-307 (1995), the entirety of which is herein incorporated by reference; Iwasaki et al., Mol Gen Genet 247:391-398 (1995), the entirety of which is herein incorporated by reference; Hattori et al., Genes Dev. 6:609-618 (1992), the entirety of which is herein incorporated by reference; Thomas et al., Plant Cell 5:1401-1410 (1993), the entirety of which is herein incorporated by reference), elements similar to abscisic acid responsive elements, (Ellerstrom et al., Plant Mol. Biol. 32:1019-1027 (1996), the entirety of which is herein incorporated by reference), auxin responsive elements (Liu et al., Plant Cell 6:645-657 (1994) the entirety of which is herein incorporated by reference; Liu et al., Plant Physiol. 115:397-407 (1997), the entirety of which is herein incorporated by reference; Kosugi et al., Plant J. 7:877-886 (1995), the entirety of which is herein incorporated by reference; Kosugi et al., Plant Cell 9:1607-1619 (1997), the entirety of which is herein incorporated by reference; Ballas et al., J. Mol. Biol. 233:580-596 (1993), the entirety of which is herein incorporated by reference), a cis element responsive to methyl jasmonate treatment (Beaudoin and Rothstein, Plant Mol. Biol. 33:835-846 (1997), the entirety of which is herein incorporated by reference), a cis element responsive to abscisic acid and stress response (Straub et al., Plant Mol. Biol. 26:617-630 (1994), the entirety of which is herein incorporated by reference), ethylene responsive cis elements (Itzhaki et al., Proc. Natl. Acad. Sci. (U.S.A.) 91:8925-8929 (1994), the entirety of which is herein incorporated by reference; Montgomery et al., Proc. Acad. Sci. (U.S.A.) 90:5939-5943 (1993), the entirety of which is herein incorporated by reference; Sessa et al., Plant Mol. Biol. 28:145-153 (1995), the entirety of which is herein incorporated by reference; Shinshi et al., Plant Mol. Biol. 27:923-932 (1995), the entirety of which is herein incorporated by reference), salicylic acid cis responsive elements, (Strange et al., Plant J. 11:1315-1324 (1997), the entirety of which is herein incorporated by reference; Qin et al., Plant Cell 6:863-874 (1994), the entirety of which is herein incorporated by reference), a cis element that responds to water stress and abscisic acid (Lam et al., J. Biol. Chem. 266:17131-17135 (1991), the entirety of which is herein incorporated by reference; Thomas et al., Plant Cell 5:1401-1410 (1993), the entirety of which is herein incorporated by reference; Pla et al., Plant Mol Biol 21:259-266 (1993), the entirety of which is herein incorporated by reference), a cis element essential for M phase-specific expression (Ito et al., Plant Cell 10:331-341 (1998), the entirety of which is herein incorporated by reference), sucrose responsive elements (Huang et al., Plant Mol. Biol. 14:655-668 (1990), the entirety of which is herein incorporated by reference; Hwang et al., Plant Mol Biol 36:331-341 (1998), the entirety of which is herein incorporated by reference; Grierson et al., Plant J. 5:815-826 (1994), the entirety of which is herein incorporated by reference), heat shock response elements (Pelham et al., Trends Genet. 1:31-35 (1985), the entirety of which is herein incorporated by reference), elements responsive to auxin and/or salicylic acid and also reported for light regulation (Lam et al., Proc. Natl. Acad. Sci. (U.S.A.) 86:7890-7897 (1989), the entirety of which is herein incorporated by reference; Benfey et al., Science 250:959-966 (1990), the entirety of which is herein incorporated by reference), elements responsive to ethylene and salicylic acid (Ohme-Takagi et al., Plant Mol. Biol. 15:941-946 (1990), the entirety of which is herein incorporated by reference), elements responsive to wounding and abiotic stress (Loake et al., Proc. Natl. Acad. Sci. (U.S.A.) 89:9230-9234 (1992), the entirety of which is herein incorporated by reference; Mhiri et al., Plant Mol. Biol. 33:257-266 (1997), the entirety of which is herein incorporated by reference), antioxidant response elements (Rushmore et al., J. Biol. Chem. 266:11632-11639, the entirety of which is herein incorporated by reference; Dalton et al., Nucleic Acids Res. 22:5016-5023 (1994), the entirety of which is herein incorporated by reference), Sph elements (Suzuki et al., Plant Cell 9:799-807 1997), the entirety of which is herein incorporated reference), Elicitor responsive elements, (Fukuda et al., Plant Mol. Biol. 34:81-87 (1997), the entirety of which is herein incorporated by reference; Rushton et al., EMBO J. 15:5690-5700 (1996), the entirety of which is herein incorporated by reference), metal responsive elements (Stuart et al., Nature 317:828-831 (1985), the entirety of which is herein incorporated by reference; Westin et al., EMBO J. 7:3763-3770 (1988), the entirety of which is herein incorporated by reference; Thiele et al., Nucleic Acids Res. 20:1183-1191 (1992), the entirety of which is herein incorporated by reference; Faisst et al., Nucleic Acids Res. 20:3-26 (1992), the entirety of which is herein incorporated by reference), low temperature responsive elements, (Baker et al., Plant Mol. Biol. 24:701-713 (1994), the entirety of which is herein incorporated by reference; Jiang et al., Plant Mol. Biol. 30:679-684 (1996), the entirety of which is herein incorporated by reference; Nordin et al., Plant Mol. Biol. 21:641-653 (1993), the entirety of which is herein incorporated by reference; Zhou etal., J. Biol. Chem. 267:23515-23519 (1992), the entirety of which is herein incorporated by reference), drought responsive elements, (Yamaguchi et al., Plant Cell 6:251-264 (1994), the entirety of which is herein incorporated by reference; Wang et al., Plant Mol. Biol. 28:605-617 (1995), the entirety of which is herein incorporated by reference; Bray E A, Trends in Plant Science 2:48-54 (1997), the entirety of which is herein incorporated by reference) enhancer elements for glutenin, (Colot et al., EMBO J. 6:3559-3564 (1987), the entirety of which is herein incorporated by reference; Thomas et al., Plant Cell 2:1171-1180 (1990), the entirety of which is incorporated by reference; Kreis et al., Philos. Trans. R. Soc. Lond., B314:355-365 (1986), the entirety of which is herein incorporated by reference), light-independent regulatory elements, (Lagrange et al., Plant Cell 9:1469-1479 (1997), the entirety of which is herein incorporated by reference; Villain et al., J. Biol. Chem. 271:32593-32598 (1996), the entirety of which is herein incorporated by reference), OCS enhancer elements, (Bouchez et al., EMBO J. 8:4197-4204 (1989), the entirety of which is herein incorporated by reference; Foley et al., Plant J. 3:669-679 (1993), the entirety of which is herein incorporated by reference), ACGT elements, (Foster et al., FASEB J. 8:192-200 (1994), the entirety of which is herein incorporated by reference; Izawa et al., Plant Cell 6:1277-1287 (1994), the entirety of which is herein incorporated by reference; Izawa et al., J. Mol. Biol. 230:1131-1144 (1993) the entirety of which is herein incorporated by reference), negative cis elements in plastid related genes, (Zhou et al., J. Biol. Chem. 267:23515-23519 (1992), the entirety of which is herein incorporated by reference; Lagrange et al., Mol. Cell Biol. 13:2614-2622 (1993), the entirety of which is herein incorporated by reference; Lagrange et al., Plant Cell 9:1469-1479 (1997), the entirety of which is herein incorporated by reference; Zhou et al., J. Biol. Chem. 267:23515-23519 (1992), the entirety of which is herein incorporated by reference), prolamin box elements, (Forde et al., Nucleic Acids Res. 13:7327-7339 (1985), the entirety of which is herein incorporated by reference; Colot et al., EMBO J. 6:3559-3564 (1987), the entirety of which is herein incorporated by reference; Thomas et al., Plant Cell 2:1171-1180 (1990), the entirety of which is herein incorporated by reference; Thompson et al., Plant Mol. Biol. 15:755-764 (1990), the entirety of which is herein incorporated by reference; Vicente et al., Proc. Natl. Acad. Sci. (U.S.A.) 94:7685-7690 (1997), the entirety of which is herein incorporated by reference), elements in enhancers from the IgM heavy chain gene (Gillies et al., Cell 33:717-728 (1983), the entirety of which is herein incorporated by reference; Whittier et al., Nucleic Acids Res. 15:2515-2535 (1987), the entirety of which is herein incorporated by reference.

[0068] (a)(3) Nucleic Acid Molecules Comprising Genes or Fragments Thereof

[0069] Nucleic acid molecules of the present invention can comprise one or more genes or fragments thereof. Such genes or fragments thereof include homologues of known genes or protein coding regions in other organisms or genes or fragments thereof that elicit only limited or no matches with known genes or protein coding regions.

[0070] Genomic sequences can be screened for the presence of protein homologues or genes utilizing one or a number of different search algorithms have that been developed, one example of which are the suite of programs referred to as BLAST programs. Other examples of suitable programs that can be utilized are known in the art, several of which are described above in the Background and under the section titled “Uses of the Agents of the Invention.” In addition, unidentified reading frames may be screened for protein coding regions by prediction software such as GenScan, which is located at the website gnomic.standford.edu/GENSCANW.html.

[0071] In a preferred embodiment of the present invention, the Glycine max protein or fragment thereof of the present invention is a homologue of another plant protein. In another preferred embodiment of the present invention, the Glycine max protein or fragment thereof of the present invention is a homologue of a fungal protein. In another preferred embodiment of the present invention, the Glycine max protein or fragment thereof of the present invention is a homologue of a mammalian protein. In another preferred embodiment of the present invention, the Glycine max protein or fragment thereof of the present invention is a homologue of a bacterial protein.

[0072] In a preferred embodiment of the present invention, the Glycine max protein or fragments thereof or nucleic acid molecule or fragment thereof has a BLAST score of more than 200, preferably a BLAST score of more than 300, even more preferably a BLAST score of more than 400.

[0073] In another preferred embodiment of the present invention, the nucleic acid molecule encoding the Glycine max protein or fragment thereof and/or nucleic acid molecule or fragment thereof exhibits a % identity with its homologue of between about 25% and about 40%, more preferably of between about 40 and about 70%, even more preferably of between about 70% and about 90%, and even more preferably between about 90% and 99%. In another preferred embodiment, of the present invention, the Glycine max the nucleic acid molecule encoding the Glycine max protein or fragment thereof exhibits a % identity with its homologue of 100%.

[0074] In a preferred embodiment of the present invention, the Glycine max protein or fragment thereof or nucleic acid molecule or fragment thereof exhibits a % coverage of between about 0% and about 33%, more preferably of between about 34% and about 66%, and even more preferably of between about 67% and about 100%.

[0075] Genomic sequences can be screened for the presence of proteins utilizing one or a number of different search algorithms have that been developed, one example of which are the suite of programs referred to as BLAST programs. Other examples of suitable programs that can be utilized are known in the art, several of which are described above in the Background. Nucleic acid molecules of the present invention also include non-Glycine max homologues. Preferred non-Glycine max homologues are selected from the group consisting of alfalfa, Arabidopsis barley, Brassica, broccoli, cabbage, citrus, cotton, garlic, oat, oilseed rape, onion, canola, flax, an ornamental plant, maize, pea, peanut, pepper, potato, rice, rye, sorghum, strawberry, sugarcane, sugarbeet, tomato, wheat, poplar, pine, fir, eucalyptus, apple, lettuce, lentils, grape, banana, tea, turf grasses, sunflower, oil palm, and Phaseolus.

[0076] In a preferred embodiment, nucleic acid molecules having SEQ ID NO: 1 through SEQ ID NO: 304905 or complements and fragments of either can be utilized to obtain such homologues.

[0077] The degeneracy of the genetic code allows different nucleic acid sequences to code for the same protein or peptide, e.g. see U.S. Pat. No. 4,757,006, the entirety of which is herein incorporated by reference. As used herein a nucleic acid molecule is degenerate of another nucleic acid molecule when the nucleic acid molecules encode for the same amino acid sequences but comprise different nucleotide sequences. An aspect of the present invention is that the nucleic acid molecules of the present invention include nucleic acid molecules that are degenerate from the STCs of this invention.

[0078] A further aspect of the present invention comprises one or more nucleic acid molecules which differ in nucleic acid sequence from those of a STC of this invention due to the degeneracy in the genetic code in that they encode the same protein but differ in nucleic acid sequence or a protein having one or more conservative amino acid residue. Codons capable of coding for such conservative substitutions are known in the art. For instance, serine is a conservative substitute of alanine and threonine is a conservative substitute for serine.

[0079] (a)(4) Nucleic Acid Molecules Comprising Introns and/or Intron/Exon Junctions

[0080] Nucleic acid molecules of the present invention can comprise an intron and/or one or more intron/exon junction. Sequences of the present invention can be screened for introns and intron/exon junctions utilizing one or a number of different search algorithms that have that been developed, one example of which are the suite of programs referred to as BLAST programs. Other examples of suitable programs that can be utilized are known in the art, several of which are described above in the Background and in the section entitled “Uses of the Agents of the Present Invention”.

[0081] (a)(4) Protein and Peptide Molecules

[0082] A class of agents comprises one or more of the protein or peptide molecules encoded by SEQ ID NO: 1 through SEQ ID NO: 304905, fragments thereof or complements thereof or one or more of the proteins encoded by a nucleic acid molecule or fragment thereof or peptide molecules encoded by other nucleic acid agents of the present invention. Protein and peptide molecules can be identified using known protein or peptide molecules as a target sequence or target motif in the BLAST programs of the present invention. In a preferred embodiment, the protein or peptide molecules of the present invention are derived from Glycine max (soybean) and more preferably Glycine max, genotype A3244.

[0083] As used herein, the term “protein molecule” or “peptide molecule” includes any molecule that comprises five or more amino acids. It is well known in the art that proteins or peptides may undergo modification, including post-translational modifications, such as, but not limited to, disulfide bond formation, glycosylation, phosphorylation, or oligomerization. Thus, as used herein, the term “protein molecule” or “peptide molecule” includes any protein molecule that is modified by any biological or non-biological process. The terms “amino acid” and “amino acids” refer to all naturally occurring L-amino acids. This definition is meant to include norleucine, ornithine, homocysteine, and homoserine.

[0084] One or more of the protein or fragments of peptide molecules may be produced via chemical synthesis, or more preferably, by expression in a suitable bacterial or eukaryotic host. Suitable methods for expression are described by Sambrook, et al., Molecular Cloning, A Laboratory Manual, 2nd Edition, Cold Spring Harbor Press, Cold Spring Harbor, N.Y. (1989), or similar texts.

[0085] A “protein fragment” is a peptide or polypeptide molecule whose amino acid sequence comprises a subset of the amino acid sequence of that protein. A protein or fragment thereof that comprises one or more additional peptide regions not derived from that protein is a “fusion” protein. Such molecules may be derivatized to contain carbohydrate or other moieties (such as keyhole limpet hemocyanin, etc.). Fusion protein or peptide molecules of the present invention are preferably produced via recombinant means.

[0086] Another class of agents comprises protein or peptide molecules encoded by SEQ ID NO: 1 through SEQ ID NO: 304905 or complements thereof or, fragments or fusions thereof in which conservative, non-essential, or not relevant, amino acid residues have been added, replaced, or deleted. An example of such a homologue is the homologue protein of all non-Glycine max plant species, including but not limited to alfalfa, barley, Brassica, broccoli, cabbage, citrus, cotton, garlic, oat, oilseed rape, onion, canola, flax, maize, an ornamental plant, pea, peanut, pepper, potato, rice, rye, sorghum, strawberry, sugarcane, sugarbeet, tomato, wheat, poplar, pine, fir, eucalyptus, apple, lettuce, peas, lentils, grape, banana, tea, turf grasses, etc. Particularly preferred non-Glycine max plants to utilize for the isolation of homologues would include alfalfa, barley, cotton, corn, oat, oilseed rape, rice, corn, canola, ornamentals, sugarcane, sugarbeet, tomato, potato, wheat, and turf grasses. Such a homologue can be obtained by any of a variety of methods. Most preferably, as indicated above, one or more of the disclosed sequences (SEQ ID NO: 1 through SEQ ID NO: 304905 or complements thereof) will be used to define a pair of primers that may be used to isolate the homologue-encoding nucleic acid molecules from any desired species. Such molecules can be expressed to yield homologues by recombinant means.

[0087] (a)(5) Antibodies

[0088] One aspect of the present invention concerns antibodies, single-chain antigen binding molecules, or other proteins that specifically bind to one or more of the protein or peptide molecules of the present invention and their homologs, fusions or fragments. Such antibodies may be used to quantitatively or qualitatively detect the protein or peptide molecules of the present invention. As used herein, an antibody or peptide is said to “specifically bind” to a protein or peptide molecule of the present invention if such binding is not competitively inhibited by the presence of non-related molecules. In a preferred embodiment the antibodies of the present invention bind to proteins of the present invention, in a more preferred embodiment of the antibodies of the present invention bind to proteins derived from Glycine max.

[0089] Nucleic acid molecules that encode all or part of the protein of the present invention can be expressed, via recombinant means, to yield protein or peptides that can in turn be used to elicit antibodies that are capable of binding the expressed protein or peptide. Such antibodies may be used in immunoassays for that protein. Such protein-encoding molecules, or their fragments may be a “fusion” molecule (i.e., a part of a larger nucleic acid molecule) such that, upon expression, a fusion protein is produced. It is understood that any of the nucleic acid molecules of the present invention may be expressed, via recombinant means, to yield proteins or peptides encoded by these nucleic acid molecules.

[0090] The antibodies that specifically bind proteins and protein fragments of the present invention may be polyclonal or monoclonal. It is understood that practitioners are familiar with the standard resource materials which describe specific conditions and procedures for the construction, manipulation and isolation of antibodies (see, for example, Harlow and Lane, Antibodies: A Laboratory Manual, Cold Spring Harbor Press, Cold Spring Harbor, N.Y. (1988), the entirety of which is herein incorporated by reference).

[0091] It is understood that any of the antibodies of the present invention can be substantially purified and/or be biologically active and/or recombinant.

Uses of the Agents of the Invention

[0092] Nucleic acid molecules of the present invention may be employed to obtain other Glycine max nucleic acid molecules. Such molecules can be readily obtained by using the above-described nucleic acid molecules to screen libraries Glycine max libraries.

[0093] Nucleic acid molecules and fragments thereof of the present invention may also be employed to obtain nucleic acid molecule homologs of non-Glycine max species including the nucleic acid molecules that encode, in whole or in part, protein homologs of other species or other organisms, sequences of genetic elements such as promoters and transcriptional regulatory elements.

[0094] Nucleic acid molecules and fragments thereof of the present invention may be employed for genetic mapping studies using linkage analysis (genetic markers). A genetic linkage map shows the relative locations of specific DNA markers along a chromosome. Maps are used for the identification of genes associated with genetic diseases or phenotypic traits, comparative genomics, and as a guide for physical mapping. Through genetic mapping, a fine scale linkage map can be developed using DNA markers, and, then, a genomic DNA library of large-sized fragments can be screened with molecular markers linked to the desired trait. In a preferred embodiment of the present invention, the genomic library screened with the nucleic acid molecules of the present invention is a genomic library of Glycine max.

[0095] Mapping marker locations is based on the observation that two markers located near each other on the same chromosome will tend to be passed together from parent to offspring. During gamete production, DNA strands occasionally break and rejoin in different places on the same chromosome or on the homologous chromosome. The closer the markers are to each other, the more tightly linked and the less likely a recombination event will fall between and separate them. Recombination frequency thus provides an estimate of the distance between two markers.

[0096] In segregating populations, target genes have been reported to have been placed within an interval of 5-10 cM with a high degree of certainty (Tanksley et al., Trends in Genetics 11(2):63-68 (1995), the entirety of which is herein incorporated by reference). The markers defining this interval are used to screen a larger segregating population to identify individuals derived from one or more gametes containing a crossover in the given interval. Such individuals are useful in orienting other markers closer to the target gene. Once identified, these individuals can be analyzed in relation to all molecular markers within the region to identify those closest to the target.

[0097] Markers of the present invention can be employed to construct linkage maps and to locate genes with qualitative and quantitative effects. The genetic linkage of additional marker molecules can be established by a genetic mapping model such as, without limitation, the flanking marker model reported by Lander and Botstein, Genetics, 121:185-199 (1989), and the interval mapping, based on maximum likelihood methods described by Lander and Botstein, Genetics, 121:185-199 (1989), the entirety of which is herein incorporated by reference and implemented in the software package MAPMAKER/QTL (Lincoln and Lander, Mapping Genes Controlling Quantitative Traits Using MAPMAKER/QTL, Whitehead Institute for Biomedical Research, Massachusetts, (1990)). Additional software includes Qgene, Version 2.23 (1996), Department of Plant Breeding and Biometry, 266 Emerson Hall, Cornell University, Ithaca, N.Y., the manual of which is herein incorporated by reference in its entirety). Use of the Qgene software is a particularly preferred approach.

[0098] A maximum likelihood estimate (MLE) for the presence of a marker is calculated, together with an MLE assuming no QTL effect, to avoid false positives. A log₁₀ of an odds ratio (LOD) is then calculated as: LOD=log₁₀ (MLE for the presence of a QTL/MLE given no linked QTL).

[0099] The LOD score essentially indicates how much more likely the data are to have arisen assuming the presence of a QTL than in its absence. The LOD threshold value for avoiding a false positive with a given confidence, say 95%, depends on the number of markers and the length of the genome. Graphs indicating LOD thresholds are set forth in Lander and Botstein, Genetics, 121:185-199 (1989), the entirety of which is herein incorporated by reference and further described by Arús and Moreno-González, Plant Breeding, Hayward, Bosemark, Romagosa (eds.) Chapman & Hall, London, pp. 314-331 (1993).

[0100] Additional models can be used. Many modifications and alternative approaches to interval mapping have been reported, including the use of non-parametric methods (Kruglyak and Lander, Genetics, 139:1421-1428 (1995), the entirety of which is herein incorporated by reference). Multiple regression methods or models can be also be used, in which the trait is regressed on a large number of markers (Jansen, Biometrics in Plant Breed, van Oijen, Jansen (eds.) Proceedings of the Ninth Meeting of the Eucarpia Section Biometrics in Plant Breeding, The Netherlands, pp. 116-124 (1994); Weber and Wricke, Advances in Plant Breeding, Blackwell, Berlin, 16 (1994). Procedures combining interval mapping with regression analysis, whereby the phenotype is regressed onto a single putative QTL at a given marker interval, and at the same time onto a number of markers that serve as ‘cofactors,’ have been reported by Jansen and Stam, Genetics, 136:1447-1455 (1994) and Zeng, Genetics, 136:1457-1468 (1994). Generally, the use of cofactors reduces the bias and sampling error of the estimated QTL positions (Utz and Melchinger, Biometrics in Plant Breeding, van Oijen, Jansen (eds.) Proceedings of the Ninth Meeting of the Eucarpia Section Biometrics in Plant Breeding, The Netherlands, pp. 195-204 (1994), thereby improving the precision and efficiency of QTL mapping (Zeng, Genetics, 136:1457-1468 (1994). These models can be extended to multi-environment experiments to analysis genotype-environment interactions (Jansen et al., Theo. Appl. Genet. 91:33-37 (1995).

[0101] Selection of an appropriate mapping population is important to map construction. The choice of appropriate mapping population depends on the type of marker systems employed (Tanksley et al., J.P. Gustafson and R. Appels (eds.), Plenum Press, New York, pp. 157-173 (1988), the entirety of which is herein incorporated by reference). Consideration must be given to the source of parents (adapted vs. exotic) used in the mapping population. Chromosome pairing and recombination rates can be severely disturbed (suppressed) in wide crosses (adapted x exotic) and generally yield greatly reduced linkage distances. Wide crosses will usually provide segregating populations with a relatively large array of polymorphisms when compared to progeny in a narrow cross (adapted x adapted).

[0102] An F₂ population is the first generation of selfing after the hybrid seed is produced. Usually a single F₁ plant is selfed to generate a population segregating for all the genes in Mendelian (1:2:1) fashion. Maximum genetic information is obtained from a completely classified F₂ population using a codominant marker system (Mather, Measurement of Linkage in Heredity: Methuen and Co., (1938), the entirety of which is herein incorporated by reference). In the case of dominant markers, progeny tests (e.g., F₃, BCF₂) are required to identify the heterozygotes, thus making it equivalent to a completely classified F₂ population. However, this procedure is often prohibitive because of the cost and time involved in progeny testing. Progeny testing of F₂ individuals is often used in map construction where phenotypes do not consistently reflect genotype (e.g., disease resistance) or where trait expression is controlled by a QTL. Segregation data from progeny test populations (e.g., F₃ or BCF₂) can be used in map construction. Marker-assisted selection can then be applied to cross progeny based on marker-trait map associations (F₂, F₃), where linkage groups have not been completely disassociated by recombination events (i.e., maximum disequilibrium).

[0103] Recombinant inbred lines (RIL) (genetically related lines; usually >F₅, developed from continuously selfing F₂ lines towards homozygosity) can be used as a mapping population. Information obtained from dominant markers can be maximized by using RIL because all loci are homozygous or nearly so. Under conditions of tight linkage (i.e., about <10% recombination), dominant and co-dominant markers evaluated in RIL populations provide more information per individual than either marker type in backcross populations (Reiter, Proc. Natl. Acad. Sci. (U.S.A.) 89:1477-1481 (1992). However, as the distance between markers becomes larger (i.e., loci become more independent), the information in RIL populations decreases dramatically when compared to codominant markers.

[0104] Backcross populations (e.g., generated from a cross between a successful variety (recurrent parent) and another variety (donor parent) carrying a trait not present in the former) can be utilized as a mapping population. A series of backcrosses to the recurrent parent can be made to recover most of its desirable traits. Thus a population is created consisting of individuals nearly like the recurrent parent but each individual carries varying amounts or mosaic of genomic regions from the donor parent. Backcross populations can be useful for mapping dominant markers if all loci in the recurrent parent are homozygous and the donor and recurrent parent have contrasting polymorphic marker alleles (Reiter et al., Proc. Natl. Acad. Sci. (U.S.A.) 89:1477-1481 (1992). Information obtained from backcross populations using either codominant or dominant makers is less than that obtained from F₂ populations because one, rather than two, recombinant gametes are sampled per plant. Backcross populations, however, are more informative (at low marker saturation) when compared to RILs as the distance between linked loci increases in RIL populations (i.e., about 0.15% recombination). Increased recombination can be beneficial for resolution of tight linkages, but may be undesirable in the construction of maps with low marker saturation.

[0105] Near-isogenic lines (NIL)(created by many backcrosses to produce an array of individuals that are nearly identical in genetic composition except for the trait or genomic region under interrogation) can be used as a mapping population. In mapping with NILs, only a portion of the polymorphic loci are expected to map to a selected region.

[0106] Bulk segregant analysis (BSA) is a method developed for the rapid identification of linkage between markers and traits of interest (Michelmore, et al., Proc. Natl. Acad. Sci. (U.S.A.) 88:9828-9832 (1991). In BSA, two bulked DNA samples are drawn from a segregating population originating from a single cross. These bulks contain individuals that are identical for a particular trait (resistant or susceptible to particular disease) or genomic region but arbitrary at unlinked regions (i.e., heterozygous). Regions unlinked to the target region will not differ between the bulked samples of many individuals in BSA.

[0107] Applications for markers in plant breeding include: Quantitative Trait Loci (QTL) mapping (Edwards et al, Genetics 116:113-115 (1987), the entirety of which is herein incorporated by reference); Nienhuis et al, Crop Sci. 27:797-803 (1987); Osborn et al, Theor. Appl. Genet. 73:350-356 (1987); Romero-Severson et al, Use of RFLPs In Analysis of Quantitative Trait Loci In Maize, In Helentjaris and Burr (eds.) pp. 97-102 (1989), the entirety of which is herein incorporated by reference; Young et al, Genetics 120:570-585 (1988), the entirety of which is herein incorporated by reference; Martin et al, Science 243:1725-1728 (1989), the entirety of which is herein incorporated by reference): Sarfatti et al., Theor. Appl Genet. 78:22-26 (1989), the entirety of which is herein incorporated by reference; Tanksley, et al., Biotech. 7:257-264 (1989); Barone et al, Mol. Gen. Genet. 224:177-182 (1990), the entirety of which is herein incorporated by reference); Jung et al, Theor, Appl. Genet. 79:663-672 (1990), the entirety of which is herein incorporated by reference; Keim et al, Genetics 126:735-742 (1990), the entirety of which is herein incorporated by reference, Theor. Appl. Genet. 79:465-369 (1990), the entirety of which is herein incorporated by reference; Paterson et al., Genetics 124:735-742 (1990), the entirety of which is herein incorporated by reference; Martin et al, Proc. Natl. Acad. Sci. (U.S.A.) 88:2336-2340 (1991), the entirety of which is herein incorporated by reference; Messeguer et al, Theor. Appl. Genet. 82:529-536 (1991), the entirety of which is herein incorporated by reference; Michelmore et al, Proc Natl. Acad. Sci. (U.S.A.) 88:9828-9832 (1991), the entirety of which is herein incorporated by reference; Ottaviano et al, Theor. Appl. Genet. 81:713-719 (1991), the entirety of which is herein incorporated by reference; Yu et al, Theor. Appl. Genet. 81:471-476 (1991), the entirety of which is herein incorporated by reference; Diers et al, Crop Sci. 32:77-383 (1992), the entirety of which is herein incorporated by reference, Theor. Appl. Genet. 83:608-612 (1992), the entirety of which is herein incorporated by reference, J. Plant Nut. 15:2127-2136 (1992), the entirety of which is herein incorporated by reference; Doebley et al, Proc. Natl. Acad. Sci. (U.S.A.) 87:9888-9892 (1990), the entirety of which is herein incorporated by reference), screening genetic resource strains for useful quantitative trait alleles and introgression of these alleles into commercial varieties (Beckmann and Soller, Theor. Appl. Genet. 67:35-43 (1983), the entirety of which is herein incorporated by reference; Tanksley et al, (1989) the entirety of which is incorporated by reference), or the mapping of mutations (Rafalski, et al., In: Nonmammalian Genomic Analysis, ed. Birren and Lai, Academic Press, San Diego, Calif., pp. 75-134 (1996). Additionally, markers can be used to characterize transformants or germplasm, as a genetic diagnostic test for plant breeding or to identify individuals or varieties (Soller and Beckmann, Theor. Appl. Genet. 67:25-33 (1983), the entirety of which is herein incorporated by reference; Tanksley et al, 1989). Markers also can be used to obtain information about: (1) the number, effect, and chromosomal location of each gene affecting a trait; (2) effects of multiple copies of individual genes (gene dosage); (3) interaction between/among genes controlling a trait (epistasis); (4) whether individual genes affect more than one trait (pleiotropy); and (5) stability of gene function across environments (G x E interactions).

[0108] It is understood that one or more of the nucleic acid molecules of the present invention may in one embodiment be used as markers in genetic mapping. In a preferred embodiment, nucleic acid molecules of the present invention may in one embodiment be used as markers with Glycine max.

[0109] The nucleic acid molecules of the present invention may be used for physical mapping. Physical mapping, in conjunction with linkage analysis, can enable the isolation of genes. Physical mapping has been reported to identify the markers closest in terms of genetic recombination to a gene target for cloning. Once a DNA marker is linked to a gene of interest, the chromosome walking technique can be used to find the genes via overlapping clones. For chromosome walking, random molecular markers or established molecular linkage maps are used to conduct a search to localize the gene adjacent to one or more markers. A chromosome walk (Bukanov and Berg, Mo. Microbiol, 11:509-523 (1994), the entirety of which is herein incorporated by reference; Birkenbihl and Vielmetter Nucleic Acids Res. 17:5057-5069 (1989), the entirety of which is herein incorporated by reference; Wenzel and Herrmann, Nucleic Acids Res. 16:8323-8336, (1988), the entirety of which is herein incorporated by reference) is then initiated from the closest linked marker. Starting from the selected clones, labeled probes specific for the ends of the insert DNA are synthesized and used as probes in hybridizations against a representative library. Clones hybridizing with one of the probes are picked and serve as templates for the synthesis of new probes; by subsequent analysis, contigs are produced.

[0110] The degree of overlap of the hybridizing clones used to produce a contig can be determined by comparative restriction analysis. Comparative restriction analysis can be carried out in different ways all of which exploit the same principle; two clones of a library are very likely to overlap if they contain a limited number of restriction sites for one or more restriction endonucleases located at the same distance from each other. The most frequently used procedures are, fingerprinting (Coulson et al, Proc. Natl. Acad. Sci. (U.S.A.) 83:7821-7821, (1986), the entirety of which is herein incorporated by reference); Knott et al., Nucleic Acids Res. 16:2601-2612 (1988), the entirety of which is herein incorporated by reference; Eiglmeier et al., Mol. Microbiol. 7(2)::197-206 (1993), the entirety of which is herein incorporated by reference, 1993), restriction fragment mapping (Smith and Birnstiel, Nucleic Acids Res. 3:2387-2398 (1976), the entirety of which is herein incorporated by reference, or the “landmarking” technique (Charlebois et al., J. Mol. Biol. 222:509-524 (1991), the entirety of which is herein incorporated by reference To generate a physical map of a genome with BACs using the fingerprinting technique, a BAC library containing a number of clones equivalent to 4×-20× haploid genome can be used (Zhang and Wing., Plant Mol. Bio. 35:115-127 (1997)). For example, BAC DNA can be purified with the conventional alkaline lysis procedure as used for plasmid DNA purification, digested with the restriction enzyme used for construction of the BAC libraries and end-labeled with ³²P-dATP, digested with Sau3AI and fractionated on a denaturing polyacrylamide gel. The gel is dried to chromatography paper and exposed to X-ray film. Fingerprints are scanned and then converted into database records, according to the positions of each band relative to the bands of the closest molecular-weight marker on a gel. The incoming database of fingerprints are first compared against each other to assemble contigs if overlapped, and then compared against all existing databases to place the incoming BACs and BAC contigs in established contigs if overlapped. The physical length of a contig in kb is estimated according to the number of restriction sites of the enzyme used for the first digestion prior to fragment end labeling

[0111] Restriction analysis of a certain clone can be carried out, for example, according to a method originally described by Smith and Berstiel, Nucleic Acids Res. 3:2387-2398 (1976), First, the number and size of cloned restriction fragments to be mapped are determined by complete digestion and agarose gel electrophoresis. Then, the clone is linearized at a unique restriction site outside of the cloned DNA. Aliquots of the linearized molecules are digested to different extents with the enzyme selected for mapping. These partially cut samples are separated on agarose gels, blotted, and hybridized to a labeled fragment of vector DNA. This probe is derived entirely from one side or the other of the unique site used to linearize the clone.

[0112] The results show a ladder of DNA fragments that have the same unique end. By repeating these analyses in pairs with all the neighboring intermediate DNA fragments, the correct order of restriction fragments as well as the orientation of the cloned insert can be deduced. The order of restriction fragments produced by restriction enzymes other than the cloning enzyme can be determined similarly. Fragment data from different enzymes are then combined by a computer program and compared with the alignments of other clones of the library (Kohara et al., Cell 50:495-508 (1987), the entirety of which is herein incorporated by reference).

[0113] The landmarking technique can be carried out without any labeling and relies on agarose gel analysis. Clones are first digested preferably with a 6 bp specific endonuclease A, if possible with the original clone enzyme. Clones are then digested with a second endonuclease B. Endonuclease B is chosen based on its ability to cut rarely in the genome, for example, on average only once in 30 kbp. Of the fragments generated by digestion of one clone with enzyme A, statistically only a small number (between zero and three fragments) will also be cut by enzyme B. The very specific pattern of those fragments which are produced by double digestion are easily recognized. Any of these fragments which have a restriction site for the rarely cutting endonuclease is called a “landmark” Generally one common landmark is sufficient for defining two overlapping clones.

[0114] Alternatively to chromosome walking and the associated comparative restriction analyses methods, chromosome landing also has been reported to be used to locate a gene of interest (Tanksley et al., Trends in Genetics 11(2):63-68 (1995), the entirety of which is herein incorporated by reference. For chromosome landing, a DNA marker is isolated at a physical distance from the targeted gene. High resolution linkage analysis is used to identify such a marker that cosegregates with the gene. The marker is isolated at a distance that is less than the average insert size of the genomic library used for clone isolation. The DNA marker is then used to screen the library and isolate (or “land” on) the clone containing the gene without chromosome walking. Genome coverage of a library can also be determined by cross-hybridization of individual large insert clones by screening a BAC library with single copy RFLP markers distributed randomly across the genome by hybridization. To assure accuracy of the physical map, the markers should be single-copy or of single-locus origin, if multiple-copy.

[0115] Chromosome landing of large-insert clones using chromosome-specific DNA markers such as STSs microsatellites, RFLPs, or other markers can correlate physical and genetic maps (Zwick et al., Genetics 148:1983-1992 (1998), the entirety of which is herein incorporated by reference in its entirety). These strategies include chromosome landing of BACs containing markers or BAC contigs by BAC-FISH (Fluorescent In Situ Hybridization), a technique that involves tagging the DNA marker with an observable label. BAC clones giving positive hybridization signals are individually analyzed by FISH to metaphase chromosome spreads. The location of the labeled probe can be detected after it binds to its complementary DNA strand in an intact chromosome. The FISH of a BAC selected from a BAC contig will directly place the BAC contig to a specific chromosome region and establish a linkage relationships of the BAC contig to another BAC contig.

[0116] Likewise, BACs and STCs of the present invention can be used for contig mapping (Venter, et al., Nature, 381:364-366 (1996), the entirety of which is herein incorporated by reference). A “seed” BAC insert can be sequenced and then STCs and the corresponding BAC of each STC can be placed on the sequenced insert using the BLASTN program. Marker or gene containing STCs can be determined by the BLASTN program and their corresponding BACs can be hybridized to specific chromosomes using BAC-FISH (Zwick et al., Genetics 148:1983-1992 (1998)).

[0117] STCs can be used to identify a minimum tiling path of BACs by computational procedures. Any nucleation sequence (the sequence of an entire BAC, for example) can be electronically compared to a database of STCs to identify the next clones to be sequenced to maximally extend a contig. Chosen STCs need to occupy correct positions in the tiling path. Several factors can contribute to errors in the positioning and selection of these clones. An STC that contains all or part of a repetitive element can appear to align at any part of the growing mosaic which contains that element. One method of selecting the appropriate BAC is to mask out all sections of DNA sequence which are known to be repetitive elements. The sequence symbols of these section are replaced with Ns. These sections of DNA are not used to align the STC. STCs which are completely comprised of Ns are discarded. In this way, the unmasked sections of DNA may be aligned against the growing mosaic without misplacing them due to redundant sequence. A program publicly available, PowerBLAST includes a number of options for masking repetitive elements and low complexity subsequences (Zhang and Madden, Genome Res 7:649-56 (1997), the entirety of which is herein incorporated by reference. cDNA and genomic libraries also can be used as probe sources, thus directly combining the ordering of the genomic DNA with the localization of transcribed sequences. By a simultaneous hybridization to the genomic and back to the transcriptional libraries, results are produced on sequence homologies between transcribed sequences.

[0118] It is understood that the nucleic acid molecules of the present invention may in one embodiment be used in physical mapping. In a preferred embodiment, nucleic acid molecules of the present invention may in one embodiment be used in the physical mapping of Glycine max.

[0119] Nucleic acid molecules of the present invention can be used in comparative mapping (physical and genetic). Comparative mapping within families provides a method to the degree of sequence conservation, gene order, ploidy of species, ancestral relationships and the rates at which individual genomes are evolving. Comparative mapping has been carried out by cross-hybridizing molecular markers across species within a given family. As in genetic mapping, molecular markers are needed but instead of direct hybridization to mapping filters, the markers are used to select large insert clones from a total genomic DNA library of a related species. The selected clones, each a representative of a single marker, can then be used to physically map the region in the target species. The advantage of this method for comparative mapping is that no mapping population or linkage map of the target species is needed and the clones may also be used in other closely related species. By comparing the results obtained by genetic mapping in model plants, with those from other species, similarities of genomic structure among plants species can be established. Cross-hybridization of RFLP markers have been reported and conserved gene order has been established in many studies. Such macroscopic synteny is utilized for the estimation of correspondence of loci among these crops. These loci include not only Mendelian genes but also Quantitative Trait Loci (QTL) (Mohan et al., Molecular Breeding 3:87-103 (1997), the entirety of which is herein incorporated by reference.

[0120] It is understood that markers of the present invention may in another embodiment be used in comparative mapping. In a preferred embodiment the markers of present invention may be used in the comparative mapping of Glycine clandestina, Glycine gracilis, Glycine soja, Glycine tomentella, and Glycine tabaina.

[0121] The nucleic acid molecules of the present invention can be used to identify polymorphisms. In one embodiment, one or more of the STC nucleic acid molecules or a BAC nucleic acid molecule (or a sub-fragment of either) may be employed as a marker nucleic acid molecule to identify such polymorphism(s). Alternatively, such polymorphisms can be detected through the use of a marker nucleic acid molecule or a marker protein that is genetically linked to (i.e., a polynucleotide that co-segregates with) such polymorphism(s).

[0122] In an alternative embodiment, such polymorphisms can be detected through the use of a marker nucleic acid molecule that is physically linked to such polymorphism(s). For this purpose, marker nucleic acid molecules comprising a nucleotide sequence of a polynucleotide located within 1 mb of the polymorphism(s), and more preferably within 100 kb of the polymorphism(s), and most preferably within 10 kb of the polymorphism(s) can be employed.

[0123] The genomes of animals and plants naturally undergo spontaneous mutation in the course of their continuing evolution (Gusella, Ann. Rev. Biochem. 55:831-854 (1986)). A “polymorphism” is a variation or difference in the sequence of the gene or its flanking regions that arises in some of the members of a species. The variant sequence and the “original” sequence co-exist in the species' population. In some instances, such co-existence is in stable or quasi-stable equilibrium.

[0124] A polymorphism is thus said to be “allelic,” in that, due to the existence of the polymorphism, some members of a species may have the original sequence (i.e., the original “allele”) whereas other members may have the variant sequence (i.e., the variant “allele”). In the simplest case, only one variant sequence may exist, and the polymorphism is thus said to be di-allelic. In other cases, the species' population may contain multiple alleles, and the polymorphism is termed tri-allelic, etc. A single gene may have multiple different unrelated polymorphisms. For example, it may have a di-allelic polymorphism at one site, and a multi-allelic polymorphism at another site.

[0125] The variation that defines the polymorphism may range from a single nucleotide variation to the insertion or deletion of extended regions within a gene. In some cases, the DNA sequence variations are in regions of the genome that are characterized by short tandem repeats (STRS) that include tandem di- or tri-nucleotide repeated motifs of nucleotides. Polymorphisms characterized by such tandem repeats are referred to as “variable number tandem repeat” (“VNTR”) polymorphisms. VNTRs have been used in identity analysis (Weber, U.S. Pat. No. 5,075,217; Armour, et al., FEBS Lett. 307:113-115 (1992); Jones, et al., Eur. J. Haematol. 39:144-147 (1987); Horn, et al., PCT Application WO91/14003; Jeffreys, European Patent Application 370,719; Jeffreys, U.S. Pat. No. 5,175,082; Jeffreys et al., Amer. J. Hum. Genet. 39:11-24 (1986); Jeffreys et al., Nature 316:76-79 (1985); Gray, et al., Proc. R. Acad. Soc. Lond. 243:241-253 (1991); Moore, et al., Genomics 10:654-660 (1991); Jeffreys, et al., Anim. Genet. 18:1-15 (1987); Hillel, et al., Anim. Genet. 20:145-155 (1989); Hillel, et al., Genet. 124:783-789 (1990), all of which are herein incorporated by reference in their entirety).

[0126] The detection of polymorphic sites in a sample of DNA may be facilitated through the use of nucleic acid amplification methods. Such methods specifically increase the concentration of polynucleotides that span the polymorphic site, or include that site and sequences located either distal or proximal to it. Such amplified molecules can be readily detected by gel electrophoresis or other means.

[0127] The most preferred method of achieving such amplification employs the polymerase chain reaction (“PCR”) (Mullis, et al., Cold Spring Harbor Symp. Quant. Biol. 51:263-273 (1986); Erlich, et al., European Patent Appln. 50,424; European Patent Appln. 84,796, European Patent Application 258,017, European Patent Appln. 237,362; Mullis, European Patent Appln. 201,184; Mullis, et al., U.S. Pat. No. 4,683,202; Erlich., U.S. Pat. No. 4,582,788; and Saiki, et al., U.S. Pat. No. 4,683,194, all of which are herein incorporated by reference), using primer pairs that are capable of hybridizing to the proximal sequences that define a polymorphism in its double-stranded form.

[0128] In lieu of PCR, alternative methods, such as the “Ligase Chain Reaction” (“LCR”) may be used (Barany, Proc. Natl. Acad. Sci. (U.S.A.) 88:189-193 (1991), the entirety of which is herein incorporated by reference. LCR uses two pairs of oligonucleotide probes to exponentially amplify a specific target. The sequences of each pair of oligonucleotides is selected to permit the pair to hybridize to abutting sequences of the same strand of the target. Such hybridization forms a substrate for a template-dependent ligase. As with PCR, the resulting products thus serve as a template in subsequent cycles and an exponential amplification of the desired sequence is obtained.

[0129] LCR can be performed with oligonucleotides having the proximal and distal sequences of the same strand of a polymorphic site. In one embodiment, either oligonucleotide will be designed to include the actual polymorphic site of the polymorphism. In such an embodiment, the reaction conditions are selected such that the oligonucleotides can be ligated together only if the target molecule either contains or lacks the specific nucleotide that is complementary to the polymorphic site present on the oligonucleotide. Alternatively, the oligonucleotides may be selected such that they do not include the polymorphic site (see, Segev, PCT Application WO 90/01069, the entirety of which is herein incorporated by reference).

[0130] The “Oligonucleotide Ligation Assay” (“OLA”) may alternatively be employed (Landegren, et al., Science 241:1077-1080 (1988), the entirety of which is herein incorporated by reference). The OLA protocol uses two oligonucleotides which are designed to be capable of hybridizing to abutting sequences of a single strand of a target. OLA, like LCR, is particularly suited for the detection of point mutations. Unlike LCR, however, OLA results in “linear” rather than exponential amplification of the target sequence.

[0131] Nickerson, et al. have described a nucleic acid detection assay that combines attributes of PCR and OLA (Nickerson, et al., Proc. Natl. Acad. Sci. (U.S.A.) 87:8923-8927 (1990), the entirety of which is herein incorporated by reference). In this method, PCR is used to achieve the exponential amplification of target DNA, which is then detected using OLA. In addition, to requiring multiple, and separate, processing steps, one problem associated with such combinations is that they inherit all of the problems associated with PCR and OLA.

[0132] Schemes based on ligation of two (or more) oligonucleotides in the presence of nucleic acid having the sequence of the resulting “di-oligonucleotide”, thereby amplifying the di-oligonucleotide, are also known (Wu, et al., Genomics 4:560 (1989), the entirety of which is herein incorporated by reference), and may be readily adapted to the purposes of the present invention.

[0133] Other known nucleic acid amplification procedures, such as allele-specific oligomers, branched DNA technology, transcription-based amplification systems, or isothermal amplification methods may also be used to amplify and analyze such polymorphisms (Malek, et al., U.S. Pat. No. 5,130,238; Davey, et al., European Patent Application 329,822; Schuster et al., U.S. Pat. No. 5,169,766; Miller, et al., PCT Application WO 89/06700; Kwoh, et al., Proc. Natl. Acad. Sci. (U.S.A.) 86:1173-1177 (1989); Gingeras, et al., PCT Application WO 88/10315; Walker, et al., Proc. Natl. Acad. Sci. (U.S.A.) 89:392-396 (1992), all of which are herein incorporated by reference in their entirety).

[0134] The identification of a polymorphism can be determined in a variety of ways. By correlating the presence or absence of it in an plant with the presence or absence of a phenotype, it is possible to predict the phenotype of that plant. If a polymorphism creates or destroys a restriction endonuclease cleavage site, or if it results in the loss or insertion of DNA (e.g., a VNTR polymorphism), it will alter the size or profile of the DNA fragments that are generated by digestion with that restriction endonuclease. As such, individuals that possess a variant sequence can be distinguished from those having the original sequence by restriction fragment analysis. Polymorphisms that can be identified in this manner are termed “restriction fragment length polymorphisms” (“RFLPs”). RFLPs have been widely used in human and plant genetic analyses (Glassberg, UK Patent Application 2135774; Skolnick, et al., Cytogen. Cell Genet. 32:58-67 (1982); Botstein, et al., Ann. J. Hum. Genet. 32:314-331 (1980); Fischer, et al. (PCT Application W090/13668); Uhlen, PCT Application W090/11369).

[0135] Polymorphisms can also be identified by Single Strand Conformation Polymorphism (SSCP) analysis. The SSCP technique is a method capable of identifying most sequence variations in a single strand of DNA, typically between 150 and 250 nucleotides in length (Elles, Methods in Molecular Medicine: Molecular Diagnosis of Genetic Diseases, Humana Press (1996), the entirety of which is herein incorporated by reference); Orita et al., Genomics 5:874-879 (1989), the entirety of which is herein incorporated by reference). Under denaturing conditions a single strand of DNA will adopt a conformation that is uniquely dependent on its sequence conformation. This conformation usually will be different, even if only a single base is changed. Most conformations have been reported to alter the physical configuration or size sufficiently to be detectable by electrophoresis. A number of protocols have been described for SSCP including, but not limited to Lee et al., Anal. Biochem. 205:289-293 (1992), the entirety of which is herein incorporated by reference; Suzuki et al., Anal. Biochem. 192:82-84 (1991), the entirety of which is herein incorporated by reference; Lo et al., Nucleic Acids Research 20:1005-1009 (1992), the entirety of which is herein incorporated by reference; Sarkar et al., Genomics 13:441-443 (1992), the entirety of which is herein incorporated by reference). It is understood that one or more of the nucleic acids of the present invention, may be utilized as markers or probes to detect polymorphisms by SSCP analysis.

[0136] Polymorphisms may also be found using a DNA fingerprinting technique called amplified fragment length polymorphism (AFLP), which is based on the selective PCR amplification of restriction fragments from a total digest of genomic DNA to profile that DNA. Vos, et al., Nucleic Acids Res. 23:4407-4414 (1995), the entirety of which is herein incorporated by reference. This method allows for the specific co-amplification of high numbers of restriction fragments, which can be visualized by PCR without knowledge of the nucleic acid sequence.

[0137] AFLP employs basically three steps. Initially, a sample of genomic DNA is cut with restriction enzymes and oligonucleotide adapters are ligated to the restriction fragments of the DNA. The restriction fragments are then amplified using PCR by using the adapter and restriction sequence as target sites for primer annealing. The selective amplification is achieved by the use of primers that extend into the restriction fragments, amplifying only those fragments in which the primer extensions match the nucleotide flanking the restriction sites. These amplified fragments are then visualized on a denaturing polyacrylamide gel.

[0138] AFLP analysis has been performed on Salix (Beismann, et al., Mol. Ecol. 6:989-993 (1997), the entirety of which is herein incorporated by reference); Acinetobacter (Janssen, et al., Int. J. Syst. Bacteriol 47:1179-1187 (1997), the entirety of which is herein incorporated by reference), Aeromonas popoffi (Huys, et al., Int. J. Syst. Bacteriol. 47:1165-1171 (1997), the entirety of which is herein incorporated by reference), rice (McCouch, et al., Plant Mol. Biol. 35:89-99 (1997), the entirety of which is herein incorporated by reference); Nandi, et al., Mol. Gen. Genet. 255:1-8 (1997); Cho, et al., Genome 39:373-378 (1996), herein incorporated by reference), barley (Hordeum vulgare) (Simons, et al., Genomics 44:61-70 (1997), the entirety of which is herein incorporated by reference; Waugh, et al., Mol. Gen. Genet. 255:311-321 (1997), the entirety of which is herein incorporated by reference; Qi, et al., Mol. Gen. Genet. 254:330-336 (1997), the entirety of which is herein incorporated by reference; Becker, et al., Mol. Gen. Genet. 249:65-73 (1995), the entirety of which is herein incorporated by reference), potato (Van der Voort, et al., Mol. Gen. Genet. 255:438-447 (1997), the entirety of which is herein incorporated by reference; Meksem, et al., Mol. Gen. Genet. 249:74-81 (1995), the entirety of which is herein incorporated by reference), Phytophthora infestans (Van der Lee, et al., Fungal Genet. Biol. 21:278-291 (1997), the entirety of which is herein incorporated by reference), Bacillus anthracis (Keim, et al., J. Bacteriol. 179:818-824 (1997)), Astragalus cremnophylax (Travis, et al., Mol. Ecol. 5:735-745 (1996), the entirety of which is herein incorporated by reference), Arabidopsis (Cnops, et al., Mol. Gen. Genet. 253:32-41 (1996), the entirety of which is herein incorporated by reference), Escherichia coli (Lin, et al., Nucleic Acids Res. 24:3649-3650 (1996), the entirety of which is herein incorporated by reference), Aeromonas (Huys, et al., Int. J. Syst. Bacteriol. 46:572-580 (1996), the entirety of which is herein incorporated by reference), nematode (Folkertsma, et al., Mol. Plant Microbe Interact. 9:47-54 (1996), the entirety of which is herein incorporated by reference), tomato (Thomas, et al., Plant J. 8:785-794 (1995), the entirety of which is herein incorporated by reference), and human (Latorra, et al., PCR Methods Appl. 3:351-358 (1994) the entirety of which is herein incorporated by reference). AFLP analysis has also been used for fingerprinting mRNA (Money, et al., Nucleic Acids Res. 24:2616-2617 (1996), the entirety of which is herein incorporated by reference; Bachem, et al., Plant J. 9:745-753 (1996), the entirety of which is herein incorporated by reference). It is understood that one or more of the nucleic acid molecules of the present invention, may be utilized as markers or probes to detect polymorphisms by AFLP analysis for fingerprinting mRNA.

[0139] Polymorphisms may also be found using random amplified polymorphic DNA (RAPD) (Williams et al., Nucl. Acids Res. 18:6531-6535 (1990), the entirety of which is herein incorporated by reference) and cleavable amplified polymorphic sequences (CAPS) (Lyamichev et al., Science 260:778-783 (1993), the entirety of which is herein incorporated by reference). It is understood that one or more of the nucleic acid molecules of the present invention, may be utilized as markers or probes to detect polymorphisms by RAPD or CAPS analysis.

[0140] Nucleic acid molecules of the present invention can be used to monitor expression. A microarray-based method for high-throughput monitoring of plant gene expression may be utilized to measure gene-specific hybridization targets. This ‘chip’-based approach involves using microarrays of nucleic acid molecules as gene-specific hybridization targets to quantitatively measure expression of the corresponding plant genes (Schena et al., Science 270:467-470 (1995), the entirety of which is herein incorporated by reference; Shalon, Ph.D. Thesis. Stanford University (1996), the entirety of which is herein incorporated by reference). Every nucleotide in a large sequence can be queried at the same time. Hybridization can be used to efficiently analyze nucleotide sequences.

[0141] Several microarray methods have been described. One method compares the sequences to be analyzed by hybridization to a set of oligonucleotides or cDNA molecules representing all possible subsequences (Bains and Smith, J. Theor. Biol. 135:303 (1989), the entirety of which is herein incorporated by reference). A second method hybridizes the sample to an array of oligonucleotide or cDNA probes. An array consisting of oligonucleotides or cDNA molecules complementary to subsequences of a target sequence can be used to determine the identity of a target sequence, measure its amount, and detect differences between the target and a reference sequence. Nucleic acid molecule microarrays may also be screened with protein molecules or fragments thereof to determine nucleic acid molecules that specifically bind protein molecules or fragments thereof.

[0142] Additionally, microarrays of BACs may be prepared to sufficiently cover 3× of an entire genome. Such microarrays can be used in a variety of genomics experiments including gene mapping, DNA fingerprinting and promoter identification. Microarrays of genomic DNA can also be used for parallel analysis of genomes at single gene resolution (Lemieux et al., Molecular Breeding 277-289 (1988), the entirety of which is herein incorporated by reference). It is understood that one or more of the molecules of the present invention, preferably one or more of the nucleic acid molecules or protein molecules or fragments thereof of the present invention may be utilized in a genomic microarray based method. In a preferred embodiment of the present invention, one or more of the Glycine max nucleic acid molecules or protein molecules or fragments thereof of the present invention may be utilized in a genomic microarray based method. For example, Genomic Mismatch Scanning (GMS), a hybridization-based method of linkage analysis that allows rapid identification of regions of identity-by-descent between two related individuals, can be carried out with microarrays. GMS is reported to have been used to identify genetically common chromosomal segments based on the ability of these DNA sequences to form extensive regions of mismatch-free heteroduplexes. A series of enzymatic steps, coupled with filter binding, is used to selectively remove heteroduplexes that contain mismatches (i.e., chromosomal regions that do not share identity-by descent.). Fragments of chromosomal DNA representing inherited regions are hybridized to a microarray of ordered genomic clones and positive hybridization signals pinpoint regions of identity-by-descent at high resolution (Lemieux et al., Molecular Breeding 277-289 (1988))

[0143] It is understood that one or more of the molecules of the present invention, preferably one or more of the nucleic acid molecules or protein molecules or fragments thereof of the present invention may be utilized in a GMS microarray based method to locate regions of identity-by-descent between related individuals. In a preferred embodiment of the present invention, one or more of the Glycine max nucleic acid molecules or protein molecules or fragments thereof of the present invention may be utilized in a GMS microarray based method to locate regions of identity-by-descent between related individuals. The GMS microarray approach can also be used as a tool to map multigenic traits. For example, in yeast, the entire genomic sequence is known and it has been reported that the genes responsible for growth at elevated temperature, a trait required for the pathogenicity of certain yeast strains, may be determined using GMS (Lemieux et al, Molecular Breeding 277-289 (1988)). By analyzing the inheritance of large numbers of tetrads derived from crosses of pathogenic and wild type strains, all the genes responsible for a yeast strain's ability to grow at 42° C., for example, could be identified.

[0144] It is understood that one or more of the molecules of the present invention, preferably one or more of the nucleic acid molecules or protein molecules or fragments thereof of the present invention may be utilized in a GMS microarray based method to map multigenic traits. In a preferred embodiment of the present invention, one or more of the Glycine max nucleic acid molecules or protein molecules or fragments thereof of the present invention may be utilized in a GMS microarray based method to map multigenic traits.

[0145] Plant repeat elements may be used with GMS microarraying to identify species specific chromosomes in another species background. For example, the maize genome contains moderately repetitive DNA sequences (ZLRS) representing about 2500 copies per haploid genome; these sequences are present in the genus Zea and absent in other graminaceous species. Ananiev et al., (Proc. Natl. Acad. Sci. (U.S.A.) 94:3526-3529 (1997), all of which are herein incorporated by reference in their entirety) have reported unusual plants with individual maize chromosomes added to a complete oat genome generated by embryo rescue from oat (Avena sativa)×Zea mays crosses. By using highly repetitive maize-specific sequences as probes, Ananiev et al. (1997) were able to selectively isolate cosmid clones containing maize genomic DNA.

[0146] It is understood that one or more of the molecules of the present invention, preferably one or more of the nucleic acid molecules or protein molecules or fragments thereof of the present invention may be utilized in a GMS microarray based method using repeat elements to selectively isolate clones containing species specific DNA. In a preferred embodiment of the present invention, one or more of the Glycine max nucleic acid molecules or protein molecules or fragments thereof of the present invention may be utilized in a GMS microarray based method to selectively isolate clones containing species specific DNA. A particular preferred microarray embodiment of the present invention is a microarray comprising nucleic acid molecules encoding genes that are homologues of known genes or nucleic acid molecules that comprise genes or fragments thereof that elicit only limited or no matches to known genes. A further preferred microarray embodiment of the present invention is a microarray comprising nucleic acid molecules encoding genes or fragments thereof that are homologues of known genes and nucleic acid molecules that comprise genes or fragments thereof that elicit only limited or no matches to known genes. A further preferred microarray embodiment of the present invention is a microarray comprising nucleic acid molecules encoding genes or fragments thereof that elicit only limited or no matches to known genes.

[0147] It is understood that one or more of the molecules of the present invention, preferably one or more of the nucleic acid molecules or protein molecules or fragments thereof of the present invention may be utilized in a microarray based method. In a preferred embodiment of the present invention, one or more of the Glycine max nucleic acid molecules or protein molecules or fragments thereof of the present invention may be utilized in a microarray based method.

[0148] Nucleic acid molecules of the present invention may be used in site directed mutagenesis. Site-directed mutagenesis may be utilized to modify nucleic acid sequences, particularly as it is a technique that allows one or more of the amino acids encoded by a nucleic acid molecule to be altered (e.g. a threonine to be replaced by a methionine). Three basic methods for site-directed mutagenesis are often employed. These are cassette mutagenesis (Wells et al., Gene 34:315-23 (1985), the entirety of which is herein incorporated by reference), primer extension (Gilliam et al., Gene 12:129-137 (1980), the entirety of which is herein incorporated by reference); Zoller and Smith, Methods Enzymol. 100:468-500 (1983), the entirety of which is herein incorporated by reference; and Dalbadie-McFarland et al., Proc. Natl. Acad. Sci. (U.S.A.) 79:6409-6413 (1982), the entirety of which is herein incorporated by reference) and methods based upon PCR (Scharfet al., Science 233:1076-1078 (1986), the entirety of which is herein incorporated by reference; Higuchi et al., Nucleic Acids Res. 16:7351-7367 (1988), the entirety of which is herein incorporated by reference).

[0149] Any of the nucleic acid molecules of the present invention may either be modified by site-directed mutagenesis or used as, for example, nucleic acid molecules that are used to target other nucleic acid molecules for modification. It is understood that mutants with more than one altered nucleotide can be constructed using techniques that practitioners skilled in the art are familiar with such as isolating restriction fragments and ligating such fragments into an expression vector.

[0150] ApBACwich system has been developed to achieve site-directed integration of DNA into the genome. A 150 kb cotton BAC DNA is reported to have been transferred into a specific lox site in tobacco by biolistic bombardment and Cre-lox site specific recombination.

[0151] A construct or vector comprising a nucleic acid molecules of the present invention may be used in transformation. Exogenous genetic material may be transferred into a plant cell and the plant cell regenerated into a whole, fertile or sterile plant. Exogenous genetic material is any genetic material, whether naturally occurring or otherwise, from any source that is capable of being inserted into any organism. In a preferred embodiment of the present invention the exogenous genetic material can include Glycine max genetic material. Such genetic material may be transferred into either monocotyledons and dicotyledons including but not limited to the plants, Zea mays and Arabidopsis thaliana and soybean (See specifically, Chistou, Particle Bombardment for Genetic Engineering of Plants, pp. 63-69 (Zea mays), pp 50-60 (soybean), Biotechnology Intelligence Unit, Academic Press, San Diego, Calif. (1996), the entirety of which is herein incorporated by reference and generally Chistou, Particle Bombardment for Genetic Engineering of Plants, Biotechnology Intelligence Unit, Academic Press, San Diego, Calif. (1996), the entirety of which is herein incorporated by reference).

[0152] Transfer of a nucleic acid that encodes for a protein can result in overexpression of that protein in a transformed cell or transgenic plant. One or more of the proteins or fragments thereof encoded by nucleic acid molecules of the present invention may be overexpressed in a transformed cell or transformed plant. Such overexpression may be the result of transient or stable transfer of the exogenous material.

[0153] Exogenous genetic material may be transferred into a plant cell by the use of a DNA vector or construct designed for such a purpose. Vectors have been engineered for transformation of large DNA inserts into plant genomes. Vectors have been designed to replicate in both E. coli and A. tumefaciens and have all of the features required for transferring large inserts of DNA into plant chromosomes (Choi and Wing, at the website genome.clemson.edu/protocols2-nj.html July, 1998). ApBACwich system has been developed to achieve site-directed integration of DNA into the genome. A 150 kb cotton BAC DNA is reported to have been transferred into a specific lox site in tobacco by biolistic bombardment and Cre-lox site specific recombination.

[0154] A construct or vector may include a plant promoter to express the protein or protein fragment of choice. A number of promoters which are active in plant cells have been described in the literature. These include the nopaline synthase (NOS) promoter (Ebert et al., Proc. Natl. Acad. Sci. (U.S.A.) 84:5745-5749 (1987), the entirety of which is herein incorporated by reference), the octopine synthase (OCS) promoter (which are carried on tumor-inducing plasmids of Agrobacterium tumefaciens), the caulimovirus promoters such as the cauliflower mosaic virus (CaMV) 19S promoter (Lawton et al., Plant Mol. Biol. 9:315-324 (1987), the entirety of which is herein incorporated by reference) and the CAMV 35S promoter (Odell et al., Nature 313:810-812 (1985), the entirety of which is herein incorporated by reference), the figwort mosaic virus 35S-promoter, the light-inducible promoter from the small subunit of ribulose-1,5-bisphosphate carboxylase (ssRUBISCO), the Adh promoter (Walker et al., Proc. Natl. Acad. Sci. (U.S.A.) 84:6624-6628 (1987), the entirety of which is herein incorporated by reference), the sucrose synthase promoter (Yang et al., Proc. Natl. Acad. Sci. (U.S.A.) 87:4144-4148 (1990), the entirety of which is herein incorporated by reference), the R gene complex promoter (Chandler et al., The Plant Cell 1:1175-1183 (1989), the entirety of which is herein incorporated by reference), and the chlorophyll a/b binding protein gene promoter, etc. These promoters have been used to create DNA constructs which have been expressed in plants; see, e.g., PCT publication WO 84/02913, herein incorporated by reference in its entirety.

[0155] Promoters which are known or are found to cause transcription of DNA in plant cells can be used in the present invention. Such promoters may be obtained from a variety of sources such as plants and plant viruses. It is preferred that the particular promoter selected should be capable of causing sufficient expression to result in the production of an effective amount of protein to cause the desired phenotype. In addition to promoters which are known to cause transcription of DNA in plant cells, other promoters may be identified for use in the current invention by screening a plant cDNA library for genes which are selectively or preferably expressed in the target tissues or cells.

[0156] For the purpose of expression in source tissues of the plant, such as the leaf, seed, root or stem, it is preferred that the promoters utilized in the present invention have relatively high expression in these specific tissues. For this purpose, one may choose from a number of promoters for genes with tissue- or cell-specific or -enhanced expression. Examples of such promoters reported in the literature include the chloroplast glutamine synthetase GS2 promoter from pea (Edwards et al., Proc. Natl. Acad. Sci. (U.S.A.) 87:3459-3463 (1990), herein incorporated by reference in its entirety), the chloroplast fructose-1,6-biphosphatase (FBPase) promoter from wheat (Lloyd et al., Mol. Gen. Genet. 225:209-216 (1991), herein incorporated by reference in its entirety), the nuclear photosynthetic ST-LS1 promoter from potato (Stockhaus et al., EMBO J. 8:2445-2451 (1989), herein incorporated by reference in its entirety), the phenylalanine ammonia-lyase (PAL) promoter and the chalcone synthase (CHS) promoter from Arabidopsis thaliana. Also reported to be active in photosynthetically active tissues are the ribulose-1,5-bisphosphate carboxylase (RbcS) promoter from eastern larch (Larix laricina), the promoter for the cab gene, cab6, from pine (Yamamoto et al., Plant Cell Physiol. 35:773-778 (1994), herein incorporated by reference in its entirety), the promoter for the Cab-1 gene from wheat (Fejes et al., Plant Mol. Biol. 15:921-932 (1990), herein incorporated by reference in its entirety), the promoter for the CAB-1 gene from spinach (Lubberstedt et al., Plant Physiol. 104:997-1006 (1994), herein incorporated by reference in its entirety), the promoter for the cab1R gene from rice (Luan et al., Plant Cell. 4:971-981 (1992), the entirety of which is herein incorporated by reference), the pyruvate, orthophosphate dikinase (PPDK) promoter from Zea mays (Matsuoka et al., Proc. Natl. Acad. Sci. (U.S.A.) 90:9586-9590 (1993), herein incorporated by reference in its entirety), the promoter for the tobacco Lhcb1*2 gene (Cerdan et al., Plant Mol. Biol. 33:245-255. (1997), herein incorporated by reference in its entirety), the Arabidopsis thaliana SUC2 sucrose-H+ symporter promoter (Truernit et al., Planta. 196:564-570 (1995), herein incorporated by reference in its entirety), and the promoter for the thylacoid membrane proteins from spinach (psaD, psaF, psaE, PC, FNR, atpC, atpD, cab, rbcS). Other promoters for the chlorophyll a/b-binding proteins may also be utilized in the present invention, such as the promoters for LhcB gene and PsbP gene from white mustard (Sinapis alba; Kretsch et al., Plant Mol. Biol. 28:219-229 (1995), the entirety of which is herein incorporated by reference).

[0157] For the purpose of expression in sink tissues of the plant, such as the tuber of the potato plant, the fruit of tomato, or the seed of Zea mays, wheat, rice, and barley, it is preferred that the promoters utilized in the present invention have relatively high expression in these specific tissues. A number of promoters for genes with tuber-specific or -enhanced expression are known, including the class I patatin promoter (Bevan et al., EMBO J. 8:1899-1906 (1986); Jefferson et al., Plant Mol. Biol. 14995-1006 (1990), both of which are herein incorporated by reference in its entirety), the promoter for the potato tuber ADPGPP genes, both the large and small subunits, the sucrose synthase promoter (Salanoubat and Belliard, Gene. 60:47-56 (1987), Salanoubat and Belliard, Gene. 84:181-185 (1989), both of which are incorporated by reference in their entirety), the promoter for the major tuber proteins including the 22 kd protein complexes and proteinase inhibitors (Hannapel, Plant Physiol. 101:703-704 (1993), herein incorporated by reference in its entirety), the promoter for the granule bound starch synthase gene (GBSS) (Visser et al., Plant Mol. Biol. 17:691-699 (1991), herein incorporated by reference in its entirety), and other class I and II patatins promoters (Koster-Topfer et al., Mol. Gen. Genet. 219:390-396 (1989); Mignery et al., Gene. 62:27-44 (1988), both of which are herein incorporated by reference in their entirety).

[0158] Other promoters can also be used to express a fructose 1,6 bisphosphate aldolase gene in specific tissues, such as seeds or fruits. The promoter for β-conglycinin (Chen et al., Dev. Genet. 10:112-122 (1989), herein incorporated by reference in its entirety) or other seed-specific promoters such as the napin and phaseolin promoters, can be used. The zeins are a group of storage proteins found in Zea mays endosperm. Genomic clones for zein genes have been isolated (Pedersen et al., Cell 29:1015-1026 (1982), herein incorporated by reference in its entirety), and the promoters from these clones, including the 15 kD, 16 kD, 19 kD, 22 kD, 27 kD, and gamma genes, could also be used. Other promoters known to function, for example, in Zea mays, include the promoters for the following genes: waxy, Brittle, Shrunken 2, Branching enzymes I and II, starch synthases, debranching enzymes, oleosins, glutelins, and sucrose synthases. A particularly preferred promoter for Zea mays endosperm expression is the promoter for the glutelin gene from rice, more particularly the Osgt-1 promoter (Zheng et al., Mol. Cell Biol. 13:5829-5842 (1993), herein incorporated by reference in its entirety). Examples of promoters suitable for expression in wheat include those promoters for the ADPglucose pyrophosphorylase (ADPGPP) subunits, the granule bound and other starch synthases, the branching and debranching enzymes, the embryogenesis-abundant proteins, the gliadins, and the glutenins. Examples of such promoters in rice include those promoters for the ADPGPP subunits, the granule bound and other starch synthases, the branching enzymes, the debranching enzymes, sucrose synthases, and the glutelins. A particularly preferred promoter is the promoter for rice glutelin, Osgt-1. Examples of such promoters for barley include those for the ADPGPP subunits, the granule bound and other starch synthases, the branching enzymes, the debranching enzymes, sucrose synthases, the hordeins, the embryo globulins, and the aleurone specific proteins.

[0159] Root specific promoters may also be used. An example of such a promoter is the promoter for the acid chitinase gene (Samac et al., Plant Mol. Biol. 25:587-596 (1994), the entirety of which is herein incorporated by reference). Expression in root tissue could also be accomplished by utilizing the root specific subdomains of the CaMV35S promoter that have been identified (Lam et al., Proc. Natl. Acad. Sci. (U.S.A.) 86:7890-7894 (1989), herein incorporated by reference in its entirety). Other root cell specific promoters include those reported by Conkling et al. (Conkling et al., Plant Physiol. 93:1203-1211 (1990), the entirety of which is herein incorporated by reference).

[0160] Additional promoters that may be utilized are described, for example, in U.S. Pat. Nos. 5,378,619, 5,391,725, 5,428,147, 5,447,858, 5,608,144, 5,608,144, 5,614,399, 5,633,441, 5,633,435, and 4,633,436, all of which are herein incorporated in their entirety. In addition, a tissue specific enhancer may be used (Fromm et al., The Plant Cell 1:977-984 (1989), the entirety of which is herein incorporated by reference).

[0161] Constructs or vectors may also include, with the coding region of interest, a nucleic acid sequence that acts, in whole or in part, to terminate transcription of that region. For example, such sequences have been isolated including the Tr7 3′ sequence and the nos 3′ sequence (Ingelbrecht et al., The Plant Cell 1:671-680 (1989), the entirety of which is herein incorporated by reference; Bevan et al., Nucleic Acids Res. 11:369-385 (1983), the entirety of which is herein incorporated by reference), or the like.

[0162] A vector or construct may also include regulatory elements. Examples of such include the Adh intron 1 (Callis et al., Genes and Develop. 1:1183-1200 (1987), the entirety of which is herein incorporated by reference), the sucrose synthase intron (Vasil et al., Plant Physiol. 91:1575-1579 (1989), the entirety of which is herein incorporated by reference) and the TMV omega element (Gallie et al., The Plant Cell 1:301-311 (1989), the entirety of which is herein incorporated by reference). These and other regulatory elements may be included when appropriate.

[0163] A vector or construct may also include a selectable marker. Selectable markers may also be used to select for plants or plant cells that contain the exogenous genetic material. Examples of such include, but are not limited to, a neo gene (Potrykus et al., Mol. Gen. Genet. 199:183-188 (1985), the entirety of which is herein incorporated by reference) which codes for kanamycin resistance and can be selected for using kanamycin, G418, etc.; a bar gene which codes for bialaphos resistance; a mutant EPSP synthase gene (Hinchee et al., Bio/Technology 6:915-922 (1988), the entirety of which is herein incorporated by reference) which encodes glyphosate resistance; a nitrilase gene which confers resistance to bromoxynil (Stalker et al., J. Biol. Chem. 263:6310-6314 (1988), the entirety of which is herein incorporated by reference); a mutant acetolactate synthase gene (ALS) which confers imidazolinone or sulphonylurea resistance (European Patent Application 154,204 (Sept. 11, 1985), the entirety of which is herein incorporated by reference); and a methotrexate resistant DHFR gene (Thillet et al., J. Biol. Chem. 263:12500-12508 (1988), the entirety of which is herein incorporated by reference).

[0164] A vector or construct may also include a transit peptide. Incorporation of a suitable chloroplast transit peptide may also be employed (European Patent Application Publication Number 0218571, the entirety of which is herein incorporated by reference). Translational enhancers may also be incorporated as part of the vector DNA. DNA constructs could contain one or more 5′ non-translated leader sequences which may serve to enhance expression of the gene products from the resulting mRNA transcripts. Such sequences may be derived from the promoter selected to express the gene or can be specifically modified to increase translation of the mRNA. Such regions may also be obtained from viral RNAs, from suitable eukaryotic genes, or from a synthetic gene sequence. For a review of optimizing expression of transgenes, see Koziel et al., Plant Mol. Biol. 32:393-405 (1996), the entirety of which is herein incorporated by reference.

[0165] A vector or construct may also include a screenable marker. Screenable markers may be used to monitor expression. Exemplary screenable markers include a β-glucuronidase or uidA gene (GUS) which encodes an enzyme for which various chromogenic substrates are known (Jefferson, Plant Mol. Biol, Rep. 5:387-405 (1987), the entirety of which is herein incorporated by reference; Jefferson et al., EMBO J. 6:3901-3907 (1987), the entirety of which is herein incorporated by reference); an R-locus gene, which encodes a product that regulates the production of anthocyanin pigments (red color) in plant tissues ((Dellaporta et al., Stadler Symposium 11:263-282 (1988), the entirety of which is herein incorporated by reference); a β-lactamase gene (Sutcliffe et al., Proc. Natl. Acad. Sci. (U.S.A.) 75:3737-3741 (1978), the entirety of which is herein incorporated by reference), a gene which encodes an enzyme for which various chromogenic substrates are known (e.g., PADAC, a chromogenic cephalosporin); a luciferase gene (Ow et al., Science 234:856-859 (1986), the entirety of which is herein incorporated by reference) a xylE gene (Zukowsky et al., Proc. Natl. Acad. Sci. (U.S.A.) 80:1101-1105 (1983), the entirety of which is herein incorporated by reference) which encodes a catechol dioxygenase that can convert chromogenic catechols; an (x-amylase gene (Ikatu et al., Bio/Technol. 8:241-242 (1990), the entirety of which is herein incorporated by reference); a tyrosinase gene (Katz et al., J. Gen. Microbiol. 129:2703-2714 (1983), the entirety of which is herein incorporated by reference) which encodes an enzyme capable of oxidizing tyrosine to DOPA and dopaquinone which in turn condenses to melanin; an α-galactosidase, which will turn a chromogenic α-galactose substrate.

[0166] Included within the terms “selectable or screenable marker genes” are also genes which encode a secretable marker whose secretion can be detected as a means of identifying or selecting for transformed cells. Examples include markers which encode a secretable antigen that can be identified by antibody interaction, or even secretable enzymes which can be detected catalytically. Secretable proteins fall into a number of classes, including small, diffusible proteins detectable, e.g., by ELISA, small active enzymes detectable in extracellular solution (e.g., α-amylase, β-lactarnase, phosphinothricin transferase), or proteins which are inserted or trapped in the cell wall (such as proteins which include a leader sequence such as that found in the expression unit of extension or tobacco PR-S). Other possible selectable and/or screenable marker genes will be apparent to those of skill in the art.

[0167] Methods and compositions for transforming a bacteria and other microorganisms are known in the art (see for example Sambrook et al., Molecular Cloning: A Laboratory Manual, Second Edition, Cold Spring Harbor Laboratory Press, Cold Spring Harbor, N.Y., (1989), the entirety of which is herein incorporated by reference).

[0168] There are many methods for introducing transforming nucleic acid molecules into plant cells. Suitable methods are believed to include virtually any method by which nucleic acid molecules may be introduced into a cell, such as by Agrobacterium infection or direct delivery of nucleic acid molecules such as, for example, by PEG-mediated transformation, by electroporation or by acceleration of DNA coated particles, etc. (Pottykus, Ann. Rev. Plant Physiol. Plant Mol. Biol. 42:205-225 (1991), the entirety of which is herein incorporated by reference; Vasil, Plant Mol. Biol. 25:925-937 (1994), the entirety of which is herein incorporated by reference. For example, electroporation has been used to transform Zea mays protoplasts (Fromm et al., Nature 312:791-793 (1986), the entirety of which is herein incorporated by reference).

[0169] Technology for introduction of DNA into cells is well known to those of skill in the art. Four general methods for delivering a gene into cells have been described: (1) chemical methods (Graham and van der Eb, Virology, 54:536-539 (1973), the entirety of which is herein incorporated by reference); (2) physical methods such as microinjection (Capecchi, Cell 22:479-488 (1980), electroporation (Wong and Neumann, Biochem. Biophys. Res. Commun., 107:584-587 (1982); Fromm et al., Proc. Natl. Acad. Sci. (U.S.A.), 82:5824-5828 (1985); U.S. Pat. No. 5,384,253; and the gene gun (Johnston and Tang, Methods Cell Biol. 43:353-365 (1994), all of which the entirety is herein incorporated by reference; (3) viral vectors (Clapp, Clin. Perinatol., 20:155-168 (1993); Lu et al., J. Exp. Med., 178:2089-2096 (1993); Eglitis and Anderson, Biotechniques, 6:608-614 (1988), all of which the entirety is herein incorporated by reference); and (4) receptor-mediated mechanisms (Curiel et al., Hum. Gen. Ther., 3:147-154 (1992); Wagner et al., Proc. Natl. Acad. Sci. U.S.A., 89:6099-6103 (1992), all of which the entirety is herein incorporated by reference).

[0170] Acceleration methods that may be used include, for example, microprojectile bombardment and the like. One example of a method for delivering transforming nucleic acid molecules to plant cells is microprojectile bombardment. This method has been reviewed by Yang and Christou, eds., Particle Bombardment Technologyfor Gene Transfer, Oxford Press, Oxford, England (1994), the entirety of which is herein incorporated by reference). Non-biological particles (microprojectiles) that may be coated with nucleic acids and delivered into cells by a propelling force. Exemplary particles include those comprised of tungsten, gold, platinum, and the like.

[0171] A particular advantage of microprojectile bombardment, in addition to it being an effective means of reproducibly, and stably transforming monocotyledons, is that neither the isolation of protoplasts (Cristou et al., Plant Physiol. 87:671-674 (1988), the entirety of which is herein incorporated by reference) nor the susceptibility of Agrobacterium infection is required. An illustrative embodiment of a method for delivering DNA into maize cells by acceleration is a biolistics-particle delivery system, which can be used to propel particles coated with DNA through a screen, such as a stainless steel or Nytex screen, onto a filter surface covered with corn cells cultured in suspension. Gordon-Kamm et al., describes the basic procedure for coating tungsten particles with DNA (Gordon-Kamm et al., Plant Cell 2:603-618 (1990), the entirety of which is herein incorporated by reference). The screen disperses the tungsten nucleic acid particles so that they are not delivered to the recipient cells in large aggregates. A particle delivery system suitable for use with the present invention is the helium acceleration PDS-1000/He gun which is available from Bio-Rad Laboratories (Bio-Rad, Hercules, California) (Sanford et al., Technique 3:3-16 (1991), the entirety of which is herein incorporated by reference).

[0172] For the bombardment, cells in suspension may be concentrated on filters. Filters containing the cells to be bombarded are positioned at an appropriate distance below the microprojectile stopping plate. If desired, one or more screens are also positioned between the gun and the cells to be bombarded.

[0173] Alternatively, immature embryos or other target cells may be arranged on solid culture medium. The cells to be bombarded are positioned at an appropriate distance below the macroprojectile stopping plate. If desired, one or more screens are also positioned between the acceleration device and the cells to be bombarded. Through the use of techniques set forth herein one may obtain up to 1000 or more foci of cells transiently expressing a marker gene. The number of cells in a focus which express the exogenous gene product 48 hours post-bombardment often range from one to ten and average one to three.

[0174] In bombardment transformation, one may optimize the prebombardment culturing conditions and the bombardment parameters to yield the maximum numbers of stable transformants. Both the physical and biological parameters for bombardment are important in this technology. Physical factors are those that involve manipulating the DNA/microprojectile precipitate or those that affect the flight and velocity of either the macro- or microprojectiles. Biological factors include all steps involved in manipulation of cells before and immediately after bombardment, the osmotic adjustment of target cells to help alleviate the trauma associated with bombardment, and also the nature of the transforming DNA, such as linearized DNA or intact supercoiled plasmids. It is believed that pre-bombardment manipulations are especially important for successful transformation of immature embryos.

[0175] In another alternative embodiment, plastids can be stably transformed. Methods disclosed for plastid transformation in higher plants include particle gun delivery of DNA containing a selectable marker and targeting of the DNA to the plastid genome through homologous recombination (Svab et al. Proc. Natl. Acad. Sci. (U.S.A.) 87:8526-8530 (1990): Svab and Maliga Proc. Natl. Acad. Sci. (U.S.A.) 90:913-917 (1993)); (Staub, J. M. and Maliga, P. EMBO J. 12:601-606 (1993), U.S. Pat. Nos. 5, 451,513 and 5,545,818 all of which are herein incorporated by reference in their entirety).

[0176] Accordingly, it is contemplated that one may wish to adjust various aspects of the bombardment parameters in small scale studies to fully optimize the conditions. One may particularly wish to adjust physical parameters such as gap distance, flight distance, tissue distance, and helium pressure. One may also minimize the trauma reduction factors by modifying conditions which influence the physiological state of the recipient cells and which may therefore influence transformation and integration efficiencies. For example, the osmotic state, tissue hydration and the subculture stage or cell cycle of the recipient cells may be adjusted for optimum transformation. The execution of other routine adjustments will be known to those of skill in the art in light of the present disclosure.

[0177] Agrobacterium-mediated transfer is a widely applicable system for introducing genes into plant cells because the DNA can be introduced into whole plant tissues, thereby bypassing the need for regeneration of an intact plant from a protoplast. The use of Agrobacterium-mediated plant integrating vectors to introduce DNA into plant cells is well known in the art. See, for example the methods described (Fraley et al., Biotechnology 3:629-635 (1985); Rogers et al., Meth. In Enzymol, 153:253-277 (1987), both of which are herein incorporated by reference in their entirety. Further, the integration of the Ti-DNA is a relatively precise process resulting in few rearrangements. The region of DNA to be transferred is defined by the border sequences, and intervening DNA is usually inserted into the plant genome as described (Spielmann et al., Mol. Gen. Genet., 205:34 (1986), the entirety of which is herein incorporated by reference).

[0178] Modern Agrobacterium transformation vectors are capable of replication in E. coli as well as Agrobacterium, allowing for convenient manipulations as described (Klee et al., In: Plant DNA Infectious Agents, T. Hohn and J. Schell, eds., Springer-Verlag, New York, pp. 179-203 (1985), the entirety of which is herein incorporated by reference. Moreover, recent technological advances in vectors for Agrobacterium-mediated gene transfer have improved the arrangement of genes and restriction sites in the vectors to facilitate construction of vectors capable of expressing various polypeptide coding genes. The vectors described have convenient multi-linker regions flanked by a promoter and a polyadenylation site for direct expression of inserted polypeptide coding genes and are suitable for present purposes (Rogers et al., Meth. In Enzymol., 153:253-277 (1987), the entirety of which is herein incorporated by reference). In addition, Agrobacterium containing both armed and disarmed Ti genes can be used for the transformations. In those plant strains where Agrobacterium-mediated transformation is efficient, it is the method of choice because of the facile and defined nature of the gene transfer.

[0179] A transgenic plant formed using Agrobacterium transformation methods typically contains a single gene on one chromosome. Such transgenic plants can be referred to as being heterozygous for the added gene. More preferred is a transgenic plant that is homozygous for the added structural gene; i.e., a transgenic plant that contains two added genes, one gene at the same locus on each chromosome of a chromosome pair. A homozygous transgenic plant can be obtained by sexually mating (selfing) an independent segregant transgenic plant that contains a single added gene, germinating some of the seed produced and analyzing the resulting plants produced for the gene of interest.

[0180] It is also to be understood that two different transgenic plants can also be mated to produce offspring that contain two independently segregating added, exogenous genes. Selfing of appropriate progeny can produce plants that are homozygous for both added, exogenous genes that encode a polypeptide of interest. Back-crossing to a parental plant and out-crossing with a non-transgenic plant are also contemplated, as is vegetative propagation.

[0181] Transformation of plant protoplasts can be achieved using methods based on calcium phosphate precipitation, polyethylene glycol treatment, electroporation, and combinations of these treatments. See for example (Potrykus et al., Mol. Gen. Genet., 205:193-200(1986); Lorzetal., Mol. Gen. Genet., 199:178, (1985); Frommetal., Nature, 319:791, (1986); Uchimiya et al., Mol. Gen. Genet. 204:204, (1986); Callis et al., Genes and Development, 1183,(1987); Marcotte et al., Nature, 335:454, (1988), all of which the entirety is herein incorporated by reference).

[0182] Application of these systems to different plant strains depends upon the ability to regenerate that particular plant strain from protoplasts. Illustrative methods for the regeneration of cereals from protoplasts are described (Fujimura et al., Plant Tissue Culture Letters, 2:74, (1985); Toriyama et al., Theor Appl. Genet. 205:34. (1986); Yamada et al., Plant Cell Rep., 4:85, (1986); Abdullah et al., Biotechnology, 4:1087, (1986), all of which the entirety is herein incorporated by reference).

[0183] To transform plant strains that cannot be successfully regenerated from protoplasts, other ways to introduce DNA into intact cells or tissues can be utilized. For example, regeneration of cereals from immature embryos or explants can be effected as described (Vasil, Biotechnology, 6:397, (1988), the entirety of which is herein incorporated by reference). In addition, “particle gun” or high-velocity microprojectile technology can be utilized (Vasil et al., Bio/Technology 10:667, (1992), the entirety of which is herein incorporated by reference).

[0184] Using the latter technology, DNA is carried through the cell wall and into the cytoplasm on the surface of small metal particles as described (Klein et al., Nature, 328:70, (1987); Klein et al., Proc. Natl. Acad. Sci. (U.S.A.), 85:8502-8505, (1988); McCabe et al., Biotechnology, 6:923, (1988), all of which the entirety is herein incorporated by reference). The metal particles penetrate through several layers of cells and thus allow the transformation of cells within tissue explants.

[0185] Other methods of cell transformation can also be used and include but are not limited to introduction of DNA into plants by direct DNA transfer into pollen (Zhou et al., Methods in Enzymology, 101:433, (1983); Hess et al., Intern Rev. Cytol., 107:367, (1987); Luo et al., Plant Mol. Biol. Reporter, 6:165, (1988), all of which the entirety is herein incorporated by reference), by direct injection of DNA into reproductive organs of a plant (Pena et al., Nature, 325:274, (1987), the entirety of which is herein incorporated by reference), or by direct injection of DNA into the cells of immature embryos followed by the rehydration of desiccated embryos (Neuhaus et al., Theor. Appl. Genet., 75:30, (1987), the entirety of which is herein incorporated by reference).

[0186] The regeneration, development, and cultivation of plants from single plant protoplast transformants or from various transformed explants is well known in the art (Weissbach and Weissbach, In: Methods for Plant Molecular Biology, (Eds.), Academic Press, Inc., San Diego, Calif., (1988), the entirety of which is herein incorporated by reference). This regeneration and growth process typically includes the steps of selection of transformed cells, culturing those individualized cells through the usual stages of embryonic development through the rooted plantlet stage. Transgenic embryos and seeds are similarly regenerated. The resulting transgenic rooted shoots are thereafter planted in an appropriate plant growth medium such as soil.

[0187] The development or regeneration of plants containing the foreign, exogenous gene that encodes a protein of interest is well known in the art. Preferably, the regenerated plants are self-pollinated to provide homozygous transgenic plants, as discussed before. Otherwise, pollen obtained from the regenerated plants is crossed to seed-grown plants of agronomically important lines. Conversely, pollen from plants of these important lines is used to pollinate regenerated plants. A transgenic plant of the present invention containing a desired polypeptide is cultivated using methods well known to one skilled in the art.

[0188] There are a variety of methods for the regeneration of plants from plant tissue. The particular method of regeneration will depend on the starting plant tissue and the particular plant species to be regenerated.

[0189] Methods for transforming dicots, primarily by use of Agrobacterium tumefaciens, and obtaining transgenic plants have been published for cotton (U.S. Pat. No. 5,004,863, U.S. Pat. No. 5,159,135, U.S. Pat. No. 5,518,908, all of which the entirety is herein incorporated by reference); soybean (U.S. Pat. No. 5,569,834, U.S. Pat. No. 5,416,011, McCabe et al., Biotechnology 6:923, (1988), Christou et al., Plant Physiol., 87:671-674 (1988), all of which the entirety is herein incorporated by reference); Brassica (U.S. Pat. No. 5,463,174, the entirety of which is herein incorporated by reference); peanut (Cheng et al., Plant Cell Rep. 15:653-657 (1996), McKently et al., Plant Cell Rep. 14:699-703 (1995), all of which the entirety is herein incorporated by reference); papaya (Yang et al., (1996), the entirety of which is herein incorporated by reference); pea (Grant et al., Plant Cell Rep. 15:254-258, (1995), the entirety of which is herein incorporated by reference).

[0190] Transformation of monocotyledons using electroporation, particle bombardment, and Agrobacterium have also been reported. Transformation and plant regeneration have been achieved in asparagus (Bytebier et al., Proc. Natl. Acad. Sci. (U.S.A.) 84:5345, (1987), the entirety of which is herein incorporated by reference); barley (Wan and Lemaux, Plant Physiol 104:37, (1994), the entirety of which is herein incorporated by reference); maize (Rhodes et al., Science 240:204, (1988), Gordon-Kamm et al., Plant Cell, 2:603, (1990), Fromm et al., Bio/Technology 8:833, (1990), Koziel et al., Bio/Technology 11:194, (1993), Armstrong et al., Crop Science 35:550-557, (1995), all of which the entirety is herein incorporated by reference); oat (Somers et al., Bio/Technology, 10:1589, (1992), the entirety of which is herein incorporated by reference); orchardgrass (Horn et al., Plant Cell Rep. 7:469, (1988), the entirety of which is herein incorporated by reference); rice (Toriyama et al., Theor Appl. Genet. 205:34, (1986); Park et al., Plant Mol. Biol., 32:1135-1148, (1996); Abedinia et al., Aust. J. Plant Physiol. 24:133-141, (1997); Zhang and Wu, Theor. Appl. Genet. 76:835, (1988); Zhang et al., Plant Cell Rep. 7:379, (1988); Battraw and Hall, Plant Sci. 86:191-202, (1992); Christou et al., Bio/Technology 9:957, (1991), all of which the entirety is herein incorporated by reference); sugarcane (Bower and Birch, Plant J. 2:409, (1992), the entirety of which is herein incorporated by reference); tall fescue (Wang et al., Bio/Technology 10:691, (1992), the entirety of which is herein incorporated by reference), and wheat (Vasil et al., Bio/Technology 10:667, (1992), the entirety of which is herein incorporated by reference; U.S. Pat. No. 5,631,152, the entirety of which is herein incorporated by reference.

[0191] Assays for gene expression based on the transient expression of cloned nucleic acid constructs have been developed by introducing the nucleic acid molecules into plant cells by polyethylene glycol treatment, electroporation, or particle bombardment (Marcotte, et al., Nature, 335:454-457 (1988), the entirety of which is herein incorporated by reference; Marcotte, et al., Plant Cell, 1:523-532 (1989), the entirety of which is herein incorporated by reference; McCarty, et al., Cell 66:895-905 (1991), the entirety of which is herein incorporated by reference; Hattori, et al., Genes Dev. 6:609-618 (1992), the entirety of which is herein incorporated by reference; Goff, et al., EMBO J. 9:2517-2522 (1990), the entirety of which is herein incorporated by reference). Transient expression systems may be used to functionally dissect gene constructs (See generally, Mailga et al., Methods in Plant Molecular Biology, Cold Spring Harbor Press (1995)).

[0192] Any of the nucleic acid molecules of the present invention may be introduced into a plant cell in a permanent or transient manner in combination with other genetic elements such as vectors, promoters enhancers etc. Further any of the nucleic acid molecules of the present invention may be introduced into a plant cell in a manner that allows for over expression of the protein or fragment thereof encoded by the nucleic acid molecule.

[0193] Nucleic acid molecules of the present invention may be used in cosuppression. Cosuppression is the reduction in expression levels, usually at the level of RNA, of a particular endogenous gene or gene family by the expression of a homologous sense construct that is capable of transcribing mRNA of the same strandedness as the transcript of the endogenous gene (Napoli et al., Plant Cell 2:279-289 (1990), the entirety of which is herein incorporated by reference; van der Krol et al., Plant Cell 2:291-299 (1990), the entirety of which is herein incorporated by reference). Cosuppression may result from stable transformation with a single copy nucleic acid molecule that is homologous to a nucleic acid sequence found with the cell (Prolls and Meyer, Plant J. 2:465-475 (1992), the entirety of which is herein incorporated by reference) or with multiple copies of a nucleic acid molecule that is homologous to a nucleic acid sequence found with the cell (Mittlesten et al:, Mol. Gen. Genet. 244: 325-330 (1994), the entirety of which is herein incorporated by reference). Genes, even though different, linked to homologous promoters may result in the cosuppression of the linked genes (Vaucheret, CR. Acad. Sci. III 316: 1471-1483 (1993), the entirety of which is herein incorporated by reference).

[0194] This technique has, for example been applied to generate white flowers from red petunia and tomatoes that do not ripen on the vine. Up to 50% of petunia transformants that contained a sense copy of the chalcone synthase (CHS) gene produced white flowers or floral sectors; this was as a result of the post-transcriptional loss of mRNA encoding CHS (Flavell, Proc. Natl. Acad. Sci. (U.S.A.) 91:3490-3496 (1994)), the entirety of which is herein incorporated by reference). Cosuppression may require the coordinate transcription of the transgene and the endogenous gene, and can be reset by a developmental control mechanism (Jorgensen, Trends Biotechnol, 8:340344 (1990), the entirety of which is herein incorporated by reference; Meins and Kunz, In: Gene Inactivation and Homologous Recombination in Plants (Paszkowski, J., ed.), pp. 335-348. Kluwer Academic, Netherlands (1994), the entirety of which is herein incorporated by reference).

[0195] It is understood that one or more of the nucleic acids of the present invention comprising SEQ ID NO:1 or complement thereof through SEQ ID NO:304905 or complement thereof, may be introduced into a plant cell and transcribed using an appropriate promoter with such transcription resulting in the co-suppression of an endogenous protein.

[0196] Nucleic acid molecules of the present invention may be used to reduce gene function. Antisense approaches are a way of preventing or reducing gene function by targeting the genetic material (Mol et al., FEBS Lett. 268:427-430 (1990), the entirety of which is herein incorporated by reference). The objective of the antisense approach is to use a sequence complementary to the target gene to block its expression and create a mutant cell line or organism in which the level of a single chosen protein is selectively reduced or abolished. Antisense techniques have several advantages over other ‘reverse genetic’ approaches. The site of inactivation and its developmental effect can be manipulated by the choice of promoter for antisense genes or by the timing of external application or microinjection. Antisense can manipulate its specificity by selecting either unique regions of the target gene or regions where it shares homology to other related genes (Hiatt et al., In Genetic Engineering, Setlow (ed.), Vol. 11, New York: Plenum 49-63 (1989), the entirety of which is herein incorporated by reference).

[0197] The principle of regulation by antisense RNA is that RNA that is complementary to the target mRNA is introduced into cells, resulting in specific RNA:RNA duplexes being formed by base pairing between the antisense substrate and the target mRNA (Green et al., Annu. Rev. Biochem. 55:569-597 (1986), the entirety of which is herein incorporated by reference). Under one embodiment, the process involves the introduction and expression of an antisense gene sequence. Such a sequence is one in which part or all of the normal gene sequences are placed under a promoter in inverted orientation so that the ‘wrong’ or complementary strand is transcribed into a noncoding antisense RNA that hybridizes with the target mRNA and interferes with its expression (Takayama and Inouye, Crit. Rev. Biochem. Mol. Biol. 25:155-184 (1990), the entirety of which is herein incorporated by reference). An antisense vector is constructed by standard procedures and introduced into cells by transformation, transfection, electroporation, microinjection, or by infection, etc. The type of transformation and choice of vector will determine whether expression is transient or stable. The promoter used for the antisense gene may influence the level, timing, tissue, specificity, or inducibility of the antisense inhibition.

[0198] It is understood that protein synthesis activity in a plant cell may be reduced or depressed by growing a transformed plant cell containing a nucleic acid molecule of the present invention.

[0199] Antibodies have been expressed in plants (Hiatt et al., Nature 342:76-78 (1989), the entirety of which is herein incorporated by reference; Conrad and Fielder, Plant Mol. Biol. 26:1023-1030 (1994), the entirety of which is herein incorporated by reference). Cytoplasmic expression of a scFv (single-chain Fv antibodies) has been reported to delay infection by artichoke mottled crinkle virus. Transgenic plants that express antibodies directed against endogenous proteins may exhibit a physiological effect (Philips et al., EMBO J. 16:4489-4496 (1997), the entirety of which is herein incorporated by reference; Marion-Poll, Trends in Plant Science 2:447-448 (1997), the entirety of which is herein incorporated by reference). For example, expressed anti-abscisic antibodies reportedly result in a general perturbation of seed development (Philips et al., EMBO J. 16:4489-4496 (1997)).

[0200] Nucleic acid molecules of the present invention may be used as antibodies. Antibodies that are catalytic may also be expressed in plants (abzymes). The principle behind abzymes is that since antibodies may be raised against many molecules, this recognition ability can be directed toward generating antibodies that bind transition states to force a chemical reaction forward (Persidas, Nature Biotechnology 15:1313-1315 (1997), the entirety of which is herein incorporated by reference; Baca et al., Ann. Rev. Biophys. Biomol. Struct. 26:461-493 (1997), the entirety of which is herein incorporated by reference). The catalytic abilities of abzymes may be enhanced by site directed mutagenesis. Examples of abzymes are, for example, set forth in U.S. Pat. No. 5,658,753; U.S. Pat. No. 5,632,990; U.S. Pat. No. 5,631,137; U.S. Pat. No. 5,602,015; U.S. Pat. No. 5,559,538; U.S. Pat. No. 5,576,174; U.S. Pat. No. 5,500,358; U.S. Pat. No. 5,318,897; U.S. Pat. No. 5,298,409; U.S. Pat. No. 5,258,289 and U.S. Pat. No. 5,194,585, all of which are herein incorporated in their entirety.

[0201] It is understood that any of the antibodies of the present invention may be expressed in plants and that such expression can result in a physiological effect. It is also understood that any of the expressed antibodies may be catalytic.

[0202] In addition to the above discussed procedures, practitioners are familiar with the standard resource materials which describe specific conditions and procedures for the construction, manipulation and isolation of macromolecules (e.g., DNA molecules, plasmids, etc.), generation of recombinant organisms and the screening and isolating of clones, (see for example, Sambrook et al., Molecular Cloning: A Laboratory Manual, Cold Spring Harbor Press (1989); Mailga et al., Methods in Plant Molecular Biology, Cold Spring Harbor Press (1995), the entirety of which is herein incorporated by reference; Birren et al., Genome Analysis: Analyzing DNA, 1, Cold Spring Harbor, N.Y., the entirety of which is herein incorporated by reference).

Computer Media

[0203] One or more of the nucleotide sequence provided in SEQ ID NO: 1 through SEQ ID NO: 304905 or complements thereof can be “provided” in a variety of media to facilitate use. Such a medium can also provide a subset thereof in a form that allows a skilled artisan to examine the sequences. be recorded on computer readable media. As used herein, “computer readable media” refers to any medium that can be read and accessed directly by a computer. Such media include, but are not limited to: magnetic storage media, such as floppy discs, hard disc, storage medium, and magnetic tape: optical storage media such as CD-ROM; electrical storage media such as RAM and ROM; and hybrids of these categories such as magnetic/optical storage media. A skilled artisan can readily appreciate how any of the presently known computer readable mediums can be used to create a manufacture comprising computer readable medium having recorded thereon a nucleotide sequence of the present invention.

[0204] As used herein, “recorded” refers to a process for storing information on computer readable medium. A skilled artisan can readily adopt any of the presently known methods for recording information on computer readable medium to generate media comprising the nucleotide sequence information of the present invention. A variety of data storage structures are available to a skilled artisan for creating a computer readable medium having recorded thereon a nucleotide sequence of the present invention. The choice of the data storage structure will generally be based on the means chosen to access the stored information. In addition, a variety of data processor programs and formats can be used to store the nucleotide sequence information of the present invention on computer readable medium. The sequence information can be represented in a word processing text file, formatted in commercially-available software such as WordPerfect and Microsoft Word, or represented in the form of an ASCII file, stored in a database application, such as DB2, Sybase, Oracle, or the like. A skilled artisan can readily adapt any number of data processor structuring formats (e.g., text file or database) in order to obtain computer readable medium having recorded thereon the nucleotide sequence information of the present invention.

[0205] By providing one or more of nucleotide sequences of the present invention, a skilled artisan can routinely access the sequence information for a variety of purposes. Computer software is publicly available which allows a skilled artisan to access sequence information provided in a computer readable medium. The examples which follow demonstrate how software which implements the BLAST (Altschul et al., J. Mol. Biol. 215:403-410 (1990)) and BLAZE (Brutlag et al., Comp. Chem. 17:203-207 (1993), the entirety of which is herein incorporated by reference) search algorithms on a Sybase system can be used to identify open reading frames (ORFs) within the genome that contain homology to ORFs or proteins from other organisms. Such ORFs are protein-encoding fragments within the sequences of the present invention and are useful in producing commercially important proteins such as enzymes used in amino acid biosynthesis, metabolism, transcription, translation, RNA processing, nucleic acid and a protein degradation, protein modification, and DNA replication, restriction, modification, recombination, and repair.

[0206] The present invention further provides systems, particularly computer-based systems, which contain the sequence information described herein. Such systems are designed to identify commercially important fragments of the nucleic acid molecule of the present invention. As used herein, “a computer-based system” refers to the hardware means, software means, and data storage means used to analyze the nucleotide sequence information of the present invention. The minimum hardware means of the computer-based systems of the present invention comprises a central processing unit (CPU), input means, output means, and data storage means. A skilled artisan can readily appreciate that any one of the currently available computer-based system are suitable for use in the present invention.

[0207] As indicated above, the computer-based systems of the present invention comprise a data storage means having stored therein a nucleotide sequence of the present invention and the necessary hardware means and software means for supporting and implementing a search means. As used herein, “data storage means” refers to memory that can store nucleotide sequence information of the present invention, or a memory access means which can access manufactures having recorded thereon the nucleotide sequence information of the present invention. As used herein, “search means” refers to one or more programs which are implemented on the computer-based system to compare a target sequence or target structural motif with the sequence information stored within the data storage means. Search means are used to identify fragments or regions of the sequence of the present invention that match a particular target sequence or target motif. A variety of known algorithms are disclosed publicly and a variety of commercially available software for conducting search means are available and can be used in the computer-based systems of the present invention. Examples of such software include, but are not limited to, MacPattern (EMBL), BLASTIN and BLASTIX (NCBIA). One of the available algorithms or implementing software packages for conducting homology searches can be adapted for use in the present computer-based systems.

[0208] The most preferred sequence length of a target sequence is from about 10 to 100 amino acids or from about 30 to 300 nucleotide residues. However, it is well recognized that during searches for commercially important fragments of the nucleic acid molecules of the present invention, such as sequence fragments involved in gene expression and protein processing, may be of shorter length.

[0209] As used herein, “a target structural motif,” or “target motif,” refers to any rationally selected sequence or combination of sequences in which the sequence(s) are chosen based on a three-dimensional configuration which is formed upon the folding of the target motif. There are a variety of target motifs known in the art. Protein target motifs include, but are not limited to, enzymatic active sites and signal sequences. Nucleic acid target motifs include, but are not limited to, promoter sequences, cis elements, hairpin structures and inducible expression elements (protein binding sequences).

[0210] Thus, the present invention further provides an input means for receiving a target sequence, a data storage means for storing the target sequences of the present invention sequence identified using a search means as described above, and an output means for outputting the identified homologous sequences. A variety of structural formats for the input and output means can be used to input and output information in the computer-based systems of the present invention. A preferred format for an output means ranks fragments of the sequence of the present invention by varying degrees of homology to the target sequence or target motif. Such presentation provides a skilled artisan with a ranking of sequences which contain various amounts of the target sequence or target motif and identifies the degree of homology contained in the identified fragment.

[0211] A variety of comparing means can be used to compare a target sequence or target motif with the data storage means to identify sequence fragments sequence of the present invention. For example, implementing software which implement the BLAST and BLAZE algorithms (Altschul et al., J. Mol. Biol. 215:403-410 (1990)) can be used to identify open frames within the nucleic acid molecules of the present invention. A skilled artisan can readily recognize that any one of the publicly available homology search programs can be used as the search means for the computer-based systems of the present invention.

[0212] Having now generally described the invention, the same will be more readily understood through reference to the following examples which are provided by way of illustration, and are not intended to be limiting of the present invention, unless specified.

### EXAMPLE 1

[0213] BACs are stable, non-chimeric cloning systems having genomic fragment inserts (100-300 kb) and their DNA can be prepared for most types of experiments including DNA sequencing. BAC vector, pBeloBAC11, is derived from the endogenous E. coli F-factor plasmid, which contains genes for strict copy number control and unidirectional origin of DNA replication. Additionally, pBeloBAC11 has three unique restriction enzyme sites (Hind III, Bam HI and Sph 1) located within the LacZ gene which can be used as cloning sites for megabase-size plant DNA. Indigo, another BAC vector contains Hind III and Eco RI cloning sites. This vector also contains a random mutation in the LacZ gene that allows for darker blue colonies.

[0214] As an alternative, the P1-derived artificial chromosome (PAC) can be used as a large DNA fragment cloning vector (Ioannou, et al., Nature Genet. 6:84-89 (1994), the entirety of which is herein incorporated by reference; Suzuki, et al., Gene 199:133-137 (1997), the entirety of which is herein incorporated by reference). The PAC vector has most of the features of the BAC system, but also contains some of the elements of the bacteriophage P1 cloning system.

[0215] BAC libraries are generated by ligating size-selected restriction digested DNA with pBeloBAC11 followed by electroporation into E. coli. BAC library construction and characterization is extremely efficient when compared to YAC (yeast artificial chromosome) library construction and analysis, particularly because of the chimerism associated with YACs and difficulties associated with extracting YAC DNA.

[0216] There are two general methods for preparing megabase-size DNA from plants. The protoplast method yields megabase-size DNA of high quality with minimal breakage.

[0217] The process involves preparing young leaves which are manually feathered with a razor-blade before being incubated for four to five hours with cell-wall-degrading enzymes.

[0218] The second method developed by Zhange et al., Plant J. 7:175-184 (1995) the entirety of which is herein incorporated by reference is a universal nuclei method that works well for several divergent plant taxa. Fresh or frozen tissue is homogenized with a blender or mortar and pestle. Nuclei are then isolated and embedded. DNA is prepared by the nucleic method often more concentrated and is reported to contain lower amounts of chloroplast DNA than the protoplast method.

[0219] Once protoplasts or nuclei are produced, they are embedded in an agarose matrix as plugs or microbeads. The agarose provides a support matrix to prevent shearing of the DNA while allowing enzymes and buffers to diffuse into the DNA. The DNA is purified and manipulated in the agarose and is stable for more than one year at 4° C.

[0220] Once high molecular weight DNA has been prepared, it is fragmented to the desired size range. In general, DNA fragmentation utilizes two general approaches, 1) physical shearing and 2) partial digestion with a restriction enzyme that cuts relatively frequently within the genome. Since physical shearing is not dependent upon the frequency and distribution of particular restriction enzymes sites, this method should yield the most random distribution of DNA fragments. However, the ends of the sheared DNA fragments must be repaired and cloned directly or restriction enzyme sites added by the addition of synthetic linkers. Because of the subsequent steps required to clone DNA fragmented by shearing, most protocols fragment DNA by partial restriction enzyme digestion. The advantage of partial restriction enzyme digestion is that no further enzymatic modification of the ends of the restriction fragments are necessary. Four common techniques that can be used to achieve reproducible partial digestion of megabase-size DNA are 1) varying the concentration of the restriction enzyme, 2) varying the time of incubation with the restriction enzyme 3) varying the concentration of an enzyme cofactor (e.g., Mg²⁺) and 4) varying the ratio of endonuclease to methylase.

[0221] There are three cloning sites in pBeloBAC 11, but only Hind III and Bam HI produce 5′ overhangs for easy vector dephosphorylation. These two restriction enzymes are primarily used to construct BAC libraries. The optimal partial digestion conditions for megabase-size DNA are determined by wide and narrow window digestions. To optimize the optimum amount of Hind III, 1, 2, 3, 10, and 5-units of enzyme are each added to 50 ml aliquots of microbeads and incubated at 37° C. for 20 minutes

[0222] After partial digestion of megabase-size DNA, the DNA is run on a pulsed-field gel, and DNA in a size range of 100-500 kb is excised from the gel. This DNA is ligated to the BAC vector or subjected to a second size selection on a pulsed field gel under different running conditions. Studies have previously reported that two rounds of size selection can eliminate small DNA fragments co-migrating with the selected range in the first pulse-field fractionation. Such a strategy results in an increase in insert sizes and a more uniform insert size distribution. A practical approach to performing size selections is to first test for the number of clones/microliter of ligation and insert size from the first size selected material. If the numbers are good (500 to 2000 white colony/microliter of ligation) and the size range is also good (50 to 300 kb) then a second size selection is practical. When performing a second size selection one expects a 80 to 95% decrease in the number of recombinant clones per transformation.

[0223] Twenty to two hundred nanograms of the size-selected DNA is ligated to dephosphorylated BAC vector (molar ratio of 10 to 1 in BAC vector excess). Most BAC libraries use a molar ratio of 5 to 15:1 (size selected DNA:BAC vector).

[0224] Transformation is carried out by electroporation and the transformation efficiency for BACs is about 40 to 1,500 transformants from one microliter of ligation product or 20 to 1000 transformants/ng DNA.

[0225] Several tests can be carried out to determine the quality of a BAC library. Three basic tests to evaluate the quality include: the genome coverage of a BAC library-average insert size, average number of clones hybridizing with single copy probes and chloroplast DNA content.

[0226] The determination of the average insert size of the library is assessed in two ways. First, during library construction every ligation is tested to determine the average insert size by assaying 20-50 BAC clones per ligation. DNA is isolated from recombinant clones using a standard mini preparation protocol, digested with Not I to free the insert from the BAC vector and then sized using pulsed field gel electrophoresis (Maule, Molecular Biotechnology 9:107-126 (1998), the entirety of which is herein incorporated by reference).

[0227] To determine the genome coverage of the library, it is screened with single copy RFLP markers distributed randomly across the genome by hybridization. Microtiter plates containing BAC clones are spotted onto Hybond membranes. Bacteria from 48 or 72 plates are spotted twice onto one membrane resulting in 18,000 to 27,648 unique clones on each membrane in either a 4×4 or 5×5 orientation. Since each clone is present twice, false positives are easily eliminated and true positives are easily recognized and identified.

[0228] Finally, the chloroplast DNA content in the BAC library is estimated by hybridizing three chloroplast genes spaced evenly across the chloroplast genome to the library on high density hybridization filters.

[0229] There are strategies for isolating rare sequences within the genome. For example, higher plant genomes can range in size from 100 Mb/1C (Arabidopsis) to 15,966 Mb/C (Triticum aestivum), (Arumuganathan and Earle, Plant Mol Bio Rep. 9:208-219 (1991), the entirety of which is herein incorporated by reference). The number of clones required to achieve a given probability that any DNA sequence will be represented in a genomic library is N=(ln(1−P))/(ln(1−L/G)) where N is the number of clones required, P is the probability desired to get the target sequence, L is the length of the average clone insert in base pairs and G is the haploid genome length in base pairs (Clarke et al., Cell 9:91-100 (1976) the entirety of which is herein incorporated by reference).

[0230] The soybean BAC library of the present invention is constructed in the pBeloBAC11 or similar vector. Inserts are generated by partial Eco RI or other enzymatic digestion of DNA from the cultivar A3244. The library provides approximately twenty fold coverage of the soybean genome.

### EXAMPLE 2

[0231] Two basic methods can be used for DNA sequencing, the chain termination method of Sanger et al., Proc. Natl. Acad. Sci. (U.S.A.) 74:5463-5467 (1977), the entirety of which is herein incorporated by reference and the chemical degradation method of Maxam and Gilbert, Proc. Natl. Acad. Sci. (U.S.A.) 74:560-564 (1977), the entirety of which is herein incorporated by reference. Automation and advances in technology such as the replacement of radioisotopes with fluorescence-based sequencing have reduced the effort required to sequence DNA (Craxton, Methods, 2:20-26 (1991), the entirety of which is herein incorporated by reference; Ju et al., Proc. Natl. Acad. Sci. (U.S.A.) 92:4347-4351 (1995), the entirety of which is herein incorporated by reference; Tabor and Richardson, Proc. Natl. Acad. Sci. (U.S.A.) 92:6339-6343 (1995), the entirety of which is herein incorporated by reference). Automated sequencers are available from, for example, Pharmacia Biotech, Inc., Piscataway, N.J. (Pharmacia ALF), LI-COR, Inc., Lincoln, Nebr. (LI-COR 4,000) and Millipore, Bedford, Mass. (Millipore BaseStation).

[0232] In addition, advances in capillary gel electrophoresis have also reduced the effort required to sequence DNA and such advances provide a rapid high resolution approach for sequencing DNA samples (Swerdlow and Gesteland, Nucleic Acids Res. 18:1415-1419 (1990); Smith, Nature 349:812-813 (1991); Luckey et al., Methods Enzymol. 218:154-172 (1993); Lu et al., J. Chromatog. A. 680:497-501 (1994); Carson et al., Anal. Chem. 65:3219-3226 (1993); Huang et al., Anal. Chem. 64:2149-2154 (1992); Kheterpal et al., Electrophoresis 17:1852-1859 (1996); Quesada and Zhang, Electrophoresis 17:1841-1851 (1996); Baba, Yakugaku Zasshi 117:265-281 (1997), all of which are herein incorporated by reference in their entirety).

[0233] A number of sequencing techniques are known in the art, including fluorescence-based sequencing methodologies. These methods have the detection, automation and instrumentation capability necessary for the analysis of large volumes of sequence data. Currently, the 377 DNA Sequencer (Perkin-Elmer Corp., Applied Biosystems Div., Foster City, Calif.) allows the most rapid electrophoresis and data collection. With these types of automated systems, fluorescent dye-labeled sequence reaction products are detected and data entered directly into the computer, producing a chromatogram that is subsequently viewed, stored, and analyzed using the corresponding software programs. These methods are known to those of skill in the art and have been described and reviewed (Birren et al., Genome Analysis: Analyzing DNA, 1, Cold Spring Harbor, N.Y., the entirety of which is herein incorporated by reference).

[0234] 297 forward STCs are resequenced and the complex repeats within the these sequences are located. These forward STCS are designated: GM_{—}667_B2_H12_MF_{—}50, GM_{—}667_B2_H12_MF_{—}4BDT, GM_{—}667_B2_H12_MF_{—}40, GM_{—}667_B2_H11_MF_{—}50, GM_{—}667_B2_H11_MF_{—}4BDT, GM_{—}667_B2_H11_MF_{—}40, GM_{—}667_B2_H10_MF_{—}50, GM_{—}667_B2_H10_MF_{—}4BDT, GM_{—}667_B2_H10_MF_{—}40, GM_{—}667_B2_H09_MF_{—}35, GM_{—}667_B2_H08_MF_{—}50, GM_{—}667_B2_H08_MF_{—}40, GM_{—}667_B2_H08_MF_{—}35, GM_{—}667_B2_H07_MF_{—}4BDT, GM_{—}667_B2_H07_MF_{—}40, GM_{—}667_B2_H06_MF_{—}40, GM_{—}667_B2_H05_MF_{—}40, GM_{—}667_B2_H05_MF_{—}35, GM_{—}667_B2_H04_MF_{—}50, GM_{—}667_B2_H04_MF_{—}4BDT, GM_{—}667_B2_H04_MF_{—}40, GM_{—}667_B2_H03_MF_{—}40, GM_{—}667_B2_H02_MF_{—}50, GM_{—}667_B2_H02_MF_{—}4BDT, GM_{—}667_B2_H02_MF_{—}40, GM_{—}667_B2_H02_MF_{—}35, GM_{—}667_B2_H01_MF_{—}40, GM_{—}667_B2_H01_MF_{—}35, GM_{—}667_B2_G12_MF_{—}50, GM_{—}667_B2_G12_MF_{—}40, GM_{—}667_B2_G11_MF_{—}40, GM_{—}667_B2_G10_MF_{—}50, GM_{—}667_B2_G10_MF_{—}4BDT, GM_{—}667_B2_G10_MF_{—}35, GM_{—}667_B2_G09_MF_{—}4BDT, GM_{—}667_B2_G09_MF_{—}40, GM_{—}667_B2_G09_MF_{—}35, GM_{—}667_B2_G08_MF_{—}50, GM_{—}667_B2_G08_MF_{—}4BDT, GM_{—}667_B2_G08_MF_{—}40, GM_{—}667_B2_G07_MF_{—}4BDT, GM_{—}667_B2_G07_MF_{—}35, GM_{—}667_B2_G06_MF_{—}40, GM_{—}667_B2_G05_MF_{—}4BDT, GM_{—}667_B2_G05_MF_{—}40, GM_{—}667_B2_G05_MF_{—}35, GM_{—}667_B2_G04_MF_{—}50, GM_{—}667_B2_G04_MF_{—}4BDT, GM_{—}667_B2_G04_MF_{—}40, GM_{—}667_B2_G03_MF_{—}40, GM_{—}667_B2_G02_MF_{—}50, GM_{—}667_B2_G02_MF_{—}4BDT, GM_{—}667_B2_G02_MF_{—}40, GM_{—}667_B2_G02_MF_{—}35, GM_{—}667_B2_G01_MF_{—}4BDT, GM_{—}667_B2_G01_MF_{—}40, GM_{—}667_B2_G01_MF_{—}35, GM_{—}667_B2_F11_MF_{—}50, GM_{—}667_B2_F11_MF_{—}4BDT, GM_{—}667_B2_F11_MF_{—}40, GM_{—}667_B2_F10_MF_{—}4BDT, GM_{—}667_B2_F10_MF_{—}40, GM_{—}667_B2_F10MF_{—}35, GM_{—}667_B2_F09_MF_{—}50, GM_{—}667_B2_F09_MF_{—}4BDT, GM_{—}667_B2_F09_MF_{—}40, GM_{—}667_B2_F08_MF_{—}50, GM_{—}667_B2_F08_MF_{—}40, GM_{—}667_B2_F07_MF_{—}50, GM_{—}667_B2_F07_MF_{—}4BDT, GM_{—}667_B2_F07_MF_{—}40, GM_{—}667_B2_F07_MF_{—}35, GM_{—}667_B2_F06_MF_{—}40, GM_{—}667_B2_F05_MF_{—}4BDT, GM_{—}667_B2_F05_MF_{—}40, GM_{—}667_B2_F04_MF_{—}50, GM_{—}667_B2_F04_MF_{—}4BDT, GM_{—}667_B2_F04_MF_{—}40, GM_{—}667_B2_F04_MF_{—}35, GM_{—}667_B2_F03_MF_{—}40, GM_{—}667_B2_F02_MF_{—}4BDT, GM_{—}667_B2_F02_MF_{—}35, GM_{—}667_B2_F01_MF_{—}35, GM_{—}667_B2_E12_MF_{—}50, GM_{—}667_B2_E12_MF_{—}4BDT, GM_{—}667_B2_E12_MF_{—}40, GM_{—}667_B2_E10_MF_{—}50, GM_{—}667_B2_E10_MF_{—}4BDT, GM_{—}667_B2_E10_MF_{—}40, GM_{—}667_B2_E09_MF_{—}50, GM_{—}667_B2_E09_MF_{—}4BDT, GM_{—}667_B2_E09_MF_{—}40, GM_{—}667_B2_E08_MF_{—}40, GM_{—}667_B2_E07_MF_{—}4BDT, GM_{—}667_B2_E07_MF_{—}40, GM_{—}667_B2_E07_MF_{—}35, GM_{—}667_B2_E06_MF_{—}50, GM_{—}667_B2_E06_MF_{—}40, GM_{—}667_B2_E05_MF_{—}50, GM_{—}667_B2_E05_MF_{—}40, GM_{—}667_B2_E04_MF_{—}4BDT, GM_{—}667_B2_E04_MF_{—}40, GM_{—}667_B2_E03_MF_{—}4BDT, GM_{—}667_B2_E03_MF_{—}40, GM_{—}667_B2_E03_MF_{—}35, GM_{—}667_B2_E02_MF_{—}50, GM_{—}667_B2_E02_MF_{—}4BDT, GM_{—}667_B2_E02_MF_{—}40, GM_{—}667_B2_E02_MF_{—}35, GM_{—}667_B2_E01_MF_{—}4BDT, GM_{—}667_B2_E01_MF_{—}40, GM_{—}667_B2_E01_MF_{—}35, GM_{—}667_B2_D12_MF_{—}4BDT, GM_{—}667_B2_D12_MF_{—}40, GM_{—}667_B2_D11_MF_{—}50, GM_{—}667_B2_D11_MF_{—}4BDT, GM_{—}667_B2_D11MF_{—}40, GM_{—}667_B2_D11_MF_{—}35, GM_{—}667_B2_D10_MF_{—}50, GM_{—}667_B2_D10_MF_{—}40, GM_{—}667_B2_D10_MF_{—}35, GM_{—}667_B2_D09_MF_{—}4BDT, GM_{—}667_B2_D09_MF_{—}40, GM_{—}667_B2_D08_MF_{—}40, GM_{—}667_B2_D06_MF_{—}4BDT, GM_{—}667_B2_D06_MF_{—}40, GM_{—}667_B2_D06_MF_{—}35, GM_{—}667_B2_D05_MF_{—}50, GM_{—}667_B2_D05_MF_{—}40, GM_{—}667_B2_D04_MF_{—}50, GM_{—}667_B2_D04_MF_{—}4BDT, GM_{—}667_B2_D04_MF_{—}40, GM_{—}667_B2_D04_MF_{—}35, GM_{—}667_B2_D03_MF_{—}40, GM_{—}667_B2_D03_MF_{—}35, GM_{—}667_B2_D02_MF_{—}4BDT, GM_{—}667_B2_D02_MF_{—}40, GM_{—}667_B2_D02_MF_{—}35, GM_{—}667_B2_D01_MF_{—}40, GM_{—}667_B2_D01_MF_{—}35, GM_{—}667_B2_C12_MF_{—}50, GM_{—}667_B2_C12_MF_{—}4BDT, GM_{—}667_B2_C12_MF_{—}40, GM_{—}667_B2_C11_MF_{—}40, GM_{—}667_B2_C10_MF_{—}40, GM_{—}667_B2_C09_MF_{—}50, GM_{—}667_B2_C09_MF_{—}4BDT, GM_{—}667_B2_C09_MF_{—}40, GM_{—}667_B2_C08_MF_{—}50, GM_{—}667_B2_C08_MF_{—}40, GM_{—}667_B2_C07_MF_{—}4BDT, GM_{—}667_B2_C07_MF_{—}40, GM_{—}667_B2_C07_MF_{—}35, GM_{—}667_B2_C06_MF_{—}50, GM_{—}667_B2_C06_MF_{—}40, GM_{—}667_B2_C05_MF_{—}50, GM_{—}667_B2_C05_MF_{—}40, GM_{—}667_B2_C04_MF_{—}4BDT, GM_{—}667_B2_C04_MF_{—}40, GM_{—}667_B2_C04_MF_{—}35, GM_{—}667_B2_C03_MF_{—}35, GM_{—}667_B2_C02_MF_{—}40, GM_{—}667_B2_C02_MF_{—}35, GM_{—}667_B2_C01_MF_{—}40, GM_{—}667_B2_C01_MF_{—}35, GM_{—}667_B2_B12_MF_{—}4BDT, GM_{—}667_B2_B12_MF_{—}40, GM_{—}667_B2_B11_MF_{—}4BDT, GM_{—}667_B2_B11_MF_{—}40, GM_{—}667_B21B11_MF_{—}35, GM_{—}667_B2_B10_MF_{—}50, GM_{—}667_B2_B10_MF_{—}40, GM_{—}667_B2_B09_MF_{—}50, GM_{—}667_B2_B09_MF_{—}4BDT, GM_{—}667_B2_B09_MF_{—}40, GM_{—}667_B2_B07_MF_{—}4BDT, GM_{—}667_B2_B07_MF_{—}40, GM_{—}667_B2_B07_MF_{—}35, GM_{—}667_B2_B06_MF_{—}40, GM_{—}667_B2_B05_MF_{—}50, GM_{—}667_B2_B05_MF_{—}4BDT, GM_{—}667_B2_B05_MF_{—}40, GM_{—}667_B2_B04_MF_{—}35, GM_{—}667_B2_B03_MF_{—}40, GM_{—}667_B2_B03_MF_{—}35, GM_{—}667_B2_B02_MF_{—}4BDT, GM_{—}667_B2_B02_MF_{—}40, GM_{—}667_B2_B02_MF_{—}35, GM_{—}667_B2_A12_MF_{—}4BDT, GM_{—}667_B2_A12_MF_{—}40, GM_{—}667_B2_A11_MF_{—}4BDT, GM_{—}667_B2_A11_MF_{—}40, GM_{—}667_B2_A11_MF_{—}35, GM_{—}667_B2_A10_MF_{—}40, GM_{—}667_B2_A10_MF_{—}35, GM_{—}667_B2_A09_MF_{—}50, GM_{—}667_B2_A09_MF_{—}40, GM_{—}667_B2_A07_MF_{—}50, GM_{—}667_B2_A07_MF_{—}4BDT, GM_{—}667_B2_A07_MF_{—}40, GM_{—}667_B2_A07_MF_{—}35, GM_{—}667_B2_A06_MF_{—}40, GM_{—}667_B2_A06_MF_{—}35, GM_{—}667_B2_A05_MF_{—}50, GM_{—}667_B2_A05_MF_{—}4BDT, GM_{—}667_B2_A05_MF_{—}40, GM_{—}667_B2_A04_MF_{—}50, GM_{—}667_B2_A04_MF_{—}4BDT, GGM_{—}667_B2_A03_MF_{—}40, GM_{—}57_B2_C12_T7, GM_{—}57_B2_A0_T7, GM_{—}57_B2_A03_T7, GM_{—}57_B2_A05_T7, GM_{—}57_B2_A08_T7, GM_{—}57_B2_A09_T7, GM_{—}57_B2_A10_T7, GM_{—}57_B2_A12_T7, GM_{—}57_B2_B01_T7, GM_{—}57_B2_B02_T7, GM_{—}57_B2_B03_T7, GM_{—}57_B2_B04_T7, GM_{—}57_B2_B05_T7, GM_{—}57_B2_B06_T7, GM_{—}57_B2_B07_T7, GM_{—}57_B2_B08_T7, GM_{—}57_B2_B09_T7, GM_{—}57_B2_B11_T7, GM_{—}57_B2_B12_T7, GM_{—}57_B2_C01_T7, GM_{—}57_B2_C02_T7, GM_{—}57_B2_C03_T7, GM_{—}57_B2_C04_T7, GM_{—}57_B2_C05_T7, GM_{—}57_B2_C07_T7, GM_{—}57_B2_C08_T7, GM_{—}57_B2_C10_T7, GM_{—}57_B2_D01_T7, GM_{—}57_B2_D02_T7, GM_{—}57_B2_D03_T7, GM_{—}57_B2_D04_T7, GM_{—}57_B2_D05_T7, GM_{—}57_B2_D06_T7, GM_{—}57_B2_D07_T7, GM_{—}57_B2_D08_T7, GM_{—}57_B2_D10_T7, GM_{—}57_B2_D11_T7, GM_{—}57_B2_D12_T7, GM_{—}57_B2_E01_T7, GM_{—}57_B2_E02_T7, GM_{—}57_B2_E03_T7, GM_{—}57_B2_E04_T7, GM_{—}57_B2_E05_T7, GM_{—}57_B2_E06_T7, GM_{—}57_B2_E07_T7, GM_{—}57_B2_E08_T7, GM_{—}57_B2_E10_T7, GM_{—}57_B2_E11_T7, GM_{—}57_B2_E12_T7, GM_{—}57_B2_F01_T7, GM_{—}57_B2_F02_T7, GM_{—}57_B2_F03_T7, GM_{—}57_B2_F04_T7, GM_{—}57_B2_F05_T7, GM_{—}57_B2_F08_T7, GM_{—}57_B2_F09_T7, GM_{—}57_B2_F11_T7, GM_{—}57_B2_F12_T7, GM_{—}57_B2_G01_T7, GM_{—}57_B2_G02_T7, GM_{—}57_B2_G03_T7, GM_{—}57_B2_G04_T7, GM_{—}57_B2_G05_T7, GM_{—}57_B2_G06_T7, GM_{—}57_B2_G07_T7, GM_{—}57_B2_G08_T7, GM_{—}57_B2_G09_T7, GM_{—}57_B2_G10_T7, GM_{—}57_B2_G12_T7, GM_{—}57_B2_H01_T7, GM_{—}57_B2_H02_T7, GM_{—}57_B2_H03_T7, GM_{—}57_B2_H04_T7, GM_{—}57_B2_H05_T7, GM_{—}57_B2_H06_T7, GM_{—}57_B2_H08_T7, GM_{—}57_B2_H11_T7, GM_{—}57_B2_H12_T7, GM_{—}707_A2_D05_T7, GM_{—}707_A2_D08_T7, GM_{—}707_A2_D12_T7, GM_{—}707_A2_F08_T7, GM_{—}707_A2_G01_T7, GM_{—}707_A2_G06_T7, GM_{—}707_A2_G08_T7, GM_{—}707_A2_G11_T7, GM_{—}707_A2_H06_T7, GM_{—}707_A2_H07_T7. The clones names corresponding to these STCs are determined by truncation before the “_{—T}7” or the first “_{—MF”.}

### EXAMPLE 3

[0235] To identify sequences containing microsatellites or simple sequence repeats (SSR), a SSR repeat pattern library is generated by using a Perl program, SSR_{—generator.pl, developed at Monsanto. The library contains repeat patterns of di-, tri-, tetra-, penta- and hexa- nucleotide repeats, a total of} 5421 patterns. The length of di-, tri-, tetra-, penta- and hexa- nucleotide repeat units were 18, 12, 9, 5 and 4, respectively. These repeat patterns are used to search against the BAC-end sequence databases by the BLASTN program. If the search is performed on both strands, complementary and replicated patterns of an SSR library are removed from the library to avoid redundancy of SSRs. For di-nucleotide repeats, there are four unique patterns, i.e. (CA)n, (CT)n, (CG)n and (AT)n. Product scores are used as a criteria to extract potential SSRs from BAC-ends. If a product score is equal or greater than 90, the sequences are further examined.

[0236] The SSR-containing sequences identified from BAC ends are searched against each other as well as the existing SSR collections by using BLASTN, and clustering of the sequences is performed by using CLUSTER2, a tool developed at Monsanto. The minimal match-length is set to 100 base pairs. Any redundant sequences are removed and the unique ones are then passed through a visible inspection to further remove those with not enough flanking sequences for primer design and those with substantial ambiguous nucleotides.

[0237] Primers are designed from good quality unique sequences. A public available primer design software program, PRIMER 3, (Cambridge, Mass.) is used. PRIMER 3 can be accessed though the internet at genome.wi.mit.edu/cgi-bin/primer/primer3.cgi. Default parameters are used except those for product size and primer size are changed. Product Size is Min: 80, Opt: 100, Max: 120, while Primer Size is Min: 18, Opt: 22 and Max: 27. Oligos are synthesized by Genosis Biotechnologies, Inc (Houston, Tex.).

[0238] The above protocols are used to develop primers from Sequence id GM_M02_A2_B07_MR_MR containing the following nucleotide composition:

AGGCGTTTTNCCTTGATACCTTCGNAGGTCCANCCTTTTNCTTGCTGTAT
CGACTCATTAACACCAAGCTCGGTGAGCACTCTGAAGATTATGACAACTT
TCGNTGATCTTTTTGTCATCGATATTNTAGNAGAGACCAATCTTTCTTCT
TCAAATGTCGCTCATGATATTTATTGTAATTATCTTCAATGTATGTCCAA
AAAGTTAACCTTTTTTGGACCCCCACAATAGAAATCTTTGAAATATTTAG
CCATGTGTTGGCAAGCCATTCATATTTCTTTGCGGAGAAACATGATCTAT
TGTGTCTTTCGGATGCTTCTTCTATGTcttcttcttcttcttcttcttct
tcttcttcttCATTGACCACAATATTATCCAACTCAACTTAGGTGCAAAA
TGGTGGAATTTGAGACTTTGACGCANAGTCAGATGGTGCGTCATGCTCTT
TCATTACATTGGACATCATNTACTACCCTTTGAAGACCCTCGATCCATGG
AAGGGTTAATTGGTG

[0239] This sequence contains CTT dinucleotide repeats with a repeat unit of 11. Using the Primer 3 program, two primers are selected: SER157F GTGTCTTTCGGATGCTTCTTCT and SER157R CACCATTTTGCACCTAAGTTGA. When these two primers are used to amplify genomic DNAs from eight different varieties, Minsoy, Noir, PIC, HS-1, A3244, H6686, A0868 and H5088, three alleles are detected. Sizes of these alleles ranged from 80 to 110 bp The size variation in the PCR products result from repeat numbers in different varieties.

PCR Reaction Conditions

[0240] Genomic DNA is isolated from young leaves of Glycine max or Glycine soja plants. Two leaf discs are collected (approximately 40 mg) from a healthy leaf and stored on wet ice or at 4° C. Tissue samples are then freeze-dried and stored at −20° C. or −80° C. The frozen samples are kept as dry as possible and sealed from contact with the atmosphere. The freeze-dried samples from −20° C. or −80° C., are allowed to warm up to room temperature prior to unsealing or opening. One leaflet (or 2 leaf discs) is inserted into an 1.5 ml Eppendorf tube, placed on dry ice, and crushed with a wooden dowel. Approximately 200 μl of microprep buffer (25 ml extraction buffer (350 mM sorbitol, 100 mM Tris-base, 5 mM EDTA-Na₂), 25 ml nuclei lysis buffer (1M Tris/HCl, 0.5 M EDTA, 5 M NaCl, 2% CTAB), 10 ml 5% sarkosyl, 0.1 g Na bisulfite) is added to each sample. The sample is then homogenized. An additional 550 μl of microprep buffer is added, vortexed for about 30-60 seconds, and incubated at 65° C. for about 60 minutes. About 700 μl chloroform/isoamyl (24:1) is added, mixed well for about 10-30 seconds. Centrifugation of the tubes is performed at approximately 10,000 rpm for 5 minutes in a microcentrifuge. The aqueous phase is transferred into a new tube and RNA is removed from the extract by the addition of 30 μl of RNase (10 mg/ml) to the aqueous phase and incubated for 1 hour at room temperature. Approximately 500 μl ice-cold isopropanol is added to the aqueous extract, and the tubes inverted until the DNA precipitated. The precipitated solution is kept at 4° C. for about 1 hour or overnight. Centrifugation of the tubes is performed at approximately 10,000 rpm for 5 minutes in a microcentrifuge. The supernatant is discarded and the pellet washed 1-3 times with 200 μl 70% ethanol. The ethanol is removed using a micropipette and pellet dried at 37° C. for 10 minutes. The DNA is dissolved in 50 μl TE (10 mM Tris-HCl pH8.0, 0.1 mM EDTA), then kept overnight at 4° C. Centrifugation of the tubes is performed at approximately 10,000 rpm for 5 minutes and then the supernatant is transferred into new tubes. Using this method, approximately 2 μg of DNA per mg of fresh leaf tissue is extracted.

[0241] DNA concentration is measured by a Spectrometry (Molecular Devices, Sunnyvale, Calif.) and adjusted to proper concentration for use as template. The total volume for PCR reaction is 20 ul. The reaction mixture contains: Template DNA at a concentration of 15 ng, 0.15 uM of primer, 0.03 unit of Taq DNA polymerase (Perkin Elmer), 50 uM of dNTP, the Reaction buffer contains, 10 mM Tris.HCl pH8.5,1.5 mM MgCl2, 50 mM KCl and water is added to a total volume of 20 ul.

[0242] The PCR is performed on a Perkin Elmer DNA Thermal Cycler 9700 using the following cycle profile: hold at 94° C. for 3 min, 32 cycles of 94° C. for 25 second, 47° C. for 25 second and 72° C. for 25 second, and 72° C. for 3min of final extension.

[0243] An acrylamide gel is prepared using 56.5 ml water, 3.5 ml 10×TAE buffer, 10.5 ml 40 acrylamide stock solution, 50 μl TEMED, 0.06 g ammonium persulfate. To each PCR, sample 20 μl of formamide loading dye is added to each sample and the samples are denatured at 90° C. for 3 minutes with a 4° C. hold in a thermocycler. 1.5 μl of each sample is loaded onto the gel. Gels are run at constant wattage to give a constant heat development during electrophoresis at 40 to 50 Volt/cm of the gel length. Gels should be run at approximately 50° C. during electrophoresis. Electrophoresis is stopped when the Bromophenol blue dye is at the bottom of the gel. After electrophoresis, the gel is stained in 1×SYBR solution for 15 to 20 minutes with vigorous shaking. A Gel image is recorded using an Alpha-InnoTech imager.

### EXAMPLE 4

[0244] In order to create a file containing complex repeats, the GCG (Madison, Wis.) REPEAT program is used to determine initial internal repeats. Stringency is defined as 19 matched bases out of every contiguous 20 bases in the repeated diagonals part of the REPEAT program algorithm. After the REPEAT program is run on the STCs, a REPEAT output filed is processed with the UNIX utilities grep, sort, uniq and sed to produce a GCG pattern file. The GCG pattern file is broken into size groups: <20, 20-39, 40-59, 60-79, 80-89, 100-119, 120-139, 140-159, 160-179, 180-199, 200-219, and >220. Each pattern group is compared against the entire STC library or subset thereof using the GCG FINDPATTERNS program. Sequences of size 1-19 are allowed no mismatches. The 20-39 group are allowed one mismatch. A pattern of size n is allowed floor (n/20) mismatches. Patterns that occurred in at least 100 STCs are selected in this step. The results of the FINDPATTERNS program is post-processed with the UNIX utilities grep, sort and uniq and with the GCG REFORMAT program to produce GCG sequence files. Each sequence file is derived from a selected pattern and placed in a subdirectory that corresponds to its size group. GELSTART, GELENTER, GELMERGE and GELASSEMBLE are used to coalesce similar sequences of each size group. Patterns are 90% similar before they are aligned and the patterns overlap by at least two thirds of the modal length in their length group. The GELSTART program creates a subdirectory which contains the individual and the coalesced consensus sequences. The consensus sequences are placed into a single directory and a FASTA style sequence library is constructed from it. The REPEAT-MASKER program is used to mask the original STCs. The unmasked sequences that remain afterward are concatenated into 100 KB pseudo-sequences. The pseudo-sequences are fed back into this algorithm and the new repeat patterns that result are added to the repeat library. The algorithm is iterated 3 times.

[0245] The repeat library is compared to the STCs using NCBI BLASTN version 2.0. HSPs are reported if they satisfied the criteria of:
[0246] “observed fractional match” >=“allowed fractional match” where “observed fractional match” is defined as:
[0247] “fraction of HSP similarity”×“fraction of query sequence in HSP” and “allowed fractional match” is defined as:
[0248] (“repeat length”−“floor (repeat length/20)”)/“repeat length”

[0249] Alternatively, the repeat library is compared to the STCs by an algorithm that is written in the C programming language and is compiled with optimization. Using a repeat library patterns file containing 3,302 complex repeat sequences from Glycine max, 304905 Glycine max STC sequences are searched and repeat coordinates are identified in these sequences.

[0250] STC and repeat library DNA sequences are represented by the characters A, C, G, and T. Ambiguous sequence characters allow for combinations of these characters, as defined by the IUPAC-IUB (the Wisconsin Package version 10.0, Genetics Computer Group, Madison, Wis.). For example, A or T is represented by W, G or C by S, and A or C or G or T by N. DNA sequence characters are represented as 4 binary digits (bits), where 0001 represents A, 0010 represents C, 0100 represents G, and 1000 represents T. Using standard Boolean logic, A or T (W) is equivalent to applying the logical OR operator to 0001 and 1000, the result being 1001. The table below shows all standard symbols and their computer representation for this method.

| IUPAC-IUB | | Computer |
|---|---|---|
| Symbol | Meaning | Representation |
| A | A | 0001 |
| C | C | 0010 |
| G | G | 0100 |
| T | T | 1000 |
| K | G or T (Keto) | 1100 |
| M | A or C (aMino) | 0011 |
| R | A or G (puRine) | 0101 |
| S | G or C (Strong pairing) | 0110 |
| W | A or T (Weak pairing) | 1001 |
| Y | C or T (pYrimidine) | 1010 |
| B | C or G or T (not A) | 1110 |
| D | A or G or T (not C) | 1101 |
| H | A or C or T (not G) | 1011 |
| V | A or C or G (not T or U) | 0111 |
| N | A or C or G or T | 1111 |

When matching sequence patterns, a match occurs only when a symbol in the sequence being searched is a subset of the symbol appearing in the pattern. For example, an A in the pattern will match only an A in the sequence, whereas an R in the pattern will match any of A, G, or R (but no other symbols). The AND operator is applied to the computer representation of the pattern symbol and the sequence symbol, and a match occurs if the result is identical to the sequence symbol. For example, A matches A because 0001 (pattern) AND 0001 (sequence) equals 0001 (result), and the result equals the sequence. An R in the pattern matches an A in the sequence because 0101 (pattern) AND 0001 (sequence) equals 0001 (result), and the result equals the sequence. An S in the pattern does not match an A in the sequence: 0110 (pattern) AND 0001 (sequence) equals 0000 (result), the result not matching the sequence. Using this algorithm, pattern matching becomes a byte by byte comparison using the AND operator.

[0251] The algorithm allows the user to define the number of mismatches as a fraction of the number of characters in the pattern. For example, a 5% mismatch frequency allows for one mismatch every 20 pattern characters. This works out to 0 mismatches for a pattern of 1-19 characters, 1 mismatch for a pattern of 20-39 characters, 2 mismatches for a pattern of 40-59 characters, and so on.

[0252] The searching algorithm aligns the pattern sequence with the DNA sequence at every possible position on both DNA strands and counts the number of mismatches in the alignment. If the number of mismatches is less than or equal to the number permitted, then a match is recorded.

[0253] The patterns and the DNA sequence are stored in Fasta-format DNA sequence files. The length of the patterns and the DNA sequences are limited only by available computer memory. The computer program first loads the patterns into memory. Each DNA sequence is then loaded sequentially from the Fasta file and searched sequentially with each pattern, allowing for the mismatch frequency designated by the user. The reverse complement of the DNA sequence is generated and again searched with the patterns. The coordinates of the pattern matches for each sequence and the name of the pattern that matched are saved in memory. Once a sequence has been searched with all patterns, the coordinates of the patterns are sorted into order, and the name of the DNA sequence, the name of the pattern, and the coordinates of the match are written to an output file.

The application's sequence listing, which the Patent Office published only in electronic form, follows.

SEQUENCE LISTING (304701 sequences)

SEQ ID NO: 1 - DNA, 619 bp, Glycine max
  unsure (1)..(619): unsure at all n locations
tggggaatatgcctgangtacactatagatactaagctagcngccagtgtagcctatcctaatttgaccgctggaacatacattggctttttagcntgaatcgcctattgcatgaacaacattcaaaacaactaaatngccttgggcttagcgagactgactcgcttancccatgcttattcaaactatataggcatggtgtcttagcaggactgactctcttatccaccaacagaataccacaagcctcatagactccgacctaagcaaactaactcgcttatcacggcatgtcngctatcaagttcatactaactcagaagatataactagagatntatactcttngctagccgaagtgcaggggcttaacgagttcgtcataaaagcatagatttaacatanatgatgaacatgcttagcgggacaagaccgacttactgatgtcatcatataacccanaatatcatccanaataatagactggctantgagcagctcgctagcagacatcaaagttcagaaatatgnggctcaagacccacatctagtactatatgctatactatagtcaaacatgaatgacctcatatcctgaataatccctacactatagtag

SEQ ID NO: 2 - DNA, 465 bp, Glycine max
  unsure (1)..(465): unsure at all n locations
ggggagtatcgtgagttcactcaatattagcccttcagactcgctgtaagacctcggtccagccgaatccctttatgagcgcttaagtcactgccgcgcttacacgcggactgagaaacctgcgtacccgctaatctcttcacacatcccctatcgcactggcggtatctcaatgaccaccatcgccttccaaccatgccaactaatggcaatggccctgatcggatttctcttaccattgtcggatttacccgctatggcgcttcatcaacagaggatgccctagtatcaccctacccacaccccgtgaccaaccttggcctttaaataaaacctatctttgtcatttcggaataaactttcctgtctttcagcaaatgaagaacccctgctcngtcctttgggcgggccttttgcacgctttttggacttgttatcaaaaaaacccttcttgttcaaaacacn

SEQ ID NO: 3 - DNA, 175 bp, Glycine max
ggacttagtacgcgcttactgttacatatactacctatggcaaatttgttttacactgaattacaaccttgtatgcacaacgtatggtactcctttttgttgcagttagtgaccattggggagtatgaacaggcatgaaaacacttaaagtcactttggaataacacgacaaggt

SEQ ID NO: 4 - DNA, 247 bp, Glycine max
  unsure (1)..(247): unsure at all n locations
tctatacctgttgcaagagnttgtggtctacgttcttctgcagatcaccatacagatctctgtccttctttgtagcaatctggagtcaatgagaaacctgaagcttatgctgtaaacatttataatagacctcctcagcaacanaactaacaacagcagaataattatgacctttcaagcaatagatgcaatctaggttggaggaatcatccaaatctgagatggacaagtnctccgcaacaacaac

SEQ ID NO: 5 - DNA, 337 bp, Glycine max
  unsure (1)..(337): unsure at all n locations
gagtcctctcacgaggtggaggttgagccatgttctcagtataaaaattagtagtggaatgctcanaatcagaatattcaaaatcaccctcaagagaatgctcacaatgcacataatgaccaggatgcacagtatgcctaattaatctatgaaaggatctatctatttcaagatcaaagggttgtaaatcacctagaatgcccctagtcatgcactatatccagcaaataatgtgtttcttaacaagcacctaaccaggnggtaaaactacaactatactcaaacgatatcaaaatgagccttaaatttgtgaggaacaccctanaatcatgaaaag

SEQ ID NO: 6 - DNA, 211 bp, Glycine max
  unsure (1)..(211): unsure at all n locations
gagatgatgcgctccatgagtatgtggatcanatggagaatagagatcataatgaagaagaaaggaggagaagagggaatgatggtgttcctagacaaaaccgaattgatggtattaaactcaacattcctccatttaaaggaaagaatgatccggaggcctacgtggagtgggagatgaaaatagagcatgttttctcatgcaacaacta

SEQ ID NO: 7 - DNA, 482 bp, Glycine max
  unsure (1)..(482): unsure at all n locations
agcctgtgtcctgaanatttgaanntcattcacctgaggtggcnacctctgaacttctacagaatgagctctgatccactggtatacaagggcctcagatatcttaagaacggggggttgattaagatattaccaactatttcccccagtaaaaatctatttcactttctatttcaggtaccaaatcccttaaccatggactcttaaataatgattccaattgaaccattttgatgttaatataaaaccattattaattaaagaagttcacggaagagaaagtgcanacctggatttatactgggtcggtacaccttgtgctacgtccgtcccagaaccgctgaagtcatattgaaatcttcagttgacacagcatctctggtaatttcacaaacctgttatcttgataaaaagaatactttgaaatattcttgcccagtctagatgaggtgcagattaagaaagttgttaaaacctggtaa

SEQ ID NO: 8 - DNA, 574 bp, Glycine max
  unsure (1)..(574): unsure at all n locations
ntatcacttgaggacctatgatactaagctctataaagttacttgtcgaaccaatcaaataagttttcaactagtaaaaaatgttagaaatttatgtgaaatttntaccaaagatagtcattgtatagttgcttatttcaagccatacaaaaatntaatttgcatactttattgtcatgattagaaagaacanaaccatgtgttgttccaagcataaaanaataagaccaaaactttcaccagtcgtgctctnttttttcttgagggttatatatatatatatatatatatatatatatatatatatatatatatatatatatatatatatanagaatcataacatgttttgataggtacatgataagaaatggatcattcagttaataacatttttaaatatactatacaatgcttacatcctagagatacatatattataccatcatgcacnaaacctgagagaaatttagtactatatcacgagaaagacacatgcctttctgtttgtcctattatcattataananaaacttggnattaaacatacagcacaattctttgtttatcgtaa

SEQ ID NO: 9 - DNA, 622 bp, Glycine max
  unsure (1)..(622): unsure at all n locations
tggggatatatgccttgangttcactnncnatgnctangnccactatcgagtactcaagcttgtanatattactcntatacattgcctgttccattatgctcttgatgtccttatatgttacttcgctcgtgacatcttttgtcttgaatcggaatgacatgacacggttatctgtactgtctntnngtattggtagttgatatcgcgttgcgggaggtaattccgattggattaactcaccatccttaacttgccannattgtatgacatttgttgttggatcacctatgatgtcttgtttccaacggtaatctatatcatttctgatggcataagcatgaaaccaatcaaagaanaggacattaatcttgactctttcacanantcgtagaactngcttggatttgtntctgtttgaccctttgtaaagtggaaaaccatctctttatggtcattctccngagaataaaatctttctaanggttncttatcanntgctaagtgcagatacatcataaggtncataaaaaagtatgtgggattgatcgactttggcgnctcttgtcttggtgatgtgtctaggatctnaaagangctattcttgagttacagaagactgtg

SEQ ID NO: 10 - DNA, 250 bp, Glycine max
  unsure (1)..(250): unsure at all n locations
ccttcacccgacgaagacactgacananacttatcttctccttcttggacaaagtatggcaggctgnggggcaagtaaatttcttcccatcagaccttggatgcaactatgatcgtatacccatatcagctacatcttgacnggtattcaagccatcctttgtcttgcctttgaatgtaaggaacgtcccaatgacactatcacagacattnttctccacatgcataacatcaatacaatgtctaacgtc

SEQ ID NO: 11 - DNA, 536 bp, Glycine max
  unsure (1)..(536): unsure at all n locations
tgatgncnttnnnaattgacgcacgtantaggtacactataatactcagcgttcgagaaaccacttaaactaaggaagttcctanacaaaaatcaatggaggaagcttcgccaagtatgcgcattgaagacaccttattcaaacctttcaaagttagtgagaaggctgaacgaancactagggaacttagaacaactaaatccttaatggaatgcgtaggtgacaatcatagtgaattactaaacaagattggtagttactaatggcattcagatactcccaagcctcgataatacttctaaatggtataagaagacctncacataataatgtattaatgaagatgtgaccngactagataaccactgagatgaatagtgcagaaagatataatccataattcaacctgaaacacctcaatattatcacgtcgctgcgtgactctttagagaagagtaaacaattagagttagtgaacactcatgatgactaatgcaacgattactctgatcctcactatactgtgccatacaacn

SEQ ID NO: 12 - DNA, 210 bp, Glycine max
tcatcttgcttggacgatgagaaaactggtgcaaatgaagagggtgagaaggatggagaaacccatgctgtgactgtcattcctatacggccaagttccccaccagctcaacaccatcattactcagccaatatcagtcattctcattacccaccacccatttatccataaaggctatccctaaatcaacaacaaaacccacctaccaca

SEQ ID NO: 13 - DNA, 397 bp, Glycine max
  unsure (1)..(397): unsure at all n locations
ttgatcatcctgctntgataaataagaaagcctgggaaaatggagacaataagaaggagggaggaacccatgctgtgattgccgttcctacttggccaaatttcccaccagctcaacaatgtcaatactcaaccaatatcagcccttctcattacccaccaccctattagtcaagaacacccaatcatccacaaaggccacccctgaatcagccacanagcttgcttgccgcacatncgatactaaacaccaccactaacacanatcanaacaccaaccagggaanggaatttcagaaaataagcctgcagaatcacccaattctggtgcatatgctaactacttcatattactcataatcaatggcacataccccaccanggtctcaactcatttt

SEQ ID NO: 14 - DNA, 548 bp, Glycine max
  unsure (1)..(548): unsure at all n locations
ngatgtgaggaagtgtggaagagtcagtcttcctactnttgtttgttgaccatatattggtacctggagatatgtcgcangggtcacgagacctctgtgaggtcaggtggagtgctatntcccaaaaccaagcttgaccaatcccaacccaacctgngcatattcagtcagtgtgaacctgtgacgtacctaagcaggcgagcttctgacagtcaacccatattagaacaaagaccacanagcaaggaggctcgtgtggcagctggccagctatggatcttgagtggtatctggagataggcctctcgtaatcgattacccagggtgtgtaatcgattacatgggctacaaatggagaccagaagttaagatggcctctgggtatcgattaccaacgggtgtgtaatcgattaccatgcttannaatgganacagngagttaagatggcctctggtatccattaccaacgggtgtaacgatacanagctaaacatgagacggatgtgcgnggctctgtatccataaccatgatttattcaataccaan

SEQ ID NO: 15 - DNA, 598 bp, Glycine max
  unsure (1)..(598): unsure at all n locations
tatatgtacttgacncgtcgatctctgagtcacctgcggcatgcaagcttanaaatatatggngattatgtnntggtatgtatgaattacatcacagataatttgattgactaagattaagtgatgatggtggtggtagatctgatgaccatcacagtgaagaccacagtgatggtggttgcaagcatggagctgaagaggaacatgaaactaatatatgtgatttgacagggagcacacaaaggttctgcattgcggcagtgaagaacatgcttttgatttctatactagatatgccagatgtcatgggttggatgtgagaaaatatgacatacttcgagaatttgaatggggaatgtataaaacattggttttcttgcatagaanagggttgagaaaaaagaacacttcacgagggtcgatagaataagagacatatatattcatactaattgtgagctaggctcatgtttcttagatagaaacataacatgaaagtctttattcacagaatataacatgactacccaccactgtattatatatccaagatcgggatactatttgataactagcngatagtgataattgtgtgacn

SEQ ID NO: 16 - DNA, 226 bp, Glycine max
  unsure (1)..(226): unsure at all n locations
gtgtacacatgttgtaactttcttgaatgaaagtcttatgagatacaattcanagttccacttctctccctctnttattccttcaatntcgtgctcccgccttctctctntcttttcctccattaaagtatcctcttcaagcttcttatccaagggcaattgtggtggtgaagctccttcttccttggctgattccctagtggatggtgccacccctctcctcttc

SEQ ID NO: 17 - DNA, 193 bp, Glycine max
  unsure (1)..(193): unsure at all n locations
atgacattntaattctgcaaataacaataactaaaccctttatgtactagattagagactaaagaaagggattnttcttttcctttttctcattcgtggctttatcccctgacatttactagacttgtgcttccacatcatatatccctatcattctgtctttaatcattcanaaattcatttgatcttgtct

SEQ ID NO: 18 - DNA, 157 bp, Glycine max
  unsure (1)..(157): unsure at all n locations
ttaagttaaaaagtcttttttcaacaaattactctctggtaatcgattaccagaggatgtaatcgattaccagtggccaaaactganttacaacagctattaaaatntgaattcaaaatttgcactgtgtaatcgattacacatatatggtaatcga

SEQ ID NO: 19 - DNA, 406 bp, Glycine max
atagtgctgccggatcttatacgagctgcacttcgtctgtggacccttactaacaccgtcagctaagcccactcaaggaactcccagttcactcgaaccactcacagcggtattcacacacaggaattcctcgaaccgtgcgattacccgtccaagcgacaaactttacatcctatcgcatattggcggaactccggaggtttcaacccttccgagggatacctatgcattgagaccatggggcccggcatcatcaaaagctgcctaaacagccactcaaggtgcgatgtgactcagagacgccatgagacaccgtgcatatgggggctgatgctgatcatagccaagttaacgtaagaggggcctgagtatttggctacaagaggtatcctatgggagagatcgg

SEQ ID NO: 20 - DNA, 234 bp, Glycine max
ctgtccaaacatgttgacgctttgaaacactgcacaaaccagtacctcaaagcaattgttcccgaagtttattgtgctagctcatgggctgtgtttagaaatgagatgaatttgtgaccacggagcatggatttgacataaatgagctgcttttgaacaagtgtcttcctctcttgcacaaaaccgccgcgaacgtaggaattctgctcctttcaacatcaaaatcttacttat

SEQ ID NO: 21 - DNA, 222 bp, Glycine max
atactggtcctctaacctgttgttgacttgaacatttatgaccctctgtgtaatatccttggacttttactttataaatatttgtgtaaaaatgtccatgtttgttcttgtgctcaatatttaaatatctaaactatttgagtctaataaggtaatgatggttcacaacatattgtttatagattataaactatctgatgaaccactttaggctgtctatgg

SEQ ID NO: 22 - DNA, 377 bp, Glycine max
  unsure (1)..(377): unsure at all n locations
tctataaatctataaagttctntcaaatattttataattttaaaatatatatccattaaaatccanacctaaaaatcttaatcctaaaagtcnttttaaaaatctaataagtcaaaatatttctacataatcttttaatatctaaaagactnnttttatactanaatagtcttttaaaatcctataccccttttatattccttcanagttttttaanattcataaaattttaataaaacattaaaataatattttanaatcatatggaatacattatgataaaataaataaccatgatacacgaaccattacacagtaacatccacccatgagccacctacctatgtggacatttttaaatcattcaattagttttt

SEQ ID NO: 23 - DNA, 322 bp, Glycine max
  unsure (1)..(322): unsure at all n locations
gaagtgttagtgganatggaagtgtttcccggacaaactgaacaagatgaatgcctctcatatatgaaggctntgacttgtagtagaggttctgaggttntgccatctgatgctagtccagaaatgaaggtttcttccagctatgactgcgagtcttctgctggattgaactcacaagccanaagagaacagttngaggatgtgaacatgatggatgttgattcaactggtattgcaatgagcttcttgtgggctgttaatcatatatgtgcctattctcaaacgacatgatttggggatgtggatatggcagatcatttaa

SEQ ID NO: 24 - DNA, 116 bp, Glycine max
  unsure (1)..(116): unsure at all n locations
gtgaatctaagatctctatcatacactatgatagatggcacaccatgtcagttgacaatctcactaatatacanggaggtcagcttctctaacgaaaactcgatattggtggggat

SEQ ID NO: 25 - DNA, 236 bp, Glycine max
  unsure (1)..(236): unsure at all n locations
catctatatatagcaatgtatatatatgtctattaagtgttngatacatgataaaatcaagcccttaannttacaatacatatatgcatgtgtaaaacattcttgctttgtaatntcactcactataatcatatgatcactctttgcctaggttggccatccttgcacccaaaagacaacatttgtgaatcatttgagatgcttatgtntctcactagattntgattctgatttct

SEQ ID NO: 26 - DNA, 430 bp, Glycine max
ttttggaatctatataatagcatccaagaggggaatattgacctctaaccttctggaagtcttcaaaagatctgaatcaagctctattttctttgcaggaatggatctaaaaggaaaacgtagaagaatctggtttgcgaagaatctgattggcctattcatcaatttggaccatatatgtggcttgggagctctctgcacttctcaggtaaaacactcaattccccttggatgatattggctgtgcagaatgctgcaaaacttgtcctgcattggtgacctgtactactattagttatagtcttgaggtgcatcatatctgtgaactgatgttgggagcacttctgatcactcttaggaggctacctgtatctgccagtgtcagtgaatgaatgctgatgtatgtgctgaagtagctatttgtgtaagg

SEQ ID NO: 27 - DNA, 300 bp, Glycine max
  unsure (1)..(300): unsure at all n locations
ctatgtgatcaatagattaaattaatattgttgagatcgtcatattttagcctaaatgtctgagtctgttcttagtgcctgctgtatagtttcttattttcaaaaganatactatgatgagtatattttatgtacactccgtgagtgatattgaattattgaataagaagttgttgtctgcctttgtgataaaatgttgtcctttctatgctcttctgtacaaacaaactaatgcgttctaaaataagggtatatcattagtctatatntaactatcattagtctatgtatagtacttta

SEQ ID NO: 28 - DNA, 395 bp, Glycine max
  unsure (1)..(395): unsure at all n locations
acacaagtttgagtttattcagaatattagagtntatctctnttatcttagtgagagtgattctcctaaattcttgagtgattcaagaacactctggctgtatcanaggactntcacaacctttgtgtgttgccctcgctgganagagtgattctttccttcctttcatcttcacccttgttctttcaaaccacaattccagagaatccacctctgcccagaattatctagtggccataactcccagtttacgcactcacattaagtgattcttgaggctaaattgaatntcanaacgagacctttcacctcattntggaatcacctcatttggatccctgtagcttcagttatggccatttctatatntctgtccagccaccacttaacctacg

SEQ ID NO: 29 - DNA, 610 bp, Glycine max
  unsure (1)..(610): unsure at all n locations
aaatattcctgaccngtgtctncaccgtaccgcgatctgttagtcacctgangctgcaactggtggtggggaatatggtggtgggttggccatgttgagctgaagtacagcatgggtgtcttcttccttcttcttggacctgctcgctacgaatctactattgcttgtgctggcgggagcggcataatcaaactttctccttctcaagcctaccacaatcctctcgccttgcaataccaaatctacgaagctaaagggcatgtagcccatcatcttttcataatagaacactggcagtgtgtccactatcatggttatcatttctcttttcatcatagaaggcgctacttgtgctgccangttcctccacctctgggcatactctttataggactcatgcttcttcttgtaatattctacgntngngctctatcangagccatgtcagtgtngtattgatactgcttaatgaaggcacgcatcanatccttccacgagcagatctggaagcttctaagtggtatactangtgaccaccgccccngtcaactttctntgaaaaatgcatatgagctctcgttcttgagatgccccatcttacaaacatttn

SEQ ID NO: 30 - DNA, 269 bp, Glycine max
  unsure (1)..(269): unsure at all n locations
atcacatgtggtactatgtggcggtcgggcgatgtgtgcacaacaagtntcccacatccacaatgcgcgcataaacccaccatccnctgttgcccacctccaactgagctcacgtactcccacgtagcccatatcctcgtttctctcaacaccgggtccccatcaatcctcccaagtttccacaacatccaagcaaaacaacattcaaacagcataagctatcacagccaagcaaaacagagcaaaggcagaaaactctgctcaacaca

SEQ ID NO: 31 - DNA, 289 bp, Glycine max
  unsure (1)..(289): unsure at all n locations
gtcactcncgcattntatctctagcatgcatagtatcgtggtctcgtccactgtcacgggaagccggaaggtccatatcaccttcttaattgtacacatggggcactgcgccctcaaatgcacaagtaagaagagataattttccgggctctcgtgtccgtaaaatgcattcatatcatgcaccacatangcatctcttcataacatcataatggacatatcctgcatttgtgcgttatcatattccagcctcacattntgcatgagtcatggcatcatcatgcatatg

SEQ ID NO: 32 - DNA, 166 bp, Glycine max
  unsure (1)..(166): unsure at all n locations
gagtggatttaattactacaagtgtgagactgttgatgatacaaactcctctagttgtgagatactagcgctcggtcaattctctcctcaaggacaatttagccttttacctcacgaaaccacgcanaggggtaaccctctaacagtatgtcaataaggtcacaat

SEQ ID NO: 33 - DNA, 402 bp, Glycine max
cccttgctgccgttctcattacgcgctgcacttaacattataacaatgaatgaatcttacctaaaatttacagagattgggtgtagatacacataaagctatgatagtttatatgagccttgatgtttatatcaaaaaaatagctaacatttcatatagtgaggtgtttatatattggagagtctgaatactaaatactataaatacatagtattttaactttaaacataccagtctattgttttatagaagtcaatatataatagtttcagctcctagtatgattgaaataataaaaataaagtaagcataatatctctttcgcaataaatttaacttataattgtctatttattatgacgggactactacaatacacacatccctctgtctcagcataaa

SEQ ID NO: 34 - DNA, 236 bp, Glycine max
  unsure (1)..(236): unsure at all n locations
caccatcaataagtatacatcgttcataagggtccaccacttgaaagagggctngcaccagcgtagaatttccattctctgtcctgtctactataccaattgtcttttgtcctgcgaagatacaagtaacatctttgaggaccatangagcagcagggtcattctgtatatgaagggtatgaagttcaactnttccctcctttggccactctggttcatgcctgcaatcttgaatg

SEQ ID NO: 35 - DNA, 206 bp, Glycine max
  unsure (1)..(206): unsure at all n locations
atgcaagggttgggcgctaagcgctngagactcacaacttagcgcattaacagagttgcgcttagcgcgaggcttgtgcttaaggaaaggactatttttcagaaaaaagttntctgagttatttttcagtcctttttccaagaaaatgaaacccttatgttaaacattcaaagatnggttgatatactcctatgtacagattatat

SEQ ID NO: 36 - DNA, 561 bp, Glycine max
  unsure (1)..(561): unsure at all n locations
tgttgtgtacttgaccgcttacttcagtcacctgccgtctgcagctaacatanatctcagagtctcgtatatacgggactttatatacatccgagtataaagttnatggtcgttgaattggctcggaggttcaacattcaatttcaagcgtctcgatatattactcgactcaatcagacatctgagtaaaaagttattagtcggtgaattggctcataggttcaacattcaacttcgaacgtttcgatatattacgggactcaatcagacatccgagtaaaaagttattgccgttaagatagctcatatgtcaacattcaattctagcgtctaatatatttcgggactcaatctacatccgagaacaagtattgtcttngaatggctcagaggttcaacatcaatgtcgaggactcgattattatgtactgaatagacatcgagataaagtatcgctgtngatnggctagagctcaacatcatatatacggactaattgcggtccataaaggtatgctaaaatagtcacattaacgtcatttcaagctctttttacggacn

SEQ ID NO: 37 - DNA, 395 bp, Glycine max
  unsure (1)..(395): unsure at all n locations
actcggatgtccgatgagtctctgttatatatcgacacgctcganatngaatgttgaagctctaggcctattcaaacaacaataacgtnttactcggatgtccgattcagtgacgtaatatatcgggacgctcganattgaatgttgaacctctgagccaactcanacgacaataactnnttactcggatgtctgattgagtcccgtattatatcgagacgctcgaaattgaatgttgaacctctgagccaattcaaacgacaataactntntactcggatgtctgattgagacccataatatatcgagacgctcgaaattgaatgtngaacctctcagccaattcaaactacaantaacttttactcggatgtccgatcagtgacgaatatatc

SEQ ID NO: 38 - DNA, 562 bp, Glycine max
  unsure (1)..(562): unsure at all n locations
ttatattcctgaccgttaacttcgttggacctgccgcatgcantctngaaaacttatcccannctctacatngactcaatngtgcttaccacttcaaaagtacttgtctattctaagcacctctaattaggtgtttatagctcatttttcatgaccaccattaaatgggagaacccaatttaaaaaaggtcaaagatctaaatgaaaagttaataaaagtatggggacccacagaataattaaacctatattttaaaaaggtattggtaccttctcattataaaccaataaattanggtgtacagtaaattacatcttacatgggtggtaattaactttaataatggtgtctaaatttatgatcgcaaataaaactagtggtgtcatttaattcttacaatcatattaacttgaagacaatgtattgtaatgaatgngcacaaagactctatagtcattaacaatcctttaaanaagtatgacaatcaacatacaatctacatatatcataagtgatatatattgatagttatattatggctataaaaaaatgtatatcttn

SEQ ID NO: 39 - DNA, 335 bp, Glycine max
  unsure (1)..(335): unsure at all n locations
tctgtacgatgtctagggtagtagtcttgacaagtatatggtgacgagtntgtcataccccccaagtatggacgagtgttgtccagggtcgagcatggtggccccgacgagtttgagagttgtaggtcaatctggcatgtcaagcccccgagcctggacatgctaaggacaattgtaagctggccgttcaggcttgtgggagtgatgatttctcgtttctaagggtgacgcctggttgtccacccttctttttatgtacaggtgcttngttgaggtcttgggtgttattctgccattgaccgtgtttcagtgtgctctgctggagcacttgaatg

SEQ ID NO: 40 - DNA, 240 bp, Glycine max
  unsure (1)..(240): unsure at all n locations
tgtccgattcggggacataactcatctagacgctcgaaattgaacaacgcaagctctcgagaaattcgaatggtcataacatttcgcacaaatgtccaattctgggacataatatatcaagacgctcganactgaatagcggaagctctcgggaaaatcagatggtcatnaactttcacatggatgntccgattgtgaaaataatatatcgagatgctccaaatcgaacaacgaaagcta

SEQ ID NO: 41 - DNA, 167 bp, Glycine max
tcaccacgacattgcttcacacgtcatccgggagatatccacctaatgggatcttcacacgcacacaaacgctattaaatgtgtgccaacaacctacttctcaccatccgcagaacacaacacaacataccccgaacataaacagttgaggcccctccgcacccttc

SEQ ID NO: 42 - DNA, 195 bp, Glycine max
  unsure (1)..(195): unsure at all n locations
ttctgatgtgatggagattcttaagaagacaagggttctacgtgtacatgatgctgacaatgagaagtctcccgagacaatcctcgagcatgagtatgaatntacttgcatacatcttagtataactaatactcttaacatgtttatgtaatttgaggccctccttgcattttcctggtttgcattacatgttct

SEQ ID NO: 43 - DNA, 243 bp, Glycine max
  unsure (1)..(243): unsure at all n locations
agagaccctgttacgtaaaatggttttaaaagaagcccnctttgtgtaaattgccacatagacgttgtgccattcacatatggatgtggcaaacacaatgatcaacctatcttgaggtatcaagttgaagtgatggttaaagacaaagacgaagatacaanaattttgctctgggaccgtgaatgtgcagaagtgattggtcaatctgcggatgaaattaacagggctaaaatggaagtatgt

SEQ ID NO: 44 - DNA, 260 bp, Glycine max
gtggacgctgcattggctgacttacagacatttcacgattgacgtggacttgatgacattgaagggccaagctcgtccgaagatttattgacgttaccttacttggtgctagaaacccttttttctttttttcaagcatttacgccagccttatctacccagcccttccaccaacatcgtgttcgtgaactatgacttattctgagacctgtttgtgtctgtagtcatgtttattttacttgacgatgtgtacgtctgaa

SEQ ID NO: 45 - DNA, 271 bp, Glycine max
  unsure (1)..(271): unsure at all n locations
ataataactctcgtgtggttccaattctgtagttcttcttctagactcctagcccttgcattctagattaggtcacccctatggtncatgtaatgaactagtcntcaatcattgtaacatttctccatcaaataaaaaattctcaaggttttgttctttctagtgtatgggaaagtctcatagattaccatctcacactttttgttnntgttactctcccttggagccctatttcacatatttgtggggaccttctcatttgacttcatat

SEQ ID NO: 46 - DNA, 240 bp, Glycine max
  unsure (1)..(240): unsure at all n locations
tcacacagttatcattctcaaacttggagtttggaagaccaattactaagtctttcctaactagatgatntanatgattcatattattgtgtgcagtcctacaatgccacaaccatgaatcatctattttactcaccaagcaacttagctcatgaaaagatgcatggctcaacattagcatatagatgttacctatccttntaccaatgtggacaactttaccagatatggcttcactta

SEQ ID NO: 47 - DNA, 593 bp, Glycine max
  unsure (1)..(593): unsure at all n locations
acccttgtcctgaccgttgtatncactcgaccgcgatctctnagtcacctgcggcatgcaagctngngttcanggactggatggcttantcacaaaatnttgtgctatgtaacgtnngtgtgtgtgannggtaaaatttgtttggtgtctacacttggaactatgatcgccttttttgttgtgaactattctggtggggcctttgataacaatgtatgcttgtatgtatttctttcacccgttcatcttgaacaaaaaaatacttctgtgttcatataagcttcgtatatctgtaatcagaatacctagttttggttgaatgctatgnttttggtanatcactaataagaaaaataaggggaggggangctacttgcaatcaanggtanggcatgcccaagccttgtgatggctaacctttggctttacaaatttccatgaanggngatgctatagcttgatngatcnggcctttcnnngtgagtcttattctacaagtggatgctnttctctctgcagttgctgatatatttcatgattatctaaagctaaaattgatgtgtaatatgaagtctgtttgtataaatataaan

SEQ ID NO: 48 - DNA, 318 bp, Glycine max
  unsure (1)..(318): unsure at all n locations
tgtgtgtgaagatcagcanagaccagagcttgaagaggaagtcatcctgtgagctcgagatgagtntgtgagtgattgaggtcttataggtggaggagacatccncactacttgtatttctgcaatctttcatctttctcttctctttgtngagaggaagcttcccagtatggaaagctaatcctctgtggatcttcctgangtcttgagaaaatcttttattatcaatatgtttggtgtactggcttcaaactcatcttcatgtattgcttatacgtgatcatgtttttatgacatcacaaggaactgtcaatctat

SEQ ID NO: 49 - DNA, 560 bp, Glycine max
  unsure (1)..(560): unsure at all n locations
ctacgtgtcantaaancgttgnatacgtttgannnncatttgaatcactcgaaccgcgatctctnagtcaccgcngctgcaactgtggatatgggtactcatacatgtggactaggttgctggtcggcgatgggtgcacaacaagttttcacctgcacatatcgcgcatagacccaccattctctattgccaacctcatctgagctcacgtactcccacgtagcccagtaatcttcgattctctcaacacagggtccacaatcaatcttccaaacttgcccaacatncaatgtactcagcatttcaacaacacanaccattacagccaataaaatagggcatanggcataagactcttgctaaaacaccaccgaaattacaggtgtctcactaaagaccccataacaattcttcgtccaatcttaacgtggatcgactcaaattactgaagttcagtctaacctcatttgccgtggattataaaacatcagactatctcatactttcacacacaatctacattttgactgcaaactgtgccattacaaaattgcaatgaa

SEQ ID NO: 50 - DNA, 195 bp, Glycine max
  unsure (1)..(195): unsure at all n locations
agaacaatctaagccatcataacttaattntcataccttatggatttccatattgggaatcagttttagttttctcaattcactntcccatgcttctttacttcttgaacgaagacatgcacccaacacttttaaagcaaggtatacctttgcaatatgaaattactcttctagatagatcttcatatccatctt

SEQ ID NO: 51 - DNA, 224 bp, Glycine max
tattctgcaggggttgtctattgaacagacaatattagggggctctctggatggcataagagttttataagagctggtctgctagcaaatcaactgatctgaagtgctataataacttgtcaatccttgtgctactattacacttctccctatacaataccctgcttctggcccaccttttgcgcagagtacgggcttaagagaagcggtctacgtatggaact

SEQ ID NO: 52 - DNA, 309 bp, Glycine max
  unsure (1)..(309): unsure at all n locations
ctgcataattctagttgngtacaactttnggctcgttgaggtagtattcaatntcataaaatggtgtatctagagccatttgtgtgggtcacacgtttgttgactcgctgggctaaatgttctgtctgggatgtgaatttggctggctaggctttaatctagttgtttatatgatgattatttaaattttccttanactcttcctttcttttttttatgantcanatgactntaanatattnttgcanatatattatacttatttgtatgatgaatatgtcattcttgaccctgttatatttatgtaat

SEQ ID NO: 53 - DNA, 314 bp, Glycine max
  unsure (1)..(314): unsure at all n locations
cttctggtaaagtacgttcaaacaatcactcagaaaggacatcggtttcatcagctggtgccaaaactagcacanaagagttaggccttanattanngtgtatgaagagtgataaaagaaaatgggccttggaggttcttgcgaggaaaacagctgccacaagcaggaacacagcanatggaaatcaggaagacaatgcagtttttaaaggaaattatcctntgcttgtatgtaaatgatcttattagttntgtataaaaattgttttattttacctttgacattgtcagaaattgtatatggcaatttcactg

SEQ ID NO: 54 - DNA, 131 bp, Glycine max
actatctttacgattaattgactttcatctggtttgcttaccctatgaaccgcgagatccttatgctccctagctcttgtcttttacccgctccagcctgcactctggagtcctcgtgggcataaacccgg

SEQ ID NO: 55 - DNA, 270 bp, Glycine max
  unsure (1)..(270): unsure at all n locations
ttctttgttagcaaactttatgcctaatcttctattaataacaatattgcatatttcatatggtcgatggaatgtcattgtttgtatctgctgattgaaatgtatttcgaccggaagtacagcatcatgcccataagtcagtcgaaatggggtagtattagttgattccttangagaatatctacatgcccatagaacttgatctaacgttntattccaatttcnttggtttttgggcaatgtgttgtttaatcaagttaattacaatct

SEQ ID NO: 56 - DNA, 558 bp, Glycine max
  unsure (1)..(558): unsure at all n locations
tgtgtacctcgacccgngatcctctagagtcacctgcggcatgcaagcttctccctctttttnctantaatagggggaggacggtagaacataatattcaacccttctttgtntctgagaatcacttaataatagtgagacaaattatttcgtgaagaaaaatccagccggngtgcttccataatgcttccgagaggtttctgtgggccgattcctgaagaatttccaccgttcttcatcgttcttccgtcttcaaccggagagttccgaaatcgaactttcaattatttatgtcccataggatcccacttgttcgcatgcttattttattcatttactttcgacccgctttgactgcttaatcatgtattaagcatttctcgctaataaaataaaataattccaccgacatttatngaacatatttaatatctttaaatgagatcgaccgtcggtctgcctatcacattaaaccaaaagggcaaataatatattatatcanaaaatgtcttgatgaatatcagaacatcaacggacgtttcttgtgatttcttttag

SEQ ID NO: 57 - DNA, 412 bp, Glycine max
  unsure (1)..(412): unsure at all n locations
acacccctctaataactaagctcacctccttatgaagagaagctagagcttagctacacacccctataatagctaagctcacccncatgacaaaatacatgaaaatacaaaaaaatcctactacaaagactactcaaaatgccctgaaatacaaggctaaaaccctatacntgtagaatggccaaaatacaaggcccaaaagaagaaaanaaacctattctaatanttacaaagaagagtggacccaaccttgacccatgggctcaaaaatctaccctaaggttcattagaaccctaaggccttctttatcagctctagcccaatcctcttggagcctcttgctcatggctctggtaactggtccttttctanggaggatagcatcacattatgacaagctcagtcttaact

SEQ ID NO: 58 - DNA, 135 bp, Glycine max
attatcattacaggttacaacatttatcaaccactcagaccagtctcacactacttttaatataagaacaaaaataaaaatgccaccaccaatataattcccacatccattaatcctatcaatcctcacactata

SEQ ID NO: 59 - DNA, 147 bp, Glycine max
gctcagatatctgtattgctgacttctggttgctgatgtagtctcctctaaatcaaaatactaaacactgttacctctactggctatttttgacctttgtgaggattgttgagattagtttcggagttgtcccttaaatcctaccta

SEQ ID NO: 60 - DNA, 111 bp, Glycine max
cttagtacgctctccctatcttatgtgacttaagattgtggtaaaaaagctgctatgagataggcataatgatattgcagaaatcctgatgtaaaaaatctaaatctactg

SEQ ID NO: 61 - DNA, 204 bp, Glycine max
  unsure (1)..(204): unsure at all n locations
gactttcaatcccataggttacaatatacagtagcacacaaataatacatgaggtacatgcctagctcacgcgtagttgtggcttggcacaattatttaaactcttaagatatacaattgatggcattaatgggtaagtcagccccataagtcatcaaattttaattttcgcatataaatagcctangacatagcattcttata

SEQ ID NO: 62 - DNA, 425 bp, Glycine max
aaagatgctaagtgatcatgaccgcgacttagcacgcgctgcgctgattgcttggatgcatgtctgcttgtggaaccaaagaagcggtataacacttacggtctcgatctatccttctgccctgtgacataaatctacctggactttaaccaataaacattcttgactaagaattctggaatatgtgacgacagtcaaatgcaattatacattaggcactgagtatcgaataataattaactatatcccgcttgattagactgaactacatcaatcatatcaacactacaatcataagtatcctgctcttgtcaacactactataatacttctttctttacttggagtttggaagaatctgccatttattgtgaggaaaggactttgagcactatctgatgatgaagatgtagagcaaatatatg

SEQ ID NO: 63 - DNA, 541 bp, Glycine max
  unsure (1)..(541): unsure at all n locations
tggagtatgcgtgtgtcacncgatactagcccttngatctcttctctaaactgcttntgactaatcactncaattattcatantgaccgatttgttctcattattataatcaatagtccaccattctggtgttattatgtatctatgtgaatacgtaaaccatataactacttgtacgttaagaacatatgagctaataatggcgcgaatgagcactatagcgtggggttgtggtgtagacagatagccggttccactcacaaggtcggttgtgttcaaatatgtgtgctgttggcctttgggccaatatgtcagtaaacataggtcacagtgttgcagctctatcttagttatgtttggagagaaaatacctacgcaccatttgggcatgtgggtttttatgatataccaacaccttgtcactgattgggtttcgatatgatcaaaacaaccgtactttcaatacaccccggttttaatttttcaagatgttgacttttttttactaaatacatactcttgatttacatacccctttaag

SEQ ID NO: 64 - DNA, 558 bp, Glycine max
  unsure (1)..(558): unsure at all n locations
agaattacgttgacncgntttgactctcgatcgtacctggcgattgtgtagacgttanctgcangcatgcaagccttgagtacanaacaattccctttttctaatataataactcgtgtttgatactatgaatgatatataagagaatctcataanacagaagcttattgagttaaaattggattaattataccctacataacctaaaattaagaatttagacaaaactaatagagccattctaaaccaaatatgagagcaaatagaaataacatgtgttgtagaaatgaaataggctaactatactaggataaataaatgaatttaaaaatttagtagagaagaacatatntacctaataaaaaaatgacngaccggggcatgatctcttaggacatgggtctcgactcatttataataatagactatagtcttttttataaatatattgtaacttcatgatcgaaatattctgttcaaaatatctctatattaaanattatgtgatattacttatatacacgcgaaatatatactgtaagttgcaaaggtacatat

SEQ ID NO: 65 - DNA, 291 bp, Glycine max
  unsure (1)..(291): unsure at all n locations
cttctgtaatggttggctaaacaccctagttngggatttctaatgaacagctgatgtaaatacttaatatctaattgatttatgtttatgtgttcaatgcttccttcaatgcttaatgtttgtatgcttttggtctgatcatccatttgtgtgcatagttaggtgactttagcattgggaaatgtactattgccttagaacttgattgaagcangattgaaacttagtcttacaagagggatctgcagaaataagtttggtntaattatgttgtacaataatgttgttagt

SEQ ID NO: 66 - DNA, 487 bp, Glycine max
  unsure (1)..(487): unsure at all n locations
tcgcttgtcaatggtattattcaacaagtgattctcctcanatttcagccagcccgcatcaattagaccttgcaccttatgcttcanggccatacaatgctcaatggaatgcctccgcgctccttcatgataagcacancgttgcgtcgactcgtattctcatagaaatggaggttgatgaaccttggttggggttatggctaccatttgaatatcaagtggatatgggagcangtcagcatacgacaccggaattagggtgaattctacaggctttntctgtngcaaaatcatttattggttgggctatacgtgatgttagcattggtttgtggaggtggctttgaaagggttgtattgctgagtatgacattgtgggtggtggaactcgccaatangatgcagtacagccatggttctcctcatctacctctttttgcccagtttgattaccaacatgtgatcaattgctctttataccactcat

SEQ ID NO: 67 - DNA, 99 bp, Glycine max
aagctatagagatccttactactctcaaaaggcagagctgagataaaaatatatcccttttaaaattatagttctagacaagaatctgaaacaactcat

SEQ ID NO: 68 - DNA, 307 bp, Glycine max
  unsure (1)..(307): unsure at all n locations
gcgatccttgagtcacctgcngcatgcaagcttgtaatcgattacacatatactgtaatcgattgccagagcatattttcagaanatattctcaacagtcacatctttttatatggctcttgaatggctatcaaaggcctatatatatgtgacttgagacacgaatttgctaagagttnttcagaacaaaaaagtcttatcctcttataaagaaaaattgttttatcctcttacaaattccttggccaaactacttgtgattcaataaggaatttttgagtgctcaaactgttcaatctatctcttt

SEQ ID NO: 69 - DNA, 142 bp, Glycine max
  unsure (1)..(142): unsure at all n locations
gctgagngatatggngtacccatcacatgtggtactatgtggcggtcgggcgatgttgcacaacatagtttccacatccacaaatcgcgcataaacccaccatcccctgttgcccaccttcaactgaactcacgtacttcta

SEQ ID NO: 70 - DNA, 260 bp, Glycine max
  unsure (1)..(260): unsure at all n locations
agtcacctgggctgcagctaaagttaaatgaccaaagagaaananataanatattataaaatatttgttntctanaacggttatctntaaaaaaaagaatcgtcttagaatgtcagatntcaaagacggttactacatcacaatcgtcttaganaatagtgtcagaaagactntctaagatggttctaaagataaccgtcttanaatatntattattctaagacggttattatatcacaaccgtcttaganagttcacat

SEQ ID NO: 71 - DNA, 249 bp, Glycine max
  unsure (1)..(249): unsure at all n locations
atgacatgcgatctttctttggtccttgtgaggtgcttggcacccatcattagggcaattgtgaaattccaggacatggccggaaaccaaaaaatattgatgcacaatccgtaagtttccgtgacacaccgaanatcaaatggaagcatcgttgcataattaagtgagattctgtaacattccgtaagtcaaaaaggaggtgattatgtaatccgcaaggttccgtaacattacggaaagaaaacaagt

SEQ ID NO: 72 - DNA, 373 bp, Glycine max
  unsure (1)..(373): unsure at all n locations
gctttatgctatactcagtggtgttaatcgcttgtcacaattcccgagctctattagtggcactnggctgaatttattctatttcagtttctgcgatccttatttaaattcctttgattgatacgtattgtcgtaattatcattatctgaaagtataatatcaatgaactgtgaacattcactcatacatatatatccatttatattattctcttctggcacttgctgtgtttgcactttccttcattgttgagggtgaattatgttngtgaacagcgttgagagggtattctctcgttgaggagttattagcaccattttaccacttgagtcagtcacaacaattnttctgtggattttcangaatatttca

SEQ ID NO: 73 - DNA, 330 bp, Glycine max
  unsure (1)..(330): unsure at all n locations
tatatgtaggacactccccatagaattatggaccggttctgttgttaatgccatagtgttgacaacttctaatcatctcttggaacctttcctangcttcaagtagactctnttactccttctgcacaaaaatgtttccaatggtccttgatgtactgatccttcttcatgggagagaaatatctccttaaaaaggtacttgggcactagttccacgtagtgatactattctctggcagtgaacatagccagttccatgcattcccattaatagagaagggaaaggcataaagaatgaagtattctgcttgcacatnggtctgtctcact

SEQ ID NO: 74 - DNA, 441 bp, Glycine max
  unsure (1)..(441): unsure at all n locations
tatctctaacatagtgcatttgaaaaagcttgtataaactntatttattagcattagacaacaatccttttggtttgtttaaatgagttctttttcacttattagacgatacactccgagtccaatgtttcaacatattgatggaggtttggcangcataccatgtttttgtagtagatagtggtaagtgggttgtcgtatccgcannggatggtagatattacgataatttctactattctaattagaactcctaaacacactaattactaatgtacataattttatttgcanattttataattaaacaattgtagcatattaaaataggtcacaaataacaagttacagtgaaaatcatgaagagtgtggatcaattactattacatctcatcttaatacactaagatctattatcagtatgatcatgtatttgtatct

SEQ ID NO: 75 - DNA, 318 bp, Glycine max
  unsure (1)..(318): unsure at all n locations
tagaactacatcagcgcccaatgcaatgagataaatctatcaacagctgcttcaacaaacatctctgtgtgataccctgactaattatatagcggtttgtgatcaagaacacacgataaccatatgcacaagctttcattgctggatatagttctgcatatgtggcacataatcctaccactcacacgtcataatactgtcagagaacaatgtgtgagcaaaagaacaaaatataaatgtctaataaatctttgtcaacatgataagaaatagacatgantcacaatcctgacctgcagtgaaaatgctaacaactat

SEQ ID NO: 76 - DNA, 170 bp, Glycine max
  unsure (1)..(170): unsure at all n locations
gttacatagaaaggaaagattcgtggaatctaatagttnttcttcatcagttcaagattctntatcagccatcaggcaaaaagaatataaatcttttctatcgagggcctacccaataaaatgagtaggatctattatcaactcccagtatctgccaccacaactgacat

SEQ ID NO: 77 - DNA, 570 bp, Glycine max
  unsure (1)..(570): unsure at all n locations
tttagtgtacgtgacncgcgatcctctgagtcacctgcggtgtgcangcttgaaatgaacaaggangctctcgagaaattcaaatggtcttaacttatcacacggtagtncggattcagagcatactatgtgaagatgctcgaaattgaacaacgaaggctctcgagaaattcaaatggtcataactcgccacacggangttccgatcagacgcataatataccgagacgctcgaaattgtacaatgaaagctctcaacaaaatcaaatggtcaaaacttgtgacacagaagtccgattcaggcgcataatatatcgagaagcttgaaatngaacaacggaggctctcgagaaatcanatgtcatacagtgtacacggaagtcgattccgtggatagatatcgagaagtcannaatgaacacggagctctcagaaatcaatggtatactttccacggagtcgataagtgctaataatcagagatgaattgagacggaactgtgagaatcaatggcatactatacacgagtcgatcagcgctaatatcaacgctcaatgacacgaagttct

SEQ ID NO: 78 - DNA, 265 bp, Glycine max
  unsure (1)..(265): unsure at all n locations
caacttccgtttgcccatcggtttgtgggtgacaagtggttgaanataacaatttagtgcccaacttgctccacatagtcctccaaaaatggcttatgaacttagagtccctatcactaacaatgctccttggcaaccatggagtctcacaatctccttgaanaacaaatcagccacatgggaagcatcatcaactttnttacatggaatagaatgagcccatttagaaaacctatcaacaaccacaaaaatggaatctctacca

SEQ ID NO: 79 - DNA, 599 bp, Glycine max
  unsure (1)..(599): unsure at all n locations
aatattgtacctgacncgttatctccgattcacctgcggcatgcaagcttcccaacatcaaagtaatacaacattcaaacagcacaagctatcacagccaagtanacagagcaaagggcagaaaactcttgtcaaacaccaaccaatatcacagcttttcttactcaaagaccccagtnacaatgccttcgttccaattcgttaaccggtggatcgacttcaaaaatttactggaagtctctagtacatgagcctacattttgaccgttgggatctactagaaaacatncagaactcattctgcactactcttttcacagncaatcacacacaagcatttttctgcacaaagccaaaatcctgctgacctattttgcagcaaattctgcatagtgagatttcgaaatacacttctctcatcaatcttgccanatcaattctacnnagtccaatatgtataatcatgtctacccaaagtcagcttcaaacacagcacatagaattatgtgtccatacccctcaaatcatgngtttctagggttgaaagtgaaantgagntgaggannattgaacanactctcacctacaccagtccatan

SEQ ID NO: 80 - DNA, 251 bp, Glycine max
  unsure (1)..(251): unsure at all n locations
caacacgaacaacaggtgagacaganaacttcatagctctaatgggatgggcatcaacttccttttcattagtcaaagtagcattctttggtatgaactgatccataccaaccatagcaacagtgttaccacaggggacatcttccacagtttcctgtctttttcccatccacatgacagttctttgaacacttttaacatacaaatccttcttctccccacggacataatatggtcccataatcctcacc

SEQ ID NO: 81 - DNA, 294 bp, Glycine max
  unsure (1)..(294): unsure at all n locations
atccacgtcgattaccaatccttngaaacatagcacgagacctatcagctatgcttctttctatagtaacatctgagtctgcatttagcatacgtggaagggtgctcgatccatttcgtagttctctatcacatgaaaagccagaggcccttatctgtacacaagaatggctcanagatacaccttcacgcaccattttagacttcgatttggaagagcttcaaagtttcgacaaacgtatattgttttcccaatttgtagtaataatataattaaaatatttattgagtaaca

SEQ ID NO: 82 - DNA, 303 bp, Glycine max
  unsure (1)..(303): unsure at all n locations
gctacgtgagagagggagaganaaggcttctgaatntctggcttggctgagtgaggagagagnaaagctntntggttntaaaataaaaagggttntcctttntatttttttccattattatattcaagctctgccacatgtccctatttgattggagcaaaaagggcccactntctctttttgactgtgacccatactcagtcacaaaagtgagaaaaatctgaccttngaaacgctaaaatcctgcctcggtttgcgtgtcgtttctctgattccaagttctcgcgtttctctgcgtccgcc

SEQ ID NO: 83 - DNA, 226 bp, Glycine max
  unsure (1)..(226): unsure at all n locations
ctgtatggtggtcancacaagagcacaaaccacatacccttgcgacaggtacatatttctgattcaaggccagctgggttaccaagttgaccaacgcatccagtntgccttcaagcttcttagtttcagatgatgcanatgaggttgtagctacctcaagcactcctctaatgactatggcatcatntctggcgctaaactgctgggagttggacgccatcttctc

SEQ ID NO: 84 - DNA, 381 bp, Glycine max
  unsure (1)..(381): unsure at all n locations
aactggtaatcgattaccanaacattgtaatcgattacagctntttgaaaataattggaatgttgtaaattcaatttgaaaactttttcanaacaattntgctactggtaatcgattaccagagagtaaaaactctttgtgtaaggggttgtgtcaaaaactcatgtgctattcnaagttttgaanaactttttaatacttatcttgattgagtcttctcttcattcttgaatcttgagtcttgaatcttgatcttgattcttgagatcttgaacctngaatcttgattcctgtctctagaatttcttcttgagtcttgaattcttcttgattcttatcttgaactcttgaattgtcttgattcacttgagtgtctttgat

SEQ ID NO: 85 - DNA, 528 bp, Glycine max
  unsure (1)..(528): unsure at all n locations
cactaacctagaataatataacttaatgcccactaacctagggaatataagaacttaatggttgagtgtaacttgaaatgtggcaaccaaaagtcaccctcaacaggcatcaagccagccaccatttggtcttccaaaaggctgatgcctangtttccaattgggcccttattacaacttgaactanaccaaactaaagcccttttagttgattaaccaaaaccatatttttggtcagccaactttacaaggagtgggccattatttagacaaactaaacactctaaaatngagaacaagtggtgtcatttagtcctcctncattttgggtatgatacaactcacaaccttggactntttctcttanacatgggcttgtatcaaatagtatggacaacancttgtgaagagcttctttggattncttgctctaccccctgcatangtcatccaagtccttcaagnggatccctgcccttgctctggtcatgtcctcatcattctcttcctcctgagaaagaattgctn

SEQ ID NO: 86 - DNA, 239 bp, Glycine max
  unsure (1)..(239): unsure at all n locations
ctatgtttggattaacaatgcaccccagttgcccaatcaaatagctaggtcactcgaatgaaactagtgtccttatctttacttnccttntatttccaatanaagataagtaaagaagggcaactgtcataccctaatttctccagggactatcattncatggatatttgatttcgctagccgaattgagttgttcgacgcctattaccacccaagacgaaagaatcattcgacgtttg

SEQ ID NO: 87 - DNA, 511 bp, Glycine max
  unsure (1)..(511): unsure at all n locations
aagaantggtcatactatatctttcttcgcgattctatanttttcactcattttacaaccaattaaaacaaatgaggtcctttctctgattccaatatctatgtctaacctcataatcaccggccaaaaaccaatatcatacgcaataaatcaagcccaatgtaaaacatcatcacgtgtagcaaacacctataaagggataatacatgtttagtcttcaacgcacattcatttatttactttaacaanaaanatcatattaatacctgagaaaatattgaagcataataacaatcaacatgttgatgcacatcaagttcctcttcattntcttcattcacactanggttctcttcattcatatcaactnttntagaacatatgtngtcatacattcactaatcttcgtncatctaaataaaacatgaaaaaaatcatgacaacacacacccctacacatatacatatacatatacatttttattttnntttacatattataaataaacag

SEQ ID NO: 88 - DNA, 320 bp, Glycine max
  unsure (1)..(320): unsure at all n locations
atgtttanaagtctgaagcttcctcctccctcactcattttctcaattattctccttcctaaagtttcatctcctctctagagctaagaaattaaagtttactccaaagtgagtcttattccttctcctttaaatctcctttggttgatgtctagaanggaaactattcttcttcttcctttgttctggttggtctatttcttctctctttntccttccttgaagtgacccataatgggttttgatgtagaaaactttattaagtgttgtctccatgagtttgatgtgtggacttcgctttcttcattagcattcaatat

SEQ ID NO: 89 - DNA, 550 bp, Glycine max
  unsure (1)..(550): unsure at all n locations
cgcaacgcttgtcnantnanananttttgaatccagcttcgtacccgcgattctctatactctacctgcacgcatgcaagctnnttggagtagagacatgggaccaactcattntatttcatataagagcatctagtcaagatatgagagaccatacaagattcctagcggcttctaattatatgggccattaagactatcatatgctgacaatatccgagaagcccatgaatctcttctgtggcggagaanggtgcgccactgtctttgctttgtaacaacatggagagtcttactccgttcaagaaaagaaaccggccatcacatggtttctctgggtaagagtcaacgccttctctacctcttttcactatacttgtgcatactctcgcgacctatgtcggggccgggtagactaactttttgtacttggcatgaactacatgtggctcgttgataacctgaaaagctcttgactgatagactatctttgaacatcttggtggatggcatttcttcaatgatatgtgacccaaaccggaattacgca

SEQ ID NO: 90 - DNA, 281 bp, Glycine max
  unsure (1)..(281): unsure at all n locations
cgtgtatgcgagacagagaccaacatgttatctatcatcgccaagttcgaagaagagttatgtctggccacggcccacgagcatagaatcgcggatgagtatgctcaagtatatgcggaaaaagaggctagaggaagggtgatcgactctttacaccaagaggcaaccatgtggatggatcggtttgctcttaccttgaacgagagtcaagaacttccccgattggtagccaaggccaaggcgatggcagacacctactccacccncgaagagattcatgg

SEQ ID NO: 91 - DNA, 88 bp, Glycine max
tgtactcgctatgctatgcacgcatggtaagttcgcttagaagttgggtgtaatgctacaattcttgcgggaaatggattaaacctgc

SEQ ID NO: 92 - DNA, 359 bp, Glycine max
  unsure (1)..(359): unsure at all n locations
caagctntgaacaatatactnggccttcatntaactgtctttgggctnggcagccacgctcaacanagtactttcgacacctactgtacgttgatttcaccaatgctgntatgggaatgttgcgacaatcctttanaaccttattgatacattctgagaggttcgttgtcatgtggccatattgacgtccttctctatcgtaagccatcgtccatttttccttngagatgcgatcaatccatgttgctatggctggactcagttcacgaaatttttctaaatttgataaaaatgtgcttgcaggagtgtngctgcataaaatagtatgaatacaatttaatataatgaagtaaataacg

SEQ ID NO: 93 - DNA, 367 bp, Glycine max
  unsure (1)..(367): unsure at all n locations
acccatcacatgtggtactaggtggcagtcgggcgaagttgcacaacaagtntttccacatccacaaagcgcgcataaacccaccatccncctgtgcccacctccaactaagctcacgtnctcccacgtagcccatatcctcatttctctcaacaccgggtccccatcaatccttccaagcttcacaacatccaatcanaacaacattcaaacagcacaagctatcacagccaagcaacacatggcataggcagataactctgctcaacacaccaaccannaatacaagctttctcactcaaagaccccagtaacaattccttcgatccaattcgtaaccgttggatcgaactcaaaatttactgga

SEQ ID NO: 94 - DNA, 280 bp, Glycine max
  unsure (1)..(280): unsure at all n locations
ataacaacaaaccacccaagaaaaatccatangcttcgtatacaaaacgatanactcattgtagaacaaaaaaagatccaaccttttgtactaatcataaaaaatgaacaaagctctaagtctttgttgtgcgatgaatcaaaaaaccacaaaaagctagtaaatgatgcacatgcaacatcaaaacccaacaaaccctgaccaaaatggtacataacaacaaaccactcaagaaaaatctgaaagctttgtatacaaaacaacaaactcatgataaaat

SEQ ID NO: 95 - DNA, 367 bp, Glycine max
  unsure (1)..(367): unsure at all n locations
tagttatagccggtacgaattaccatcattntgactagcttccctacattgagctgtggaatagctaatgtgctccatggtggatntctcatcttcgcctaagaagggttgcaaatttgagatttcctcttggaaaatggattaccttgtcaatccattaaaggtaagctnttatgtacaccgggctgtcaactggcttcaactgcacctcanaattcttacaaattgcatttgctatcatattagcatctattggttgagggacagtcgttctcacctcagtccaagtaggtatggggttctctgtcatagtggagtgttgttaccatccatttgtggcattgtcatgttnttgggtgacatattg

SEQ ID NO: 96 - DNA, 130 bp, Glycine max
  unsure (1)..(130): unsure at all n locations
aaaaccccatacccacgaaaattaagagagaaagaagtccacccaaaccttgattttcgaagtctcactcgtagccactcacttcacgaccccgaanatgccctcctatcgcgatttgggcagaaatgat

SEQ ID NO: 97 - DNA, 446 bp, Glycine max
  unsure (1)..(446): unsure at all n locations
ctaagctactcacctanagtcacttgtgttagttatggcaagtgtgctagcttanagtagtatttatatattattatcatatacatgttgattactacattantttggcaacaataaatactagcatccanaaactactagttagagctttgatactgtntcgagttgttgggatgcanaaatgggatncaaaatgtgatcagagccaagcatatcagatacatgccttaatatctttatgggtccaaagtctatatgtcagacaaaatatatgcctttcccttntntatacttaactagctaanattcttctagaagatgcatcgtaatatatatatatattatgatttgagctgcataagtgaagaataatgtcataaataatctggacagttttcttttgaatgatctgagagtactatgaataataaaaataaaataaaatg

SEQ ID NO: 98 - DNA, 201 bp, Glycine max
actcgacatggttgaagtacattacctccatcctatcacgcaacgggtgatctactggcagttacttgaaggccttatgtcaagcggaggtatttgcgctcctatcatgtcacacattatgcactgggttcctgacataactctccaaatataatgtgtttcccaagaccatttaaagctctccacatggggtcttggatg

SEQ ID NO: 99 - DNA, 568 bp, Glycine max
  unsure (1)..(568): unsure at all n locations
aaattgtcgtgaccgttatcttcattcacctgcngctgcagcttgcgattgtcttgccataaagatcggtggttgaaaaagcaatttattattctgcttggacgaatgagaaaactggngcaaatgaagaaggtgaggatgaangaaaaacccatgctgtgactgccattcctatacagcccagttttccaccaacccaaaaatgtcattactcaacccttcttcttacctacacgccatttattcacaaaggccattcctaaatcaaccacaaagtatgtctaccgcacttncaatgacgaacaccacctttagcacaaaccaaaaacacccaccanaaaatatatttgcaccaagagcctgtatgttcaccccnaattctggtgcatatgctaactgctccatattacttgatatgcatggtaccataaccctgtanggtcctcnaccccattttctgggatcgactcaacgcacatgtcatatngtgangaccctgggcatncattgacaatgaggggctgaacgtaggtcanggctaatgatcggctgctgaattnangagatt

SEQ ID NO: 100 - DNA, 350 bp, Glycine max
  unsure (1)..(350): unsure at all n locations
tgattctgcagcaatntgtgtttctttagaattttcaatttagtccttgccacattggactcaaacttgccacattgngttgcttacgtggactgaggtgtgccaaatagacatttgactaacggaatatattagattntaacagcaaggacttatttgcataacggatgtaaagatagggacctatttgatattaaaattaagttaaggactaatatgcaaactggttacaatctcanggacgtaaatgcctattcactcgtctctgtgtgctatcaggctnttcgtcttacagacagcaaaaaagaattttatacggataccactcggtatttccgcccgtcacgtga

SEQ ID NO: 101 - DNA, 218 bp, Glycine max
  unsure (1)..(218): unsure at all n locations
ctcacgccatttctctatttggtcttccacgagagctatataaatagatggagctgtatttgagcaactaaaccttttgctcaaagtacctagatagtacacgttccccttggtaattggacctccaataacattcaaatatattttattatcattaacagaagtagcagtgttagggtaaccctgtgtgaaccaaggttntaaaaatctgcttttag

SEQ ID NO: 102 - DNA, 283 bp, Glycine max
  unsure (1)..(283): unsure at all n locations
gaagtctaacctaatataagcatacctgccagcatcttcaggttcatctatctcaaatgcatccaactcatatctntctggtgtagtaacacgcatacacaacgtttccacacatactaagccttcttttgtgacgacaaatttgttgattntgacgagaacctcgttacaatcttcaagcacatatgtcaaccttttatagaatattctgatagtgccaaaaagaagttagccaagcactctatatgatacaacatcaatttcttggcaaatcttgtctaca

SEQ ID NO: 103 - DNA, 272 bp, Glycine max
  unsure (1)..(272): unsure at all n locations
agctactttttttcgtcttctttttgcgagtagaccctagacctgannatggatttgagttgtgtttgcttgtgtacttcccattagctactgtgattatgctctgtgaatttcatgacaagatgcatcacatgtcataaaatgaagaacaataaaatgtaacttctttctttgtctcatcatactcaatgagcacattacttgtgattttatgtactgaagttgctgggtttcgttgcatatatgacactgttcatcttcaatgtcaagca

SEQ ID NO: 104 - DNA, 339 bp, Glycine max
  unsure (1)..(339): unsure at all n locations
gctttcgattcattctatgtacccgtagtggtccacaatgtgtttcgtgcatttataattctcgtttgttactntntatacccactgttgacatgcttaagccatattgcttaagtcatttctcgcttaacttaaaaataaaataaatttccaccgaacattntgaatatattatccgttaacttcggttaaaatcaattccgaccgttcggtcatgccgtaaccacgttggaaatcanaaagagggtaaaaataatataataatcaaaaaaatatctttttagtgaaataaagcggaaaatcaatcggacgttttctcttttgggattctcattctta

SEQ ID NO: 105 - DNA, 237 bp, Glycine max
  unsure (1)..(237): unsure at all n locations
gttcacattcttgttctttctttgtctaacatacacacttgttcaaacctcatgaaaggaacacaaactccatcacaataatgcattcaattcanaataaaagcatacaaccattttcacanatcaatanaagtgcttcactgccatatcatcaaaatcaagttaaactgttccatatgcttaagaataagcanaccaactacctcaaaataaaactagcagtgtgtcgcaacctac

SEQ ID NO: 106 - DNA, 498 bp, Glycine max
  unsure (1)..(498): unsure at all n locations
cactcccgcagcacggtatcttatatcagttagttccgaaacgcacacacggtgacaataaatatncaaatgccgccttaattgctttcaaaattaaacacattgacattatcaattatcagcaacaacaccgtaagtattatattcacaaaattaataatagaacacctaaaattataaagtagccactttcgatacaatgaatcnaanaatattntagtgagagagagagagagagagagaaaccttgtggtggaggaacgcgtntgtganaacggatgcgaagagttgtgagcactggatgcgataacctctgtgtggatcgagagctttgataccaaccgttgttctgtanggttcngagcgctggggtggacgatctacngcgtctgttggttctgcggaaagccgcttctgaattgccgattcgcgtcgcgccgctcataggttctttcacgctgcgcataaagaagatccgaaagaagatacaagacgctg

SEQ ID NO: 107 - DNA, 526 bp, Glycine max
  unsure (1)..(526): unsure at all n locations
tacctcanttggtgccaggcaccactcccactatctgatgacctactcggttcanaaacataatatagttntggtgttcaattatgaatacaaaatatttcactttatcttcaggttttcatatccaatcctatttccaaacactcatgaagaaaattgctccggccacctcctgattactctatacaatataagaaactatagttcgcgtattataataaaataaattcgatagagagttacacgatcattcactgagtcgtcgtacacaagcattaccgagattcatacattacctctcatatgttgaggaccntcttgcaagtcagagcgaggaacagcatctcatcgggctctgctgtgctgttctgctgccacaacacacaaatcgacatctaaaccctataattggcaataaanaatactaaatagaaaatgatcatgcagacgtgtcgtgatgatcgatgattgagcaaagatggagngtaagaagatcgtcatcatgcgagagctgaagcatgtgccg

SEQ ID NO: 108 - DNA, 580 bp, Glycine max
  unsure (1)..(580): unsure at all n locations
agtggcacttannnnttgtatccacttgataccgcgatccntagagtctatctgaggcatgaagcttgagcanatcnacgacattacttttactcgatgtttgtatgaatccgaatattcgagatgctcgagattgaaacagaagctcatatcaatggcaaaccacaataactattaactcggatgttcgataagtcccgtaatatatcgagacgctcgaaattaaaacagaagctctgagccacattcaacgacaattactctttacttcgatgtctggatgaatcccgtaatatatcgagatgctctgaaattgaaacagaagctcatagcaattgcaaaccataataattttaaactcggatgtccgattaagtccccgaatatatcgagacgctcgaaattgatacaaangctctgagcaaattcaatgacataactttaacttcgatgtctaatacaaccgtatatacgagatgctcgaatgaaacagaactcgngcattgcaaccacaatactttactcgatgtcgatagtccgaattatcggacctcagatgaaaagagtctggcaatcaaat

SEQ ID NO: 109 - DNA, 309 bp, Glycine max
  unsure (1)..(309): unsure at all n locations
aactcggatgtccaaatgaaacccgtattatatcgagacgctcgannattgaaacagaagctcgtagcaaatgcaaaccacaataactntttactccgatattcgactgagtcccgaattatatcaagacgctcgaaatngagaacagaagctctaagcaaattcaaacgacaatacactttaactcggatgtccgaatgtgtgctatagtatatcgagacgctcgtaattgagaacagaagctcgtagcacattcaaacaacaacgtaattttacacggatgtcctgtngagtcgcataatatatcga

SEQ ID NO: 110 - DNA, 279 bp, Glycine max
  unsure (1)..(279): unsure at all n locations
acattggaaagtatgtttaccagtgggacgttactcttaaagcanaaatggcatgtaacctcctnccatcaatacaaacatcaatgtaaaattagagcaagcttatgcgcatatttctctacgaacgttcacttgcacaagacatcctattaaccgaaaaaatgcacccatatacaatcaaggcagccttgttacctagaatatntacacgtacttncagggtgtatttgtacttacatcacacacnatctctttgctataatcacatacatgcatact

SEQ ID NO: 111 - DNA, 282 bp, Glycine max
  unsure (1)..(282): unsure at all n locations
ctcacgccgngaactcctctaattcagcactcatgcagcctatggcacccgttcagagggatgtcccccaggttccaactccagccacgactcgcccggccgacaatcccaacgcaacaaggaactntcccctgatgccaattccagaattcaccccactcccaatgacgtatgaagacttcttgccgtctctcattgccaaccaactggccgtagtaactcccgggaagatcttccaaccccctttcccaaagtggtatgtcctaacgcatcttgcacgta

SEQ ID NO: 112 - DNA, 304 bp, Glycine max
  unsure (1)..(304): unsure at all n locations
tacccatcacatgtggtactaggtggcggtcgggcgatggtgcacaacaagctntccacatncacaatgcgcgcataaacccaccatcctctggtgcccacctccaactgagctcacgtactcccacgtagcccatatcctcgtttctctcaacaccgggtccccatcaatcctctcaagcttgcacaacatccaagcaaaacaacattcaaacagcacaagctatcacagccaagcaaaacagagcanaggcagaaaactctgctcaacacnatcaaccaaaatcacagctttctcacgtaaa

SEQ ID NO: 113 - DNA, 201 bp, Glycine max
  unsure (1)..(201): unsure at all n locations
tcattaaaacatacatcgaatcttttaaattcaattctatatttaaatatcacaccattacgaaacgaaaaacatacttacatcaaaattatcatttgagttataaatactcatagaaataaaatctaatttgattaaatcaaatatacatacctagctaccacgacacaatattatntcattttcgttgttatttctaaa

SEQ ID NO: 114 - DNA, 345 bp, Glycine max
  unsure (1)..(345): unsure at all n locations
acatgggaaacatntataatcttgaatattntataataaaatatattntggtaggtctctatctaaaaatatattatattttttttcacaaaccacgaatatctntcctaaaagccagtggttaatgaatattgattcctatgactcanatctgatgtcactggttaaattaaaataatgttatgtcaatggattcaagcactctatnggtntatataatatctttgttatcatttcggaaacatataattatgaaatttttatcatattctatcttaatatatctggtagataacatttaattttctcacaaacaggatatataaatcttaatttctattattt

SEQ ID NO: 115 - DNA, 201 bp, Glycine max
  unsure (1)..(201): unsure at all n locations
ctatcctcaattcagcaacacacggtgaanacacagcatataacatgttgaacaaaacacatggaaagcgggaanaacagaaatggttatatagtgttaccttgcgcctgatgaatccttgtggagactcacacnttctcctagcatcgaacctagcatgagaatgagagtggatagcacagganacacaaacacagtact

SEQ ID NO: 116 - DNA, 251 bp, Glycine max
  unsure (1)..(251): unsure at all n locations
cttcttcggcgaaggcgagatagtttgtggcagtgatattattgaccagccctccgaaaccttctaccgagatatcttgtgccacgtgggcctcgttcagaacttntactagcagagcccgatgaggctcggagctcatgagtaactccaacagcgagaccctggccggggttntgttgagctgctcgataaccttgaattcgctctgctgaattatacgaaggaactcgctggcatcctctagcgacacc

SEQ ID NO: 117 - DNA, 369 bp, Glycine max
  unsure (1)..(369): unsure at all n locations
cgatatttatagagacaagaaacatantttaggctatgatttttagctagcagtgtcccttactaatgtttattggttaaagatgattcatttaattntaaattttaaagaattatttactaaaaattatttctgttcaaaaataatataaagcaaattacatgtgtccncgaggtttaagggaaatacatatgtctctcttattttgtaaattacacatgtttccttgaattnangatatacacatgttccttttgttttaaaactacactatccctaatgtgttaacattgatatacagtctgtcatgacatttgattaaaagctaattattttgtctataatgganatggactgaaaactattttt

SEQ ID NO: 118 - DNA, 125 bp, Glycine max
caagatcaagtttaatatccagtttcatgagaagaaatcaagaagattcaggaatcaagagaagttgatttcaagattcaagagaagatgaattcaagagtcaagagaagaaattatgaagactt

SEQ ID NO: 119 - DNA, 503 bp, Glycine max
  unsure (1)..(503): unsure at all n locations
attatgtgtcgttgacncgcgatcctcacagtcacacgggttgacacccttggattacntacgagcgcctcatatattacgagacttatcggacatcggtctaagtatggcgctgtatttttagacctccgtttcactacagcgtctgattatacaagctcgacgacttcgagtaaagtatggcgtgatttctgaagctccgtttcaatacagcgctcgattctacggacacatcgacatccagtcaaagtattgcgttgattactacacttctgttcaatttagcgttgattatacagactcatcgacttcagcaaaagtatgtcgttgctttttacagttcgtctgattcagcctttatatttaagggtcattggcactcagttaaatattgccgtgatatttggagctcgtttaatacagcggtgaatcctcggacacatcacatcgactaaactattgcgttgatttgtcaacttaggttcatacagcggttgatatag

SEQ ID NO: 120 - DNA, 149 bp, Glycine max
aagctcaatgttcctcccttcataggttgaagtgatacatatgcctatctggactgtgaaatgaagactgagctcatatcttcctgctatgactacactgatgcgcacaaagacaatctagcacctgctgaattctccgactatgccct

SEQ ID NO: 121 - DNA, 610 bp, Glycine max
  unsure (1)..(610): unsure at all n locations
nncctatgtcgttgacncgttatactccgattgcacctgccgcatgcaagctatgnnttnnttggatgctgactngtggaaagaagccatttatgatgagaaggattctttataatctaacaagacatgacatttatagactgcctctggtgcaaccaatgtgtgtaatgaatcttgaaaagaaactaaaacctgatggtactgtggataaatacaaagctcgccttgtagccaanggttttatacaaagagagaatgtagatttctttgacaccttttcactagtcactanaataacatctattcgggtgctaatatctctttgtgntnttatattctagtggtacaccaaatggatgttaaaactgcttttntaaatggtgaactggaagaagaaatctatatggaacaacctgtacggtttgtgattcatggacaaaaagataaagttngcaagttatataaaactttgtatggtcgtaaacaatcacctaagcagtggcatgaaaaagttgataactaatantctcgaatgggttaaggtgaaatgaaatacaatgcattactacaaattgtaatatattgcctatcttgtgaaatgcgtgacttt

SEQ ID NO: 122 - DNA, 335 bp, Glycine max
  unsure (1)..(335): unsure at all n locations
atgatgttagaagaagaaaataaagcctttctttgataaaacaaagttaacgtttaaagaacaactttgtaagaaaaataataatattttacacaaacttgtttagacaatgaacatagatntcgcacaacataaagtattttcaagatgaaatgaaattcacacccctatattaatgtaaagcagaagataaatacaatagagacatataagatgttaagaattatactatgttatctttaccactaaggctatgtntaagttttgattaatcactaagtntcactaacttctcacaaatacaagtattacgtcacaatcatttctcgctctac

SEQ ID NO: 123 - DNA, 539 bp, Glycine max
  unsure (1)..(539): unsure at all n locations
ccactgtgtcgttgacaagttgaagtccactcgtacctgcgngcatgcanactcgcatgggtacnatgagacttggttngctcgccanaagaattttgttctangtgtgtttcatcttgaatggggagctnagcactatttggtaagtgacggtggctgctgctgaatgaaacacggactctgtgggttacggtgcttatggcccactatgggaaaataaaactaatttgactattccacaactgcatgattgngtcccactgggggaacgatatagtgaatacactaaggggggaactaaactcggtgagcgatgctgatgcaatgagacaaaagtattttggatgagtgggtggggatgttttctaaacaattatgcgtgccttattctatagcagatatacagggaagagggatggattgggttgaggagcactgaaagcctgtttatggacaccacctcagatatcactatcacctttgctataggtgtgagaggtgatgtttgatcttatcgataccttacgatatatcatttn

SEQ ID NO: 124 - DNA, 392 bp, Glycine max
  unsure (1)..(392): unsure at all n locations
tgtgagaaactgctatgtgaactnttgaactcatttctggtgattaaaggccccatatattgtttccatatggtcttagacaagtatataaaaatagccccattacaaccaatttctagtaggcacatgcatccatcataaaataaatgtcaccttagttagaaacaaagaagaagaagctgagaagcaaatnagcttctctacccaaacgaaacctctgccacaccgctcccccaacttctncattctattgttgccttcaccaaaggcgaatccaagaaatttagatatgggtggcaatatataaaaatcatgacttgagaatattaaaatttactacatgtcattataaaatatatatataactatatttatatgagaaaagaatatat

SEQ ID NO: 125 - DNA, 499 bp, Glycine max
  unsure (1)..(499): unsure at all n locations
ggttangtattgagacaaggtgggttntaagctcatgttaatagatggacagattatactcacaattngtcttttcagttggacatccgctatgcgcactcgtggcactaagcgccctgtctatcacgcgctaagcctgagctagctcgtgctaagcgctaagacctctgactagttggttgaatagttcagataagtgcacatcaccgcgctgagcccaacatctcattgtaatgactcaacagggctacgggagagccaacccctctcttgaaattatgtgacgcagccacttccgactagcccaatcctctgaatgaactaatgctatgctacaggcagagcctaacgccaacttcactatttgaatattgaagtggcttacgcgctgttggctaagctgactatctctgaagataagcttgttgctcgtaacctacatccatgctagcgctattgcgaagatatnntgtgtgcaaagcctatatgtactatggct

SEQ ID NO: 126 - DNA, 434 bp, Glycine max
  unsure (1)..(434): unsure at all n locations
ccccgtgtccttgaccagttaattcccttgtacacgcgattgtctgactctacctgcangcatgcaagcttcatctanttattttcaaatctatggcgtagttgangctttatcatcctatngaatcaaataatccttgaagtataagatgctttcttctgtgaagtgcaaatcctgccatgtactgcttaattaaaactagtggctcccaaaaaggggagaagccatataaacaactggtctgtttttcaaaggggaggcgagcaaactttcattctctgtgacaagtgtatcactatgaccttacctgtgatatgcctgcaagtgttcagtagcacttccatcactaaagttagcgaaatatagaattttttttattatgatcccccataaaattttattttatacgtaatttaagaatgttattatctacg

SEQ ID NO: 127 - DNA, 286 bp, Glycine max
  unsure (1)..(286): unsure at all n locations
ctataatatacctccatcttaatggagtgggtaccactactggaaacccgcatgcaatctttatgaggaatagattaaatattgggaagcctaaacaggaccttatgttccttatagtggcggaagtgcacaatagaaaacctaagcagatggactgngaaaaagaagatatacaatataattaaaggccaaatttatacatctgcctagaatgataatacttanggtttcaatgtaaaggctaggatatgggatcactacagtacactgaggccaacaatgtaaa

SEQ ID NO: 128 - DNA, 201 bp, Glycine max
  unsure (1)..(201): unsure at all n locations
ctcattctaatgnatcncaacacttcatttcatacgaaatcaaaccactgaatcattttcaatcaattcattgttcaatcatgcttttgtacaagctactactacaaacaaaataactaaaatttaagactgaaatttaaataactganacataaacataanataaactaaaatagaataataataaactgttcaaaatgc

SEQ ID NO: 129 - DNA, 303 bp, Glycine max
  unsure (1)..(303): unsure at all n locations
tcactntaacctcctatttctactgaatctagaattagcctttcaaaccctcanagcatcacactnttccactcataacactacattctcactntctaaccctagaataactctacctttcatccctagcnagtttncatcagcaatttcagcacataaacatcacaagcatcatcataaaaaccctacaacagaatgggtaagcttgactcacaccaaacatggcaagttcaacatgctttcaacannatccttcaccaataactaccacaatacataaacctagtaaaactacccatcata

SEQ ID NO: 130 - DNA, 522 bp, Glycine max
  unsure (1)..(522): unsure at all n locations
aaaagcatatattttgttatccgcatggatactctctctggaatcaaggactcaattcctgcttggatataaattgctgtacaggcttccggctgaaattcatacagcggaatatactatgatcccctagaagaggtaagattctagacttcttacatgtatgatacacttataaaaagagatgacacatcctaatatctctttttccattatgggatagaattgtatctatgacctctctttgtagtactcatcatgacagaactnttaatggtgatatgcaatgatgtngaaaggtntgtaatttcttttaagccatnggcacactctggctttattcttatattatgaagaaaatatcctcactcttttgcccaannggataatgtatgatcgatgtatataagaagtgtatatngaagtgcgatatttacccatgttcatactgcagactgatngtatgttgaggtacactngtaaatataacctatgaaataaaattcttttccttttcttgctatn

SEQ ID NO: 131 - DNA, 341 bp, Glycine max
  unsure (1)..(341): unsure at all n locations
ccatgctaacatctgaatcatatcagcatatcacanaaactgtttattcacaatctgagtcacatgttgtaagtggacattctttaatgtattcatactatacagtatccatggcagccagaattcattcatgagaccaaccctcttgtctgtctgtngcagtccttcctttgtcagttntcgcactttgctaatcacaaatgtctgctctcaaaacaactaaattattttattattggatcaatacctataagaaaaaagagagcagttattgttaagaataggaacaacataccaaatatatcagtttcaactatactaaattcacaactctctaacat

SEQ ID NO: 132 - DNA, 244 bp, Glycine max
  unsure (1)..(244): unsure at all n locations
tcgantactctgtntctttgagatcatgtnntgttttcttggctctctacnttaacctataacacgggtatagtaattgattacatcgttcttgagagtgttcctagaagtgaccaagaatactctaatcgattaaatcaagaatctaatctattacattgttcttgaaagcttttacggtgtgggaagaatactntaatcggttgaaatgaaaatctaatcgattacctcttcaagataattg

SEQ ID NO: 133 - DNA, 254 bp, Glycine max
tttgaattttttgtacgtacaaacttacaaactcgtacgatactatttttcttgcacgtacaacctacactatgattactcttttagcttcaagaagtacaaaactacggatgccacaacactctttgactcgccatacgaatacgacacactgttttatttaacatgaactatatgtgatagatatccgcaatagagaattacacctttgtatactcacgaagcatgttgtgtaacactcctttattactcaa

SEQ ID NO: 134 - DNA, 480 bp, Glycine max
  unsure (1)..(480): unsure at all n locations
gattcgttaggtctttcntatgtacgcagtattagtcaccttaaatactaagctatctttaattgactgttgaatgttacatttttggatgctgtggcaggttataaagatacagctcaaaggttagttgaccttatctcttggaactcatatttattatctttgttaatcatagaaactctaattatgtttgtaagcttctggtgcttcgtccaatttataaaaagcatctgcttcttggatcttttttgcttggcaattctaggatattcacgacttcattccatcngttaaaggaacgagatgatcttcctttgctggtgtaaatctttacgcttaatctaaatggcaatatcttgccttgctaatattgcctatcgtgtgtngatatatatatacatatatatatatatatatatatatatatatatatatatatatatatatatatatagctctggcaggtattggcactaggag

SEQ ID NO: 135 - DNA, 306 bp, Glycine max
  unsure (1)..(306): unsure at all n locations
gtactttcggcacctactatatgtngactngaccaacgctgntatnggaatggtgcgacaatctttcaacaccttattcacacattctgatanggtggttgtcatgtgaccatatcgtcgtccagatgtatcgtaagccatgctccatttttcctttgaaatgcgatcaatccatcttgctatggctggactcagttgacgaaaattttctaaagtttgatcacacacatgctngcaaggagtgtacgctgcatcaaatttgtatcatcanaagtgtacgtagacatcanactcaaattaaataat

SEQ ID NO: 136 - DNA, 199 bp, Glycine max
  unsure (1)..(199): unsure at all n locations
tcatacgttatatcactattangcgtacaaccagcgttaacggaccaatactgcttaaaaaatacccccgcctgcactatcgagactgtgtatcataacatctgcgacaggaccatacaacggatatgactgatcgcacgatacacttgccctgcgataattgccagggaaacgtgcaaaaattcatttgcacttaatg

SEQ ID NO: 137 - DNA, 285 bp, Glycine max
  unsure (1)..(285): unsure at all n locations
gtaattgattaccaaaacattgtaatcgattacaactttttgaaattaataggaacgttgtanattcaatgtgaaaactgtttcaaaacaattntgctactggtaatcgattacaacaatctggtaagtcgataccagagagtgaaaagtctctaaataacattgtttgagaaaaatcatgtgctacttcattttntgagaataaactttcatacttatcttgattaagccctctcttgattcttgaatcttgaagcttgaatctgtatcttgattcttgagatc

SEQ ID NO: 138 - DNA, 442 bp, Glycine max
  unsure (1)..(442): unsure at all n locations
catataatccctccaagagtaanaaacataccttgatatngtaaatctcctatcatccaaaccatcaacatagtcaaaataatccacatatcccataaccaaaagatcaccctattgactgccaaacataacatgatgacttggtgtgccttttaggtaccgaaagatnacatttcattgttcccaatagtgctaaccttgctttggacataaactacatactngacttantaacatgcaccatattggtctagttcaaatcataacacacatcaagcattcaactggcacaaggaaccnttgacatgtatgtcattntccgcatcaccaatctttgngtactgtacataaagattaagtggttgccatgggatctctctacgaacattgtcatgcgactatgtatatatattannataaatcatgatattagtatagtatt

SEQ ID NO: 139 - DNA, 232 bp, Glycine max
  unsure (1)..(232): unsure at all n locations
acatcgttcgcgtgtatgacatccactccatacagttngaagttgaggagatcttcaatcctattacacaacgtggccgacanaagtgtgcagctaacttgaatggtcattattgtcaatgcagaatgtattctgcgcttcactatccactgtcacatattattgcagctngtggttacgtgagcctgaactactaccaatatatagatgttgtttatacaaatgagcacat

SEQ ID NO: 140 - DNA, 231 bp, Glycine max
ctcaatagctcttgcaacatggtgagtcagtcccattggtggctttggctgtatcatctgtagaagcatgatccccagtgaataaatatcagatttgattccagcatgctcgtttgctgatactcagggtcaatgtaaacagaaagtccagcagttgatgtcatgcgatactgtgtcactgtgtctgcaactgtaggagggacaagccttgccaatcccacatcactgatc

SEQ ID NO: 141 - DNA, 583 bp, Glycine max
  unsure (1)..(583): unsure at all n locations
ccatattcgtgaccgtgtantcctggancgcggcctcnagtgactgaggctgcaagcttnggctgtcaatgcttattattgtgctacagaaggcatatgtctgtgtggtggtcngcanangagcatanaccatataagtctgcgacaggtgtagatatttgattcatggccagttgggttaccangtttaccaaggcatctagtttacctttcagcttcttagtctcagctgatgaagatgaattcttggtacttcatgcctccttaatgacatacatacttctgcactaaatgtgggagtttgacccatcttctaataaattttggcttcagcagggtcatgtcttcagggctcaccactggtagcatctatcatacttctcttcatggtactgagtcctttcataaaatattcgaggagaagctgctcatanatctggtggtacgggcacttgcacatagttngtaaatatctcccagattcatatanctctctcacttgagtgctaatgcctgaatatctttctgatgtcgnggccttgagccggaatatttctataatacttttgggtctccacactgn

SEQ ID NO: 142 - DNA, 550 bp, Glycine max
  unsure (1)..(550): unsure at all n locations
gctaatcccgacccaacccgngcatagttagtcagtgagaacctgcgacgtttctanacaggcgagctcctggcagtcaaccaatanaagaacatagtccacgaagcaaggatgcttgtgtggcggctggccaactatttgtctggtgtgttatctgaaaataccctcttggtatcgattaccatcngtggtaatcgattacaggggttaaaaatggagacacgatgttaagtagcttctagtaatcgattaccaattgtgtgtaatcgactaccaatcgtgtgtaatcgattacacagtatgatagggcactagtaatcgataccagctgtgtgtatcnattacatagtgctacctgctatgggtaatcaattaccatctatgtngaatcgattacacagtgtacctttatatttcacttgtcaanggtgngtaattgattttggcacctgtatcgatactacnttggaatcgatacanagagaaaaccttgaaagacatttactatcgancgcatggatccatgttatacttgtgtataatcttgaag

SEQ ID NO: 143 - DNA, 480 bp, Glycine max
  unsure (1)..(480): unsure at all n locations
acccatcccttattatgactcataccaccatcttgtggcaccagantaacgttggtgcaccagaggagcctncacataagcactgntcataatttctagtgcttgcanatatgtttccaatgaatccttcacaacttccacatanggtgtagaggatggacaactcactaatatatcttcttcacccgacactantaaccatttgtcttccaccacaaacatcaatttcttgtgcaacattgacgggaccaccctcaacaaatggatccanggtcgacctagcaagcaactgtaggcggngttatgtcattacttggaaagttatctggatgtgtgtggctaatttgatcagagatcatcttctctacgtaccccgatccataaagctttacacatgagctggctatgttaccataatacactatcatgtattagcatacataggagagatgcatactactgcatattgtctgctgacac

SEQ ID NO: 144 - DNA, 318 bp, Glycine max
  unsure (1)..(318): unsure at all n locations
tctgacattcaccacagattctgtcttcttctatnttcagattgggaatgcctctaacagcacctctgtcaatgatattcttcatgcctcttaagtgcagatgtccaaatctttgatgccatattctgacttcatcttctttggaggatagacatgtggaggagtaactggtttcttgaggtgtccataagtagcagatgtcctatgatctgctgcccttcattagaacttcactcttctcatttgtcaccaagcattctgacttttgtgaagttacatttgaatccttatcacacagctgactgattgctgatcaag

SEQ ID NO: 145 - DNA, 511 bp, Glycine max
  unsure (1)..(511): unsure at all n locations
tgaatgtgtcctgaccngtgtnannccatnaaannnntttgantnccactcgtaccgcgatcctctgagtcacctgcggcatgcaagcttctcaaggaagntttctcatgaaagcttctcaacgaagctatctattctataaatagaagcatgntgtaacacttgtgtaactctgatgaatgaaagcttatgagaacacttanagttcacttctctcctctttattcttcaatttctgctcgcccttctcttttcttttctcattaagcatctcttagcttttatcaagaatttgggggaactcttcttctggctattnctagggatggngcctcctctctcttctcttgctttgctgatctcatggggaaaatcacattgaggacctatgagctaagatcacctctagagctacagcagcttataactgcgatagtgcctcatgcgaggaagatacagagaaactgcggttaataagtgagtctctcatttgctgatgagatatcatagg

SEQ ID NO: 146 - DNA, 653 bp, Glycine max
  unsure (1)..(653): unsure at all n locations
atggtatggattccggtgnngngtcncnnnncnntnttttgatcgcccagctgattangtgacactatgaatactcaagcttctcccncaattntctatanatatggggagaagtgaagtgaataagggttcacctcttangcacttctctctctttcgaatgtgcttggaaaaattggttccgtgaagaaaatccaagccgaggcacttccgaaacgtttccgtgaggaatttcgcgaaggttttcgaccgttcttcgacgttcttcattcgntcttcatcgntcttcagtcttcaacgggtaagtacctcaaaccaagcttttcgattcattctatgtacccgtggnnggccacacttnggttcggggattttatttctcgttcattactttntataccccctttngacgtngctaagccattnntattaagtcatttctcgcttaacctaaaaataaatanaatttcaccgatcgtttgaatggtattatccgtaacttcngnntanatgaaatccgaccgtcngtcgtgccgtaccaccgtgggaatcananagaaggttanntatattttattaatctaaaacggcttttttgtaantaaagcggaaaatcaacggaccgttctctttggaatcctaatctaatgaan

SEQ ID NO: 147 - DNA, 615 bp, Glycine max
  unsure (1)..(615): unsure at all n locations
tggaaattatgtcgttgannnntcnnnncnnntgataactcccgctgtaangtacactctnnantactcaagctatctanacgtattcccatatggctaacttcattagtagtttgttgtatgcactgcaaaccacactgncaaacaagcagctgctatgaacttacagaataacaatagcttcaatatcccaccagcttccatggagtctgtntcaacttttggcaccataatatgtcccaatatatgatagaattatagttccaattatgacgagagtcatatgtaatgagagaggcatcagcatcattaggatgaatggcattggcttaacattctcagtcatactcatgaatgttgcttgcttagtagaaaaaaaagagatgaagaattgtnggacatgaattcttaacaggtnggggaactactacgcatgatactatgagtgtgtattggtgatccnncatactcgatcctggcatggaaatatttttctcagtggtttgcagagatttctatgtcaagtcttgctcaagagaggctaggaatgctgtgatctaatatgcttggatatgagtcttttaagcagcttctaataatagtcgnggacatgcg

SEQ ID NO: 148 - DNA, 236 bp, Glycine max
  unsure (1)..(236): unsure at all n locations
actatcctctatatcatataatntagcatataattccttgaccagtgccacatcattgtgaccatcaggctgcctggtcaaggccttatgccagttcctctgcttgagctccctgcgaaactcatcatactntatggcgtataaaatgacgttcctctncagaaggatgtcccgagagtaaatgttctgtgcatatctctcctacgcgccctcagatatgaatctaatggtatcat

SEQ ID NO: 149 - DNA, 445 bp, Glycine max
  unsure (1)..(445): unsure at all n locations
ggatccttgagtcacctgcggcatgcaagctntccgcaagacttacggaaagatcttataatngaccttagcagaggtatccatagaagccattgcatcactcacccaatactacgaccagcctttgagatgcttcacattcggagacttccaattagtaccaaccattgaagaatttgaggaaattctaggatgtcctctcgggggaagaaaaccatatctttcatccgggtgtctcccctctttgagcagaattgcaactgtggtcaaggattcagcaagaggtttggacagcataaaacagactcggaacggcatggcgggtctaccacggaggtacctanaagacaaggcgagaggtatggccgatcaaggagaatgngtcccgtttatggatgtgttagctntgctaatttttggggtcgcctctttccaaacgtggttg

SEQ ID NO: 150 - DNA, 475 bp, Glycine max
  unsure (1)..(475): unsure at all n locations
tactgtggacaagagctngattgaggttagtgactcacctacaagattttatttgctcaaaatatgataacgaaataataccactcattaacgagccttttatattcaaaatcttcaaagatgcatagaatttgttttattcctatgtttaatgaaaccttttccttggtatgtttatggatttctttttctttttttggtttaagactacagtatcctgcatttgcttaaacttattatgtttatggatattaaatagagtaataaccatatggcaaatgctcatgttaatgtttatggagttcaaaatggaatgttttcattaaaaattgacattaatgtacatatactgtaatttccaatacactttcaatttaaattccaataaaccttctattttgaatttcttaaggacattggttaacaagacgctaaacatattaatggtccattagtattagattccaatatcatc

SEQ ID NO: 151 - DNA, 436 bp, Glycine max
agcttagtaacagaagaaagggagagaaaaataaatggagtatgatcgaacctcattcctccgtgggtgtgctttttgggttttcagtttatggaggatgctacaaaccattcatgaatatttaaccattaaaatattttaaaaataagtgctgttaaaatcacctacataccgttgacggcagaatgaagatgttatgtttgataatcatatacaagatttaggtgtcagtttcaaatcgaataagttctacaatattactattatatactagcagtgcaaccgtgtattgcacgatattcttttgtataacataagtgaaaagtgagtcaaataaactcttgaaacattattcatctccagcttatgcgtgacgacatttgaaattcttataatattactgggatatagttacttttaataaaaactataatat

SEQ ID NO: 152 - DNA, 410 bp, Glycine max
  unsure (1)..(410): unsure at all n locations
atgagtccctcgcagcgagaaacacacagtgaaccacttctacagcacagcaggttgttgttcgatggaatcatcaagtttctgcaacaatggaagacgagtgaatgtgcaaatctagacacaaaatacaagagaagggatttaatcaaacctttccattccatttccacgtagaaactcggacttcaaatttgaagagtctttccactacaactacaaaattgaattatgcttacatgacttttagataaggagatggggagaagaagacttacgttattgaaggccgtcggaaaccatatcgtatgcaaaaagtttacaaaatgttcggccctgcctccaccaaatcaaattgngcttagatgcttttgccaatcaaccaacctgtgtgattttccgtcttcagtttc

SEQ ID NO: 153 - DNA, 432 bp, Glycine max
  unsure (1)..(432): unsure at all n locations
agcttgcttaagaaacttctatgaaggttggatctttaagcttcaatgaggtccttcaatggtgattttccaccatggagatgcagcggaagataaaggagaagaggtgagaggaggcgccatctactatgatgcaagctccattggagcttgtaggcctaggatcttcttcatcaatggattcctttgcttcttggaagataaatggcagcggaatggagaaggaagagagagaggagacgccacttcaaggagaagatgagtctagaagaagctcaccaccataggaggccatggataagagcttggaggaagaaggagatgaatgaagggagagggagagaagagcacgaaattntgtgctcaaaaggagctctgaaatctgaagttaatattcaaatgatncaaagtgaaaaaaatacacacacatga

SEQ ID NO: 154 - DNA, 464 bp, Glycine max
  unsure (1)..(464): unsure at all n locations
tgtgagactcactaagggcagaccttaggttatgcngagccttggagaatcgactaggaaattntctgtcttgggttttagagagactcaccaacggcggaccttgagtttgatgagcctatgagactcagcaagggtggacctttggttttatgagcctttggagattcgaccagtgacgtgtccgacctggattttggtgagattcaccaagggcagatgttagtcgtcttatacgactaacttttgtataaaaaacttttacaaaatgtatataaatccccaatttatagttcttttgtaggattggtaaataaatttgctttgttttgatctatgttcattaaaagcctctntatatggaattaatgttaaattctcttcaatttcaggcaaaaatgagcaaatttgaagaagtgcaaagtagatgtcgcgctaaacgagctccgtgcgcttagcgtgta

SEQ ID NO: 155 - DNA, 408 bp, Glycine max
  unsure (1)..(408): unsure at all n locations
agctntcanaattgccccatgtgtggtgtcgcttgtcaatgttaggattcaacaagtgattctcctcaaatttcagccagcccgcatcaattagaccttgcaccttatgcttcagggccatacaatgctcaatggaatgccccggggctcctccatgataagcacacgttgcgttcgactcgtatcctcatagaaatggaggttgatgaaccttggttggggttatggctaccattgaattatcaagtggatatgggagcaagtcagcataggacaccggaattagggtgaattctacaggctttttcgttgcaaaattcatttattggttggcgctataggtgatgtttaacattggttgtgtggtaggtggcttttgaaagggttgttattggctgagtaatgaca

SEQ ID NO: 156 - DNA, 466 bp, Glycine max
  unsure (1)..(466): unsure at all n locations
ctaagcttaagaacatganatggaacatatgagactaaaccaacatgaagaanatgacaagaaaaagaaaggaatttcacttaaagcctcatcttccattcaagaagaaagtgacaaagaggacttgaatgaaatagaagaagatgatgatttcagtctcttcataaaaagattcaataagtttctaaggaacaaaggaaatcaaggaaaaacaaacttcaatccaaataaaagaggagaagatttatcttctattccaaagtgttatgaatgtaatcaacctggacatctaagagttgattgccttggtttcaagagaagaatggaaaaatctggcaggaaaaccttcaaagataagaaggcaaagaaagctgacatcacttgggaagataacaatatggattcatccagagactcagaanatgaagtcatgaatctaagtttcatggctaanaactatgaaagt

SEQ ID NO: 157 - DNA, 413 bp, Glycine max
  unsure (1)..(413): unsure at all n locations
agcttagactaagtttatcctaccatcctcagactgatggtcaaactgaacgaactattcagtccctagaggaccttttgagggcatgtgtcttagagaaaaagggaatttgggagagttttcttccattgatagagttcactcataacaatagttttcactctaccattggcatggctccctatgaagctttgtatggtaaaaggtgtatgacacccctatgttggttagagcccggagaagacctcaccttatgacctgaagtggtataacaaaccatcgagaaggtcaagttgatccaagaaaggatgaggactgcttanagtanacagaaaagttatcagaataagaagaggaaagacctggaattcgaggttggtgatcatgtattcttgagagtcactccatggact

SEQ ID NO: 158 - DNA, 473 bp, Glycine max
  unsure (1)..(473): unsure at all n locations
tgtctcagcgtctatgcgagacagaaaccaacatgttagctatcatcgccaagtaccaagaagagttgggtctagccacggcccacgagcatagaatcgcggatgagtatgcccaagtatatgcggaaaaagaggctagaggaagggtgatcgactctttacaccaagaggcaaccatgtggatggatcggtttgctcttaccttgaacgggagtcaagaacttccccgattgttagccaaggccaaggcgatggcagacacctactccgcccccgaagagattcatgggcttctcggctattgtcagcatatgatagacttaatggcccacataattagaaatcgttaggaaacttgtatggtctctcagaccttgactagatatgatttcttttttttgaaataaaatgagttggtcccatgtntctactccaaaaagcttgtgcanatcaaatcactcctatatctcatc

SEQ ID NO: 159 - DNA, 440 bp, Glycine max
agcttgtatgttttctttattatgtaagaataaaaaataaatacaagaaaatttacaataattcacacacattcaacttaaacatgtttcttaattaattataatattaatctcattaaaaagtaattaaggtgacacttgttttaaatatattttgtttttattttccaaaaaaaaatagaaaataagaataaaaatatatttgcttaaaatttaaaaaagatttttttgaaaatattttcaaaaataatcctaaaattaaaaataaaaaatcaatatttttgataacacttaaaaatactgttttcttcatacatgttgtttaaattttaaaaatttgaaaatagaaattatttttaaataatagaaataaaaacaaaaaatcgacactcaatccaagcgtgacttaatattgtttgtcatatccaaattcaaaattg

SEQ ID NO: 160 - DNA, 367 bp, Glycine max
  unsure (1)..(367): unsure at all n locations
ctaccacaagcaacaacggtgttattctttntattgtttaaattgatgtcctttaagctattctaaagtagaaccttaaaaaaccgaacatccgagaaaaaatagaaagaaaaaaaaaaacaaagaagcaggtttgtgataccccataaaccccagaagaacaaaaatcatagaaaaccaaaagaaaaatcaaagcaagtccaagaagattcaagatgatcaagatagcaaagaagaaaaactaaaaaaaaaacgcaccaatgaaggctggtaacagaggagtccaagagataaatcatatcaataaccctctgcaattcaaccttcagatcaaatgataacaacaataacccatgaggaagaagag

SEQ ID NO: 161 - DNA, 411 bp, Glycine max
  unsure (1)..(411): unsure at all n locations
gtcattaatcgtaatgaanaataacaattaaacaacaattaataaaagagaagtcaagcttattgaaaagctagtaaatacttggaaaatatccatttgcaacatgttggtataaaaaagtaacaacgataataaaattaattaaggcgtacccaacaagctttctcttgctttgaaaagtcattaatcgtaatgaaaaataacaattaaacaacaattaataaaagagaagtcaagcttattgaaaagctagtaaatacttggaaaatatccatttgcaacatgttggagtaaaaaagtaccaattatctcactaatgaaacttatatataaaaaacattaataaattaatcaacatgcacctttcaataagcgataataaattaatcanagcgtataactagagacatg

SEQ ID NO: 162 - DNA, 475 bp, Glycine max
  unsure (1)..(475): unsure at all n locations
ngctntaagactgtatattgatttctttagtttgcacaccatgtgttcctttcctttaactgagaaccccattagttggtccatataaatattctcctctaaatctccatttagaaaggcagttttcacatccatctgatgtagctccaagtcataatgggctactaatgccatgataatcctgaaagaatcctttcgtgagaccggtgaaaacgtctctttataatcaatgtcatctttctgagcaaattccttagcaacgagtctagccttgtaacgttcaaggttgccatgagagtcacgcttagtcttgaagacccacttacaaccaactctcttacaatcctttggtaattctacaaggttccaaacaccattatgttccatggaaattatctcttctttcatgacattaaaccacttctcagaattatcacannatatagctngtgaaaacaaaacttgatcattatca

SEQ ID NO: 163 - DNA, 426 bp, Glycine max
agcttgaaattgaacaacagaagctcacgagaaactacaatggtcataacatgtcacacggaagtccgattcaggtgcataatatatcgagacgctcgaaatagaacatcggaagctctcgagaaattccaatggtcataacttttcacacggaagtccgattcaggcgcataatatatcgagaagctggaaattgaacaacgaaagctctcgagaaactcaaatggtcataacttgtcacacggacatccgattcaggcgcataatatatcgagacgctcgaaattgaacaacgtatggtgtcgagaaattcaaatggtcataacttgtcacacggaagtccgattcatgcgcataatatatcgagacgcttgaaattgaacaacggaagctctcgagaaactcaaatggttataacttgtcaca

SEQ ID NO: 164 - DNA, 437 bp, Glycine max
tggaaatgaacaacggaagctctcgagaaattcatatggtcataacttatcacatggaagtccgattaaggcgcataatataccgagacgctcgaaattgcacaacggaagccctcaagaaattcaaatggtcataacttatcacacggaagtccgataaaggcgcatagtatatcgagaatcttgaaattgaacaacggaagctgtcgagaaattcaaattgtcataacttatcacacggaagtccgattcaggcacataatatatcgagacgctcgaaattgaacaacgaaagctctcgagaaattcaagtggtcataacttttcacacggaagtccgattcaggcgcataatatatcgagacgctcgaaattgaacaacagatgctctcgagaaattcaaatgatcataacttatcacacgtaagtccgattct

SEQ ID NO: 165 - DNA, 382 bp, Glycine max
  unsure (1)..(382): unsure at all n locations
agcttgagaatggaggatttccttgagggtcctctcttatgcaatcatggaacacagctccaaactcaaaaatggaggacacatgaatgacaacgcaattcattcatggggctccgaaaaagggtaagaatggaggatttgcttgagggtcttctcttangcaatcatggaacacagctccaaactcaaaaatggaggacacatgaatgacaacgcaattcattcatggggctccgaaaaagggtgagaatggaagattgccttgagggtcctctcttatgtaatcatggaacacagctccaaactcgaaagtggaggacatatgaacagccctcagcaataacattcatgtggccctggaaaagaatgagaatggaggatt

SEQ ID NO: 166 - DNA, 448 bp, Glycine max
  unsure (1)..(448): unsure at all n locations
tatgcgcctatttccttaaaacgttctcttgcacaagacattcaaccgaaaaaatgcacccatatacaatcaaggcagcttcgttacctagattatttacacgtacctccaaggtgtatttgttacttacatcacacacatctccttggctaaattcacatacatgcatactcaaagcattttggggcaccaaaaattgcacatgtgcacatcttggtgtttctaatacctatacatacgcaaacttcatgatgaatcttgactatccacacaataaggtgctacatttcatgctctcttttttttttttttttttcaagtttttgctacctaaagccgcatgcaaactcaagcatattttcctttgctgactaaaattgtattcaaattaaaaggtatanttttttgtaatatgttttctttcacataacatgcaacgtattatata

SEQ ID NO: 167 - DNA, 397 bp, Glycine max
  unsure (1)..(397): unsure at all n locations
agctngggtccaattcaaacagccctaacttttgacattgagatgctagaaattgagaaatggaagttcttgagaaattcaattggtcataacttttcactcggatgtcagattcaagagcaaaatatacagagacgctcgaaattgaacaacggatgctctctagaaatttaaatggtaaaattttttcacatggatgttatattcagacacataatatatcgagacgttcgaaattcaagaattcaaaaattaaagttctcaagaaatatagagatgaaaaattatgaccatgggtgtacgattgagacccatgatatatcgatatgctcaaaattcaaaaattggtccaattcaaaaattcaaagagccctaacttttgacatgggtgtacgat

SEQ ID NO: 168 - DNA, 391 bp, Glycine max
  unsure (1)..(391): unsure at all n locations
tactaagcttcttataagctgacaccatttatcaataaacacaagttgagtgttattcagaaaattagagtttatctcttttatcttagtgagagtgattctcctaaattcttgagtgattcaagaacaccctggctgtatcaaaggactttcacaacctttgtgtgttgccctcgctggaaagagtgattctttccttccaatcatctccacccttattctttcaaaccacaattccagaaaatccacctctgcccaaaattatctcgtgaccataactcccattttacacactcaaattaagtgattcttgagcctaaattgaatttcaaaacgagacctttcancctcgtttggaatcacctcatttggagccctgtagcttccatta

SEQ ID NO: 169 - DNA, 357 bp, Glycine max
  unsure (1)..(357): unsure at all n locations
agctntgatcgatgctacagctgacacagaccaaatggtccaagaggcatatcagacagtatttaacggccaaagttcttccaatcatttttggctagaaattttttaataaagatatattgagataataatagactaatcatagtacatataataacttgatttgactatctctattttaattgagcagaggttatgagaagtaaatgtatccggagatttcacagagactntggctatcttgagtttgccaattacaataactgctcaaaagatttcaagtcccataccaatctgttgaacgaagagtgggctcaaccacaggatatttatcccgtgaatggaattcctgaagct

SEQ ID NO: 170 - DNA, 471 bp, Glycine max
  unsure (1)..(471): unsure at all n locations
ntcgcaaggcggggatgttcatgagcatatcagttcgttgtcgtgtagtcatgatctacataatgtcagatcatattactttgtatgtatgacaaaaatgaaaccaagatttttggacctctcatttatagttatacaaggttgcatacctccatgcttgttccatccttagctatctgttgtgatggagcaaattcaacaatataatcagttacagatagaagccactcaatttcttttctccacctggcctttctttctgaggacattggctccagctttgattgttctccgaaaacagatgctgcattgaatcaggaaacaaattattgaatggaaatttcattgagacttgagagatcacatttcagttagtcacagttataatatgcatgtgcttgaatntgaattgagatgactacactatctattaattntatagaaatcaagccccatgatngaaatcacact

SEQ ID NO: 171 - DNA, 400 bp, Glycine max
agcttccatcatcaagtgtcaagggaaattgttttgtgttaagggagattgttcggtgttgagggtggtaaccttgactagtgtaagagttgtaggtttgtgaggcatgtcaagctcccctagcttggacgactgttgtttaggcttcttctagcaagttgtctagggtggacatgcttttgatcttgcaagcaaaattagacgtgtcaggtggatgatgtccttatatatgatgattcagcccttttctgatcattggaggatgcattgaagacaaatgtttcgttttgtcttttgctacaagcgagtgcaacacacacatattactcttgcatatgtatcactcatggagtgggtgtgtactgaagatgcaatacgtgggtgagtggagctgcatcat

SEQ ID NO: 172 - DNA, 464 bp, Glycine max
  unsure (1)..(464): unsure at all n locations
taagctccttcaactgcacaaggctcttaatatttgaagagtatccttgtggaaccttcacccgatgaagacactgacaaaaacttatcttctccttccttgacaaagtatggcaggctgggggcaagtaaattttcttcccatcaaaccttggatgcaactgtgatcttatacccatatcagctagatcttgacgggtattcaatccatccttcgtcttgccttgaatgttaaggagcgtcccaatcacactgtcacaaacatttttctccacatgcataacatcaatacaatgtctaacgtcaagatcacaccagtacggaagatcaaagaaaatggacctcttcttccatatgcaactctgacntttatccttcttttgggtcttcccaaatacaatgttcaagtgttgaacccgctgatatacctgctcaccanngaacggtttcggcgtaatatcatgc

SEQ ID NO: 173 - DNA, 441 bp, Glycine max
  unsure (1)..(441): unsure at all n locations
agcttctaaggaagttntctcaagaaagcttctcaaggaagctacctagtctataaatagaagcatgtgtaacacttgttgtaactttgatgaatgagagtcttgtgagacacaactcaaagttcaacttctctccctttttcttccatcaatttcgggctccctcctctctctttctctccctctttnttttcctccattgaagcatcctctccaagcttcttatccaaggctcatcttggtggtgaagctccttcttccatggcttattccctagtggatggcgccgcctcttacctcttctcctttgtcttccgctgcatctccatggtggaaaatcaccattaaaggacctcattgaagctcaaagatccaacctncatacaagctccaatggagcttacatcaagcttccatccaccttggaaagggattgacctc

SEQ ID NO: 174 - DNA, 473 bp, Glycine max
  unsure (1)..(473): unsure at all n locations
tgttggagttatcatcacaagatgcnttgttggcacaaaataagtttctttctaagcaacttgagatcttaatagaaacacttagtaagttgccaactaaactgtctaccggtcaacctccacattcttctattttgcaggttataggttacagattgtaccatttgtggtgaggctcatgaatcangtcattgcattcccattgaagagcacactcaggaatttcattacatgggaaatcaacaaaggcaaggatacaaccaaggaggattttcgggttccagcaaggtccctataattagcaaaggcaatggagatcacaccctggcaatcaattcaataaggaccagagtggaccttccaacaggccacatcaacaagggccaaatatttttcagaggaccaccaaactggaggagacactagctcaatntatgcaagtgaccatgtccaaccataagagtactgagtca

SEQ ID NO: 175 - DNA, 430 bp, Glycine max
  unsure (1)..(430): unsure at all n locations
agcttgaagatgatgatttaatggagaanaagaaagagtggggggaacacaaaattgaaggaataaaagaggaagagaagtggaactttgaagtgtgtctcataagattttcattcatgaaagttacaataagtgttacatatgcttcaatttataaactaggtagcttccttgagaagctttcttgagaaaacttccttgagaagctagagcttagctacacacacccctctaataactaagctcacgtccttgagaagattcctaaagaagctagagcctagctacacacacctctctaatagctaagctcacctccttgagatgaaaagctactcctatagtagctaagctcacccccattccaaaaatacatgagaatacaaaaaaagtccatactacaaagactacacaaaatgctctgaaatac

SEQ ID NO: 176 - DNA, 429 bp, Glycine max
tctattggatgtgatgacaataagtatatcactaattattttataaaaatcgcggaaaaggattatagactcacaaatttaatccgaattgattatatataattgagcttatttggtttaagttttaactttctttcttgttcattatagaagattattatatatttttaagtcttttatctatattcattgcctttatatataaacttttaaatctatattaatatagcggcaaatatattttactcattaataatactcaaatatattttatttaacatctagtattatttgtgcttatcagtgctatcacattacatgtctcattatttttttaatccaaaatatgatagaattattaccgaacttatcagtgatatcactatacgtgtctctttattaaactaaaactagagcatattaataaac

SEQ ID NO: 177 - DNA, 316 bp, Glycine max
agcttgcttattcaaatttcaagatacaagtgaactccccaagaagtgacatggcccacttgtggttttccaatctagcttacattctgcaaagttagaatatgaaaatccaattaaactcaaggaggtacctttggggtaccttaaaccaacattggttgtgcccttaaagtacttaataatccttttgacaacatttaaatggtattccttgggattttatttatatctttcacatatgcacacacttagcatgatgtcaagttggcttgtagtcaaatatatgagataaccaatcatacctctatactttgac

SEQ ID NO: 178 - DNA, 473 bp, Glycine max
  unsure (1)..(473): unsure at all n locations
ttatntatgaacaccatgaacagaccagaatatgtttggcaacaaacatgacaatggatggcagatgatattaaattcaatcatagaaaacaaggtaattctatatatactaaataagaacttattacccgtaaccataatatttattactatactaatcacaggtattcaacttactgaaaaggaagcaatccatttatgcttgactgaaattgaaaatatgctacaagccaacagaaaaagaccacgagattttccttccatgaaatacccaataggatatgcacccaatcaagaccataataaactcatcttcaatgaaatggcatatgacaaacaaatactagcggcagaattcaacagatcttaccatttgttgacaggtatatgcaaatttttacactttttatttagaccctnctcaatcacaatagtgcatattactaattcttaatatgtcaatatgtaaatac

SEQ ID NO: 179 - DNA, 428 bp, Glycine max
  unsure (1)..(428): unsure at all n locations
agcttagacggagaagaagagaccttagatggagaagaataagaagagcttagatggagatcgaagaagagagcacgagcaaaatagggctcgcgtctgatatattttaaaatgtaagtccaacatcggttttcaataaataaaaaaatcgatgttaaagttaacatcagtcttttggacgaaaccgatgttaccttatcatacattggcattggttttctaaaaaccagatgttaacaaacttacgttaacatcagttttgcataaatcgatgttaacagatgcacattatttacaattatgccaccgcgcttaatatggcgatgttaaatcttgtttntgtagtagtgcttttaaaatagtgaaatcataatgtttctcttatatggtgtttcttttaaaatgagcttacccttgggtttatgttg

SEQ ID NO: 180 - DNA, 456 bp, Glycine max
aagaactattactattgaagaattaattcatgttattttttatgagactaactctattaggccaagaaaggatatacttgatgatattacagatactttagaagatacgcatattcatgaagaagtccacaaagacaaagaagatggaaatagtagagactctcaatccaaagaaaatcaaataaacgtggatcttccaacggagtggagaacttcaaggtatcaccctcttgataatatcataggtgacatctcaaaaggggtaacaactcgacactttcttaaagatgcatgcaataacatggcttttgtctctttaattgaacctaaaaacataaatgaagccataatcgatgaacattgaattattgctatgcaagaagaattaaatcaatttgaaagaaatcaagtatgggaattagttgatagacccaatgatcatccaattattggaac

SEQ ID NO: 181 - DNA, 448 bp, Glycine max
  unsure (1)..(448): unsure at all n locations
agctttggcagtcaaccttcgcatcctggtagtttgtctagtcttctttnttgtggatttcctacgagaatctggtggtggaggggacctcgagggtgttgccatgcctgcatagaaatagagaaattaattaagccaactaaattaccacaacatacacgtatcaaatagtaatgaaatacaaataataagaaatttaaaatgacaatggataaggtaaacaaaatggtgttatataccgcattcaagtagatgtattttcccataaaccttcgtcatgattgatatgatttgcatatacatcatcctcctcattttcatcatttacggcaggcatttttgtggaaaaggtcggcatgtcgctgacatcaagggttgaagcatcaatatcgggagagataccaattgttttcccctgaagaacaactgaccatcttgagtcactggg

SEQ ID NO: 182 - DNA, 475 bp, Glycine max
  unsure (1)..(475): unsure at all n locations
actaagctaattccttannaatgagggtaggagaattgccttggattcagctagggactactttcctgagcacccttatgttcaatatgttggataaataaaaatagttttttttttgctatatgcatgagagtttcaatgctagttgtcacacaaatgtattacacaaaagtacctatcatataaagagtggctatgcaatttaaaatgcatcaagaagttntagattgtgtggctatgcagtcaatactgtatcatcatcgtgattttgcaaagaatattactcggtgaaagagcagtctatgcaatgatgctggtgtttctacctgaattttctcctttgaaaactattttatttggaaatccttcccaagacaccgttgaaccactgatggaggctntggaggaagaatataaagatggaaatgagataaatgaatcaaggcagtttattggaggagtattggatcttgaa

SEQ ID NO: 183 - DNA, 431 bp, Glycine max
agcttcgaagagaatggtacattaatatttgtcacatagtaacccctcgtaagatgctaattaatgtataatggctttcccacctttagataaaaaaacaaaaataaaaactaagcaagacgaatagcaatgaaatggaatggggaagagatgcttacggcagagtgcaaaggttgttggagaaagacagaaattaagtcattgattcgatcattaagtaaaacaatgagatttttttttattgctgttgtttagctttaccaaaaatccattcagaaatgccttgactgtgcatgtccatgaatccatgcgagacccaatgattctgtaaattgaagacaattactatgcctctgtgtatcaagtcccttattgctatgtttatgtgtctcacgtacgtctttaatggtctgtctctatgactgacattc

SEQ ID NO: 184 - DNA, 406 bp, Glycine max
  unsure (1)..(406): unsure at all n locations
atgaagaagctctcatagaagcacgtttgaatgctctcaaaataacaaatgaaatacaaggctttggaagttcattcaactctccaacttcatcatcatcatcatcatcatcaccttggtctttatcatctgaagcgtcacaaggatcttcatctttctattcattntccaccacaagtacccctgcttacacatttgattccaatgatcagctaaacaaacaccactcaccaacctccatagcaaatgatggtaatattaatatagtcctcccaccaaagaatattaatgtgaccaaaaaccatgtttggaagcgttttgcaggtgaagagaataacattttgattgattctgatgaggatgaagacatggaaaaaccaaaagggcttctaagtgaaatttgctc

SEQ ID NO: 185 - DNA, 197 bp, Glycine max
  unsure (1)..(197): unsure at all n locations
gttataccttggtggccaaggtttaatgttgctntttatgattaatgagaatgtagttntgttggtgtatattgctgttgctaccataagtntactaaaataattgctgggatcactataggttgctttgctgcatgacagtctaccatccccccgaaaaaaaaaaatttgaatttggtgtaaatctaaatcaatca

SEQ ID NO: 186 - DNA, 456 bp, Glycine max
  unsure (1)..(456): unsure at all n locations
attacggacctataaaactcagctgactggttatttaaatttaaattacttagctcaatatcaagcttgagtttgtttatttagttaaacaattatacttgatcgaacatttgacaagtcaagtttaaataaatagttcatggatagctcggctcatttacaattctactaattagtaattactatatggtttgttccaccccgacctatatagtcatgtggggatntgttcatcctttatggttatccgtctttgtgttgtggtgattccagttttttcaaatgataatttcttggtagatcatgttctaagttactaagtgagtttacggagagagatatgataaattatgtggcaatgtctcttgtaattgagatggtgtaatgggagggagtgatctactgcaattcanggatagtgccttttatgggtcagcatagtcacaccggggatct

SEQ ID NO: 187 - DNA, 363 bp, Glycine max
  unsure (1)..(363): unsure at all n locations
agctntctgagttntttggtttccaaactttgttctttcacagaaaacaaaagtgtgctattcatcttttttattctcttctccttttgccaaaaagaattcgccaaggactaaccgcctgaattctttttgtgtctctcttctcccttttccaaaagaacgaatgactaaccgcccgaattcttttgtgtctcccttctcccttgtcaaagaattcaaaatgacacagtctgagaattcttttgattcttccctttcccataagcaaaagatttcaaaggactaaccgcctgagatatcttttgtttccccttcacaaagtttcaaaggactaaccgcctgagaactntgtcttaacatatt

SEQ ID NO: 188 - DNA, 423 bp, Glycine max
  unsure (1)..(423): unsure at all n locations
ntctgcagggaagctaagtgtgaagtatgcaatcctgcatatgattggcgctgcaaactgggtacccaccaatcatacttccactgttgccacaggtttgggtaaatttctgtatgctgttggaaccaagtccaaatttaattttggaaactatatttttgaccaaactgttaagcattcagaatcttttgctgtcaaattacccattgccttcccaactgtattgtgtggcattatgttgagtcaacatcccaatattttaaacaacattgactctgtgatgaagagagaatcggctctgtccctgcattacaaactgtttgaggggacacatgtcccagacattgtctcgacatcagggaaagctgctgcttcaggtgctgtgtccaaggatgctttgatngctgaactcaaggacacatg

SEQ ID NO: 189 - DNA, 427 bp, Glycine max
agcttcaagtggataaatagtggctcgttgtatactcggctaataaccaaccgaagcgtacaattttaattttcaaaaaaagcatcgataaaaaaaataggttttactttgtcaaaagtacaaatgtctttttttagcaagtcttttttattttataaggttttatgtctttttacatttctcaccaaacaaataaaaatgaattaatatttttctttcaatgcaacatcaatgaaaatatatctattatatatatatatatatatatatatatatatatatatatatatatataataagattttatttatagaatgataccaagtaacaaccttatatttattttctttaaaattattaaataacatcattcaatttaatcgattcatcttaatgattcttattttattaattaatcatgatatca

SEQ ID NO: 190 - DNA, 485 bp, Glycine max
  unsure (1)..(485): unsure at all n locations
ctataggaccttgaaactaagcttagaatggtggttgattattcctatttcaaaagaataatatgccaggttgtttattgctatacaagtcaacttaatattacggttcttgcttaacctttttttcttatagaaatgcaagtttgactaagtacctgttcttgcggggcaaggccaaaataaaaacaagagtgtatggaacagaatcacagattgttggtgggcaaatggtcattggtcaacatcttgtataattattgaataaattgtgaagtagtatattttttccacgatatactttacacgtccaaaagttaatttaacggcataaaaaaatatatatattcactgcaatgtgacttttttttggaaaaaatgtaaattatattaaatccaaaatgatacaacaataaacgggacatatcccgcacatatatagagcattggtagaacgcnagtgttaaagcatgcttctcanatatgca

SEQ ID NO: 191 - DNA, 424 bp, Glycine max
agctttagaataaaaaatacggagaaagaaattcaaaagggtatccgaaaaatgccttttcgtccgcattccttttgagctcgtcaacaatggcagatgatctctcttcctttgccaaggtaagttttttttttttttttacctttcaatgttgtcttgttccttcaaatctctcaaaacttggggtaaaaagattatattttttattttgttttaacatggggtgccacgtgaaattgtccgatctggttccttaaaataaccccagcgaatatgtttgtttttgaggtcaatgggtattacgcatttgattgggttgtttccttgagatgcagatattctgtggggtttcaacatattcatgtgttggatcaacttggttttatgtgttctgtgatataaatataaaatcgatttaaaatct

SEQ ID NO: 192 - DNA, 435 bp, Glycine max
  unsure (1)..(435): unsure at all n locations
tacaaccaaacactctngatgtaatgattctatctatctatttaatgttatttcagtattattgtcttttttatgtgcttattatcatgtttgtggcttgatcacccatgctcatgtaatgtgacagggtttaggcattgagagatgtttaactcttaagaattggaaaagatcatataaataattcatctctaatgatagaatgatgttatttaacatattttatgcatctttgttcataatgcaatttgtctaattcatctcttaagggattaggggagaaattaggtaggttaagctctttcatgtgaggaaacacgacctgaatatgcaagtagatgcaggtgataattgaaataatactgaatagaananaatcattaacgttacatcaagaataattntggtaggctgagtccccaacatacacataat

SEQ ID NO: 193 - DNA, 239 bp, Glycine max
  unsure (1)..(239): unsure at all n locations
agcttgcctgtccgatgcagcagtaatgatggcccgagttatgttggggaacggttacgaacccggaatgggtttaggcaaagacaacggcggcataactagcctgataaatgccaaaggaaatcgcgggaagtatggtttaggctataagcccactcatgcagatgtaaagagaaacatcgcgggaaggaagggcggtggtcanaactcgcgggtgagacaagaaagtgaaggaagcc

SEQ ID NO: 194 - DNA, 469 bp, Glycine max
  unsure (1)..(469): unsure at all n locations
tgcctcaggtcgaaaagaaatttgtcccaacagttaagcgagactgaagggaatatgtgggccatcatcgatgagtgcaaagagaagctaaatcttgcagcgactcacgagcaaaggctagaggatgagtacgccaagatatcagcagaaagggaagcaagggaaagggtaattgattcattgcaccaagaggcaacaatgtggatggaccactttgctcttactttgaacaggagtcaagaacttccccgattgctagccaaggccaaagcaatggcggacacctattctgcccccgaggagatccacggacttctcagctattgtcagcatatgatagacttaatggaccatatgattagaaaccgcttaggaagttgtattgtcgctcagatcttgactagttataaccttntgaataaaatgagtttatcccacatttttactccaaaaatcagtgcgaatcaag

SEQ ID NO: 195 - DNA, 336 bp, Glycine max
agcttgtgcaaatcaaatcactcctacatttcatctctagcatgcatttttctttctttacccactcctcacgtttggttttttagggaaaaacaccataactaaacgcgccgcaagggatccctatcgcaccagatccaaatctagaacgatgggtgatcaagaggagacgcaggaacagatgaaagccgacatgtcggctctgaaagaacaaatggcctccatgatggaggccatgttaagtatgaagcagctcatagagaagaacgcggccactgccgccgctgtcagttcggctgccgaagcagacccgactctcttgccaactacgcacca

SEQ ID NO: 196 - DNA, 410 bp, Glycine max
  unsure (1)..(410): unsure at all n locations
nttatgtgaaaggatgtgactcnttcacttttgaattgaatttcaacgttcaaaggcactggtaatcgattaccaaaacatcgtaatcgattacagctttttgaaattaattggaacgttgtaaactcagcttgaaaaactttttcaaatccattttgctactggtaatcgattaccagattgttggtaatcgattaccagagagtaaaaactctttggtaaacatgttttgagaaaaaccatgtgctactcaatttttgagaaaaacttttcatacttatcttgattaagccttctcttgatttttgaatcttgatcttgattcttgagatcttgaaccttgaatcttgattcttgactcttaactntcttcttgagtcttgaattcttcttgattctatcttgaactc

SEQ ID NO: 197 - DNA, 442 bp, Glycine max
  unsure (1)..(442): unsure at all n locations
agctntgcatgtctagtgattctagatagagaaaggtccaagttccagagagttttgagagattttgctgtgtgaagatctgcagagaccagagcttgaagcggaagccgttctgagagcttgagataagtttgtgagtggttgtgagatcctagaggtgaaggagacatcctcaccacttgtatttttgcaatctttcatcttgttattctctttgttgtaaaggaggcttcctagttatggaaagctaaaatcctctgttggatcttccttgtaggtacatgatgtaaatatatttctatctatttaatgatattttgtgtgttctctgtgctatcaacttttcattctagtatgcctttaccttgatcatgtagatgtatgctttgttaaggtcattcaatagtggaaactggtctaattctgatgacctcgataggac

SEQ ID NO: 198 - DNA, 421 bp, Glycine max
ggagatgaggaagtgtagaagggtgaaacttcctgcttttattcgttgaccacagagtggtacctggagatatgtcgcgggggtcaggagaccttggggacgtcaggtggggtgctattgcccaaaaccaagcttgaccaatcccgacccaacccgggcatagtcagtcagtgagaacctgtgatgtacctaagcaggcgagctcctggcagtcaacagataaaaggaacaaagaccacaaagtaaggaggcttgtgtggtggctggctagctgtgaatattgtgtgatatatgggttatggcctctggtaatcgattaacaagggtgggtaatcgattacaaggcttaaaaatgaagacaggaggctaagatggtctctggtaatcgattaccaaggggtgtaatcgattaccacgcttg

SEQ ID NO: 199 - DNA, 442 bp, Glycine max
  unsure (1)..(442): unsure at all n locations
agcttattctttatctagagtagttgagcacaacaacttactactgacatatattcgactttagtagtggacaatgtagttgagccttgcatcttgcatattcatgttactaagttagcaccgataaagtaatagcttccactagtgctttttctttcaactttatcaccaacatagtcaacatcataatagcttgtaagtctgaaactttctcttcttttgaacataagaccaagattagaagttccaattaaatatctacaaatatgtttaattttagttaggtgaacttccctttgttctttttgaaatcttgcacatagataaacattgaacataatatcagaaatggatgcagtgagatagaccagtgagttgcatccactttnnttgatccttgtccaatccaaggtatgtcatggtgtgcatnggagtcttcatt

SEQ ID NO: 200 - DNA, 458 bp, Glycine max
  unsure (1)..(458): unsure at all n locations
ntccacatccacaatgcgcgcataaacccaccatccnctgttgcccacctccaactgagctcacgtactcccacgtagcccatctcctcgtttctctcaacaccgggtccccatcaatcctctcaagcttccacaacatccaagcaaaacaacgttcaaacagcacaagctatcacagccaagcaaaacagagcaaaggcagaaaactctgctcaacacatcaaccaaaatcacagcttttctcacgtaaagaccacagtaacaattccttcgatccaattcgttaaccgttggatcgactccaaaattttactggaagtctatagtgtataagcctgcattntgaccgttgggatatactagcaaacatccagaactcattctgcactagactttccacagccaaccacacacaagcatttttctgcacttgtgcaaaattctgctgacaattcaca

SEQ ID NO: 201 - DNA, 313 bp, Glycine max
  unsure (1)..(313): unsure at all n locations
cgctntagatttccactatacttgtaaaatcctttacaagcaatgaaccacaaaggacttccctcctttgtgttcagtgattacaaccaagaagttattcccacttcttgcaatgaaccccaaggaacattggttccttgtgtccaatgataacaaccaagaagttatacccacttcttgcaatgaacctaaaagacgttggtcttttgtgtctagtgatcaaccaagaatcaaatcctacttcttgcaatgaacccaaggaacattggtcccttgtgttcagtgtttgcaaccaagaagacttntnttgaaa

SEQ ID NO: 202 - DNA, 467 bp, Glycine max
  unsure (1)..(467): unsure at all n locations
tcttattcacataacaccaatagtattccatttataagcagagattgacgattcanattacatatttataagagaccaaccaaacacaaagcaaccacagcttataacacccgtaacaaatcctagaacatttgaatttgcaaaggcgggccatgaccactttattctaaaacttcaaacacaacacatacttattatttattgatacatgtattacagctatctctgcttgaaggttatgcatgttgatctcacttgcagctgcatgggtcgcaagtgcagtttgatccacagttgcagccaccgttctcagctgcaacacccatttcagcaccctcgaattgggccttcaccggcccaacacccaaaactagagtctcatttgtgatcttctcaacgtagtcaaaagagtacttgttgcaactgcaatacatganaaattaacatacataaggttggggaaaaca

SEQ ID NO: 203 - DNA, 449 bp, Glycine max
agcttgcgtctaatctaaaattgctgaacaatcatgtgcctgtgatgcttctctctcgagagaaatgctacctggtaagagttctatgtgtatacattatgtactaaaaatagcatcaaaataaaaaatagttcgtactaaaagaacagaagttgattaatgagaaatctctaactcctaatacttttttaaaatcactttttaattattttttaaaaaatttaaacaaactgaatcaatatggtgaaatatcacaaaatttgattaatgctaatccctaactcttaactaggagggctttacttaacagcccaggcaaaagttggagtgaaaatgagatataaatggagacaaacaaaagaaaaagtacttcttttctatttgattaaggagacagaataaaggctctccagaagaatcagatctaaaacgagaatttgttgaaatgt

SEQ ID NO: 204 - DNA, 351 bp, Glycine max
tcctttacttgtactcatttttattgcgtgcggttgtaatccaactgccgggcatgttcagaacaaccagttgaatccagtatggaatgagcactttgaattcattattgaagatgcgtcaacgcagcacttgacagtaagaattttcgatgatgaaggcgttcacgcttctgaacttattggctgtgcccaagcttccttgaaggatcttgaacctggtaaagtcaaggacgtatggcttaagctggttaaggatttggaggtccatagagataacaaatacaggggtgaggtaagatagtatgttcttagtgtcttcgcaactttcatctagcattctagctgatcaat

SEQ ID NO: 205 - DNA, 416 bp, Glycine max
  unsure (1)..(416): unsure at all n locations
agcttnttagttttagtagatgaagatgaatctgtggccacctcatggactcctctaaggataatagcatcatttcttgcactgaattgttgggagttggaagccatcttctcaatcaaattcctagcttcagcaggggtcatatcaccaagagctccaccattggcagcatcaatcatattcctatccatgttgttaagtccctcatagaaatattgaagaaggagttgctcagaaatctggtggttaggatagcttgcacacaatttcttgaatctttcctagtactcatacaagctttctccactaagttgcctgatgcctgaaatgtcttttctgatggcagtggtcctagatgcagggaagattttcttcaagaacaccctcttaatgtcatcccagctgaaaacggacct

SEQ ID NO: 206 - DNA, 449 bp, Glycine max
  unsure (1)..(449): unsure at all n locations
ttgagccaaaatcctgactcaccatanaccttgtcccagtgtgagaatgccaatccttaccctcggaagcaaaaaaaaggagagagagagagagagaagagaaggaaaatttccgatcaaaggaaaaaggagaaggaaaatttccaatcaaaggaaaaaggaaaggaaattcccaatcaaagagtgggggaaagcaaaaagaaaagaaagaaaattcccaatcaaagaatgggagaaagaaaaaaagagagaagtaaaaaagaagaaatctcctggtcagagaaaccagaagaaatgtgccgagaggtccttggaccagacaatatctgaacaatacagaattgtcaccaaatgaataaaaaagaaggagaggaaaccacgacctanaatggtcttccncctttaattgccaaccaaaatcttgtgcgcnccgcactanacanaaacag

SEQ ID NO: 207 - DNA, 398 bp, Glycine max
  unsure (1)..(398): unsure at all n locations
agcttcacagaggagatagagttagggtccttnggagcggtttatagaggcacaattggtgacactaacacaagtatcgccgtcaagagattatagacaattgctgatgaaggggagagggaatctcgaactgaaattactgccattgctcgaacacatcataagaatttggtgaagctcattggtttttgcatcaatggagctaggaagcttcttgtttatgaatatgtcagcaacgggtctcttgcaagtcttctcttcaatgatgagaagcacatgtcttggagagacagactaaaaatcgccttggatgtcgctagaagagtcctatatctacatgaagagtgtgagggccgtattattcattgcagataaatcctctaaatatacttatggat

SEQ ID NO: 208 - DNA, 407 bp, Glycine max
tgtttcaagataagaatttgctttctttgcttctcttctttctaatatgcatctttattctgtgaaattgatgttactatttggtttggttttgtttttgcaagatgctttgtactacaatgttgtattgtcttcctcactttgattcctctatgttaaagttcgtttgtttaaaatttaaaataaattattttgttgttgattctgtaatatatgtttgtgtttttgaaatttagtcttgcgcggaaggaatcttagattgaagaatttcttcgagcctacctcagaaagaagtaaggacttctggtatatggtttagttttgttttagccggttagtttgataagctatctttttctttttttgtgttgcagaaaggagaaataatttcacgtaataatgggtga

SEQ ID NO: 209 - DNA, 419 bp, Glycine max
agcttggggagctaggaagactctctgcattattgaagaagttagagaaagatctcaagaacaagaataaatacgatgtatgttatccattcttgtggataaattcttcaaactttctgttatgggtttctttggactgtgattgccttacttttgtatgtgtattggttacctatatatggctgcaggatgagcaataccgtgccaaactaaacaagtcaaatgagaggactctatcacttatcaaagcaggaattgatactgtggtagcagtaggactgcttcaattggcacccaagacagttactcctcgcgtaactggggcttttggatttgtttcgtctctaatatcttgctatcaggtacctgctagtataattgtagtttaattccgttgtgcttctattttcctatcctat

SEQ ID NO: 210 - DNA, 396 bp, Glycine max
  unsure (1)..(396): unsure at all n locations
tgctgcaaagaagaaaaagaatagggattcgtgttcaatgtanctgctttttgacttttcctttgcgtatgcaatgtccatcgatcttgttcaaactttaataggctgtatttagatgggcatgggattctttgttacattttggggtgttctggagtggactgaacagattcacttgtgcttcaatcaaaggctttattcattaataaaaatgtttatcttataaaaaaaaatgggttttgtttacactcaaaatcattacatgtcattcctaccgctccacgggggttacgaaggataattatgtatggtgggaattatttggccctagcttaagaagaaaaaaatatgactcttttatttgtgtgtatacaggttattaagcatcaataataa

SEQ ID NO: 211 - DNA, 414 bp, Glycine max
agctggcctaattaacctgaaattgagagaaaatgattattaaacacacaaaatggaagtactaagtatttattacctatacttaatagaaactacttataacactacaaaataaccataaattggaagagtttgatacaatttatacaagttatatacacaaaatttagtcgtattcaccaactaacagaggcccaaaaattgaaactagcagttgcagaattctcagattatgcttttgtgtggtggaacaaattacaaagggagagagctagaaatgaggagcctttggtggaaacttgggttgagatgaaacggatcatgaggaagcggtatgtgttggcaagctatactatggacttaaaattcaaacttcaaaagttgtcccaaggtagcaaaggcgttggggaatac

SEQ ID NO: 212 - DNA, 381 bp, Glycine max
tgtaagaagtatagtaatataggagaatgtttttggttgattgataaggacttagaatttaatcatgggttaaggagttgtacaactgatggagatatattacacttagttagggatgcttttgaaaatgagaatgagataaatgtttattttcatcatgaagtagatccaattttagaagaagtcccacaaatgttgtacttggaatgtgatccaattcgaaaagctgttgagaatgaggatgatttaaatgatgtacctgttgctggccatgaggaaggtaagttttaattcatctgtacttggtccgacatggttaccataattaattaatatgaattaattttactttatgaccattgatgcaaatgctggtgctgg

SEQ ID NO: 213 - DNA, 391 bp, Glycine max
  unsure (1)..(391): unsure at all n locations
agcttgggctttntccctcaacacctgtaaaaagaataaaaacatatatattagtggtgttgggtatgttagagtagggtaaggtttgaaaacccctttcctgggcatcttttcatgagggaacatggtttctcaccaactcaatgagtggtgctacaagtatagaaaaatatgggacaaacctttgtaaaagtttgttaagtcatggaagttccaaatttcctttataattggtggagtgggccactcaagaatgacctttattttcttatggtccgtgtgaaccccttgatcaatatttaaaaaaattaaggaaagtaatgcaataaaacatacattttttttttgtattttcatgttgattactcctaccaaaaagtacgacaaacct

SEQ ID NO: 214 - DNA, 437 bp, Glycine max
agtcgctccaacaatttatatacttaactcctacctccttagccaatcttaggtgggctaagagggtttcatactcaactttattattcgtcatctcaaactcgaaccttagggattgctctaggattacttcacctatgctttctaggatgactccagccctactcccttttttcattggatgaaccatctacgtatagcttccacctctcagattatggttctgtagtggttgtcattttggctatgaagtttgctaggcactacgccttcattggacctattggctcatatttaagcctaaacttggacaacttgatcgatcaggctatcattcgactcgtgagttctggtttcttcataactgttcagatagggtggtcagttcaaaccacaatctaatgactttggtaggaagtatgggtctagtctcctac

SEQ ID NO: 215 - DNA, 357 bp, Glycine max
  unsure (1)..(357): unsure at all n locations
agctnttccatctatctatatgtgagtcgataaggagtttcattggttgctatctggagtgtacagtggtacgcccagggtatgttgtagagttcttctttccataggcccttagacttatcgagtctagtacgcagggccctgaggatgactctgttagctgcctctgcttagctgttagtatgaggatgttcgacagaggtgactaggtccttgatgcctagccttgttaggaagtcttcataagtgtgagctctgaattgaggttgttgtcggtgacaatggtgtatgtgaggtcgtacctgcatatgaggggtttctaggtgactatttccacctcgttggctggtaatttac

SEQ ID NO: 216 - DNA, 444 bp, Glycine max
  unsure (1)..(444): unsure at all n locations
tcttaacattcaaggcaagacanaagatggtttgaatactcatcgagatctagctgggatgggtatacgagaccagttacatccaaggtctgatggtaagaaaatatacttgcctctagcttgtcatactttgtctagaaaggagaagataagtttgtgtcattgtttttgccatgtcaaagtgtctcggggattctctggaagcaatgtcttccaaggttattttgatgatgtcaaagaatcaagagttaagcaaagtttcaagcaaagattcaagaatcaagtttcaagattcaagactcaagaatcaagtttcaagaatcaagattcaagaataatcaagatcaagattcacgactcaagattcaagaatcaagaagaagactcaatcaagataagtattaaaaagtttttgaaaacattgagtagcacaagaagtttcac

SEQ ID NO: 217 - DNA, 305 bp, Glycine max
agcttgtgactcttggcaatttcttttaaaactagtcacttaaaaagttgtgacttttgaaaaaatctttagaaacaagtcacttgaagaattgtgacttttggaaatgtatttttcgaaatcagtcactggtaatcgattaccattaaggtgtaatcgattacacatcaatagatgtgactcttcattttgaattttgaaaattaaaatgtttagaagctctggtaatcgattacacaagtttaaaatgatttaaaactgtttaaacacaacttgtaactcttgaaatttgaaatcttaacttt

SEQ ID NO: 218 - DNA, 237 bp, Glycine max
tgtccttccagtagaaaagatttctccaatttttctaccctcgcaacaccaagtgtatccccttgtacaccttgcaccccaatttaaaccaacatacatataccattgtgatgtcatctctcccaatgaaatgacattaatggtagtagaaagtgcaaatctcacattttgaaaagtttggatgatgccattgtgaagttttattctcataatccaaaggccttcacccttcatttt

SEQ ID NO: 219 - DNA, 393 bp, Glycine max
  unsure (1)..(393): unsure at all n locations
agctnntaaaattgaattaanaagttcaatatctgctggtaatcgagaaccatatatgtgtaatcgattacacaatgcaaattttgaattcaaattttaatagctgttgtaaatcatttttggccactggtaatcgattacatcctctggtaatcgattaccatagagtaaatctcttgaaaaagactttttaacttgcatttcttggccaaaccttttgctacttcaattaggaattcccttcctatttaatatacccttcctaagactctagagactgtcttgatcatccatcttgaatatctttaatttctttgtcttgaataaagctttgagaagcatgtgatccttcggcatcatcaaaacattcagcttgatcctttgtctacaatc

SEQ ID NO: 220 - DNA, 429 bp, Glycine max
  unsure (1)..(429): unsure at all n locations
cccaccatcttctcctagtagaacactattaatgtgtctactatcattggtatcatctccctctccatcattgggggcgctactagagctgccaaatccttccacctttgggaatatttagaaagattcatgctccttcttacacatgttctgtagctgcattctatccagagccatactagaattgtactgatactacctaatgaatgcaaccattaggtccttccatgaatggactcgggaaggttccagattagtataccaggtgacggctaccccagtaagactttcctagaagaaatgcatcaacgattnttcattnttcgagtatgcccncattttcctgctgaacatcttcaggtgattcttggggcaagtaatccccttgtacttatcaaagtctggaaccttgaactttggagaatgata

SEQ ID NO: 221 - DNA, 428 bp, Glycine max
  unsure (1)..(428): unsure at all n locations
agctnttggaacaattagtaatgtgacatgttatactntattctcttttcatttttaattcaagtagatgttaatccctttgtaataaataaataattattatgtctttctgtgtttgttattttatgctattcttgttcttttatacattcgggaccagggattggttaggttccttggcttgacttgcattgccaactggtaatgcaagtggcaatatctccaccagatctacaggcatctgaactttattcagaagcagaaaattacacatcacaaagtttctaatttatcatcattctcgagtcaatattttaattttggttaagccttgatgaagttattgattggcctaattgcttcctatttcagctatggaccgtgtcaaactcctaccttatgattttgtgtgcagcggtatttacaaa

SEQ ID NO: 222 - DNA, 420 bp, Glycine max
ggcatgccatttagtcctataaaatgattatagtttgattttagttcttacaaaaaaattctttctttttattctttgtaaatttaaaattattgattttagttctatagaatcaacataatttgattttggtttcaataaaatatttttgtttgggtttaatggctccaaaatataaaattactattttggttcccctaatctaaagtttttttttttatcaaaacctaaacctttaattttaaggtagataaataacattgtaagaatctagattttttttaaggtattacatattggcattataccatatacaccagtgaatgaaaaccaatatctttttatataaaaactgaaattaaaatttgatagtaatttataaaaatttaaagtatatttaagtcaaaatatatataaaag

SEQ ID NO: 223 - DNA, 274 bp, Glycine max
agctttaaaaaaacctgagcctaacattttatttaaatatactagtttaaaccagaattatgtaagtcagatcatagactcctataagtcgacctaatgtatttccacccctaatcacgtgagatatatgaaaatctagtcaaaggtgctcctattggaggcgtgatcctgagtagtgccaccttttcaggtgacctatcacaataggtagcgccaccctatgcatctccaccaaggaggcaccttatgcaactccactaaggaggttccatac

SEQ ID NO: 224 - DNA, 469 bp, Glycine max
  unsure (1)..(469): unsure at all n locations
ntgatgttctatccaaagacaaattaagtagtattcttcagtctttcattctgatgtttctcatcaatatttgtcatggacaacttcttcattcaacaatattgcatttttttatgttgttggttcttcctttctaatgtgtggcaacatatggaagttgaagaactgtcataacttagtcttctaattttgttcaagtgatgcattctgagtcttcttgaatcattctgaagttcaaaaactcaaagtcaaagtcttcatcattctgatgttgactctatatagcttcattataaaccatgacgttcttcatgtagcctttaatgaatcttctatataaggtattgctattcagtatcttgccaagaactaatttctcaaagggaagcaaagttcatcattctgatgggcttcaaaagatattctgagttctcaactttgacaacaattctttgaacctttatgagca

SEQ ID NO: 225 - DNA, 394 bp, Glycine max
agcttgagctaaaaggtttctccacataattttattaataagaggctcagttctacccactggccttttctccattaactcctttgtaggcctttctgtagctagtgccaatgctcctagagtatccataatgagatttacccataatagttgaactgttgttaggggaacgtctcccgaagaaactgctgcaataaaattgatcactagtgctgcaacattcacggttagttgaaactggatgaatttctggatgttgttatagacacatctcccccaccttaagacagtggcaacagaattgaagttgtcatctaagatcacaatgtcagaactctccttggcaacttcagttccttggatccccatagagagtccaatatcagcttctttt

SEQ ID NO: 226 - DNA, 260 bp, Glycine max
tatgaatgatctcaacatacgttggagatactcctacaactatgacgtgacttatcatcacaacgatatatccttggtattaggcttttagaatgacaactatatattcatcacgtgcatgaatcattatcgcctatacgcatcatacatgtgctgattcttatatatccctgcaagcgtctaactctaattgccatatcagataatcgcatagcatctacgcatcatatggtgtatctgattctttactgctgcgacat

SEQ ID NO: 227 - DNA, 437 bp, Glycine max
agcttcttacatagtccgcctttgcttgaccttctttatgcttaaaaacagaaacattaggcataggcaaaagatcaagaggagttagtgggttaaaaccataaacaacttcaaaatcatcaaaagtgttagtggtcaaaatctgatttttgcaaaacaagatatatagtgactgtttagcacgatacaacttcggattttttaaaaacgctcgctggcacacaatgtttttttacgcccgaggaagttttcttgttttggtgttgcataaaaaatttacaatgtaggtcggctaggtttttttgtgcgagctcaaccgacgtctggttacggccgaaactggcatgttcccaattattcggccaggaaaacattagccctactcggcaaagaaatattattcgccgatattgatataaaaaactgacagtcgatgt

SEQ ID NO: 228 - DNA, 428 bp, Glycine max
  unsure (1)..(428): unsure at all n locations
tctcgagaaattcgaatggttataactnttcccacaaatgtccgattcggggacataactcatctagacgctcgaaattgaacaacgcaagctctcgagaaattcgaatggtcataacatttcgcacaaatgtccaattctgggacataatatatcaagacgctcgaaattgaatagcggaagctctcgggaaattcaaatggtcataacttttcacatggatgtccgatttgggaaaataatatatcgagatgctccaaattgaacaacgaaagctatcgagaaattcgaatggtccgaacttttcgcacggatgtccgattcggggacataactcatctagacgcacgaaattgaacaatggaagctctcgagaaatttgaatagtcataagatttcacacggatgttcgatttggggaaatatat

SEQ ID NO: 229 - DNA, 433 bp, Glycine max
  unsure (1)..(433): unsure at all n locations
agcttgcacagcccttagattatttggttttacccagatctgggacaaaaaattccacaagaagaccctttgatttcgatctcttgattctgtagttgcatgcatatgccatagctcagcaaggtcaaatgcattgtagatctagtgccttttggtgcaggctccccctgaactggtggattttagagattttggaatcataattgctttctttttcgatctagacttgttactagttttctacactaacactcgagtagtaggtgtgataattaagtaaattattaacatttcttgttatgtttttttactaatcactaactagtgtttacgggtttattcacatacactgaaatgaagcaatatcattttttgaacaattaatgtgtgaaaacatcattgtgttaataatttnttttttttataacatacc

SEQ ID NO: 230 - DNA, 406 bp, Glycine max
  unsure (1)..(406): unsure at all n locations
ctcagctttaactgagagcacnagaataaagattttcatattatgtgaatgtgtttcactcttaaaaatgtaagaagaagaaggaaacaaagtccccgtaaatatgcaagtaaccaactagaaagagaagcaacccttttaagtctttaatgcgtggaagtgagatgtgactctgaagtggaacaagacaatgctgcgacaggcaaacaaagagagagagagagagagagagagagagagagagagagagagagcttcaagcagtgtttctctctcttggaaacatagtgcctcgttctctgcaacaacagcaaagtatcgaatttgaacagaataaagcgcagtgagtgtgtagagtgtagagagaagagctctctattgctattattcaattaaaaataatagt

SEQ ID NO: 231 - DNA, 384 bp, Glycine max
agcttcttgaggaagcctcttaatgaagctttctgaggaagctacatgaagctgcctcagtaaaaacgctgcccagtcttcgttaaccgttggatcgtctcgcaatttggtctgcagcttcacaagacaattttccacgatctgaccgttgggatctttgatagaacatctgaagtgtgcgcaaagcttccgttcccgagagcatttctcatttgagcgtttcagcctttactttcgtgtagcttaggaaaaacgccatttcttctcctttctttcttccaaagtcatttctaacgtcccaagcactttatccatcacccacagccaccattagccaccacaaactatcgttgttctccgttgaaaccctaatttgacctttca

SEQ ID NO: 232 - DNA, 492 bp, Glycine max
  unsure (1)..(492): unsure at all n locations
tattacggacacttgaatctcagcttcaagacaactctccttgttgttgtctacctcaacctctatttcatatattggcttgcctagtatagttgctactgttaataataactcttgtgtggtttccaattctgttgtttcttcttctagtactcctagcctttggcattctagattaggtcaccctaatggtcatgtaatgaaactagtcttcaatcattgtaacatttctccatcaaataaaaatttctcaggtttttgttcttctagttgtatgggaaagtctcatagattaccatctcacacttttgtttttgtttactctcctttggagcttattttcacatatttgtggggaccttctcatttgacttcatatgctggttataaatattatgtatcctttattgatgnttttntccaagtacacctggatatttcttatcaagtctaanggtgaaactctnntgttttcaagcttntaaatctatg

SEQ ID NO: 233 - DNA, 406 bp, Glycine max
  unsure (1)..(406): unsure at all n locations
agcttgcattnggaattgcgattgccccactccatcattaggattagtacctgacatctcaaacaaacaaatcaaacgtaacaagacaattatagttgctgtttgaatacctcacccactcaagtgtatcacacaattatggcttttctctaatgaaacactctttccttttaccactctaattccccttgagttcttaggcaattcaagagattatggccacaacaaagaacaattcaccaatatgtgtaaggtaaggctagagagacaaggaaaaggttaaccaagaaaaaggctaacaatgtttttaggcacaaatgaaggaaataaaattcagaatttaggaattcaagtaacaatccttcatgcaaccaatatattaccttaaagagaattttttttaaag

SEQ ID NO: 234 - DNA, 427 bp, Glycine max
ctttttctctggctctgttacgtctctcttaacaaaaactctgagaactctctatttttcgccaacttcagtcttttaagggatttttttatcctaaaggcttgcttagcgccattttctcgctaagcacgagttagtggattttcgcttagcgagctagatgcgctgagcgtgagaagagacaaatgactcgctgagcaagctgatggcgcactgggcgcatgcatgaatggaagattctcttctagattcttccaactcgctaagcgaactgagtgcctcgcttagcaaatgttactcgctaaacgcatatgcctcgcttagcaagacaccaactgcttcaaccttcttcttcttcttcatcctttggcctataactgaagttgaaccacattaattcacaatatttgggaatatctacttagtg

SEQ ID NO: 235 - DNA, 424 bp, Glycine max
  unsure (1)..(424): unsure at all n locations
agcttacccaaacaggacttattttttgtatcagtgtttatggttgaagaggaggaatctagaattttttaggacacttgtttgactctagacttcatttgggataaaggtatttttcagcttccctgtggtattcttctcgtggtcttttgtaacaatatatggtaaatatcaaataaacctccataattttaacaatcttttaagcgacatttccttgtcaagtgttcttatcggcatgatttatgttctcccaggttctagtttttcatttttttttgtaaattctcttccaaaaatggatggtgacaggggtcaatgacatcaaatcatttaaatggtgttgttagattggtgtagcttgcctccaaagtcctaagagttataacgagtctgtntgtaagggcagctagaggtgatatat

SEQ ID NO: 236 - DNA, 469 bp, Glycine max
  unsure (1)..(469): unsure at all n locations
ntcatgactcatgtggcgacaagctcaattatcccacaattaaccacaatcatattagatatcaatataattatacattttcgtacaggctcaattatgaatgatcccacaaaccaaagaaaccaaaccacaatctttattcgatatatagtttaaaattcttctcacaaaaaaatatggtttaaaataattttattttgttatgttttcaattataacttattatattaataaatttattaaattttataatagcaatattaaaaatcatatgagccataatctatctaattaaatgacactctaaacagtttatgtcattataactaattaactctagttatatgttaggtggagccatcaaagtgaacataaaaaattgatctaatcggtaataaatacattcattcattcatataacgtaaggaccttaattattcatttatatttatcgtgtgaaaaattttaa

SEQ ID NO: 237 - DNA, 416 bp, Glycine max
agcttgtgaatcctagaaaaactatcatttgttggcagcctaaccccattacaagcctagaaagtcatttggattcattttgtatgttcattgctgtatgatatgagatgaaatgcaaaggttgggacttgtgttagttgtttatgatggaatgagcctaaacacttaagcttgagtgaaacaatgactctgaggttttggttgatgatccttccttgaattctgccatcctaactagcttattttagttgtgactctaatacgtgtgttcctatctttgaaaagctgcatgtttgtgaaaagcaatttattgaagctttccatgatattcagttcatatggttgaatttctctatgaagcaaacaccatttttgggtgaccactgtaggttgccacttgaggacaactgaactgt

SEQ ID NO: 238 - DNA, 437 bp, Glycine max
  unsure (1)..(437): unsure at all n locations
tcttttagaccttgaacaagcaatcaactcctctntcagaaccatgctatgtgctcgcgactggtccctttcttcccttcgcaacttgagttcactattgctaccccatagagctccgcgaaatttgttccggccatactcttccttgcgagccctcttggtctctcgttcaagggctcttgcggtaattgcattctcttcccgtaacccggcacactccttccgaacgtgtgtagcagccaacttgaacttctccttggcgagttttgcctttcctaactcgctttcgagagcttggacttcctcgtcctcttccggtgcttcaaaattctcttcgctgacgacttttaacttggcgagccaatctaaacctcgtatgcgaactttcagccattcgtggtacccaccaatgatgccattacgaatgcctctaagct

SEQ ID NO: 239 - DNA, 186 bp, Glycine max
  unsure (1)..(186): unsure at all n locations
atcagcaccagccctatacaacattagaaaataaaaagtggttctagttntattttataaggaaaaaaaaaaaagaagcagtaactctatccaacaaaggtatataccttctcctaatttcctccattcccaagtcttgcaggtacaaatggatgctttgaagtatgcgatcaaggtcaacatcat

SEQ ID NO: 240 - DNA, 395 bp, Glycine max
  unsure (1)..(395): unsure at all n locations
ntctttctaagagaattaagataaaatagaagaacatgatatcagggaaatagaatcaggatagtatcgcaacatatcttaacacttcctctcaatggagaatatgtatatgtatctagctcgttacatatatatatgctatattgggcccttgtaaagacttagtaaagatgttgtcaagattatccttggaacaaacagatgaggtgttgatgatgcggagagaatattttctatgataaaatgactcaacttaggaagaaaataaagaacgagaaacttaaccactagctagaagatacactcaatccttaaccatntaataaaagtaaatcaaacaaggcttagccataataattgctgaagccgtcaatttcatcagttgataaagagag

SEQ ID NO: 241 - DNA, 396 bp, Glycine max
agcttgagatgaggaagtgttgaagggtgaaacttcctacttttattcgttgaccacagagtggtacctggagatatgtcgcgggggtcaggagaccttggggacgtcaggtggggtgctattgcccaaaaccaagcttgaccaatcccgaaccaacccgggcatagtcagtcagtgagaacctgtgatgtacctaagcaggcgagctcctggcagtcaacagataaaaagaacaaagaccataaagcaaggaggcttgtggtggctggccagctgtgaactttgattgatatgtgagaattggcctctggtaatcgattaccaagggtgggtaatcgattacaaggcttataaaaatgaagacaggaggctaagatggtctctggtaatcgatta

SEQ ID NO: 242 - DNA, 463 bp, Glycine max
  unsure (1)..(463): unsure at all n locations
tgtcaaaggtcaaagagcagcttgtccgaacaattgagtatgaccgaagaaaacatgtgagccatcattgaccaatacaaagagaagttaaatctagcttcaacccatgagcaaaggctagaggacgagtatgcaaaggtatcagtcctgcaagtagaaagggaagcaagggagagagtgatcgattcattacatagagaagcaatgatgtggatggataggttcgctttcaccttgaatgggagtcaagagcttccaagactactagccaaagctaaggcgatggcggatgtgtactcggcccccgaggaagttcatgggctcctcgattattgtcagcacatgatcgatttgatggcccacataattaggaatcgctaaggcatntgtattttcgcttttaatttgacaagaatgaacatttttgttcttaataaaaatgagtttggttcaatcctatgtc

SEQ ID NO: 243 - DNA, 440 bp, Glycine max
  unsure (1)..(440): unsure at all n locations
agcttgttacaaccaatattctntatcctaccaagtcatttctacctctaacacaaattagatgatttggttgtttaattgcacaatgactaacactatatcgccttacagatggataaacagtttcaacacttagtctcttcactcaagaaaaatgaagtgttttgagatcttttctaaacttcacaagtatttacataaagatatttttaaagaaagaatttgaataatgagcacttcaattcatacttaatgtctttaaagcttctagtatttataggccaactttgatcaagtatctattgtctctaaatgaacatatttcctctcttaagtttacgtctgaagaatatggccattgagggattaaatgtgtgtattaaatgaatgtacttcttcatgtcgagaaaccgctttgtcgttggagtgttgaacactac

SEQ ID NO: 244 - DNA, 473 bp, Glycine max
  unsure (1)..(473): unsure at all n locations
tcttatccaggcaattctnggtggtgaagctccttcttccttggcttattccctagtggatggtgcctcccctatcctcttctcctttgccttccgctgcatctccatggtgaaaaatcaccattgaaggacctcattgaagctcaaagatccagcctccatagaagctccacaagcaagcttccatcatgaatgaagtgatttctaatgttagtgtgtttagtcctctcatgatggacttgatccttggcaaaacaaaatgcatttagacagtggcaaaaaatgatatgcctctttttgtggaaacccaagattgctaattagacccttcagccaagttcattcctttactggttcttccaacgccatgtactctacctgtgtaatggataaagccaccatgggttgaagtgtagtcttccaactgagtagagtgttgcttccatgtncttcatctcaaattactacttagt

SEQ ID NO: 245 - DNA, 454 bp, Glycine max
  unsure (1)..(454): unsure at all n locations
cgggatccttaagtcacctgcggcatgcaagcttgngacaaaggaactnttcttagcatatgataaacaatggaaacttaaatgaatcgtccaatgatnttctgtggagttttgctttanaaatattctcattttatcttaatattttttgttgttttctttctgggtagagtatgcctttatagacttcgatgaaggtttcgttatgagattagtgttgagtccttgaaatgaccattatctcgcgttgggagataaaggctacgtggcaagctctgatttgagaggaaaggaacaaatgtataaacaactgcatgtgctccttgtccaggacgaaagtgaacattgaggaatattctgtgtagaacttatatnctcttctcatttgtttttccccttaattcaaatttaatgattcaataaagaagacaaaatgttttttagcgaaatactg

SEQ ID NO: 246 - DNA, 484 bp, Glycine max
  unsure (1)..(484): unsure at all n locations
actaagcttagcaagtaacgctcagattaaatgcccncagtctctctctgtctctctctctctctggcaattcatccctatactgtgcaaaaccgacagctagccatttttttgttttttgttttttgagcagtacaacttggtcattcttaatcaaacctagcaaaatttaatctacttgaaaatctgaacaccaatcggactccatgactcaagtaacccacaaaggaacacatgcacggatcatagagcatcacaacacgatgtaaatcagcaagggaattttgcagcaatcccacttaaacactcaacacaagcaagcagaaaaaaacttttcaagggagctaagggttaccgcataaagccaaaattgctccccacctcatatagagaaaatctctggaactggatttcttctcttgctccaacaccctttcaccgagaagaaatctccaacacccgctacgtgtggataaaagctggt

SEQ ID NO: 247 - DNA, 393 bp, Glycine max
agcttgcttctacattatgttgcttaaggcttggatagttacaacttgtgtttgcttatgctcaattatcttgaataacacaattcaagagagcttaagacttattttgattcacaaatccagccacaactcagcaccacaactcaacttcatcataggcatcattaggaaacttagaaaacaaaaaaagagttcaacaacaagagtacttcaaggaattgatttagaacatgttatgatttaaataacatgcatgaattagactcaaaattcaaaagataggctaagaatgacaagaatagatgaacaaatgtatctagaattcaataaacaaaataaaaattcaacacaaacttagaacataatgtgacaattactatgactaaacatgac

SEQ ID NO: 248 - DNA, 444 bp, Glycine max
  unsure (1)..(444): unsure at all n locations
ctcagctagagaggaagcttcatggagganaagaaagagagagagagaggnggggggaggcatgaaattgaaggaggaaaagagggagagaagttgaactttgaagtgtgtctcaagagactctcattcatcaaagttacaacaagtgttacacatgcttctatttatagcctagatagcttccttgagaaacttccttgagaagcttccttgagaaatttccttgagaagcttccttgagaagctagagcttagctatacacacccctctaataactaagttcacctccttgagaagcttccttgagaaacttccttgagaagattcctagagaagatagagcttggctacacacacccctctaatagctaagttcacctccttgagatgagaagctagagcttatttacacataccttctataatagctaatctctcccatg

SEQ ID NO: 249 - DNA, 427 bp, Glycine max
  unsure (1)..(427): unsure at all n locations
agcttctttgttagacctcgatcggtcatctttccaggtcgaggtcgaccgtcatttttttcgatccatttcggtgaataatatttttttgccgagatgggcaaaatgccagtttcggccgaataaatgggaaaatgccagtttcggccgaaacgaaaagtcggttgggctcgcacaaaaaaacctagccgacctacattttaaattttttatgcaacaccaaaacaagaaaacttcctgtgccgtaaaaaaaaaacattacatgacagcgagcgttntgaaaaacaaaattgcgcaacgtcggctgaaaaatatcaatcggggctttttcacgaccgatgtcggctattgagttttcaattcaattcctgaacgaaatttgcatgatgttggttaggaaatgttcgatcggcatcatcctgtgaag

SEQ ID NO: 250 - DNA, 418 bp, Glycine max
tcaccggatgacgccgatcgaacatttcctaaccgacgtcatgcaaatttcgttcagggattgaattgaaaactcgttaggcgacatctgtcgtgaagtagcgaccgatatttttcagccgacattgcacaattctttttagaaaagctcgctggtcgataatggtctttttacggcagagtaagttttcttgttttggtgttgcataaaaaagttacaatgtacttcggctaggtttttcgtgcgagttcaaccgacattttgtttcggccaggaaaacattagcccacctctgcaaaaaaaatatttgctaaccgtcttcatgcatatttcattcaacgattgaatagaaaactcaatagccgacaacggtcgtgaaatagtcccgactgatatttttcagccggcattgcgcatt

SEQ ID NO: 251 - DNA, 381 bp, Glycine max
agcttgtacaaacttaagattccttcataattgttaccttgcgtgtccattaggactataattcaagaaagatattattattattctatgactattgagtgctactagattaagcataggtgattaacaattagaaagagaaatgagttctataagaattaggttacattggttatcacacaggtaaaaccaaacttcttaggcttttcataattgaactatttttttattgcctatgctatcgagcattgagattctgttaaacttgcttcgcttttcttttttttattactttcctcgttgtaatactaatacatacttcacacttaagtattgtctaaataattaagggatgggagatcttactactagctacatggg

SEQ ID NO: 252 - DNA, 133 bp, Glycine max
tattgcaagagaatgaatttagcacctgatcaatgaattatacaagcaacttctcaccacgatcacgctccccggatagggaggctgtctccatggcatctttgtaaggtaatccttctttgacaaacaatat

SEQ ID NO: 253 - DNA, 259 bp, Glycine max
gaatcttgaatcttgaattcaactttcctctcgaatcttgaagtgttcgtcaacttctcctcttgaatcttgaagtgttcttcaacttttcctcttgagtcttgaattgctcttgattccatcttgaacatttagaactcattctttgaatgacctttgagctttatgacatcacctttgatcattgagctataagtcaccacctttgtcatcatcttttgttatcatcattgttatcatcaaaacacctctgaatcac

SEQ ID NO: 254 - DNA, 426 bp, Glycine max
ctagtctgatccatatactcttgccgtcgatcaaggcagatacgtctactatattaactgattaaacttattacagccataatcatctcccatagtaatcctttcactcactttggctatagactgacaagactacgtcttaccaatgaggtaatggctcaaatcaccattgatttaattttggtgaataagatgttggcttcaagtttgtatggatcacaaaagttatttcaaggaaaaatcacattaactatatataatgatttaataaaaattagttatcaataaatactagcgaaaaatacttcacactattgttacgatgtaaaaaataatgcttacttctaaatatgcctgctgcgggagaaccatagtggagagatgatgataaaaactgaatctattatataattggtccctcacttt

SEQ ID NO: 255 - DNA, 427 bp, Glycine max
tgcctgtccgatgcagcagtaatgatggcccgagttatgttggggaacggttacgaacccgaaatgggtttaggcaaagacaacggcggcataactagcctgataaatgccaaaggaaatcgtgggaagtatggtttaggctataagcccactcaggcagatgtaaagagaagcatcgcgggaaggaagggcgatagtcaaagctcgcggttgagacaagaaagtgaaggaagcccgccatgccacataagtagaagctttataagcgcgggtctgggagacgaaggtcaagtggtcgcaatatacgaagataatgttccaagtacattggatttggtacgaccttgccctcttgatttccagctggggaattggcgagtggaggaacgccccgacatttacgcagcgagcataatgtaaaccttta

SEQ ID NO: 256 - DNA, 405 bp, Glycine max
  unsure (1)..(405): unsure at all n locations
agctntcactctcacccaatctcccacctgctttggacaaatcaacaattaaatagagccaaccaataataaggcatctgatattaaatatatagaacgaacaaactaaaaaggtagcaaatgatcaactttaacagaatgaattgctaccttgaaatcttccaccttctccatatctgatggatcagcttgccatggtatgggtctatttggtatctctattattaagagaccgtcattctcaatctcacttattcttccgacactatgatgtgtctcaccaccccatgcatatctaggttctgcaacagatcgtttcacacatacccggtccccaatctgtaagacaaattttgttaatacaagtcatgtaaagacaggaaacaaataaacgtcatagaatga

SEQ ID NO: 257 - DNA, 459 bp, Glycine max
  unsure (1)..(459): unsure at all n locations
cttaacaagttttaccattggagcatatcatttgagaatatgtntacttaagtgagttgcttatataaacaacggttacttaattcattcttattaattaaaagaaacatttttaattataaaatttaatgtggttcaaattaagcactcactctatcaactttagcattaaagtaaattttttagtaaaatttttaaatttatgtggcagtgtggggctctaaaatataagataaacaactcatttaagcaatcatacattatagagattcttaatgtaatataagtactactaaaagatactatctccatcccaaaatatctgttacatttgggaaaaaaattgtcccaaaaaaagtgttacatttganaaaaaanaattatcccanaataagtgttacatctgaaaaaaaattgtcccatgtncatattgattnttcaatgtaacattaattacta

SEQ ID NO: 258 - DNA, 432 bp, Glycine max
agcttcttagtctcagctgatgaagatgaattcatggctacttcatgcactcctctaatgacaatagcatcatttctggcactaaattgctgggagttggaagccatcttctcaattaaatttctggcttcagcaggggtcatgtctctaagggctccaccactgacagcatctatcatacttctctccatgttaccgagtccttcataaaaatattggagaagaagctgctcagaaatctagtggtgagggcaactggcacatagttttttaaatctctcccagtattcatataggctctctccactgagttgcctaatgcctgaaatatcctttctgatggttgtgatcctggaagcaaggaaatttttttctaagaatactctcttgaggtcatcccagctcgtgatggaccttggagcatggtaatat

SEQ ID NO: 259 - DNA, 404 bp, Glycine max
  unsure (1)..(404): unsure at all n locations
taaccgagactcgcgctcccggttaaagggccaagagtttccttttatcagtttctgggccaccccctgatattggagggggaccaactgtgcaagcacaaccagagagggaggctatcatgcagctactatgcataccggggcaagatttcacccgtgccactgcaaagagacgagtgtggatcatgcgcaccaacatgaccactcttacacagatataaatgacgttgttacttatcaacattctgcccagcgaccgtaatgccgatctccccctgcgaaagtatcagttggtctgtgccgtcccgacatangtagggatgcattatttccaactaatttctaatgccatctactatttgcagggatcgcacccacaagacacccagtggacccggaaaagt

SEQ ID NO: 260 - DNA, 298 bp, Glycine max
agcttgttaaaacaaaataagttaggtctcatgatgcacattcatgtgacactagaagaactattgtaattgaaaactagacttgtattcatgtaaatctaatcatgtatgcatgtacctgttatatcatagatttaatttcggaatagaaaaacgttttggtggttgatatgcagttcattttcttggtgtaagttacccctatcataagaataagtaggacaaccactaaatagagaagcgtcacttcctaatagcatatggccaaaatgacaactccaacaatggaagttgcaca

SEQ ID NO: 261 - DNA, 447 bp, Glycine max
  unsure (1)..(447): unsure at all n locations
tgtagtggagtgtcattntcagtttcagaattatctgagtacatatatatatatatatgtctacctgcacatacatctttgaggtttttttcacatagtttaatggaattatattatctttattattcacaccccttgtttacactaaactagaaataggccattttcaatttcttttgttgatggacaagcacaagctagtgtcattacaattaatgattaagaaattaaaatgcaaaattacttaataagaaatataatatttattatatatactatatttaatttgataccttttattttttaattttataatagtacccaaaaagcatgtcatgaaaaatataaaattataaatgtctttagcaaggtatctacacacgtacgtacacttcactattgattataacgctnttattttgccatatagagtgcatgtggcatcga

SEQ ID NO: 262 - DNA, 331 bp, Glycine max
  unsure (1)..(331): unsure at all n locations
agctnggctctgttgattctgtctctaaatatctgacatttcctaagaaacactaatgctcctcctttcttcttagcattacacactatatcattgaagtcacctccaatcatccaactatcattcatggaagtagctatatcaagaagcgcactccatattagagaatgtttccctcattaggactagtgtagagaggagtaaacctcaaaataccacctccttgcaagataatcttaacatgcaagaattgaaaatgcgtttgagcaacttccaaggttaacattattctttttccaagcaataatgatacctcccgaaaatctttgac

SEQ ID NO: 263 - DNA, 437 bp, Glycine max
  unsure (1)..(437): unsure at all n locations
ntctaatgataatccgaacatacagtaagttgttgaaccgatttgattntgaacttttgatgcaccgatttagctttatgttttgtttaaattgtgcctatctgttttaaattttaatacaatctaagggaaatacgacctaagaataatgaagaaagggatgaaaagaatttgatcaccaagaatgtttttctgtccaacatttgttcaagacaccagtcccaaagcaaacatgacccaatagattttaccagaaaattttacacttcaattgatatcttcgttacatggaaaaaaaattatagttgaggtctttacagttaaaatatgcactttatcctgcaaatgtttccactagaagtagaagagttagaatcctttttaataccangcaantttctgctgtgttntgtcacactctcacacgactgtcaatc

SEQ ID NO: 264 - DNA, 435 bp, Glycine max
agcttcaactattatatttcgatggagttcatatattgtgattgtcaaaaccaaagaacatcatcaccaacaccacgcccttttcccacattgacatacaagaattcagatatctccaaaggctcgtcacaagatatggtaacactcggttttcttcacatttctttcaaaatacccatttgttttgctatttaaaaagtaaaacttttctcacatgatttcattttactaactactcactttagaagatgtaagttctcatcaagtggtttttccgacaattttccagcacttagagtttgcccaacgttggtgtctgtcaataccagccaagcattacaccgagaatcaaagaaaatgcagatacagcgggagttggagaaagaaggatcggagagagataatcccaagagatgaatggcggcaaggctgaag

SEQ ID NO: 265 - DNA, 450 bp, Glycine max
  unsure (1)..(450): unsure at all n locations
gctttattctaattgatccntttttcttcccctctgcagcctcgcagttgtcttttattgcccatcgataaaggaatgactcttggtgagccaatgagctcaaatcaagctagagaacttcctgaaccagatagtgtgatggcagaacttattgctatctatcaattcccagagtttatttcagaacctcgtaggctgggaatgccatcaagaagccttttcctctcggtgtcagtgtcagccaagttagcatcggcttcgccaaagccatcattttaagcggatgacattgatgagtgacccaacagtcttgagtggtagttctcaaaggagaagggatctgaggtactaagtagctatggaatgaaggcgaactaaaagctttcttccattctccttcgattcgtgacgtgattagctggaacagtcgattgatctgatctactcata

SEQ ID NO: 266 - DNA, 161 bp, Glycine max
agcgttgagccattgaatttctcgagagctttcgttgttcaattttgagggtctcgatatattatgcgcctgaatctgacctccgcgcgaaaagatatgaccatttgattttcatgaaagctaccgctgctcaatatctagcgtcttgatatattatgcgc

SEQ ID NO: 267 - DNA, 462 bp, Glycine max
  unsure (1)..(462): unsure at all n locations
ttatggctggcctccggacttcactccccgtgcctctccgaatgatataagccaagcccctacttttgaggggcaactcccgccttgtgacgactatcccgggcaagacgatgaggaaggagatacccatctcggccccctgctccaccttaatgatccgtccccacatgaactaccccaaccgaacatagtccgccatatcccggcctcacccacacccgtaaaagaatctgttcccttcgcggaagataagggaaagatagaggcgcttgaagagaggttaagagcagtcgagggccttggcaattacccgttctcggatttagcggatttatgtctcgtgcccaatatcgtcattcctcccaagttcaaagtaccggactntgataagtacaaagggacgacatgtccgaaggggcatcttcggatgtattgtcgaaagatggnggcgtattctgcgga

SEQ ID NO: 268 - DNA, 412 bp, Glycine max
agcttgtgcatccaataccctgatgaggatgtcccatatgttcttaaaactggactaatccatttgcttccagagtttcatggccttgcaggtgaagacccacacaaacatctgaaagaattccatattgtttgctccaccatgaaacccccagatgtccaggaggatcacatatttttgaaggcctttcctcattctttagagggagtggcaaaggactggctatattaccttactccatggtccatcacgagctgggatgacctcaagagagtattcttagaaaaaaatttccctgcttccaggaccacgaccatcagaaaggatatttcaggtattatacaattcaatggagagagcctatatgaatactgggagagatttaaaaagttatgtgtcatttgcccgcacc

SEQ ID NO: 269 - DNA, 429 bp, Glycine max
  unsure (1)..(429): unsure at all n locations
ngctctanattacattgatgtttgtatttatgggaggagtgttatatgccattttgctttaagagtaacgtcccactggtaaaactaactttccaaatgtttgccttcgcaggaatggccccgaggaagcttgcctcaaagaggtccaggaaggacaaggcagcagaaggaactagttccgctccggagtatgatagtcaccgctttaggagcgcggtacaccagcagcgcttcgaagccatcaaggggtggtcgtttctccgggagcgacgcgtccagctcagggacgacgagtatactgatttccaggaggaaatagggcgccggcggtgggcaccactggttactcccatggccaagtttgatccagaaatagtccttgagttntatgccaatgcttggccaacagaggagggcgtgcgtgacatg

SEQ ID NO: 270 - DNA, 418 bp, Glycine max
agcttcatgattgaatcaagtttgagtcatgaatcaagattgattcaaggagttttgatgataataaagatgatgacaaaaagcccaagagaatgagttcaagattgagtcaagaacacttcaagaatcaagagaaatttggtttcaagattcaagtttcaagaatcaagaatcaagaataatcaagttgaagattcaagaatcaagaaaagactcaatcaagataagtactataaagttgtttcaaaacattgagtagcacatgaatttttcacaaaaccttttaccaaagagtttttactctctggtaatcgattaccagtttattgtaatcgattactagtggcaaagtttgttttcaaaagctttcaactgaatttacaacgttccaattaatttcaaaatggtgtaatcgatt

SEQ ID NO: 271 - DNA, 350 bp, Glycine max
  unsure (1)..(350): unsure at all n locations
ctaatcctgtctttgtaacacaatggaaatcctggcgagactattgtagaaaatctatggagtcaaatgaggaggatgggtttgggtgaaactgaggcaagtcatcttgtccttggaaatgttaagcaagcattggaacttcttgttcagcaaaggtaagagttntttaatgtgatggatttaaaattacaaaattgtttgcattttgtggcacctccaattgctagtgagaagcaatgaagtgattcttcgttcatatttttctttataggtatttacagaaagacaaagttaatggtccttaaggcaatactatatattatgagctcgccgagagagctttatatgga

SEQ ID NO: 272 - DNA, 407 bp, Glycine max
  unsure (1)..(407): unsure at all n locations
agcgttgacttgagtaatcaagagattataaatatgtgaccatggcatgagttttaatcgattnttatgatcatatatcatctatcagctatctttcgatctatcttgcaatatcttctttcatctctttctacagaactttctaattcatttatcttcagctttctaaaaggttttgttcaacactttctcttccaagaaaagttctttgataaaaaaacttgtgttattcatctttttcattctcttcttcctttgccaaaagaacgaaggactaaccgcctgaattcttttgtgtttctcttctcccttacaaaagattcaaaggacttancgcctgagaattcttttgagtcttcccttccccttaagcaaaagatttcataggactaactaccagagatatc

SEQ ID NO: 273 - DNA, 443 bp, Glycine max
  unsure (1)..(443): unsure at all n locations
ntttggagtagaaacatggaaccaactcattttatttaataaaaggaagtcgtatctagtcaaggtctgagagaccatacaagtttcctaacgatttctaattatgtgggccattaagtctatcatatgctgacaatagccgagaagcccgtgaatctcttcgggggcggagtaggtgtctgccaccgctttggccttggctaacaatcggggaagttcttgactcccgttcaaggtaagagcaaaccgatccatccacatggttgcctcttggtgtaaagagtcgatcacccttcctctagcctctttttctgcgtatacttgggcatactcatccgcgattctatgctcgtgggccgtggctagacctaactcttcttggtactnggcgatgatagctaacatgtaggtctctgtctcgcataaacgttgagacaagcttc

SEQ ID NO: 274 - DNA, 292 bp, Glycine max
tgaatcatcctattgaatcaaagaaatccttgaagtaataaagattgctcttctttcttgttgaaaagttgcaagattccttgcacatgtaactcgtctttaaatattaaatactagtttgtgtactccccaaagaaaaggggagaggagagccaattagaagacgaaagctgtgttccggtagtatttacaaagaggggtgagtgttggaagcaaaaagctttgtacatattctcttgtgtgaacccaagttgtaaattctctcatgggaccttatgatcccttgtggcaa

SEQ ID NO: 275 - DNA, 415 bp, Glycine max
  unsure (1)..(415): unsure at all n locations
tcaagaattatggcctcatcaaactacttgtttcccgagggaaattctataaatagacctcccatctttaatggagtgggttaccactactggaaaacccgcatgcaaatctttatagaggcaatagatttaaatatttgggaagccatagaacaaggaccttatgttccctctatagtggccggaagtgcaacaatagaaaaacctagagcagattggactgaggaagaaagaagattagtacaatataatttaaaggccaaaaatattattacatctgccctaggaatagatgaatactttagggtttcaaattgtaaaagtgctaaggatatgtgggatacactacaagtaacacatgaaggcacaacanatgttaaaagatctaggataaacactttaactcgtgaatatg

SEQ ID NO: 276 - DNA, 271 bp, Glycine max
agcttaagctccttcaactgcacaaggctcttaatatttgaagagtatccttgtggaaccttcacccgatgaagacactgacaaaaaattatcttctacttcttggacaaagtatggcaggctgggggcaagtaaattttcttcccatcagaccttggatgcaattgtgatcgtatacccatatcagctagatcttgacaggtattcaagccatccttcgtcttgccttgaatgttaaggagcgtcccaatcacactttcacaaacatttt

SEQ ID NO: 277 - DNA, 457 bp, Glycine max
  unsure (1)..(457): unsure at all n locations
nttatctagccaagatcatacaaaagtgttacaacagaacctagtggtttctaattatatgggccatcaaatctatcatgtgttgacagtaattgattagcccgtgaatttcctctggggttgaacacacttcagcgatggcctttgctttggcttgtagtcgcgggaggtcttgacttccatttaaggtcaaggcgaacctatccatccacatggtcgcttcttgatgcaatgcatcaatcaccctccctcttgcttccttctcggcgtacgcttgtgcgaagtcctctactagtttttgttcatgggtcaaagactggtttaactcttctttatacttccctattatagctagcatgctttgctctatggcttctaagtgttgggccaaactcctctgggatcttgagcaagcagctaactcctcctttaagaccatgccatgtactcgtgactg

SEQ ID NO: 278 - DNA, 435 bp, Glycine max
  unsure (1)..(435): unsure at all n locations
agctnttaattnnttttattaatggaaagtctttttagaaaagaatggtttgatgtcatagatatatgcactcaatgtttaatcaagaaaagaaagagattgctaatttatctgtaagtctgcattttttttttaattttagtgcactaaagattttagtttttcattttaatccgttttattcctgtaaatgtaaattcgcttaggaactaaaatttaaaaattacaaacttacaacctaacgataataaaaataaagccaaatttatatttaagtaaaaaaaatgagttatcgacaaaaataataaataatgtatatgaataacatcattaaaaaaaaagcatattatctattatagtctaaaaaggtaagtattacttttaaaaggtaaggaaactcaaatatattggatcccaaaattcggtaacttgggg

SEQ ID NO: 279 - DNA, 388 bp, Glycine max
  unsure (1)..(388): unsure at all n locations
tattcgtgaattactacctgtcatcgtggaagttttaattcagtggcaaaatctccctcccaatgaaaatagttgggaatctgtgactatattacaagaggtttttccgacgtatcaccttgaggacaaggtgagtcttttaggcggaggtattgataagtataagcataagccacacatcaccaaggtgtacacccgcaaacacccaaggggtgcaaaccacccaaccgttacaacccacccaaagggtgtaaaccactcaatagttacaattcacccaaagggtgcaaggtcagaagatgtgaatcaaggagacatgacccttgngaacagtcacaaccaactgttatgatccgcccaagggatgcaaggtcatgagatgcgaatc

SEQ ID NO: 280 - DNA, 378 bp, Glycine max
  unsure (1)..(378): unsure at all n locations
agcttgctatcacctttaaaagtcttatccattntcagtgctaacattctggcgtgcaacacattttcaaaacgtacaaaaccaaattggtcaccccttttatctcttttaccaggaatgaacaattcggagattttcccatatctcctggacacattccacatatcttttgctttataatcttcaagaaagttcgtgaagaaaaaagaggattgaccgtccccttctaaaggcatcttggaatttattccagccacatccgctttggcctcttcatcaacagtcttcttacctgtatgccctgatttcttcctctatgagaaaatgatataattgatttcctttgataaaaaactaattttattaacaataatttaa

SEQ ID NO: 281 - DNA, 403 bp, Glycine max
  unsure (1)..(403): unsure at all n locations
gtatagtaaaagcaactatgttttactcacctactctcccttacacaagnagaatttaaaacagnnnnnataaaannatatggactcaaactgagaaggtgggatgacaacattttgttaaaggaagaagtataagcctcttgtataagcaagaaagaagcaactcttaagagggaaaaagtaaaacaatgctcaggcttattacaaatcagaatgaatcaaaactgccacagctcttgaaccaaattgattcaaaactaanaggcaatataaattatgtcacaagaactagagattaagtccaaacaacttgaagatgtacaaaggcacagggatgaataggatcaggcattatcgaagcanattcaatggctcggaaattaaatagaaagcttatgcatat

SEQ ID NO: 282 - DNA, 402 bp, Glycine max
  unsure (1)..(402): unsure at all n locations
agcttttcgattcattctatgttcccgtagtggtccgcattgtgtttcgtgcatttttattctcgttntgtttactttttataccccgtgttgacgtgcttaagccattttacttaagtcatttctcacttaacttaaaaataaaatcaatttccaccgaacgtttgaattgtattatccgttaacttcggttaaaatgaattccgaccgttcggtcgtgccgtaaccacgttggaaatcaaaaagaggtaaaaaataatataataatcaaaaaaacatcttttagtaaaataaagcgaaaaatcaatcggacgttttttctctttgggatttctcattcttaatcgaattgattaataactaaagtgaaactaaggctaaaatcaactcgcctagtcaagc

SEQ ID NO: 283 - DNA, 409 bp, Glycine max
  unsure (1)..(409): unsure at all n locations
taggaacccaaactttntagcttcaatgtaagaaaacatactcatgactaggaacccaaaatttggttttagaattagataagcatgaaaatagggacttgcttgtaagaattcgggctaccccatgattggtactttgcacctaagtaacgtgggaaatgcttttcaatggtatgtagatatatgtgtaaatataaggggcataaaattcctcgccaagtatggataattgttttcctaaatgaatgtatgatagcgtggaatgcctttttgaatgcaaatatgtgcaggatgtaattagctttcaaatatgcatataaataaacatgagtgaaacagtaaaaatttgtatggtgtacttcanatgtatgtaagtagttggtgatagcaaatgtttaggaatataaat

SEQ ID NO: 284 - DNA, 295 bp, Glycine max
agcttccaacttcatactattgtaccttatgaagtcatggcaagcttcataaagtcttcatgttggccaaaattgtagttgtccttgagtaacctatcttgtgtaattaaggcactacagagtggagccaacctattacgcacaactgaaatattgcttacgaaatgcttatcatctctttccattaccagaacttttgccttcaatgagtggtaacaaccagatatgactatcttacatggaatcaattgaccattaaatgaaggggaggaaaaattaagatatgaaaatgatg

SEQ ID NO: 285 - DNA, 327 bp, Glycine max
tcccatcctaattaatgtgaatagatgaacgactattgttttacattagatgcacaattcatactaaaatgggtcttttgtgtaagtatattgtgtgacatgaaccggtcattaatttgactaatgataccatattaaacaacagatgcatgtcattaacgttgagaaaataacttaagttgacctgcaacttttcatttcacaaggaaaaccagtcgctataatttgatgaatattattctagctcgtttattctcttactaaagccacttagctagccacacactcatcgctagagcggcgcacttatttctttctcaacattta

SEQ ID NO: 286 - DNA, 386 bp, Glycine max
agcttcaagaataatggtctcatcaaacttcttattcctagaaggaaattcaattaataggcctcctatttttaatggagaggattaccattattggaaaacccgaatgcaaatcttcattgaggcaatagacttaaacatttgggaagccatagaagtagggccttatgtacccactatggtggctggaaatgcaacaatagaaaaacctatagaagagtggactgaagatgaaagaagattagtgcagtacaatttaaaggctaaaaacatcattacttttgccctaggaatagatgaatattttagggtttcaaattgtaggaatgctaaggatatgtgggacactctacaagttacacatgaaagcacaactgatgttaaac

SEQ ID NO: 287 - DNA, 447 bp, Glycine max
  unsure (1)..(447): unsure at all n locations
gtctccttgagcttganattcgttagccaattgtgtggtgtcgggaacangcgcgccatcttcagcgtcggtgttggagtgttgntgatgattatgctcaaagggaaggtcagtgaagtgtgacaacgtgggtaaacaacgtttcttcttcttgttcttccaagtcactttcatttttcaccgccacttttctcttccaacgtttttgtttgtctgtgtttgttatggcttctctcttctcttctaccaaataaactcttaattttcttctttacactntgggcctccgtgtttgtttgtagggagttactaggttattattgggccattctcattgctatggacccctatgtcaagggatggatatttttcttattccanaaatatcttttccacataattatgaattgttgtataatcacctataaaattcacaaatttataacg

SEQ ID NO: 288 - DNA, 436 bp, Glycine max
agcttcttatccaaagctcatcttggtggtgaagctccttcttccatggcttattccttaatggatggcgcctcctctcacctcctttcctttgtcttccgctgcatctctatggtggaaaatcaccattaaaggaccccattgaagctcaaagatccaacctccatagaagctccacaagcaagcttccatcatagggtgacgaaagtggtcttttccacatcttcgggtgccatttttatttggttataccctgagaaaccatccataaatgagaaaagggcgaacttagctgtattatctactagtatatcaatgtgtggtaagggaaaattgtctttaggactggctcggtttaaatcccgatagtcaacgcacatttgcactttgccatctttttttgggacagggacaatgttggctacccactccgggt

SEQ ID NO: 289 - DNA, 475 bp, Glycine max
  unsure (1)..(475): unsure at all n locations
tcatggtgaatcaaaggtgattcanaggtgttttgatgataacaatgatgatgacaaaggtgatgacaaaaagctcaaagatcaatcaaaagaacaactcaagtgaatcaagaacaattcaagagttcaagaatcaagaagaattcaagactcaagaagaaagcctagaatcaagaatcaagattcaaggttcaagatctcaagaatcaagatcaagattcaagactcaagattcaagaatgaagaaaagactcaatcaagataagtattaaaaaagttttttcaaaactttgaataacacatgagtttttgacaaaacctttaccaaagagtttttactctctggtaatcgattaccatatagttgtaatcgattaccagtagcaaaatgagtttgaaaaagttttcaaactgaatttacaacgttccaattattttcaaagggctgaatcgatacaatgtttgggtatcgata

SEQ ID NO: 290 - DNA, 325 bp, Glycine max
agcttatctggtttgaagttaattgctgagacatttgattggagtcatgatgcctaggcttgtgaactttccttgcttgcaaaatgtgtagatttgttgttagtgcattatttgtggatttcagattcatttttaggaagtttttggattgaagggcacattgcttcttggttgaataacctgtttgtacatagctgaaataaaattttcaatactagcactactggtccttttttttgcaattctattaccagcttttggtttttttatgtgtcaatttcttggcttattttacctaagattttgaattaatttaagacatgtt

SEQ ID NO: 291 - DNA, 467 bp, Glycine max
  unsure (1)..(467): unsure at all n locations
ngaggaatctgagggaaccgctagagactcgactatcactgttagactacacacgtgagcccacttagaggtaagggatgggtttatcgctgacatggtaccacattacatataggattgagtcttagtgtatctgttgcataacgcctatgttgtacttgagatttattttaatattcagtactttatgttattccactgcttaacttgtttccttttgaaaaaatttggacgaccttgttttaggccggagatgttttcatacccttatttgataagtttttaatttgatgattcacatgaatgtgaaccttttacccacatgaactctnttacgtttattgaataaaatcattttatgtaattccacattttccatgtgttttattatatgaatatgtatattgngatagaaggtgtcacattgagttggtattatccactaataactcanatgtatgagcttt

SEQ ID NO: 292 - DNA, 316 bp, Glycine max
gttttttaaaagaaacacaaattaacaacataaacaaaatagaaaccctgagtaggaatcaccactaaaccgacgggaagggcaatgcaaacaacacatgcatgaagttgggcaacaatgaaaagaaaaagaaaataaaatccaccaaaggcgagtgaagaaaagagagacaaaagatctccagatttcacatggaagacacaaaaagtacaataaggattaatgcataagacaaaaggagtagagcccaacccaaaaggtacaagcaacgctcttgaggttcttactcaatgtaaaacttaaacactctttgagc

SEQ ID NO: 293 - DNA, 425 bp, Glycine max
tgtctaggtttctagagaaaaaaggtctagttccgagagtttgagagatttactgtgggaagatctgtagagaccagagcttgaagcaggagccggtttgagagcttgagatgagtttgtgagtgattgtgagatcctataggtgaaggagacatcctcaccacttgtatttttgcaatctttcatcttgttcttctctttgttgtaaagaaggcttcctggtatggaaagctaaattctctgttggatcttccctgtaggtacctgatataaatatatttttatctatttaatgatgtttagtgtgttctctgtgctatctttttttcactccagtatgcctttaccttgatcatgtagatgcatgctttgttagggccattcaacagtggacattggtctaactctaaattccttgatagtat

SEQ ID NO: 294 - DNA, 438 bp, Glycine max
agcttttccatctagctatatgtgagtcgataaggagtttcattggttgctatctggagtgtacagtggtacgcccagggtatgttgtagagttcttctttccataggcccttagacttatcgagtctagtacgcagggccctgaggatgactctgttagctgcctctgcttagctgttagtatgaggatgttcgacagaggtgactaggtccttgatgcctagccttgttaggaagtcttcataagtgtgagctttgaattgaggttgttgtcggtgacaatggtgtatgtgaggtcgtacctgcatatgaggggtttctaggtgactatttccacctcgatggctgtaattttacgaagtgatcttgcttttatccacttggtaaagtagtcgatggctactagtaagtatttgacagctcttgcggattatggca

SEQ ID NO: 295 - DNA, 428 bp, Glycine max
  unsure (1)..(428): unsure at all n locations
tcttaacattcaaggcaagacaaaagatggtttgaatactcatcgagatctagctgggatgggtatacgagaccagttacatccaaggtctgatggtaagaaaatatacttgcctctagcttgtcatactttgtctagaaaggagaagataagtttgtgtcattgtttttgccatgtcaaagtgtctcggggattctctggaagcaatgtcttccaaggttattttgatgatgtcaaagaatcaagagttaagcaaagtttcaagcaaagattcaagaatcaagtttcaagattcaagactcaagaatcaagtttcaagaatcaagattcaagaataatcaagatcaagattcaagactcaagattcaagaatcaagaagaagactcaatcaagataagtattaaanagtttttgaaaacattgagta

SEQ ID NO: 296 - DNA, 450 bp, Glycine max
  unsure (1)..(450): unsure at all n locations
cacctgagngcatgcaagcgtaataaacaacctttgtagtaacaacttacaccaatatactcaatatctccaaagaggtccatgaaaccaatgagacaccacatcataagtatcagcagcaagatatggctacgttccatgagacaccacattcttcaaacgtgtgaaactaaagttgagccttccaccacaagtagttgaatatgaaatcaagaagagaatcccaagtatgggagacagcatgaggagaaactgaaggtaaatggctgtgtaatttgagagccacaataagctaaagacaatgccaaatatcacaaccaaatggaatattggagaaggagaaacagcagtggtcatgttctggcttgtgtatccttctacactcctcttttttggatagaaccaccccattttccttctcttaaatttttttctcacccagtgaaatat

SEQ ID NO: 297 - DNA, 504 bp, Glycine max
  unsure (1)..(504): unsure at all n locations
ntgaccctgatccctgcacttcggaccctaaactctcgctccaggacacgctctcccttagcttagtgaagctcctcttcctctgtatcagaagaagagggtttggtggatagctatacatccgaagatagccggtccttcttgtcataaatcacgctacccccagactggtgctctgcagctgcataacaagggaaaggctactcaagactgcgtttattgtgtgccaatataaggggcgtagctttcctctcgcaaaggagagaatctggtttatcaaatggtgcatgaggacggagagaatctttcttcccgcggatacgatccgaatgtgcttggccctggatcttgatcttcgcggtggcaaagcggtgcatctgacgccccgcctgcgattccagagagacttgggaaataaacacggtggcctctgtcaagatgaagaggacgtctcagaagaatccctgcttctgacgaaaaggcccttttgttcccaatgattgg

SEQ ID NO: 298 - DNA, 283 bp, Glycine max
agcttctcaaggaagttttctcatgaaagcttctcaaggaagctatctagtctataaatagaagcatgtgtaacacttgttgtaactttgatgaatgaaagtcttatgagatacacttcaaagttccacttctctccctcttttattccttcaatttcgtgctcgccccttctctctttcttttcctccattaaagcatcctcttcaagcttcttatccaaggcaattcttggtggtgaagctccttcttccttggcttattccctagtggatggtgcctccc

SEQ ID NO: 299 - DNA, 425 bp, Glycine max
  unsure (1)..(425): unsure at all n locations
tctcccncaattttctataaatagggggagaagtgaagtgaataagggttcagccccttaggcacttctctctctttcgaatgtgcttggaaaaattgtttccgtgaagaaaatccaagccgaggcacttccgaaacgtttccgtgaggaatttcgcgaaggttttcgaccgttcttcgacgttcttcattcgttcttcatcgttcttcagtcttcaacgggtaagtacctcaaaccaagcttttcgattcattctatgtacccgtggtggtccacacttggtttcgtgtatttttattctcgtttcatttactttttatacccccttttgacgtgcttaagccattttatntaagtcatttctcgcttaacctacnaataaaataaatttccaccgatcgtttgaattgtattatccgttaact

SEQ ID NO: 300 - DNA, 372 bp, Glycine max
  unsure (1)..(372): unsure at all n locations
agcttaactctcaaattccncttcatcccatgctcttttgatataggcattccttcattagggacaacaacctcagcaccaggtttgacaatatctgtcaatgggatcatgagactccttccgtccaaggtggtgagatccaacgttttaccagtaagggcctcaagaagggttatctcttggttgatcaccaaatcattaccatcccttctataaagagcatgcggcttctcatctatcacaaaaatgagatctgctgggatgacaccaggctcacggttacctttctctgggaaggtaatttttgttcctttcttccagccaggttttatctcgatagtcaaaatctcctccacatccccacatttgctg

SEQ ID NO: 301 - DNA, 465 bp, Glycine max
  unsure (1)..(465): unsure at all n locations
ctggcagttgagaattcctgttctgtctgactaccttccatagtttatcaaccataaattgtaagaaatgcttatcatggaattgtgccaccttgttatactccactgctaaaaaaatttaccacataaagagtagtagcatgctgcaaccacaagaaaacttattcaaatgattttaaatgtacaggttcttaactttcaaagtaaataatacttaattttgtcagaattttttaacaacgtaaaatggaagaatttctcctatcaaggaatatctaatgccaaaaagcgaataacatgttcagaagtgaacaataacaaatgataaatagaaggcaagagagaatatcatttacacgtttcagattntaattgttcacgcaaccttgtacaagtaagcatgtggtgtattaccctntagattgatatttaatggctgataaagtacaaatntaaatataatat

SEQ ID NO: 302 - DNA, 333 bp, Glycine max
agcttatgcgcatatttccttacatacgttctcttgcacaagacatttaaccgaaaaagtgcacccatatacaatcaaggcagcttcgttacctagattatttacacgtactgccaaggtgtatttgttacttacatcacacacatctccttggctgaatttacatacatgcatactcaaagcattttggggtaccaaaaattgcacatgtgcacatcttggtatttctaatacctatatatacacaaacttcatgatgaatcttgactatcttcacaaaaaggtgctacacttcatcccttttttcaagtttttgctacctaaagccgcatg

SEQ ID NO: 303 - DNA, 426 bp, Glycine max
ctggcttcctttgatttctgacacgtctcgggacttcattcattgtccaaggacgccaagtgtctcgaagcggccaatcaaaggttgtatatcatcaaataataatccccggacgaaattagggtatgacagttgcccctctttacttacctctcatcggagataagaggaaagcaaagataggacactgatttcgtccgtcctgccctttccgtgatgacgactctcgcctctactccttcgtttttcttctgcacaaaacaaaatacaaacaacaacctgaacaacgaatataatatacatataaaaatatacacatatttggcgaaggaaccgatccggaaaacaacagaagaacgtgtttcccagtcaccagaggcttcgcgcttgaaatggaggacacatgaacagcgctaggcaatgaca

SEQ ID NO: 304 - DNA, 391 bp, Glycine max
  unsure (1)..(391): unsure at all n locations
agcttctcccccaattttctataaatagggggagaagtgaagtanaaaagggttcagccccttaggcacttctctctctctcgaaatagctgaggaaaattagttccgtgaagaaaatccaagccgaggcgcttccgtaacgtttccgtgagtaattacgcgaagatcctcgaccgttcttcaagattcatcgttcgttcttcgttttcttcagtcttcaacgggtaagtacctcaaaccaagcttttcaattcattctatgtacccgtggtggtccacattttgtttcatgtatttttattatcgttttcatttactttttatacccccttttgacatgcttaagccatttatttaagtcatttctcgcttaatctaaaaataaaataaa

SEQ ID NO: 305 - DNA, 440 bp, Glycine max
  unsure (1)..(440): unsure at all n locations
ntgaattggtttagggcatgatgatacatgatttgggacttgtatgaattgatttgggcaagattggatgagaggaagtgtgattttcgaaatctgcacttatgcagaatttttgctgagaaattgtgcagcagaattttgcacaagtgcagagaaaatgcttgtgtgtggttggctgtggaaagtctagtgcagaatgagttctggatgtttgccagtagatcccaacggtccaaatgtaggcttatgcactatagactcccagtaaaattttggagtcgatccaacggttaatgaattggatcgaaggaattgttactgtggtctttaagtgagaaaagctgtgattttggttgatgtgttgagcagagtnttctgtctntggttctgtttgcttggctgtgatagcttgtgttgttgaatggtgtttgcttggatgt

SEQ ID NO: 306 - DNA, 381 bp, Glycine max
agctctaacctcattgtctctcacagtctttatgattgggagccaatccaatccttgtgttcggactctcagccacttatgatagccgctgatgatcccattactgcttcccctaagctctctatcctttcttcacgccgcatcccatgccttgcgaactccttggagtaccctcgcgttgtggtcactgaaaccccgtgcgatgaaaggcgtgatgctttcgtctgatggcactcctctcatggggtagccaagctgtcttgtggcgaggacgagattataattaatacaaccccttgttcccatcaagggaatatttggacatccttcgcatgaagatagattcctgattcttccttccttctagcgagggaaccaatt

SEQ ID NO: 307 - DNA, 464 bp, Glycine max
tagtaaagctaagcactaacaatctcctctcttggcagaatttgtctaaaacatacttagacacttcctgagcaggtacgagcagttatgcaagtgggatcagcaacttccattatcagagtaatcaagcacagcggaatctgtagtctagacaagttgcaagtcgtttccaggatgtcaagacatctcacatgacatctgctttctgcttctgctccccctgtctccatgcttactgcagcatcttctatcagctactagtcttttccaggatgtcaagacatctcatgtgacatcagctttctgctccccctgtcttcatgctcttactagtagcttacatcagtcatcattggcagcagtctccccctcaaagtcatatacatacaactccccctcaaaatcatgaatcatgcatacatcgtatcctactgccatacatcatacatagtatcctactactc

SEQ ID NO: 308 - DNA, 312 bp, Glycine max
  unsure (1)..(312): unsure at all n locations
agcttctttgttagacctcgatcggtcatctttccaggccgaggtcgaccgtcattnttttcgatccatttcggtgaataatatttttttgccgagatgggcaaaatgccactttcggtcgaataaatgggaaaatgccagtttcggccgaaacgaaaagtcgggtgggctcgcacaaaaaaacctagccgacctacattntaaattttttatgcaacaccaaaacaagaaaacttcctgtgccgtaaaaaaaaaacattacatgacagcgagcgtgttgaataacaaaattgcgcagcgtcggctgaaaaa

SEQ ID NO: 309 - DNA, 365 bp, Glycine max
gtgtgctcggaatcctcgccgatcttgttgaacacatgatagactccttaatccgatacaagcttgttgatgagggctacatagtatatattgtccagaccacctaagcccttgagactcctcaagatgttgctgtatactgtgtgcggaaggtcaaattggatgttttccatgaagtgaaacagtataaacttgtggagattatagaaggttgtcttaaagccagctttgtgaagcacactcttattcagaatgttggctactatttttgccttcttacacatcaggctgtagatgatagtcttctgatcgctagccttgtcagcattgtctttgtagagagctgtagtgacgtgtgagtcata

SEQ ID NO: 310 - DNA, 414 bp, Glycine max
  unsure (1)..(414): unsure at all n locations
agcttgtagtgaggctnggctacaaaaaatcataggttnttttctaggattcaaaggcttagattctaagagagcacaaatcctagacttatctaagtgatctttttaatacaattagcttgctcactagcttttcactttcatttgcttttgaccttattacatcagcacacatttcctttgattgctttctttttctttcttctcttcttcttttctcttttttttataacacaacttatgtgttatgtgtgctgatgctttatctctttctttgcatcccaattagttccactcccccaaatttggggtaaatttgccttgaaccatatgctctcctagaatctaaacaaggtatctggagataatcattcaggttcagggttcaattgttgacaaaatcattcagctcat

SEQ ID NO: 311 - DNA, 400 bp, Glycine max
  unsure (1)..(400): unsure at all n locations
tgaacccttaactattaaagtgtgcttggaatcctcgtcgatcttgttgaacacatgatagactccttaatcccatagaagcttgttgatgagggctacatagtatatattgtccagaccacctaagcccttgagactcctcaagatgttgctgtatactgtgtgtggaaggtcaaattggaggttttccatcaagtgaaacagtataaacttgtggagattagagaaggttgtcttaaagccagctttgtgaagcacactcttattcagaatgttggctagtatttttgccttcttacacatcaggctgtagatgatagtcttctgatcgctagccttgtcagcattgtctntgtagagagctctagtgacgtgtgagtcatagttcttctcctaaccc

SEQ ID NO: 312 - DNA, 398 bp, Glycine max
  unsure (1)..(398): unsure at all n locations
agcttgctctntaattattgatagaggaagttgtaataatgttgcaagttccaggttagtgtccaaactaaatttggaagagaaagagaagagtgaagcaccaaagaggaataagaaaaggaagagtgaagcaccaaagaggaataagaaaaagaagagtgatacacatgagagaaaatttaattgtttagcaaaggcgagtgaagtgaggaaagtactacttgcttgtgagccactctatctactgtactacaaagacaataaaatttatgctaataattctaatgagttaactatttcgatttctcctagtgttgagcttctattgcaggaatttaaaaatgtctttcccaaagagattcctcatggactgccaccttcatgaggcatagaacatc

SEQ ID NO: 313 - DNA, 384 bp, Glycine max
  unsure (1)..(384): unsure at all n locations
tttcagagacatgaatggaataagattggagttttcaaatgcttggaagcattcaaaattctcatttgagaagaactccatatcaataaattttgggtctataatggaacgagagaaaaagaggtttgtgtaccgtatacactgttcttctgatgagaataatgatccagagggaatggaggaaggaattggggcttcctgtgaccctgaatgccgctgactccgactcgaggttcctttctgatttttcgatggttccgccatttgaggagttttttttggaatttcaatcggttcaaatgaaagagattgaaaaaagatgaagtttgggctttgcanggagtgatttggacaagaattgagtgagatatggctggaagaaaa

SEQ ID NO: 314 - DNA, 416 bp, Glycine max
  unsure (1)..(416): unsure at all n locations
agctngatccctcaaaaaaggataacgttaatgaaaatagtgaaaacaaaataattaaagagatagtttaccttgatgtggtttttgtagtatcccttcaccacaggatttgtaaaaaagtcatcctcagaatttatggactgtccctgactccttgcccattccacatactgtttctttccacccatgttctcatagttattcaccaaactcaacaccatcttgatcccatattttcttgcttcggctattgcgaaatccaagccctttttatttccaatccaagaaaacaacagagttaacaaatgggaaatgaagttttgttctatacactattagaaaaaatacaattagatagaaaaaaaaagtaattttccgtcactaaatttgatcattaatccattggtatgaaaatg

SEQ ID NO: 315 - DNA, 437 bp, Glycine max
  unsure (1)..(437): unsure at all n locations
ntctntgttattgttatgggacctttctacttaagttngttttatccatttatacgaaaggatcttcatcaacactaatcataatgcttttgaaaagttaactaagtgttttcaacatgttttaaccaataccctgttacttttttcaaaatgctttcattgattaaaaaacataaagcttttacgatagtactctcgaacaaatgtaagaagcaactcaacctttcaaagtatgtgataagttatctggttacatataaaaaaaagaagggaaaatgatctttcactatgtaaaaaaaagaagacaatacaccctttctaatgcttaagtcaatagatatccagagagtcaaatgatattatagagaagaacaatcatatttgcaagtatgaaaaatctttggatttgtagaggaggttgagatggatacttattc

SEQ ID NO: 316 - DNA, 408 bp, Glycine max
  unsure (1)..(408): unsure at all n locations
agcttagaactgcatgtgggcatctatttctaatcctctatgatgtccctatgtacataaaacagtcccacaaacccaatcttacaaaactacattcatatgtcattggggcatttcaccgagcacttggtgggcgcgtgtttaggcataaattgcaagagaatgggggcaatgtggcatgccccattgtttcagaataccacataggcctaaggccatcccctacaacccctcaactctaacaaatcaagcataaaaaaccccaaaactgccccataaatatgagcacattcttacaacttagagctccaaaagatgaacaaaatacactaatggaaagcaaaaaactcaaggattgaatacttacttgttggagtgagtaggaatacgaanaatgaaatcaaaatg

SEQ ID NO: 317 - DNA, 369 bp, Glycine max
acccttcatatgtggtactaggtggcgatcgggcgatggtgaaaatcaactctcccacatccaaaaatcaaacatgaacccaccatccctagttgcccaccttcaactgagctcacgtacccccacgtagcccttatcctcgttcctctcagcaccgggtccccatcaacccctccaagcttccacaatatccaagcaattcaatatccaaacatcatgaactaccctaaaccaagaaaacagggaagaggcagaaaactctgcccaaaacacattccaataccacagctttccctactcaaataccccagtaacattctcttcgttctgattcgttaaccgttggatcgaactcgaaaatttactgga

SEQ ID NO: 318 - DNA, 426 bp, Glycine max
agcttatgttgcaaacatctacaatagacctcttcaacctcagcagcaaaatcaaccacaacagaacaattatgacctctccagcaacaggtacaatcccgggtggaggaatcatcccaaccttagatggtcgaatccttcacaacagcagcaacaacaaaaacagccttattttcagaatgctgctggcccaagcaaaccatacgttcctccaccaatccagcagcaacaacaacaacaacaatagccccggaaacatcaaacagttgaggcccctccgcaaccttcccttgaagaacttgtgaggcaaatggctatgcaaaacatgcagtttcaacaagagaccagagcctccattcagagcttaactaatcagatgggacaattggctacacagttaaatcaacaacagtcccagaattctga

SEQ ID NO: 319 - DNA, 451 bp, Glycine max
  unsure (1)..(451): unsure at all n locations
nntgcttncattgtagccacttaacctcaggacttattgagggtgatgaattaagaagaaattctgatgtgatggagattcttaagaagacaaggtttctacgtgtacatgatgctgacaatgagaagtctcccgagacaatcctcgagcatgagtatgaatttacttgcatacatcttagtataactaatactcttaacatgtttatgtaatttgaggccctccttgcattttcctgttttgcattacatgttctaattttggatccatttattttagtcgaattatatggcttggagacttgaattatcggattgccctctcctaccgttttgctaaggcacttgttgagatgcaaaactggagagcattgttggagaatgaccatgtacgcctatataactctgttcttttaatatctaattttctatcttttaacttcaactggatt

SEQ ID NO: 320 - DNA, 400 bp, Glycine max
  unsure (1)..(400): unsure at all n locations
agctngngaactccaatgtagctcgcanagatgttagtaacaaaaagcagacaaaaaagtcccttatatggatgaatttcccgttctgttgatgtaagacctgatggaaattgttattacagggaaattgcaactttaatatgttagaggtgaggaatcatggctctacttcaacaagacttgatttaagatcttcaaacatggaattctcaatatgttgagttttttggcacataagatggtcttgttaaattattagactctttgtatgtccagcatagcccaatagcatccgttgacaagtggatgaccattcctgacatgggttatgtcattgtaattgaatttgtaaacaggaatcactttgtgttggtatacaacatattcttaagagattttt

SEQ ID NO: 321 - DNA, 467 bp, Glycine max
  unsure (1)..(467): unsure at all n locations
taaagttaanaggactaaaagagaaaaaattataatattaaaggaactaanattgaaaaactgcaagtttacaatgactaanaatgaaaaaaaaaacttatagaacaaaaaaaacacaaacttaagtgaactaaaattgaacaaaaagttttcaaaaatcaaaattaaaaaaaatgcaaacttacatacgaaaaaaataattaagccattttttaatatgctgtttttcatatcttttttatattttcttatgaaaaagtttaggcaatttggttaatatcttctatctccaactttttttttctctttttgaggaaaaaaatctctttttttaattggtaatattttaaataagagagatctttntttgattcaagaaacatttttntggaaataattatatntttcattttaggaaaaatacttaagtataaattatttttcttttataanttggtattagtagt

SEQ ID NO: 322 - DNA, 428 bp, Glycine max
  unsure (1)..(428): unsure at all n locations
agctttacacatacacacacaacacacatatttatatgctctaatatgcttttacacataactcataatcatgtatttacttcttctatcttattatgattatgttctaccttagtcaaaatttaaagagggagattgttaggtctaaatggtccacagaccactggatgacccattcccaccttggattntgatgattataaaggtataaattattggtagactaatgatttattgttaagtgaacatgacctactacataaatgagcacacttggtattaaattgtattctacagctctagtgagaatgcatccaacgggctattaaagtacctgcatccacttattgtgaaactagtgttcacacactgagttgttnttattcgtgttcattggactcaaataacttatacactgtattttatat

SEQ ID NO: 323 - DNA, 402 bp, Glycine max
  unsure (1)..(402): unsure at all n locations
ngaagaggatgctttaatggagganaaganagagagaagggggcgagcacgaaattgaaggaataaaagagggagagaagtggaactttgaagtgtgtctcataagactttcattcatcaaagttacaacaagtgttacacatgcttctatttatagactaggtagcttccttgagaagctttcttgagaaaacttccttgagaagcttctttgagaaaacttccttgagaagctagagcttagctacacacacccctctaataactaagctcaccttcttgagaagcttccttgagaagattcctaaagaagctagagcttagctacacacacctctctaatagctaagctcacctccttgagatgagaagctagagcttagctacacaccccttataata

SEQ ID NO: 324 - DNA, 434 bp, Glycine max
agcttgtatctgacatttgttggtatttactggtatgtgtttttttaagacatctatgactttttattgctaattatgaattatgaatgccattaattttgaacaatttttatcattttttagaatttatatgtatatagtatacattgtatagactataaaaaatttaaaaatagaagctatcctgctatatgctatctcactatagtgtttttggagccagccgctatgtgttgctctctgggatttaaaacaatttttgaaatgtatgatatatataaattatatatgtataaaaaattaacttaattcaaataaaagtaaaacacataaaaattagcataatattgactcaaaagttcaattggccaaatatgacaagagggtgcatgacacatgctgcaaccacaacgctcataacaactgcaatagca

SEQ ID NO: 325 - DNA, 422 bp, Glycine max
  unsure (1)..(422): unsure at all n locations
ggtgcaaatcanatcactcctacatctcatctctagcatgcattntctttctttacccactcctcacgtttggttttttagggaaaaacaccataactaaacgcgccgcaagggatccctatcgcaccagatccaaatctagaacgatgggtgatcaagaggagacgcaggaacagatgaaagccgacatgtcggctctgaaagaacaaatggcctccatgatggaggccatgttaggtatgaaacagctcatggagaagaacgcggccactgccgccgctgtcagttcggctgccgaagcagacccgactctcttggcaactacgcaccatcctccctcaaacatagtaggacggggaagggacacactgnggcacgatggcagccctcacctgggatacaaccgagcggcttacccttat

SEQ ID NO: 326 - DNA, 275 bp, Glycine max
agctctaccattctgtactaattctagagcatcacgcaagcaatcctctagagcctgctgaaggactgccagtgttgaacctcctgcgagaagaaatcacacgatgccgatgcattattaggttatagcaacggattcgtctttaaaggatgttgctgttgagaacactaaccatgctgagttcctctttctggacccgttataggaagaccttctagagcagccattacaactatactcgttctaagagcatacaggcgatcccctatattctt

SEQ ID NO: 327 - DNA, 377 bp, Glycine max
  unsure (1)..(377): unsure at all n locations
taagagntttccgcctctcaactggacctctcttcaaactcttgaactttctcaatgttccagtcttgaatattttccagaaataataggagagatggaaaacataaagcatctttttttgtatggccttcccataaaagaattgtcattttcatttcaaaatcttattggactccgttggttaaccctgaggagctgtggaattgctaagataccatgtagcttagcgatgatgcccgaactgtttgaattccatatggaatattgcaacaggtggcaatgggtagaatctgaagaaggtgaaaaaaaagtgggctcaataccatcttcaaaggcacatcggttttcggccaaggattgcaatctatgtgatgatt

SEQ ID NO: 328 - DNA, 343 bp, Glycine max
  unsure (1)..(343): unsure at all n locations
agcttatacgacctatgatgtggttntgtgactaaattcaatttagacacaagtctttcacttgccatattggtacaactccctccatcaatgatcaccatgcaaactttgccattgatcaaacatctagtgtggaaaatgttttctctttgactttcctccatagatttcaattgatggccaagtaaccgcctaatcatcaacaattctccctccggtgttttctccacttcctcctcatcatcctcactctcttctcccttttcaacttcggactcactaatgtaatctccatctctaagaatcatggctntcttgttagggaactcatatagcataatgt

SEQ ID NO: 329 - DNA, 357 bp, Glycine max
ccgagactcgcgctcacggattaggggccagtagtttactgttatcaggttctgggccaccccccctgatattggacggcgaccaactgtgcaagctcaaccagagagggaggctatcacgcacctactatgcataccggggtaagatgtcacccatgccgctgcaaagagaccagtgtggatcatgtgtaccgacatgaccgcttttacacagatataaatgatgttgctacttagcaacattctgcccagcgaccgcgataccgatctgcccctgcggaagtatcagttggtctgtgccatcccgacatacgttggtgtgcattattttcaactaatttctaatgccgtctacta

SEQ ID NO: 330 - DNA, 368 bp, Glycine max
agctttatgtgaaaagatgtgactcttcacatttgaatttgaatttcaacgttcaaaggtactggtaatcgattaccaaaacattgtaattgattacagccttttgaaaataattggacgttgtaaattcaatttgaaaactttttcaaaacaattttactactggtaatcgattacaacaatctggtaatcgattaccagagagtaaaaactctttggtaaaaggttttgtcaaaaactcatgtgctattcaaagttttgaaaaactttttaatacttatcttgattgagtcttctcttcatccttgaatcttgagtcttgaatcttgatcttgattcttgagatcttgaaccttgaatcttgattc

SEQ ID NO: 331 - DNA, 348 bp, Glycine max
tgacgatccctgtttatacatcaaaagcaaacatattggtgacaaaaatcactacataaaaaagataaatcataaaaaatgcgaataaataataatctaaaagatttaaaccagataaagaaactaccaccttctataaaatccaacaaaagtaagtcggttatcaatataaagatttttatatcaactaataataaatccttctagatataatccacctgttgttagggtcaatctcaagcgctttcttaatatcaaattcggccaagtctaaatcagccaactggatatatgcctgggcccttctatagagagccttcacattagtactctcaaggtccagtacct

SEQ ID NO: 332 - DNA, 396 bp, Glycine max
agcttgccaccaaaaatgttccaaacaccatttgtactctgaaacaagtgaaagttgttaatttctataacagccactcaatggcatgcattatgaactgtgcctttgaaaagattgccccaactggagtttcatatgctagtgttggatataaaaaaataaataataccatgagtcaaagataaaaaaacaatcatcagagaacatgtatgtacagacacagactgcccataaataattaacaaatttctgcacattttacaatagagtgaatgtaaggactagtgcataggtcataggtgttaatcttggtttattggcaatgaaatagtgaatgaaaaactttaagagcatgtttgcatcagcgtttcaacatccaccaatggcatttcatgc

SEQ ID NO: 333 - DNA, 424 bp, Glycine max
  unsure (1)..(424): unsure at all n locations
tctgactataagtacgacacatganatgcagttgcatatatgttaccacactataagatgttactttgttcagatgctagtttaggctcttgaaaagtctccgttcttcatttattttaatggaattttcagttgaacgctacgaataaatctgcagccgcagaatgctatacaagaacagaggtttgtctggaaggtagtacttgatgcactgctatttgccagtacaaactctcacaggcttgacatgtttgctctttgtttatttgtgcatgtattaaacaactcttgttgactttggtatcagnatttggtatcagtattttaaaaagagaacacagtcctaacatataactaattaacatggtctaaacagtctcacaatatatttaacttcttattttcctgcgaaggattatattat

SEQ ID NO: 334 - DNA, 430 bp, Glycine max
ttaagtcacctgcggcatgcaagcttccagattagtgtaccaaatgaccgctgctccagccaagctatcttggaaaaagtgcattaacaacttttcatccctagaatgcacccccatcttgcgacaatacatcttgagatggttcttaggacaagtcgtccctttgtacttgtcgaaatcaagtaccttgaattttggggggatgacgacgtctggtactaagcaaagattcgccatgtccgcgaacggataatcaccaaagccttcaacagctctcaatctctctttgatgagatcgagtttccttctttcttccgttgccggggatggtccttctatggacaagaatattggctgtgctgggaggttgggctgaggcagtatgttgggtgccggcccctcgatggggaccagggggtagaaatcgatg

SEQ ID NO: 335 - DNA, 438 bp, Glycine max
tctcctctatcttcctatgaatagggggagaggtgaagggaaaaatgttcagccctcctggtaattcgagatcacttgagattagtgaaaaaaatcgtttccgtgaagaaattgcaagccgaggcgctttcgtaacgtttctgtgggtgatttcgtgaagattttcgatcgttcttcgacgttattcgttcgttcttcatcgttcttcagtcttcaaccgattagttcccgaaatcgaacttttcaattcattctatgtacccttagaggtcctgatttgtttcgcgtacttttattttcatttcatttactttccgtacccccttttgacgtgctttagtcatttacttaagtcattttctcccctaataaaaaataaaataaatttccatcgatcatttgaattgtaacatctggtaatatctgttaaaataaaat

SEQ ID NO: 336 - DNA, 307 bp, Glycine max
  unsure (1)..(307): unsure at all n locations
agcttctcgacgctgaggaacctctatctatagtatcttccctgncacagctaacagtaacagggtatccgtttgtaatttccgctactttatgttttctatttcatacacttcgcttattaatatgtctttactgcacacataataaaatgctcgattattttttttcatctttatatctaatagcatctatataacttgatttcttaatccacaaaattgcatggatatagttctccctcactaatcaaccataagaatgtttgagcaattgagtacatgtttttttataatgaaattcaatacg

SEQ ID NO: 337 - DNA, 416 bp, Glycine max
tatacttcatcactagattgctgatgtgcatttccagcactgtcgctgcgtggaagttcatctcttacaaacactgctcagaagcataagccagggcttggatacagaagcgcaaacactgctatcttggactgaggcaaccttttaaagatctcacataggcattcatctggcaaagactcaatagatgtcttatgcttctgctcaaaccattctccactgatatcaaatggaacactgaagcgagacctcttctgaagaggaaggataacatgaacttgactgtcaagagacaagatgagacacggctccttcgggttaggataaataggaccaccatgactacaatcatcattttctgacaaaccaaacatgtctaaagtcaagatggcgacaaaactgcacataaataaata

SEQ ID NO: 338 - DNA, 421 bp, Glycine max
  unsure (1)..(421): unsure at all n locations
agcttcttgctgcgctcgtcgttcacgacatcgagattcggtagggtttcttcgaaaacctgcagcacgggcttccggagctcttcgctgctgaaccgcgagcgcaggaaccgcagctccgtgagcaggtgctcgatctccacgtcgcgaaccgccctgatcgcgccaatttgtcgctccatcgctgcaccgaagttcaaccgaactcaaaacgggagtcagagagtggtttggtggttgggagtgataagaaggggtcatgatttttaatccccgctaacataacatactaattgctaacattagccggtaaaaataaattgaactaaaagcacgttcataaaaagggaaaaacgaaaagattgatgtgtagatgtgaaccttggatntcgaggtcgatgaattgtggtggctgcagttg

SEQ ID NO: 339 - DNA, 435 bp, Glycine max
  unsure (1)..(435): unsure at all n locations
ntggagtttccaagtgccaattcgtcttcttctttagtccagtcttcttctggcttcaattcatcagtgggctttccttctgtgtccagcatcttgggatgttcccagcctttgatgacagctttccaggttctgctatccagtgatttgaggaaggccaccattcttgctttccagtattcatagttggttccatcaagaattggtggtctgttcactggtcctccttctttctccatgttcatcagaatttatctccctagatctcactctgtgatttcgagtgttggctctgataccaattgaaattctgataccaggggacagatgtcgtaccggatgtcacgacatcacgcttcagaacatgcagattagatgcgtccgtatgaacagattaaacaagtnaataacacaagaggattgttaacccagttc

SEQ ID NO: 340 - DNA, 438 bp, Glycine max
agctagaactcttgcacctccttgaagatcaactcatgacttctcccaaactttggctgcataaaccttctttggcccaccatctttggcctccaaagtgatggtgtacaatgaaccagaaaccacttgctgtttcgcagttaccaccttttcaaactccaaaagggcattctgcatagccatttacaattcaataaaaataaaatataattcatatataccacagaataaaaagataatagaagcccgttcgtggttattgaaattgaccctaccaatctatttattccttgacagtaatggaaatgcaaatttatcctaacaatcaattaatttttggtgaacaaaattttgggggaggggtgatgccccagaacaagacagataaagcctccgagctcaaagaacattcacagaagaacttacatttaccccact

SEQ ID NO: 341 - DNA, 415 bp, Glycine max
catagatatatccagttccctaacaatatcaaggaatctcgctagatggcagtctctgaacttcttggaatgtaccacatgatatggtacttccgtagcctcatttgaagctctatgtttcttcttctctcttgctatctcacttctactctttactttcccttctttattattttcaactgcttctttttctacaattgcgtttgctttctctacctctatacctttatctaggtcattgatgactatctcctcgaccattattggtttttcaccctcctgacttgtcacatttgttacctcttctttctttgtctcaatgccatcctttacaacaatatgattctccaaagccaccttatcctcatcctcaactaccaaacgcttcgtggttcttgttatcacaacattacat

SEQ ID NO: 342 - DNA, 411 bp, Glycine max
agcttatgctgaattaggctaaactttcgttagctgcttgagctgagtctagtcttacaagagggatttgcggatgaaactcagtttaagttagtctaaacctaagaaggctgtctcaattgggcctagtccaacaagagggatctaaggacgaagcttggattgattcggtctagcaagggatcgaggtttactaatttagactacaacatagaacacaagagcatgattgattagagaaatatatttatatgtatcagcttgttgagaagaaagacccaacatttctacttactgctgacacttttacttacttttcattatataggtttttagcgtaaaagttagtttaaattctgtttgacattatcaatcatacatgttgtctcaacagtgcttcatttctgaact

SEQ ID NO: 343 - DNA, 459 bp, Glycine max
  unsure (1)..(459): unsure at all n locations
ctatctactactcaagcttatgctgcaacatctgcgatgnacctgctaaacctcagcaacaaaatcagccaccacagaacaattatgacctctgcagcaacaggtacaatcccgggtgaaggaaccatcccaaccttagatggtcgaatccttcacaacagcagcaacaacaacaacagccttattttcataatgctgctggcccaagcagaccatacgttcctccaccaatccagcagcaacaacaacaacaacaacaaccccaaaaacagcaaacagttgaggctcctccgcaaccttcccttgaagaacttgtgaggaaaatgactatgcaaaacatgcagtttcaacaagagaccaaagcctccattcagagcttaactaatcagatgggacaatttgctacacaattaaatcaacaacagtcccaaaattctgacagattaccttctcaatctg

SEQ ID NO: 344 - DNA, 407 bp, Glycine max
agcttgtgcctcgtacttatgatcattggagcattaaatgcgcatccttctttgatgcaaaaaaattactctgattggcttttgtgttgaatactttagtataaaatcacttttccttggtcaaagcaagtttttcataacatattttgaactatagcttcatttattattcataagattcgccagatcgtaggagaatatctctgcaaaatgaatctcacacacataaataaatgaagtgtgaaatattattctttaatgttgtatcagatcatgacttggtcctattttcgtctaatactttagacgcatgatgtatacaacatgatctgatttcacataagacacaacttttaacttttgtatttatttgcatcgaataaaaataatgagtcctgatttatttt

SEQ ID NO: 345 - DNA, 426 bp, Glycine max
  unsure (1)..(426): unsure at all n locations
taagctccttcgactgcacaagactcttaatatttgaagagtatccttgtggaaccttcacccgacgaagacactgacaaaaacttatcttctcctttttggacaaagtatggcaagttgggggcaagtaaattttcttcccatcataccttggatgcaactgtgatcgtatccccatatcagctagatcttgacgggtattcaagtcatccttcctcttgccttgaatgttaaggagcatcccaatcacactgtcacaaacatttttctccacatgcataacatcaatacaatgtctaacgtctagattagaccagtatggaagatcaaagaanatggacctctgcttccatatgcaactcttacttttatccttcttttgggtctttccaaatacagtattcaggtgttgaacccgctgatata

SEQ ID NO: 346 - DNA, 385 bp, Glycine max
  unsure (1)..(385): unsure at all n locations
agctnttactaaattgttaagagaatgatgtgtataagagaaacttaacagaaagtaaaagcggaaattaaatgcacaacggaaagtaaaagagtagggaagaaggaaacaaacacacaagagttttttatactggttcggcaacaacccgtgcctacatccagtccccaagtgacctgcgatccttgagatttctttcaaccttgtaaaaatccttttacaagcaaagatccacaagggatgtaccctcccttgttctctttgaacctagtggatgtaccctccactagagctgatccataagagatgtaccctctcttgttctcagtcaaacccaagtagatgtaccctctacttgtaccacaaaggatgtaccctccaatgt

SEQ ID NO: 347 - DNA, 421 bp, Glycine max
  unsure (1)..(421): unsure at all n locations
tccaagaatcaagatcaagattcaagactcatgattcaagaatcaagagaagaattaatcgagataagtatgaaaaagttttttcaaaaactgagtagcacatggatgtttctcaaaacttgtttaccaaagagnttttactctctggtaatcgattacataaccagtagcaaaatgtttttgaaaaagttttcaactaaatttacaatgtttcaattgatttcaaaaagctgtaatcgattacaatgttctggaaatcgattaccagtgtgcttgaacgttgaaattcaaattcaaatgtgaagagacacattctttcacaaaaaagctctgtgtaatcgattacactgatttggtaatcgattaccagtgataatttatgaataaataaaaagatgtaactcttcaaatagtttttgac

SEQ ID NO: 348 - DNA, 336 bp, Glycine max
agcttaagagaggaaatatgtatgtttagagacaacaaaggtttgattgaagatgacctataaataccaaaagctttaaagacattaagtacgaattgaagcacttattattcaaattattgttgtgaagagctttttgtctaaattcttgtaaagtttagtaaagctcttaaaaaactttgtttctctttagaaaaaaaactaagtgctgaaagtgtctattcatctgttagatgattgagtattaatcattgtgcaaccaaaccaacataatcttctgaattttgttaaagctaatagtgacttggtagggtaaaaaatattgattgcaacaag

SEQ ID NO: 349 - DNA, 382 bp, Glycine max
  unsure (1)..(382): unsure at all n locations
agctnggtcagcgtttcatggaaccactgttataggattgaatcaatgttggggggtggtgatagatgcacaagaacttaggttcaattgtcgtttcttccactatgagattgaatgtctgatttgagtggatgcaagtcttgttcttcatcccactaataatctcaagtagcagcacacgaaagcaccgtgtacctctgttttgcctgagacaattgttagtcgatgaatacgactagcttttgtgtataaaacatgtgtaaattgaatcaaacttccccaatttatggttgttttgtaggattataaatactttttgttaagtataggtaatagacacttaatacttctatttgtgtatttaataatcaacttctctcat

SEQ ID NO: 350 - DNA, 401 bp, Glycine max
taatactattgtggcatgactctgatattttgattctgtgtctcttgactgtcatttaaatctgaggcattagactcctctctcataccattattcatcaaaccattttgattcttgtacaatgttatctgtttggcaagtgtaccaaatgtccaagtaataaagtctcggaagcccgagtgtcgaattccattggaattttgtgttgtacttatcttggatacttttcaatctataagtggaaaataataaaagagaggggtagaagagagaatacgaacaataataggaaattataagtaatggaaagcaaatgaattaaaagcagagtaatcaaaaagggaattcaatggaatgtaagtgttaggacctaacatgccctatttgcctaggatgtatga

SEQ ID NO: 351 - DNA, 413 bp, Glycine max
agcttgtcagttataataataccgtgttgagacatcaagacaaacaatataccataataacaaggttttttttccaaacatcagtcacttggaggatatttctagtgcaatcaaatagggtcaaaagtcacaacaacaataatctctcaaccaaaacatcaagataaaacaataggataatgcataataattttaagataaaagcttctcataaactagatacttaagtcaagagtggatcccgtcatgcagtatgtagtaaattccaattaacactaggtggatttattaaacatcatcatacattctgtttaaaagccacctaagtactttcttccagaagatgagtcttcaaagttggcaattctactgggacaaaaaagacaaaacgatgcctcataaggacatatcta

SEQ ID NO: 352 - DNA, 477 bp, Glycine max
  unsure (1)..(477): unsure at all n locations
aggcccacgcncncnnaatgtacccatttganagcgtcttgatagcatagcaagcacgcgacacaatagaatactcaagcgagcctcatagaggtccatgatagataatgcggtctgaaggactatttccgctcctaagtatgacagccaccagtttatgagcgctgtaggtcaacaactatttaaggacataatggatcgtcgtatctaccagaacgacgttgtttgcatgcgatacgacgattatactgttttccatgaggagattgggctccggcaggggacatcacgtgcttctcccatgaacgaggtgatacagacatagtccctaactttatgtccaatcttgacacatataagacgcgccaacctacgtcttcgaatgagatatgaaccggaatatttctactatttgttttatttgaatccttaagttttaaggacagattctgtgtggcaaattaatcgtcattaggc

SEQ ID NO: 353 - DNA, 331 bp, Glycine max
  unsure (1)..(331): unsure at all n locations
agctngtctatttaataggttttggtcaagatgtcatacacacgattatcattcttatcttttttgacatcctatccttaaagagaggtagggagaaagctaaagggtactctcaagagagtgtgtgttcatatggaagaccaacttgcataactctaaaaagcgattggtcatcttgaattcaaatacgttttcgctttgatttcttaatgattaacatgattgattcgggattgatagatttagttccaatagtttggactttcttctcaggttagctgcgaatctagggaggttgaatagattccttcaaaaaatttatttcataata

SEQ ID NO: 354 - DNA, 413 bp, Glycine max
  unsure (1)..(413): unsure at all n locations
tcttagtttcagatgatgcagatgggtntgtagctacctcatgcactcctctaatgactatggcatcatttctggcgctaaactgctgggagttggaggccatcttctcaattaaatttctggcttcaacacgagtcatgtctccaaaggctccaccactggcagcatctatcatacctttctccatattactgagtccttcataaaaatattggagaaaaagttgttctgaaatctgatggtgggggcaactggcacataatttcttaaatctctcacagtactcatacaggctctctccactgagttgtctaatacctgagatatccttcctgatggctatggtcctggaagcatggaanattntttctaagaatactctcttaacgtcatcccagctcgtgatggacctt

SEQ ID NO: 355 - DNA, 433 bp, Glycine max
agcttcaccttctggtcctcctcatagttgttgcatgagaaaacatgctctattttcatctcccactccaagtaggcctccgaatcattctttcctttaaatggaggaatgttgagtttaataccatcaattcggttttgtctaggaacaccatcattccctcttctcctcctttcttcttcattatgatctctattctccatttgatccaacctctcatggagcgcatcatctcgttgtttcattaacctctccaaatgttgcatcaaagcttgcatttggaattgcgaaagccccactccatcattaggattagtacctgacatctcaaacaaacaaatcaaacgtaacaagacaattatagttgttgtttgaatacctcacccactcaagtgtatcacacaattatggcttttctctaatgaaacactct

SEQ ID NO: 356 - DNA, 429 bp, Glycine max
ctgttttcaatcttgtgcatctcgatatattacaggtctcaatcagacatccgagtaaaaagttattgttgttagaagttgcacagagcttcagttttgcattttgagggtctcgatatattacgggactcaatcggacatctaagttaaaagttattgctgtttgcatttgcttcgagctttcattttcaattacgagcgtctcgatatattacaggactcaatcggacatccgagtaaaaagttattgtcgttagaatttgctcatagcctctattttcaattttgagtgtgtcgatatattacgggactccgtcgtacatccgagtaaaaagtaattgtcgttagaattttctcaaagcttctgttttcaatttcgagcgtctcgatatattacaggactcaatcggacctctgactcaaaagtta

SEQ ID NO: 357 - DNA, 431 bp, Glycine max
  unsure (1)..(431): unsure at all n locations
agcttgtgcgtttaaaaaaaaaanaagaaagggggttaaacgttgtagtcggatctgagtcatattggagtcgtattgaagtcgtgtagccttagaaagtcgtatttaagtcgtatcccagcggtatcttgtatttaaaaaaaattggatactcctaggatacgtatccggtcgtatcgtatccgtgaagtatcagtgtcaaatactggtgcggcaccaatatttttccttttttcacgtattcggacttcacaggtatttacagatagagtaaagttttttttatatcagccacaaattaaactctacaaaactttaatatataagaattaaactcaaagaattgtatgatttttttaataaatttatacatttattatataataattatttgtgattagataataatataagagatatataatcattat

SEQ ID NO: 358 - DNA, 439 bp, Glycine max
  unsure (1)..(439): unsure at all n locations
tgctgcacaattccttccttggttggtgttttggtttgtgctaaaggtggtgtttaacattggttgtgtggaaggtgggttttgtggttgatttacggatgacctttgtggataactgggtggtatgtaaggagaagggttgttattggctaagtaatgacattgttgggttggtgggaaacttggccgtataggaatggcagtcacaacatgagtttctccctcatcctcaccctcttcatttgccccagttttctcattcatcaaagcaagatgattaatattgcctctgttcagacccacttcgatcctttcgctggcgaagaccaaatctgtaaaacttgaaggtgtgtaacctatcatttttcatagtagaacaccggtgacatgtctactatcattgngatatctctttctctgttattgggggcgctacttg

SEQ ID NO: 359 - DNA, 331 bp, Glycine max
agctttgatgatatggtcttcaccgacgaatggatcaaaatgggtttaaaaagaggcaaatcttatcatcatgctttgataaatgcaaaaaaaaaaaaaactagggcaaataaagagggtgagaataagggagaagcctatgctgtgactgccattcctatacagccaagtttcccaccaacccaataatgtcattactcagccaataacaaactttctccttacccaccgcccagttatccacaaaggcaatccctaaatcaaccacaaagtctgtctaccgcacttccaatgacgaacaccacctttagcacaatccaaaaacatcaac

SEQ ID NO: 360 - DNA, 440 bp, Glycine max
  unsure (1)..(440): unsure at all n locations
cggttacctccttcttcactacatcaagaattactgggttgcgtcttctctgtggttgtcttactcgtttagccccatcctctaaatttatccgatgcctacatgtggatgggctaataccaggaatgtctgccagggtccagcctatagccttcttatgcttcttaagaactgataacagcttctcctcttgctcatcaacaagggaggcaaatataattactggaaaacttttgctctcatctaagtaagcatattttaaatttgatggcagaggcttcaattctggtgtgggcggctggatagtggtagaaagagatggtttctcagcctgtacctcataaagaaagtcagaggtacgtgtacttcctgaaacatggttagttctatctgactntataaaatcaatctcaagaggtaaaacatcagacatgtgatca

SEQ ID NO: 361 - DNA, 349 bp, Glycine max
agcttgccgccacagagttttccgactatgctcttgtgtggtggaacaagctacaaaaggagagagcaagaaatgaagagccaatggttgatacatggacggagatgaaaaatatcatgaggaagcggtatgtgccggctagttactcaagggacttgaaattcaagctccaaaaactaacccaaggcaacaagggggttgaggagtatttcaaggaaatggatgtgctcatgattcaagcaaatattgaagaagatgaggaggtaactatggctcgatttcttaatggtttgactaatgatatccgtgatattgttgagctgcaagagtttgttgaaatggattattt

SEQ ID NO: 362 - DNA, 422 bp, Glycine max
  unsure (1)..(422): unsure at all n locations
tcaacattcaatatcgagcgtttcgatatgttacgggactgaatcagacatccgagtaaaacgttactgtagtttgaaggtgctcagagctaaggcattcaagtccgagcgtctcgatatactacgagactcaatcagacatccgagtaaaaagctattgtcgtttgaatttgctcaaagcttcggtattcaatttcgagcctctcgatatattacaggactccatcagacacccgagtaaaaaagttattgtcgtttgaatctgcttggagcttcaacattcaatttcgagcgttccgatattttacaggactcaatcggatagccgagcaaaaagttattgtcgtttgaatttgctcagagctttngtattcaatttccagcatttggatatattacgggtctcaatcagacattcgatt

SEQ ID NO: 363 - DNA, 384 bp, Glycine max
agctcgcaataaaaatcttgtctctagttacatggtgggaaaggtgatgcggaagtgaatcttctacaatatgtagatgatatgatcttctttgtggagaaagcctacaggtgtaggtactagacatagcccatatttgggtaaaccaatagaaattcctttgtgtgtggtatcctttttttttaatgattttcatatattttaactattgagtacttgtctttaattttgaaaaaccttgttttacaaaagcataactctaatattcaatctaaaggtttttacaaaacagtttaaaagttttgaagcaacatcttgtatcaaaaaagtgaaaaccaaaatctattggaaatagaatctatgattttaaaggtagctcctgaa

SEQ ID NO: 364 - DNA, 390 bp, Glycine max
  unsure (1)..(390): unsure at all n locations
tctaacattccaatccactcaattcatacgatntctcattcatttcaaacacaaacattcatttcatacaaaacaaaccattgaatatcatattcaatcaattcactgttcaatcatgcttttgtacaagctactactacaaacaaaataattgaaatttaaagactgaaattttaataactgagacataaagcataaactaaataaattgataaaaataaacttttcaaaatgcaaaaagataaagatcctgtcaatcctcctattggtgatcctctgcatgctcattaagatacaacactggagcagctggtggatcctgaacaatatgctactcttgctccaatgcttgtgtggatggcagggaatcatcaataactggagctggag

SEQ ID NO: 365 - DNA, 417 bp, Glycine max
  unsure (1)..(417): unsure at all n locations
agcttcatacttgcaacanaggagttgagcttgtaaaaaagattcgtcttcaaactcttagaggtgactntgagcatttgtttatggaggagtccgagtcaatttctgattatttttctcgagtattggccgtagtcaatcaacttaaaagaactggtgaagatgttgatgaggtgaaggtcatgaaaaaaatacttcgaactttaaatccaagttttgacttcattgttaccaacattgaagaaaacaaggatttaaagaccatgactattaagcaactcatgggctccttacaagcatacgaagaaaaacaaaagagaaaaattaaacaaaaggaggctacggagcaactactacaactcaacgtataggaagcaaactatgcatattacaagagccaaagaggacgaggtcgtg

SEQ ID NO: 366 - DNA, 354 bp, Glycine max
gcgctagtatagttcccgcaaggatggttggtttgtactaaaggttgtgataaatactggtttatgggtaacgctgtctctagaacatttccatgagattcaatgatgaaatctgggcattttcaagtgaaaaaaaaggctaagttttgaattgcgaaaagtagcagttgggctaagtgcttatccactgctaagcgcagcttcagagcgcttagcacacaggagaatctggcagagcattagcatcaaagtctcgcactaagcgcacgatcagtgtgctaagcgcaacagtttccttcagccaggctaagcgcgagactggcgctaagcccaattccacttactcgcgctatg

SEQ ID NO: 367 - DNA, 431 bp, Glycine max
  unsure (1)..(431): unsure at all n locations
agcttgcttctacaggttccctgaccccaattatggtatcaaaagctgtaaacaaacaataaactaccctcacctatctatatctctctcttagttccttgcagagttgttctaagatatcttaggttcacgtccgttcattcaaacgcagaactctatatagaagcaaaaactttgatgttttggtgatgccaaaggatcatgcgcttcttaagtttaattcgaaggatcatgcgcttctcaagtttaattcaagaggatcatgcgcttctcaaggttaattcaagacaagaatccaagaaattcaagatatatgatcaagataatctctagaggcttaggaagggaattccaagttgaaacaacaagaggtttggccaaagaatttaagctaaaatgtttttaccaaagatttactctntggtaatcga

SEQ ID NO: 368 - DNA, 415 bp, Glycine max
  unsure (1)..(415): unsure at all n locations
ngcaccactccagatcttgagcagattcattcggtgcaatgtagagtgagttgctagagaactctatctctcactttggtccttcaaacagaaagtgaatcgcatgtgataatgatatttgaggtggagtattatattttgtggttgcggcatctccaaatgcaccaaagtgtgatgcttaatctacacttaagctccatggggagggtttcaagaaggtgaaaagttaagtccatagctggttctgcatggttcatatataaactaacctggttctagattcctgcttcttcccacacgtttctaacttgttggcagccaaagaagactcgtgcaatggactcctttcctttagattgcagcctggttcttgtagggagacagcattttaatgtacgccatagaaagtgcttga

SEQ ID NO: 369 - DNA, 360 bp, Glycine max
agcttgtagaattcaccccaattccagtgtcctatgctgacttgctcccatatctacttgataattcaatggtagccataaccctagccaaggttcatcaacctccatttctccgagaatacgactcgaacgcaacgtgtgcttgtcacggagaagccccggggcgttccattgagcatggtagggctctgaagcgtaaggtgcaaggtctaattgatgcgggctggctgaaatttgaggagaattgcgtgtaaatcctgacattgacaagagatgccacacatggggcaattttgaaagctgttgttaggtgtccctaatgactcatcagggtttctcagtttatggccttattgtaaa

SEQ ID NO: 370 - DNA, 428 bp, Glycine max
tccacaacatccaagcaaaacaacattcatacagcacaagctatcacagccaaacaaaacagggcaaaggcagaaaactctgccaaaacaccaaccaaatcacagcttttctcacttaaagaccccagtaacaattctttcgatccaattcgttaaccgttggatcgactccaaaattctactggaggtctatagtacattatcctacattgtgaccgttgggatctactagcaaacatccagaacgcattttacattactctttccacaaccagcaaatacatggatttttctgcacttgtgcaaaaatctgctgcacaattttacagcaaaatctgcacaaagagcatatttcgaaaaccacacttcccctcatctaatcttgcccaaatcaaatcctacaagtcccaaatcatgtatcaatcatg

SEQ ID NO: 371 - DNA, 305 bp, Glycine max
tcaagctttccataatacttatctcaacactccatcaaatattacaaaaaatcatcaataaataacttgactagtttgtgacataaggaagaatgttgtgaatggttgtatccttaatgagggtttgtcattctcttaaaagggcacaggtgacagagcataacatcattttgtggtaaggcatagcaaaacagagagattttatgatatgcaaccaaaatttctattgctttatagaatgacaatgacacaaaatatgtacactgaagttgcctttaactcctagtttgtttcattgtgtgaaa

SEQ ID NO: 372 - DNA, 398 bp, Glycine max
  unsure (1)..(398): unsure at all n locations
ntattgtgactaagagtatatggctatctcttctgcttagcataatgacatacatcacacttcttattgactgaatggaaagagtaaagaaagactacttacttattaaggacattctctaatgatacaagtgtcccaacaagagtgtgacaatgcaatcttggctcatgtatggcaacagaaacatttttaatgtacatatataactatcacttgattttcatcaatcaccaaaagatatatcccttcaacttgatcagcaaaatgcactcagactcatgaaattggagagtacaactcacaaaatgacaaaacttacactctgaaataaaattgaatgtaaattgttttagaattgttcattaaccacaacttcatactttgactcacctgtctgc

SEQ ID NO: 373 - DNA, 361 bp, Glycine max
agcttgccacccagctcgcccaggcgagcatggttgattcctccagaagcaacagccttctggaggaatcttctggagggcccaagtgggcctggttgccatttgcacccccatttctactaagtacaccccttgcctgtttttggtgattcttttttcgctaagttactgaaacttacgaattttgtaacgatacttgttttctttccgtaatgttacggaacctttccgggggaacaaaatgtgcataagacgatgtcagcctctgcatgctatcaagcgttctgtcttacagatagcaaaataatgtttttacgggttaccacttcggtatttcctgccgtcagcgtgacttaaaatt

SEQ ID NO: 374 - DNA, 416 bp, Glycine max
  unsure (1)..(416): unsure at all n locations
agctntcataagtgaagtcaggtgcaaccatctccctaagaatcctctcacgaggtggaggttgagccatgttctcattatgaaaattggcagccgaatgctcaaaatcagaatatttataatcagcagcaacaaaatgctcagaatgctcaaaatgcacataatgattaggatgcacactatgcctaaccaatctatgaaaggttctatctatttcatgatcaaagggttgcacatcacccggattgcccctagtcatgcactatatgcagcaaatcatgtatttcccaaacaaacaccattgttaaaaatggggtaaaactatgggtgaaacttcaagtagtgctcaataatattcaaatgagctgaagatgtgcgaggaacaccctcttatcatgaatagataacaaaaattt

SEQ ID NO: 375 - DNA, 333 bp, Glycine max
agcttcttttggaccttgaacaggcaactaactcctctttcaaaaccatgctacgtgctcgcgactggtccctctcttcccttcgcagcttgagttcactattgctaccccacagagctccgcgaaatttattccggccatactcttccttgcgagccctcttggtctcttgttcaagggcccttgtggtagttgcattctcttcccgtaacccggcacactccttctgaatgtgtgtagcggccaacttgaacttctccttggcaagtttcgcctttcctaactcgcttttgagagcttggacttcttcgtcctcttccggtgcctcaaaac

SEQ ID NO: 376 - DNA, 385 bp, Glycine max
  unsure (1)..(385): unsure at all n locations
cggagaggatgcttcaacggagganaagaaagagggagagaaagagagaggggggagcacgaaattgaaggaagaaaaaaggagagaagttgaactttgtgttgtgtctcacaagactctcattcatcaaagttacaacaagtgttacacatgcttctatttatagactangtagcttccttgagaagctttcttaagaaaacttccttgagaagctntcttaagaaaacttccttgagaagcttctttgagaaaacttccttgagaagctagagtttagctacacacacccatctaaaaactaagctcaccttcttgagaagcttccttgagaagctagagcttagctacacacccctataatagctaagctcacccccatgac

SEQ ID NO: 377 - DNA, 436 bp, Glycine max
  unsure (1)..(436): unsure at all n locations
agctngtaggttaagtgacagtgattggactggagatgaagatgatcggaaaagtactagtggatttgtgtttttcatgggggaacacaaccttcacttggatgtcaaaaaattagtcgatagtcactctttcaacttgtgaggcagaatacatagcaactacttcatacatttgtcatgcagtctggcttaggaatttgttaaaaaagttgggcatgtcacaagaatagccgaccaagatctttgttgatagtaagtcagccattgttcttgcaaagactccagtgttccatgatcgaagcaaacatattgatacatgttaccactacataagggagtgcatagcaagaaaggatgtacatgcagaatatgtgaagtctcaagaccaagtagctgacatcttcaccaagctgctcgagtaagaagacttaatcaa

SEQ ID NO: 378 - DNA, 405 bp, Glycine max
  unsure (1)..(405): unsure at all n locations
cgagccaaaatcctgactcaccataaaccttgacccagggtgagaatgccaatccttaccctcggaagccaaaaaanaaaagagagagagagagaagagaaggaaaatttccaatcaaaggaaaaaggagaaggaaaatttcaaatcaaaggaaaaaggaaaggaaattcccaatcaaagagtgggagaaagcaaaaagaaaagaaagaaaattcccaatcaaagaatgggagaaagaaaaaaagagagaagttaaaaaagaagaaagctcctggtcagagaaaccagaagaaatgtgccgagaggtccttggaccatacaatatctaaacaatacagaattgtcaccaaatgaataaaaaagaaggaaaggaaaccacgacctaaaatggtcttccccctttaa

SEQ ID NO: 379 - DNA, 436 bp, Glycine max
  unsure (1)..(436): unsure at all n locations
agctntgtcgcanattatattttagacagacagatattaaagatttgtgtttagttctgaacatatctttcaagaaataaaaaaataatgtttttttttggtaaaactatctattttgggacaaatgttaatctaatttatcaatataaaattttcattttatgaaactgatatgaatgattagaacaatgaagtaacaactcctttaaaaataggcaaaacattgaagaaatcaattccattgctaatttcatcgtaatacacttgctaaatggtccaaaacaatttttcaatataagaaattgataccaagacagaggtaaacaaagtcaatttataaaatcacacaaaaaatcatctcacaacacacagaagcaatccttctacaaaagttgctcataagtgttcagcagcccttacgctgctcagcaacctg

SEQ ID NO: 380 - DNA, 436 bp, Glycine max
  unsure (1)..(436): unsure at all n locations
atactatatnntttttgaaaatttactgattagattaaaaaaaatgtagtttatgttctatgttcacgcatcaataaaagctcaatactatttcaattccagaacgcaattaaataaaatgacttgtcttgcatgacgatttttttttatcagactttatttttttagtttctaaaattgatttatgtttctaatctctgattttttttactggtcaacgtcccgtaacatttttttttaactttttagtcccttttttccttcaatggactagaattaaagtaaaaaatcaaggaagtaaagttaataaaaagaagttcaaaagactataaataaaatttttaaaaaattaaaactcaaaaagatagtaaaccataaattttattttcagaatttttttaatactcactacataatanaaataaaaagaaacact

SEQ ID NO: 381 - DNA, 395 bp, Glycine max
  unsure (1)..(395): unsure at all n locations
agctngatttgtgagttgattttagccttagtttcacttggttatttctcaactcattaaaagagaactttcaaaacaaatgtccggttgaaacttgcctttttgatgattaaccgaggttatagcataaacgatcagttgaattttattttaaaggtgattaaataagattacaatgcaaacgatcggtcaaaattcattttaacattgattaagtgagattacggcttaaacgatcggtcgaaactcgcttaaaacgaagaaaaagaataccgaaagtagacgagatgaagatgaaaacatacaaagcaagaatggacccctaagggtgcatagaatgaattcaaagctttgaaatcgaaaataattgattgaagatgatcaactaacaatga

SEQ ID NO: 382 - DNA, 436 bp, Glycine max
cggttcgaggtacttacctgttgaagatcgaagaacgatgatgaacgaatgaagaacgtcgaagaacggttgaaatctttgcgaaattcctcacggaaaacgttacggaaacgtttcggaagtgcctcggcttagattttcttcacggaaacgatttttccaagcaaattcgaaagagagagaagtgccaaaggggctgaacccttttcttcttcacttcctcccctatttatagcaaaataggggaggtggttgccgcccagctcgcccaggcgagccaggttgcttcctccagaagcaacagccttctggaggaatattctggagggcccaagtgggcctgggtgctatttgcacccccatttttactaagtacacccccctctgctgtttttttggtgattcttttttcgtaaagttacagaaacttacgaat

SEQ ID NO: 383 - DNA, 371 bp, Glycine max
agcttctataatgggacaactagtgattcttgtgacggtacatgcaagggaggtagagctggacaaaaataaggtgtgggtaaaaccttataaatcacactacattgaacatttgtatatgatattaacaatgacatctattttgtaacctagaatatctaataaaagacacatttaatagcatgtgcaagcaacttatcttaaccaggagcaaggtcacgaaccaaaccaatacacccaaatgcacatagaggagcatggtataatggacctttgaggaaataagttgatagggaattgatcaaataataagcagttaaaacaacttcaccacaaaattataaaatgatattttcatgtaacaataaatg

SEQ ID NO: 384 - DNA, 437 bp, Glycine max
tgtggacttagagtcactgccattaaaattggtatctttttctttgtttattttttttttccttttggaaatggtaaatggataaagcatgcatacttttttatccacgaaactttgaatagtctctcccagttttctttgtcaagattttctgtcttcttctcaggttccttctttccttttattttttctaatcaaggcaccccatactctttttgttcaaagtgcaaacactctcgaaccattgaaccaagaatttaaattgatgtgtgattgtggttttgtcatgaccattgatattgtggaaaattgcggacaaatgtagctacaattatggatagctttgtagttgcagagacctcaaaaacattaacgttgcagttgaaatagcggtcacggaccgttttttaaaacctctgcatctaagcaagaactac

SEQ ID NO: 385 - DNA, 222 bp, Glycine max
atacctttcgactcggatgtccgatcgggtcacgttatatctcgagactctcgaaatgaacacccgctgcgtggagctagattaaacgactatgccttcttactttgatggcggagtgagtcatgaattatatgttgagactcttattacctatccacatcatttggcatattgaaaccactatacctatttactccgatgtgggcttgagttgcgtaatat

SEQ ID NO: 386 - DNA, 409 bp, Glycine max
gagcgtctcgatatattacgggactcattcagacattcgagtaaaaagttattgtcctttgaatttgctcagatctttgaaattcaatttctagcatcttttatattacgtgactcaatccgacatccgagtaaaatgttattgtcgtgtgaatttgctcagagctttaacattcaatttctagcatctcgatatattacgtgtctcatccgacatccgagtaaaaagttattgtcgtttgaatttgctcagagctcattattcaatttctagcgtctcgatatattacgggactgaatcagacatccgagttaaaagttattgtcgttacactatgctcaaaacttcaacattaaatatcgagcatcttgatatattacgggactcaatcatacatccgagtataaag

SEQ ID NO: 387 - DNA, 407 bp, Glycine max
  unsure (1)..(407): unsure at all n locations
agctttaaactaacttcaatcatatgtttgatgtgttggatcgttgttttagattattaatggtgtactaattcgatgatcatatttggaaacaaaagatttgagttggatatggatttggggtgctaagaaggccctcaacctantgctagaggttgttagtgatggctaacaatgctaacaatggatgagtgagtgaatccctaaataacttaaggttgatacaagtcttacaagaggtaagccactatccatgttcatccattttcaataaaatcacacttcctccatgagattaatttgaaccttgtcaaatggtcaaagcgtgactatgttaagggatgtacttgggttaatcgctcaaggtgaaatctacatgagagtaaatagtcaggatgacatgacat

SEQ ID NO: 388 - DNA, 285 bp, Glycine max
  unsure (1)..(285): unsure at all n locations
tttagtcttaacgaactacgcanngttgaattcctcatcgcacctgaggatacatangagcaagggcaacacccttgttgacctcccaaaaaataaaaagaatataaaaaggggagaagtgaataattctgaagtcacgttgcacacactcgattaaaggctgccgtccctcgtgacaggcatgtggggtgctaatacctttcccatgcataaacaactctggaacccttcttttcatattcgcagacctctttttgggttttctaatgttttccctcaataaat

SEQ ID NO: 389 - DNA, 383 bp, Glycine max
  unsure (1)..(383): unsure at all n locations
agctnntgtttttttatataaaatgagaagttctggactcattacgttatctaaaaatcttggggtggatccaagtgctccgatcatccatttgcatactcatgttttggtagcatactcaccgttgtttatttctttaggaatttcatcataactaagaaaacatcaaggccgatcaacgtttatttgaggaaaacgtcggaaaaaccggaaaagacgcgatctacgaactttttagtgaaaggttcgggagttgtatttacgcacggggaaggtattagcaccccacacgtccgtcccaagggacgacagcctttaattgaatgtgcaaacatgactttgatttttacgttcccttttatgtccttatatcctctataccc

SEQ ID NO: 390 - DNA, 437 bp, Glycine max
tgttgtcattaaatcttacatgaattgcctcttccatagtcaaggtttttgatttgtacactctatatgccttggatgattcaaagtatccaatattccaaaatcacattttgagtcaaactttccaaggttatccttggtgttgaagatgaaacactggcatccaaatgggtgaaagtcagaaatgttgggcttatgtccctcccacaattcataggaagtcttttttaagattgaccttatataaattatgttctgtaaataataagcagtgattgctgcttcagcccataagtgtttcagagttaagtagtcgttaagcattgttcttgccatttcctgaagagaatccattttcctctcaacaactccattctattgtgatagtcttggagtagaaacaatattatgaataccattctcttcatagaattttt

SEQ ID NO: 391 - DNA, 329 bp, Glycine max
agcttgcctagttaacctgaaattgatagattatgattattaaacacacaaaacagaattactaagtatgtattatctatctttaactaaaataacttataacactacaaaataaccataaattggaggagtttgatacaatttacataagttttatacacaaaagttaatcatattcaccgactaacaactccctaaagtttacagttttgcttgtcctcaagcaaataaagaacagagcattggttcccaagtgacaaaaatatgcagtgattatgtacaaaggtgtatgcaacaaaagtcactaattgcatgatacaagaatgaag

SEQ ID NO: 392 - DNA, 417 bp, Glycine max
  unsure (1)..(417): unsure at all n locations
ngatgcttctacttgtgatgaanagattaataacataaaagagaagatgtacaagctctttgatgaatatgttattgtaaagtcaagttcatctattgcatcaagttctcaacaacctactggttaagaagatttcagtatagaagaaaatcaagagatggatgatccatataatgttagtcttttgtttaactatttaattgttttatgattcaatttattttatttaatttttctcatatattgtcatacgaatatatcaattatgtgagccaaaatgttaatgtcaatggcaactctgaattagatctctatttggctgagacaccgcttgagccaaagttttttttttccctaaattggacattttgagttattggaaggatcgccaagaacgttaagcattcctataacaac

SEQ ID NO: 393 - DNA, 398 bp, Glycine max
  unsure (1)..(398): unsure at all n locations
caaaatactattgattccaaaatataatcaataaagatcaacaaagtctggactttaattgaagcttcaaaggtcggttgtaaatgggtttacaagaaaggattggagcaaattggaaggttgaaacctacaaagcttgccttgttgccaagggatattgtcaaaaggaaggtataaattatgacaaaacttttatccgcggcaatgcttaaatcaatttacattctttgtgctatagtagcatactatgatcatgaaatgtgaaatggatgtggaaaatgactttccttaatggtgggctaaaacaatatgtgtatatgacacaacctgaggatttactgctcgnctgacctaataatgtgtagaattgaagcttctcttaacagaattgatgggtt

SEQ ID NO: 394 - DNA, 385 bp, Glycine max
tggtttatgaattgattttagccttagtttcactttggttattagtcaattctattaagaatgaaaatccctaagaaaaacgcccgattgattttctcgattattttatgaaaagatatatttttttattattatattattattgtgcctctttatggttttaaacgtggttacagcatgaaagatcggtcggattttattctaacagaaattaaaagatgttacaattcaaatgatcggtggaaatttattttatttgttgattaggcaagatagtgatttaaataaatgactaaagcacgtcaaaagggggtacgaatagttaatgatatattaataaaagcacgagacacaagtggggaccactaacggcacatataatgaa

SEQ ID NO: 395 - DNA, 404 bp, Glycine max
agcttggtgtttaagtgctttcttttgctatctaattttcctttctgattatgtttaattttgtttctgtgtctttgatcacttgctttgtgatgtttgattaagtagttatgctttcttataatagttgcaatgttttttatgaattaaatgttatgatcttttttccctattcacatcatatttttttttgtttactctatcagtagttgtgactttttggccttataatggaaaaaaggggagaaacattgcattaggaggaagtaatgcattgtatacatacatccgtatacaactctacttaatgatgaagatgtgattcgacacttctcttagtgattataaactttcaggtttttttaaaaaaagtctctactctcaagaatctccaaatgcactca

SEQ ID NO: 396 - DNA, 424 bp, Glycine max
agcttcttgagatgcctttcggttatctcattggaggctttggtgaaatcaacaatctcattagaaacatcgatattcaagtaatcaatgaatctagaggttaagacaacatatagaaattcctctttttctccttttctctttgaacaggtcatgcggatgagggcacacactacctattcacgcctaaccacaaggtaaacgaaaaaaaaacgtaatggtaagctgcaataaaaacagtgacaaaagaactgaaagctataacgcctgtcgcaacctacccttttgcgggcaagcgaggcgagactcacgggtgcgtcttccaaaggaggaaaatgcgcggagtcgccaccaacgtttatttgtggaaaacgttggaaaaatcgaaggaaactggtcatgaagaatattctagattcgggag

SEQ ID NO: 397 - DNA, 401 bp, Glycine max
tgtcgtgtgatctgatgatgactcgagtcgtctggaacaactctaacgtccaacaagctctgcatagctcctaacaccatctagaattaatcctacaatagtaattacaattagcaactatgtttcagtgacaatttaggaaagagaaatcaacaaaatgcaatttgcattagctagcaagagtattctccacctggtagataatatgccactatctgcccaggctgtggctgtactgagatgggcattaaacataaatgcaagaccacgtggaggttgcctctcctcacgtggaatgacatggggatgggaaaccttgcaaaaccaatgcatatagtcagagttgcaacaaggtgggtgtgcatagatgcagtcactctatgatgcctctttgcaacatc

SEQ ID NO: 398 - DNA, 352 bp, Glycine max
agcttcacaaagcacatggaagccccaccaggtgggtgacaagacctttaaccaagttgaaatcaaacctgagatgatttcatgtcatatactctttacaagaccaccacgacgctacctctacgtcgacaagctcttacttcctacgttgtcaaagattctaaatcacgatggcctattcatactaccacaagtatagagtgttgcatagacaaaggcaacatacatgacatacacacaagacataaacagtgtgaaattcgtcatcaaagaaaagcatgtgcattgatgaaaaataaaaataattgtcatagttacaaggcctatacgaccaaaattccaacatgaaaaa

SEQ ID NO: 399 - DNA, 364 bp, Glycine max
  unsure (1)..(364): unsure at all n locations
gacacttccaaactcagcttcgtcacgggagttttctcaagatagcttctcaaggaagaaggtcattgttttcggtggagattttcgtcaaatcttaccggtcattccaagaggaagacaatctgatattgttcattcaatgattaatgcatcatatatatgagatcattgtgaagtgttgactttgacaaaaaacatgcatttgcagnttggtatggacaactcatctgcgagtgaactcaatagcttttcccaatggatacttgatattggagatgaaaaaatttctgaatcaaatgatggttatgttattatagagatcccacaagagcttctcatctcaaaatttaatgaccctatacat

SEQ ID NO: 400 - DNA, 431 bp, Glycine max
  unsure (1)..(431): unsure at all n locations
agcttgctctanatntacattgatgtttgtatttatgggaggaggttatatgccatttttgctttaagagtaatgtcccacaaaaactaactttccaaatgtttgccttcgcaggaatggcaccgaggaagcttgcctcaaagaggtccaggaaggacaaggcggccgaaggaactagttccgccccggagtacgacagtcaccgctttaggagcgttgtacatcagcagcgcttcgaagccatcaagggatggtcgtttctccgggagcgacgcgtccagctcagggacgacgagtatactgatttccaggaggaaatagggcgccggcggtgggcaccactggttactcccatggccaaatttgatccagaaatagtccttgagttttacgccaatgcttggccaacagaggaaggcgtgcgtgacatg

SEQ ID NO: 401 - DNA, 419 bp, Glycine max
  unsure (1)..(419): unsure at all n locations
agaatcggacatccgtgtgaaaagttatgaccatttgaatttctcaagagcttccgttgttcaatttcgatcctctcgacatattatgcacccgaatcggacatctgtgtgaaaagtcatgatcatttgaatttctcgagagtttccgatgtttaatttcgagcgtatcgatatattataaccctgaatcggacctcagtgtgaaaagttatgaccatttgaatttgacgagagcttccgttgttcaatttcgaatgtcactgtatgtgatgcgcctaaattggacattcgagttaaatgttatgaccatttgaatntctcaagagcttccgctgttcaattctgagcgtctcgatatgtgatttgcctgaatcggacatccgtgtgaaaagttatgaccatatggaattctcaagagc

SEQ ID NO: 402 - DNA, 416 bp, Glycine max
  unsure (1)..(416): unsure at all n locations
agctntaacaaggctagtcacctatatgttttttatacttgaaagtaatatgacatagttaatgaagatctcggatagcaatattttgggcagtatacatcttaagtcaacccccaggttttgtataaacctgaaaacttagtgccgaggaatgtacgaggggtagtagggtttattctgcaaaaagagtttacctggcatctgaataaaaatttatgttgattgcagtatgctggattatgtcatttcttcgggtttttaattaaaatggtcactagtctcatttattttttgcttgcttatagaaatgagctctaattgattaatttcttaatttaagacattcttaaggaagacagtaatgttcttttgcttctcatgattngttttaattacaatgggcactgctatgtaat

SEQ ID NO: 403 - DNA, 436 bp, Glycine max
  unsure (1)..(436): unsure at all n locations
ngaacgtaaattaagcgcagagacaattaatcaagcactaagcatgcatgaattaatagcaacaaatacagagtaattggtgaagaggaaaaactgatcagaatttaatagtaataatagaacctcaaagagagttgtgcttgatcctcaagagaaaacaacgctggagacttagccttccattaatcaatagaaaacgaaattgtagtagaaacgaagaaaactagaattattctccaaaacgaaaaagaaactaaaacaaattgagagtagcactctaaaactaaaacgaaaaagtgagagaggagaggagagagagaagagaatagaagagagcctaaactagaaccttggtgttgtntatatagtttcagccccaaagcttataaatctgttttaaatccaagcccataaataaaataaaatctagataaga

SEQ ID NO: 404 - DNA, 315 bp, Glycine max
  unsure (1)..(315): unsure at all n locations
agctttgtatggacaggaacccccactnttatctaaaggagctgacatcccttccaaattggaagaggtaaatcaattgagtaaggacagagatgaattgttacaggaactaaagaacaatctgctcaaggctcaggatcagatgaaaatatctgtaaacaagcatataagggagctagtcctgctggaaggagattgggtctttctgaaactgcaaccttatagaatgatgtctttagcaagaaagccaaatgaaaagctgggtccactattttatggaccctacaaggtgatacaatgaattgggcatgctgc

SEQ ID NO: 405 - DNA, 421 bp, Glycine max
tcttgagtgggaagcacaatgagcctataaacattgtgcattatgctgacgacacggtctttgttggagaggcctcttgggataatattctagtgttgaaatccatgcttaggggatttgaaatggtctctggtttgagaatcaactatgcaaaaagccaatttgggggcgtcggttttcaggccaattggactcagcaagcagcccaattcctgaactgtagacagttggatacccctttctactatttatgcatgcctattgctgttaaagcttccaacatggtggtttgggagcctttgtttaacaaattacaagccaagctctcatagtggaatcagaaaattttgtctatgggtggtaaggttaccttgataaaagctgtcctgagtgcactcgctatatatcttctatctttctt

SEQ ID NO: 406 - DNA, 321 bp, Glycine max
agctataccagctggtttattacaacctttttccattccacaaagaatttgggaggacattgctatggatttcatcactaatctacctccctcacgcggttatgctactatatttgttgtggtggatatactttcataatttgctcattttataccattgaaggctgcttttaatagcaaatctgatgcagatgctttcatttctaattatgacaagatgcatgggtattcaaatacattagtctttaatagagatcgtatttttatcatttcatttcggcagcagttgctcatagcacatggaactatataggctatgat

SEQ ID NO: 407 - DNA, 436 bp, Glycine max
actaagtgctcaccaacactatataagaatccctcttgttatttcatgtaaacctcttcttctagatcaccattcaggaacgccgttttcacatccatttgatgtagctcaagatcaaaatgagctattaatgccaaaattactcgaagagagtctgtcttagatacaggggaaatggtctctgtgtaatcgattccttctctttgagtgaatcctttagcaacaagtcttgccttatgtctctcaatgttgccttctgagtctttctttgttttgaagacccatctacattcgatggcttttacaccaacaggcaactcaacgagattccaaacttggttagatgccatataatccatctcatccctcatagcattataccacaaatctgattccttagaactcatggcttatgataacgtcttacgatcatttt

SEQ ID NO: 408 - DNA, 287 bp, Glycine max
agcttgatattgaacaacagaagctcacgagtatactacattggtcataacatgtcacacggaagtccgattcatgtgcataatatatcgagacgctcgaaatagaacatcggaggctctcgagaaattccaatggtcataacttgtcacacggaaggtcgattcaggcgcataatatatctagaagctggaaattgaacaacgaaagctctcgagaaacacaaatggtcataacttgtcacacggacattcgattcaggcgcataatatatcgagacgctcgaaat

SEQ ID NO: 409 - DNA, 410 bp, Glycine max
cggaagctctcgagagattcaaatggtcttaacttatcacatggaagatcgattaatgcgcataatataccgagacgctcgaaattgctcaacggaagccctcaagaaattcaaatggtcatatcttatcacacggaagtccgataaaggtgcatagtatattcgagaatcttgaaattgaacaacggaagctgtcgagaaattcgaatcgtcataacttatcacacggaagtccgattcatgcgcataatatatcgagacgcttgaaatagaacaacgaaagctctcgagaaatacatgtggtcataacttttcaacggaagtccgattaggtgcataatatatcgagacgcttgaaattgaacaacagaagctcttgagaaattcaatcgatcattacttatcacacg

SEQ ID NO: 410 - DNA, 393 bp, Glycine max
gcatgatgaccaccaatatgacgacaaaaagcccattagaatgagtccaacattgagcctagaacatctcccgaatcacgagacagatgtcacgaatcatccttcaaggcagagaaataacaagcgcgaatgagtcagatcaagaatcacgacccatgactcaacactcttgagaagactcattaacagaacagactacgattattttcaaaagcatgatgcagctcatgaagggtccatacaatcttctaccaaagaggttctactctctgcgaacccataaccaggggccagtcttgtttacaacagcttctaatagaatccacaacgccccacacaatcccaaagggggaatccaataaacacatgggagaacataccacttcccagacg

SEQ ID NO: 411 - DNA, 407 bp, Glycine max
  unsure (1)..(407): unsure at all n locations
agctntagcagtccatttttctgtctgacaccacgtagaaaattctatcgatcgggttaactgagatatactcctattatgaggaaaatgagtttttgatcttagtcactcactaagacttggacttagcacctacacttttaaatatgtgactggttaaatgactatcatgactgataaaagaagtgatatgtgatgctcattacatgaaatttttttttgaaccaatggtaattacgaatcatgagtgaaactaatctataactcagcagatgaacaagtaatctataactatgaataaacatgagctaacatgaatttggattatacacgcacttagaagcatggaacttaaacacggttatgccacttttaagtttactgccaaaagttatgatgtggaaaaa

SEQ ID NO: 412 - DNA, 424 bp, Glycine max
  unsure (1)..(424): unsure at all n locations
ntacacgcaatcttacaaatgaccgcctatcctacacttaatataactctctgccatcaacctaaggggtgaaaaagtatcttaatcgctgagtgcaacagaacgtgtagattcactaagtgaccaccgccacgtttcctggaaaccacaactttgactactggatcgatgctgtatccgtaccggattgatatagtagttcaacctgcacttagaccagttatgattcttttcgttcgataactacaacgtatggctggacctctcctttactacgccacgagcgtgtgtgagaggtgagcactatatgttgacacaagcgcaggtatatcgtgttcttcgtctgtttcttgaaccaactttcatctttgcagtctttgcttaagcttatgttcgattcaaattgttggtatacattgtaaag

SEQ ID NO: 413 - DNA, 366 bp, Glycine max
tcgacccgggatccttaagcacctgcggctgcagcttcaggatctcttcctggtggtggaagttcaaatttttcttcaaatatgcatgggatgtgagtaaaattttctgaaatgaattagtgtagtttgtttactaattcatcatcatcattcaggtagtcttttctcatctgattgataaaactcttctttctctatgactacagtacatgctataaagtgtaggcctgtaggactcttatatctatggtagattaccatggtgagatgggttagtctataggcttcattttggtctgcatacaattggtaggattcaaatttctgttttcttcaaatgtcatttaccagcttcatttgtgtcta

SEQ ID NO: 414 - DNA, 373 bp, Glycine max
  unsure (1)..(373): unsure at all n locations
tcatctatnttcctttagtttctgttacgtgatctctccgttttctaacttgaatatcaatatagacagtaataaacacatttaaatattaaatagtaatacctgagacaggaatttatatagcgattccccttggtagctgcatcaagcactgcaaaaccacaaaatatgaatgattattatgattttttttatgaatttttaattagagagagatgtgattgggaaattacagcaccagattcctgaaggcgaccggtggcatcggtgaagcactgcatgtgatggaaagaggtggatgtggattcggagagggccaatcggagggaagcgaagagagaagtgaaactctgagcgatggccaacgagtctc

SEQ ID NO: 415 - DNA, 344 bp, Glycine max
  unsure (1)..(344): unsure at all n locations
agctntatgataggagtgtgaagcatgtgttcattggttatgatgcaagttcaaaaggctacaagttgtacaatccatacaatggaagattgttgtaagcataaatgctaaatttgatgaagaagagacatggaattgggagaaaaaagaagccccctatgatttattttcttattttgaagaaaatgatgaattaagtgtagcaccaaatgagatttctactccacctcctatacaaactcattcaattcatgaagcatcatcttctgaagggagttaaagtgaaagaccaagaaaaatgagaagccttctagacatatctaatggattgtttgaggtttatt

SEQ ID NO: 416 - DNA, 377 bp, Glycine max
tggaaggtagtcataccttacaaaacatatatatgtatgtttaggtagtgaaaataccttagatatgcatgtatgtaaacaaaaaaacacttcacaaaatatatatatgtatgtttaggtagaaaaataccttagatatgcatgtatgtaaacaaaaaacacttcacaaaatatatatatgtatgtttaggtagaaagataccttagatatgcatgtatgtaaacaaaaaatacttcacaaaatatatatgtatgtttaggtagaaagataccttggatatgcatgtatatagcaaaaataccttacaaaacatatatatgtatgtttaggtagcaagataccttggatatgcatgtatatagcaaaatacctcatg

SEQ ID NO: 417 - DNA, 435 bp, Glycine max
  unsure (1)..(435): unsure at all n locations
agcttataagaacaaaattgcctcaatcatttccaaatatgcatgtgaattangaagcatcaacaagaatcaagccaaagctattgtgcaagcaatcaatggggcaaaacacaccaaatgattatgatgatggatggctcaaattcttacaaaggtaaactcatcactttcaaattgagctttcaaaactatcatgacatgtagaggagaatcaaagatttcaagtcgcaaaatgtcaaaaacttttattttcaaaacaattaaccatttcttgaacatatcctataattcaaagaaaaacatgtaaagtcgtacatgaacacagaattgaaccaaaatattaaactagaaatccgacgaaactaacaacattaacaaattaacaaaaccgacaaaactagcaaaaccaaagaacactcccccccccccatactt

SEQ ID NO: 418 - DNA, 388 bp, Glycine max
  unsure (1)..(388): unsure at all n locations
aggttcgaggtacttacccgttgaagatcgaagaacgatgaagaacgaataaagaacgtcgaagaacgaacgaaacctttgcgagattcctcacggaaaacgttacggaaacgtttcggaagcgcctcggcttagattttcttcacggaaacaattttttccaagcaatttccaaagagggagaagtgcctaaagggctgggatccttttcttcttcattttctcccctatttatagcaaaataggggagatgcttgccgcccagctcgcccaggcgagcagggttgcttcctccagaagcaaccgccttctggaggaaccttctggagggcccanatgggcctgggtgctatttgcacccccatttttactaagttcaccccctctg

SEQ ID NO: 419 - DNA, 422 bp, Glycine max
  unsure (1)..(422): unsure at all n locations
agctatgactaacttatctaactcaaacaaattgagttgcattatgagacaaaacactcattagttgctgattattaggaagccaaagcaaagatgaacaaaagggaggttatatgattacactagggtgggaaaccctattctgtgggtgctcagtttcattgaaaggtgagatatattgtccattttgacctgataaaactgacggttttgcgcttcaaatgcaatttatataaattatattgtaataaataagcccgaaactatcttatattactgcatatatagatagtacttgtatgcatgatggctcgggctatataagattgtattctctgaagtaatttttatatatgtctcggatgaatctacttacgtaccacttactacttatgtntattaatcacatatttactgtacta

SEQ ID NO: 420 - DNA, 361 bp, Glycine max
cgataaagaatgtcttgctggagaagatgcattaatgcagtttgagaaggaaaaatctgagataaattctataagtaattcttcattgatccctcgccaaaatgaagaaagggagaaagtgaatacttccaccgtggagaagtcacgagaagatggacctgtgaatcctcttgccagcatggatattgatctatacaaacatttggaagatctggtttctttcaagaattcatacttcagtgagagcaatgagtatataagccagccttttctgcatgacgaacactcgggtaatgccaagaaccttatgatgtacctgatcatgtgaaagataatgctactgctctctggagaagatttg

SEQ ID NO: 421 - DNA, 355 bp, Glycine max
agctttatggagattataactaaaaaccgtatgtgaatagaggatgcatgcattaattccttgtgtctacatatcttctagagaaatacttaacacattaactcaagatatttttccctttacctttggtttttaattcatgtagttaatttagtttgtcttaaaaatttaactccactttgttttggtgcagggaaaacatataaaggtgaaccgattgcagatgctatgaaaacccaatgctggaaattaataatcaaaatcagtaatgtttagtttcaatgttctaaatttgtaagtattatatttattgctgaatttcaatatgaagtgaaactagacttataaatgcatt

SEQ ID NO: 422 - DNA, 403 bp, Glycine max
agcttcagcacaagaatattatgaatgaaaaatgatagaacctaaaatcaacaaaaaaacatgattcaagagtagatctacaaaatttgaaccatagaaatgcaagaacaagtgtatatctaagatttaatcggtttatttttttgaatctactctaaacagcaccaaaccacaagaaaatggaggatatacatggagaataagatgaagaacaagaaattaaagagaattcaccgaacaaaaagatagaggaaacaaaagaacatcacctagatgaagatgctcttgataccacatgatgtaagctccattggagcttgaaggcctaggatcttcttcatcaatggattcctttgcttcttggaagatgaatggagaaggaagagagagaggagacgtcact

SEQ ID NO: 423 - DNA, 445 bp, Glycine max
  unsure (1)..(445): unsure at all n locations
tcgtatgtctgagtggactcatccagtgaaacatctacttgatcctgaaggattttctcaagttttctatgatcttttgatggatttttgaaatctctttgtaggtttttataagctttttgagagaatatatgagttagatagaagctcatgataagcttttctaaggaatttagggtcatcgaaatttacctcatctttttggtctaattcagacccttcagaagctgtgtttgccatgaggcatatgttggcttcttcatcatcttcatcagacaatgtgtcatccaggtcttctcacgtgctcataagccccttcttttctttagtcttaaagaaattcttcttatgttgacttttctccagatcttgacattcagacttgaaatgtccaagctttntgcattcatagcanactatggagctttngtctttttctttcttg

SEQ ID NO: 424 - DNA, 356 bp, Glycine max
agctttgaaagcagagctcgaaaagacaagagtggtgaaagagaagctaaagatggcagtcactagggtcaggaaagtatgatgagctaaaagatgtcaacctaaaagggctcgaaaggaagaatggaacaggaacaagttttgaggggctctgtggggcagcaataacgagctcaagcttataagtgctgagagggacgaatcgaggatggaaagcatggtgttagaaggtaagttaaaggcttgtcagaggtcgaagagaagtttgacggaagagttgagcaaaaaagaagaaaatattttgataatcatcgaccaatataaggaaaaggtgaacctagctggtagtcatgggc

SEQ ID NO: 425 - DNA, 457 bp, Glycine max
  unsure (1)..(457): unsure at all n locations
gacactataaaactcagcttccataaggcggctagtctgataactgacctagacattttctatttatagctaggggtattcaccacctattatntactctatttgtttattttcattattctataaaaaaagaaactatgttttattctccatcaaatgaataataaaataccctttttattttctctcaaaccattattttaattaataaatttatttccccttatttatttaattataaaacctcatcatttttttttctaaaactctatttatttacaaataacaatcctttttaaattattttatgaaaattgggatgttacacaggacacaaattgttggacttatcctaatggtgaaagatttatgattagaggaaagaactatctataagataattctaaggtgaggtaaccatttaaatcctttaagtatatgttggaatcacacgaca

SEQ ID NO: 426 - DNA, 410 bp, Glycine max
agcttaactctcaaattccccttcatcccatgctcttttgatataggcattccttcattagggacaacaacctcagcaccaggtttgacaatatctgtcaatgggatcatgagactccttccgtccaaggtggtgagatccaacgttttaccagtaagggcctcaagaagggttatctcttggttgatcaccaaatcattaccatcccttctataaagagcatgcggcttctcatctatcacaaaaatgagatctgctgggatgacaccaggctcacggttacctttctctgggaaggtaatttttgttcctttcttccagccaggttttatctcgatagtcaaaatctcctccacatccccacatttgctgaaatggaattgcatgtgtcaaatattgtcaaaaaacac

SEQ ID NO: 427 - DNA, 439 bp, Glycine max
  unsure (1)..(439): unsure at all n locations
ngcagtttgagatttcctgttctgtctgactaccttccaaagtttatcaaccataaattgtaagaaatgcttatcatggaattgtgccaccttgttatactccactgctaaaaaaatttaccacataaagagtagtagcatgctgcaaccacaagaaaacttattcaaatgattttaaatgtacaggttcttaactttcaaagtaaataatacttaattttgtcagaattttttaacaacgtaaaatggaagaatttctcctatcaaggaatatctaatgccaaaaagcgaataacatgttcagaagtgaacaataacaaatgataaatagaaggcaagagagaatatcatttacacgtttcagattttaattgttcacgcaaccttgtacaagtaagcatgtggtgtattaccctttagattgatatttaatgctgat

SEQ ID NO: 428 - DNA, 431 bp, Glycine max
  unsure (1)..(431): unsure at all n locations
agcttcctcttatgagtgcatagctctttcataaatttagcatatcttggaatatgctttattgcatccagtagaggtatgtttacctctactcttctaaatgtttccaagatctccttctccgcctcttccattttcttgttggaaattgctcttggtgggaatggaagagggatatgctactactgtaagtcagaattaccagtagaagattcacctgcatagaaattgttaggcaacttactctttaaatttttgtcatcatctttctctggagttgagtgaggttgggcaggttcatttgcagatgaggaagatgctactagttgaggtccttgatactgttttcccaacctcaatgtaattgcactcacanttttgggattctgtacagattgagaaggtaatctgtcagaattctgggactgttt

SEQ ID NO: 429 - DNA, 428 bp, Glycine max
  unsure (1)..(428): unsure at all n locations
ntcataggtgaaatcaggtgcagccatttcccttagagtcctctcacgaggtggaggttgtgccatgttctcagaatgtgcaaaatcagaatgctcagaatcagaatgctcaaaattataatgctcaagatcaggatgttcaaaatcaccaataacataatgcacagattcaccagttatggaatgctcagaatgatcaaaaggtataaaatgatgcctaactaatctatgaaatgtcctatctatctcaggatcaaagggttgtaagtcagatggattgcctctagtcatacactacattcagcatgcacacaactagttgccttgtcatgtaaataaaggtgttggtttgaactacagctaccctcaaatgatatccaaatgaacttgaaatttgtgagcaaccttataaaatgatgagaagatag

SEQ ID NO: 430 - DNA, 437 bp, Glycine max
acctgagctgcgacttggttaattctgagtaattatgaatatgtttacaactcaacatgtttatctggggattaattcactcctaaagaaactaatggtttagaagagtaatcctgatagacacttctaagcattatttgcattgaacatttggttgatgttataatgatgtctcccaaagctatagccatttaactgctacagcaatccttttggatagcaaatatcatagaacccaggaccaaaacaattttaagcctataacaaatctgaatcgtgaataacacgatcatctcttttcattgcatattttgatttcacattgttggttagattccttagatgtttgaagctgttattatctatttgctctgttaaaatttagttgatatatttttgggggatgcatacgctccactaaaatatcttaatatgct

SEQ ID NO: 431 - DNA, 430 bp, Glycine max
gcttcttattggtctgggtagtaggtattcagtctcttcattgtgagagtcaatattatctaactaaacacattaggagctcgatatagcttactattacattcctctggggtacctctggtactcctatatttataatatattattattttgccgacaaaaaaaaacattaccaatattttaataattaatgtgacttctttttctattttctatcaaaggtattcaagaatcagcctcctttctaaaatatacttctacaataatcaatcacttctgacgcactattagcacccatgccattatatttttgttaattaaataaaatatgcttgcatttgtcacagacaagttttagacgactcgataatttgaacatatatcttcaataataatgacaactcaagggcttatgcgttttctttttgat

SEQ ID NO: 432 - DNA, 394 bp, Glycine max
agcttaaaggaagtgaacgaattagtatggtcagaaatgtctccgcattgattggtaaatctgttcctcaaattcctgaaaaatgcacagatccaggtacattcagcataccttgtattatagggaatagtaagtttgacaatgccatgctagatttaggagcctctgttagtgttatgcctctgtcgatttttaattctctatctctaggtcccttgcagtcaactgatgtggtaattcatttagctaatagaagtgttgcctatcctgttggtttcatagaagatgtcttaattagagttaatgaactgattttccgtgttgatttctatatcttgaatatggaagatggattttctcaaggatcacgtcccatcattctaggcagaccgtt

SEQ ID NO: 433 - DNA, 433 bp, Glycine max
tctcagatctggtcatggaaagacttggctactgccttcattaggaagtaccaatacaacacggatatggctcctgatcggaaccaacttcagagcatgaccaaacgggaacatgagtccattaaagaatatgctcaaaggtggagagacctagcaatccaagtcatcccacctatgacggagaaggaaatgatcacaattatgataaatacgttgcctacgttctactacgagaagctgataggatatatgccggctaactatgcaaacctcgtctttgccggagaaagaatcgagtccggactgaagaaaggcaagtttgaatatgactccaacgctgcccccacaacaatagaagagccccattggtgggcacacgcgaaaaggaaggagatacccacgcagtcaccactcgcccaacatggatgaaaac

SEQ ID NO: 434 - DNA, 326 bp, Glycine max
agcttagcatcatctaagggggagtgacatagtttgtggaaagcattaattcagagggatctcttatggttatttcttccctaaatattttattctatacttaagagaaatcttcttgatgtgaaaatctttatatgaataaaatgagatgtttcttgatacttgttcagactttacctcaaagtcttgcgatagtttatgatttgtctatcttatatatcctttgcatttgataagactaactaatgtttttaatgatatatgctataagtctacttccatcttttaaatttgtatttgtttgacatcataaaaaatggggagat

SEQ ID NO: 435 - DNA, 410 bp, Glycine max
actcaagccttaaagtttggtcacataagcacaacaatgatgcatgcatatgtagattctaaagcgaatggccaaagtagaccttgaacataaaagaaatcacatcataatgttatgaggaaatcatggaacaagatctaaaaggaaagaaaggacgattaaatggaaatttcatatatttttctaggcctttttcttgaaaggaatggaagcacacaaaaaaaaagggaattatgcttccatcataccctgcatattatgaatatataatccccaatgaacgatgatactacttctagcgaagccgacataaggttaactaggaactaggaaagtaaagtttctagcaagccacggtgagtttaagtacatcattatattaatttgttcaaaggaagaaaattaaaatg

SEQ ID NO: 436 - DNA, 361 bp, Glycine max
agcttcaacattcaatttcgagtgtctcgatatatgacgggactcaatcagacatccgagtaaaacgttattgtcgtttgaattggctcagagcttcaacattcaatatcgagggtctcgatatattgcgggactcaatcagacatccgagtaaaaagttattgtcgtttgaattggctctgagcttcaacattcaatttcgagagtctcgatatatgatgggactcaatcagacatccgagtaaaaagttattggcgtatgaattggctcagagcttcaacattcaattgcgagggtctcgatatattacgggactcaatcagacatccgagtaaaaagttattgccgcttgaattggct

SEQ ID NO: 437 - DNA, 426 bp, Glycine max
  unsure (1)..(426): unsure at all n locations
ntgagccaattcaaacgacaataactntttactccgatgtctgattgagtcccttcatatatcgagacgctcgaaattgaatgctgaagctctgagccaattcaaacgacaataactttttactcggatgtctgattgagtcccgtaatatatcgagaccctccaaattgaatgttgaagctctgagccaattcaaacgacaataacgttttactcggatgtctgattgagttccgcaatatatcgagaccctcgaaattgaatgttgaatctccgagccaattcaaacgacaataactttttactcggatgtctgattgagtcccgtaatataacgagacgctcgaaattgaatgttgaacctctgagccaattcaaacgacaataactatttactcggatgtctgattgagtcccgtaatatat

SEQ ID NO: 438 - DNA, 103 bp, Glycine max
agcttgagatgaggaagagttgaacggttattcttcctgctcatatagctgaccacagaggggtacctggagtaatgtctcgtgggacatgataccttgtgga

SEQ ID NO: 439 - DNA, 326 bp, Glycine max
  unsure (1)..(326): unsure at all n locations
ntcataggtacaatcatgtgcagccattctccttatagtcctctcacgatgtggaggtggcgccatgtgctcaaattgagcagaatcatactgctcagagccagaatgctcggaattatagatgctcaatatcatgatgctcataacctccaataacaaactgcacaaattcaccagttgtgtgaatgctcaaaatgatcaaaaggcataaaacgaagcctaactaatgtatgacatgccctatctactctaggatcaacaggatgttattcagacgtgatgcctctagtcatacactacatgcaccatgcgcacgactatttgcc

SEQ ID NO: 440 - DNA, 411 bp, Glycine max
  unsure (1)..(411): unsure at all n locations
agctnggttcgaggttcttacccgttgaagatcgaagaacgatgaagaacgaatgaagaacgtcgaagaacggttgaaacctttgcgagattcctcacggaaaacgttacgaagacgtttcggaagcgcctcggcttagattttcttcacggaaacaattttcccaagcaaattcgaaagagagagaagtgccaaaggggctgaacccttttcttcttcacttcctcccctatttatagcaaaataggggaggtggttgccggccagctcgcccaggcgagctcagctcgcccaggcgagccaggttgcttcctccagaagcaacagccttctggaggaatattctggagggcccaagtgggcctgggtgctatttgcacccacgttttactaatacactccccctgctgt

SEQ ID NO: 441 - DNA, 426 bp, Glycine max
ttaagaaaggccaaactccgctcacaaatctgatttcaggcataaataggtggtcttgttcgtgctcatgcgcttatcgcagttcagaactgcttagcgcgcattagtgaatttcggcttagcgcggcttttctcgctcagcggatggaccgaagtggtgcgcttaacaggatggcccttcgctcagcgaacaagtatagcgtatccttcttccagattcttcctcgcgcttagccgaggaatcttgcactcagcagatggctcgctcagccaatatgctggcttagcgagaaggtgaaaatcaacacttcaaaactttcctaattatccggaaattgagagaaaatgattcttaaatatacaaaatggaagtgctacttatttattacctatatttaacaaaaattaattacaacactacaaagt

SEQ ID NO: 442 - DNA, 415 bp, Glycine max
agcttggttaaccttgggaatcggtaattaattgccagaggaatttcatgagaactaacattgggggggaaatcgatactagtgaatcataatctcttgtcacttttaatatcacttaaatcactcttttgcaatagttaatttgttttctcttaaaatcaaaaaccacaaaaatacttcaatcttcttttaattatctctattgtttagtttaataattgtgactattttgggactacaactggtctttaaggtacgatattcggacttaggtccatgatactactatgtagggtacacttacccttgagcgagtatttcttttacgcatcaagtctctaacgtcattgctagggactagttgcacagattcctgagtagtttaattttgttaaactgagcaattcttattcat

SEQ ID NO: 443 - DNA, 335 bp, Glycine max
  unsure (1)..(335): unsure at all n locations
agctnnttgaanaatgtcctttggccaaaccttttgcatcatcaagtaaagaatgttgttcaagactctatcatttatcttgaatttttgagtctttgacttgaattaaacttgagaagcacttatcttgtgacatcatcaaaacttcatattaagtatgcttttacatgggctcgcgggctcaagacccaaaatgggtggtggttctcttcttatgggcttccttcctggccacatttggacatttgtggacatgtttgggaattgatattggtccctacctcattgttattgattcctaccactttttgaaaatgtgatgaaaaggcattctt

SEQ ID NO: 444 - DNA, 418 bp, Glycine max
  unsure (1)..(418): unsure at all n locations
tgcttgtggagcttctatggaggctggatctttgagcttcaatgaggtccttcaatggtgattttccaccatggagatgcagcaaaaggcacaggagaagaggagagaggagacatcatccactatggaataagccatggaagaaggagcttcaccaccaagaatgtgtcttggatattcaagaagatactcattcattcaagcaaggttcttgcaaaaggattgatcatgttttacacttatttatgcatgaatttctaaaggcatgctacaataggttttttctagtttgggctaagggtaggtttcttttatgctcttattcatagtggaccctaggattgggtaccttagtctctttttctgggataggaacaaagattgtttgtgatngcatgcaacaattctatatgcatag

SEQ ID NO: 445 - DNA, 409 bp, Glycine max
agcttgtaaatcaaagtacatggccaagaaatccaatttttaaataaaaagctattattcaatggaagtctcaaatccctaggacaactcagataactgcacatttcgtgtgggtgactgtgtgtgtgcatcaaaggtattcctcagctgacaactaacgaccaattcctttcaagatgaaaaaatcactgaagtgggtacaaccccatggttatgagttatgacatttttaagtgaattttaatttttaatattatgaaattatgcatattgttattttttttaatattatactaaaaaaattaattattgccagttcaaccaacgttagaccttgaacctttaacgagtgtctttaccaattcaatgatcaatccagttttaaaaacatgtctctaacaaaaaaaaa

SEQ ID NO: 446 - DNA, 201 bp, Glycine max
ctgtttactcttcggcccccatagttgtctggacatggtccttattgtacatccataacctttcttccttctatgttgcatcggataccgagattatattacccgctaacgatgaatcattacactgcggcacctgcagatgttacgatcgacaggacatagcatgctctagtatgaatgagcatgatctctctttcattg

SEQ ID NO: 447 - DNA, 334 bp, Glycine max
agcttatacaaattacattgctctctacgcattttcatactttaaaaatagcctatgatattttctttatcaatattataaaaattaagaggataaaatagtaaaattagtattttttttttcatttcttatattttttacattttttaaaaaaaaagtctagcgagcaatatttattttttaacaggaacaaatattttttctattgcgcatataaaaataaaaataaaatcctctaaggacaattgtccccacacctatccaagtgcatcgaccactacaccacctttgcatgaatagacacatattttgatgaaatacctttaattcattt

SEQ ID NO: 448 - DNA, 436 bp, Glycine max
tggtccagtctatcattgagggttttctcaatgagtttgaggacaacattattgagacagatcctagtgctgaactttttagatcaaggctagtgtctgaagctgatgcaagacaagttgatgttttttttttcttatgttatggatgaagataacatcaaacattttaaatctatctatggaccacttacatctaatattgtcgcagatgtacaagatgacttggaaacaaggaaggtgctacaacctattaaagaacctatctgactgacaattctttttgccaaacttaatcattgcttgagaaggaatgatcagcagcaagccactgagtggcttctttcttcaaggtcactgcctccaccaccacctccaaagggatttcctattgaacccgatgtgaatgttagattttaccttggcttcagaggatata

SEQ ID NO: 449 - DNA, 415 bp, Glycine max
agcttaataaatctatatatggtttaaaacaagcttcccgtcagtggtaccttaagtttcatgggataatttcttcatttggttttgaggaaaaccccatggatcaatgcatattccacaaggtcagtgggagtaaaatatgtttccttgttttatatgtagatgatattttacttgcagccaatgatcggggtttgctacatgaggtgaaacaatttctctctaagaattttgacatgaaggatatgggtgatgcatcttatgtcatcgacattaagattcatagagatagatctcgatgtattttgggtctatcacaggaaacctatatcaacaaaattgtagagagatttcaaatgaaagattgttcaccaagtgttgctcccattgtgaagggtgataggtttaatttgaa

SEQ ID NO: 450 - DNA, 432 bp, Glycine max
tgagcgtatatgttaaatgaaccgagcttgttataaatgtggtcaccccgatagaaactaaagccggttctagtcgagtggttgtgccggataaacatggcttggcggcagccaatgaagacccacaatgacgatggagactaatgtgacgctcaccggagatgcgtcacgcgacgtgtgcattaacttcacgagttcgggccctgagagggatcacatacggcggtgttttgagttggttgtgcatatgaacagcgtggtggtcttcgacaatgacgatgggcactactcacctgtgaaaaagcagaaaggtccaccaaggatgcctcgaggtatagggagagaagaccagtgtgacgttggccggatatgcatctcacgtcgtgtgcgtgaacttcacgtgccaaggccttgcatatggttgcgtgtggc

SEQ ID NO: 451 - DNA, 428 bp, Glycine max
  unsure (1)..(428): unsure at all n locations
agctngaaggtgtgtaacccaccattttccatagtataatactggtaatgtgtctactatcagtgttatcattttttctccgtcattgaggtgccacttgagctgccaggtctctccacctttgggcgtattctttgaatgatctgtgcccctttttgcacatgttctatagttgcatcctatccgaagacattatactagcactgcctaacgaaggcaaccagtaggtccttccaagaatggactcgagaaggttccaggttagtgtaccaagtaacagctaccccagtaagactctcttggaaggcatgtatcaacaattcctcatcttttgcgtatgcccccatcttccgataatacatctttatatggatcttggggcaagtagtccgcttgtacttgtcaaagtccaacaccttgaacttggg

SEQ ID NO: 452 - DNA, 441 bp, Glycine max
  unsure (1)..(441): unsure at all n locations
nntctaaagtttctagttttctaaaccttgaaaacttgtgctattcatcttttcattctcttctccctttgccaaaaagaattcaccaaggactagccgcctgaactctttttgtgtctctcttctcccttttccaaaagaacaaaggactaactgcctgaattcttttatctctcccttctcccttgtcaaagaattcaaaacgacacagtctgagaattattttgattctcccctttccctaatacaaaagtgttcaaaggactaaccgcctgagaattcttttgtatccccattcacaaagtatcaaaggtttaaccgccttagatctttttcctaacacattggaggttacatcctttgtggtacaagtagagggtacatctacttgggtttgactgagaacaagagagggtacatctcttgtggatcagttctagt

SEQ ID NO: 453 - DNA, 424 bp, Glycine max
agctttatttatcataacataatcatctaatttagttttcacaagaactctattgttttttataaccatgatgcaaaaatcatgatcatggccatatttatgctaccttttatgttcatatacgtgtagcttcataaaacatgtatgatttttttatttgaattttgtacttttcaatgttggtgttactttaggagtgaattaaacttaaagttcaatttatctttttttcaggtattgtagcaactactacggagaattaccggatatagaactgtgcgattggtgccatatcgaggagaagaacttgagacatattggctccaattcgaagaaaccggtgtcggccggaaacaaggccggagccacccaccgttcggagtatttcggcgagaaaatgatcaagcagcatgatcatcatcgt

SEQ ID NO: 454 - DNA, 427 bp, Glycine max
  unsure (1)..(427): unsure at all n locations
tgcattgtgaaaatgctcatgcatacgcatacacatgcatatttgttatctatgacaggagcaggatcgttttaggcaatagtcaaataccggagccaaatccaaagacagagacgaatcgaggtatgcggtaacgcgaccacgatttgctgcacaatgtcattgcctgctttcaggtacttagggatgggcacgagtggaggctaggcccatgatcaacggatcgtcgtcccacgtccagctctggacaagcaagaagcgctactgggaagcagcctactatcctttaaattcctatttattattgctgatgtttctttaaggtgatggtcggatgcctaatttaccctanggggttcgaggaagcgaacgccgacccatagagagggcgtacctttgttttaaaaaaatgcagggttaactcact

SEQ ID NO: 455 - DNA, 368 bp, Glycine max
agcttattcttctcttgaggttgaagattgttaagtaagttaaataagattccctggtagctttcatcagaattgatattcaaatgaataaggattcaaagtcctgcagcttgccaaatttctttttctttctcacatgctataagaaaaaaaaaaaagaaaaagacttggagcaaaaccaacattgtgtaggacaagtaatacctttcgaaatgagtctttcacgagtcggctagcatttctaagtgatcaccacataaaatgtttaatctcaggaggaatatgcaacttccagatcaatgaccaatcaccatgaactttaatagatcattgttcaccatagaatccatgatattattgaagcatgg

SEQ ID NO: 456 - DNA, 289 bp, Glycine max
cgcataccaaatgttcaccactactagaggatataccttcttcatgttgcatatgaatctcctcctctaaatcaccattctgaaagactattttcacatccatttgttgcaactcgaggtccacatgagcaactaataccaagatagtctgaagagaatctttcttagatataggagaaaaagattgtgtgtagtcgattacttctatttgagtaaattctttagcaacgagccttgccttgtatctctcaatgttgcctaatgaatcccttttggccttaacgactca

SEQ ID NO: 457 - DNA, 309 bp, Glycine max
agcttgtattttagacctcgatcagtcatctttcctggccgacgccgactgtcatttttttcgatcaatatcggtgaataatatttttttgccgaggtgggctaatgttttcctggccgaatgaatgggaacatgccagtttcggccgaaacgaaacatcggttgagctcgcacgaaaaaacctagccgacctacattgtaagttttttatgcaacaccgaaacaagaaaacttcccctgccgtaggaaaaaacattatgggccagcgagcgttattttaaaataaaaaattgcgcaatgtcggctgaa

SEQ ID NO: 458 - DNA, 431 bp, Glycine max
  unsure (1)..(431): unsure at all n locations
tcaacatcagaccacttccagggtgctggaactacttcacatggacttgatggggcctatgcaagttgaaagccttggaggaaagaggtatgcctatgttgttgtggatgatttctccagatttacctgngtcaactntatctgagagaaatcagacacctttgaagtattcaaagagttgagtctaagacttcaaagagaaaaagactgtgtcatcaagagaattaggagtgaccatggcagagagtttgaaaacagcaagtttactgaattctgcacatctgaaggcatcactcatgagttctctgcagccattacaccacaacaaaatggcatagttgaaaggaaaaacaagactttgcaagaagctgctatggtcatgcttcatgccaaagaactttcctataatctctgggctgaagccatgaaca

SEQ ID NO: 459 - DNA, 415 bp, Glycine max
  unsure (1)..(415): unsure at all n locations
agcttaagagaggtacaccgatattgtggtgcctangaaactactaccagagaggaatgtggtagtttatttcactgagttcgatgagttcaaggaggaactcaagagaagacactgggatgaggagttgacttattttactgatggcagcatagatgtcaccatcgtgaaggaattttacacgaacgtctatgaccccgaggataaatcacctaagcaggtgggggtgagaggtcatttggtgaaatttgatgaagatactctgaatacgtttctgaagaccccagtgattgtggaagagggggaaaatttgtgtgcttattccaggtttgcactcctgaggcctaatccttangagttggttgctaagctctgtatcctcaggaggggatttgagctaaatgttgatggttag

SEQ ID NO: 460 - DNA, 425 bp, Glycine max
  unsure (1)..(425): unsure at all n locations
tgtagaatggctagacatgatacatgtcatggtttggtttggttcaaggataaaagggatgccccacattatttccatgacacaaatgcaaagatgatgatttggaaattttatgcaaaactggtcatgcatgcacctatgtggacgctcaagtgtcaaatttttatggtcatgtgatgctagggctcaagattcatttcctctattttaaatcaacccaatgtttccaaaatatgctcttttatcaatttatgcatttatcctagttcatttcgtgcgtccggtgaaattttcacagcattcacccttcaggtgtagacacgttttttcttcaaaaatcggttatgatctatgaattttttttttcagagaaaagttggaaatcatctcttttcaaaagcatgtcggttnttagctagacaact

SEQ ID NO: 461 - DNA, 351 bp, Glycine max
agcttcctcggggccatttcctgcgaaggcaaacatttggaaagttagttctaccaaggaatgctactcttaagacaaaaatggcatacaacctcctccacaaacatcaatgtaaatttagagcaaactcatgcacatacttctttacgaacattcactcgcacaagacattcttctaactaagaaaaatgcacccatgcacaatcaaggcaccttcgttacctagattatttatatgtacttccaaggtgtatttgctaaccacatcacatgcacttccttggctaaatttacatacatgcatgctcaaagcctcttggctaccataagttgcacacatgcaaacttatg

SEQ ID NO: 462 - DNA, 408 bp, Glycine max
  unsure (1)..(408): unsure at all n locations
ntgtgtaatcgattacacatatttggtaatcgattaccggtgattatttctgaaaaatctaaagatgtaactcttcaaaaaggttttgactttttcaaatgggtttaagttttttctaaaagttataactcttctgaatggtcttcttgaccagacatggagagtctataaaaacaaggctttgttttacatttcaagaatctttctaacaatctcttacaatcctttacaagccttgaatctctttaaacttcttcttcttctttgtaccaaaagctttctgaagttttctggttttccaaaccttgaaaacttgtgctattcatcttttcattctcttctccctttgccaaaaagaattcgccaaggactaacaacttgaattcttttggtgtctctcttctctct

SEQ ID NO: 463 - DNA, 426 bp, Glycine max
agcttgaaggcgtgtaacccaccatcttctcatagtagaacacaggtaacatgtctactatcattgttatcatctccctctccatcattgggggcactacttgagctgccaaatccatccacctttgggcgtattctttgaaagattcatgctccttcttacacatgttctatagttgcattctctctggagccatatcaaaattgtactgatattgcctaatgaaggcaacaattacgtccttccatgaatggactcacgaaggttccagattattataccatgtgacagttgccccaataagactttcctggaagaaatgcatcaataattcttcatgttttgcgtatgctcccattttcctatagtacatcttcacgtaattcttggggcaagtagtccccttgtacttacgaaatccaacac

SEQ ID NO: 464 - DNA, 425 bp, Glycine max
tcaactgagacctgcgttgaaatgccataaacttatcagcagatggaaataataaaatacataatctggtttcaacatttgtaatggattctagagttgaatagcatatatttgcatggaaatattggagcacgcgcattttctctatctcgttagatttccaaattgattgagagtatgtggaaacttgtattctgccttacaattacaatggtatttatacatggttacaaagagtttgtctaaagattcaactgttttgccaccaccacaactcacaaaaattcaaacaacttgcccaactatatccaataatgaaatccttagtttaatacaaattaatgtaaactaataaaatagacaaaagtttggaagatttcgaaatgtttctgtaaatgaaacattccaactaagcaatcttgtat

SEQ ID NO: 465 - DNA, 337 bp, Glycine max
agctttcatgagaacacctaatgtcattgtcttttaggacaacatgccccaacagacttgaaagcttgtccaacatagcacaacttgcaagccgcaacacacaaggtggccatacatcatgcaagaatagtgatcaaatatgtattaagtataggctaagctaggctctttaatttgtggcatgaaaagaatcgtgtcaatttggtcagtccaataggccaatgaattgcacgattgaaaattatttattctatttggtcaaaatatttttttttaataaaatacatataaattaatgcaaaaacaaaaaataagtcaatttgttctaacctaaccg

SEQ ID NO: 466 - DNA, 375 bp, Glycine max
  unsure (1)..(375): unsure at all n locations
tgctcttctgctgtcaaatatgaacttcagttcatcttctgctcatgtactaacanagaancttgcaattcatcaagggagggtgcatctatatctttggactcttcaattgcacaaacaacataatcaaacgttggtgttacggatcgcaaaatcttttctacaatggtgacatctttcatcttctcgccatggaatcacatcatgtttcttatctccattgttcttgcaaaatagctagaaatagattcaccatccttcattgctaatgtctcaaaatctcttcttaagctctgagctgtgcacgcttcactctagcagaaccttgatactttttcttcatagaatcccanatgtccttgaaagtttctctgc

SEQ ID NO: 467 - DNA, 359 bp, Glycine max
agcttgtaatcgattacacatatactgtattctattaccagagcagattttcagaatatattctcaacagtcacatctttttacgtggttcttgaatggctatcaaaggcctatatatatgtgacttgagacacgaatttgctaaaagtgttttagaacaaaaaggtcttatccttcttatagagcaaaatcgacttatcctcttacaaattccttggccaaattacttgtgattcaataacgaattatttgagtgctcacattgtacaatctatctcttttaagagagagtacttgttctcttcttcttcattctgaaaagggattaagagactgagggtcttcttttgggaaagaat

SEQ ID NO: 468 - DNA, 423 bp, Glycine max
  unsure (1)..(423): unsure at all n locations
agctnnttagaaatattttaataagtattagaaaataatattactagagattaggtgtgttaaagttagttggactattttgtatacagaaatattttatataaaggacgtcgaagtattgcttatattcttaattatatatttcttatattctaaaaaatgtgtgagattaatttctttattattcaatttataaattatttgaaatacatgcatggatcggaatgcaagttgaatacccaaaatgttagttatataaacataaaatggtttataacacttctattacttacttgacttaatgtttaacactttaactaaaggatatttcaaaaagtgtcaatgaataaacaaatagataagatcacgttcgagttctttaattactcggaagtgcacaacagaaagtangtttgactgttg

SEQ ID NO: 469 - DNA, 441 bp, Glycine max
  unsure (1)..(441): unsure at all n locations
cgaatatgtggacctgattntgntntaagacattcttggttgagagaagaatgaagaatgataagcaaacaatggaacttgttgttgttctcaatgatgggctgtcatcaccacaaggaaataaattatacatatgaaagatctaacgaattcaacttaatctttcatgtcgattactaaaattaaagtgtgattagctgtgcttactgacttgtactggtgaaagtaaaataaaaaatgccttcattaaatgcattccagaggagactttacccctttccccaaagaaatagaaaggttaaatcactaatttggtccatgtagtttcaatccaaaatcaaaaccctttataaaggcccttgtaattttcaagcaatgcaaaatggtccctgttatagttctacaatttcaatctaaacagggaataacgccaattaacat

SEQ ID NO: 470 - DNA, 425 bp, Glycine max
  unsure (1)..(425): unsure at all n locations
agcttgatgtgagaaagcgtggaagagtgagtcttcctacttttgtttgttgaccacagagtggtacctggagatatgtcacgggggtcaggagaccttggggacgtcaggtggggtgctatttcccaaaaccaagcttgaccaatcctgacccaacccgggcatagttagtctgtgagaacctgtgacgtacctaaacaggcgcgctcctggcagtcaaccaataaaagaacaaagtccacaaagcaaggaggcttgtatggcggctggccagctatgaatttggagtggtatctggaatttggcctctggtaatcgattaccaagggtgtgtaatcgattacaaggcttaaaaatggagacaggatgttaaaatggcctctggntatcgattacccataacagggagataggacactagtaat

SEQ ID NO: 471 - DNA, 439 bp, Glycine max
tgtgttgcaaaagttggtggtattcatacaaagatgggtttgagcttagatgtcattactaggtggaattctaattttgtgatgcttgagagtgcccttgtatattgatgtgctttttgtagtcttgcaattgatgataggagctattcaagttgtcctattaatgaagaatgggagagaggacaaaaaatgtgtgattttttgcatcctttttttcaaatcacagagttgatatctggttcctcttacccaatgtctaatttgtatttcatgtaagtgtggaaaattgaatgtttattgcttcaaaatttgagtaataaagatgagttgattagaacaatggcaattgatatgaaaacaaagtttgataaatattggagtgattatagcaatgtgctttcctttgggtgcattctagatccacgctctaaaataaaaa

SEQ ID NO: 472 - DNA, 432 bp, Glycine max
agcttgccgccaccattgctgctccctgctataaaatatcatccgggcaacttcccaagttcccctttttctcttctttcaagtaacccttttctttcaaagttgagatttgtgttcccattcgcacaaaatggttttatcctcagtagtgttttgttttttttcaagcataattggttcaaatcaaagtaagtaagtaatctttgaccttgaaagttcagtttcaaagggaaaattttgatcgggtaatcccgtaggaagaaatggttaggttttcttctgcataattcttggttgtcaaatgatatcgttacaaaggttgaactgtaaactcatctgcttggaattggaatttggcaattctctgtctctagaaattaaatattaactgaaaatcttagtataagtggtttctggtggctttttggcatg

SEQ ID NO: 473 - DNA, 440 bp, Glycine max
cgtcttgacatattagaagtttatacacatgataaaaacattctgaagaattgcttatgattaatagcatgttttcgttatatttcttttaataaaaagagattttaagtgaattagtaattagtgaggatagaagtaaaaagaaaaaaagaaaaaggaaaaaagccagtaatatgtaagttataagctagttgaagtaataagccaaaaattacataaataaaatagcataatgtatatctaataaatttattttgattaaaataactagtcaaactaacttatactagagtgttgtgttaaacacaattggaaaaaattgttgacggtaattattatttaaatacgtttatgatttatattattatcaaaaattataatcttaatagaaggaaaaaaacaacaccttaatggtttaaagctattgaaagcaaagaaaa

SEQ ID NO: 474 - DNA, 397 bp, Glycine max
agcttgaaattgaacaacggaagctctccagaaactcaaatggtcataacttatcacacggaggtccaattgaggcgcataatatatcgagacgctcgaaattaaacaacgaatactctcgagaaattcaaatggtcgtaacttatcacacggaagtccgattcaggtgcataatacaccgagacgctcaaaattgaaccacgaatgttctcgagaaattcaaatggtcataaattttcaaacggcagtccgatttaggcgcataatacatcgagaatcttgaaattgaacaacggaagctatccagaaattcaaatggtcgttactcgtcacacggaagtccgattcaggcgcataatatatcgagacgctcgaaattgaaaatcggaagctctcg

SEQ ID NO: 475 - DNA, 435 bp, Glycine max
tgttcttaagcaaaagctaactaatgcccccatacttgcgttgccaaactttcaaaaatcttttgaaattgagtgtgatgcttcaaatgttgggattggggctgtgttgatgcaagaaggccatccaattgcttattttagtgaaaagttaagtggtcctacccttaactattcaacttatgataaggagttgtatgccttagtacgggctttgaaaacatggcaacactacctttatcccaaggaatttgtcattcatagtgaccatgagtccctcaaatatatcaaggggcaaggcaagcttaacaaaaggcatgcgaagtgggtggaattcctatagcaattcccttatgttatcaaacataaaaagggaaaaggtaatattgtagccgatgctctttctcggcgtcatgcattactttctatgcttgaaac

SEQ ID NO: 476 - DNA, 461 bp, Glycine max
  unsure (1)..(461): unsure at all n locations
ggatccttaagtcacctgcggcatgcaagcttcanattatggtggttcagccgaacagtacgaggctgcagaagatcaatttacaaaattgtgaatattatgacatcaccaacatcatatacatctgcaaatttcttgtgagtagatcaaattcattctgcccaaaattttagcacaactcaaagtgtgcagactgcagaagcaagccatacctgaaaaagtgtcattggaaaagagtggtgaatttccctgcctttgatttcatctggcacaatgtttctactaatggatatgttaaggtaactatacatcaaagccaaaaacttggcaatgaccaaagcttcataacattctttaactgactccaaaaaggtgaaaaactccttgcttcctctgatatccaagagacccacaaaggagacagctgcatagattggagccatgaggatgataatgataat

SEQ ID NO: 477 - DNA, 429 bp, Glycine max
  unsure (1)..(429): unsure at all n locations
aggcatttattactgtaagatctctccaatgctcatgaaagcaattggacagacaagcagtgatagtgaacattaatatcccgataaaattaaagggtaatgttaaaataaataaaagagtaaataactaaatataaactatctcatctaggataaaatatataaatttgtgagagaattttttaataagatataatgtttaaggattaattagataataaattatattttttataattaatttgatattaagtattaaattgtaggattaatttataattaattttttttagaattaatttatctcactttttatatatttaaaaattaagtttaaattctttatcttttaagaattaatttattgacacttatcacttttaaggataaatttaactatntagtatttatcataaataaaaaataaca

SEQ ID NO: 478 - DNA, 424 bp, Glycine max
agctttagaactagcatgatatgccatgaattcttcatacacactttcaagatcaggagctctttcttcttcataattgaaattctgataccaggggacagatgtcgtaccggatgtcacgacatcacgcttcagaacatgcagattatatgtgtccgtatgaacagattaaacaagtaaataacaccagagaattgtttacccagttcggtgcaacctcacctacatctgggggctaccaagccagggaggaaatccactctcaatagtgttagttcaaggtctaacagcccctgtttacaaccttctcacctaaccactacccgtgcgatctctacctaagagccactcttagatatgagaaccttcgctcactccctctcactcacactcccgtgtttacaattaagtcaaagacacacca

SEQ ID NO: 479 - DNA, 409 bp, Glycine max
  unsure (1)..(409): unsure at all n locations
ntaccctctcttataacatgcagaattcgaaaattccactacataaagacaaatgatctaatatggttgaccagatgagcataaatatgacaggaactcactccaagggaaatcatgtccacaacaagctnggagtcatattcacaaatgatgcttgtaacacccttatcccacgcaatctgcaacccttgagcaatggcaagcaacttcgcattcagactcattgtgaagcggcaacaaccaaaaaaactgagaaatcaattacccaaattatcacgaatcaatctgtcaattccagcctgactcggattgcctaaggagcttctatcagtgttgagtttgtaatcaaaatcaaccggaggagaccaacacaccatacgactaggaagacttgagatattgtgatgag

SEQ ID NO: 480 - DNA, 341 bp, Glycine max
agcttatgcgcatatttccttacgaacgttcacttgcacaagacattctattaactaagaaaaatgcacccatatacaatcaaggcagcttcgttacctagattatttacatgtacttccaaggtttatttgttacttacatcacacacatctccttggctaaatttacatacatgcatactcaaagcattttggggtaccaaaaattgcacatgtgcacatcttggtatttctaatacctatacatacacaaacttcatgatgaatcttgactatctacacaataaggtgctacatttcatgcccttttcaagttttttctacctaaagccgcatgcaaa

SEQ ID NO: 481 - DNA, 430 bp, Glycine max
tcagaccaaagcaacataaaatctaggtatccgaaacccctcaatttaatggattttcaaggtttgagaagtgaaattgagaatgaggtaaatatggagcaaactctcacctcacacaagtctataacatcaatctaaacttgctcaaactagatttacacctaaaattccaccgaatcaaaatttgactcctcaacacccaattttaccctagaaatggctctttgttcactttggtcatttgattttctctcttgcacagcccaagcttcctcataagtcctaaatgacatttcaaactaagattaactcactttaacctccaaataccactaaatccagatttggccttccaactctcaaaaacctcactctgtgtccactcataacaccatattctcactttctaaccctaggttaactctaccct

SEQ ID NO: 482 - DNA, 430 bp, Glycine max
  unsure (1)..(430): unsure at all n locations
agcttggacaggaggataaggatgatacctgataactttatgcccaccccggatttcgacattttcaacttgaaaaagggtttaggggtgggggagtttaaaaaaagcatttaatcggaatgcattgatagtttaggtattttataatgaaatgcaatatatagtaatattgttgctttttctaacaattcttttaaaagttatatttgagatgattttgtaaaaatcattatagtaaattagtaatgtatcaaaattaaaattttaaaaatatgttgaggcatgatttaatttatgttattntatcaaaataaactctaaaatttattttaagaagctttaaggtcaaaattataatataaactttttagtgatactaaactcgttcattcatgattttntgttgtgtttcaaaattcacttttactaa

SEQ ID NO: 483 - DNA, 427 bp, Glycine max
  unsure (1)..(427): unsure at all n locations
tgtcacttctatggcttctatntattgagtagttataacgtggaacatttggagaacccagctaacaaagttttagttccctacgaattctattattccttcactaacactttctggttttcttcttccccactcgtctgccttctacgaatggctttgcatctccatcttttctaactcgatggtgcatttcaccgctatctatcaagtcaacaacgtctagctgatcgtctaaagcttttcaacggacccattcatgggctaagtaagacaaaaggcactctctgattttgtaccagattgcttccattgaaaagcttcatacgatccatactagaggtacccaactttggccatatggtccaatattacaaaacaagagaaagggatttataagtttatttctcacaactgaagaaattatagt

SEQ ID NO: 484 - DNA, 406 bp, Glycine max
  unsure (1)..(406): unsure at all n locations
agcttgaaagagcccgggtagtcaaagagaagttcaagtccatagccatcaaagtctgaagagagtatgatgaactaagggacgttaatatggccaccgatgaagccttggaatgagaaaccaagaaggcccgaaaggaagaacacgaccaaaacaagttttgaggggctttatagggcagcaatagtgagctcaaactctgaagaggtgaaaggaatcatcatgggtcaaaggcatgatctggaaggacgagctaaaggcttgccttangtcgaaaagaaatttgtcccaacagttaaagtgagactgaagggaatatgtgggccatcatcgatgagtgcaaagagaagctaaatctatcggcgactcacgagcaaaggctagaagatgagtacgccaagatatc

SEQ ID NO: 485 - DNA, 433 bp, Glycine max
tgtaggattatggggtacccatcacatgtggtactaggtgtcggtcgggcgatggtgcacaacaagtttttccacatccacaatgcgcgcataaacccaccatcccctgttgcccacctccaactgagctcacgtactcccacgtagcccatatcctcgtttctctcaacaccgggtccccatcaatcctcccaagcttccacaatatccaagcaaaacaacattcacacagcacaagctatcacagccaagcaaaacagagcaaaggcagaaaactctgccaaaacaccaaccaaaaatcacagcttttcccactcaaagaccccagtaacaattccttcgatccaattcgtaaaccgttggatcgactccaaaattatactggaagtctatagtgcataagcctacattttgaccgttgtgatctactaac

SEQ ID NO: 486 - DNA, 252 bp, Glycine max
agcttgtaaccattagaagagaatgatcatgtgaatagaagtatgactgaaaatgttagtcagttgttagattgattatgaaggaatgcattgaccgtatcccggtgagagtgtgatctttaaattttgagagaaacgattatcatttactactaattttcgcatgaatctctgaagtatggactgaatgcatgaaattgaggacgatgaaggccatgtttgattgtgatagccacttatccaaaaagctga

SEQ ID NO: 487 - DNA, 338 bp, Glycine max
cgtagaatggctagacacgatacatgtcaaggtttggtttggttcaaggataatagggatgccccacattatttccatgacacaaatgcaaaaatgatgatgtggaaatatgatgcaaaactggtcatgcatgcacctatgtggacgctcaagtgtcaaattgttatggtcatgtgatgctaaggctcaggagacatttcctctattttaaatcaacccaatgtatacaaaatatgttcatatatcagtctgtgcattcattcgagaccatattgagggtctgggagaatcttcacagcattcaccctacacgtgtgtacacgatttttcagaaacta

SEQ ID NO: 488 - DNA, 355 bp, Glycine max
agcttgaagttataaacaatagttgttgatgaaaaccatgacaagtcaactatttggaacttattcatcatatagttccttatgaaatatattttatttgaaaggtgttcaaagcgaacatctgaatgctcagaccatcttattgttcatcttctatttctcctagaacctcagacagcaccatcttttatagtatctgagatggttatctctaccctttcactggaaaactgccataactctctctctccctccctctttttctccccatgaaaagatatttaggagaaatcactatcaaactttatcaagataagggaaatacttattaagttataaaatcagggtaatgatc

SEQ ID NO: 489 - DNA, 398 bp, Glycine max
  unsure (1)..(398): unsure at all n locations
cgaggttaatcgtaaaactgcaaagacatgaccttgtgagaggtttaccaagaatgtcatacaaagttgatttactttgtgaagcatgtcacgagaggaaacaaattaaaacctctttctcaagcaaaaactctatttccacctaaagaccacttgaattattacatatcaatttgtttggtccaactagaacaacctctgtcagtcgaaagagatatagtctggtagtagtggatgactactcaagatggacatgggttatgttccttgctcacaagaataattccttagagatcttctttaaattctataaaaggattcaaaatgaaaagggagtatgccttacttcaataagaagtgatcatggtggagagtttgaanatgagaactttcatcta

SEQ ID NO: 490 - DNA, 384 bp, Glycine max
  unsure (1)..(384): unsure at all n locations
agcnttggaaaatgatttttatacaaaagttagtcgtataaagtgactaacatgtattaagcccgctatgtccacaagcttaacgagtaggactcacaaactcgatataactatgcagattaaaaaaaaggtctgttattcacaaggtctgtgggcttaacgcgtcgttccatggatcttggtccatatacccacccttattaatagtggaccaaaattgctaaattttataaacatgtaaaacactataattatagggaccaaaagtggatttaatcctaaattatatatttttcacaaataatttatattgtgatattttattatattaaattattgatatatttttatgaaaatattgaaattcatgtagttgaaaataaa

SEQ ID NO: 491 - DNA, 423 bp, Glycine max
tagctccatactcgaaggtggaggacacatgaacagtgctatgcaatgacattcaaggggcttcgaataaagtggagaatggaggattgcacttgagggtccacacttatgcaatcatgaagtatagctccaaactcgaagatggaggacacatgaacaacgctaggcaatgacattcatggggcttcgaaaaaagtggagaatggaggattgcacttgagggtccacacttaggcaatcatgaagtatagctccaaactcgaatgtggaggacacatgaacaacgctaggcaacgacattcaaggggctccgaaaaaagtggagaatggaggattccactttagtgtccacactaaggccatcatgaagcatagcttccaactcgaagatggaggacacatgaacagcgctaggcaatgaca

SEQ ID NO: 492 - DNA, 427 bp, Glycine max
  unsure (1)..(427): unsure at all n locations
agcttattcaaacaatagaggcatggtggcttagcgagcgtggctcgcttagccacaaacagaatgccaaaagcctcatagactcagacctaactaaactaactcgcttagtgcggcatgccggcttagcgagattataaaaattcagaaattaaaactgggaatttaaacactcgctaagccaaagtgcagtggcttatcgagttcataaaaaaagcataaattcaaatagaaatgacgaacacacttagcgggacagggccgacttagtgagttcatcagaaaacccagaaattcatccaaaattgatgaactcgcttagcgagcaggctcgcctagcgagtacatcaaaatttccagaaaattggggctttgaagcctcaacttcctagccgctntcaggcataggatatctaagcaaaaccca

SEQ ID NO: 493 - DNA, 439 bp, Glycine max
cagagccatgggaacaagaaggtgtagatataattcaaactaagggaggaaaatgttctaatcccacacaatctggtgttatgggtttaatgagaagttaatagaaaaatatgtttgactcacttatgaattaatgtctttttcctattgcctacataatatgattgagtgcttcacactactagaaaagtgcttttctacgacggttattttgaatattctacgtctgttattaaccatcgtcataggagacatcgtagataatcttcactttctacaacggtttcctaaaaaccgtcttagaaaaagctacacttctaagatggttcttagttaaaaactgacttggaatgatagactttctaagacggttttttagataatcgtcttagaatgtactttaaaaaaatttattgagaattctaagatgatcttttca

SEQ ID NO: 494 - DNA, 400 bp, Glycine max
agcttataaacacgttaaaagctattgggctagtttgtttaaaattaaaattagcaattttaaaataagtgcttttaaaaaaaacttatttaataagcatataggatttgcttctcaaaataagcagtaaattatttattttaaacaaaacagtttagacaaacacactacaaaaacataaagttacttattctattaaaataaatgttttttaataaataagtttaaacaaactgagtcaaattttcaaattttccataagttttttctcacacttatacaagtgcttgtgttataagtctagataggctgttaaaagactcttctaagtgcattccaattaaacaggttaactccttatttatcttcattagagattaacattgcatgctgccgggga

SEQ ID NO: 495 - DNA, 317 bp, Glycine max
cgagtgagccaccatagggtgatgcaatccaagtagagagttctctctgagagagaagataaattgcttgggaagtctctatcctcaagcttgagcgagccaccgcataatgagtcgatccaagtagagagcctctctgagagagaagataaatagcttgggaagtctctatcctcatgcttgagtaagcctctctgagagagaagataaatagcttgggaagtctctatcctcaaacttgaataagcctctctgaaagagaagataaatagcttatgaagtctttatcctctagctcgtgtgagccaccattgagt

SEQ ID NO: 496 - DNA, 426 bp, Glycine max
agcttcaggctgctcaattgctccaggttgctgcatgggagggcaaaggtctgtatggtggtcagcagaggagcacaaaccacaaactcttgcgacaggtacagatttctgattcaaggccagctgggttaccaagttgaccaacgcatccagtttgccttcaagcttcttagtttcagatcatgcagatgggtttgtagctacctcatgcactcctctaatgactatggcatcatttctggcgcttaactgctgggagttggaggccatcttctcaattaaatttctggcttcagcaagagtcatgtctccaagggctccaccactggcagcatctatcatacttctctcgatattactgagtccttcataaaaatattggagaagaagctgttcttaaatctgatggtggggcaacttgcacat

SEQ ID NO: 497 - DNA, 438 bp, Glycine max
tatcctatcttttgcaaatctttccgggaactccctcagagtatatgttccgtttgatttagtcacttgaccattttggagtgacgctaatggagccgtttgacgtttaatcaatccattgaaattctagggtttgtcccccccttttttttgtttaaacacatcgacgggtaagaacttttgatctgcccctatgttcacttgaggctcatgcacgatgcccctcattgccccagtgtaaggctttgaggtaccaatcgttgtctttcgtcatgaccttgtagatgggaacatattgggtgggaacttctaatctgaccctaggttcacttgaggttcatgcacgatgcccctcattgccctagtgtagggctttgaggtatcaatcgttgtcttgtttcacaaccttgtagcaaggaagaacgaaagaagagattg

SEQ ID NO: 498 - DNA, 400 bp, Glycine max
  unsure (1)..(400): unsure at all n locations
agcttctaactntntaacttctagcttatatcttattaattaaaatctttcaatttgaggaagttcatttatcaaacataaccttagcttggagccaacgagagaagttcctttaattgttttcaatttgaggccaagtgtgggaaaattgatcgaggcttagcctcaaaacatttgacaatctacatttttttagtttatagtgattaaaaaatattttataaatttaatttattttaatatttttaatttatattttaaaaaagtgatcaactaatgggctggcccatttggtctacatcttaccaaaggctgagctggggcaattcttcaaaacatcccaattttcttggtgcacgcttcattttccttaaatctccttttacccttcttttaaaac

SEQ ID NO: 499 - DNA, 440 bp, Glycine max
tgagactgagtgaacgatccatgatatcaccatattattgcatcttttccatgcagaatgcagaggatgggtaatgactggttgtgagatagttccatccacaaattcaaccttgttatttgcactcagagtagtaagcattgaacgactccgaggattataattcggtggatcaagaaatggagatacaagcgttattgctgaactttcactagggtgaaggtaataggaactatgaacattcaaagattggtcagtttctgtgttcatgttcaatcaatagagtagagattctcttgaaattgaggaagatagaaagaaatttcaaagaatcgaacaaaccgaaaatcgcagaagcagagaatggaccacataagcgaaaacagagtgtgaaaaaaaaatgatgcgaagagtggcacatcagacctcttcaatcgaag

SEQ ID NO: 500 - DNA, 431 bp, Glycine max
  unsure (1)..(431): unsure at all n locations
agcttgtaacctttagaagagaatgagcatgctaatggaattatgactgaaaatgttagttagtttgtcagattgattgtgaaggaatgcattgactgtatcccgatgagagtgtgatccttaaattttgagagaaacgactatcatttagtactgatttttgcatgaatctttgaagtatggactgaatgcatgaaattgaggatgatgaaggccatgtttgattgtgataaccacttatccaaaaaagctgaccacgtgcttgaatgatttatcctttgcacctagtttgagctgaatgaattattgattgattgaaccctgagcctatgcagtgttatctccagctaccttgacttatgttgtatgagaacatcatccacaagaagcgtggttcanagcanatttgtcccacatctgggggagtaatt

SEQ ID NO: 501 - DNA, 398 bp, Glycine max
tatcgcattcgactgcacatgttgtctgatgctctgcagatttatgtggcgtatcaattaaatcgattacgaccttctctttatcgattaccatgtgatataatcaatcactcctctgtctataagtgtttcagaagtgaacaagaacactataatcaatcactttgggtatgtaatcgattacattgaacctaagttgttgccaggctttgggaagaacactataatcgagtaataagaaaatataatcgagtacttcatggaattaatcgatcatcttgtagatttaattgattacaggcgcgtataattgccttctctataaacaaccagcttgtgttcacttcgaaaactataacaatgaacgaaatttgcttctgaatgagctaagatcacgt

SEQ ID NO: 502 - DNA, 417 bp, Glycine max
agcttaccgcaaatgtgacattgtggtctattgttctgattccaagaattatttgaattatgtccctagttcgatctgccgttgcctcttttattgttgtatcttcctcctcgattggaattgtaaccaccatgaaagttggatctaccaccacgattgttatattctcctctagaatttgacttatctccacttcctctaccagaagtataactaggtccagaaacagtattagccagaatcaaatttgaataagctttcttgtgtttctcaaaatgctcttcttgagccaatataaatgcctcaatgtagtcaacagtgtctggatctaaacgcgatgtaacagaagtaacaaaagaatcataatcttcaggaaagccatctaacatcgcttctatatgatcatcatcataaatc

SEQ ID NO: 503 - DNA, 369 bp, Glycine max
cttgatggttgtgttgaatgcattaaaggtaatcaaaccaatagcaagaaattaagtgcatatagggctacaaacatcttggaattgatacatacgaatatgtgtgggctatttcatacaccttcgtggaatggtcaacaatattttatatcattcatagacaattactccagatatgcatacttggttcttatacatgaaaagtcacaatctctggatgtgttcaaaacatctaaagttgaagttgaaaatcaactcaacaaaagaataaagtgtgtcagatcttaccgtggtattgctccaagaacatgaggaaaataatggtatgatggaaaatgacccataaaataagggtagaaactttgtctt

SEQ ID NO: 504 - DNA, 419 bp, Glycine max
agcttgtacttggtttagacgtgattgatacatgatttgggacttgtaggattcaatttgggcaaaattggatgaaggtaagagtggttttcgaaatctgcactttatgcagaattttgctgttgaaatgtgcagcagaattttgtatatgtacagaaaaatgcttgtgtatggctggttgtggaaagggtagtacatatggggttctggacatttgcaaacagatcccaacggtcaaaatgtatacttatgtactatagacttccagtaaaattttcgagtcgatccaacggttaacgaactggaacgaagagaatgttactggggtatttgaatgtgaaaaggtgtgatattggtttgtgttttgggcagagttttctgcctttgccctggtttcttggctgtgtaatttgtgatga

SEQ ID NO: 505 - DNA, 426 bp, Glycine max
  unsure (1)..(426): unsure at all n locations
ggcttgtggggcttctatggaggctggatctttgagcttcaatgaggtcctttaatggtgattttccaccatggagatgcagcggaagacaaaggagaagaggtgagaggaggcgccatccactacggaataagccatggaagaaggagcttcaccaccaagatgagccttggataagaagcttggagaggatgcttcaatggaggaaaagaaagagggagggaaagagagaaaattgaaggaagaaaaagggagagaagttgaactttgagttatgtctcacaagactccattcatcaaagttacaacaagtgttacacatgcttctatttatagactaggtagcttccttgagaagcttctttgagaaaacttccttgagaagctagagcttagctacacacacccatctaanatctaagctca

SEQ ID NO: 506 - DNA, 430 bp, Glycine max
  unsure (1)..(430): unsure at all n locations
agctngctccatataaatatatatatatatatatagaggtatatatatatattgaggagaaagataattcaaggaaacaattcctatgatgagataagtagattatgattatgatgatggcaagttcaagagaaggtcgtcaagcaaagcaagagggtgacaccactaatattgacaagttctcccaggcatcgtccacttcaagacaatggtcagctttcataaatccaagaattgtgagagtgtcacgttcttttggagggaaagataggcatagcaaggtttgcaccataagagggttgagggacagaaggattatgctctcagttcccacagcaatacagctatatgatcttcaagacaaacttggactaagccaaccaagcaaagtgattgattggttgcttgaagccacctaaattgacattga

SEQ ID NO: 507 - DNA, 427 bp, Glycine max
  unsure (1)..(427): unsure at all n locations
ntggccgatccatatcctccaccaagaatatttnttgatagatattcttcacctcccatttcactttcttaggatccacctcctaaatcccatcaatatgtagacccctatgtagatttttccttctcctccaattaatagtaccatggaagaatattgagttgttgtctccttccactaaccatctagatctagatttttgtcttagaaatgactcattcctccttgccaatatccaaaattgctctttcaaatctatcttcatgttcaattcactctccaccaaaactctagcctcctcaagcttatccaactcattcattttcaaggcaatctctttctgtgatgaatgaaagtcttcaaaacatgtagcattccactctctaagcaccttctagaggccttttagatttcactgaggacatat

SEQ ID NO: 508 - DNA, 416 bp, Glycine max
agcttgaaccaaaaccggtgagagtgtgacctcactctgtgagtgaacgactagctgtgagtaataatctttgcatgaatctctgaattttagaatgaaatgtataaatgaggacatcatgaaggccatgattgtacatacacaagccttttgaccaaaaagcttaccttgaatgataattatatcctttgcaccctttttaagctgaatgatattgtcaaaaatttgaaccctgaacttaaataattattttcagataccttgtttagattctaggagagcatatagttcaaggcaaatttaccccaaatttgggggagtggaactaattgggatgcaaagaaagagataaagcatcatcacacacaacacacaagttgtctgttaaaaaaagaaaaagaaaagtgtgctgatgt

SEQ ID NO: 509 - DNA, 426 bp, Glycine max
tgacgggtggctgtgggtgtggagaaagttgggaagacgctggtgaggcatatgtaaggtgggagagacgctcgcaccatgcttcgaacttattggccaagtcggagtgtctctcggagagggctgctatggcttcttcaaagcggtccgcggttgtgggccgagtgccgtgctccgccatagtagcaggtcggaccagtgttaagcacggcggaggggaagattcgcgagagagaagatgatgtttgccttgattcgaggtcaacgctcctcttgagggaactagcttttattgaaaggatatatctgccttcctcatacgactttcaggcttttatacaagctacaatgactactacgaacatctaacggccctaactaccaagatggagtagttacaactttctaacagaatgcttacgtata

SEQ ID NO: 510 - DNA, 409 bp, Glycine max
  unsure (1)..(409): unsure at all n locations
agctntgaagaacttagctacactggaaatcctgagctttgtggtccccctgtaacaaaaaattgcacaaacaaggaatggttgagggagagtgcttctgttggacaaggtgatggtaatttctttggaacatcagagttttatattggtatgggagttggattcgcagcaggattttggggtttttgcagtgttgttttcttcaacagaacttggaggcgtgcttattttcattatcttgaccacttgagatatctgatttatgtgatgatagtcttgaaggtaagacaggtactcgggaaattattgagttacattgtaactgttaggagtgagagacattacaacgcgttagtctatccattcaaaatgagagaaagtttaccatactatgtatctgttcatttgt

SEQ ID NO: 511 - DNA, 402 bp, Glycine max
  unsure (1)..(402): unsure at all n locations
tcccaattgtagtcatcatctaaaggagaatgtgaagagctgaggtgaagctgaagaacatgggaagtaaggttgtggcagaggactccataccagtggcaacagttggtatgattatgattccaagaccaaagcctatttgaaggatcattcacattattcttaatcttcataagtgtctcacactcacttgggatgcacacactctctctgcatggtaagctcaacaaccaaagctggacatagacaagaatataaatggaggaggaattcatgatcacaaaaaggatatatgaaacagcttaattgtataagtgcttcttggttctgcatattaatcataaaacttctattatttatactgctgccctgactgtttntctcttcactttcatatttttt

SEQ ID NO: 512 - DNA, 377 bp, Glycine max
  unsure (1)..(377): unsure at all n locations
agctngagaccaaaatatgacatagaacgtttccaacaatctaattctcgcactaataaagtaaatcttattgaaaacacaaacgaattatacataaatgcttctcacaacatgggaggtaaaatccctcaaacaatttcatataatcatatcaaaatcataggttcaaaattacgaaaacaccaagaacactcaattttatcaaccaattcacattagggcatcaattgacctctcaaacacaacaatcttgtgattataatcataaaggatgaattaaaatatagtaaacatcccaaaatataccccaatttgatcatctaaggattctctataaatattcattctaaccccaattgcgataaactcatctctta

SEQ ID NO: 513 - DNA, 331 bp, Glycine max
tgtaggattatggggtacccatcacatgtggtactaggtggcggtcgggcgatggtgcacaacaagttttccacatccacaatgcgcgcataaacccaccatcccctgttgcccacctccaactgagctcacgtactcccacgtagcccatatcctcgtttctctcaacaccaggtccccatcaatcctctcaagcttccacaacatccaagcaaaacaacattcaaacagcacaagctatcacagccaagcaaaagtagagcgaaggcagaaaactctgctcaaacaccaaccaaaatcacagcttttctcacttaaagaccacaataac

SEQ ID NO: 514 - DNA, 426 bp, Glycine max
agctttaagagaagttgcaagagaaaagactacagcctcaatgtggctgaaactagagtcattgtatatgacaaagtcccttgcaaatcgactatgcttgaagcaacaattgtactccttcaagaagacagagtcaagaacagccactgaacaattggctgatttcaacaagattcttgatgatttggaaaatattgaagtaaagcttgaagaggaggataaagctcttttgcttttgaattccttaccaaaatcctttgaacatttcacggatgcaattctttatggcaaagatcaagacattgccctagaagaagtccaaacctcaataaggaccaaggagatgcaaaaacagcaagactccaaatctgaggataatggtgaaagcctgaatatttcaaggggaaggagtgaaaagaaggaaca

SEQ ID NO: 515 - DNA, 384 bp, Glycine max
tgatggctgcgcttagtgagtatggcggttacctcgcgcttagcacgtgatttgtgctaagcgggccttcacgtttcatactctctcaacttcttggcgctaggcatgcgtagccttctaagcgcctgcatcatgctgaacgctttatatgcgctgagtgagtagcttcatatcttcaaattttcttcttctttgaactttactttgattttctatgccaattattcaccaatcatgataaattcacagcttttaacactttctatacaaaaacttaaatgatgtaaaaattccaattattcacacaaaaaggaagaaataagagagaaaaattaacaatccctacttaatgtaatcccagaatacctatacatagcagttatc

SEQ ID NO: 516 - DNA, 530 bp, Glycine max
  unsure (1)..(530): unsure at all n locations
agcttagcaccactatcgcgcttagcgcgagtaaatggatttggacttggcgccaatgttgcactgagcctagcaagagatggacgactcgcttagcgagctgatctcgcgcttagggcgctgcttcgattcaggtgctcttccagattcctttttcacgctaagtgcactgaagccgtgcttagtgacggatacgcactaagcccactgagttcgcttagtgcgacaaccactttggcacttcaagaaattagctcctttttacctgaaattgtacagattttaacattaattccaataaaagagaccccaatgacagagatcaaaacacatcaaagtttatttacaattcctacaaaagaactataaattggggaaaattatacatattttgcaaaagttttctatacaaaagttagtcgtataagacgactaaaaactcccccaaatttacagttntgcttgtcctcaagcaaagaaagaacagttcacttgtcctcaagttgcaatatctatagtggttatacaaa

SEQ ID NO: 517 - DNA, 531 bp, Glycine max
tatgctgcaaacatttataatagacctcctcagcagcaaaaccaacaacagaaaaataattatgacctttcaagcaatagatacaatctaggttggaggaatcatccaaatctgagatggacaagtccttcacaacaacaacagcttatccttcctttctagaatgctgctggtccaagcaagccatatgttcctcctccaatacagcaacaacagtcacaaaaaagacaacaagcaattgaggctcctcctcaaccttccttagaagagttagtgaggcagatgaccatccagaatatgcaatttcagcaagagacaagagcctccattcagagtctaacaaatcagatggggcagatggctactcatatgaaccaagctcaatccaaattctgacaaattgccttcataaactgtgaaaaatccaaaaaaatgtgagtgtcatcaccttgaggtctggcaaccaaattcaagtgcctacaccagtagtagcagctgcacctgaacctgtcaagctatattctacacctg

SEQ ID NO: 518 - DNA, 473 bp, Glycine max
  unsure (1)..(473): unsure at all n locations
tccttatagaaacctgctgcatgcaagcttgatcaaaacaacatctaaacattccaatccactcaatttatacaatttctcattcaagtcattaacaaacactcattcataagaattcacaccacagaatatcataatcaatcaggtcactgttcaaacaagctttttgtacaagcaatcaacactaaaataactggaatttaaatgactgaaacataaactaaataactgataaaataaattgctcataatttgcaggattttaaaaactatgcagaatttaaaactcctgatcatcctactgctgatcttctgcatgctcgttcaaagccagcacctgagcagtaggctcctgagctgctgcttcctcctgagcgactagatcagtctcaaagacaaatggctcaagaggagcaagctcatcctctgcatctggcataggctcctctgctggcacaagctcttangctact

SEQ ID NO: 519 - DNA, 470 bp, Glycine max
  unsure (1)..(470): unsure at all n locations
tgggattgcatttgggcatctattttgactttcctatgttgtctctacatatataaaacagccccactatcccaactctgcaaaatcatatttatatatcattggggcatttcatcgagcacttggtgggcgcacatttagacataaattgcaagagaatgggagcaatgtggcatgccccattgcttcagaacacaacctaggcctaaggccttttcattcaaatcctcaattcaagaaaacaagcaccaaagcaaaccaaaacttccttacaaatataagcatgttctcacaatttagggcaccaaaggatgaagaaagcacatcaatggaaagcaaaaacaccaaggatggaatacttacttgttggagtgaattgaaataccaaaaacgaaagcaaaatgcgatcaaaaggcttangggagcaagaaaccgcaagccttcgtgttctctatctttgaatgaggggg

SEQ ID NO: 520 - DNA, 489 bp, Glycine max
agcttctttgagaaaacttccttgagaagcttctttgagaaaacttccttgagaagctagagcttagctacacacacccctctaataactaagctcacctccttgagaaacttccttgaaaagattcctaaagaagctagagcttagctacacacacctctctaatagctaagctcacctccttgagatgagaagctagagcttagctacacacaccctataataactaagctcacccccattccaaaaatacatgaaaatacaaaaaaaagtccctactacaaagactactcaaaatgccctggaatacaaggctaaaaccctatactactagaatggccaaaatacaaggcccaaaagtaggaaaaacctattctaatatttacaaagaagagaggatccaactttgacccatgagctcaaaaatctaccctaaggttcatgagaacccaagggccttctttagtagctctagcccaatctacttgg

SEQ ID NO: 521 - DNA, 564 bp, Glycine max
tcatgatgaatcaagattgattcaaagagttttgatgataacaaagatgatgaacacttcatgataacaaagatgatgatcttaagaatcaaagaatgagttcaagattgaatcaagtacacttcaaggatcaagaggaaagttgagttcaagaatcaagaatcaagtttcaagattcaagttccaagaatcaagatcaagattcaagacttaagattcaagaatcaagagaagacttaatcaagataagtattaaaaagttttttcaaaaactgagtagcacatgaatttttctcaaaacctgttcaccaaagagtttttactctctggtaatcgattactagattattgtaatcgattaccagtagcaaaatgcttttcaaaaagctttcaactgaatttacaacgttccaattgatttcaaaaagctgtaatcgattacaatgttttggtaatcgattaccaatgtgcttgaacgttgaaattcaaattcaaatgtgaagagtcacattctttcacaaagaaactttgtgtaatcgattacactgatttgggaatcgatta

SEQ ID NO: 522 - DNA, 476 bp, Glycine max
agcttatgttcatcaatttatgttctaaaattttttatttggctttttactagtattgagtgtttttccagctgtgttgacttgaatccattcaaactttaaatttccaagtttcagtaaatgctttattaatttggttcatttattttttgagttaatattattccaatttttattttcatgcaacttaaatttcaatacatgtataataattgatatatcatgaatttcaaacgatatgtgaataagacttctgctatttgcctgcaacactatctgttatatgatatactgggttattggtttgtcattttgcgtgatatgccattgataacacttgtattgctggaacctgtcttcttttggcatctctagatcaaagagatcccattgtctgtctagtctgatagtgaggtcctgttgtggtgttgctggccttctttctatgttatgctgcttctgttctttcacaactg

SEQ ID NO: 523 - DNA, 537 bp, Glycine max
ttttgctgaaaaattcctttttggtttacgctaaaggtggtgtttgggcattgggtgtgtggtaagcaagtaggccttgtggttgatttgggtggagggtaatgagaagggctgatattgactgagtaatgatgttgttgagctggtgggaagtttggccatgtaagaatggcagcctcaacatgggttccttcctcattctcatcctcttcatttgccccagttttctcattcatccaagcaggatgatcaaatttgcatttttttagacccgcttcgatccttttgccggcgaagaccaaatctgtaaagcttgaaggtgcgtaccccaccattttttcatagtaaaacactggtaatgtgtctactattattatgatcatctctttatccgtcattggaggtgccacttgagcttgctaggtctctccacctttgggcttattatttgaaagattcgtgcccctttttgtacatgttctgtaggtgtatcctatccagagccatatcacaattgtactgatattgccttacgat

SEQ ID NO: 524 - DNA, 510 bp, Glycine max
agcttgagcttctcaaggaagcttctcaaggaggtgagcttagtttttagatgggtgtgtttagctaagctctagcttttcaaggaagttttcgcaaagaagcttctcaaggatgttttctcatgaaagcttctcaaggaaactatctagtctataaatagaagcatgtgtaacacatgttgtaactttcttgaatgaaagtcttatgagatacaattcaaagttccacttctctccctcttttattccttcaatttcgtgctcccgccttctctctttcttttcctccattaaagtatcctcttcaagcttcttatccaaggcaattgttggtggtgaagctccttcttccttggctgattccctagtggatggtgccacccctctcctcttctccttttccttccgctgcatctccatggtgtaaaatcaccattgaaggaccccactgaagctcaaagatccagcctccatagaagccccacaagcaagcttccatcaagtggtatc

SEQ ID NO: 525 - DNA, 650 bp, Glycine max
  unsure (1)..(650): unsure at all n locations
ttcatgagaaaacttccttgagaagcttctttgagaaaacttccttgagaagcttctttgagaaaacttccttgagaagcaagagcttagctaaacacatccatctaaaaactaagctgaccttcttgagaagctagagcttagctacacacacccctctaataactatgctcacctccttgagaagagaagctagagcttagctacacacccctataatagcaaagcttcatggtgaatgtgattcaaaggtattttgatgataacaatgatgacaataaaagatgatgacaaaggttatgaacaaaaagctcaaagaataaataacaactcaagtgaatcaagaacaagtcaagagttcaagaatcaagaagaattcaagactcaagaagatagcctagaatcaagaatcaagattcaagattcaagatctcaagaatcaagatcaagattcaagaatgaagaaaagacttaatcaagataaatattcaaaaggtttttcaaaactntgaataacaaatgagtttttgaaaaaacctttaccacagagtttttactctctggtaatcgatgaccatattgttgtaatcgattaccagtagcanaatgagtttgaaaaagtttcaaactgaattacaacgctccaacta

SEQ ID NO: 526 - DNA, 470 bp, Glycine max
  unsure (1)..(470): unsure at all n locations
agcttgttatgaaaaccttcttatctatgcattaaatatctgtcattctaatactctaaacattctaatgcagatgcagtatatatgacaacaaatagcataatgtaaagaagaagggaaaaaaggatttaacataggtatttttatactagttcatcccaaccttaggctacatctagtcgtcacctaaactgatgagattttcattaacataaccaacaacatgttgtatttttacaactgccaaccacttgttggacttcataacatctcccccaccacaatcacacacatggtcttggcttggagataagtcgtctcaaccacaacatcatgggaaagaaaatctaagtatttttcacctgtttaggtgggcttaacccacataatgattctccttactcttaagaagcanaatccactcaaccatgacacccacttgtcatgggagaganncatatagtatttct

SEQ ID NO: 527 - DNA, 525 bp, Glycine max
ggagcaaattaagcataatgagtctatgcattattccattaaagcgttggtagttaagatggaaaaaatggcaatccaccaaaagatgctagagactcaaattgctaatatagttccactatgagacatcttgagattcttgaagctacaaagaaaaaggatgaggaaatagtgaagcctactacacaactcttggaggaaggctcaaaatatgtactactctttccttttggtgcaaataaattggaaaagataagaacctttctttaaaggtgaagatcagaagaaaaagcgcactcctcaggtaagacctaaaccattccttcactgctccgatatgagcttcttgggcattactttattgttgataccatttggaccgaaactgaaactgagagaaaacttagagaatggtccacaagtcttaatctttgatccatatggcgtgacaagtcttgtagttgtaaaaatagaccataagtgtaggatcaatacatcgccataagagaacaattcactacacat

SEQ ID NO: 528 - DNA, 416 bp, Glycine max
agctttgtcgtccatggatgtcggaatgtactaattgttgacattgggcgaccagagcaccctggtcgtgtccgtgctgctagagtcagtgtcacgatcaaacaatactttggaccggcttcaaagagctcctgcatgactacatccatggctccttaacacttggagcagctaacacaaaaaatcagggaccagctagaggaatcaatcacaaaaaatatgacttgacaactaatgttgttcttcatccaaatgcagttctaaatgaaatcatagatgcaatcacagggactcgcaactgtcttttaagcctgaggttagtccttctactgcttgtgtcaacacaaaggaaagttgtgtcaatccctataggtgggacccagacacgaatgactcacagaaatgtgggttatatg

SEQ ID NO: 529 - DNA, 543 bp, Glycine max
  unsure (1)..(543): unsure at all n locations
gcgatctgcctctatattttcaacaatcccatcttgcctccagataatgagggggtggtggagggtacatggcacagccccaactccatgaatccattcccttcctaatagcaagttaaaattaggcttagactgtatcaccaggaatagagttggtcgaactatactgcctacagcaacatctacttgaagggctgccgcctaataaccagattgaccctcagtaattcgaaagcacaatgctatgagcagatagagcagtgtcatgtgtcccgatcttgtgaagcatagatcgaggcattaagttaacagccgctcctccatcgatgagcactttgatgatgccaatattttcaacttttgctctgatgaaaagaggtttgagatgacttttcatctgaaaatatggctgttcgaaataagctaattgttcttccacacagccattgtgcataacatagtaacatactggctttgggtcagccatatcnaaatgatcgaactcactttcgatctcagtaacttgagactggacatcatatt

SEQ ID NO: 530 - DNA, 490 bp, Glycine max
agcttgaagaatggaggaacgagaatgtcttatcaagaagggaagagtagtgatgatttagagccaggtaacatggaacatggaatagatgctactccaataacctattgtgcagaaaacaatagcctttccaaactgcgtttgcaatcaaataagtttgaagtatctattgggggaaatgatgccggtccgtcctcgcagcctaaggtcaaacctctaaatttttttaactgtcaggaaagcagcaaaaataacccagtggagactaaaaattattccatcttgggccatagtaaggacaaggaagaagtggcatcacattcatcttcaaccaaacaaaatacagatgataatgataacatcgaatccaatgcactacctgatagaaaggaagaagagaatatttgcacagaagaataatctgggaagctgggataactcgttttctccaaattcactgcttccttgagagaacaacctgcaatgacac

SEQ ID NO: 531 - DNA, 542 bp, Glycine max
ttataccgatatgggctcaaaacggcagcaggtatcttcagtttccgagtaagtggtctccagggtctgctcatcaattcagttggctgaacaacatcatcctctttttcatttccaaaaccaccttcctttggccatatagcattgccatagccataggtgccctttgtttcaaagagccacctattatgatcaaaatctccagtttggctcctcattagtgccgactttgttgatttcatcatggacaatctcctctccattttagacattccacttggtggaggaagtggaaggggacgtccattatctacagccacttcatctagctctgtgttcttgtatggctccttgcatcctgggcatataccacctcctggttttacagcatctatataacaatctctgcatatcttgaaatcacactcacatgggagaatatcagcaccacgttcatcgctcatcaccttagaatcacaaccaggaattgcacatgaagatcctcttgcaccagccatctgcggatgatttgcttcagattc

SEQ ID NO: 532 - DNA, 506 bp, Glycine max
  unsure (1)..(506): unsure at all n locations
agcttgttgaaataaaccttgcattattattttattaaaatatatattaaaatttaaacatttaaaactaacttctaaacaattttgtttaaactcctatgtcttatctagttatgataacaatttatcacaatgaatgaatgaggcttaagtggaagagctaatgatgtctcctattgtggaaaattatttaaataaaatgtttaaatatatttttaatcattgcaatttaacgttttttttattttgtccttgcaaaattgcttatttgttttgagttcttgcaaattacgtttattttatttttaatccttaaaacactttagataacacttttgatatcgaaaaaatactatctaaaactctataaagaccaaaagcaaaataaacatattttacaataattaaaaattaaaaaatactaataattttataagacaaaanataaaactgtaaccactaaaagatatttaagcctaaataaataattttgaaatgaatgactc

SEQ ID NO: 533 - DNA, 590 bp, Glycine max
tccaagaatcaagatcaagattcaagactcaagattcaagaatcaagagaagacgtaatcaagataagtatgaaaaggttttttcaaaaactgagtagcacatggatttttctcaaaacatgtttaccaaagagtttttactctctggtaatcgattaccagattattgtaatcgattactagtagcaaaatggatttgaaaaaattttcaaatgaattgtacaacgttttaattgatttcaaaaggttgtaatcgattacaatgttttggtaaccgattaccagtgcctttgaacgttgaaattcaaattcaaatgtgaagagtcacatcctttcacataaaagctttgtgtaatcgattacactgatttggtaatcgattatcagtgattgtttctgaataaatcaaaagatgtaactctttaactggtttttgactttttcaaaatggttgtaagtttttctaaaagtcataactcttctaaatggctttcttgaccagacatgaagagtctataaaagcaaggctttgttttgcatttttaaaatctatccaaagtcaatctatcttttatatcaatccaatacaa

SEQ ID NO: 534 - DNA, 510 bp, Glycine max
  unsure (1)..(510): unsure at all n locations
agcttggcaacaggtgaaaaagtgtctgaaaaatctattccagcttgttgtgtgtaggctttagctactaattgagctttgtatctgtccactaccattaggtttatatttgagcttgtaaacccatctatatccaatacagtgcttgtcagtaggtaaaaagactagagacaagtgttatttgcttctaatgcttaaatttcttcagtcataacttgtctccacttagggtatggaattgcttgatgataaaaccgtggttcataagtagtggagatttgattgatgaagttgtgataagatgagctaagtcgagccatgaaacaataatgtcatattagatatggttgagaagacgcgaagtagatgaaattagacaagtaaaaaggtctcttatgctttctggatgaccttctaagaattttttgtggtggcatagactcaaaaactctanttgaagaagtggtaggaagagggacaggatttgaccgagtctttgttgattgagca

SEQ ID NO: 535 - DNA, 622 bp, Glycine max
  unsure (1)..(622): unsure at all n locations
tgtagaatggctagacataatacatggcggggtttggtttggttcaaggataaaagggatgccccacattatttccatgacacaaatgcaaagatgatgatttggaaattttatgcaaaactggtcatgcatgcacctatgcagacactcaagtgtcaaatttttatggtcatgtgatgctagggcttaggattcatttcctctattttaaatcaacccaatgtttccaaaatatgttcttttatcaatttgtgcattcatcctagtccattttgggtactcgggaaaatttcacagcattcacccttcaggtgtacacacattttttcaaaaactagttatgatcagtgaattttttcaaagaaaagttggaagtcatctcttttcaaaagcatgttggtttttcagctagacaacttattttttctttttttcttttttttttggtttttttttgaggtattttgctacctaaacatatatanggttttgtgagatatttttgctatatacatgcgtgtccaaggtatcttgctacctaaacatacatatatatattttgtgaagtanttttttgttacatacatgcatatctaaggtattttcactacctaaacataca

SEQ ID NO: 536 - DNA, 478 bp, Glycine max
  unsure (1)..(478): unsure at all n locations
agctttcaacttattgtgatgtattaaaccatccaaaaagttggtgtgatgatgcttttccaaaatagattatggtcaaaaatcctgcatccactatatacattattattatcaacaagatttaatgtcctgattaattgtataaagatttaaaaagattagcacgtactacagattttgaaatacttccttgaaaatcacattggtagntatatttcatagttttccttctttatcatgaatcagaattttcaatatacttttactttgaactcttgagaatgccacataaagttggccatgactgaaaactggtttaggtagatataacccaaccgattcaagagattgtccttgagatttatagattgtcatgacatatgaaactataattgagagtngcttctaatcatcttgaaaggccaggagaatgagatggtgataatgacattcatggaacatacaccaaactacctat

SEQ ID NO: 537 - DNA, 585 bp, Glycine max
tattattgttagggtttcttttgtaatggctggctaaacaccctagttggggatttctaatgaacagctgatgtaaatacttgatatctaattgattgtgttttctgtgttcaatgcttaatgtttgtatgcttttggtctgatcatccatttgagtgcatagttacgtgactttagcattgggaaatgtactgttgccttataacttgattgaagcacgattgaaacttagtcttacaagagggatctgcggattaagttttggttttaattatgttgttacaataatgctgtttagtctaggcctagtcttacaagaggaatctacggacgaaactcagtttaagttagtctaaacctaagagggttgtctaaattgggcctagtccaacaagagagatctgaggacgaagcttgtattgattctgtctgacgagggatcaaggtttagtaatttacgctacaacatataacacaagagcatgattgattagagaaatatatttttatgcatcagcttgtttgtttgaaagacccaacatttctaccctattgtgtcacttttacttacctttgcatttatag

SEQ ID NO: 538 - DNA, 528 bp, Glycine max
  unsure (1)..(528): unsure at all n locations
agctttctgtacaagcaatcaactcaaagtattgaaatttaaatgattgaacataaatcataaaataactgaaataaactaaaatgttcaaaatggataaatttaaatgtcctactcatgtgattgctcctgtgcatgctcattgagatccaacacatgagcagctggtgaatcctgagggataggctgctctagctcagatgctagtgcaaatggcatggaatcatcaggtatgggtactggggatggctctgggatctggtctatggaagtctcctcctcctgatccatgtgtacacctgcatcaaaacaaaagggctcaagaggagtgagctcatcctccccctctgttgttgntgttggctcctctagctcangctcctgngttacgaaagccccaccctttccagaaagagaaaagttgggctcctgccaggccacctatgcgtcaaactcatncatgctcatgatggatggcangcccaaagccctgaaggctctgcatgataaagtccctgcccctacgta

SEQ ID NO: 539 - DNA, 562 bp, Glycine max
  unsure (1)..(562): unsure at all n locations
ttaggagaaaccataaaaactaaggtggttcctaaacaaaaatcaattgaggaagcttcgccgagcatccccattgaaaaacctttattcaaacctttcaaagttagtgagaaggctaaacgaaaaattagggaacttagaaaaactaaatccttaattgagggcgtaggtgacaaccatagtgaattactaaacaagattggtagtttacttaaggtcattccagatactccccaagcctcagaaaatacttccaaaatggtaacaagaagtacctccaaattaattaatgttattaatgaagatagtgaccaaaactcagataacacaactgagataggatcagtgtcagaaaagaatataaatccaattaattccaaacactggaaaacaccctccaaattatattatcaacgtccaactgcccctgaccttctattagaagaaagaggtgaaaacaattttaaaagttttagtgcaaacaacatctatgaatggaacatagatgcacanacggagtataaaatcatgaatacactccaacatatgaccatggtagcta

SEQ ID NO: 540 - DNA, 491 bp, Glycine max
  unsure (1)..(491): unsure at all n locations
agcttgaccggatgtaagatacatcttcttcaaccttagtcattcttgactccatttcattgaagcgcatatccacttgcaattccaaagtatcaaacctctcaccaacaaaggtttgaagaccatcaaagctttccataatcttcgaaagaagagatgaatcttctccttcatgtccttcttcaccagcatttctagcacccttcttcacccaagagccatcatgctcctttatataaccaaaggatgctatgactgaagcgcctataaggaatgatctctttattggaacataaggttcagaatcaagagggatgttgaagtgttgaaggaaaagggtaacaagatgaggataaggcaatggggcattcaatcgcaatgccttatgcatgcgatatctaacaaggtgtgcccaatctaattgtaaacctttatgaaaggcccacatgacaatgagatcttcttcagaaacctgagcanggtttgaagat

SEQ ID NO: 541 - DNA, 614 bp, Glycine max
tccgttcccgagagcatctcttatttaagcattttagcctttgctttcttgtagcttaggaaaaatgccatttcttcttctttctttcttccaaatccatttctaaagttccaagtactttctccatcacccacatccaccattagccaccacaaaccatcattgttctccattgaaaacccacaccgagaggaacccttcaaccgaagcagaatttccaacttggcttgcggtttcggtagagaacgaaaaccctaatctgatctttcgttttctttcgaggtaaccatgattctatgcttgtttcttgttagtttcatcctatctttgcatcttttctaactttgcgccatttcatgtcttatgcttcctttgaaaaaccttagagaaagagactttgtaaacattatcctttcatgaaatgcatgttattttcgtaacctacactgaaccccggtcacattggcgtggtcggaatttccaaattacgttcctttctaaaaccccgaaatactctcagctctctcatgtagtgatgtgggtgtctgacccagagcactgtgtcataccctaaattccttcggggaccctttgcttaatgacatgcgaccttt

SEQ ID NO: 542 - DNA, 506 bp, Glycine max
agcttgtactagtcatatatatgttacaaaacaatgaaaacaaaaattgaatcgtttattgcagatacagaaatacttaaacaaacctgccaattaggagttttgcggctttttgcaaattccgcccatgtttctagatcaaggccatacttgactataggatcaaatatttgctgactttaatggccagcaaaaacaaattttgaagtcaatgaaaacttaaatggcctctattttgctgcatctgtacacatcaccttttttttttgcattcaccttcagggatatcaaatttgcgctgcacaacaaaatgagttatgtaacagtatgtaaatgaatcctttaaaagtaacttaacaacaaaatcatgaatacaagtgtatttagatttacataccaaaatatctttccatattaagctctttagattgtcgaggacaacatttcaattcgcgtgtacaataggaactttttcccttgcgacaacccctaaataactgtgaaat

SEQ ID NO: 543 - DNA, 426 bp, Glycine max
cttgcacttgagtgatgtagctccttgtagagcttgtaagcctttttttttcttcatcaacggagtcctttgcttcttgaagattacatggggtggaatggagatggaataatgatgacttggagatgccactttctggagaagattagtcaagaagaagctcaccaccatatgctgccattgataacatctttcaagttatatccttggactgctggactgggtttatttgtgcacaatatttcatgcgtctaaagcttgctgcactttgcccattttgtctcctatgatcggggttgaattaaggctcacacctgaccactatttatagcctcagtgtcacacaaaattctacggatagcttaatttctatccaaagttcacttgagtttgaaattgaatttgtgcagccaaattttggaacca

SEQ ID NO: 544 - DNA, 593 bp, Glycine max
agcttgcccttacactttgggaagaaaaatataataaacttttacacaaaagaatgaaagttcaatcaatcttcaaggatcaaccacaccaaaattttttttcaaaggatcaaacctggagcccttaaaaataagaccaaactcggatcttccacttggaatctacacgtttcgccattgtcatagactcagtcactggttgttatgtattaataaattctatgtaatatgacactttaatttgcattaaagtcaaaacttattttgttttatttttaatagttacgtaatttatatttattgaatttaattaaaatacattcattgtaaagattttttttatgcttatctcatcatcatgtattgtcatatagtaaaattattgacttttattataataataataatcaaaatatatatgtaaaaattatttctaatagaataagagttatgtgaacattaaactcattatttatcaattcaatacttgttttttaaccttatagaacaatggtacttttttttaataatttgaaaattcactcattttaatttttaatatttgattggaacttaatatattatttattaaa

SEQ ID NO: 545 - DNA, 373 bp, Glycine max
tgtatatgcataagtattacaaataccggaatgtgcacatgttcaatttttggtaccccaaatgctttgagtatgcatgtatgtaaatttatccaacgaagtgcatgtgatgtacgtatcaaatacaccttggaagtacatataaataatctaggtaacggaggtgccttgattgcacatgggtgcatttttcttaattgtaagaatgtcctgtgcaagtgaacattcgtaaagaaatatgtgcataagtttgctctaaatttacattgatgtttgtgtctattggaggaggttggattccatttttgttttaagagtagcatttcttggtaaaactaactttccaaatggttgccttcaccggaaaatggcc

SEQ ID NO: 546 - DNA, 394 bp, Glycine max
agcttctcaaggaagttttctcaagaaagcttctcaaggaagctacctagtctataaatagaagcatctgtaacacttgttgtaactttgatgaatgagagttttgtgagacatacttcaaaattccacttctctccctcttttattccttcaatttcgtgctcccccctctctctttctctccctctttcttttcctccattgaagcatccttccaagcttcttatccaaggcttatcttggtggtgaagctccttcttccatggcttattccctagtggatggcgcctcttctcacctcttctcctttgtcttccgctgcatctccatggtggaaaatcaccattaaaggacctcattgaagctcaaagatccaaccttcatagaagcccca

SEQ ID NO: 547 - DNA, 537 bp, Glycine max
tctacttatgtggcagggcgggcttccttcactttcttgtctccaacgcgagctttgaccactgctcttccttcccgcgatgcttcttttcatatccgcctgagtgggcttatagcctaaaccatacttcccacgatttcctttggcatttatcaggctagtcatgccgccgttgtccttgcctaaacccattccgggttcgtaaccgttccctaacataactcgggccatcattactgctacatcggacaggcaaggctgcccagagaagaagtccacggaggaaatgctgaccacctcaaaagactggaaagcggtttctaacgattcttctgcggcttccacataaggcatagaggatgggcagctcaccaagatgtcttcctcgcctgacacgatgaccaagtgcccctccactacgaatttcaacttttggtggagtgtagagggcacaactcccactgagtggatccacgggcgccccaacagacaactgtagggggggttaatatccattatttggaaggtgacttgaca

SEQ ID NO: 548 - DNA, 519 bp, Glycine max
agcttatcatgagagatatgtcctaacctattatgccaaacattgcatttattgaaagggatggtattgattttacaagtgtaggacaactgagttggtgatgaagataggatgtataagccaacacttaattcagctgctccaatcgtcctcaaggaggagttgtcctgtatagaacaaccagtagggtgaaaaatcatactacaatgtagattagctatgagtcttgaaactaaaatcaagttgaatgtgaaagaaggaatatacaagacatcagtgaggtaaagttgatcattaaaatgtatagtgcctgccaaattggtttgaatttgagatccatcaggtagtttaacaagtataggtctaatttgcttaaggcattgaaactgagtttgggaaaaacacatatgatcagtagctccactatccaaaccccaagagtttatgttggaactataagcatgaagagtggcacagaaaatacctgaattctcattcttatgagagctaaccaactga

SEQ ID NO: 549 - DNA, 579 bp, Glycine max
  unsure (1)..(579): unsure at all n locations
ttgaaggacaccctgacaaaatatgaacttgttaaacctacaccatcaaattaagaggtcataaaatatactatagtatcaagacacgaatcacctcctcttcttcaatgttatctgcattctgctttagttgtaaaatggatgtttcaactcgagccactaaatactgactagagtgctgcaacctatctttgaactggacaaattcaattacctggaatataacattggatcaattcaatcaactccatggacgcggttctttcaacattacgtcagaaccgacatgaatagaatattatcatgcaatgtgtacttctttattttgcacatacatgagcataaccatgtcaatcaaactatgcaccacatggacagatgcactacttatgttttgagtatgtcattcaattaagaaaacaacaaaacagggtcaaatcttgacttcatttctaacaaggttgcgcagagattaaaaaatttaagaaaaaagttcctttaatgtttttgactaaattaaccatgttcccctcagaatntagaattctaacagaattgcctccatcagtattatcaatg

SEQ ID NO: 550 - DNA, 431 bp, Glycine max
  unsure (1)..(431): unsure at all n locations
agcttgtgcgaatcaaatcactcctgcattttatctctagcatgcattctttctttctttacccactcctcacgtttggttttttagggaaaaacaccataactaaacgcgccacaaggcatccctatcgcaccagatccaaatctagaacgatgggtgatcaagaggagactcatgaacagatgaaagctgacatgtcggctctgaaagaacagatggcttccatgatggaggccatgttaggaatgaggcagctcatagagaaaaatgtggccaccgctgccactgtcagttcggctgccgaagcagacccaactctcttggcaactgcgcaccatcctccctcaaacatagtaggacggggaagggacacactggggcacgatcgcaaccctcacctgngatataatcgagcggcttacccttatgga

SEQ ID NO: 551 - DNA, 319 bp, Glycine max
tgcacttgaggtatcaaaaccagtgggaggatctacatatactttctcttggataaaaccattcaagacggcactttttacatccatttggcaaagccaaaaatccattatcgatgcctatgctaataatatccttatcggcttctaatctaccaaccggagcatgtgtttcctcataaaccaacccttctaggagactatatactcggactacataacccatattgatttgcaaggactatagaaaactaataccactagctgataaatacccattttgctacgataacaggataataagcaggcttctcgactaatt

SEQ ID NO: 552 - DNA, 250 bp, Glycine max
agcttgtaggattatggggtacccatcacatgtggtactaggtggcggtcgggcgatggtgcacaacaagtttttccacatccacaatgcgcgcataaacccaccatcccctgtagcccacctccaactgagctcacgtactcccacgtagcccatatcctcgtttctctcaacaccgggtccccatcaatccttccaagcttccccaacatcaaagtaatacaacattcaaacagcacaaactatcaca

SEQ ID NO: 553 - DNA, 597 bp, Glycine max
tcaagatgtgatgtagctccttgtagagcttgtaggcctcggatcttcttcatcaatggagtcctttgcttcttgaagattaatggcagtggaatggagatggaagaatgatgattggagatgccacttcaaggagaagattagtcaagaagaagctcaccaccataggaagccattgataagagcttgaaagtaagagaaaaggagtggagggaaagggagagaaggagcacgaaattttatgcgtcaaaagtagtctgaactttgaagtttaattctcaaatgatcaaagttgaaaaaatgcacacacatgaccactatttatagcctaagtgtcacacaaaattcgagggaaatttgaatttctattcaaattttacttgagtttgaaattgaatttgtgcagccaaattttggaaccaaaatttcactaattatgattagtaaattttagctatggttcagcccactaatccaagatcaagtccaagattctccactaaatgtgcttaggtgtcatgagacatgtaaagcatgaaggacatgcacggagtgtgactatatgatgtaacaatggggtgtagcaagcaaatgctc

SEQ ID NO: 554 - DNA, 449 bp, Glycine max
agctttgcggatttggacttcgccagcggtaggatcaaagcgggtctgaaaagaggcaaatttaatcatcccacttggacgaatgagaaaactggggcaaatgaagagggtgagaaagagggagaaacccatactgtgactaccattcctatacgaccaagtttcccaccaacccaacaatgtcattactcagccaataacaaacctcctccttacccaccacccagttatccacaaaggccatccctaaatcaaccacaaagcctatctaccgcacttccaatgacgaacatcacctttagcacaaaccaagagcaccaaccaagaaatgaattttgcaaacctgtagaattcaccccagttccagtgtcctatgctgacttgctctcatatctacttgataattcaatggtagccataaccccaaccaaggttcatcaaccttcatt

SEQ ID NO: 555 - DNA, 447 bp, Glycine max
tgtatatgcataagtattagaaataccggaatgtgcacatgtgcaatttttggtaccccaaatgctttgagtatgcatgtatgtaaatttaaccaaggaagtgcatgtgatgtacgtatcaaatacaccttggaagtacatataaataatctaggtaacggaggtgccttgattgtacatgggtgcatttttcttagttgtaagaatgtcctgtgcaagtgaacattcgtaaagaagtatgtgcataagtttgctctaaatttacatagatgtttgtgtttattggaggaggttgtattccatttttgttttaagagtagcatttcttggtaaaactaactttccaaatgtttgccttcacgggaaatggccccgatgaagcttgcctcaaagacgtccacgaatgataatgcggtcgaaggaactacttccgctcctgagtatgac

SEQ ID NO: 556 - DNA, 523 bp, Glycine max
  unsure (1)..(523): unsure at all n locations
agcttagaagggccgaaagggatgagtcaatggtggaaagtatggtattagaggataagttgaaggcttgtcaaaggttgaaggaagtttcaccgaacaactgagtagaacgaaagagaatatgttgacaatcattgaccagtataaagagaagctaaacctagctgctagccatgggcagagactagagaataagcatgcgaaggtattggctctgcaagtggaaagggaagtaagagagagggtgatagaatcattgcatggggaatctgtgaaatggatggatagattcgctctcactctgaatgggagtcaagagcttccaaggcttttagccagagccaaggtaatggcagatgtatactcagctcccgaggaagttcatgggctttntgattattgccaacacatggtcgagttgatctcccacataattaggaaccactgaggagtttgtatttatgctttgactttgccagataacaatgttgtttcttaatgaaaatgagtcttgattcaaccc

SEQ ID NO: 557 - DNA, 384 bp, Glycine max
tctcccccattttcttaaattgggggagaagtgaaatggaaatgggctcaaccccgtaagcacttctttctctttcaaatttggttataaaaattgtttccgtgaataaaatacaagcccgaccttttgcgtaacgttttcgagagtgatttcacgaaggattttgaccggtcttctacgctcttaaatcgctcttcatcgatcttcggacttcaacgggtaagtaccttgtaacctgcttttcgattcgttctatgtacccgggggggatcacatcgagcttcgagggttttatttttcgatatcatatactcttcgcaccccttatgacgagcttgagccgtttcatttaaaccatttgtctcttaccctacaaataaaata

SEQ ID NO: 558 - DNA, 556 bp, Glycine max
agcttattagtttatacttgatagacatgatacttgttattgcagaagcacaaattctttgttaattgtaattagtcaaactatgctttaaagcaatatgggaattttagactcttcctcgttgaaggttatggagattgtattcgaatttctagaatatatggttcatgtgtaccggagtctttgtttttctttctgtaagtgttgacagttttaacttccttgatgaagctgagaacacaagtttatacagcgttttttaacctttttttttttatctagcttgacctctgaagtttttttttttggttggtttgtttgttttaaaagagtaaacttccattagttgggaacaccgcaccggattttgaagcagaggccgtgtttgatctggagtttatcaaggtatttattacacaatgccattttgaaaagctgctgaagaaaatgaagggtgtgtgaagacttggcccatttacaatctccccatagtttaaggtcttaatgattcatttgtatgaagaagctatggcctatgactgagagttcttagcat

SEQ ID NO: 559 - DNA, 553 bp, Glycine max
  unsure (1)..(553): unsure at all n locations
tcttgttcttctggtgaagtaaaagtgagattgctgggataaaccagttcttgatctgatttacaaagccatggaaccaacagagtaactttctgctttgcagattgtgataaatatgcagctcgaaatagtgggtttacagctgttcccgtcatccaaggaagactagcagttgtcactattgcaacatgtctttcattgtccaatggatcatgctttgcatggtctgtccagaatccaccttcataccggtgccctgtgctctgaaggacacttgctattcgtaaatccaattcatcatttatgtttccattccctagaacagaagattcttccccagagagggaatgcaatagttgatggtttttgcatttgctatacaagctttctactatcttgtcacatatgtctgcaatgcaatcagattcgaaaaaattattaaaattgaataacagatcgagtgaatcctanactgtataaactagctgactgcctagaaaactaccgcanagaaagcaaagatataatcctgccagctcatgaaaaatagatc

SEQ ID NO: 560 - DNA, 463 bp, Glycine max
  unsure (1)..(463): unsure at all n locations
agcttctatttcaactgagctctttatatttcgggaagagaaatcaactgctgagagaaaggtaattctatgttataattgaaattaaaccaatttacagttatctgttcaatattgaaatccccaacctagttaccctaaaattattgtacattggtagattctatattatgtttatcgcttaccaacttttgtaccctacttctgattctgctgcgttttgcatgccatttcaaatgaggacttgtacaaaagatcacaagagtataatatgagtctgctacagtacaatagtcgccttcagtcggatcttgaaataactaatgaggcacataaacgattggagacggagaaagcaaccattgttgaaaacctancaatgtgagaggccacaacaaggcattacaggaccaggtgccatctcttaaagtaagttgttttgtttgattattgattttaatgc

SEQ ID NO: 561 - DNA, 218 bp, Glycine max
gacattattcacattggaaagtctactgcagtgtactgttgaataatcaagatcataacaaatgccatacatgtcttctatttctagacacaatgaatcactatattcgacgcatgcctttctttctatccaaaatcatcataaatgtgtgatacagacctcattgccatgcagatgtacaagtgctttcctctcaactctgcggaaaagggctttat

SEQ ID NO: 562 - DNA, 491 bp, Glycine max
agcttggtgatgtgtgtatccattcctgcaaactgtgcatccatagcatcaatacgactgtccaatgagtcaaagcgttcactgacgaaggtgtcgagtccatccaacctgtcaagaatgttgtgcataagagatgaagaatcatctctctgaggaggcggtgatggagaatggtcttcaacggcctgtactggagcatctttcttcacccaagaaccatctctctctttgcggtatccaaaagaggagaccacattcgcaccgatagagaaagatctcttgactttaacaaaaggttcagagtcaagagggacattaaaatgttgtaagaacaaggtgatcaaatgaggatatggaagtggagcattttatcgcaatgccttatgcatgcgatatctcacaagatgggcccagtcgatttgacgaccggttaagaaaacccacataattattaaatcttccttagaaacatgtgcaaggttggatgatct

SEQ ID NO: 563 - DNA, 559 bp, Glycine max
tggaggtaaactagatgccttggttaacctggtaacccaactggccatgaataaaaaatctgcacctgtcgccagactctgtggtttatgctcctctaccgaccatcacacaaacctttgcccttctgtgcaacaatctgaagcaattgaacagcctgaagcttatgctgcaaacatctacaacagacctcctcaacctcagcagcaaaatcagccacaacagaacaattatgacctctccagcaacaggtacaatcccgggtggaggaatcatcccaaccttagatggtcgaatccttcacaacagcatcagcaacaacaaccttattttcaaaatgttgttgaaccaagcagaccatatgtctccaccaatccagcagcaacaacaacaacagccccagaaacaacaaacatttgaggctcctccgcaaccttccattgaagaacttgtgaggcaaatgactatgcaaaacatgtagtttcaacaagagaccagagcctccattcagagcttaactaatcatatgggacaatgggctacatagttaaatcaacaaca

SEQ ID NO: 564 - DNA, 497 bp, Glycine max
  unsure (1)..(497): unsure at all n locations
agctngtagaaaattcaaacaggaataactttttactcggatgtctcattatgtcccgtaatatatcgagatgcttgaaattgaaaacggaagctcgtagcaaatgcaaaacacaataactttttactcggatgtccgattgtgtctcgtagtatatcgagacggtcgttattaaaaacataacctcgtagcaaattcaaatgacaataactatttactcgaatgtttgattgtgtcccatagtatatcgagacgctcgtaattgaaaatagaagctcttagaaaattttaacgacaataactttttactcggatgtccgattgggacccgtaatatatcgagacgctggaaattgaaaacataagctcttaggaaattctaaagacaatgactttttactcggatgtacgattgtgtcccgtaatatatcgagactctccaaattgaaaacaaaagctcctagcaaattcaaactacaataacttttactcagatg

SEQ ID NO: 565 - DNA, 563 bp, Glycine max
  unsure (1)..(563): unsure at all n locations
tgaccaggaattatttggatgggttggatgtggaattcaggttgttcctggtgcggagatgatggtactgtgggtgaaccagaagctgcagtttcttttggtgaggtagccatggaaaagcagagcgtttgaaatgatttcgtaaatctcagaaggctattgggaaatgctggtaaaaacacgaatgccaagcagatataaatttgaatgaagaatgtagaggggcgtgtgaagcaacggtcgaatttgctttgtagtgaacgtgctattaatgttaagtgattcgtttgggcacgttcagattgcagtagctgctataattcctctagcagacaaatgcccagcttgcccctcagtttttcaaactgatttgcatccaaagcctttgtgaaaatatctgctatttgttcctcagtgtcaacatgcttcagtgtgatcactttatcatcaacaagatctctgatatagggatgtctaatgtcaatgtgcttggttctgctgtgttgaacaggattcttaganatattaatagcactcatgttgtcacagtacaatgtcatgac

SEQ ID NO: 566 - DNA, 450 bp, Glycine max
agctttttctttcacaatcagtctgtctattgactaacaattctactgtaagttcacactcttgttctttctttgttcaacatgcatattcgttcaaattcatgaaaaagaaacatagatgtcatcttaagcatgcattcaatttgaaacaaggcatacatccatttcataaaataaataaactacttcattgccataccaacaaaagttaagttaaactgttccagatgcttcaggataagcaactacactactcatgcacaaaaataataaaatgtaaataatgtactaacaccataattatactaatagatcaaaaagcacaaaaaatcaacagaaatttaaaagtcctgtgattggtcctgggtgtcctgtgtctgagcctctttctcttccaacaaatgaagtacaagagtagctactggagaggcattcggagactggactggg

SEQ ID NO: 567 - DNA, 620 bp, Glycine max
  unsure (1)..(620): unsure at all n locations
tgtgactcttggcaatttctttaaaactagtcacttaaaaagttgaattttgaaaaaatcttcagaaacaagtcacttgaagaattgtgacttttggaaatttatttttcgaaatcaaacactggtaatcgattaccattaaggtgtaatcgattacacatcagcaaacgtgactcttcattttaaattttgaaaattaaaacatttagaagctctagtaatcgattacacaagtttaaaatgatttgaaaatgtttaaacacaagttgtaactcttgaaatttgaaatcttaacattttaaaacactagtaatcgattactaccttctggtaatcaattaccagagagtaaaactctttggtaatgattttgtgaaaacttcttgtgctactcaatgttttgaaaaactcttttagtacttatcttgattgagtcttctcttgatttttgaatcttgatcttgattattcttgaatcttagatcttgaaccttgaaacttgattcttgaatctttgctagaaactgtgcttaactcttgattctttggcttcatcaaaataaccttggaagacattgcttncacaatctccccctttntgatgatgacaaatctgaaat

SEQ ID NO: 568 - DNA, 538 bp, Glycine max
  unsure (1)..(538): unsure at all n locations
agcttgtagaatggctagacatgatacatgtcagggtttggtttggttcaaagataaaggggatgccccacattatttccatgacacaaatgcaaagatgatgatttggaaacttcatgcaaaactggtcatgcatgcacctatgtggacactcaagtgtcaaacttttatggtcatgtgatgctagggctcaggatttaaatcaacccaatgtttccaaaatatgttcttttatccatttgtgcattcatccgagtccatttcgggcgtccggggaaatttcacagtgttcacccttcaggtgtagacacattttttttcaaaaactagttatgatcaatgaatttttttcaaagaaaagttggaagtcatctcttttagaagcatgtcggtttttcagctaaacaacntattattatttgttttctttttcctctctttntcttacttgctttctttttccttaattgctctctctttcttactcggcttctttttccccttattaattttattttttattttatcatgatttttg

SEQ ID NO: 569 - DNA, 522 bp, Glycine max
ttgagggtgcgcagcccaccatcttttcatagtagagtaccgataatgtgtctaccatcacgattatcgtctccctttttgcacatgttctgtagttgcatcctatctggaaccatatcagaatagtactgatactgcctaacgaaggcaaccattaggtccttccaagtatggactcgggaaggttccaagttagtgtaccaggtaacaactaccccagtaagactttcttggaagaaatgtattagcagttcctcatctttgcgtatgcccttatcttccgacaatacatctttggatggttcttggggcaagtagtccccttgtacttgtcaaagtccagcaccttgaacttgggaggggtgatgatattgggtactaggaacaactcttctaggttagcaaaggcataatctttacctccttcaatggccctgagcctttcctctttcccatttctgccatagcatgagggtttttaaccactgtggaatgtgagggttgtggttgtgggtgacactg

SEQ ID NO: 570 - DNA, 422 bp, Glycine max
tcctttagtcgacctgccgcatgcaagcttctgatacggttggttcagcaaaagtgatttacagcaacacaaccagcaaactcgggccatttgttgctatttgcaacttgcaagtctgaaaggaccaataggaagacaaaaagttgcaaagactatgtttaattcggaagtccaaaccattttccttatgaatattccagatcagtagttagttaagattttgttctttgaaatattttttttttggaaggcagttctttgaaatatatattaataaaagagagggatgaggccaggtgtctttaaatagccgacacagattttttttattctttctaagtgagcgtaaaacataatatggaaataagtactatgtttctaatcacaattttacatccagtgctgcacaggtgctttgcacc

SEQ ID NO: 571 - DNA, 485 bp, Glycine max
tcagcaacttaattaccacataagctccaatggatgaacagatttagtggacacaggaaactgataggggaaacttgaaatccaatttctgcaacaaaaaaaaaaatgctagtgttcgctatataatgcatacaagttcataatttgacgaattgatgattgagtaacaaaggcgagtcacaatgaatgctacatacacagatatggattgtgcaataagttgtaaagatcgccacatattttcttcattatagatggaacacaaacgtagaagatcttgaccatctggagatcacaatcatttactcctcttacaaaagaccccaaaaactcttcacttcattcgtatcactcatcatgagatgaatattcaaaaattactcccttccaaatggagctttgagaaccatggataaaacctaagaaaaccatcacaccttttctgaccattctaaaacataattgaatcttgcaccatatataca

SEQ ID NO: 572 - DNA, 427 bp, Glycine max
agctttgatgtgaaggaccttaatttccctgattttgtatccaaccaaggtgaggaaacaagggacaaaagtgattccacaatgcaaatgctggtcatcctcacttctcttagcacatcaacaaccaacactagcttttgttcattaaacattggagggtgcatggtggctgtttgactcttcatacccttcttcaaccacttcaatgtttctttcttcagtttcttcctatagcaattgtaggctgcgattttttcttcaattcctggatcaccaatgcttgctctacgcaaagtgaattgaagttcttggaggtgttcttttactagcaagagaacatcttttgagatgccacacacctccaacatcctcagagatgactctgacacatcatcaaaccatttttcttctgtttgatgggcaatag

SEQ ID NO: 573 - DNA, 505 bp, Glycine max
ttgactccacaatctgaattgtcttcctaaaggatttatcttgttaccagcagtctagggtcttgaatggcttcagactccaatcagcaataattgatctcatcacaattggacagtggtttgagtaattcctatccagtatgaattgcgtacttccactccatttagagaaccgttcaacagatacaagaattctatccagccggcttttagctgtcccgtttggcctataccaagtaaatttgcgacctacacttggcacatgctcaacttctaaatccactatccaatcattaagttctgacacgatcccccctccttgctctctttggccaacccccactcattctgacagtctccttacacggttgaaatcgccaactatacaccacaatttgatatgacttgaacttcttaattgtctaatcagattccacaggtttcttttcagatatgcatcacaaggggaatatatattgacaattgtgattttttcgccatcacc

SEQ ID NO: 574 - DNA, 480 bp, Glycine max
agcttctgtccctgaaaaactggttcttatatgacaacagggagtgaagattgctgaaaaccctagccttgcaacaagtcctagggaagtagacctggagatggataagaagatccgcagtattgtgagtagcattttgaaagacgcctctgttcctgatgctggtgaagatgttccaacatcctccaccccgaatgtttctgtgcctaatgttgataaagatgttccaacatcttccgctccaaatgctgaagccctcccttcacccagtgaagaggaatcaacagaagaagaagatcaagccacagagaagacccctgcaccacgggcaccagaacctactccaggtgacctcattgacctagaagaggtagaatctgatgaggaacccattgccaacaagttggcacctggcattgcagaaagactacaaagcagaaagggaaaaacccccatcaagaggtctggacgaatcaaaac

SEQ ID NO: 575 - DNA, 577 bp, Glycine max
tctttgagaaaacttccttgagaagctggagcttagctactcacacccctgtcataactaagctcacctccttgagaagcttccttaagaagattcctaaagaagcttgagcttagctacacatacctctctaatagctaagctcacctccttgagatgagaagctagagcttagctacacacccgctataatagctaagctcacccccatgacagaaaacgtgagaatgccacaaaaagtccttactacaaagactactcaaaattccccgagatacaaggctaaaaccctatactactaaaatggccaaaatacaaggcccagacgaaggaaataactattctaatatttacaaagataagtgggctcatacttagcccatgggctcgaaatttaccctatggctcatgagaaccctagggccttcccttggatctctagccaatctactcggagtctcttacccaatgcccttacggggtaggattgcatcagtatgtttgtccctgtgtatgttggttttcaagagaaattgagtttttaactaagtggatgtgatatatttgttattgatga

SEQ ID NO: 576 - DNA, 552 bp, Glycine max
agcttaaccgagacttgcactcccagttaaggggccagtagtttccttttaatgattcctaggccaccccctgatattggaggagggccaactgtgcgagcacaaccagagagggaggctatcacacagctactatgcataccggggcaagatttcaaccgtgccgctgcaaagagacgagtgcggatcatgcgcaccaacatgaccactcttacacagatatagatgacattgctacttagcaacattctgcccagcgaccgcaatgccaatctccccctgcggaagtatcagttggtctgtgccgtcccgacataggtaggtatgcattatttccaactaatttctaatgccatctactatttgtagggatcgcgcccacaagacacccagtggacccggaaaagtccaacaaggccttggggtttctagctctggttacgggcctctgttagtcctacagggtgcccgttccccccagcaaggtcatgccatcgtgacataggtaagtatgcacttctctcaactgatttctaatgccatctattgttt

SEQ ID NO: 577 - DNA, 555 bp, Glycine max
ttcttgagaaaccttccttgagaagcttctttgagaaaacttccttgagaagctagagcttagctacacacacccctctcataactaagctcacctccttgagaagcttctttaagaagattcctaaagaagctagagcttagctacacatacctctctaatagctaagctcacctccttgagatgagaagctagagcttagctacacaccccctataatagctaagctcacccccatgacaaaaaaaacatgaaaatacaaaaaaaagtccttactacaaagactactcaaaatgccccgaaatacaaggctaaaaccctatactattagaatggccaaaatacaaggcccaaacgaagaaaaaacctattctaatatttacaaagataagcgggtcatgcttagcccatgggctcgaaatctaccctaaggctcatgagaaccttagggccttcccttggatctctagcccaatctacttggagtcttctacccaatgcccttgcaagataggattgcatcacatgtcatgatagttttgaaagcctcatttg

SEQ ID NO: 578 - DNA, 633 bp, Glycine max
  unsure (1)..(633): unsure at all n locations
agcttactttatgacaaattgacaatgctgttacacaatttcaggtgaatcaaaaaatgatccttacactaacggctagtataatgtcttggtgcctaaaacaccctcgtgaagaaaggacagtgggaacttcagataatgagagtgggagtcaattggagactacatcaaattcaacactagatgactctgcctctgattcatcaatagatgagaatgggaacatgtaaatatatgcctcgagtgaaaccgtttttttctttttaatatatacatatatttgaaccactctttttagttgatcaaaagatcaatgtatgacactaggtaatttaatggtttcaaagcaaattttgttcaagcagctatgtaaatagtgaggtttntattttttgcaaagttggaacctcagttatgaggagtgnctttttccatatccactttgaaagaaaaaaaaaaacgctactgaacattcagtattaaccagaaacgagttaagcatacttttatttttttatgaattattatgcattatttctaaagcatgttcagaaaaattgtattctaaatgccatgaaagttttaaatagatattattatagcttaaatatgttttaatctttgaataatttt

SEQ ID NO: 579 - DNA, 541 bp, Glycine max
  unsure (1)..(541): unsure at all n locations
tgtaggattatggggtacccatcacatgtggtactaggtggcggtcgggcgatggtgcacaacaagttttccacatccacaaagcgcgcataaacccatcatcccctgttgcccacctccaactgagctcacgtactcccatgtagcccatatcctcgtttctctcaacaccaagtccctatcaatcctcccaagcttccccaacattcaagtaattcaacaatcaaacaccacaaactatcacagccaagaaaacagggcaaaggcagaaaactctgcccaaaacaccaaccaaaatcacagcttttctcacttaaagaccccagtaacaattccttcgttccaattcgttaaccgttggatcgactccaaaattttactggaagtctctagtacataagcctacatttttaccgttgggatctactagcaaacatgcagaactcattctacattactctttccacaaccagcaaatacatggcatttttctgcacttatgcaaaattctgctgcacaatttcacagcanaattctgcat

SEQ ID NO: 580 - DNA, 521 bp, Glycine max
  unsure (1)..(521): unsure at all n locations
agcttatggttgaaggaatagctcgcccaagcgagctggttgcttaggcctgaaggcatttcatggcctangcgagccatatgctagcctgggcaagcttaggtccagaaaaatccacaaaaggacccttttgccccctttcccttgtatctttttgctttcttgatcaaaactcggagtgatccctggcttcgcactgtaactagtgccaaacaccgtaattcaactagcaatgatcaaaacatcatattgaatgatatttcccggatgaaattagggtctgacaacttgttatcatgataacttttgcattgactttttgttgatgaatgaaattagttaaatgtgttttagaaaaaacaagcttaaatatgtttaaggtcactgataaatgactaaattttattttgggtccctaataattattttggtgttttaagtgtttgatatatttaaacttttgttttgattccctattgtcagctaagtgatgatatgacaccatcacaatcgttaataat

SEQ ID NO: 581 - DNA, 606 bp, Glycine max
  unsure (1)..(606): unsure at all n locations
tgaacttgcccgctaagcatgggtgtgtgctaagcgagctgtccaattcttccaacttttcttcaaggctttttcttccagtttttgcatcaattttcctctcaagcacttgaaatcttcttcttttgacttctacttataaaaaattgtaaagatgttaatttcttcattatttcattaaaacaatagtaaagtgaagaaattgcaatcattattagccagaattgactgtcaaattaactcagatttggcagttatcaactacacctaggccttattgggccttagtcaataatcagtactacaccttactaggtgttggttaatcattagtcttatacttgggccttggtcaatcattagtgttacacttaaagtcttattgagcctaacttaatcattaatactacacctaggctttattggaccctggtcaatcatcagtattacacttaggtcttattgaactttggtcaataatcaatgttatactcttaggttntattggggcctggttaatcattagtgttatccttaccccattgctcaatcatcattattaaacttgagccttattgggtcataataaatcattaatgtaaacta

SEQ ID NO: 582 - DNA, 454 bp, Glycine max
  unsure (1)..(454): unsure at all n locations
agctttgcctctggttgctctgctagggttttcaagcattagagagaaggagaagagattagagcctcaatttcactgtctctgtgtgaggggcgtttatctccctacaaacattattttttaaatcccaatggtgggaatatgtgaaaatgagttttgaacccgatgtccaaatttgaaaatgatccaacagttaattagtctgctattatagttttattggaatagatttggatgtatgtgggaaaaagagaggattttgggagaggggaagggagaacgaatttgtgaggaagacatagcgtcaacaacagcagcctgctccttccttccaaaatgctgctggcccaagcagaccatacattcctccaccaatccaacaacagcaacaacctcaaaaacagccaacagttaaggcccctccacaaccttccctcggnaaaattgtttcgcc

SEQ ID NO: 583 - DNA, 615 bp, Glycine max
  unsure (1)..(615): unsure at all n locations
tgagcttagctacacatacctgtctaatagctaagctcacctccttgagatgagaagctagagcttagctgcacaccccctataatagctacgctcacccccatgacaaaaaacatgaaaatacaaaaaaaaaagtacttactacaaagactacttaaaatgccccgaaatacaaggctaaaaccctatactactagaatggccaaaatacaaggcccagacgaaggaaatacctattctaatatttacaaagataaacgggctcatacttagcccatgggctcgaaatctaccctaaggctcatgagaaccctagggccttcccttggatctctagccaatctacttggagtcttctacccaatgcccttgcggggtaggattgcatcaaaaccttctcattacccaccacccagtcatccacaaaggccatccctaaaatgaaccacaaagtgtacctaccgcacttgcaatgacaaacaccacctttagcataaaccaaaacaccaaccaagatnatgaatttgcaacgaagagcctgtagaattcaccccaatttcagtgtcctatgctgacttgctcccatatctacttgatattcaatggtatcataac

SEQ ID NO: 584 - DNA, 457 bp, Glycine max
agcttagtgacttaagtgtctccaaactgtaattgtaggagaagttgcctaagccatgtaattttgaatgcagcaacttccatggcatggcatttagcttcgatgctgggtctagcaactatattttgcttcttacttctgcatgagaacaaatttccttccaagagtcagaggtagacctcctatctgatggtgatcctacccaatcagcatcagagtaagaaacaatcttcgcattgcctttgtcttcatgtaagagtctacaacctggtgcatacttgatatatctaaggattgatatatctaaggatgcgcatgacagcatcccaatggctatcacaaggggcattgaggaattgacttaccacacttactgcaaaggtgatgtctagtctagtgatagtgaggtaattgagtttaccaataagtctgtgatatcttcccgggtcattcagta

SEQ ID NO: 585 - DNA, 557 bp, Glycine max
gacactatacaatactcggcttgtgccaaagatgccacacggatttgcggcctattaaatgcggaagcacttcatcggaaattgttgactaaagccaggacaacaaaagttgatcctgttgttcccaagcgacatactgcgcgagacattgccgagatcacaatctgctaaggtttggaacctcagcggaatcattggatgcacgaggaagtgatgaatatgatgatgacctataagcactggttctacttgctgacaccaaagcaggtagttcgagttcgttaatatctttgaaattgaatgcgagaaagaagtctcagattgcgataacggaatcgcagtcgtctgaagtggtgtcacagccatcggaaacaacgtttaagtcaccacaaacagtgaaatccgcagtggttggggaggaagaagatttaaacatgtaacgttgttgtttgcgagagccattaacactccttaagatcaaatcaagctctgattaccctataaggtttcagtaatgaaaatgatagaaaagatatatctgaaatggagtttttgat

SEQ ID NO: 586 - DNA, 449 bp, Glycine max
  unsure (1)..(449): unsure at all n locations
agcttccttattcattcaacaacctcttcaagtaaatcaatttatttatataattattaatgccatctaaataacaatatgggctttatattcttttttggcctaggtggtcaactcaacactccctttctttgggccttactgggccttcaccaatgttactgaaaaatcaaactttagctaccaacaaagaccccttaacatctatcaactgcttggttatgaagttgctaagatgtttattgatcacatcatttaataaattataatatcaaatagcttaataaattttgaatttcaaaattatcacctcaatcaataagttatttgttttgccttttttatttcggattatccccttttcaaatgcctcttcttcaattccttagaaacctcaatagttntatcatattagttacatcgacctttatcaaaggaccaattactat

SEQ ID NO: 587 - DNA, 207 bp, Glycine max
gtttcgctgcgcaattcatttcttggtcggtgtcatgctttgcagccacacgcggctgttagcattgcttgtgcggtcagtgggtgcagctgtccatctacggagcgcctttgaggataaattgtcaactgctactgataaaggatgagtaatgacattgttgggtcggtgggacacttggccagtcaagaatggcagacattgcat

SEQ ID NO: 588 - DNA, 516 bp, Glycine max
  unsure (1)..(516): unsure at all n locations
agcttaaagactcaatgaaaggccaactatttataaaagtcttgtaatataaaatatttaatcgattaaactgagcatgtagtcgattaaaatattcttatttgacttgggtttacctaaagaacaatataattgattatgatcaactgtaatcaattaaattgacaactagaaatttccttctaatagaacaagcctttataaccaattaagagaagcttgtaatcgattaatttgacaaaacataaaagcttggttccaatagaaacaagtttcatgaactaatcaacttttgtgtaatcgattaccaagtgtagacaattcaatgtgattccaaaaactagagttaatcaacttggctaatctaatgattaactattaagcatgatgaactagattaaattcctagttctaaaacaaataatacaatgccacattcaaatgatcaaaattaaaaactaagtaacatgttgaatcttncatcaacaatattgaagatgaatatcanaagcttaa

SEQ ID NO: 589 - DNA, 632 bp, Glycine max
tggcaaaggtagttttaggcctgtatacagggggtatgcgagctatgtggctattgataattaagctcaaaatttgttattaaccacatttaattttctttcccacaaatttggtgctaaggaaacactacaacatggacaagagatcgctgctaagaggctttcacaaacatctggacaaggtttaaaagaatttaagaatgaggttctgttatgtgccaaacttcaacattgagatcttgttaaagttcttggatgttgcattcaagaagatgagaaattgctcagatatgaatatatggcgaacagaagcttagacttctttctttttggttagtctcataatcagcttagaactgctaatatttggaacgatagaagccgtgcttggaaagcagacggttaccaagcattgtcttaaagggggaaaaaacacacgtgtctttcgtacatatataatttacttttatcattttgccacttttccaactaaaataaagaaataataaaagattgtattggaatttgaaatctttgtattatttctgtactatgttaataaataattgaactaaaaatcttacattaattttattctaaattattaaattctatgttttttcattcttttc

SEQ ID NO: 590 - DNA, 466 bp, Glycine max
agcttcttattcaaggctcatcttggtggtgaagctccttcttccatggcttattccctagtggatggcgcctcctctcacctcttcttctttgtcttccactgcatctccatggtggaaaatcaccattaaagaacctcattgaagctcaaagatccagcctccatagatgccccacaagcaagcttccatcaggacgtgtaatcctctgaaggtgagggcatgtagccctctgaaggcaaggatgtgtagtcctctaaaggcgagggcgtgtagccctttaaaggtgagggcgtgtagccctccgaaggtgagggcgtgtagccctctgaaggcaagggcatgtagccctctaaaggtgagggcgtgcaaccctctgaaggcgagggcgtgcagccctctgaaggcgagggcgtgcaaccctctgaaggcgtgggcgtgcagccctctgaaggcgaggacgtgt

SEQ ID NO: 591 - DNA, 571 bp, Glycine max
tagaaggtagtcatacctcacaaaatatatgtatgtgtttaggtagtgaaaataccttagatatgcatgtatatagcaaaaatacctcacacaatatatgtatgtatgtttaggtagcaagataccttggatatgcatgtatatagcaaaaatacctcacaaaaatatacacatgtttaggtagcaaaatacctcatgaaaaaaaaaacaaaaaaaaaaaaacaaaaacaaacaataacaaaaaatatatctttcagctgaaaagccaacatgcttttgagaagagataacttccagcttttctttagaaaaaaattcactaatcataaccagtttttgaaagaaaatgtgtgtaatacacctgaagggtgaatgctgtgaaaattttcccgaacacccaaaatggactcggatgaacgcatgaattgataaaagaacatattttggaaacattgggttgacttaaatagggaaaatgaatcctgagccctagtgtcacatgaccattaaaacttgatgcttgagtgtccgcatgggtgcatgcatgaccagttctgcataaaatttccta

SEQ ID NO: 592 - DNA, 550 bp, Glycine max
  unsure (1)..(550): unsure at all n locations
agcttgccttgccccttgatatatttgagggactcatggtcactatgaatgacaaattccttgggataaaggtagtgttgtcatgttttcaaagcccgtactaaggcatacaactgcttatcataagttgaatagttaagggtaggaccacttaacttttcactaaaataagcaattggatggccttcttgcatgaacacaaccccaatcccaacatttaaagcatcacactcaatttcaaaagatttttgaaagtttggcaacgcaagtatgggggcattagttagcttttgcttaagaacattgaaagcttcttcttgtttctctccccatttgaaaccaacatttttcttgagcacttcattgagaggtgctgccagtgtgctaaaatccttcataaatcgtctataaaaacttgttaagccatgaaaactccgcacctcggtcacggacttaggtgtaggccattcttgaatagccctaaccttctcctcatcaacttgcactccttttgaactcacaacanaaccaagaaacacaacatggttag

SEQ ID NO: 593 - DNA, 759 bp, Glycine max
agaattatacaatgacactttttgcccaaccatgaagtccttcttaattatcatgctatcatggaacttcttggtcttttctttgtagaacttggcattctcgtaggcttctaggcggatctcatctaactcactcagttgcaactttctttcctcaccagcttgatccatagagaagtagcagatcttcactacccagtatgctttgtgctcaatctccactggaagatgacatgcctttccaaagacaacccgataaggagacattcctatgggtgctttgtaggcagtcctatgtgcccaaagagcatcatctagcctggtactccaatctttcttgcttggttgcacaatcttctctaaaattctcttgatccccctattagaaatttctgcctgtccattggtttgggggtggtatggtgtggataccctgtggacaaccccatactttttaagccaggcctgcattacttcggtgcaaaaatgggtgccttgatcgctacccgacgcttttaggcaaccttcgcctaacgacaccaggataagggcccttgggactttattccctcatacatttataccccttccagaattatcatccgctcgtcaccttctccctctcccccaccgcgcttcgccctcctaaatgcgtgaactccaaccccacccacgaattctccccactctcctcatagttcgggtaccgcataacggctctgggaaaatgtctcgtcccattctgctcataaacccccg

SEQ ID NO: 594 - DNA, 497 bp, Glycine max
agcttgtccgcgcaagcattgcattccctaaaaatgtgagatatcctaaagttgcgggtatttccaaccacaacaaggtccaattttcttcagctgctttctcaatcgcaattatggcagccataatttctaccatgaatgcaaagtgaatgccaatattgatagcgaaagctttaataaacttcatatttatttagaaaaataccaccacacccgaccatacctgggcttccttttgcaaccccatcaatattgcattcgatccagggggtgtaggcagtctcaaaataatagttttgattttgtttactttcctaggatgacagcaccaagaaatgcttgatgatttggaaatcagcaaatgagtgtttttatggttcttgtggaagtggaacccgtgatgtgaactcctatagtgatgctattaagcacttgttggaggggcaaaatgaggttctcaaatatgaatttattcctcatattccaaatgaagaaaa

SEQ ID NO: 595 - DNA, 494 bp, Glycine max
tctgcaataaagcaaatttcttttctggatataaataatgaaacaaacttaaaaactgaaatgagtgtttagtattcagagtttgtaagttgagttagtagcatattttaatttttaaatcccaagtagtgggacactggggcatagcagccagacccaaaaacactatagttcgttagcagctattttgaaatttgtatgtagcttgtttatattagggttttaaataggctctgcagtagtggtgtgtcagtgcggagaggcgactgcccactacaggggttgccatagcaaagcggtttaatgtagtggccacagtggcattatgtgttgattcgaaaaaagaccaatgaacaaagaaattagggcttttttgggggacattttttgggatttcaatttccaaagatgacatctacagatgtaataatagtgaaaattttaaagaaggccacttggatttaaaagctggtgattggtgattcctataatct

SEQ ID NO: 596 - DNA, 407 bp, Glycine max
agcttctagaagaattatcggctatctgcttagacaactgtcctacttgaatttccaagttcttgatagtagactctgtgctcttgtgattggacatagtaacctgcaagaactgagcaaaagtctcttccaacttggttgttctctcataaaggctaggcgcttgattttgaggcctgttggatgatcctccttggtctttattgaattggtttccaggatgagacctccattgcccttgattctgattaaaattggaaccttgctggtaacctactaatcctctagcattaaatcctggtcggtgctgattccccgtataattcacctcctttgcagcttcatcaagagatatacagcaaccagattcatgagctcttccatatatgctacatcctccaacctac

SEQ ID NO: 597 - DNA, 569 bp, Glycine max
  unsure (1)..(569): unsure at all n locations
tgaccctggtagaaaaatgaagataatgagcttacaaggcttaagctctatagcttgagctcaacctttgaataaaaataaagaaaagactctagcaaaacttaagcattagagcttaagctcgagcctataattaaaagaagaaaaatcacttacaaggcttaactcgaggctcaaagaaaaattaagaaaataggcttaagattgacccttgaagaaaaatgaagaaaagactccgacaaaacctaagctttggagattaaactcgaccacacaagaatgaagaaaatgaacttacaaggcttaagctttacaacttaagcttgaacttgaaagaaacatgaagaaaagactttaacaaggcttaagctctatagcctaagtttgatccttgaagaaaaatgaataaaataggcttacaaggcttaacctctatagtttaagcttaggcctagaagaaaaatgaagaaaataggcttacaaggcttaagctttgtggcttanacttgacctttgaagaaaaatgaagaaaatactctgaaagaggttaagctntagggcttaatctc

SEQ ID NO: 598 - DNA, 560 bp, Glycine max
agcttgaacccaaaccggtaagagtgtgatcttaaactgtgagtgaacgactagctgtgagtgataatctttgcatgaatctctgaattttagaatgaaatgtataaatgaggacatgatgaaggccatgattgtacatacacaagctcttttgaccaaaaaacttaccttaaatgataattacatcctttgctccctttttgagctgaatgatattgtaaaaaatttgaaccttgaacttaaataaatatctcctggtactttgcttagattataggagagcatatggttcaagagaaattacactaaatttgggggagggaagtcaattcgaatgaaaagaaaaaggttaagcatcaacacacacaacaaataagttgtatgttaaaaaaaagaaagaaagaaaagaataaattgtgttgttacaataaggtcaaaagcaacttgataggaaaagatagtgagaaagctactggtataatacaagaccattgggataagtcaaggaattgtgctctcttagaatctaaacctttgaatcctaaaaaactaatgaactt

SEQ ID NO: 599 - DNA, 550 bp, Glycine max
atggttgtgttatatcatttttcctctgtttgtttccactttatatatgcaatctattttcaaaagtatacaggaatatttcctaattcttatcaatacgaagattgacacccaagactcatcattaggtgggattgtcttctgctcatcttttgctctccattctcacaccctgcttttctttacttgaggagtgctagtaaccagaaattatcacgtggttctagaccagtatgatttgtactaatctttatatgacatttaagtgttattaattctttctcataaatctcacttaaaaaaattgggtgtgttatataaacactggttgggaccaaagccaggtaatggttcaagattgtctgataatttcttcctactaatacattctttctaatacactctctacttttgataaaaattgttagaaactacaaaagcatgagtggagttattaaatatgacgtgagactcattaaacattatgtttcctaataaattttactaaaaaatgtgttaaaaagaagtcacagaatgtagctagttttca

SEQ ID NO: 600 - DNA, 552 bp, Glycine max
  unsure (1)..(552): unsure at all n locations
agcttcacaagcaagcttccattaagtggtaatcagagcacaagagcttcaagtaagtgctccttaaacctacattaattttcagctttaccttctcctccattgttgtttcttcatttttctccacgtatctccttacatgtcttgtgctaaatgttgttaacatgattctttagagtttccaccgattaaacttgctatagaagctagatttgattttttatgattcaaatttcttgttcttattcttgaaccatgaattgtgttgagtttaggttcctttgagttttgtcttgctattttttgtggctgaaacctaacccataaaattcttacaaaaacattaaagtaaaggaaaacctcaaaaatctagagtgacttgttcacctattgtagttttgtcatagaagtcatgtctagtcattaaacttgtcacataagatttcttatgttgtgctgaatnttattttcttggttcttggctaaatcattgtgcatgcatgtataaaatcttttacatattatttattttgatcaaaactgcatgtaaat

SEQ ID NO: 601 - DNA, 514 bp, Glycine max
gcttccatacctttcagtgttggacctttcagaacaaactcataattgtcatttctcaagttatcatgcaatttatttattcatgcataaatttaaactactgaaattaaattgctgaaatcaaaatgcataaaaataacacaactatcctaaaaaaaaaacaaaatgcgattaactaaaagaaagataaagtaagaaatcctgggttgcctcccagtaagcgcttctttaatgtcattagcttgacgagtcaaatgccttcaaggtggcatgaaggtcacgtagaacacatcttccttgcattctcgcctcttagttagagacgccatgaaactcgtgtattctggaagcaccttccacgttattgcaagagaagtggtggtgatcaaggaaagaatgacacttaaggctttctcatgttctccatgtctttctttcttgacaataagttgatgaggaggggtattgacttggagaatactttcttgctgaatttctacttgtgagtacttct

SEQ ID NO: 602 - DNA, 618 bp, Glycine max
agcttcttttgttaggttttgcttacgtttatgagtgtatcgcgattttgtgcttctttttgggttgctcccgttggctgacctttctgctcctattcattctctcttttcttttctttccggttactcttacattgtatctgggttttttatagcttcttttcttaggttttgcttacattcatgattgtttatcaatttttgttgccaggttgttctcctatccaggtgtcattctgcgattttgtgcttctttttgggttgcttttgttgtccaggtttgtatttccctcccagtggctaacctttctgttttgttttttggttccttttcattctctctattcttctggatctttcttttgggttcctctttaaccttttttggttaggttttgctaacgtctgttgctattttgttctcctatccaggtctgaaactgtgattttgttcgtcttttccgtttgcttttgttgtccaggtttgaattttcgtctcggtgtctgacctttcttttttgcattggttctctcattctctgaaggttgtgggtttttaaaacgtctgctacatttgtgctatgcctccattgccgagcgattttatatataaaaaaa

SEQ ID NO: 603 - DNA, 287 bp, Glycine max
actctataaaactctcacgcttgccgagtgctaaaaaattttctgaatagcaagggctacctatgaacgcatgacttgctgagccataagtgttcgcttattgagctcaacaaaattttgctaaaataaaatgcactgaacaaattgatactatgtatgccacatgcacaacaaccccaaggcactatcataccacaaacagatattgacaaaattaatagcagcttgaacatattaaacttataaattagctattgcactgtaatgagggagaacagagaaagcac

SEQ ID NO: 604 - DNA, 642 bp, Glycine max
  unsure (1)..(642): unsure at all n locations
agcttctcccctattttgctataaataggggaagaagtgaagaagaaaagggttcagccccttaggcacttctttctctctcgaaatagctgaggaaaattatttccgtgaagaaaatccaagccgaggcgcttccgtaacgtttccgtaaagtttccgtgagtaattacgcgaagattctcgaccgttcttcaagatccatccttcgttctttgttttcttcagtcttcaacgggtaagtacctcaaaccaagcttttcaattcgttctatgtacccgtggtggtccacattttgttgcacgtatttttattcttgttttcgtctactttttatacccccttttgacgtgcttaagccatttatttaagtcatttctcgcttaatctaaaaataaaataaatttccaccgatcgtttgaattgtatcatccgttaatttggttaaaatgaattccgaccgttcggtcatgccgtaaccacgttgggaatcaaaaaagagggaanataataatatataatcaaaaataccttttagtaaaagtaaggcgaaaatcaatcggacgttttctctttgggatttctcattcttaaatgatttgactaaatactaaagtgaaactagggctaaatcaaactcgcct

SEQ ID NO: 605 - DNA, 462 bp, Glycine max
tcaacatcagaccacttccagggtgctggaactacttcacatggacttgatggggcctatgcaagttgaaagccttggaggaaagaggtatgcctatgttgttgtggatgatttctccagattcacctgggtcaactttatcagagaaaaatcagacacctttgaagtattcaaggagttgagtctaagacttcaaagagaaaaagactgtgtgatcaagagaatcaggagtgaccatggcagagagtttgaaaacagcaagtttactgaatactgcacatctgaaggcatcactcatgagttctctgcagccattacaccacagcaaaatggcatagttgaaaggaaaaacaggactttgcaagaggctgctagggtcatgcttcatgccaaagaacttccctataatctctgggctgaagccatgaacacagcatgctatatccacaacagagtcacact

SEQ ID NO: 606 - DNA, 582 bp, Glycine max
agcttgttaagtattaagtggttatttaagcacgggtacttgacatgtgtgtagggttcaacaagtaacatttatatattagaacagttaaaataaaatatatttatgaatgacatgaaaaaataagcaatatacaatgacgaattcatttaagatgtgtaaaaaatttaaaagagagatattaagcgcatgtttgctttagactcatatttatctctagttatttgatgtgattttccacgtggattcgtgaatccaaacatagtctaagagaataatattacttaattgtaagaggtaaaaatcatttgtataatagtaagatttatttaagacatctaaaaagtggaaagaaatttaataagatgaagatagcctaaagacatctcaaaatatgtgtttattttgtcatttcttatttagtactagtgtgtaataatttttttttaaaaaaaaacaatagaacttattaaacactcataaaaaatatgcttacataagtctttctctaacagtagagtcttaaaaaatttgtgggttcttcatagactattaaacatcatataaatgtgagatgaagtt

SEQ ID NO: 607 - DNA, 632 bp, Glycine max
  unsure (1)..(632): unsure at all n locations
ttatgacattgctgcaatctcctattttagatttttccccgaagaaccattaacttctgaccatcctaaagatgagcataacatcatcaacaacgttaagcagggtaagacgcctaaaaaagttttatttacttagcttttgttttcaattaactgcttctcttcgcactgaatggtcgctgtaactgtaacaatcatgactgccttattgcagatgaggagtcctataatgatgcggccttgcatattacaatttgttgccatattccacaatgagaagatgatattcggctactcttttattcaaattggctttttcacacattccttttacctgatacataacacttgcagttaccacattttctggctaggactatatagaaataccagcattcttccatgaacagtgggcatcgcattaccccaaatntgcccgttttgactatgatgaagcctcatactagatacaactcagacagtattgaggaaaattgttctttgctaatggcctcaaacagttgaggaagcacttatatatctacgagtcagtaaccatcaattttatggcctatgaacacaaatggatttttaacctccatttcactccttcactggaacaacaagcatgc

SEQ ID NO: 608 - DNA, 419 bp, Glycine max
agcttcatacaattaatatagaacctatattttaatgtcacatcctatcagagcgttgtgttcccgtgtcctctagcatgaggttcttcatagtcatccacctattcatctgctcccccgaacacaaagttcaagatcatcacaggatccaaacacaacaacacacaaggagtgagttatcacattcctagctaatagagaaacaagacaattaaatatacatattatataaatgaaataaaacttacttacacgtcattcacgtaattccaccactttgtcattcaaaattcacttttcatcaatcaatcacacttttcaatcatcaatcacattacacaagaatcacacgctttgatcaaaacataataacacctcattgtcataataaacgattagcaagcgcatgaaacagttat

SEQ ID NO: 609 - DNA, 194 bp, Glycine max
ggttccccatatatacagatcttatcatcgtggcatctcgacttatcgtccgtacactggttcaggaccaattcctaaccaatgcttctggaacccttgcgtccactttgtgcacactgggggatctatcgcacagctgctggctaactctattaactctcgatgcctcacataattataaacttctccacccc

SEQ ID NO: 610 - DNA, 627 bp, Glycine max
  unsure (1)..(627): unsure at all n locations
agctttatatggacgaaagtgcaaaagtcctatttgttggtatgatgatggagaagcagtacttcttggacctgaaatgctacaacaaattaacgaacaagtgaagttgattcgagagaagataaaagcatctcaggataggcagaagagctattatgatagaaggaggaagccactagattttcaggaaggagaacatgtgtttatgaaggtttctcccgtaaccggagtcggaagagctcttaaggctaggaagttgacacccaagtatctaggtccgtatcagattttgaagaagattgggcctgtagctaggaattgcccacagctccagcagacgacaataacttttaactcgaatgttcgattaagtcacgtaatatatcaagacactagaaactgaaaacgcaagctcgtagcaaattcaaacgataataacttttaactcggaggttggattgagtcccggaatatatcgagacgctcgtaattgaaaacggaagctcgtagcanatgcaaacgacaatanacttgaactcggatgttcgattgaatcccggtatatatcgagacgctcgaaattgagtatagaagctcagagcaaatgcaacgacaataaattttact

SEQ ID NO: 611 - DNA, 405 bp, Glycine max
tctgttttcaattttgagcgtctagatatattacgggtatcaatcggacatccgagcaaaaagttattgtcatttgaattttgtgtattcattttttagcatcaagaattattaaatgactcaatcggacatccgagtaaaaagatattgtcgattgaatttgctgacagcttgtgtattcaatttcgagagtctcgaattattaaatgactcaatcggacatccgagtaaaaagttattgacatttgaattctcttagagcttctgatttcaatttcgagcatctagaattattagaggactcagtcggacatcccagtaaatagatatggtcatttgaatttgcttaaagatactggtctaaatttcgtgcgtctcgatatactataggactcaatcggactt

SEQ ID NO: 612 - DNA, 564 bp, Glycine max
agcttgtttaattaattttttttaaggtgtacttaattacacttcagcctgtcttataagtcttaggatttatgcttccatgattttcttgtaatgatattcaatcactgcgtttggaaatgaacatttatcactggcttctctgaaaaatattagcatattcttgtaatgatattcaatcactgtgtttggaaatggacatttatcactagcttctctgaaaaatattagcatataatatgcatgattttccttccttcttgtggaatattataatatgttgtttggttgcttggggtggtgtggaaagcagaggcatggagtgatatgagatggaatgaaacaagttatccactttgttactttaatactaatcaagttatacaggttctagaaggtgtaattaaatatagatggaatgcattgcctattgaccaacaagaaggaattaaaaattccatctctgatgttattgtataggtatcagccacactttgattattttttttggtgattcttatagtccttttgccatctttggcattgtaatggaccctttttttt

SEQ ID NO: 613 - DNA, 548 bp, Glycine max
  unsure (1)..(548): unsure at all n locations
tggccaaatgcaatgcaatttgttcctgatagatacatatccaatcattgtccaattatgatcaatcataagagcattggttagggacctcgtccaatccagtgattctgtgacacatacttcaattatgtcaacacatgttgttatcgtgtacagctgttggataaatgtattattcatccatgccttaaatttttagaactctatctaacataatactagagctagtattttataatattagagcatctagctcaaatagcatggcttccaatctgattagagtgagcacaagcttggttctagtagttttagtagctctcacagttcaaatttactacttttcacccatagatccagtcttgctggatataaaacctgctccttcaaccaaacacaatcaattacaggtgaaaagttaatgcttcttaattcttatatacatggtctgtatggtgtcgaagaaatactatttactagcaacatntcctgtgctatatgtgtgtgttttcttacagaatatcattaagcttggagaaggacttttg

SEQ ID NO: 614 - DNA, 553 bp, Glycine max
agctttcaaaaatattaaaaacattttaaaacattccagtaagcattttggccactggtaatcgattaccagaaagtaaatatctcttttaaaagcttttgagaaaaacctttggccataacttatgcattatcaatttggaaacttctttcttagactctagagactaacttcatcatttatcttgaatttcttggagtcttgttttggatcaaacttgagaagcgtgtttttttggcatcataaaaaacatcatgatatctttgcttctacaataatttgaaagaaagataaaaaaaagatgcttgatttatcttatctggttttgtacattagtgtaataggtgaaaactaaaaaattagtttaaaattatgcttagtgtgaaaaccagataaactctatgtctctggaccgaattgcttgaacctctcacagtataaaaatattgtattagctgaagataaggaacatacaaaggggagttcctctcttttttgtgtaaaatttgaataggtgtgttgtttggcacattatggtatgcaaaagtcgttc

SEQ ID NO: 615 - DNA, 604 bp, Glycine max
  unsure (1)..(604): unsure at all n locations
tttcaaatggataaaaggctcacattcactttcttctacatcatattcaaatttgtctaaataaataataaagtcatctcgactcaaagaaaatcatataagtctcatacaattaatatagaacctatatcctaatgtcacatcctatcagagcgtggtgttcccgtgtcctctagcatgaggttcttcatagtcatccacctattcatctgctcccccgaacacaagttcaagatcatcacaggatccaaacacaacaacacacagggagtgagttatcacattcctagctaatagagaaacaagacaattaaatatacatattatataaatgagataccacttgcttaaacatagctcacgtaacttcaccacttcatcattcaaaattcacttttcaattatcaatcacattacacaagaatcccacacttcgatcaagatataataacacatcaattagcaagcatatgcaatagttatgctaagactcaatcctatatgcaatgtggtaccatgtcagtgaaaaaccaccctgggggcgctangagtacataacaagacacaccacacaatgggtttgtcaggtcactctcactaagta

SEQ ID NO: 616 - DNA, 554 bp, Glycine max
agcttttcgattcattctatgtacccgtggtggtccacattgtgttttgtgtatttttattctcattccatttactttttatacccccttttgacgtgcttaagccattttacttaagtcatttctcgcttaacttaaaaataaaataaatttccaccgaacgtttgaattgtattatccgttaacttcggttaaaataaatttcgaccgttcggtcgtgccgtaatcacattggaaatcaaaaagaggtaaaaaataatataataatcaaaaaaatatcttttagtaaaataaagcggaaaatcaatcggacgtttttctctttgggatttctcattcttaatcgaattgactaataactaaggtgaaactaaggctaaaatcaaactcgcctagtcaagctcgtccacaaaaataggtttttgaagtttgtcatttcaatttcttactaagtaaaatggatcgtttttaagggccaacgccttaaaatgatcacctcttaagtaaaaaagaatcacttgataagaaagaactacgtaggtctgattttctca

SEQ ID NO: 617 - DNA, 640 bp, Glycine max
  unsure (1)..(640): unsure at all n locations
tggttcccaacgctctgttcaagctctcccaaaatctagaggtaaatctaggatctctatcagatactatgctagatggcacaccatgtaacctgacaacctcacttatatacaaggtggtcaacttttccaaggaaaatcttatattaatgggaatgaagtgagcagacttagtcaatctatcaacaataatccagatagaatctaaacctctaggggttctaggtagtcctaccacaaaatccatggaaatattgtcccacttccactggggtatctctaagggttgtaacatccctgaaggtctctgatgttctatcttagccttttgacagactaggcatgcatacacaaactcactaacctctctcttcatgttgggccaccaaaacatcgtctttaaatcatgatacatcttggtagcaccagcatggatgctcanattattcctatgtccttcctctaagatcatcttcctaagttcaggcacattgggaacacaaatcctatcttggagtcttcaaactccatctgatccaatattgaaactactgtcctttcctgactctatagcctctaactgagtccttagaaaaggatcaatcttctgacctttcctgatatcacctagtaactcact

SEQ ID NO: 618 - DNA, 528 bp, Glycine max
tcctcttagtcacctgccgcatgcaagcttgggggataggagccaacgagcaaagtctttttgtgtaccatgggggcttccgtattcaagttgactatatgtattatgacatttggaaagatcatggattgtaatatttgtagctttaccccaccccccaccctaccccacttatatgcattattttttgccatatcaccggtcagtggatctttaacacccccgacatgctgaggactgggacatctttaacatgaagttcataggactggacatctatgggtggtccaataacagccagataaacccaacaacaatcactaggataggtggtcataccaccttaaagtttaagtttgcactataggctttgataccatgttagaattgggttgatatgtggataatatggtaacgggccccattatggaataaggatagactctttacccatctagaattttgagtctgggcctaattctatcttacaaaaaccggttgtaacgagagggttaatggataccccct

SEQ ID NO: 619 - DNA, 428 bp, Glycine max
cgaaccccctgaaggcaaaatctttgaaggcataaacaggggtgtttgtgctggaagtagaacacagattattgttatatgggaggcctaacacataaagcatagagaccacagatatattacagaatgtgattatgctttatagagtgagagcatgcaagggaatcagaaggcgatcctctgatcttactcgcacattttgacagcatagtataaaaaaaactaatgtaccctgtggccaaaggcttctctcaatgctaaagtatgggggagggctattgtatttatatgcaagcttaccctcgcatatgcgaagaggccattacccatgactaacccgacactaaagcacggctatacagttgcatcatggctcgccctcaacaacaacactgagtacatctatcataatgataaaccaataggac

SEQ ID NO: 620 - DNA, 527 bp, Glycine max
agcttgaagagatcttcaatggctacgaacaacaacgcatttcattttgcttcttctttccccaattacatatcacataaagtagaagattcaagctttcttttatggcgtcaactagttaagcctattatcaaatcaaacaaacttcaatgattcattgctaatccgcaaattccactttgatttctctttaaagaagatcatgaagttggacgtgaaaatccagtttatgaggcatgggagtagcaaaattaggtgttattaatctggcttcaatccattctttctacactgattttttctcatgtaatcggttataatcactcctatgaagtctaggagcacatccatgattacttccacaagcagagcatcgccacaacgcgtcagttgcacattcaacttcgagcaatgaaacttggaagcaagttgatgcaatagtttctatctcaaatcaaggtactcgctgatgctcttgcttcattaggaagccctataatgattcaagagctcgttgattcaattct

SEQ ID NO: 621 - DNA, 399 bp, Glycine max
caatactccagctgctgagctgtgtgctctccagtccatatgcggttgtctcaaacttgctacatagctaatattttctgcgttctatttattctgccgctgatcaccacactatttggtttacctttaggtattatacacattccatggtctattcgttttaggtattaatattatttgttctaggtattctcagcttctctgctattatttgcgttacatatatatggcaccttaccttgtatgttactaccattcattttacgtattctaagccattcacatatacggaatgctagtttgtcatacatctggtatctatattgtgtacacacacctttgcatataaactttcgttactcaaatatatatcgcgttatatatttaaatctgtgttta

SEQ ID NO: 622 - DNA, 583 bp, Glycine max
agcttcttttagaaaacttccttgagaatctagagcttagctacacacacccatctaaaaactaagctcacctccttgagaagcttccttgagaagctagagcttagctacacacacccctctaataactaagctcacctccttgagaagagaagctagagcttagctacacacccctataatagctaagctcacctccatgacaaaatagatgaaaatacaaaaaaaaagtccctactacaaatactactcaaaatgctatgcacacacatgacctctatttatagcctaagtgtcacacaaaattgaagggaaatttgaatttcaattcaaatttcacttgaatttgaaattgaatttgtggagccaaactttggagcctaaatttcactaattatgattagtgaattttagttatggttcatcccactaatccaagatcaattccaagattctcaactaagtgtgcttaggtgtcatgaggcatgtaaagcatgaaggacatgcacaaagtgtgactatatgatgtggccatggggtgtagtaagcaaatgctcaccctccccttctaaaattaattgga

SEQ ID NO: 623 - DNA, 510 bp, Glycine max
  unsure (1)..(510): unsure at all n locations
tgctctacatttacattgatgtttgtatttattggaggaggttgtatgccatttttgttttaagagtagcatcccttggtaaaactaactttccaaatgtttgccttcgccggaaatggccccgaggaagcttgcctcaaagaggtccaggaaggataaggcggccgaagggactagttccactcctgagtatgacagtcaccgctttaggagcactgtacaccaacagcgcttcgaggccatcaagggatggtcgtttctccgggagcgacgcgtccagctcagggacgacgagtatactgatttccaggaggaaatagggcgccgacggtggacatcactggttactcccatggccaagttcgatccagaaatagtccttgagttttatgccaatgcttggccaacagaggagggcgtgcgtgacatgagatcctangtaaggggtcagtggatcccgtttgatgccgacgctatcggccagctcctgtgatatccgttggtgttgga

SEQ ID NO: 624 - DNA, 127 bp, Glycine max
ctccacaccgagaaaacgtttatatttgtcatggaaaacgtggaacagggggacactttcccatttacccagtaacgttttttttgccatacggaattcggtgacattcttcaggcggcaggaatgg

SEQ ID NO: 625 - DNA, 528 bp, Glycine max
tgtgcacatcaaatcactcccgcattttatctctagcatgcattgtatgtcggtctcgtcctttgtcacgggaagccggaaggtccatatcaccttcttaattgtacacatggggcactgcgcccccaaatgcgcaagtaagaagagataattttccgggctctcgtgtccgcaaaatgcattcatatcatgcatcgcataagcatctcttcataacatcataatggacatatcctgcatttgtccgttatcatattccggcctcacattttgcatgagtcatggcatcatcatgcatatgcgttcaacaaactttttgatctgcaaaattgcataccatttgttttcatgtttgctcatccttgcgttttcctctacaaaacaaaaacaaaaaagggggaagcgtgaaacttcacactacattcttagtttaatgtgttaggcaccacgacccaacccatgtgggatcataaacccggttcacttaaaaacaaataattgaacattggacccaatgccatggtaact

SEQ ID NO: 626 - DNA, 442 bp, Glycine max
agcttcaaccaaggggagatggaccattttctagtgcttgaaagaatcaatgacaatgcttacaaagttgagctgcccggtgagtataatgttagttccaccttcaatgtctctgatttatctctttttgatgcagatggagaatccgatttgaggacaaatccttctcaagagggagagaatgatgaggacatgaccaagaacaagggcaaggatccacttgaaggacttggaggacctattgatgaggacatgaccaagagcaagggcaaggatccacttgaaggacttggaggacctatgacaagggctagagcaaggaaagccaaggacgctctttaacaagtgctgtccatactatttgaatacaatgccaagtttcaaggagaaaagtccaaggttgtgagttgtatcatggccccaatggaggacttaatgacac

SEQ ID NO: 627 - DNA, 365 bp, Glycine max
tttgttctcaatatcgagcgtctcggtgtattacgagacttaatcggatatcggagttaaaagttattgtggtttgcatttgctacgagcttctatttttaattacgagcctctcgatgtattataggactcaatcgaacatctgagtaaaaatttattgtcttttgaatttccaacgagcttttattttcaattacgagcgtctccatatattatgggatacgatcggacatccgagtaaaaatgtattggcttttgaatttactacgagcttccgttttcgattgctagcatctcgagatactacaggacaccattggacattcgagtaaaaatttattgtgcgttgaatttgctcagaattt

SEQ ID NO: 628 - DNA, 478 bp, Glycine max
agcttcccgccaatggtatttgaagtttaatgataccattgttttctttgaatttaaggaaaatactgttgatcggtgtatatatctgaatgtcagtgggagtaaggttatttttttaatcctatatgttgatgatatattgcttgcaattaatgatctttgtaatatcccattttttgtaaactaatttaaaaagaatttttatttataaataaatagagttttagaaaaatgatgaggtttttgtaaataaataaataatgagaaataatgatttgaaggaaaaaaaaaagaaaagatatttgatttattcatttgatagggaataaaatagagttcctttttataaaatattaaaaataaataaatagagtaataataagttgtgtataccccaggtataaatagttctgttaagtcaaatttcagactgacgatgcctcatcttttcctcaatttcggttttctttattctcct

SEQ ID NO: 629 - DNA, 320 bp, Glycine max
tatcagctactactatctctagtgtcaaattgtcaaccaatatgtttcttcaggctgtctcgaaatattcaagagtattaactcctcaattatattttattttgatgccatttgcccccagaaatgtcgtctcttggtttggttagaggcttacttgtgctatcaaacattgcgggtacttaaattgtctacacgctcttgcttatataaagataggaaacacgcttcattgcattaaattatgtctaatgcatgttcttaacattaaatacttatcacattcacaagggaaattgcgcatattgagcaagtataacata

SEQ ID NO: 630 - DNA, 631 bp, Glycine max
agcttcttgtcaaatatcaccataaaaaattacaactcacttggttttctagtacatttacagtactttccagctcttcaactgatcttgctagaagtttcacctcttcttccctgtcttcagcataaatttgtcttgattctgccacctgtaattattgtaacaaatatcagccagaaacaaggaagaaaacaatcattcagctagttcaccattcttttcctttgactgcaagtttatttctagagctgaagcaaatcaatgagcaatggaaaaattatttttcaaagatcaaaattttaatgataggttatcaaaatcataattgtactatatgttttgcttcctttggcacattaatctctatagaattctgattctcacagtttaactaaattgcatttgaaattgtatagatgccagagttgagaaatgtgcaaaaaaatttatctctacaaaattgtacaaagttcaaatgtcaaattgatatggctttctatgtcatttgacattaaaataaaattaaaaaaaaaaagacatgttagaaccattgaagatacagctcctcaagacttatgtcttatgttgaagatactacataacaaagtttttccggttgaatcatggaata

SEQ ID NO: 631 - DNA, 379 bp, Glycine max
tttttgatgcaaataacactcattgttctgttcttcattcaccctgcttgcattctatggtatacattgtcctctatttttgacttttgtttaatgggtccatggatcttcagccatgaaagctctgtggaggtttggccactatctacttacctatgctccaatattggtgcgcctttgttctatttacattacatgctgttacttaatcaccagccatgtgcttccagaccccgccatcgcataaagaacatctgattgagctccctgtcatctgttcacctacgactgtgtcgtttgccaaaaaacatgcatcctggcactgctcattaatatgctctcttgtatgggctcacagacatgggctcgatgtttaccc

SEQ ID NO: 632 - DNA, 581 bp, Glycine max
agcttatgctgcaaatatttacaatagacctcctcaacctcagcagcaaaatcaaccacagcaaagcaattatgacctctccagcaacagatacaaccctggatggaggaatcaccctaacctcagatggtccagccctcagcaacaacaacagcagcctgctccttccttccaaaatgctgctggcccaagcagaccatacattcctccaccaatccaacaacagcaacaaccccagaaacagccaatagttgagggccctccacaaccttccctcgaagaacttctgaggcaaatgattatgcagaacatgcagtttcaacaagagaccagagcctccattcagagcttaaccaatcagatgggacaattggctacccaattgaatcaacaacagtcccagaattctaacaagctaccttctcaagctgtcccaaatcccaaaaatgtcagtgccttttcattgaggtcgggaaagcaatgtcaaggacctcaccccgtacacctttcttatctgaaatgaacctgccaaacttcactctactccagaaaaaggtgatgaccaaaatttacctaacaat

SEQ ID NO: 633 - DNA, 523 bp, Glycine max
tgtgcaaatcaaagcactcccgcattttatctctagcatgcattgtatggagggctcgtcctttgtcacgggaagccggaagggccatatcaccttcttaattgtacacatggggcactgcgcccccaaatgcgcaagtaagaagagataattttccgggctctcgtgtccgtaaaatgcattcatatcatgcatcggataagcatctcttcataacatcataatggacatatcctgcatttgtccgttatcatattccggcctcacattttgcatgagtcatggcatcatcatgcatatgcgttcaacaaactttttgatctgcaaaattgcataccatttgatttcatgtctgctcatccttgcgtgtttctctaccaaacataaacaaaaaagggggaagcgtgaaacttcacactacattcttagcttcatgtgttaggcaccacgagccaaccatgttgggatcataaacccgtcttacttataaaacaaaaaaattgaacatggtacctaatgcatg

SEQ ID NO: 634 - DNA, 533 bp, Glycine max
  unsure (1)..(533): unsure at all n locations
agcttcctcttattagtgcatagctcctttaagaattcggcatatcttggaatttgctttattgcatccagcagaggtatgtttacctctacttttctgaatgtttccaagatctttttctctgcctcttccatttttttgttggaaactgctcttggagggaatggaagaggagggatgtgttgcttctgcaaatcagaattaccagtggaagattcacctgcacataaattgttaggtaaatttttgtcattacctttttctgggttagagtgaagttgggcaggttcatttgcagatgaggaaggtgctacgggttgaggtccttgacactgctttcccgacctcaatgaaatggcactgacatttttgggattttggacagcttgagaaggcagcttgtcagaattctgggactatttttgattcaattgtgtagccaattgtcccatctgattggttaaagctttaatggaggctctggtctctntgtgaaactgcatgttctgcatagtcattttgcctcaaaattc

SEQ ID NO: 635 - DNA, 539 bp, Glycine max
  unsure (1)..(539): unsure at all n locations
tcttcttcctcctgaactctctttcttctcttctctatactctccttcttccttcccttcgaatacccactgcttccttaggtttcacatcgtcagcgaggaggtttcctagccctcgaaagctcggtatcagatataagcttgaatttgaaattagccaatgctaattatctgaaattatcaatagaatccgcaccttggactttcaggattagaaccacaagattagaattcatgtttggtaaagtccaactttattcaacaaattgaagcacagatttgtaggcatccatgcctataatatcccaatatctctagaagaaacatgcattgaatccatccgggcttggagccccctcaccattggaggcaagaactgcatcacaaacctccttaaaagagggtttatcagtcaccaagtcgggatacactactagaaaaacaagcaattgcgactgcaacacgacatcggtcgtttgtggaccactgtagaatacacgcggtggcatttttgtaaatgtcgcanaactaacgacgtc

SEQ ID NO: 636 - DNA, 503 bp, Glycine max
  unsure (1)..(503): unsure at all n locations
agcttgtaggattatggggtacccatcacatgtggtactaggtggcggtcgggcgatggtgcacaacaagttttccacatccacaatgcgcgcataaacccaccatcccctgttgcccacctccaactgagctcacgtactcccacgtagcccatatcctcgtttctctcaacaccgggtccccatcaatcctctcaagcttccacaacatccaagcaaaacaacattcaagcagcacaagctatcacagccaagcaaaacagagcaaaggcagaaaactctgctcaaacaccaaccaaaatcacagcttttctcacttaaagaccccagtaacaattccttcgatccaattcgttaaccggtggatcaactccaaaattttactggaagtctatagtgcataaacctacattgtgaccgttgggatctgctagcaaacatccagaactcattctgcactactcttttcacaaccagcanaaacatnagcattttctacactt

SEQ ID NO: 637 - DNA, 610 bp, Glycine max
  unsure (1)..(610): unsure at all n locations
ttctagcttttcattggtgtattttgatctccttttggtgctctaaattgtgggaatgtgcttaaatatgtggggcaattttggtttgtttacttgcttgattaggttgaattgggggtttgtatgggatggccctaggcctataatgcattttgaaacaatgggacatgccacattgtccccgttctcttgctattgatgcctaaacgcgcgcccaccaagtgttcggtgaaatgcctcaatggcattagcgcgtgacttttgtaaggaaacaacccatggggcattttggtttgcacatattttctattttttggggcatgcattcgttcctgaaaaggttagagtaattgccccacatatattctaggcctaggaaccaaagttttatgcaaaaagaacacaagaggaggtgcatattgggtaaagttacccttttttttggccagcaatcagctatgggccacgctacaataatttccctacacctagatgtttangaattttgctcatcatanacgtgtaggtttagaatangtagcaaaatacctttggcaatttacacttttggtgtggtagcaaaatacttggatgtatgtacatataattt

SEQ ID NO: 638 - DNA, 609 bp, Glycine max
  unsure (1)..(609): unsure at all n locations
agcttcatgcttaagtatgtatggcaaaacttcattaatgttgttcaagacatacaagtgagcttgtaacaaatgttctacacttggagtaatgacatgcagtcctcttgaacccttaccacccactctgtcatcatgccgagactcaggaaggccaacaggtttagccttctctaagtattctgaacaaaattcaatggcttcttctgcaatgtacctctcaacaatagatgcttttggacgatatagattctttgtatacccttttaagatcttcatgtatcgctcaaccgggtacatccaccgtagataaacaggaccacaacatttgatttctctgaccagatgcacaatcaagtgaatcatgatgtcaaagaaagcaaggggaaaatacatctcaaactggcacagtataattgtggcctcattttccaactcatcaaacttgacaggatcaatgactntgctacatatagcatggaagaaaaagcacaggtgagttatcgctaacctgactttgtttggcaagatgtctcgtatagctacgactaacaattgttgcatgagcacgtgacaatcatgagactttaaccctacaagcttaagctc

SEQ ID NO: 639 - DNA, 475 bp, Glycine max
  unsure (1)..(475): unsure at all n locations
ccttatgaccctgcatgaaccttgaaattatggcttcagacgatatcccatatatatatttgcacgtgtgcctgttgacgattgcttcacggacttcacgatctattgcctgtaaaaagaaatactttacctttaagaccttcaactcctgctcctcgatcaattagcattgcgccttcgcacgctctattccatctaccaccatctatatcccattctcaatgagatcccaagatccttggagtggagaaaatacttcatcaacattgcccagtggctataaagaccattaaaccttcggattgcaagctgcacaatactgctactcccacctgctgctattgaaatgaactcgttctactcgaaagatagaaaaactgcagtttcgttcttgactcgcactcattgttgttgtcacacactcactgctntcctcacgtgcactcaatatcaagcgcctactgaggatctctga

SEQ ID NO: 640 - DNA, 605 bp, Glycine max
  unsure (1)..(605): unsure at all n locations
agcttatgcatgcttaagcgctataactagaacaaatgaagttgtttctaaatttgcgcttaagcaaaaaattagtggtgcaagcgagaaaacacgtttcaaacttgattagaatggcttccaaatggaattcaattagaattgtcactgttatgtgaggatcatttccattgtttaagatatctatgatttgaagaagagaattattttttatattgtaagactttaaagggaaaattgatatttaatatacctttgtcttcaagtttctatttacctataaaggggagaaatgactattttattgttgattaagacacttatagtatttgttgagaaatattttttgttgttaagacgaaatcattttgaaaagataatgatgatgtattgattgatcacttgtagtttagtatttttctattcttcttagctcaattaacatctctttgagccttattttctcactttaacttagttttggtcttagacaaatgaatgagcttaattgataattatggcttattttcatatttttgtgcttacttgacctatttgggtttgcanggactattngatactacaaagatgaaatggatcgtgtg

SEQ ID NO: 641 - DNA, 278 bp, Glycine max
tgagatgaagaagtgttgaaggctgaaactgtggtgctttgattttttgaccacaaaggggcacaccgaagcatatgccgatgtactatgcgcgcataaacccaccatgccctgttgctaaccttcaacagatctcacgtacttccacgctagccatttcctcgttcctctcatcaccggttgcccattaatactgtaatccgtccttagcatttcagcgatacaacctccaaacatgacaagctatttcagccaagccaaacttatcttacgcataa

SEQ ID NO: 642 - DNA, 523 bp, Glycine max
agcttgttatattcatgggcaggaaaatgatctttgatcaagatagcctagacacaattgccaacaacaaagtccacagatcaatgcttctgtcagcctataattaacttgtatttttcagtggaagctatcaattgagcatgagtttgttcgtgcacctggcgaagttaggagatgaactcctcaatggtggtataggaacacacttgactagggaaacttagcaagtcaaagggggccacgagtaatcatgcaataaataacgtggaaaggactagcctggtactatgattatcgacattattgtgagaaaatatatcttgacagagtctaacatcccaagactttaaatgatcgccaaccaaaatgcatagcaagttaccaagggaacgattaagcacttcaatgtcactgttagtttgtgtattggaagcactgctgaagttgaggctggtgttaactaaacgccacatacttttccaaatatgattgaggaaccgtgtgtgacaatcaaggacaatgg

SEQ ID NO: 643 - DNA, 495 bp, Glycine max
  unsure (1)..(495): unsure at all n locations
aaaactcagcttcccattatggaaagctaaatcctctggtggatcttccttctatgcacttgatgtaaatatctttttatctattttatgatgtattttgtgatcactgtgctatcagaacttcattctaccatgccttttccttgaacacctaaatgcatgtgtccttaagatcattcaagagtggaaactagtctgattcttagaacttgataggacgaggctagtttgtcgtattttcacgaagaatcggcgtacggtaacctagtaggtgtatgtatgtcttattgcggtcatggttgagtattgactaacaaaatgaatctgcggacgatgcttgatcacaattaggctctactatcatgagaaatcaaggtttgacatttcgagagacaccctacaacacataaggattgtttaatacagaatatcctttgagcatcacgcacctactangaagaccaacgtgttaccttcatagccttgtgcattatt

SEQ ID NO: 644 - DNA, 621 bp, Glycine max
  unsure (1)..(621): unsure at all n locations
gcatgcaagcttttaagcagagtgtaaattatttgactaatattcaaaaatcctgtttaagcggattttatccttccaataatgtataagatataccatttattaaagaatcttttagtatctggttttcttgcatccaagcattgatatacgcaccctacagcaaggacaaatcagtatgaagtatgaaccacaaagataaaaaagttttagattctctaaaatcaatgttcttctttttcaatttctaaagcacataatcttattttatcacttaccatttgtgttttatgcccaaaattacataatctgtgatatataaaaggagttaagtgttatgtctttgaagcagcatcaagaatttatataaacttttctttgtttatccaactcatccaaaatccattataattcataattgggtagttcctgaatgtaatttaacgatgaaattggattcttttctttggtacattgcacgacccttttttatcatcgtcggagaaatttgatattgctagaagcatatntaaattgtgacgatgtacgttgggaaagtgatagtgataatgacagttgaatggagatagtgtgttgaaaaatctgatagtaagaagtttg

SEQ ID NO: 645 - DNA, 722 bp, Glycine max
tctggagaagagaagagccatttcatcaagttctattttattaattgtttttcaatgttgtagtattaactaagcatgatttgatttccattgtttgtgggtgggtttatgacggtggaggaatggaaggagaagtggacaacattgatattacagacagaaaacatagggattcctgaatcttctccaccttacatccatcaatgtgatcatgctgtctttgtattacctcccaaaaaataaaaagcaaataaaatctacttaaatttgtgaagtagaacaactaactataagataaacaacaacgtgcttgctaacgtattaaaatataatcaatttaattagaatgtattcttttcttttatataataataataatattaatgcatttgttaatttttttagtatttaaaatttattaaaaatataaataaataagagataataatcataccatttggtgattaaatttcaatcaataaaaaaatgtattttaaatagggggttttttatattctctatcatttataataactgctttttatacctcaattaccttttattagttaataatgtaaatgtttttacactaccaatacataaagtaaaaaatttcttgatatattttagaattaattacattgttatcatcttctaattaatttttaaatttattggatcatcttattatttaaaaattaattaggtctatgtttttaaaa

SEQ ID NO: 646 - DNA, 351 bp, Glycine max
cctccagaagcacaaccgttcggaggaatcttctatagggcccaagtgggcctggttgctatttgtacccccatttttactaaatacaccccctacctttttttggggattcttttttcgtaaagctacggaaacttacgaatttcagaacgatacttgttttctttccgtaatgttacggaaccttgcggatcacataatcatcccctttttgacttacggaatgttacggaaccatgtcagtctctgcatgctatcaagcgttctgtcttacagatagcaaaagaatgtttatacggataaccactcgggtatttccgcccgtcagcgtgactcaaaagtcagtatgac

SEQ ID NO: 647 - DNA, 595 bp, Glycine max
  unsure (1)..(595): unsure at all n locations
tcttagtttcagatgatgcagatgggtttgtagctacctcatgcactcctctaatgactatggcatcatttctggcgctaaactgctgagagttggaggccatcttctcaattaaatttatggcttcagcaggagtcatgtctccaagggctccaccactggcagcatctatcatacttctctccatattactgagtccttcataaaaatattggagaagaagctgttctgaaatctgatggtgagggcaactggcacatagtttcttaaatcgctcccagtactcatacaggctctctccactgagctgtctaatacctgagatatctttcctgatggctgtggtcctggaagcacggaaaattttttctaagaatactctcttaaggtcatcccagctcgtgatggaccttggagcaaggtaatacaaccagtcctttgccactccctctaatgaatgaggaaaagccttcagaaatatgtgatcctcttggacatctggnggtttcatggtggagcagacaatatgaaactcctttcaatgattgtgcgggtcttcacctgcaaggccatgaaactttggaagcacatgaat

SEQ ID NO: 648 - DNA, 369 bp, Glycine max
  unsure (1)..(369): unsure at all n locations
agcttaacaaacttagaaatcaagtgatcatgtattccgaaatatagggggagaaaacggatgcacattttatctatatacagntgtttgttgtttgcttgaatcttgatttcaggtattgtattgtcatcatcaaaaagggggagattgtagatgcaattggctttgatgttttgatgatgatcatgatgatgtgttgcaattgatgcaaatgggcttttcaagattaaaattcaagacaatacttcaagattacaagtcacaacatcaagatgatcactagaatattaggaagggaattcctaattgaattagcaaaggttttgcccagtgatttaaaataaaaaagtgttttcaaaggttttactc

SEQ ID NO: 649 - DNA, 435 bp, Glycine max
tagatcaggcatccgagtcaaacgttatggccgtccgaatatgcatgggcattccatttcaacttttaatcgtcatgatatattacgggcctcaatcggacatgcgagtcaaaactttagcccgtcagaattcacccgagtcttccatgttaaattttgagcgtcgcgataggttacttggcttattcgaagatccggaggaaaagttatggccgcttgtatttgcgatgggcttcaattgtatcctaagagcatctcgatatattatgagctttaattgggaatccgagacacacgttatggctgtccgaatttgcgtggtcagtccatttctactttcgagggcgatgatatattatgggcctccatcggacatgcgagtcaaaactttatcccgtcggaattcacccgagttttccatgttagattttgagc

SEQ ID NO: 650 - DNA, 531 bp, Glycine max
agctttacggatttggtcttcaccgacgaaaggatcaaagtgggtatggaaaaaggcaaatctgatcatcctgcattgatgaatacgaaaattggggcaaatgaaaaggatgagaatgagggagaaacctttgctatgactgccattcctacacggtcaaatttcctgtcagcccaacaatgtcattactcagccaataacagttcctctcacccaataatccacaaaggccatccccaatcatccacaaagcctgcccgctgcacatccagtgccaaaacaccaaccaaaaaggaattttgtagcaaaaagcctgtaggattcaccccaaattctagtgtcatatgccaacttgctcttatatctacttgataatgcaatggaagccataacccctgccagggttcctcaacctccatttttccgaggatacgactcgaacgcaacatgtgcatatcatggaggagttctgggacattccatggagcactgtatgacctcgaaagtgtaggtgcacaagtctaattgatg

SEQ ID NO: 651 - DNA, 532 bp, Glycine max
tgtagaattatggggtacccatcacatgtggtactaggtgtcggtccggcgatggtgcacaacaagctttccacatccacaatgcgcgcataaacccaccatcccctgttgcccacctccaactgagctcacgtactcccacgtagcccatctcctcgtttctctcaacaccgggtccccatcaatcctctcaagcttccacaacatccaagcaaaacaacgttcaaacagcacaagctatcacagccaagcaaaacagagcaaaggcagaaaactctgctcaacacatcaaccaaaatcacagcttttctcacgtaaagaccacagtaacaattccttcgatccaattcgttaaccgttggatcgactccaaaattttactggaagtctatagtgtataagcctgcattttgaccgttgggatatactagcaaacatccagaactcattctgcactagactttccacagccaaccacacacaagacaattttctgcacttgtgcaacaattctgctggacaaatttcacag

SEQ ID NO: 652 - DNA, 508 bp, Glycine max
  unsure (1)..(508): unsure at all n locations
agcttctatagaaggttcattcctaatttctctacaattgcttcacctctcaatgagctggtgaagaagaatgtggcatttacctggggtgaaaaacaagagcaagcctttgctttgctcaaagaaaagcttactaaggcacctgttctagctcttcctgagttttctaaaacttttgaactagaatgtgatgcctctggagttggagttggagttgtattgtaacaaggtggacaccctattacttattttagtgaaaaacttcatggtgccaccctcaaccaccccacatatgataaaatgctttatgccttaataagagccatccaaacttgggaacattaccttgtttccaaggaatttgttattcatagtgatcatcaatcacttaagtacattagagggcaaagcaagttaaacaaaaggcatgcaaaatgggtaaagtacctagagcaattccatatgttatcanatacaaaaggggaaaacaaatgtggagctaatgccc

SEQ ID NO: 653 - DNA, 547 bp, Glycine max
tagtgaagcaagttcacaaaccaagaattatgtcatttctagagcttgaagataaatccaacaaacttaaaacaacacaatgagcctaagagtttatactcaagatgcaactatgggttggagtttatttggatagattacatagcttttgggctaaagaactaattaaggcccattttctaattttcctattaattgtcgtatttatttatcatgtaataatttcatatcacccatgatatgctttgggttagtttttatgtgtttaaggcttcctaagccattatattgcttagtggagtttttattcctagtgggaaataaatgtaagtggaatttagttcttagtgggaattaattcctagtatgatatttagaggaaatcctagcctataaataggagaaactttgtagctgtgaggcatattgagttttgaatgaaagtttgaattttctccttttgtgagagcttcccttggttcttgggcaaagaactgaatcatataatccaaaaaagcctaattgacacattcataggccttacaaa

SEQ ID NO: 654 - DNA, 478 bp, Glycine max
agcttcttctttcttctttcgtgctctgctccttcctcatttctggaggtgctagacctcgaattctagctcttgatactttgcacctaacaaattcggacacagaggtatcaatcactacttcggacacaggttgcagagttttgtcagataacttccttcattcaggtgtataagctagaaccattaagtgacaaaaaatctttggaattgttatgatgtggaaaggcatttttttcgggttttggtggatgctgtacaaaagaatatgaagacgtaggtcttgaaatggttagaaagtgtgaacgtttacctctagcaattgttgcattggtggtcttttatatagcaaatgtcaaagtgcacttgaatggacaggtttagtcaaaatctatgttcggagttgaagaggaattctgagttaattagtatttaaaaagaaaaattggttgagttatgataattttctgtcaatctc

SEQ ID NO: 655 - DNA, 658 bp, Glycine max
tcctaagtgtagacataggtgacgtaatgtacaagtcaattacttcagtcgaatcagctgtataaatacgtagtttctccaagagtggcatctcatttattacggaacacaaagtcgtctcgtgttttccccttaattctaccaccttcagttcccttaactgctttagctttcctacctctctaatgaccactccatcatcatctataaacactagaggtatctcttctagggatgtcatgcctccaatattcctccatattgaacccatgatcatatcagaagcctgaagatgacgtagctttttaagcttactaatctcctctggcatctcaaacacatttgtgcctcttgtatccaaggtctccaaattctggagcttaccaatgcattttggtagactttctatccgtgtataccggaagcttaaatacttcaagtggcataaattcccaaattttcaggaacataacgtaaaccagaaccttcaaaatcaagtaccttcaatagcatgtaattggtagggattttgtttactaagggttcagatactgcttcatcttctcctgtgctaataaaaattgaccgaatgggtgagcttcctatactttcactaaaatctgtttaaattgctataaatttctagaatattcttaaa

SEQ ID NO: 656 - DNA, 540 bp, Glycine max
agcttagactgagttcagcctaccatcctcagactgatggccaaactgaacggaccattcaatcattggaggaccttttaagagcgtgtgtcttaaagcagaagggaagctgggagagttttcttccattgatagagttcacttataataacagttttcactctaccattggcatggctccctatgaagctttgtatggtagaaggtgtaggacacccctatgttggttagagcccggagaaggccttaccttagatcggaagtggtaaaccaaccacagagaagatcaagttgatccaagaaaggatgaggactgctcagagtaggcagaaaagttatcatgataagaggaggaagggtttggaattcaaggttggtgatcatgtattcttgagagtcactctgtggactggggttggtcaagcattgaaatcccgaaaactcacacctcgctttattggtcctttcccaattcttaagagagttggccctgtggcataccaaaaggccttacccccgtctctttctaatcttcacaac

SEQ ID NO: 657 - DNA, 440 bp, Glycine max
  unsure (1)..(440): unsure at all n locations
ttataagcgcgggtctgggagacaaaggtcaagtgttcgcgatatgcgaagatgatgttccgagtactttggatttggtacgaccatgccctcctgatttccggctgggaaattggcgagtggaagaacgccccggcatttacgcaacgagcataatgtaaacctttacggttttaaaagctctatagttgggcctaggctttagagtttttccttttgttaaggctttgtgtcttttgtttttgaatttataatacaaggatctttcttcatctgttcctggtctctacccattctcattcatttgcatgtttacttctttttctgaaacggcagatccgatgacgagtcccccgaaggtactaatacctgggacccgcctatcgacttcgagcaagaaatgaatcanacggaagatgaagganatgaggatgtgggac

SEQ ID NO: 658 - DNA, 427 bp, Glycine max
agcttgcctcaaagaggtccaggaaggataaggcggccgaagggactagttccgctcctgagtatgacagtcaccgctttaggagcgctgtacaccagcagcgcttcgaggccatcaagggatggtcgtttctccgggagcgacgcgtccagctcagggacgacgagtatactgatttccaggaggaaatagggcgtcgacggtggacatcactggttactcccatggccaagttcgatccagaaatagtccttgagttttatgccaatgcttggccaacagaggagggcgtgcgtgacatgagatcctgggtaaggggtcagtggatcccgtttgatgccgacgctatcggccagctcctgggatatccgttggtgctagaagagggccaggaatgtgagtatggccagaggaggaaaccgtctga

SEQ ID NO: 659 - DNA, 485 bp, Glycine max
tgaaggcaaactggatgcgttggtcaacttggtaacccagctggccttgaatcagaaatctgtacctgtcgcaagggtttgtggtttgtgctcctctgctgaccaccatacagacctttgcccttccatgcagcaacctggagcaattgagcaacctgaagcttatgctgcaaatatttataatagacctcctcaacctcagcagaaaaatcaaccacagcagagcaattatgacctttccagcaacagatacaaccctggatggaggaatcaccctaacctcagatggtccagccctcagcaacaacaacagcagcctgctccttccttccaaaatgctgctggcccaagcagaccatacattcctccaccaatccaacaacagcaacaaccccagaaacaaccaacagttgaggcccctccacaaccttccctcgaagaacttgtgaggcaaatgactatgcagaacatgcagtttcagcaag

SEQ ID NO: 660 - DNA, 253 bp, Glycine max
attacgggtgtgaaagttaattggactatgttgtatacagaaatattgtatataaaggacatggaagtattgctaatattcttacttatatatagctcatattctaaaaaatgtgtgacaataactttctttatgactcaatttataaatttatttgaaatacatgcatggatcggaatgcatgttgaatacccaaaatgttggttatataaacataagatggtgtataacacttctattacttacttgactt

SEQ ID NO: 661 - DNA, 562 bp, Glycine max
tgaatatgtggacctgagtttggtgtaacacattcttggttgagagaagaacgaagaatgataagcgaacaatggaacttgttgatgatctcactgatgggctgtcatcaccacaaggaaataaattatacatatgaaagatctaacgaatacaacttaatctttcatgtcgattactacaattaaagtgtgattagctgtgcttactgacttgtactggtgaaagtaaaataaaaaatgccttcattaaatgcattccagaggagactttacccctttccccaaagaaatagaccggttaaatcactaatttggtccatgtagtttcactccaaaatcaaaaccctttataaaggcccttgtaattatcaagcaatgcaaaacggtccctgttatagttctacaatttcaatctaaacagggaataaggccaattaacatggttggtctgaattgattgaagactatatggactctctcaatggttctaaaacgtacattatagggactaaatttaattttgagaggaacaataggaacaaatattaattttttttaaata

SEQ ID NO: 662 - DNA, 404 bp, Glycine max
agcttgccacccagcttgcccaggcgagcatggttgcttcctccagaagcaacaaccttctggaggaatcttctagagggcccaagtgggcctggttgctatttgtacccccatttttactaaatacaccccctacctttttttggtgattcttttttcgtaaagttacggaaacttacgaatttcgtaacgatacttgttttctttccgtaatgttacggaaccttgcggatcacataatcatcccctttttgacttacggaatgttacggaaccatgtcagtctctgcatgctatcaagcgttctgtcttacagatagcaaaagaatgtttatacggataaccactcgggtatttccgccccgtagcgtgactcaaaagtcagtatgacagatcttgtgagc

SEQ ID NO: 663 - DNA, 561 bp, Glycine max
tcttagtttcagatgatgcagatgggtttgtagctacctcatgcactcctctaatgactatggcatcatttctggcgctaaactgctgagagttggaggccatcttctcaattaaatttatggcttcagcaggagtcatgtctccaagggctccaccactggcagcatctatcatacttctctccatattactgagtccttcataaaaatattggagaagaagctgttctgaaatctgatggtgagggcaactggcacatagtttcttaaatcgctcccagtactcatacaggctctctccactgagctgtctaatacctgagatatctttcctgatggctgtggtcctggaagcagggaaaattttttctaagaatactctcttaaggtcatcccagctcgtgatggaccttggagcaaggtaatacaaccagtcctttgccactccctctaatgaatgaggaaaagccttcagaaatatgtgatcctctttgacatctgggggtttcatggtggagcagacaatatgaaattccttcaaatgtttgtgcgggtcttcac

SEQ ID NO: 664 - DNA, 434 bp, Glycine max
agctttacttcactgcttcaagtagtgcacgagctgcttccagagggaaacacgttgcctaaaagctactagcaggacaagaagatactgtgtccgatgggtatggagtatcagaagattcatgcttgcccaaatgatgaggactgcaattctaatgaggcatgaattcaaagaaatgtccaaatgcccttggtgcgaggcatcatggtacaaggtgaaggatgatgaggactacagttctaataaaaactcaaagaagggccctctagagaaggtgttgtggtatcttcccatcattccaaggtttaagcgtctttttactaatggagacgatgcaaaagaccttatttggcatgcaaatgggagaaactctgatggaatggtccgtcattcgactgattgctcgcagtggaagaagattgatggtttgtatt

SEQ ID NO: 665 - DNA, 607 bp, Glycine max
tatagttagctcatttgctcatccaaccgcatcttatcttctctcttgcattagtttccttgattaaatcaatacggagacataaaacatatgagaatcttattttctcttttaaaatatggttatgaattctctaatataatctatgcatttaagataatttaataaatgtgtgagggtgtagatggtgggctttttagatagtgagaaattgtcccttccctgtataatcgtgtgatataagcagctcttgcccatccttggcagaccatacatttttaccatatggaataaatgacaaagaaagttcgagcaactttatttcaagaaacattttttatgtagcgaggatgatgtttttgagttcctatcttattctagtgacacatttattgagaaaatagtcgaaacatgcttcttgagtatatcaagtacaagtataaaatagaattcttaagagggggcataacaataattgattcttgcaagttgtagcctgtcttaataggttctagtagtggaaatagcccttcttgtcacttggataaggttgagtccatctaaccctccctagaatcccactataatgggagcttcatgctctatg

SEQ ID NO: 666 - DNA, 400 bp, Glycine max
  unsure (1)..(400): unsure at all n locations
ttgcaggtacttggggcttttgtagaaattatagtcataattagaaaggacaaaactttaatgcaggtctccaattttgaattggaagttcactttggtaattttgtgtaataaaaggattgcttttaatgttaacccatattatcgaggggaaactctaattttgattggagaacaataacatcttaagaacaaggaactgtgtcttaattttgtccaaataaaaagagggcgctcgaactgattttacttactggcactctgttgacatacaggaatttgtgagaatatgagagggtaaataaaatcatttttaactttgccatagaggaaaattgtaatatgcttctgaaccattgtcgtaagatattntcatttggcgtggaagtatttttcagtc

SEQ ID NO: 667 - DNA, 403 bp, Glycine max
ctatatactctgctctagctgtccccctttattaattcattgaatataaacctttttcattgaagacttgactctaatagacgggatatggacctttgcacaaggactttaaatggctcctgattaccagcaaatgaattgataaacatgtaatggagtagaatcttattctcatactctatatgaattcggatttacaaagtataacaaaacgtgtgcaaagacatacatcttgaacaaatgctcttgatttaagtccagtagcatatgacagtaatgacgtcattatcggtcatgatttcaaacaggtccaccttcttaatgataacattatttgacttgcaacatgcattctatacaagattaatatggtctgactgtagagtaaactattttttttagg

SEQ ID NO: 668 - DNA, 404 bp, Glycine max
agcttgaaggcaaactggatgcattggttaacttggtaacccagctggccttgaaccaaaaatctgtacctgttgcaagggtttgtggtttgtgctcctctgctgaccaccatacagacctttgcccttccatgtagcaacctggagcaattgagcagcctgaagcttatgctgcaaatatttacaatagacctcctcaacctcagcagcaaaatcaaccacagcagaacaattatgacctctccagcaacagatacaaccctggatggaggaatcaccctaacctcagatggtccagccctcagcaacaacaacagcagcctgctccttccttccaaaatgctgctggcccaagcagaccatacattcctccaccaatccaacaacagcaacaaccccaaaaa

SEQ ID NO: 669 - DNA, 464 bp, Glycine max
tagagtcttccttgtctatgctatagagcctgctcatgttttctcttgatcatgcagagtttgcatgatgtggtccaacaacggccagttatgagcgtgggggagtttctacagaaagtggcctggctaagagtccagccttctcctttgggaggaggtgaggcctctgcagctcacgagccttagtccgaccatgaggacgacattctggaggcctcaaagcccactctaccttagcctttcattatatgagactgatccagtatcagctaccccataggagacaccacaaccttccactggagagctggacatgtcttcttgtcagcctgagacatctgctccaatgctagacctgccgctctctcaggagttagcatcacgcacatcctgctctggacctgactgacaatgccatggactctgcacatgattattgacaggatcaggattcttatttccct

SEQ ID NO: 670 - DNA, 341 bp, Glycine max
gctgtttttgttgtgttacgtatgagtttgtgtttgaggtttgtgttttggaagaaatactccaagaaaaatgtttgagtttacgtgtatatttctctttcatagagtttggccaacgaaactgttctgaggagtgatgtacgtgattgctcaatgacatccattctgatattaagttttaatcctcccataaagcaatccaataaagcttcttgtgtaattccttgttcttcattagctaaagccgtgaactgcacgtaatatgactgaactgaaccaatttgaatgagtttacacaactgaatatctaggacattcacacggggatgggccaaattctg

SEQ ID NO: 671 - DNA, 380 bp, Glycine max
tgtcatcgtgagacatcagaggctagtattttaataaatgtgggtaggaaaaatacaccaaattgatagagaaaaatctaaaatcatacatcttaggcaaataaggcatgctagcccccaacattattgcattttgattccatctttggacattgtgattttgaaaattagaaaacccaaagtttattagggcatttcatcaaacatacaactcccaactgatctggcaaaagaaatagtgagtagaaaatggaacttgcagacaaaaaacaaataaaagaaagatgattttctctttatcattcgcagaaaagaaaaattgaggaaacacactgcaaacaaatgtttagatttccttatgtgacattatactaactagt

SEQ ID NO: 672 - DNA, 481 bp, Glycine max
agcttgtaacataataatacaaattagtctcaccaaactaataacaataatggtaataagttcacattcgcaaggctggctgatttgctgaatcctcgtcgtacagctgggatttcctaggtatctccactcattcaagagtgactgtagtaattttaatttaggataaccaccatgcttctgtttctctgtcactttctaattcatcattttataatgcctataatcaataaaaaaaatcttatttttttactgcaataaaaatttgtatttatttttacgttgtataatatgtttagagtttttttaacacaaaatatttctcaattaaaaatcagaaactaatctcttgaagccaataggagatccagaaattgtaagttgtggagacaatatttatttactattttataaattagtattttaattttgcattgaaaataatattttatgtaattaaaaattaaatataaataaatat

SEQ ID NO: 673 - DNA, 513 bp, Glycine max
taagagtgttgttaagttaatcactcccttcagtggatgtcttgctgggtgtggatgaataatttgcgtgtttcatgactactactactactactccattcaatgtctaatgccatctcatcaatacctaaactgttcgtttttttttttctccctatactcacaatttattgtttggctatgcaatgttactgtgttgatgcaatggaaattttatcagaattttgtcccaattgattgcattttgaaagggtgaaaaagacctcctcaatgtatttttatctaaatgcaagtatattctttcacgaaattgaaaatttgtttcctttgaacacaagcaatttgacttctttggaatgcatcgacaatattgatttgataacaatgatttccatttcttttttggtacatcatagtcatcctatttaaaaacatgagaagttatttgttgaatgcgctttgctggacgaaagaaaagaaaatgactgttatatattggtttctgtatataaa

SEQ ID NO: 674 - DNA, 473 bp, Glycine max
agcttcttatctaaggctcatcttggtggtgaagctctttcttccaaggcttattccctagtggatggcgccgcctcttacctcttctcctttatcttctgctgcatctccatggtggaaaatcaccattaaaggacctcattgaagctcaaagatccagcctccatagaagctccacaagcaagcttccatcagaaggttacaaagacgaagtctattttataaaaagacaacttttacaacgtcttattttcaagggtttttcaaaggaagtgtaaatgtggcgtccctaaataatgactggtttaatagtaataatttaaataacagaaaccatgggaatttttttttctctctcttttcgcggtaattaaattcagaaggaaaattatcactagagtcctgaatggccagttcacaactctattcgaaggcatttcttttctgtcactcataacctctaaactattttg

SEQ ID NO: 675 - DNA, 633 bp, Glycine max
  unsure (1)..(633): unsure at all n locations
tgaaccaaaaccggtgagagtgtgaacttaaactgtgagtgaacgactagctgtgagtaataatctttgcatcagtctctgaattttagaatgaaatgtcttaatgaggacatgatgaaggccatgattgtgcatacacaagccttttgaccaaaaagcttaccttgaattataattgtatcatttgaaccctttgtgagctgaatgattttatcaataattgaaccttgaacctgaaagattatctccaaataccttgtttagattctaggagagcatagggttcaaggaaaatttaccccaaatttgggggagtggaactaattgggatgtaaagaaagagataaagcatcagcacacacaacacataagttgtgtttaaaaaaaaagataagaaagaaaaagaaagcaataaaaggaaaggtgtgatgatgtaataaggtcaaaagcaaatgaaagtgaaaagctagtgagcaagctatttgtattaaaaagatcacttggatacgtctaagatttgtgctctcttagaatctaagcctttgaatcctagaaaaaccaatgaatttttgtaggccaaccctcactacaagcattgggaaagtctntcttgattctatttatacattcttg

SEQ ID NO: 676 - DNA, 552 bp, Glycine max
agcttttctttgtggattcattttgctttcattccattaaaacatgtcaatgattcttcaaagcgttatcagttctaccattaaagagtttcgtaatggttgtccaccttgccccataaagctcgcaagccacaagttgctctcatcttccttttttgtaaagggaattttgttaagttgagaatcaagatgattgtgccacctaaatttgtagcttttacctagacaaaagtaatgaaaacccattattcaaaatacattacaaaaataaaattagaacataaggtactacaatataatatatatatatatatatatatatatatatatatatatatatatatatatatatatatatatattaatcttctataccaaagcaatggtttcgtagtactattatctcatttgtaaactctctctagtgaaataagaacaacacgaacatgattctaactaaataatcatacataagttgattatgattaaatataaataaaatatccaagctccgatgtcaaatctatcaaagatatacaaaccccaaccaat

SEQ ID NO: 677 - DNA, 612 bp, Glycine max
tagtgtaagccttataaaattcttatttaatttaattatttatttttaaatttatatactttttaaaaaggggaatggtcatttaaaaaaatgttctaaaaatttatttaaaaacaaaatttgtaataatatattctaattaaataaaatgacaactctaaaacaagataataaatctaaatttaaagttaagacagaaggtgtgtaatcatttaaataaattaataaatatataatttcaaagtattgtgataaaatactaaaataacagcaataatggtatttatgtagataatgtaatttattaaatataaaataatttttgaataacttcaaatttaaccataataattagttttttttaaataaaaaaaaaacctaatttatttaattactctaaaaaacctaatttatcatggtagtataaacactatagaaacatttaacacgtcccataatctttattatgaaagtattttggaaagcataaaaacagaaacagaactataatataaactatctatagcataatcttattacaaatttgtcaaaattaacaaaattataatctttgatgatataccacagatcatagatgaattaaataaaact

SEQ ID NO: 678 - DNA, 547 bp, Glycine max
agcttgtctcagcgtctatgcgagacagaaaccaacatgctagctatcatcgccaagtaccaagaagagttgggtctagccacggcccacgagcatagaatcgcggatgagtatgcccaagtatatgcggaaaaagaggctagaggaagggtgatcgactctttacaccaagaggcaaccatgtggatggatcggtttgctcttaccttgaacgggagtcaagaacttccccgattattagccaaggccaaggcgatggcagacacctactccgcccccgaagagattcatgggcttctcggctattgtcagcatatgatagacttaatggcccacataattagaaatcgttaggaaacttgtatggtctctcagaccttgactagatatgatttctttttttgaaataaaatgagttggtcccatgtttctactccaaaaagcttgtgcaaatcaaatcactcctacatctcatctctagcatgcattttctttcttacccactcctcacgtttgttttttagggaaaacaccataactaaacgcg

SEQ ID NO: 679 - DNA, 460 bp, Glycine max
ggatcggacatccgtgtgaaaagttatgaccctttttatttttccagagcttccggtggtcaatttcgagcctctcgacatattatgcgcccgaatcggacatctgtgtgaaaagttatgatcatttgaatttctccagaggttccgatgtttaatttcgagcgtctcgatatattataaccctgaatcggacctccctgtgaaaagttatgaccatttgaatttgacgagagcttccgttggtcaatttcgagtgttcctgtatgtgatgcgcccaaattggacattcgagttaaatgttctgaccatttgaatttctcaagagcttccgttgttcaattctgagcgtctcgatatgtgatttgcctgaatcggacatccgggtgaaaaggtatgtccatttgaatttctcaagagcttccgttggtcaatttcgagcctctttacataattatgcgcc

SEQ ID NO: 680 - DNA, 524 bp, Glycine max
agcttaaatgagtactttcatatatgtcttctacgaactctcttcctcatgcacataatgagatataagctcattaatggatcatttatccttctaagtgttatagttcactttgaattgttcaaagcgtgcagaaagtgagatcaaaactaaatgcactagcaggtcttcaccaagctctagcataagtgcttttagttttgatgccaagttagacattagacattttcattatgtactcccttatataacttttcccctcccctttttttaacaaaaaagataacaaataaaaaaaacaaaaaactacatgcacaaataacttccttatatatattatgaacaatagtcatgaagagaagttgttcacaaatccaaatagcgatgccaaaaaaacaaaatacacccgaatttaaatcaaatatccaatttaccaacaattaatatgtgttgttccaaaaaataaaatttgtgttcatataacccaagcattacaggtataattggaatcaaataactttaat

SEQ ID NO: 681 - DNA, 459 bp, Glycine max
  unsure (1)..(459): unsure at all n locations
tcaaccttaacttttgtaagcttagatttgattgagatatacttctcaacattgggataagcttagggttgagactgagcatccctaaaaatatattctattttctactactaaggtaaaaatggttaaaataaattaaaatatgattgttaaggtaaaaaaaaaaaaaaggatataacaaaaattattaacaaccaaaactattgcccgcattataagtgaactatattttattttctaccttcatgcacttttttcaatctaagcaaggtttaaaaaaagggtttgacaccatgatttcggccacaatatcaaggtttctggagtgtccctaacaagagtggccaacgcattggtcacacttgtctgcaattttctacatatcactattacataatgtcctagtttcaatatattagagttaaccatgtttactanatattagaaaccattttctgg

SEQ ID NO: 682 - DNA, 579 bp, Glycine max
  unsure (1)..(579): unsure at all n locations
agcttgcttctacaatggtcggcccttgaactttgtttgctcccttcggaaccctcaaaacaaccatcgttgcgtaatccgtaaagtttcacaacattttggaaggaaaacaagcatcgttgcataatccgtaaggtttcacaacatttcggaaagaaaataagtgtctttacataatccgtaaagttctgtaacattttggaaagaaaatcaataaaaaaaaacataaaaggagggtgtatttagtgaaagggagggtgcaaatagcaaccagcccacttgggccttcctgagggttccaatagaaggcggtgacttttggtggaagcaaccctgctcgcctgggcgagctaggcgacaaccacctccctcttttctcctataaataggggaaagagggcagagcaaaaaaggttcagcctttctgttattgaaaattctcttcaaaatagtgagaaaaatntgtttccgtgaaaaaaatcttagccgaagtgcttccataatgcttccagacattttcgtgaagtgattcgggagattttcaatcgtcttcgtcgtttttcggctcaaccggaagtt

SEQ ID NO: 683 - DNA, 522 bp, Glycine max
tctagaagctgggcttatctaccccatttcccatattgcttatgtaagcccagttcaggtggtactaaagaaaggggcatgacagtcatttgaaatgaaaagaatgacctaatcccaacgaggaatgccactagctggagaatgtgcatcgattaccgcaagctcaatgaagccacaaggaaatatcattttcctttgcctttcatggaccagatgttggagaggcttgtgggacatgcttattactgcttcttggatggatactttgggtacaatcagattgttgtggaccccaaggataaggaaaagatgaccttcacatgcccttttggtgtctttgcctatagacggatgtcatttgggctatgtaatgcacctgccacattttagaggtgcatattggccatttttgcagatatggtggagaaaagtattgaggtattcatggacaacttctcggtatttacttgttgatagctttggcaagcataccaactgtcgttgtacgtttcacatttataa

SEQ ID NO: 684 - DNA, 511 bp, Glycine max
agaatccatcatcgcgaactggtcgcgttaggaagtgcccggaactctctcttgagaacggaggcgcacccgcccatgacagaaatacatgcgcctggaaggtgtattgtaggcaccccaaccttgggaaaacggacagacacaagttcttttgaaaacttgcaaaacgttccgttgcacatgctgaaactggggaaggtccaaactttcttggttacatttgtagctggggaaacaacagctgaacctgaatttttgtgacaaacaggctcgtgctttttttgggggatctttctaagaaccaacgggatgaccaagtaagtgtttgtgggaccgttgtttcaggtctaaaggaccctactagcgaacgtgttaattacaaggaactaccttctttatggtatatagaagaggtgagggatatcctcgtttcttgcgcatttgtttaaaaacgtctgggagaaactttccttggtggccgctgtggttctttttattctcatagaaacgc

SEQ ID NO: 685 - DNA, 342 bp, Glycine max
atataaatctgcctgcatgcatgctagaaagcaatggcttgcaagtattccaattttatcactattttaatacatctaaattgtttatttatactcgtataaacacatagatgaatgagattattctcgtgtaaaaactaatcgatgtcacgattttacctatctctgattcacatgacttcattttttttttgaagaattaatctgacaaggtttttagtctcaatcattgatataattcaccaaaatgcgtgggcaattggcattattggaatggaatggatcatataatcctaacaggaaaatcacaattatattataataatatatgttaaactatgt

SEQ ID NO: 686 - DNA, 584 bp, Glycine max
  unsure (1)..(584): unsure at all n locations
tctcaaagctatgttataggcgctctgataagagcatcacccttgttcataacagcctcaaattagtagctttgtggtgcatccttgctgcttacgtaacaccattctttatcattcctcacacggttcaccctcttctgggttggatcctgtatttgcttgctacttttgcactttgctcaattgcaatcaatatctttatgctaccaatgttaccagttttggtaccatggcttggaattgttggggtccttatggtcatggcatttccttggtatcctgatggggtagtgagagcactgtttgtctttgcttatgccttctgctctgcaccatttttgtgggcctctatggtgaggatagttcaaggtcttcagttatctctataaagggaagcttttctgccagcaagattgngagagtcttcgccaaattcatggtttaacaagttatattgagctgtctagttgggcacaccaatacaaggctgggacaaagagggaccttcttggcaagctcagccaacatagaagggagcatgatacattaaataccaaacatgcccagtaggcttcacaatgaat

SEQ ID NO: 687 - DNA, 342 bp, Glycine max
tttatgcataaagacctttcagaatgcagcttttcctcgtattttgaagatgcccagtgtgaagatgatcaaggtataggggcctgaccttcctttgcaatgaaaagaatgacctcaccccaacaagaatgccacctactggagaatgggcatcgattaccgccagctccaatgaagccccaagggaaatatccttttcctttccctttccatggaccaaaatttggaaaggctgggggacatgccctattactggcttttgggagggaatccttggggtccacacaaatgtgtggggaccccacggtatggaaaaaaaaacctctcaatcccctttggggg

SEQ ID NO: 688 - DNA, 576 bp, Glycine max
  unsure (1)..(576): unsure at all n locations
agcttatatatataatcgttctcactttatagcaccttgttcaattctaagacttacatcacgcatatggggaatacaagtgcagccctagtgtccatacttgccctaatcatgttctctacattcttcatgactttacaggctcgtagtactctccatggtcataatccattattcgctcacaaaaaagttgttgccatcgaaaaccttctccacaaatcgggtattcacatatcaaagcatgtacatattccaattggtaatgatctcccactagcacctgcagatagacttgcaccaggaggacctgatcctcagcataatgtaagagcaccaccacgcaagtcatagtttattatgtgtggagatcatatatagtggctacattcatgtatgcatgcatgccttgttttngttagctacagtggtgtgagcttaattttcaggtgtgcatgcatgcagtggtaccttcttcctagctaagttgtaaacttcatagtgttctcaaattgaataatgctatttctacccacaattttctacaatattttctcacaacaattttttttctctttg

SEQ ID NO: 689 - DNA, 640 bp, Glycine max
  unsure (1)..(640): unsure at all n locations
tacaaatctattttaagtctaagcccataaacaaaataaaataaaatctgggtaagataagataagattggatgaaataaaatctggacgaaataaaatctggataagataagatttgataaaataaaattgtctgctctcttcaagtccaagcccaattctggattcaagcccaattgcttataattctcctgaaattaaattaaaaacacaaaattagtcaagtaggcccaaatgataaaactgcataattaatttgataattaaggctaatcaataattaaaatggtgacaaaaagggttaagaaataggagaaaataatgacacatcaaatccccccacacttagccttttgcactcctgggcaaaatcaaaaagcaaagcaaaaaacaaatctagagacattaaagagaaacaaacaaacaaacacaaaaacaattacatatttctcaatgaatctcaaggaatgaaaggaatgggcaacatccaacacgtagagagttaaagaatcaagacagtcatgaaaatcatccaagcatctcanacatggcaagatagtcaatcagctcaagactgagaagtgataaagcctcataagatatacactctatctctcaagtgtctaggctactgtttact

SEQ ID NO: 690 - DNA, 416 bp, Glycine max
agcttgcctaattaacctgaaattgggagaaaatgattattaaacacacaaaatgaaaatactaagtatttattacctatatttaatagaaaatacttataaccttacaaaataaccatatattgggagagtttgatacaatttatacaagttttatacacaaaagttagtcattttcatcgactaacaactcccccaaatttacagttttgcttgtcctcaagcaaaaagagaacaactcacttgtcctcaagtgacaatgacatgcagtgactatgtacaaaggtgtatgctacaaagtgactgattgcatgataagagaatggagtaaaatgcccttatcacttgtctttcacaaggtatgcagttatccaaagagaagagcataatataaccctgacaaatagatagagtta

SEQ ID NO: 691 - DNA, 510 bp, Glycine max
tttgtgggagattcaacaacagctcatgcagatcccctaccagatatgcgacctgaggagaccacaactaatggcgcgcgtcgcgaagtattggtccagtggcctggttcatcccaacatggagcctcgtgggaagattggcaggaactccaggcggattacaaccttgaggacaaggttgtgtctgaagaacggggggatgatacgtgcgtagaggaggaagctacacaccaacgatgctcagctaggacaaagcagttacccaagcattgggacatttatcaactaggctaggaaacggggtacatgctgtgggttgggagtagcgggaaaagtagttacgtattgttcatattgttagggtttagcaataacagctaaccgtaaatggttaagcatgggtcctccattataaaagtcgtaactaacttgcaaagggcaatgagaatttctagaagcttctttctttcaaactccttctcttcctctcttctctgaacctgcgtccct

SEQ ID NO: 692 - DNA, 407 bp, Glycine max
agcttcacaaggtcattatggaaaataacataacacaataaaaagcaacacacaattaggtaaagaacaaacctaacaaggccataaaagaaaacataactctaaatgtaacatcataatcaaagtctaatcctagtagtcaactcttgaaaaagtcaacaaaagatggattagtagccccacatgcaatcaagctccgacacgcccagtggcatgttggaaacaccatcctccggcactggccagctgaggaagtcgccggagcctccgccggagaagggaggcgccgccgccgtggagaagaagaaaggtagctgaaggttgtcttgtagagacctcaaacttggaaaagcagaaagaccaacgtttctctgaaaccttgcaaaagggtcggttgcaagaggctg

SEQ ID NO: 693 - DNA, 484 bp, Glycine max
  unsure (1)..(484): unsure at all n locations
tgtaagcaattttcctaatttgtagtaagagaataaagctatcagatcactataaccaagaaaatgaggaagaaatgaatgctttgttgccatgaaagtaacaaatggagtaaaagagaaagaattataatgaaagagaggaggaatattttgttgtcatggaaggagtgtattgtttgggagaggaggggaggggagtgtgtgtccgggaaaaaaagaatttaaaataagaaggttatttaagttaatttggattaaaaaaataaaaaggaggtgtgcttagagaaaagggagtggatttaggaaatgccttgggtcacgcgctacactgctagaagtgcaaccgttactgcaagacgctatagctgagcgagggaaggacgaagttggcggcaagtttcgaagagagagagagaagaagcagtgggtggtcgaggtatcactttcttctccgcccccgccacgccctaaaccgncgcgggcg

SEQ ID NO: 694 - DNA, 361 bp, Glycine max
agcttccaagagttgaagaggcgattgacaacagcttcagtgttaattttgcccgaccctaagataccatttgaagtgtattgcgatgcaagcgggcaaggcttggggtgtgtgttaatgcaagagggaagagtagtggcttatgcttcacgccaattgcgtcctcatgaagttaactatccgacccatgatttggaactagcagttgtggtctttgccttaaagatttggaggcattatttatacggtactcgttttgaagttttcagtgatcataagagtctcaaatacttgtttgatcagaaggaactcaatatgaggcaacaaagatggatggagttcctcaaggattatgattttg

SEQ ID NO: 695 - DNA, 462 bp, Glycine max
tgagatgaggaagtgttgaagggtgaaacttcctgcttttattgttgaccacagagtggtacctggagatatgtcgcgggggtcaggagaccttggggacgttaggtggggtgctattgcccaaaaccaagcttgaccaatcccgacccaacccgggcatagtcggtcagtgagaacctgtgatgtacctaaacaggcgagctcctggcagtcaacagataaaaggaacaaagaccacaaagcaagggggcttgtggtggctggccaactgtgaaacttgattgatatgtgagatatggtctctggtaatcgattaccaagggtgggtaatcgattacaaggcttaaaaatgaaggcaggaggctaagatggtctctggtaatcgattaccaaggggtgtaatcgattaccaggcttgaaaaacgaagtcaggaaactaagggagcctctggtaatcgatta

SEQ ID NO: 696 - DNA, 552 bp, Glycine max
agcttgtacaatgtaattttatacaatgtataaatcatgatctaatgcaattctaattcctaccaaacttatcatataaaataatattatatagttcaaattttaaattaactactttaattaaactttcatgataattaatttccaatctcaattgtatttttgcagatcacacaacatataaatttctataatatgacttgtactttttaggatgttacaacagaaattgatatggagtcatagtgaggacaatcaaaaattaggagtgtaaaatgcgaaaaaggggaataaaggaaaaaagaaaaaagatgaataaacttgacaatcaattccaaaagagagaaatctaacggtttaaaagtcctcattcaccatgcaagacctatctcacttttgcatgctagaatctgtcataggctcaatatcttatgaacaaaagtgatttcatacacatatatcatttactagcatgttggtcctatgctatgcatggaagaaatatttgggaggagtcaactaattatttcaacatgtatataacaacatttg

SEQ ID NO: 697 - DNA, 418 bp, Glycine max
gactctatagaactctcacgcttctagccaaatggacttaccttgaattaattcctttgattgccctttggagcctagtttccctttccttgttttgaagctcactataagcttctagccaaatggatttgtgcagggcattctgttatgctattcattattcagagcttttgttttagggttatcgtttttctgcttgaggctactgttcacgtaatgcaattttacgttttctgcttctaattacagtttcgttcttgcttcttcttctattttcatttacgtttctgttcatttacgtttctgtttaatgtttcatttgcattttctgttagaatccatggaaggctagattttctggtgttgtttccttttgaggacgaagcccaactctctctgaggttttgcttgtaatgtg

SEQ ID NO: 698 - DNA, 495 bp, Glycine max
agcttgttgtgcaccatcgcccgaccgccacctagtaccacatgtgatgggtaccccataatcctacaagcttgagatgaggaagtgttgaagggtgaaacttcctgcttttattgttgaccacagagtggtacctggagatatgtcgcgggggtcaggagaccttggggacgtcaggtggggtgctattgcccaaaaccaagcttgaccaatcccgacccaacccgggcatagtcggtcagtgagaacctgtgatgtacctaagcaggcgagctcctggcagtcaacagataaaaggaaaacaagaccacaaagcaaggaggcttgtggcggctggccagctgtgaattttgcataatatgtggattgtggcctctggtaatcgattaccaagggtgggtaatcgattacaaggcttaaaattgaagacaggaggctaagatggtctctggtaatcgattaccaaggggtgtaatcgattaccaagcttgaaaa

SEQ ID NO: 699 - DNA, 609 bp, Glycine max
  unsure (1)..(609): unsure at all n locations
ttgttcttttataaaatgggaaattctgaactcatcatgttatctaaaaaaccttggggtggatccaagtgctccgatcattcatttgcatgttcatgttttggtggcatactcaccattgtttatctctttaggaatttcatcataactaagaaaacaccaaggcacccctataacactcgatccagaaaaatggataatgaagagggcgtgcaggaacagatgaaggccgatctatcggctttaaaagatcaaatggcttccatctcggaggtcatgttaaaactccagaaaactatagaggataaagccacgacaaccgcctccattacggttagggaagcggagccggtgctgcagcccaccttaaatccaggccgagacagaaacacgaccgtgtttggttgaaggtatagtccgcaagcttatccttatggcttgcctccagacttcaccccccgtgccaccccggaagatttaagccaatcccctaatttcgaggggcaactcccaccttatgacaactatcccgggcaagacgatgaggaaggagatacccatcttggcccccttgctcacctcanagatctgtccccccatgaactaccc

SEQ ID NO: 700 - DNA, 485 bp, Glycine max
  unsure (1)..(485): unsure at all n locations
agctttgaagagtgtttttttccaccttcttgctaagccaatctgctggcttagtgagcttccgctaagcgtaacacttatgggctaagtgcaaggaagactctagaagaagacaagcttaaagtaggagccgatttgagagcttgagacgagtttgtgagtgattgtgagatcctagaggtgaaggagacatcctcaccacttgtatttttgcaatctttcatcttgttcttctctttgttgtaaagagggcttcctggtatggaaagctaaatcttctgttggatctttcctgtaggtacctgatgtaaatatatttctatctatttaatgatgttntgtgtgttctctgtgctatctgcttttcactccagtatacctttaccttgatcatgtagatgcatgctttgttagggtcattcaacaatggaaactggtctgactctaaagtccttgatagtacaggggtaagttgtcgtactatc

SEQ ID NO: 701 - DNA, 520 bp, Glycine max
tggctcaacgtctatgcgagacagaaaccaacatgtttgctatcatcgcccagtaccaagaagagttgggtctagccacggcccacgagcatagaatcgcggatgagtatgcccaagtatatgcggaaaaagaagctagaggaagggggatcgactctttacaccaagaggcaaccatgtggatggatcggtttgctcttaccttgaacgggagtcaagaacttccccgattattagccaaggccaaggcgatggcagacacctactccgcccccgaagagattcatgggcttctcggctattgtcagcatatgatagacttaatgacccacataattagaaatcgttaggaaacttgtatggtctctcagaccttgactagatatgatttctttttttgaaataaaatgagttggtcccatgtttctactccaaaaagcttgtgcaaatcaaatcactcctacatctcatctctagcatgcattttctttctttacccactcctcacgtttggtttttt

SEQ ID NO: 702 - DNA, 431 bp, Glycine max
  unsure (1)..(431): unsure at all n locations
agctttagttgaatagaataatcctattatgtcaaagaattgggtattgaaaaagcataacaagactttttgtgattggtttaaagatacaatctttgcagatgagaatgcttcaaaaacattaagaaagctagcagatgggcctaaaagaaatgttataacttggcaaggatacgacataaacaagtattcattttacacaaaagcacaagatgacaaaagtacaatgtagaacagcggggtcaccctaagggctgaatctcaacactttgcaagtgtaaatgacgccaatccctgtgtatcttccatcccttactttgggttcattgatgaaatttgggagcttaactatgtgaaatttacggtatgtgttttcaaatgtanatgggttgacagcaacaccgggtggcgcactgatgatataggattta

SEQ ID NO: 703 - DNA, 549 bp, Glycine max
  unsure (1)..(549): unsure at all n locations
tctagccaaatggacttaccttgaattaattcctttgatagcccttttgagccttgtttccctttccttgttttgaagctcactacaagccttaagtgaaaaaccatgatatcaccatatccttaaggaattttggagctttggaattgttttgggaataagtatggggggtttttgtttcattggacaacttgttttgttggctatgcttcatgatgtattttgggtgatacttgatgtacattgtatattggttaaatgttgggcatgctgaatgaaatgttgtttctcaaaggctatagagtaaaaaaaaaaaaaaatattcgaaaaagaaaaaaaaaattcgaaaaaagaaaaagaaaagcaataaagttgagtgaataagatcttaaatggcacaagaatgatgaaactcttggttctactcttcatgtttaatttttatctttacttctttntattttcttatttttttcttaatatgcacttattcccctttgctcctctattcctttgggattagccactttatttcatattatccatacc

SEQ ID NO: 704 - DNA, 469 bp, Glycine max
agcttagcttcgaaccaaaaaaacaacacatttctattttgtgaggatgaaaaacatactgaaaattttgcaaggataaattccaaacattttgatatttataagaacaaaaaatatattttagccttgtttttattgttaaaaaaaaagagaaatgctactaacatactctttaacacactccttcatacacactttctcttatgtgttaaaatgtatttacttgaagaacaagttccacaaaatcttgaacctaccaagtgtgatggttgggattggtatgagtgggatcatttgccacaccctttggttgggcctcttgagaaaatggtcaaaggagctttcgacccatttccaatttgattctggtaattggtaatgattttttcgtgaggattcttggataatcgtacgtttgggttaggtttaatatgtttttgtatggaatttttgtttagtctaacttatt

SEQ ID NO: 705 - DNA, 420 bp, Glycine max
gggacgaattcgaagcgaagcttctggtgggagtcctctttaaaccagacactatgcgacaatttctttgccatgctctatctttctctctctcaaatccaacgagcctagcctctcttgcttctctttctatacccttcgcagtctctatttatactccgaagccttcttgtccttgcccactcctatcaccggcatgacaacctggatgacaagaggagagccttgccctctttgtgtctccctcgaaatctaggactccaacaatgactgcctcgtcatcaagtcggaccttccaactcgtatgttggctgaaccctgacactgtgcaccactggctcttcctccgatggatgcctctacatgacaaccagatttgcgagggtgtacggcggaggctgtgcgagggtggactcgcaa

SEQ ID NO: 706 - DNA, 586 bp, Glycine max
  unsure (1)..(586): unsure at all n locations
nttggggccttttannngcattgtaccagcgatctgtagagtganctgttgcgtggcgaatactcatcaaaccagtaaccaatatatatatatggttgtgtaatagtgcctacttcacatattatgagcgcgtagtacagtcgtgctctgtacataattacaagttcaatgtcaggacttatggccgaaaactcaagttaatgactgaaaaataaatcaagctccacactttggacaaaaagatagtgtacctgatattctgatcttatttcccaatactaacatcgatcatgtgagcccatgaagtgttatgcttaccacatgtctgctagatatacgtacatgatgacgagaataattgcttggagcatttatgaattgcggccaagttgagacccattcacccatgctcgctagatacatcaacatagggcccatgtcttaactatcagcattctgatgctatcagangagggtgctaagactcactgcattgattacatattangtaccaagcggccaccagaaacgatctcacaaacatatattttatgggtataggatagtagatgactttaatgtaagg

SEQ ID NO: 707 - DNA, 454 bp, Glycine max
  unsure (1)..(454): unsure at all n locations
agctgtgctaacagagtctctcgatcagaaaactaatcattatatgatgctatcctctncatttacttctggatgtcaagtggagttgtcaaccaacaacagtggtgtatgtcagtgaaggaatcatcatcatacaagtaatactaacagatctacaagccaatctcgataaataaaaagaaataggagggcatgagcatcacattaacctccggcaatgtaaggcaacgatttgcccatgtatagntaagatatatntttctttataatttcttgctctattaattaagcaacacgacggaaaatggtatgaaatgctgaaaaagggtccctaaaaggaccacttggactcaataggtaataaaactnttattcaatactggtatgctctattcgctgaaagttcttgaaacatataccactgtgttgatgaatggtgagcacataattacgt

SEQ ID NO: 708 - DNA, 408 bp, Glycine max
  unsure (1)..(408): unsure at all n locations
agcttgtgcttgattctntaggtcattggagcattaaatgcacattcttcttgatgcaacanaattactctgatnggcttttgtgtagaatacttcagtataaaaccacttttccttggtcaaagcatgtttttcacatctgaatgcgtcttttgatgttgttttaaccaatttttaactttagtttcatttattattcataggattcgacaaatcataggagaatgtctctccaaaatgaatctcagacacagaanaataaataaagtgtgaaatatcattntttaatgttgtatcaggtcatgacttggtcctatcttcatctaatacttntgacgcatgatgtatacaacatgatctgatatcgcataagatacaactnttaacccttgtattatttgcatcgat

SEQ ID NO: 709 - DNA, 420 bp, Glycine max
  unsure (1)..(420): unsure at all n locations
gctggacgttggaaaggggtttggaagaaagaaggagatatgaatgactggtttccatggctacacgnaaaataagacttgaaacactcaagtgtttctgctctcgggaaaagaagcctttttcacacaccaaaataaatatcagacatcgcaacggtcagatcgtgaacatctgtcctgtgaaccaccagaccaaatttcgagaagatccaacggttaatgaatgcaagagggcacttttactgagacagctttaggaagcttccttgagaagctnttctcgataggcttctttgagaagcttccttgagaggcttctntgagaagcttccttgagaggcttccttcagaggcttctttgagaaagctagaatttaactattcacacccttctaataacctcacctttgaataaaacat

SEQ ID NO: 710 - DNA, 566 bp, Glycine max
  unsure (1)..(566): unsure at all n locations
atgannccctgtancgccatcgtaccgcgatcctcagagtganctgttgcgtggagaatactcatcanagccagtaaccatgtatatatatggtcgtgtaatagtgcctacttgcgcatattcatggccgcggcgtacggtcgtgctctgtacgtacttacaagttcgatgcaaggacttatggccgaaaacgcaagttacatgactcgaaaaatagatcaagctccacctttgcgacaaaagnagttgtacctgttattctcataacatttcccaaaaataacatcgataatgtgagacatgacatgttgtttatctgaatgtaagctcgcttagccgtacagttgccgtgatgaaatacgctgagctcaggtaaactccgcttagcgcgaggctacaacacaaaatttctaagtactttggctagcgatcagcctcgcttagccacagtatctaacaggaggatgagtnttcatctcacagataaaactcatagcgcataagcgcgctagcgagtcatctagaaatgatacgtcaagaatntnggtgactcgctagtgcgcatg

SEQ ID NO: 711 - DNA, 401 bp, Glycine max
  unsure (1)..(401): unsure at all n locations
ntgacccttacgccatgtcngcatcttaagcaccgggctcagctactacaagagtagctaccaagcccttccactcgagtaaacgagaatgggctacgctctgcccgctagcctagctaaagctcaagtacagaatgatgggggcttatgcngatagtgcacttacactgtacatgaatgttacaaaagagaggngctacgcatctcacctagccacagttaagttaatactgaaaattgggataccaggatggcgctactgactataccacaagtgacattgtatacgcacactcgctatctgcgatgcctacgaggctgctacaatacatgaagaatttaacttctgtattttccactacgcctgtatctacagctatatacatcacaattcactctgg

SEQ ID NO: 712 - DNA, 370 bp, Glycine max
  unsure (1)..(370): unsure at all n locations
cgcacacaggttattatttctgaatgataataaaaagaaacgcatgctaatatttntttgattaaatactntattaattagcattactattacctctttattgagaattgtcatttgtgataggagtattcttattcttattntaaaatgactggaactcgtacgaataagacttttgctgcgtgttgacaagaacaattaaacgtcaatgactgaaaaactcatacgaataaatcgtacgtgatcaataacttaatttttagtcagcgtcaattagaagccatatgatatgagatagaagtgcttganaattcacatgcatgtaattaagaagagatagagattgttcttgactagtattaataatatt

SEQ ID NO: 713 - DNA, 240 bp, Glycine max
  unsure (1)..(240): unsure at all n locations
ctattcttgataatgttcttttggtatctgaaattgttcaacacttgagatgcaagcagaaaggtaaaattaggaagtttctcttgaaaatgatattagcaaggccttttacactactagaanaatggctttttacgacacgtgatctacgacggttatttgcggaaccgctttagaaagtggtgcggnggcactnttgtaatttttgtgtaataaattgcattttacgacgcactttct

SEQ ID NO: 714 - DNA, 340 bp, Glycine max
  unsure (1)..(340): unsure at all n locations
gcttgaactgcactctctcgtagctggtggtatgtagaagctnttttcctactngtgcacatatgatgatgagagaaagctatgggaatgccggtgcaattgctgtaggccttgtgcaattacttgaatagagaagctacctgcattcatgtggtactattatttatcatctcattnttgggtgcatttttaatattgcagcacataaaaaccacatatggaagttgcatatgttagaattgcgtacttcagaaagtgcatggcctgggttgccctcttctgtccattcatgcagcattgngctttgttttcccttacacctgtacctttagtatttatt

SEQ ID NO: 715 - DNA, 568 bp, Glycine max
  unsure (1)..(568): unsure at all n locations
nttganactttgnncctgtgcncgtcgaaccgcgaccttaagtcacctgaggcatgcaagcttctaaggaggtgagnctagttatgagaggtgtgtgtgtatctaagctctagcttcttaanggaagttntctcanagaagcttctcaaggaagttntctcaagaaagcttctcaaggaagctacctagtctataaatagaagcatgtgntacacttttgttgtacttgatgaatgagagtcttgtgagacacaactcanagttcaacttctctcctttnttcttccttcaatttcgggctccccctccctctgtctctccctctttcttttcctccattgaagcatcctcttccaagcttcttatccaaggctcatnctggtggtgaagctcctttcttcatggccntattcctagnggatgggcgcctctctcacctatttctcttttgtctncgctgtatctccatgggggaaatcacattaaaggacctcattgagctcaagatccagctcatagagcccacaagcagcttcatanagctgcatctcttattcatcagttcctn

SEQ ID NO: 716 - DNA, 95 bp, Glycine max
  unsure (1)..(95): unsure at all n locations
ggtctctgtggatcttcacagaacanaatctctcatactctctgaaactgggacctttctctctctagaactctctagacatgcagaagcttcaa

SEQ ID NO: 717 - DNA, 302 bp, Glycine max
atcatccatctttgtgaacgcagtatgtattaacaatacaaaaaatataagcaataccttaaaacaatccttgatacggtcaagagaacagcgacgaacgttgacattatgaaatatgtaacatctgagcgacgactataagtagatgaatatttatcctatgactattactgaccacatacgccataaaatgaagtacaatatgcgacactcgttaagtaaccattatttacaagaaagatagtgaaaaaaggaaacctgtataatactatcgtctgtgaaattaacattacaagatccct

SEQ ID NO: 718 - DNA, 182 bp, Glycine max
  unsure (1)..(182): unsure at all n locations
acgtcgaagaacggntgaaaccttngcgagattcctcacggaaaacgttacggaaacgtnntcgaagcgcttcggcttatgattntcttcacggaaacatattttccaagcanattcgaaagagagagaagtgcctaaggggctggatccctttcttcttcatttcctcccctatntatagc

SEQ ID NO: 719 - DNA, 462 bp, Glycine max
  unsure (1)..(462): unsure at all n locations
agcttaagtgtgattcctttctttttcttatcattctcctcatgttgattcagtctcattagttccatttcgtgttcctataactntccaaataaagttgcaagagacatgttagaaagatcccttgattctgtaatagttggtacctttggctgtcattccctacttaaacatcttagaactttattaataagatcctcattgngaaatatctttcctaatgatgcaagatgatttactatgtgtgtgaatctcttttgcatatcatgtatagtttcattttggatcaatctacacaattcatattcatgggttaaggtatttattctagacctctntacatctattgttccttcatggggtactngtaanggatcccacatatcttttgcactctgcaattngtactctaaagattcatccattcctaaggagatgtaattatatttggctctaaatata

SEQ ID NO: 720 - DNA, 217 bp, Glycine max
ggctgccttgtctcctaacatttctatgttaacagcttatatttaactttagcctatcctccgtctttatacgtattccagccttatgccatctgttaatgcatcaatttatcttataaaataacctcgaccgccttcgcgaacatggtgttaatcatgttcgcccatgaactttatatcgtgtattactatattcctggttcccactgtatcgccg

SEQ ID NO: 721 - DNA, 286 bp, Glycine max
  unsure (1)..(286): unsure at all n locations
gctgacaacttagttcttttatcataatcttaatattatgataaagtagaattatttggtcctatcactctcacatgggagtggaagaaatagtgatanagacaaaacctatagatcttttggaaattgatgtactggctatggtagagcacaatattnttcgcatggaccatataagtggacatcaaccatattcgatagttcactagccataagctatganaacttgatcgaaaatgaatgtgaagttttatgaattaacatatacaaccaacaatatgtagag

SEQ ID NO: 722 - DNA, 346 bp, Glycine max
ctgcagcttgcatctctctactattatttatataattttaacatctaaagaaatcaattctttgcatagcttctgagtgatttgcttataaagtcatatggattataagtcctttataaccaaaaattatggggaaaccatgatatgctcttaaaatttatatatattattctaaattaaataggaaaatgtgaaaatttttatattaaataaaatattctttaatatgtttttaaaaaaagcttaaatatctcggaaactaacatcccccttcttcatacttactgacatttcttggacgacagcttaacgagaattgtgcagtttttttatgtatgacagattg

SEQ ID NO: 723 - DNA, 345 bp, Glycine max
  unsure (1)..(345): unsure at all n locations
tcaatggtgcaaaacacaccaaatgattataatgatggatggctcanattctcacaaaggtaaaatcatcactttcaaattgagctttcaaaactgtcatgacatgtagagaataatcaaggatttcaagtcacaacatgtcaagaacttttattntcaaaacaattacccatttcttgaacatatcctataattcaaagaagaacatgcaaagtcgtacgtgcacacaaaattgacccaagatattaaactaanaaatcgacgaaactaacacattaacaaattacacaactaacaaacccacatactagcaaaaccaagacactccnnccatacttaacacac

SEQ ID NO: 724 - DNA, 493 bp, Glycine max
  unsure (1)..(493): unsure at all n locations
nttgacnnccttgannnccntcgacccgcgatcctctgagtcacctgaggcatgcaagctaagcgtgttggaaccaagataagcgtgaccaagcttaattgtagcatgagctangcttaagagtgactaagaataagcgtaggctggactangcttaagcaagatgacctacaaggtgaaatgagctactagatttcaagctttagcgtggagtgagccaagctaagcatgtggtaggccatgctaatgcatangttgagctagactaagtgaagaccttgtggatgngtatgaatatttataaatgaattcaatggagtttcctagtgatgaaactatngatgcataatggtttaatgttgggtggagatcaaatttaaaagtattatgattgaaagtgactgattaagttgattctcaccctaatatatataaatgtatgctgatggaaacaaagctgtaactggcaatgtggctgaaactgtcagggggc

SEQ ID NO: 725 - DNA, 369 bp, Glycine max
  unsure (1)..(369): unsure at all n locations
agcttgaaagagtgcctagtgtagcanatagagtatctgangataagntttttatgcagggagtatactcattgctgccaacaacatgcatgtgtgtcaagctatcctcatagcatactaatgtcaaatatgaagtagggtcaatgttgcaaaagtctatgatgctgctcatagtacctagtgctgatggatagcccagacgttgctgtaccttgagaagtgtttgagactgagaaaactctaactgctctgagagttggatggtggcaagacacatagttaaatggagtaaatgtgataaggagactgggtttggtgccatcttctcttcaatggatagagagagagagcgagggagagtgatcacgt

SEQ ID NO: 726 - DNA, 579 bp, Glycine max
  unsure (1)..(579): unsure at all n locations
nttgaaaccttgaccngcgtggtcagagcgatctgtagagtgaactgaagcatgcaagctntgtgctgagtgtgatatattntctttctatcanacatctatgtgtagagatcatctactacacatgaatgaagtaagcgttcagctacgattaatgatctttctcttacagagtctacaataaaagtaccacttcggaaagtaacgttatgcagtcgcatgtgccaaggtaagagatcagaatctctaaagctggtgtaacgttcatatattctttcatggattgtacataacactcagtatttattattgatcaaacaatatcaacactacccatagatngtaatttaccgtgttaagatcagcagtataanagatttgatgtactctatatatatganggaagaagcaantggcctacaagaactctgcgaataattaacagtatcaaggcagctgattgttacagaactttctataccacagggctatatgatggtctgatagaaattggactctctacactggtcgcgacaggaaanntagtgagaactagtgccctatattatttatgacagg

SEQ ID NO: 727 - DNA, 381 bp, Glycine max
  unsure (1)..(381): unsure at all n locations
atctgaggatgaagcttagnnttanagtagtctaaacctacgacggctgtctaaattaagcctagtccaacaagagggatctgangacgaagcttggatngattcggtctaactagggatcgaggggttagtaattaggcttacacatataacacaaaagcatgattgattagagaaaccatcttatatacatcagcttngttgctacaaagacccaacatttttacctactacagnncaatntacttacttgcattnntaatttttagcctagatttagttaaagtctgtttcaaccataatcattatgttctttcacatgcttattctaatgaaccctgctaatattagtcctgagttgatctcgatcatcttttattt

SEQ ID NO: 728 - DNA, 535 bp, Glycine max
  unsure (1)..(535): unsure at all n locations
ntttgaacccctgtaccgncgaccttaagtcacctgaggcatgaagctagcaacagtctcaagacacaatattattcgagaccatgtgtgatgatagctagtataccagtgtgtgctagatgttaatgtcgaatcataagctttactctctcatgtggccttcggcgtatatgtttgccgtgcaactgagtgagatctatcattaccctttgttaatatgcagaagtagccacatggcaacataatctatccagcanatgctaccatcgatggccaagctatggtccagaaccaacaaaatgcctcatgtcccatttctttcatcttctagaattattggagcttctgcagaattaaaagaangcattggttcctcatttcaacatgactctactggttaggttataattcactcnattctggctttagtcattntcacagtcagaactatcaacatgcaaagagatcntattcttgcaaagccaggatcaacaggaaacgtatcatgcaacagaagcgacatcctatgctcagg

SEQ ID NO: 729 - DNA, 126 bp, Glycine max
aagttttttaacttgttgggtgcctctgctcttcttaatttgctctatttttaagttacattatcaatttgttgcagacataccgtcttttatacaaattgcttcaccataaacctcctatactct

SEQ ID NO: 730 - DNA, 332 bp, Glycine max
  unsure (1)..(332): unsure at all n locations
tatatcccaatcttacactactagtcgtgagttatgcaacctgcagaaggcataagaaagggtgagaatgtcattcattataggaagattganagcatttgtatttagctttaatccatccccacganttagacttaatntcttcaatgacatactctgcacaaggctgctagttccgaaaaatgacaacatttcaatgattccaaatggaccaaactactgcaacccanatgagcataagtacaccttgagactttacacctttaaccaagccataatgacttcaaaaatggtggacttaggcagccttctagtactctcacccacagagc

SEQ ID NO: 731 - DNA, 387 bp, Glycine max
  unsure (1)..(387): unsure at all n locations
agcttagaacaatatactngtccttcacttaattgtctntgtgcttggcgaccacgatcattatagtactttcggcacctgctatatgttgacttgaccaatgctgttatgggtatgctgcgacaatccttcaacaccatattcacacattctgagagattggttgtcatgtgaccatatctatgtccagatgtatcgtaagtcatgctccattttttctttgaaatgcgatcaatccatgttgctatggctggactcaattaacgaattntntctaaattttgatcaaacacatgcttgcaaggagtgtacgctgcatcaagtttgttaccatcaaaagttgacgtagatatgatagagacaataacttctttataaataaaccta

SEQ ID NO: 732 - DNA, 390 bp, Glycine max
  unsure (1)..(390): unsure at all n locations
tgtagaactgtccaatatcgcgaagtgaacctcggatccctgtctgatacaatactggaagggaattcatgcaaccttaccacttctttgatatacaactccactagctnnttccatttatacttcatattcaccggaataanatgagcagaatcggtaagtcgatctacataatcagccacattcttcttcatgccatgccaccaaaaacttctcttcaaatcttggtacattctagtcattccaggatggaaactaagacgacttntatgcgcttcttccaagatcttaactttcaaatcatctaaagatgacacgcatatccttcccttgaatctaattaacccgggtgtgtccttctcanactctnacatccttatccccattaca

SEQ ID NO: 733 - DNA, 177 bp, Glycine max
  unsure (1)..(177): unsure at all n locations
aaaactcactctatttccactcataacaccatattctcactttctaaccctaggttaactctacccttcatccctaacagtcttacataagcaatnttagcacaccaacattcaaagcatcatcataaaaaccgctaaactgaatgggtaagcttaactcactcaaacataacaagt

SEQ ID NO: 734 - DNA, 268 bp, Glycine max
  unsure (1)..(268): unsure at all n locations
tggcttagcgagcngccgctaagcgcaacactcatgggctaagcacgaggaagactctggaagaagatgagctgtacaagctcgctaagcgcactactttatctcactaagcgcaccgcttcatctcactaagcgcaccgcttcaattatccactaagaagaaaaggcacgcgcgtaaccaaaattcactaatgtgcgctaagcgcgccataagtgcgctaagcacacgagcacgaacaaggctacctatttatgcctgaaatcagat

SEQ ID NO: 735 - DNA, 581 bp, Glycine max
  unsure (1)..(581): unsure at all n locations
ntgnngacattgatngccttagaccngtgatcctcacagtcacctgaggctgcaagctaatagaatatgaantataagncaagtctgagagctatatattnggttttatacactgcttttttttttgcacttttntgtggttgggatcgccatattttctgtgtctcacattctagaaagtcttgctcaaacctctaactagttacaatctgaatcctatatagtcagncaccttatactgattntatttttcttaaaagtctaagaactttgtaaactgtttgtgtgcaaatgttttgcatggtgtggtgtattgaggagtaataagggaaataccaactattcttgatgtgtgaatttaaaaactattagaatggatatccttgtaccacacggtcaagatatgtgaatgtgtgatgtttgtctattctcgatgcctgagactatgtgacataacatcttaccaatgatatatttgagaacattataaaggaagcaagtgcctaccctgagactatgcttgatggctgggtatgatgataaanatanaanagagacgtataaacntgtggctgagaatn

SEQ ID NO: 736 - DNA, 80 bp, Glycine max
taactagatgattaagatgatgcatgtttatgtgtgcagtcttattgatgcaatcctaccccgcaaggacattggataga

SEQ ID NO: 737 - DNA, 413 bp, Glycine max
  unsure (1)..(413): unsure at all n locations
agcttaatgaaacanaatcggggaaactcanagaaatatcatctgaagatctatgcctaaagcatgcttggtgagatagtctatcaatatcgcactattcaccatctcctagtagacatgattgattataacaggtactccatcaatgcaaaggcgcttaatggtatgaacaaaagggaagctccggtggcgagaagagcaacactcaaattcaaaagagacacgacaatgctagtttcgatcttcacattaattttgttcgtaaaccatgaattaggccctgaatgctcaacttgaactattgtacaggttccagtcgagcaagataaaacattaatgaaagcacctaagatatcatgaatcacaccatcgcataacgcacatctagatgactcgagaaaagctacgttgca

SEQ ID NO: 738 - DNA, 563 bp, Glycine max
  unsure (1)..(563): unsure at all n locations
nttttgaancncccattgcgtacacggccatcctntagagtcgacctgccgcatgcaagcatctatccaggcattctcttgtgtggtgaagctcctcctctctatgacnttattcatttagtgagacgacgcactctctcttatcctctatctcactttaccttatcgcggcataatccatggtcgaaaatcaccatnggaatgaggctcactgaaagctcaactattcaaccttcattgaaaactctcaagcaaccttgcatcataactggtgcttaactctattaacccttaatgagtaccaatctcatctagctcgtgggaagtctttacaagataccttgccagagttatatctatcaagttatgaggaatcctacacatagacattaatgtctcgcacttgtctattctgcgggagaaaacacttctaatagcatagagatagccaacaaattgatatgttagtcaaaattatgaagacaccatgtgtagtgtcctaagctgactatcaaaagaaccattacatggtaagaaggtctntcttgcactcatattcgccg

SEQ ID NO: 739 - DNA, 557 bp, Glycine max
  unsure (1)..(557): unsure at all n locations
nttggcccctgaccgctatcctctgagtcacctgcggcatgcaagcttgcctcanagaggtccaggaaagacaaggcggncgaaagaactaataccgctccggttacgacagtcaccgctttaggagtgctgtacaccagcagcgcttcgaggccatcaagggatggtcgtttctttcggagcgacgcgtccagctcanggacgacgagtatactgatttccaggaggaaaatgggcgccggcggtggacatcactggttactcccatggccaagttcgatccagaaatagtccttgagtttatgccaatgcttggaaaaattggttccgtgaagaanatctaagtcgaggcgcttccgaaacgtntccgtaacgttttccgtgaagaatttcgcanaggtttcaaccgttcttcgacgttctcattcgtcttcatcgtcttcgatctcaacgggaagtacctcaaccaagttttcgattcatctatgacnccgagtggccacattgtattcgngcatttattctcgtttgttacttttatacccctgtgacggctn

SEQ ID NO: 740 - DNA, 350 bp, Glycine max
aaaaagaaaaaaataaaaaagagtatccttaatgtttacacttgcacatttgagaagcaaactcattcgaccaggagctcatggaaggtgctcaaagacaattgtgatagtagggtacatctagtgttagtcactcatgtagactctctagggttcccatgtcatcaagaatcagcaggatcgatagatccatggcatccctctaagatcttaaatcaagagagtttcacttggtcatataccaaagtgtaacaacccattgccatctttcaatggtgcacgtggtcggtccaaaagccttacatttccttgctgtggaaaataatcgaaagttttttttaaaaacaaaa

SEQ ID NO: 741 - DNA, 436 bp, Glycine max
  unsure (1)..(436): unsure at all n locations
gcttaacagtaagtttcattntatatgtagctatgactggtccanagntagtatgtatatacganacataccttcatttgttaaatattggcataaatntatanttatacagtaataaatggtctgaaaatgagatagaaaactggagggccctcagctcccctttcttccaagtccaaaggtaaacaaataaaaataaaaataaaataaacatcttctttctttaatttgaaggggtgaatatgattcctgcacctatgctntaaattgttaatctaacactaatagtaattaagaaactgataatgacttctattctaaccaagtgatccaatagtgatccaatgtataatntcagaataagattcagaatgatctttaagtatganataaatcatattctaaccaagtgatccaatagtgatccaatgtacaa

SEQ ID NO: 742 - DNA, 341 bp, Glycine max
  unsure (1)..(341): unsure at all n locations
gatctccttttggtgctctanattatgggaatgtgctcaaatatgtggggccaatttggttggttttcttgcttgattgggttgaattgggggtttgtatgagatggacctangcctattatgcattttgaagtaatggggcatgccacattgtctccgttctcttgctattaatgcctaaacgcgcgcccaccaagtgttcggtgaaatgcctcaatggcattagcgtgtgattttcgtanggaaacaacccatggngcattttggtttgcacatattttctatttttttttgngacatgcattcagtttagaaagggctagagtaattgccccacatat

SEQ ID NO: 743 - DNA, 408 bp, Glycine max
  unsure (1)..(408): unsure at all n locations
gcaagcttatgaatgatatgagtcgaactcatttgcttattcaatttctaattataaatattatccatactttatntatttatttattctataaaaaacatttaatgtgagattaattaattaaaacacatcacttaataaatcattaagaattataccttaattatatttttgtattaaaataaataatataataatgaaggagaaatccctcgagaaaaacataatttgtagaaatgaaccactcctctcacattaaagttctaccaacacatgtatggngcgtgtatagatatttgttttatcacgcgtatgagaatggttctatagtaccctttngagatcctattcatngttatccatattgatgatccacttttgtgtcaagagctactcatattttatact

SEQ ID NO: 744 - DNA, 312 bp, Glycine max
atacaacttacagtaaaagaatagtgacaataacataattatggaaataacataaatacaaaattcagtgcgtcggaaatacgtaaattatggaaatgacttaaattaattcaagagaacataggatcggatttcatcgtttatacccttagtatcctaataagattaacatatattaaatcatttctaacattactgatgcacacatagttattccaagttgatccctcgcacttggaacctaagaatatttactacatatcgatccctcgcataagcagtaaataccccagcattataattatattctcg

SEQ ID NO: 745 - DNA, 371 bp, Glycine max
  unsure (1)..(371): unsure at all n locations
agctntataagtgcgggtctgggagacgaatgtcaagtgttctctatatgtgaagatgatgttccaagtacttcngatntggtccgaccatgccctcctgatttccagctgggaaattggcgagtggaggaacgccctcgcatttacgcaacaagcataatgtanaccttaacggtntaaaagctctatagtgggcctaggctttagagtcttcgttttgtaaggctttgcgtcttctgcttttgaatttataatacaaggatctttcttcatctggtcctggtctctacccattctcattcatttgcatggttacttctttttctgaaacggcagattcgatgacgagtcctccgaaggtactaatacct

SEQ ID NO: 746 - DNA, 354 bp, Glycine max
  unsure (1)..(354): unsure at all n locations
agcttgcaattatttaagaacttaggaagacactccacatatcanatctatctagatntttgtttaataaatatgttcacccttgtttctagctatgttntaacaaaaatcatttcgtgaactaaaanacacagtttatttattatgaacaaattatttttataagatcacaggccatcgttcattgangaaaggaagaaagattgagtctctatgtggatacatagacgatggttacctgaacggccagttaggtgtgactcatgcactangaaactgtcatctccaaggaatgaaggaaattaatggagagggtggaccattgagtgttgaacctgaacttatattaatcac

SEQ ID NO: 747 - DNA, 333 bp, Glycine max
  unsure (1)..(333): unsure at all n locations
cgtgctcgtgtgcttagcgcaattctgaaccacttagcgtgcattagtgaatttcggcttagcgcatgctnttctcgctcagcggatggactgaaccggtgcgcttagcaagatgacccttcgctcaacaaacacacatagctcatccttcttccagattcttcctcgcgcttagccgaggaatgttgcgctcagcagatggctcgctatgccaacaaattggcttagcgagagagtgaaaatcagcacttcaaaacttgcctaattatcctgagagtgaaagaaaaatattattaaacacacaaaatggaagtactaagtatttattaccta

SEQ ID NO: 748 - DNA, 477 bp, Glycine max
  unsure (1)..(477): unsure at all n locations
ttggccattgggccgttccgtcgaccgcgatccttgagtcacctgcggcatgcaagcttgtgtattgatgcattctactaatatatggaattggccactgctctgcctgagaataacaattgcttgaccacaacaacgctggatgctgttagaaggacaatggtctttcatanacctgttgtcatgacaaagatatatctgcggtgccgtgtatatgaccacgaagcattgcatgttgtatacaactatatcatgccctggcaaatgatttcgaccgtgaccgaccatatatgagtgctcaaaaatacggggtgtgcttctaaagaaaatgctgcttgttgcggacacgatcatgatacgttaccggagcatacattccatttcgttatcatcacttgtccctacctgatcaccaactaccatgagtatttagttgtattaaaatacctatacatcttaaaccttccagtgggcact

SEQ ID NO: 749 - DNA, 306 bp, Glycine max
  unsure (1)..(306): unsure at all n locations
agcttattattgttagggtttcttctgtaatggctggctgaacaccctagttggggatntcaaatgagcagctgatgtaaatacctaatatctaattgattggtgtttttggggtcaatgcttccttcaatgctngatagttgtatgctnttggtctgatcatccatttgtgttcacagttaggtgactntagcatngngaaatgtactattgccttagaacttgattgaagcangatcaaaacttagtcttacatgagggatctgcgggttaaagtttggtntaattatgttgtaccataatgct

SEQ ID NO: 750 - DNA, 352 bp, Glycine max
  unsure (1)..(352): unsure at all n locations
gcgatccttaagtcacctgcggctgcagcttcgtggtanataggtgcaccatntccttagagcctctcacgtgtggaggtgtgccatgttctcagaatgttcanaatcagaatgctcagaatcagaatgctcaaaattataatgctccaaatcaggatgttcaaaatcaccaataacagaatgcacaaattcaccagtaatggaatgctcaggatgatcaaaaggtataaaatgatgcctaactaatctatgaaatgtcctatctatctcangatcaaagggttgtaagtcagatggattgcctctagtcatacactacattcagcatgcacaactagttgccttgtcatgt

SEQ ID NO: 751 - DNA, 302 bp, Glycine max
  unsure (1)..(302): unsure at all n locations
tggagctgacccatcaactgccctagctcttttatactggtgattcctangctcttgaccttgacttgatagaacctctttntaagcgaagtcatttgacttgatcccatgttntactaaagtgaacaaaattggtgcgaatcanaactctgacatctatcatgggtggaatggatgaatgcatgaagtggtagtgcttatctctacccgagtttaaaagattggctcagaatttgtaaaacataagcacttatacaatgaaggaaagctggagttgctgcacatgatgtccaacgttatgt

SEQ ID NO: 752 - DNA, 247 bp, Glycine max
  unsure (1)..(247): unsure at all n locations
cctggagcaaatgagcagcccgaagcttatgttgcaaacatttacaatagaccctcctcacctcagcaagcaaatcaaccacaacagaacaattatgacctcttcagcaacagatacaaccctggatggaggaatcaccctaatctcagatggtctagccctcagcaacaacaacagcagcctgctccttcctcanaaatgttgtggcccaagcatacatacatttctcacaatccacaacagcaca

SEQ ID NO: 753 - DNA, 162 bp, Glycine max
  unsure (1)..(162): unsure at all n locations
agcttctaaggaagctacctagtctataaatagaacatgcgaacacttggtgaactttgatgaatgagagtcttgtgagacacaactcanagttcaacttctcttcctttttcttccttcaatttcgtgcttccccatctctctttctctccctctttcttt

SEQ ID NO: 754 - DNA, 502 bp, Glycine max
  unsure (1)..(502): unsure at all n locations
cgagaggtgtgcgtgaacatatcatgcgctttatggacatagtggctcagttgaaaaccctggaattaccatgtctgaatccttcctggtacatttcattntgtgcaccctacctcaataatatacacccttcanaatctnctacaacacacataaggataaatggtctattaatgaattgatgaccatgtgtgttcaagaagaggagagaatgataatggaagagggtgagaaggtaaatttgactacttctacttctggaaaggataggaagaagtctgtaggcaccaataaaggaaagaattcgactcaaccaacaattaaaaaggagtcaaagtgtttcttctgtaaaaagaaaggacacatgaagaaggactacccccaaattaaaagttggtttgagaagaaaggtacaccatcgactntcgttggtatgaattaatatgataatgtgaatataatacatggtgaatgactctggtctacaatcatgttctatacc

SEQ ID NO: 755 - DNA, 111 bp, Glycine max
  unsure (1)..(111): unsure at all n locations
atctcttttatcttagtgagagtgattctcctaaattcttgagtgattcaagaacaccctggttgtatcanaggactttcacaacctttgtgtgttgccctcgctggaaag

SEQ ID NO: 756 - DNA, 150 bp, Glycine max
  unsure (1)..(150): unsure at all n locations
agctnggttcgaggtacttaccccgtgaagatcgaagaacgatgatgaacgaatgaagaacgtcgaagaacggtcgaaaccttcacgaaattccttacggaaaacgttacggaaaccgttcggaagcgcctcggcttagattttcttcac

SEQ ID NO: 757 - DNA, 196 bp, Glycine max
  unsure (1)..(196): unsure at all n locations
agcttcttgtgtagccgctctgggtgctcagaatatcccaataacaaatccctcttattactagctattttgaattctttagttcctgaatgtacaaccttcaaatggtggctcgttcccctctttcttttctgcanaaaagaaaatcaaatgctgtccaaacatggacgaagtcctaagaaaatcaatatcaaag

SEQ ID NO: 758 - DNA, 117 bp, Glycine max
  unsure (1)..(117): unsure at all n locations
gcttgtataggggggttaattagaacatttggagttcanaagtacttgaacatttcttttggcanaaaatgaaacatgatgttatncaagttttttctaattgcattgtgtgtcata

SEQ ID NO: 759 - DNA, 187 bp, Glycine max
  unsure (1)..(187): unsure at all n locations
gacatgtgccacatcccatgaatattacctagaaaaacgcgacagggaagttgcccacttgtacgttcttcaacattgtgaagaagtngagccatatttatagtcagtatgtgttgaggcattaactaatgaatatttactcattaagaacatgttacaacttgcctattattttacttaattaaat

SEQ ID NO: 760 - DNA, 392 bp, Glycine max
  unsure (1)..(392): unsure at all n locations
agcttgacattcatatntgttntatgcccacaagaagtttctaactgcctctatgatnagtggtgaaatcgatcaagcatgttctagttccactgcccattaacaagaacatctntaactacaagggtggtatcagagatgtggagatagtccaacataccacacaatggtccctcataaaataacgagatatccgctctccccactctgtatataaagcccttctttagaaactcaagagccttaatagttgaagaccaagtataggaacaccatgcatgcatgatggatgtgttagataaatacttgtgctntaacatatcaatccacatttgtcctaatcatgaagaattccccaattttttccccaagcgtgacacattcactgatct

SEQ ID NO: 761 - DNA, 308 bp, Glycine max
  unsure (1)..(308): unsure at all n locations
gcttctcgatatattatgcacctgaatcagacttccgtttgataagttatgaccatttgaatntctcgagagctntcgtggttcaatttcaagcttctcgatatattatgcacctgaatcggacttccgtgtgacaagttatgaccatnttaatttctcgagaacattcgttgttcaatttcgagcgtctcgatatattatgcatctgaatcggacttccgtgtgataagttatgaccatttgaatttctcgagagcttnncgttgttcaattcaagcttctcgatatattatgcacctgaatcagac

SEQ ID NO: 762 - DNA, 410 bp, Glycine max
  unsure (1)..(410): unsure at all n locations
gcttccgtagctctatgggaagagaactatgagtctattcaacgtaaccaaccttcttctgtcacgcttatcaaaattataacaaaaatggccttctttcctttttatttatgnttnttcagaactggcaaagtaaacaaggaaaataacaaaatgctgttttcacccccacttttattatactttggaaatcaggacaaaaattgtaaaataaggaagattttttaattcttggttaaacatatcaattaaagtaaactaaatgcatcttaaatattgtcagttccttatatntatagcatatatgatgatatgatgagatcctnctataggagagtggaagtgaattactaaactgtaaccccatcatagtacatcaattgaatctgagtaatgatttgtcattcatc

SEQ ID NO: 763 - DNA, 447 bp, Glycine max
  unsure (1)..(447): unsure at all n locations
agcttgtgtatngatgcattctactaatatatggaattgtcctctgctttgcctgagaataacaattgcttgaccacaacaacgctggaggcggtaagagggacaatggtctttcaataaacctgttgtacatgaacaaagattatatcatgcggtgaccgtgtcaaatgaaccagcgaagtcattgcataattgttatactaactatattcaatgcacctgaacaaaatgatttccaaacacgtgaccgacacatatcatgcggtgctcagaagaatcaggtggtggttgacttctaagaggagaaaatgtcatgctttgttgtcnggacaacgatacaaggattacgttataccgtgatgcaatcacatatcccatctccgttatatccatccacttgtccacactaacctgaatanccanacatacacatgtaagtaattaaag

SEQ ID NO: 764 - DNA, 363 bp, Glycine max
  unsure (1)..(363): unsure at all n locations
agctntngagcaattcanatggacattacttntctcatggatgttatatntatgcgcataatatatcgagacgctcaaaattgaacaacggaagctctcgagaaattcaaatggtcataacctttcactcggaggttcgattcatgcgcataatatatcgagacactcgaaattgaacaacggaagctctcgagaaattcaaatggtcattacttntcactcggaggtccgactcangcgcataatatatcgatacgctcganattgaacaattgaagctctttagcaattcaaatggtcataacttnttccctcggaggtctaattcacgcgcataatatatctacacgcacaaaattgaac

SEQ ID NO: 765 - DNA, 227 bp, Glycine max
  unsure (1)..(227): unsure at all n locations
tctttgtgcttcatctcataccatanagtcagaaatacataaatagaatcagaaggactttcagaggcttgtagtgaggcttggctacaagannatatggtttttctaggaatcaaaggcttaaattctaagagagcatagatcctagactcacccaatnntattcttttcaatttatntagaggagctggtgtangagtagtagaagtggaaggagctggtggagt

SEQ ID NO: 766 - DNA, 310 bp, Glycine max
  unsure (1)..(310): unsure at all n locations
cttccttcatcaatgatcatcatgcanactatgccattgatcaaacatctagtgtggaaaatggtatctctttgactttcctccatagacttcaattgatggccaagtaaccgcctaatcatcaacaattctcccttcgatgttttctccacttgcttctcagcatcctcactctcttcttccttntcaacttcggaatcactaatgcactcttcgtctctaagaatcatggcattctatgtaaggcactcatatgcataatgatccaagccatggcaccgaaaacacttcacatcttgacttttttatt

SEQ ID NO: 767 - DNA, 335 bp, Glycine max
  unsure (1)..(335): unsure at all n locations
tatgaagatgtagcatcctacagaagattgnatgggaaacttctgtacttgaacaacactaggcctgacatcacatntgccactcaacaacttagtcaattcttaagtaaacctagtatgacacactacaatgctgcctgtagggttgtaagtacctcanaggcagtcctggccgaggcctgttcttcccaagaaagccagaaatccagctactangaatttctgatgttgattggggtggttgcttagattcaaggaggtccatttcaggatattgcttcttcttgngagcatctttgatctcttggagagctaagaagcagcaaacagtctca

SEQ ID NO: 768 - DNA, 347 bp, Glycine max
  unsure (1)..(347): unsure at all n locations
tgcagcttgagcanattanacgacaaaactttatctncggagttcgattgtgtcccgtagnatatcgagacgctcgaaattggaaacagaagcactgagcaaattcaaacgacaataactttntactcngatgaccgattgagtcccgtaatatatcgagacgctcgtaattgaaacagaagctctgagccaattcaaacgacaatatactttaactcgggtgtccgatggtgtctcgtagtatatcgacacgctcgtaattgaaaccggaagctctaagaaaattcanacgacaataacctttgactcggatgtccgattgagtcctataatatatcgagacgctc

SEQ ID NO: 769 - DNA, 473 bp, Glycine max
  unsure (1)..(473): unsure at all n locations
agtgatgattttttttcatacaccaacatctnccttcatccncatttggtgtctcttggctctagttattccacccattgtagtcttcaaacaanaatcacaaatgacagcctttntattgtttatgtcctttagggaaatccattcccaaacgatatcaanggtgtcacctatatangctgaaccggttgatgaagcaatgcttccaagaattggttgttcaacttggtggttgagatggtgccattggtaaaagaaataagagatcatagagaaaaagctaagagctgaanataatgttgagaagaaataggagaagaatggtaaattgagaggggacgggcacaatcgaaaaggttttaaagattaaaaacacacagaactctggacaatgtgannaggattaattcattttcttcgattntgcaatgtgctgctatgagaactaatgtgactcgcactaatagttctcg

SEQ ID NO: 770 - DNA, 343 bp, Glycine max
  unsure (1)..(343): unsure at all n locations
agcttcttgctctntaatacgcttcannaatctagacgacatctaatgcgtatttagagcatanttttagctcatcaaaaatatgggctaacaaattgcccccaaaaaatgtctgcttcgattcgagatcgaaggaagatgagaagttgacattntttctctctttctaccagttctcctgaaatggcgtcatgatcgcacgttcactgtgtaaccgtcgcctcgatctcccactacccatcattaattcccactttctaggcagagtgggacacgtgtaacgctggggagtcggaagggagatctgatttgattgattcttgaccattgattatattatatt

SEQ ID NO: 771 - DNA, 534 bp, Glycine max
  unsure (1)..(534): unsure at all n locations
ttaaacctttatgccatgacaagccaacgagcatgcagctgcagaatgctacacaagactttaactgcaatctctgtngagtctcggatatatcgagacgctcgaaattgaaaacagaatgtctgcacctctggtacgtggatggaatgtacaggtactgttnntggctntccaaatatttcanagacttctactttnttttgaaaaagtnttttttagcttggttgggtggcttctgtctcttctttaattttgtctctatcttntaagactacattatcaattntgtttgcaggagcataccgttctttttataacaaaaattgcttcacctatagaatcctctaattactcttgggctgaaagccatttaccaccaagacacattcttaacgatttgaaacagaataactttactcgatgtcagttagccccgatatatgagacctcgaattaatacaagcttgacaattcacgacatactctactcgatgtctataaaccgtatatatcaatgctcgaatgaaacagact

SEQ ID NO: 772 - DNA, 345 bp, Glycine max
  unsure (1)..(345): unsure at all n locations
agctnntgagcaaattaaatgacaataactntatacacggatgttctggtgagncccgtaatatatcgagaacgctccaatatgaaacggaaactcttataaatatcatacgacaataactttntacttggatgcccgacagagtgtcgtaatttatcgagggatgctccaaattgaatacggaagctcgtaccaaactcaaacgttaataacgttttactaggatgtctgattgagtcccgtaatatatcgagacgctcacaatttagatccgaagctctgagaaaattgaatagacaataactttatacatggatgtcccggtgagtcctgtattatatcgag

SEQ ID NO: 773 - DNA, 300 bp, Glycine max
  unsure (1)..(300): unsure at all n locations
agctngacaatcctcactttacaagcnncattttgaagttgtgttaagcnctaagtctaaattcttagattttccaatgatgggcaaggattttagtttgactgtttgggaagcaaaagaagtccttgcaatgatggataatggttagttattggtcctaaaagtattcctaattttagttggaaatgtgtcggagaacaatgtatcattttagctcactaagaaatgtgatatcagatcagtagagaaggaacacttctggtcctatatgtaatttggaattatgctangaagttctac

SEQ ID NO: 774 - DNA, 389 bp, Glycine max
  unsure (1)..(389): unsure at all n locations
ctataccttcgaccaacactgtcgtgtntctgtctcggcccgtttataaagtgggctgcagcaccggctccgcttccctaactatactggaggcgagtgcagtggctatatcctctataagtttctggagaattaacatgacctccgagatggaagccattngatcttttaaagccgatagatcggacttcatctgttcctgcacgccctctacattatccatttttctggatcgaagtgtataggggtgccttggtgttttcttagttatgatgaaattcctaaagaaataaacaacggtgagtatgccaccaaaacatgaatatgcaaatgaatgatcggagcacttggatccaccccagaggttntctagatatcatgatgagttc

SEQ ID NO: 775 - DNA, 271 bp, Glycine max
  unsure (1)..(271): unsure at all n locations
cggtagaattcaatgaatgtccttttaagtggggcctctatcttgntcttattttttctgctgaaaacaactagctctgtattgctatggaaactgagaacaccttttatagtcgaacgtggagttacatagntgtgtgtgaaatgcactcgatcaagtatttccaaacgggctggtctagtcaccctggtattctttggcttctctgcctcaacttttgggtttacactggtctgattatctgattgttcattatgactgttgctctctt

SEQ ID NO: 776 - DNA, 254 bp, Glycine max
  unsure (1)..(254): unsure at all n locations
gatactaagctctcaaaacaccttgtataccttgagagaaaagactaanagtgttgagtgatatattcgttggttagacaattatactttagtcagtgaacaaacttccaataaatcttgttaatttggttagaactagcatggtaggacaaagaatatngggcttaagttaagcttgagatagagcttgcaagtgttagagctagaagtggcagcgaacaatacttgtaacttttgatagttagtgaaaattt

SEQ ID NO: 777 - DNA, 352 bp, Glycine max
  unsure (1)..(352): unsure at all n locations
ctgcagctatgctganatattacaatagaccttctcaacctcattatcatatcaaccacagcagaacaattatgaccctctcagcaacagatacaaccccggatggaggaatcaccctaacctcagatggtccaaccctcagcaacaacaacaacagcttactcctttctttcaaaatgttgctggcccaagcagaccatacattcctccaccaatccaacaacagcaacaaccccagaaacagccaacaagtgaggcccctccacaaccttccctcgaagaactngtgaggcaaatgactatgcagaacatgcagtttcagcaagagaccagagccttcattctgagctta

SEQ ID NO: 778 - DNA, 275 bp, Glycine max
  unsure (1)..(275): unsure at all n locations
aatataaactgaaacataaagtttactataagcagaanaataatcataaaagtgtattatggataggaaaatgaaatataaatcctgtcatgggtccgtggtgctacagaggggtcatcctgtggagaagaaggggtatcctangntgctgcccaatctgctgtataatccatatctgtagcatcgtcctcctcctcaaagagctccaacacaggtgtagtcactggtgatgcctacggagtagagagctccagcacaggtgtagtcactggtga

SEQ ID NO: 779 - DNA, 489 bp, Glycine max
  unsure (1)..(489): unsure at all n locations
ntaaaccttaccgcttgaaagcgacttaagtgactgaggcatgcagcttataataaatcggtgcagcatcttctaagagttctctacgaagaggaggctgagccatgttcttcggatgaaaaatactagtggaatgctccaaatcagaatattcagaatcaccttcacagaatgcacagaatgccacgatcacactattgtaaattatgtgtttaacagcacctacaaggggtaaactacgcttactcaacatatcaaatgactgatatttggaggaacccctaaatctgaaagatacacaaataattcaacaaaattcaagtctacttgatactcctaagcaagttataaaatggacagtaatcttgaacatgaaaaaaaaaacttagtaaccgttgattttgaagttggagaccacactgccaagtcattctatatatggaaatttttctcccaaagcttatataatgcatttgaacccgacaaatn

SEQ ID NO: 780 - DNA, 281 bp, Glycine max
  unsure (1)..(281): unsure at all n locations
taaataatattattgtattggctcacacaaatgggttaaaaaataattaataaaaagtgagctattattatttttgcatgcataattgtgacaagaatatcatgtggctaaattatattggtatatcatgcatagctntgacatgaatgccatatgatgaaacttacatacaatccattaattgatattgtcatattactgcatagttgcgacatggntgccatatggcgaacaaatttgtaccatatcatccacttaaattattttaccaacacaaagat

SEQ ID NO: 781 - DNA, 298 bp, Glycine max
  unsure (1)..(298): unsure at all n locations
gcttactactaactcttaacatataatatgttccaagagtttcatttcatggtgaaaatcctcacttacaaagtgaaatagtatattgtataccttgtcatttatgtacactaatttacttaattaaacctgtacagataggaataaagaatattacctacttagctggacaaattatgcctgctctntntaatttacacaagggccgtgatttcctaatatttactactttgtccttgaaactcntcctcgcagtagaggaagtctcagatattntccaagaatatatacaattctg

SEQ ID NO: 782 - DNA, 449 bp, Glycine max
  unsure (1)..(449): unsure at all n locations
ctaatgtacatgacccgatcagcacgactcactgaatggaactatcatgagttggttggcagaaaaggagccacatttttcatacccaaatgcaaatatattgaactttgcaaatggcatgcatgccctatcggacctcagtggtcaactttatggtcatgtgatgctagggctcacgaatcatttcctctattctaatcacaccaactgtttccaaatatatgttcttatataagattgagcattcattcgagtccattttcggcgtccgggaaaatctcacacattcacccttcacgggatacacattctttaaaagctagtacgatcacgaatcttacacagagaagtggaatcgttcttttaaagcatgttggcttcaactgacactatttttcttgtctacttttactactaccctttttacttattgcttttttctttactcn

SEQ ID NO: 783 - DNA, 540 bp, Glycine max
  unsure (1)..(540): unsure at all n locations
nttgancccttganngctgaatcccttgganccgcgatccttaagtcacctgaggcatgcaagcttcttgatcagactnntagcatcaaagaccttgacattctattatacttcttggtctcgaagntgctcgttcgaaacatggtatacacttgtgtcaacgcanatacgcactggacatcctattagactctggtatgctcggctctcgtcctatatctacccccatagagtattccacgcatttaagtgctacaatgggcaccccattatcagagactngtgcctcttnctacagacgtctcgtcgaccggcttatataccttacanacactcgccccgacattgcttatgtncgtcaacaactcagccaatatatggnncaatcaacgtncacacattcacaagctgcttttanggtctacgtacatcnaggctctccggtctgtatttctttgcagtcaagagtttactctaaggcttagcactcgactggtgatgccgatcacccgtcgtatggtctcattactggcatcttan

SEQ ID NO: 784 - DNA, 297 bp, Glycine max
  unsure (1)..(297): unsure at all n locations
agcttaacctcaactagtagaatcctcctctgctctnccctatagtttgngacagcatagcactatcacccaatgcatgtttaagtataaaatnttcctttctctngcatttggntgactcaattcaattactctaatggccacttgntgttntatcatatgtnttaagtattagagagaaacttgctgagctttatgaatctgagaaacaatgtcaaaagccgctcaaatgcttagtggattgaccttgattcaggaatgaggtctcataattacttacctcccatatttatttta

SEQ ID NO: 785 - DNA, 385 bp, Glycine max
  unsure (1)..(385): unsure at all n locations
agcttatccttatggcctgcctccggacttcacccnccgtgccatcctggaagaattaagccaagcccctacttttgagggggcaactccaccttatgaagactatcccgggcaagacgatggggaaggagatacccatcttggccccctgcttcacctcanagatccttccccgcatgaactacccagccgaacatagttcgccataccccggcctcgcccacacccgtaaaagaatctgttccctttgcggaagataagggtaagattgaggcgctcaaagagaggttgagagtagtcaagggcctcggcaattacccattctcggattagcggattatgtctcgtgccaacatcgcatccctcccaagttaaagtaccggac

SEQ ID NO: 786 - DNA, 413 bp, Glycine max
  unsure (1)..(413): unsure at all n locations
ctgcagctatgccggaaatgtaattatgaaatgagatgcccgaataaacaccctttcctagtttaccatgcattangtaccatgttcaattattttgtctttaagtgaaacgggtttatgatcccaacatggttggctcgtggtgcctaacacatggaactaagaatgtagtgtgaagtttcacgccttcccccttttgttnnttgtttgagaggaaaacgcaggatgagcaaacatgaaaacaaatggcattgcaatttgcagatcaaaaagtttgttgaacgcatatgcatgatgatgccatgactcatgcaaaatgtgaggccggaatatgataacggacaaatgcangatatgtccatttatgatgtatgaagagatgcttatgcgaatgcatgatatgaatgcattta

SEQ ID NO: 787 - DNA, 229 bp, Glycine max
gagaaagcaaaaagaaaagaacgaaaatttccaatctaagagaaagcaaaagaaaaaaagaaattctaatcaagaatgggagaaagtaaaaggaagaaaagaagaaagaagctctgacaagatcgaagaaacgaagaatgtcaaaaggcttggaccgacaatattgaacatataaatgtaccaatgacgaaagaagaaagaaccatgcctaagtggctctccttattgc

SEQ ID NO: 788 - DNA, 375 bp, Glycine max
  unsure (1)..(375): unsure at all n locations
agctntataagcgcgggttcgggagacanaggtcaagcgttctctatatgctaagatgatattccgagtactttggatttggtacgaccatgcccttctgatattcagctggggaaatggcgagtggaggaacgccccggcatttacgcaacaagcataatgtaaacctttacgggtttaaaagctctatagttgggcctaggctttagagcttttccttttgataanggcttgtgtctttcggttttgaatgtataatacaaggatctctcttcatctgttcctggtctctacccgttctcattcatttgcatgtntacttctttttctgaaaccgcagatccgatgacgagtcccccgaaggtactaatacct

SEQ ID NO: 789 - DNA, 498 bp, Glycine max
  unsure (1)..(498): unsure at all n locations
gccataacaactngattatttgagaatttagaatgtcaagataaacatgaatgaagaaaaagaagatgtcctccatatagaatttctagaaatgatgtcaccaaaaaaacataactcaactgaatttgaaattagttaatgttgaaaaaaaagtgtcacacaacttggatagaagaccccacanaggaggccacttgaaggaatagatgcaacattgactttgaatgattacaaaatgacatatatacgcaatcaattagattcaaaagttaagttgtccatatgtgtngaaagacantaagtaaaattatcaactatacaattgacaatgtatttaccttaatcttgcctacaaaantcatggcttcttctatgaattcaatgagaatattttgggganggttctcatccttcantagaangtatattttatatcccttttgcannatanggnntctttgattagccatcttgatcctgtccagaacacgacccttn

SEQ ID NO: 790 - DNA, 113 bp, Glycine max
  unsure (1)..(113): unsure at all n locations
tagattaaataataataccttacanagatgagaatcttttagtcattccttaatatattcatataatggaaaanatatacatagttaaatgtagagctatatttcatcatctg

SEQ ID NO: 791 - DNA, 470 bp, Glycine max
  unsure (1)..(470): unsure at all n locations
agggatgtttacctctcttctaatggattntcactgtttgagaagtgaaagtgataatgaggtnatttggagcatactctcccgcttacataaatatcgggcagaaatttccaggatgtcacacaaacaaacatcgaaagaggatccatatacagtgaaatcatccataaacacctcgatgcaattatctaacaaatcactagaaatactaatcatgcaccactagaagataccaagggcattggacatgccgaaaggcatccttctgtaggcaatagtgccaaagggacatgtgaatatggtctnttctcgatccttangaacaatagtgatttgatataccagaanaacatcanggaactagagtgagattacctgtccgcgtcaagcatctgtcaatgatggcagggaaatgtccttttgtgaacctgttaggctctaagacatgcaaatttcactgtttggcaagg

SEQ ID NO: 792 - DNA, 370 bp, Glycine max
agcttcactaccaacaaatgcttgtgctcatgctcaattggaagacaacaaacttaccataaaccaatcaaaagggagacattatcagaggtttgtaagctatgcagtaactgcataaagcatcaccaagcttcaaggaccaatcttttcttaatcaaaaaataatcttttcaagaatggcctagatctctctataagagacttccacttgacctcttgtctgaagatggtcatgtgtagcgtgagcgactccatacatcttcaatataaattcaatctgcctctcaatgaaatgagaaccaccattactaatcacagatcgtgggacccccaacattggtgaaattatctacttgaacagctggatcac

SEQ ID NO: 793 - DNA, 926 bp, Glycine max
  unsure (1)..(926): unsure at all n locations
agatctnnnangttgtgancatcaggtagcataaccnaacnnttngaaannaaacctggtggttgactggagaccacctggggcattttgcacatttcttgtggcttacagaggcttccttagctggataagcccatccggataaagtccttccattttaatatttaccattagttaccttttgtaatggccatttagatgggaaaaatcaaccagacccattttgtttatcccttcaagtgagtctccacctttgacataaattacccatgggtgcacaaagtgtgggtggtctttgatggggcgggaaacgttccaagacccccgttggtaggttgcttcctcccttctcgaatggcattcatgttatggaggtgtgattatagccacttgtttatatccaacaaaggaacgattatgtgtgatggttgcgaatacgcacatatacactcgattattctttatcaccagacattttgtcctataagaagatggactatgtttgcctacacggttcttgctccacacactttagtcaccaaaggcttgataacataaagaatcggtgaaggtcgcttggcattggaatatctcttgtacattgaacaaacctacctctatggtcctcacttttggttgatgaaggccatgcttcaaggcccacattttaaggaaacctaagaaaattgtgtttggttgtgtccaaaccctataacaatcccttggggcatctttatttggcttactatgattagcaacattcctttgtgtgggtccacccacgcttcttcttgaccctaaaagaggaagccccgtaaaccactataacctctaccngttgtgggctaatgggggcattatgatttgtaaacctctccctcaattgtacgccgaccttgggcaaatgtgagaaaccccctctctct

SEQ ID NO: 794 - DNA, 459 bp, Glycine max
  unsure (1)..(459): unsure at all n locations
agcttgtatagttccccaatttatggttattttggagtaaattttgtaaataaatattgtgttatggttaatgttgtctctagaacatttccattggatttaatgatgaaatctatgcattttcaggtgaaaaagaggctaagttttgaattgcaaaaagtaacagttaggctaagctcagcagttgggctaagcgcatatccaccactaagcgtagcttcagcgcgcttagcgcaaaagagaatctggcagagcatcagcatcaaagtcgcacgcttagcgcaagatcagtgcgctaagcccagcaggtgccttcagccaggctaagcgcgagactggcgctaagtccaatttcacttactcgcgctaagcatgatggtggtgctaagcgcaacgtcataaattcagagcctatntaaagcttgttttgtgcaaatttanggtaagcagatgattggc

SEQ ID NO: 795 - DNA, 864 bp, Glycine max
  unsure (1)..(864): unsure at all n locations
aaaggtcagaccaacctccatatgcgcatgggagcgagcacttatttttttacactggcgggggccttaaacaaccgntggagaagcctttggcggagaaagagggtgttgcccaatgcatgccgttggcataaggttctccaacaatttaaccctggggtcgcctcaatcctaagtaggagaaaatgcggacccgctttcagaagactttccagagtagcttgtgttgttaatgacatctatgggaaagaagacgaactggtgtctatcgaatacaatgaagggagtggacccttgcgtctgtaagttgtgtttgcaccaacctacatgtagcattaattctttgtaagaattaggaaggatctactctattgagtatttctggcgctcatttcaaccactaacaaaatggtcatttttgtaaagggaaaacaggaccttgccagaatactggttaggacaatctttacccctaaatggttttcctcaaaccaggggggggtattcttgaatcttatttacggatttcaccgcgaaaagacacttacacattgtttctcactccacggtgccaaacctgcaaaaggggggaaacctaccgggagactcttttcacatttttccgaacggcaggttcttttttggctgatttgaccgcattggatacatattggttcccctcgcacgtgccccgggaaagatcttcggggcatccctacaacaccggcggcctctgttatggtagtctatctcgataatactcaacttgcatgcgttcctacccgtggtggtgtgcaatatgttatatacatgtcaaacataggaatcctgtaacaaatcgcttgagatccctgataatcaccg

SEQ ID NO: 796 - DNA, 490 bp, Glycine max
agctctataaattattgtttaaggctcaatttgttttcgtagctgaaataattacttttctttttctttatcaaagcgtgaaaattatttgggtttccatgaaaagtgattgaatttatgatatttcagtcatatacacatgcactttaagcacctaagtatttggttgttgtgtttcctttgttggcattgtcagttactatttttcaaccaacctggttatatatatcccgcttggatctgattattatcaatgaaataagttttaccccattctataatctttatatggaataagcttagcctgcgcttaacagttttaagaccagaagtaccaccattgataatcacagctggttggctgacctaagatatcatcggattctagcacaccccaatcttctgatgatgtcaagaaccatcaacatgttcaacaaagttcagctgggcaggttcatcttccatttaaagaattgtcttgcttttatgc

SEQ ID NO: 797 - DNA, 231 bp, Glycine max
tgttttcatatgggtgtatttgcaaccggagccaagtgttctccaagttccaacaggccacgaaaatgctttctagagtaaaccaacactctgcgttcagttaacacgcttggcgatcatttcagatggaactaatgatacgcgaaagagagaggaattaggaaaagaaaagtgaagttcatgaacggtcaggggggaccatgaccgtgtgaaccgcataatacaagtact

SEQ ID NO: 798 - DNA, 459 bp, Glycine max
agctttgtagaataggaactaaagttagtgatctttggatatcctatcctacagttactgacagaggaattggagtggatgacgaacggatgtcctctgttctagctctttttcttgattccatctgtaactaagaagaactcaaaattccttagaccaaaattgttcaagttaaacaacaacaataaaggctaaaattaacaataggcgcttagcgggatatagctcgctcagcgcgccctgagaaacataacatgtcagcttagttgaagcttaaatcgcttagcctaaaagttcccatgatgaaatgcgcttagctcacgtaaactcggcttagcgtgaggcttacaacacaaaattttctaagttaccttggcttagcgattcagcctcacttaaccacaacccatatgtatttcagcaagaggatgagggttcattctccaaggatgaacttgc

SEQ ID NO: 799 - DNA, 819 bp, Glycine max
  unsure (1)..(819): unsure at all n locations
ngcgatttnnnngtctctggtgtcctgattacggagacataaagtactaagctttagaatggtataccatgccacttgaagctcggccaaggctgccttgaaagaaatgcacttacagcttggtggccgcagaaaatgcccccatctttccgcaattcattccaagaataacctttggacatggcgaacctttgttttattaaaatctggtaccttggacctgggaaggatgaacaagtcagggaccagacccaaatttgctaaatccagaatgaatggtggccagggcctttaccgtctcaggctctctttaagtaatcaatctttcccctatcttttgcaaagggaacagattcttaataggtgtgggtgaagatgggacatggccgactatgtttggttggggcaaatcatggggggcccggatccttgaaggggaagttaaggcccggatagggatctctttcatcgtctttctggcagggatagtcaacaataaggagggagttgcccttcgaggtaggggcttggcttatatctttccggaccggatcgggggggtgaatgcggaagcaaacccaaaagggaggcgtggaggcttatcctctgacctaacccctgtattttattttctgaacccaatttatttgggggtttgaaacccggttcctaacctaattgtatggaaggtgcccgcaacgatatacttcctttcttttttggaagatatattctggtcccctagaataattggtcacggattactttaggcgcctatggttggggacaatatgttttgggaaccctcctccatattcg

SEQ ID NO: 800 - DNA, 520 bp, Glycine max
agcttgcctccttcttcacactatgtgccagtatttccgaccgaagtttcagtatcctttgtctccgtgtgtataggatatatacatttagttactatagtaggaaaaatagtcaagattgttaatttagtataacttctcttttatgtctccatgtatatttgtgtgtgtgtgtgtgtgtgttaattaatctagttcaaaacaggattttacatttgatagtgattcaaaccatctgctaattaccgtgttttttgtaagtttttctcagtgatatatgcaagagcaaaacatcacaaggcatgattttaagcagacaaatgctgttgtcttcatacgcttacatgttaatattttgtatgcagggcaaaccaaagtgtattaagtattgcctcttctgctgaaatgaaactaccaggccattattttctagtttgaatatatgagtttctagatcatgtctaaaagatgtattgacagagggtctacgtttccatcacatttaatttgaaggattctt

SEQ ID NO: 801 - DNA, 524 bp, Glycine max
atgatggaagagaagagaagaaaacaaaagaagattatagagaattttctcccccttaccttgattatacattcctccaagcaaagcagccaaaacaatgatcctatatgtttcctctctctctactcccttcgcaattctcacggatggtctccaaagaagacagcaaaaaagagatggcgtaaggagcatgctaggttttcaaaaaacctatcagcttttagagttaattggacttcccaagactaaaggctcaaaaatatttaacccaacataattttattgttattattttctataaaaaaataacataaaatatttaataaaaattaatatatttttcttaaaaaaaaatgttacttagtgacaatagtaatggtgaaattgtaatcgcaacaatgacaatgaaaataactgaatggtgacaacattactaaagtatttcaatatatcaatgtattgtaaaaatatcatgaagccttaattagttaaaatttgaaagcctaattttttttctctataaa

SEQ ID NO: 802 - DNA, 433 bp, Glycine max
agcttgaagaggatgctttaatggaggaaaagaaagagagaatgggggagcacgaaattgaaggaataaaagagggagagaagtggaattttgaagtgagtctcataagactttcattcatcagagatataacaagtgttacacatgcttctatttatagactaggtagcttccttgagaagctttcttgagaaaacttccttgagaagcttctttgagaaaatttccttgggaagctagagcttagctacacacacgcctctcataactaagctcacctccttgagaagctttcttgagaagatttctaaagaagctagagcttagctacacacacccttctaatagctaagctcacctccttgagatgagaggctagagcttagctacacaccccctatgatagcttagctcaccccatgacagaatacat

SEQ ID NO: 803 - DNA, 438 bp, Glycine max
  unsure (1)..(438): unsure at all n locations
ttaacatcagaccacttccagggtactggaactacttcacatggacttgatggggcctatgcagttgaaaagcctggaggaaagaggtatgcctatgttgttgtggatgatttctccagatttacctgggtcaactttatcagagagaaatcagacacctttgaagtattcaaagagttgagtctaagacttcaaagagaaaaagactgtgtcatcaagagaattaggagtgaccatggcagagagtttgaaaacagcaagtttactgaattctgcacgtctgaaggcatcactcatgagttctctgcagccattacaccacaacaaaatggcatagttgaaaggaaaaacaggactttgcaagaagctgctanggtcatgcttcatgccaaagaacttccctataatctcttggctgaagccatgaacacagcatgc

SEQ ID NO: 804 - DNA, 489 bp, Glycine max
  unsure (1)..(489): unsure at all n locations
agcttattgtctttaaattttttttattgagtgattattcaaaaatttatccaaggcctttaacttatactttccatctattgagtgtaagccattttacctctttgttttcttcttccataaaagcttgttaaaaaagtttatttgaattgggccaaagctaactcatacttttcaacagcaactcgcttagaaaaagaatacatcgtctacattatataatgatttttaatttttttttttttttacttcaggtctcttccccaaacgagccttaactctaccatcaaaatgtgcaacttccagaatggcaaaaggacgtcgcagaggaaatgacatacactcaatagatggaaacctattcgaagaggtctattgcaaaccccgcatatattggatgacttgtgagagggctccattcttcatgttctctgatgcgtngtttgcaaatggcttcgtcccattcaataatgatgactactctctttt

SEQ ID NO: 805 - DNA, 580 bp, Glycine max
taaaaggtgatagaacttaatatcgcatgtttggaacttttaattacgtgcatttttttatatacgtgtacgtcttacccagcttcaattatataaacatgcttctgcagtggttttatcttcaacacttctttcaaaaccaaattattagtgtgattgtaacagacacatttggtcattctttgaaattcaattggaaggtgacttttgtcttttaatttcttgtatatgtttcttccttttaattatgtttcagacatacagagattaatcttataaaataggaaaatttatttatgagaataaacttttgaccacgtatttaaaaaatataattatttgtccatcatatcacacaatcaagatattagtaaaaataaattatcacataaatgtttttactcaaacaagtagaggatatttatgattttaataaagaaattaaggaagaaaagatatagcacattttttttgtggattgaggtagcctgcctacctaaatttccatctagttttgggtacctaaaatatatcacaccaccggaacataatgatattaagtttgatcgaaatgtatact

SEQ ID NO: 806 - DNA, 599 bp, Glycine max
agcttgtaggattatggggtacccatcacatgtggcactaggtggcggtcgggcgatggtgcacaacaagttttccacatccacaatgcgcgcataaatccaccatcccctgttgcccacctccaactgagctcacgtactcccacgtagcccatatcctcgtttctctcaacaccgggtccccatcaatcctcccaagcttccccaacatcaaagtaatacaacattcacacagcacaagctatcacagccaagcaaaacagggcaaaggcagaaaactctgcccaaaacaccaaccaaaatcacagcttttcacatacaaataccccagaaacatttccttcgttcccattcgctaaccgttggatcaactcgaaatttttactggaagtctctagtaaatgagcctacattttgaccgttgggatctactagcaaacatccagaactcattctacactactctttccacagccaatcacacacaagcatttttctgcacaaagccaaaatccttgtgcacctattttgacaacaaaattctgcataagtgcagatttcgaaaatcacactttccctcatccaatcttgcccaaatc

SEQ ID NO: 807 - DNA, 485 bp, Glycine max
tccatcatttagcctctcatagccatgagaggctttacacttcaaaggctaatagaagaaggggatggatgactaatagcaagaaagggaggaatggctaaagtatgagggtttcccctaagggataggcttaggctttggatagctctgagactcggtgtgtcttttccttttgcttcttgctctttatataggcctaaggtagcttacttttcacgctaacttcatgctaagtgtgcctttgggcttcctgcgctcttagcggacaaaacttatagtgcacgctgagtgagctgtctaattcttccaacttttcttcaaggcttttcttccaatttttgtatcaatttttcctcttaagcacttgaaatcttcttcttttgacttttgctaataaaaaattgtaaagatattgatttcttcattatttcattaacaatagtaaagtgaagaaattgaaatcatattagccaaaattaactatc

SEQ ID NO: 808 - DNA, 534 bp, Glycine max
  unsure (1)..(534): unsure at all n locations
agcttcaacattcaacttcgagcgtctcgttatattatacgactcaattagacatccgagtataaagttattgtcgtttgaattttctcagagcttcaacattcaatttcgagcgtctcaatatatgacgggactcaatcagacatccgagtaaaaagatattgtcgtcttaattggctcagagcttctacattcaatttcgagcgtttcgatatatgacgggactcaatcaggcatccgtgtaaaaagttattgtcgtttgaattggctcagagcttcaacattcaatttcaagcgtctcgatatatgacgggactcaatcaggcatccgagtaaaaagttattgtcgtttgaattggctgagagcttcaacattcaatttctagcgtctcgatatatgacgggactcaatcagacatccgagtaaaaagatattgtcgtttgaattggctcacagcttcaacattcaattttgagcgtctcgatatattacgggactcaatcangcatccgagtaaaaagtattgtcgtttg

SEQ ID NO: 809 - DNA, 502 bp, Glycine max
  unsure (1)..(502): unsure at all n locations
ttgagcaaattcaaacgacaataactttttactcggatgtctgattgagtcccgtaatatatggagacgctcgaaattgaatgttgaagctttgagccaattcaaacaacaataactttttactcggatgtctgattgagtcccgtaatatatcgagacgctcgaagttgaatgttgaagctttgagcaaatttaaacgacaataactttttactcggatgtctgattgagtcccgtaatatatcgagacgctcgaaagtgaatgttgaagatctgagccaattcaaacgacaataacgttntactcggatgtctgattgagtcccgtaatatatcgagacgctcgaaattgaatgttgaagctctgagccaattcaaacgacaataactttttactcggatgtctgactgagtcctgtaatatatcgagacgctcgaaattgaatgttgaagctctgagccaatttaaacgacaataacctttttactcggatgtctgatt

SEQ ID NO: 810 - DNA, 568 bp, Glycine max
agcttctacttatatggcagggcgggcttccttcactttcttgtctccaacgcgagctctgaccactgttcttccttcccgcgatgcttcttttcatgtccgcctgagtgggcttatagcctaaaccatacttcccacgatttccttgggtttttatcaggctagttatgccgccattgtctttgcctaaacccatcccgggttcataaccgttccccaacataactcgggccatcattaccgccgcatcggacaaacaaggttgcccaaagagggagtccacggaggaaatgctgaccacctcaaaagactggaaagcggtttctaacgattcttctgcggcttccacataaggcatggaggatgggcagcttaccaagatatcttcctcgcctgacacgatgaccaagtgcccctccactacgaatttcagcttttggtggagtgtagaaggcacaactcccactgagtggatccaagggcgccccaacaggcagctgtagggggggttaatatccattatttggaaggtgacttgacaggtgtgagggcctatttgtactgggag

SEQ ID NO: 811 - DNA, 493 bp, Glycine max
  unsure (1)..(493): unsure at all n locations
taaaaaaacaagaaatgaattgaaagtctcggattcgaaaacttacccgttgaaggatgaagaacgacgaagaacgatgaagaatttccacagaatcgcttacggaagcgttacagaagcacttcgactcgatttttcttcacgaaaacgtgttttttgcccaaaatagccgaaatgcatagccaaaggggtcttgaacattttgaaacagctcccccctcccctatttatagaaaaaaaggaggtgcttgccgcccaaagacttaatgaagaagatttctaagcgcacccgaattactaagttcaccccccttttcgaattttacagaaaagttacggaagccttacggaagtgttttcgaatttgattttcatcttttttctcttccctttcaccaatgttaagtggaatatgcttacccaagggtttcggaaattttatggaagtattacnggagccgcggaagcccccggaaccattntttaaaaacgt

SEQ ID NO: 812 - DNA, 573 bp, Glycine max
  unsure (1)..(573): unsure at all n locations
agcttgtagaatggctagacatgatacatgtcaggacttggtttggttcaaggataaaagggatgccccacattatttccatgacacaaatgcaaaaatgatgatttggaaattttatgcaaaactggttatgcatgcacctatgcggacactcaaatgtcaaatttttatggtcatgtgatgctagggctcaggattcatttcctctattttaaatcaacccaatgtttccaaaatatgttcttttatcaatttgtgcattcatccgagtccatttcgggcgtccggggaaatttcatagcattcacccttcaggtgtacacattttttccaaaaactagttatgatcagtgaatttttttcaaagaaaagttggaagtcatctcttttcaaaagcatgttggtttttcagctagacaacttattttctttnttctccttcttctatatttggtttttttttctcttatttgctctctttttcttttcactttcttttcttttctatttcattttctttccttttctaattttatntttatcaagagattttgtttattttacatatatacc

SEQ ID NO: 813 - DNA, 567 bp, Glycine max
agctttacatcaaacaccttgtgcacacaatgcacatttcacatacatatcgatcatcgttattgatgtacaaatcatatccaaacccaccaaccaagagtgtttgggcatggagttgcaccccaaaagatagcagagaaggtaaataacattggacccaaacatcattttctcatggaacagtacaaataaactacttggaaaaggaatcctcgaagagagtaatccaaagtaataatgagatccgagaattacctggatctagtgtcacgttcatctaattcttttttattttctttttctcattcttgcatgattaaagttaaaaacacgattatttaagtcaatttaaccaaaatctttgattcccgaatgaacattttgtccgagacttactctaatatagtgttgtgttcgcgtaagtctttttttagtttcctttcacatcacactctctcatatcaattttttcattgtgtaaaaatcattcaatctcctttaaagctagatgattggcacacaagtcacgaccttaacgaggatcgtttgaacttttaagttctaata

SEQ ID NO: 814 - DNA, 487 bp, Glycine max
gagcaacatttaacgacaattactttttactcggatgtttgattgagtttcgtaatatatggagacgctcgaaattgaatgttgaagctctgatcaaattcaaacaacaataactatttactcggatgtctgattgagtcctgtcatatatcgagacgctcgaaattgaatgttgaagctctgagccaatttaaacgacagtaactttttactcggatgtctgaatgagtcccgtaatatatcgagacgctcgaaatcgaatgttgaagctctgagccaattcaaacgacaataactttttactgggatgtctgattgagtcccgttatatatcgagacgctctaaattggactgtgaagctctgggccaattaaaacgacaataactttgtactcggatgtctgattgagtcccgtatattacgagacgctcgaaattgaatgtggaagctttttgccaatataaacgacattatctttttactcg

SEQ ID NO: 815 - DNA, 639 bp, Glycine max
  unsure (1)..(639): unsure at all n locations
agcttgagagatcttgcaagaatttttttttccataaaacaaacaacaaccatttgtctctatctcgctttctctttctcccagtccaatcacccattatccttacattatcttcactattattagtcacatcatggttttcaattctcaatcatcaaatcatgatatctttcaactcatattaaattattaacacagactaaaaagggtcttattatatttatacacacatacaccaatataatcgcctctacactctactatattggtgcgcttgcattatcatttatcaagaaccaaggccaaagaacacatagaagatgtgtctagagtgtgagtgagggaggcaatagacaaagaagagagtctaatataataaaggacactgatctttcagttagatccgtgaactttactagctgggggaccatgacaaagatggaataaacccttgggccagcaaaataagatattctaagatatgcctttaattnttagcatttgccatgtataatttaaaggcctgtacatgtttatgcacttgtctttatcaagcctcgatattatntaaaacagatttttgtcattggaaaaagaaaaaaaaaacggatatatctatatatatatatatatatatat

SEQ ID NO: 816 - DNA, 813 bp, Glycine max
  unsure (1)..(813): unsure at all n locations
agactacnnnnnnnncccatagctagtaccgtgagntcangnannnncnannnnnttagggannnngnccggnanntgaaccaaaatcaaattataccaattttttctagattttttctccacacaagcccggtgttagtggggagctattcaatgtcaatggggcctaacctcaataccgaccctttttttgtaacggattactgaaagtttttcagtccaagcaccatttcattataagcttgaactacaaaaaaaatagctttttttagccatcatgcctggagcctgctaattttccaaaaaaaaattaaggatcagatgcaatgatggtggtcattcctgaaccagtggcaataccacgtacttttacactcctatctttaaaaacttgagggccagaccctactatagcgggttctgggctctactattccactactccatgtttccccaaattataatgaggatgttacccctatgagctctttgacttgcaccagaccttcgattttgaggaaacccttgctttaaaaaaataagaatataatttgctttcatacaaggttcccttaggccacataccctatagcacaattaattgggagctaggttgcttttcagagccttttcaaaaagatatcacggttttatgacctgccaactaaaaaaatttcttcattctgtgaaaacgtgtggctaaatgtcttctttaaatcttgaaggcgatatagagtaaaatgtgggtgcgtcttttattaaatatagcgggatctattaactcttgaataacgcacagtctaccctcataag

SEQ ID NO: 817 - DNA, 507 bp, Glycine max
gcacaacaagtttataaatttgtttttgttctaaatgaagtaactacctaactaactaactccacaaatatatacagtgactactcagaagaaaaggataggccttgattaggctcatataatctacctaattaaactaattacacaaagctaatcccaaattcaccacccaattattcaagtgcagagattctgacttccaagcctaattcgatgctcaaaattgaagctctttttcttagctttccagggactactcatatgctctatttggagttttgtagtgtcctatatgccctgcacaaggaagataggtcaagtaagcacaaaatccaaaaataagctacaattatcaattaagcccaattatttgccgaagaccaaaactgagtttaggtgacaaaataagattcttagagatttcaaattagataagaagaacaaaaaaatacttggccccaaattcccaatctggaacgtatgatagctcactttgagtccgttata

SEQ ID NO: 818 - DNA, 845 bp, Glycine max
  unsure (1)..(845): unsure at all n locations
nggccnannngggacattatgctagtcgtataactggaanaacaatangcgcggggggaacataagaacctggggagaaccacaacattattttgttagctattggtaattggaggaccgagggtctttatataactccaggcccaaatttccatactttacataaattggaccctaataataagcttaagaacttgcttgctaaaactgattcccgtatgcactctgccgatgatgctaaaggtgtaagccgggcggtttgggttgggtttggtcaaacacatgctcctcccaaatcatatttaaacgggcaggttgtgggtagatttttaacaaaagggaaaactccacctcaacttgtccataaagagtagagattggttgggcaaacaaggtccatgattcttttcatcgttccatttttataccaaccattttttagttactttgaagtgcatcaagcctgattggagccacccgttacattgttgcctattccacccaaatcaaaggagtggggaccaccaatccccccttacctacgaaccttttttttagataaaacagggtcgaaggaatagatacctagtataactgccctcccacctcggattgtaatatggtttctctacaaccaaaacagccggagggggtgctccctatatacactcgcgtgcggtgtgtacgaccgtcacccatcctttttgaaaaaataattttggggcaccacctgtattcggttgtgttggggtctcctataataacgaatatgccttcggtgtaaaaaataaaantcaccgcgtactatactagtggtcgtattacaacccgcccttgtgtggacg

SEQ ID NO: 819 - DNA, 677 bp, Glycine max
agcttgtcatttgagagttaagaccaatgtgatttttaactgcaatttaatcattaaattgattgtgttttctataagcatttaatgtacttctttcatcattgataattgatagtggcttccctcttaattagcaaaactgcaaaagcttaaattagttgatatgtttagttatttaagatttatatgaatgccattatgtctatcttatgaacatgtaattatgtacttgtatgcaacttcaaaggatctactaatctcttaatgcaagaattgataattaagtctctttatttaatgcatatataaatatgcaatttttataataatattaccatcatggaaacttacagtaggatattcactgtccattttcatggttgctaacttttgtatttgctcaaaggtcgagaacctaactttcaaaagagtatctaaagtaccgtgtaaaattcataatcacaatcttatgttgtataactcattcctgcaaaatgctttaaaatgtggatacaagtgaggttgtgaggggcccgcacgatgctcctggcattggttggtaactgctgctaagctcgtgactgaggttgggaagattggattacaagtcaaggttgcattgatagactactacttactcattcatttctaagtacctttttttcatggatatgggg

SEQ ID NO: 820 - DNA, 474 bp, Glycine max
ctcaagcttgcctaattaacctgaaattgagagaaaattattattaaagacacaaaatgaaaatactaagtatttattacctatacttaacataaaatacttataacattacaaaataaccataaattgggagagtttaatacaatttatacaagttttatacacaaaagttagtcgttttcaccgactaacatgtaatcgattacacaatacttgtaatcgattactagtgtttctaaatgtttttattttcaaatttaaacatgaagagtcacatctattgatgtgtaatcgattacaccttgatggtaatcgattaccagtgactgatttcgaaaaataaattaccaaaagtcacaattcttaaagtgacttgtttttgaagagtttttcaaaagtcacaacctttgagtgactagttctaaaagagtcacaacttttaagtgactagttttaaaagagtcacaattttaa

SEQ ID NO: 821 - DNA, 639 bp, Glycine max
  unsure (1)..(639): unsure at all n locations
agctttgatgatatggtcttcaccgacgaaaggatcaatgtgggtctaaaaaaaggcaaatttagtcatcctacttagacgaatgagaaaactggggcaaaagaagagggtgaggatgaaggagaagcccgtgctgtgactgccattccaatacagccaagtttcccaccaacccaacaatgtcattactcagccaataacaaaccttctccttacccaccgcccagttatccacgaaggccatccctaaaatcaaccacaaagcctacctaccgcacttccaatgacaaacaccacctttagtgtaaaccaaaacaccaaccaagaaatgaattttgcagcgagaaagccttagaattcaccccaattccagtgtcctatgctaacttgctcccatatctacttgataattcaatggtagccataaccccagccaaggttcatcaacctccatttctccgagaatacgactcgaacacaacgtgtgcttgtcatggagaagccccggngcgttccattgagcattgtatggctttgaagcgtaaggtgcaagggtctaattgatatggggctggctcgaaatttgaggaggaatcgcgtgttaaatcctgacatttgaccagagatgccacacatggg

SEQ ID NO: 822 - DNA, 586 bp, Glycine max
gacacttaaaactaagctttaaaaatcctatttttgtggacgagcttgactaggcgagttgatttagccttagtttcactttagttattagtcaattcaattaagaatgaggaatcccaaagagaaaacgtccgattgatctttcgcttttattttactaaaaggtatttttatattattattttacctcttttttgatttccaacgtggttacggcacgaccgaacggtcggaattcattttaaccaaaattaacggatgatacaattcaaacgatcggtggaaatttattttatttttagattaagtgagaaatgacttaaataaatggcttaagcgcgtcaaaagggggtataaaaagtaaatgaaaacgagaataaaaatacatgaaacataatgtggaccaccacgggtacatagaatgaatcgaaaagcttggtttgaggtacttacccgttgaagactgaataaaacgaagaacggacgatgaatcttgaagaacggtcgagaatcttcgcgttattactcacggtaaacgttacgaaggcgcctcggcttggattttcttcatggaacaaattttcct

SEQ ID NO: 823 - DNA, 489 bp, Glycine max
agctttcaaatctgagctcaaacagtcacatcatggtccacaacaacaacaacagggtgccaagaatccatgcattctcatcacccgcaccaccttcccctcccatgctttccttcattgtcgctctttccctcacaacactaaccttcatgcgcctgtacgaactctcatgcattggttccggagccatacttctagccctttgcatcaccattctcttaacatgtctatgcctgataggagagaattgagagaaagaacctctttttatgcacaaaccccacaaaataaccgaagggtagagagggttctcaatacgattttttggttgttgaagaaaaaatgggtggcaagaggcaacaagtgaagaaactgctaggatcgatgaatattttggtttggaagccaagcattgccatcatcatgtgtaaggaaacgtgcaatttgcttagaggatttcaagaagggagaaagagcgcctttgtttct

SEQ ID NO: 824 - DNA, 510 bp, Glycine max
taagctcggaaataatggaatccaagattccatttgacataagtcgttcaattttgttcttagaaaggtgacctaagcacttgtgtcataatgctcctgagtttatattatcaattctacgcttagtaccacacaattctgcattaaaggattcaccataggaagctacagtatcaagtaaatatcaattatcattagccaagagtgaactggttccaacaatatctgaattgaaagacaacctaaatacattgtttccaaatgaacataagtaacccaatttgttcaaataagaaactgaaaccaaattccatctaaatgacagtacaacaaaagtgtctttcaaagtaagaaacactgatgttagtagtggcaccagaatctaaccaccaagtgtttctaggtactggagctaaattgacctcagaacagaccaaagtaagaaacatacctttctttgcacgccaagcatgatatttggtacatttcttctttacatgtccaggctta

SEQ ID NO: 825 - DNA, 427 bp, Glycine max
agcttgcatggttagttaatgatcatgaattttgtcatgttagtgctttttgctatgctgttaaaacttgccctggttctgttggtcgggcaattgggaaaattgtggttaattgattttcttgatgttttggactttggtctggttggctttaacgagtttgatgcttccttcaattaattttatagtacacctgttattttctcctgtctatttatttgcacatggagtgttgaatgaagtctggatgatgcacaaaagcaatataattaaaattgatgtcacttttcctcttttgtttgtgtagggttgctactgtgggaggaacgtcacttgatctacatcgcctttttgtcgaaattacatcttgtggtgggattgaaaaggttgcattgcgtaaatcgttctctattaattgtagaaaatc

SEQ ID NO: 826 - DNA, 563 bp, Glycine max
  unsure (1)..(563): unsure at all n locations
ctaagctatctggtttcttgaagctgggtaatcgattatcaaatgatgaatcaattatcctaagttgcataaccttccttcttctgaaactagcttgggcagtcaattaccaaatgaggcaattgattaattcaatgctgctagccaaatttcaagtagaagtgagttcttaagaaacttagagacaaggaaatatgcatctacttcacaactgatcaaacactaagcatttaaaagataaaaaaataaactaaagcacgcacatgcctagactaaaaccaaccaataaaaatatttcatttatcaaaatgtgttaggcattctaaaattactaaaccaaaactaaactaggggcttcatgctcttcaagattttctctaacaaatttttacctaatttttttgtctatagtctagaccacatagaggtcattctatttgacccagaccggaccactgtaggtgacaatactcttttcaaacatttaaagcagttgacttgaacctgagagtactggntaaaactaaacattaccatcatagataaaactaatatttccatgc

SEQ ID NO: 827 - DNA, 433 bp, Glycine max
agcttgtaatcgattacacatatactgtaatcgattaccagaggagattttcagaaaatattctcaacagtcacatcttttttgtgtggttcttgaatggctatcaaaggcctatatatatgtgacttcagacacgaatttgacaagagtttttcagaacaaaaaggtcttatcctcttaaaaagcaaaataattttatcctcttacaaattccttggccaaaactcttgtgattcaataaggaattattttagtgctcaaattgttcaatctatctctttatagagagatttcttcttttcttcttcttcattctgaaaagggattaagagaccgagggtctcttgttgtgaaaggattctcaacacaaaggaaggattgtccttgtgtgtttagaacttgtaaaaggaatttacaagatagtggaactctc

SEQ ID NO: 828 - DNA, 444 bp, Glycine max
  unsure (1)..(444): unsure at all n locations
ttgaatgcacctacttttcaacctaataagtactaattaaacctgatatttctgaatcttatgaactcttaattgcattattgcaatgcacaccatacacaaagactaataagccagaacaagatccaacttttgtcaatactgaggatcaaagctatatgatgttgtcagtcccctcatcaaacaggtataagcctaagttaagtccaaggaattagtattttaacaatntctccaagagtcatatatgtttgcacaaattgttagttgaatctcatcaaaagggaaagctagacttttagtctccaataaagattaaatatttcgtagacagaacggatgccttgttgcatttacatagttccatcatacttncaaccctaatcgagtttctttgaaatgcaacaagctatatggttgcacaaagaacaagagtgcagatac

SEQ ID NO: 829 - DNA, 511 bp, Glycine max
agcttaagctttgaattgagtgccattaccattgatgatggcataagggagaccatatctgtagatgaggtgtttccaggtgaacttttctacctccctaactgagatttcttgtaatggccttgcctcgatccacttagtgaaatagtcgatggtgaccaataagaacttgaccactcctagggcttttggcaatggtttcaatatgtccatgccccatatggcgataggccaagtggaactcaagctatggtggttgttgggaggggtgcgtggaacatctgtgaattcttacctccttgtaaagttgagggtgtcagccaataatatccgatacacaacactttggttgctagggaacgacctccgatatggaggccacatattctttcatgtagttatcgcatgacatagtctgcttgttggttgttcaagcatttgagtaagggtgttgtcaaccttactttcaatagttcatcgtcaaagatgacatagtaactatccttccttt

SEQ ID NO: 830 - DNA, 568 bp, Glycine max
  unsure (1)..(568): unsure at all n locations
taatacctattaaacagttgccatgctgattgttgtctgtttttatgaaagctgtctgcctctcatcaataagaccaaatatcacttgtctcaatctatttgcttataacttagctatcaccttgtacatacatccaatcaaggagattggtttgtagtcatcaaatgactgggggtgtttggttttgggaattagagctatgaaagaagcattactgcctctatggaagctgccatgcacatggaattcatctacaaattttctgaagtcagttntcatcatttcccaaaattctctaatgaattttgaagttgaagccatcaggtccaagacatttgtccccatcacaactccacactgcttctttgatctccaaatccgaaaaaggaacagcccaaaactccctctgctcctggtttattgaaaagaattgcactctatcaagagtgggtctacaaaactactgctcaataatcttgtgaggaaaaattcacaacctccttcttaacatcattgggttctgattccatcacccttaatgaaaattccttgagaccattttatgtt

SEQ ID NO: 831 - DNA, 565 bp, Glycine max
  unsure (1)..(565): unsure at all n locations
agcttgcttctcctgaatatcaaatgcattttgggaaaaagaaatggacaaattaggattggttagaagagcactaactgaaattaaattgaatttgaatttaggaatgtaggcaacattatgcaagaataaggtattggttaagcaaaccgaaccaatggcaatgataggtataacatcattgttaggcagagtgacagttttatcagaaacaagttggtaagatcaaaaatgatgaagagaacaagaaatatgaatgttggcaccagaatctaaaagccaacaatcatgaagaaaattagaagtggatatagaaaggatcataccactggcagaagaaacaccttgaggaatgacagcattggtagcatgactttctaaaagattcatcaattggctatattgttgggcagtaagttgaaactgggaacctgagtcaccagaggaagatggtgagtgagacatatcaacagatacttgttgagcaaccttgtgtggtggtcaaaagatgaagaatgtttcttgacttctgangaaaactagtccctagataatttggaggata

SEQ ID NO: 832 - DNA, 412 bp, Glycine max
tattgaaaagctagtaaatacttggaaaatatccatttgctacatgttggtataaaaaagtaacaacgataataaaattaattaaggcgtacccaacaagctttctcttgctttgaaaagtcattaatcgtaatgaaaaataacaattaaacaacaattaataaaagagaagtcaagcttattgaaaagctagtaaatacttggaaaatatccatttgcaacatgttggagtaaaaaagtaccaattatctcactaatgaaacttatatataaaaaacatttattaattaatcaacatgcacctttcaataagcgataattaatttaataaagcgtattactagagacatggtgaccgaaatatttatcctcatctattattgattttatttataaaaaacttgtatgaaaa

SEQ ID NO: 833 - DNA, 673 bp, Glycine max
  unsure (1)..(673): unsure at all n locations
agcttcaagaacattctacaatgtctcagttcttcacatgcagcctgcaaaagcaccaatcaaaagatgaagaaactatagtcatgacatgcaaggtaaacttgcctgagaagtacataagtaacataactggattctttttttacctcttatgagaaaactataatgaaatagcacaagaataagagagaagtagggaagagacaagactatattcagctgctattgacgtttaaaatgtgagtaattgttaaagaagtacctataattcaccaaagcagacctcagtgtcacgttggacagtctacgtggcactgaattgccacctatacacctcactaacgccgtcacctgagaatttaacgacatggactattttgcaaaacttatgtaaagttagggactattatgaattaaaatttaagtcagggactaatatgcaaactggttacaatctcagggactaaattgcctattcactccatacaattgtgtttgaaatgcaacanaaactcagttatatatatagagttatgtcaaacttttgttaaaaataatttctataattaaaaaatatgtggtgttatattatatgaaatatttttgataaaactatatctataaatatatcttanaaaaaataagttattattaaactngagtataaaattac

SEQ ID NO: 834 - DNA, 535 bp, Glycine max
agcctcttttatcttccttggacctgtttgttttgggtgggcttaatttgggagtccaaatctatttctaacttttatagttaggggaatctataaaaaaatttagaacctgatgttatgtttaccacttaagactctcatttcccaagcaaactattaagacttgagaggaattctcatccactctcttcctattttccaggtgaccatctttgaagtgggagaaaattttgccttatcaagagttagggaatctattttccatgtgaccatagttgaagtaggggacacttttcccttataaaggattacaagatggcagttataatcttctaaacaatttccaatatctctgcttctacttactctttaatttattgtccctttatttgggattttggtgtatctgtggaaaagcgaatgagaaaggaatgctgtaatttcttatatattaccattgtgatctaatggaatttctaaaggtgaaagaccctttgataaacctcaatatctcttcctctacttactctttaat

SEQ ID NO: 835 - DNA, 547 bp, Glycine max
agcttgacactctcagctgcacttcatcatataaataagaaataatatcagaaccaagatattcctgcattatgaatagcaaaactttggcatcaaagtaaatttttctagcaagaaaaatatgtttgccaagaaaaatgacaattgtcgtaccttttcagaaacaaagtaatttaccattggaactacttcaccatagagataagctatgcagcagtaatcattacagcatctctatttgttaacatcttagtcctctgcctcatctgaaaatggataggcaagtaagacatctagtattataacaaagatgattacacagaagatgcttccctttccagaacgaatcggatatgtgcactacttgtaattctcattttgacgttgaccttcatcaaagcgttaaacattagaaaaaaaataggccactagttaaaataaatcattagctaaaaaggcctcgtgcctaatcttttttttatcggcaaagatatatatatatatatatatatatatatatatctatatatatatataaaagagagtc

SEQ ID NO: 836 - DNA, 353 bp, Glycine max
gacccatttgaacaaaccacaattttccactgactgtatttcaagtcaaccggacaccttaggttttatctaatgtcaccagggtgctagggttttgaaatgacagcaacatatacatttcataccaatttcccttcttgtgttaaccagaggaacacaggatatatcaaaaatctaggattaagattctcttcaaataaacattttctgcaaccttcctccagcctctgactctctctctctatatataatatcttggtatttatcccatcattttccttttttctttccattattttttaacttctgatcttaaatttgtactacagaggcaaaagaggatcccatttcca

SEQ ID NO: 837 - DNA, 440 bp, Glycine max
gcagctgcaagcttgaagtgtgaacccatcacttttcgtagagaaccctggaaatgtgtaacgatgattgagatcatctccctcaccatcattgggggcgctacttgagctgctaaatccctccacctttgggcatattctttgaaagattcatgctctttcttgcacatgttttgaaacctgcattctatctggaaccatatcataattatactgacactgcctaatgaaggcaaccattaggtccttccaagaatggactcgggaaggttccaaattagtctactaggtgacagctgtcccagtaagactttcctggaagaaaaccattaataatttttaatccttggagtatgcccccattttcctactgtccattttcaggagattctttgggcaaatacgcccctttatactatcgaactacgacaccttgaact

SEQ ID NO: 838 - DNA, 817 bp, Glycine max
  unsure (1)..(817): unsure at all n locations
aggaaaannnnnnnacccccgctaacncctccgccttgcannnacgnaaannatagaatantnaaccgtatgaaaccattgggtagagtaacatattttatttatatgtttaaaattaaagacactgaattatgatgcggacaagcgccattatgtagaagatttcaaatgaaattacaagtgaagaatcccaatgtactattgctataccacaactggccaatgttgagcctactaggaactcttattgcatatattacacatggaagatgttcatggtgaatactgttggagatagatctagacacatatcctatgtaaggaaattgttatccattgcattgatcacctaatccacatggacctttcaatcagcgatagaaatcttacatctgcgtccatctaaatacatgttggcagtaaccttgaagctttatctctacttgaaattattaataatgcagactgccatgaatcaatgtatcttgcgagaaatcaggtatcctaaacacaagtttttgactgccattcaaaacaaagaagcgattcagcccttttgaatccggaattacaataattttttcctcccgggtactgtactgctatataggccttcatacatgcctttgcattggcagggggcctgaaaactattaaaaggagtgaatcgtggtccccgctttaaattttaggtcacgatcccaattatattttttctctagacggaaccaaaaattagtacttcccacacctttatcatctacctggccggtcccaaacctttaccccgataatattttccatcacaagggttggc

SEQ ID NO: 839 - DNA, 481 bp, Glycine max
agcttataaaaattaaataataataataatatattatatataatccactaagacaacgactatcatcactagatctgtcttaaacggatacaagatgcaagttggttgatagtggatcaagagtagagatgaagaagataatttaagaaagttgtatgacgaatattgaatcaaagcttaacgactagctgctagaacacagacaaatcatacataataagtctttaaaaaaaaaactagcctaaagatacataaatatccaaatagaaatttcttgaaattgcctttggttggaaacagattcaacgctcctaattcaaccattgaagtcaccttatatgatcctcatgtttagacaaaaatgttgcgtaaattgcatttattatacttctttcttgaagtttacgatgtctcacatagaccaaaggaaatggttgtacaaattaaaatgacatatatcacactgaaggaaagttaaata

SEQ ID NO: 840 - DNA, 356 bp, Glycine max
  unsure (1)..(356): unsure at all n locations
gatgaggaactataaattatggttacttaatgctcaattttttctcattttttatatttcganaaggagaaattcggcttatttaataattaattattcaccaaaaaccaagttacgctgaacaagtaatggtaaaagggttttgtatcctctaaaatgagaggtacaatatcaatgatgaagtataaattattgtatttgactaggaaacatctattaaaattatttttaaaatacaaatataacaaattataatgggttgttattaataatttgccaagggaactacaagtatgcgatatgtctagagataaaattaacaagctcaattgtcaatcataacctggtgaaagttt

SEQ ID NO: 841 - DNA, 521 bp, Glycine max
  unsure (1)..(521): unsure at all n locations
agcttgtgaatgtacctatgaattgtttttttgctatgtaaataagccaaccctgagagaatatggcgagtgaaattccgaatgacagattctattagggcaccacaatgatcacggacatatttattaattgaaccaagatgaacatattccagataaatataaaaacggtcctcaacctgcaagcacatatgttaaggttttaatgctgttacagaataatgattattaatcttgagtagctaattatgaagtaggagattgcttactatttcactgccaaaatactgtacgatgtttgaatgttttagattgctaagaancttaatttcctggagaaaaagaataaactattaagaaggataaagaggatatagaaaataacatatcttcaaaactattacggaacgataaatatatatagccaagcagcccaagccattattaagtaaaaccaaccttataagtattcaactacagtggacactaaaacgaaatgaggagcgtcactgcaaaatata

SEQ ID NO: 842 - DNA, 358 bp, Glycine max
tccttaatcacctcattaaggactagaacaccatgtaggatgtgtctgttttttatgaaagctgtctgcctctcatcaataagaccagatatcacttgtctcaatctatttgctaataacttaattatcaccttgtacatacatccaatcaaggagatgggtctgtagtcatcaaatgactggggatggttaattttgggaatgagagctatgaaggaagcattactgcctctagggaaactgccatgtacatggaattcatcaacaaatcttttgaagtcagctttcagcatatcccaaaattctttaatgaatttgaagatgaaaccatcacgtccaggacatttgtccccatcac

SEQ ID NO: 843 - DNA, 538 bp, Glycine max
agcttttctaaactcattcacactaaacaggccattcaacaactcattatacgttctggtatcaggcaaacacccatatctctgcatctgatcaacaacatgcattgcccaccgtactctcccaccatgacacaagcccttgataaacgtgatgaatatgacaacatttggaggacaaccatcagccaccatattatcaataagccgataagcctggtcaagcatagaattcttgcaaagcacatccaccatgggcgtgtaaaccacaacatgaggctgaacctcacaattcaccatcctgttccacacttcaaaagcaccctgcaaatccccagccttggcaaacccgtgaacaagagtgctattagcagacacattcagcgggcaaaagcaatccttcctcatccgatcacaaactgccacaggctcagccacattcccactgcagcacaaaccattcaagagtgtgtggtaagcaacaacattcgggctaaccccctccctaaccataaccccacaagcagcttgcaggcagcat

SEQ ID NO: 844 - DNA, 631 bp, Glycine max
  unsure (1)..(631): unsure at all n locations
tttccaagacataccctnttaattaatttctatgttccatttcacatttatgtttcaaagtcaggattaggaattagggttcccccaccccagatagggaattacatcattggaaaaaaattataagaataatgggtggccgaataaaatgtttgtagacatgaaaccaaaaaaagagagaaaatcaattcatttaattgatgagaaatgaatcaaagattagaattttttctacaaaaagtttaagatacttgcatggtgttcctggttggtttcttcttttcttctggggtggtggtgcagctggagtggttgatgatgatggtgttgaggaatgctgctgcttcatctgattctgatcctcttctctgattgcaaagagcgatgctgcagaaaaaggtgctgccatatcttataaaanaaaacctctatgtataattaaccttcttctcaaagtgtttcttttccttcttgtattgaaaccttacacctaatcagaatttgaaaacccacgtgcgttgagtcctttcattcttatccccatctaaaactcaaagcaagggaatttgatctcttgacctaccgagaagttagaagaaaacttattaggggaattttttcttgaaatttt

SEQ ID NO: 845 - DNA, 340 bp, Glycine max
agcttaaaaagggaactgggagttgatggattcctctggtaatcgattaccagcctgtgtaatcgattacacagaggaatgggtcactggtaatcgattaccaggcatgtgtaatcgattacacagtgtattattgcatatttcatgtcctgaggctgtgtaattcaagtttagcctctggtaatcgattaccaaggctgtgtaatcgattaccagagatggaaagccttaaaatacacctttttattgcatgtagtgtttatgaaacgcatcgtgtgcagcatagttagatttttgtgaaagagactacccctttttcttttttttgtaaatcgtgatg

SEQ ID NO: 846 - DNA, 125 bp, Glycine max
ttacatgttccaatttacaatttgtagagtttcatggcatttgtctgttagtgacagtggtgtcatggaagtatggcctgatggatggttagcttgtattgaaggttggggggaagtattttgga

SEQ ID NO: 847 - DNA, 432 bp, Glycine max
agctatactgctatggttagcaaaaactatctggtccttctcgctctaatagcatgatttgcacaccatatgtggaaaacaaaagcatctaccattaagtatgatgtctgaacattccaatgaataataacattaatcagggatgtagaaaattactaatgtgaaacttactgttaagacacacgcacggacacagataaacacacatatgcagtgctgcccatacatgcacacttacatcttgtttgggagctgacgcagacttgaataaagtttaattgggtgtaccataatgatatagtacatacaagaccaacgtattggttgtaatgcaaggtttacacaaaggaaaggtatgtaccaactacattggaatcaacccaacaaaaaattgggtatgataaaatgactttttattacaataatcacgga

SEQ ID NO: 848 - DNA, 325 bp, Glycine max
ctaagcttggaacattctattggatgatgacatgacaacaaacgttgttatactttgtgttggctaggtggcttactctaagatcagctaatctagttctcataacccccactaatgtgcttaagggatcaattggctacataccttcaggttagaatacttaatacttactttctctttaagtacacaatactacaataaatgaatgcatatgcccacttgctcaatcacactttctttaagaaccttatgataaattttattaccaaccgtggagcatgctaacacatacacacaggtagttgtcaaatacataccatggatg

SEQ ID NO: 849 - DNA, 295 bp, Glycine max
agcttctcttatcgacaaacgtttcttatcttttcgacaaatatcctgaactctccggcaaaggagatttcatcctcaatcacctccatctacgggcacctaatcatcatcaccccaattccagtacccaagtccaccagtgcaactccgtcatgttggacatcccaagattcgatggacacgatcccttaggttggatattcaaaatatcgcagctgttcgactattaaaatacacccgaggaagaatgaatcagtgagggcttgttttatctctgtggagccaccttaagctg

SEQ ID NO: 850 - DNA, 532 bp, Glycine max
aactaagctgtgtccgagatccctatgtaagactaggcctaaactttacaacataacaacataattaaaaccaaaacttaacccgcagattcctcatgtaaggctaagtttcaatcctgcttcgatcaagttctaaggcaacaatacatttcccaatgctaaagtcacctaattgtgcacacaaatgggtgatcagaccaaaagcatacaaacatcaagcattgaaggaagcattgaacacagaaaacataatcaattagatattaggtatttacattagttgttcattagaaatccccaactagggtgtttagccagccattacaaagaaaccctaacaataaatgagattaaaagcagagaatgatagttccttacacaagaagagggattcctcctcctcttctcatcatctcacactcactctctactcaataatctctctcaaatgtcaaaacctaagctttaatgcacaagctgctcctgtttgctgcttcaaaggctctttttcccaaataggcattgtggctgc

SEQ ID NO: 851 - DNA, 338 bp, Glycine max
agcttgggaatgtttcgctttcacacgagaacttctcaccactcttcccttcattggtaatgaagcagggttgacaaccaaaatctggctcactactcatatttggctgggcatccttctgcgagtcggactacatatacattttaaaaagacaatttgagacagctagatatagcgagggaaaccgtgtgatattttttgaaattttcttgaatatgttttagtttgcacagattttaatgattagaagaaaaaaaaaacatgaatttagggattctaatctctagagtagaaaggaaagatattttattttctaaaaaataagtttataggttgca

SEQ ID NO: 852 - DNA, 496 bp, Glycine max
ttgggtacactagaggaatgcttaaaatctatggttcattcatcagacaaatccaatatacatgtgtttgtcccaataaagacatgctttctaattactagcccatgtcaagcagaagtttaattaatcaaaattgccatagcttggttttgagttagtaatcttgttgtggtttagggtaagctgctaagctagggtaatgaagctaagttgtttataaacacttgttggtatttttgttgggcaatttgggcaagtgaattttgtttcttgtatttggctttaggtagtgaaagcagctgtatgttctggtcttttatgcatttattatctgaatattggcatgatttggcgacctacattgcatggctatttattggatatgtattcacgtgccatatcatgggtatttggagaatattgggtatgtattcacatgctttcttaaatactggcatgatatggcaagctacaatgcatggttagtcataaacag

SEQ ID NO: 853 - DNA, 507 bp, Glycine max
agcttgaaaggtatcacataattgcccctaaactactacaaaatgtacgaataaaaggaaatcgtcaattattgggtagaagagtctataatactcatggagtccttagagcacactcctttcagtttcttctttttcatgaaacaaatgatggtatgtatcggtggaacttggagtctcattttggaaagcatagcttagttatgtttctatgtttcatgtatttctttaattagatgtatgatacctatgttttgagggatgtattgtatttaatgatatatgacatagagatgtatttatatattagttattaccttttgtatgaacatcgtatgaaatattttttttttatgtccttagaaaataactctagaaattattctattacctactaaaaaatgaagaaaaaaacagaatattatggccattaaaacctagagagaagaagtgaaaccttaaaggggagtagaacatgttaccttcttctaatttttttttaaaaaa

SEQ ID NO: 854 - DNA, 476 bp, Glycine max
tgtatgagtattgggaaagattcaagaaattgtgtgattgctgccctcaccaccagattttttagcaacttcttcttcaatatttctatgagggacttggaaacatggagaggagtatgattgatgctgccagtggtggagctcttggtgatatgacctctgctgaggctaggaattttattgagaagatggcttccaactcccaacaattcagtgcaagaaataatgctattgtttttagaggagtccatgaggtggccatggattcatcttcatctactgaaaataaaaagcttgaaggaaaacttgatgcattggtcaacctagtaacccaacttgccatgaatcagaaatctacacctgttgcaagagtctatggtctatgttcttctgcaaatcaccatacagatctctgtccttctttgcagcaatctggagtcaatgagcaacctgaagcttatgctacaaacttttat

SEQ ID NO: 855 - DNA, 530 bp, Glycine max
agcttaaaattgaagtgtgtttttgcattctatagtaactctttatgtttgatatgttattttttgtttgtgtgatacaattattctctttgcacaaggatggtgatgttgatttgaatgcttcaccccaagcacttgataagctgctgggttatgaacttgctttcaagataaaggtgcaacccaagttcaggaattttgttgttttgaagtgttcaattgactcaagcttaataaatgttgtgatggatatgctagctgatgctgaggtactgttcaatgcaagttatttgacattaactattgtgaaaactatgtattctattcatacttatttgttttccatgggttgtgttatcttcaatgtatgacttattcagacatcttcaaaaatgaatatcccagtttctgattccaatcattctgcccaacatgaatctgggagttttgattactgctctcattttataatatgatctttcttgcaactcttgcattatgacacttcatggctttcaacttagcattca

SEQ ID NO: 856 - DNA, 413 bp, Glycine max
  unsure (1)..(413): unsure at all n locations
aaactcaagcnttaggagaacctgcccttctctcgtacctaagaggtattctataaagtcattgaaaattgtgatggtgggtttatggaaaaacaatctaattaggagatagagaaaaagatatagaccattaactgccgttattctaaaaaaaatacccctatagtgatcgggattgtagttgttctaaaattaagtattattctaaattgataccttagatggtaaatattaatctaaaaatataaaaaggttaaaaattctacattattgttctataatttttagaagataaaacctatttatttaaataaaattcaaaggcaaaatttcttgacattttcctcgaaatataaaagtcttataaataaacccaataccacaatcaactgcggagaacccccacaatgaaa

SEQ ID NO: 857 - DNA, 559 bp, Glycine max
agcttctatggaggctagatctttgacctttatgaggtccttcaatggtgattttccaccatggagatgcagcggaagataaaggagaagaggtgagaggaagcaccatccacaagggaataagccatggaagaaggagcttctccaccaataatgtgccttggataaaaagcttggagaggatgcttcaatggaggaaaagaaagagagataaaaagagagaggggggagcatgaaattgaaggaggaaaagggggagaaaagttgaactttgagttgtgtctcacaagactctcattcatcaaagttacaacaagtgttacacatgcttctatttatagactaggtatcttccttgagaagctagagcttagctacacacacccttctaataactaagctcaccttcttgaaaagcttacttgagaagattcctaaagaagctagagcttagctacacacacctcttctatagctaaactcacctccttgagatgaaaagctagagcttagcttcacaccccctaaaatagttaagctcacccatttcaaaaataca

SEQ ID NO: 858 - DNA, 550 bp, Glycine max
  unsure (1)..(550): unsure at all n locations
ctaagcttgaataggatccttatatgccgaacccagaaactcttcacccttcctctctagcaactgccaaacattagtcaaagcagcactttccctaatcacacagcaaacaaggttttaaaaaaaaaatcactaacctttcatttcatgactaaaactaatacagacatacttcaatcaatcatcaattcacataattgaagaaataaagcacacaaactaatacacacatacttcaatcactcataaaaaattagtaactaccacacgttgataaaaaaaacacagacacacatgtctttgtaagtaacataccggttgggtatccaagcgggtgggtcgggaccgtaatccttgtagcaaccatagtacagcatctgatgaaaggagaagggaagttcanggttgaggatgctgttgctgacgtgctgccacatggcgggggtgccattgctgtgagtttcaatgatttctgcgagacccctgtggagagtggcagcgtcttctcttgcaattccatgggaatcaatatccgacacagtgatggaac

SEQ ID NO: 859 - DNA, 149 bp, Glycine max
cagcttgagatgacgaagtgtatgtaggtcttacttcctgcttctattgctgaccacagagtggtacctggagatatgtcctgggggtcacgataccttggggacgtcaggtggggtgctattgcccaaaaccaagcttggccaatccc

SEQ ID NO: 860 - DNA, 118 bp, Glycine max
ttgctctaaatttacatggatgttggtattttttggagggatttgtatgccatttttgttttaagggtagcatttcttggtaaaaactaactttccaaatgtttgccttcgcaggaat

SEQ ID NO: 861 - DNA, 464 bp, Glycine max
aacttagagaagtgaaggcaggctattatggaacttgggcagcacatcctggtctaattccagtctgcatggagattttcaacaacaacatgggcaatgctcccaaccaaaataaagacaatgaaacgcgaagatggcgcaaacataaccgagcaagacctcttgcagataccaagaggagcctgcaccatggaaggtctcagatttatggttatatgcttcttaatttaattattaaactcttaataaatatcttaagtcacttgagccttttttcaatttaattaatttttttttattaaaacattggcactagtatgtgattaacctatctcttttgtattgatacaagattaagctattcttatctcaagttattttattaactatgctcttattgggacaaggaaaaaaggaactacttaaagacacttgacaaagggaatataaatactattcaaaca

SEQ ID NO: 862 - DNA, 354 bp, Glycine max
tgtaagttatatattcaatatattttatatgttttatttatgtagatgtttatattttgataaatgaatagttttaggtagtataagataacaattttgtatagtttagtttgaattgttaatgttatatatgccagattattttttgataaatgaatagttttaggtagtataagataataattttgtataatttattttgaattgttaatgttatatatgccagattatattttgataaatgaatagttttaggtagtataagataataattttgtatagtttagtttgaattattaatgttatatggtagattagatttaggtttatttgataaattattgttgcaaccta

SEQ ID NO: 863 - DNA, 637 bp, Glycine max
agcttacaaaacctaggtatctctgcaaaagttggccctcttgctgcctccagagctcttttcccgaaataggcactgtggtgtgctctggaatctgtgccaatcatatgcctaaagtctgtgtaccctaattctgcacaagacaggctttaaataggctctgaaattgcgacgttgcgcttagcgccaccctcgcgtttagtgcgagtaagtgggttcgggcttagtgccagtcatgcgctgagcctggctgaagacacctacagtgcatagcgcactaatctcgcgcttagcgcgtgaccttgatgctgatgccttgcctgattcatgtggaagcaatgtcttccaaggttattttgatgatgccaaagaatcaaaagttaagcagagtttcaagcaaagattcaagaatcaagtttcaagattaaagattcaagaatcaagtttcaagaatcaagaatcaacaatagtcaagatcaagattcaagactcaagagaagactcaatcaagataagtattaagaatttttcaaacatggagtagcacatgatgttttcacaaaatcaattaccaaaaagttttactctctggtaatcgattaccagattataagaatcgattacacaaggtttaaaa

SEQ ID NO: 864 - DNA, 242 bp, Glycine max
tttgtggaaactgctctttggaggaatggaaaaaggggaatgtgctgcttctgcaaatcagaattacctgtggaaaaagattcacctgcacagaaattgttaggtaaatttttgtcatcacctttttctggaatagagggaagtttggcaggttcatttgcagatgaggaaggtgctaccggttgaagtccttgacactgctttcccgacctcaatgaaatggcacttgcctttttggggat

SEQ ID NO: 865 - DNA, 653 bp, Glycine max
agcttcacactccaacaagccaattgtaattgaagaacttgttttaagtatgcatactttttggtcatagatatatgtatgtttagtttatataacctatattccaaaatgactattttttgcagtttcaacccagagcttgccctcagaaagcttcaagggaaaagggtgctatttgtgggggattcactgcaaagaaaccaatgggaatcttttgtctgcttggtaaaatgggtcatacctcataagcataagtctatgcaactaggaagagttcattcagttttcacagccaaggtattgatacatgcattcaatatatggtcaaagatgttgactcaactcaatcagctattaacttaagaacaaaacttagatgcagttttatgtgttttgggtgttgcttccaattagaatcagagttttacctctgatctgcataacccacatcaccgaggtgaagctctaattgtgattgcagaacaacaccaaaagcacatataaaaatgcatctaaaatttgtccttaacttaatcagaggctctgccgggctctcaatatgtaattgacacttaacacaatataatctattactagtaggaattctctcaaattatgacactaactattagacattatgctttttttttgga

SEQ ID NO: 866 - DNA, 281 bp, Glycine max
tagaacaatataacttggccttctcttaattgtctttgggctttggcgaccacgatcaacaaagtactttcggcacctactatatgttgacttgaccaacgctgttattggaatgctgcgaccatctttcaaccaccttattcacacattctgataagttggttgtcatgtgaccatattgccgtccagatgtattggaagccatgctccatttttcctttgaaatgcgatcaatccatcttgctatggctggacttcattgaccaaaattttctaagttt

SEQ ID NO: 867 - DNA, 421 bp, Glycine max
agctttcgagaaatttaaatggtcatcacttttcactcggaagtccgattcaagcgcatcacatatagagacgctcgaaattgaacaacggaagctctcgagaaattcaaatggacatatcttgtcactcggaggtccgattcaggtgcataacatatcgagacgcccgatattgagcaacggaagctcttgagaaattcaaatggtcattacttttcactcggaagtccgattcaggcacataacatatagagacgcccgaaattgaacaatggaagctcttgagaaattcaaatggtcattactttttcattcggaggtccgaatcaggcgcttcaaatatggagacgctcgaaattggaacaacggactcctctcatatattcaaatggtcataacttttcactcagaggtccgattc

SEQ ID NO: 868 - DNA, 471 bp, Glycine max
ggctgcgcagcagctctgatttcgtgagtatttatagaagatgacgcattgtaatcgattacaggtattggtaatcgattacaggcccaataagccttctggtaatcgattacaggatgttgtaatcgattacaggcagcctgttcatgtgtaatcgattacactggatggtaatcgattaccagagcctaacctaggctagtttctaagagaatatctatatttatgctcaaatacatcctatatgactaattttcactactaatacactaaattcaatcattcaattactatatacacaagaaatcataaattctatcataaaaacaagaattctaacaagatcaaacaaaataatctacaatcaaaaggttaaagttaatcaaccaatcaatcaaccaatcaatcaaccaatcaatttctatttgtctaaatctcttacatctaagagacctaattttctttaataga

SEQ ID NO: 869 - DNA, 562 bp, Glycine max
agcttgtaacaaacctaattcataatattctcatgttaaaaataaacaaacaaaaatatcatttaaattgtgtctaactacattaaattgtattaaattgaatttaggtttaattactcatttgattcttatagtttcatatttgtaccttttagttcatatagttttaaaataatttttttagttcttataatttacattttaattctcttttagttcttgtagtttgaaattgatatttttagtccttataatttatattttaattctcttttagtccatataatttgaaagtgattttttaaatccttatattttatattttaattcccctttagtctttaccatcaaaatatgagtaatattatcaattacaattaactacaaaaatattaataagtaattcataactaatttattataacataatttgtaataaaaaattattgataatttataattaatttgtagctaattatttttatatgaaggagtgtaaatgatgagaactaaaaagatgacttttaaactataggagttaaaatgaaattaaaatttaatt

SEQ ID NO: 870 - DNA, 1009 bp, Glycine max
  unsure (1)..(1009): unsure at all n locations
cactgcaatcattcgagtactagcgcgtaaacntcgcacactcctnactctcactgctatnnttnatagcangtatangtatattgananantntttattacactannnactnaannnnaagannantcgtnagtgtgtggcttttnactgagaccctgctatntacgcgacactatataatactcaagccatctggaaaggtggttccttgacagtatgcattcagaaaaaattttgatttttggttggggttctttctgagttaagttactatatgcaaaatttgaaaatctgaagtccctaaaatatttgaaaacaattttatagagggataacaaaaaaaagaaggaaaaaattgcctgccaactgcattttgaaaaattctccctacagaaattgataaataaaaatgtgccaaccagaatgccaatttggtggtttgggttgaaacactttcttggattgacaacataaatagttcctataagaaaagttcaacttggataagcattattcaaaatggcctactccttgaaaaattaaattcccttacatcttacggtttcaaattccctagaattttgggatttataaagaccaacttgttggaaaatgaatggttcaagtggcaccctggaaattattatggtacaagtttcttgcaactttaatcttttctgcctcttggcataccctaatggcggataaaacctgatacctaaaatataagtaagccgggtatgccttgtgggctcctcttctctcatagagggcaaatccttgatttaattagctataggccgcaaacaccaaactgaaataattggttgttttttactggaagaaaaaatcctggcctggatgtgggtactaacactaaagctggtagaaatatgttttataacccaatattggccccattaattgcactaccaccgttggattaagaaatattggataatattggaaaattttcaaggttaaattcccctggttcgatatggagcg

SEQ ID NO: 871 - DNA, 424 bp, Glycine max
agcttctccctctttttcctataaataggggtaggagggcagaacaaaaatgttcaaccctcctggtatctgaggatcacttaaaattagtgagaaaaattatttccgtaaaaaaaatccaagccaaggcgcttctgtaacgcttccgagacgtttccgtgggtgatttcgcgaagattttctgtcgttcttcggtcttcaaccggtaagttcccgaaatcgaactttttaattcattctatgtacccttagtggtccccacttgttttgtgtgcttttatttttatttcatttactttccggacccccttttgacgtgctttaatcatttatttaagtcattttctcgcctaataaaaaactaaaataaatttccaccgatcatttgaattgtaatgtcctttaatttctgttaaaataaaat

SEQ ID NO: 872 - DNA, 568 bp, Glycine max
  unsure (1)..(568): unsure at all n locations
gcttgttgttttttagctagacaactttttattactattttttattttctatatttttcttccatcttattcttttcttgctcgctctctttttgctcctttttttccatgagatattttgctacctaaacatacgtatatttttgtgaggtattttgctatatacatgcgtgtccaaggtatcttgctacctaaacatacatatatatgttttgtgagatatttttgctatatacatgcatatccaaggtatcttgctacctaaacatacatatatatattttgtgaagtatttttcctacatacatgcatatccaaggtatctttctacctaaacatacatatatattttgtgaggtatgactaccttccgagcttgtgcttgttttatttaaattcctaggatcatgagcaactaggtgtgtcctgctatgacttgagaaacaaaggtgatcaaataacaagcagagatttaaaaggtactangttgcctcctagtagcgcttctttaacgtcttgaagctgacgcctgatggcttgtcggtcacgaacctagcactntgcatac

SEQ ID NO: 873 - DNA, 468 bp, Glycine max
agcttctaaaagagtttggtagatctctaggttcagtggaaaaccatcagcccaatggcatgtctcagagatagacccatcagatgatctgcaagaaagagacataacaacagttcgaaaggtttgcattgattcaccattctttccaatatccatgggtttctcaaatgctccgcggattatgtgccgtagactctgtgcagaagggtctgatttatctaagggaagatgaggatgcaagaggagtcctgcttcaagaaccttcaaatttcttctcaaccaagcttcatactcttgttgacttggaaaatctgaactcctgaacagttgtataagctctagtggaagaaccactgactccatgcgtctttcaagctatttcatgaacagagacctagtcagttttaatattgtgattaaacagatgtaagaaagaaccattatgcagatgttcaaacatgacatttt

SEQ ID NO: 874 - DNA, 316 bp, Glycine max
tgccttctctttttttttttaaggaaaactttttcctggtacctaaaaaaaatactccctccgcttctcaatttaagccacaaaaaaactctttttttttttggctcaaatataaacaaatcttaattacctatatattatttaatgagactttctccataatacccttcattttataagtccaaagacttttttatgcttgatttcaagttccaatgaagaatagtttaggaaaaatgtttattttttattgaaaatgacaaaatttaaaagacctatagtttatccgcttttgaagataacattgatttttcct

SEQ ID NO: 875 - DNA, 570 bp, Glycine max
agctttgatgtgttctaaaagttggttatggaattcagagaatgcaggtaaaattctgaatgcttatgtgatactttatgaattgcttatatttttaaaacttataacttgttatttattattttataaatattatttataggttctagatcaattgaagaatcaacttttacagatgagattgaatccgatgatgaatgtatattcacttttagttgttctaatttttttttaatatcattatacatatctaatttttcaaattttttaaaatataggtggatctttggtcagtaacattactcaatgtttgcaagattagtagacattattgttgatcggtaaagtaataactatacttatttactaatgtgatgtgtgattttaagattgaaacatctaaaatatgatgtttgattttataaatatcacgttgagcgctgaaaaaaaattgtcatgacatctttggtgaaggtggtggttattttgatgatggacattgttttcattttctatttatttctaaattgggaatattttgaactaatgaacatttgaattattgttgtt

SEQ ID NO: 876 - DNA, 484 bp, Glycine max
ttttatttttagtagataaggatgaattcgtggccacctcatggactcctctaagaacaatagcgtcatttcttgcactgaattgttgggagttggaagccatcttctcaattagattcctagcctcaacaggggttatatcaccaagagctccaccactggcagcatcaatcatactcctattcatgttgctaagtccctcatagaaaaattgaagaaggagttgctcagaaatctggtggtggggacagcttgcacacaatttcttgaatctttcccagtactcatacaagctttctccactaagtttcctgatgcctgaaatgtcttttctgatggaagtggtcctagatgtagggaataatttctccaagaacaccctcctaaggtcattccagctaaaaatggacctgtgagccaggtagtatagccaatcttttgccactccctccagagaatgaggaaaagtctttagaaagatatg

SEQ ID NO: 877 - DNA, 587 bp, Glycine max
agcttctcccccaattttctataaatagggggagaagagaagtgaaaaagggttcagccccttaggcacttatctctctttcgaatttgcttggaaaaattgtttctgtgaagaaaatccaagccgaggcgcttctgaaacgttttcgtaacgtttccgtgaggaatttcgcgaaggtttcgaccgttcttcgacgttcttcattcgttcttcatcgttcttcgatcttcaacgggtaaatacctcgaaccaagcttttcgattcattctatgtacccgtggtggtccacattgtgtttcgggtatttatattctcggttcatttactttttatacccccctttgacgtgcttaagccattttatttaagtcatttcttcgcttaacctaaaaaataaaataatttccaccgatcgtttgaattgtattattcgattacttctggtaaaatgaattccgaccgttcggtcgtgccgtaaccacgttggaaatcaaaaaagaggtgaaataataatttatgtataaagaaaaccgtttttaataaataaagcggaaatcaatcggccgtttttctttgggattctcat

SEQ ID NO: 878 - DNA, 434 bp, Glycine max
tctcccccaattttctataaatagggggagaagtgaagtgaaaaagggttcagccccttatgcacttctctctctttcgaatttgcttggaaaaattgtttccatgaagaaaattcaagccgagccgcttccgaaacgtttccgtaacgtttccgtgaggaatttcgcgaaggtttcgaccgttcttcaagattcatcgttcgttcttcgttttcttcagtctttaacgggtaagtacctcaaaccaagcttttcaattcattctatgtacccatggtggtccacattttcgttcatgtatttttattctcgttttcatttactttttatactcccttttgacgtgctttagccatttatttaagtcatttctcgcttaatgtgaaaataaaataaatttccaccgatcgtttgaattgtatcatccggtattt

SEQ ID NO: 879 - DNA, 553 bp, Glycine max
agcttaaacgtgttataataaattgaatgattgaaggacgtggatgttaaatctgaaccaatgaaacaggaacttgacttgtatctatgttcaagagtgcccgaatgcgatcccagttgacccaattatcgttagcgtacgaggcaacaattacactaggtaagctagacaaaccaacaatagggcaaagaggggtcacactcaccccactaaagatgatgtggcacgtaattgggcaaagagagtgatgtagctccatgtggagcttgtaggccttgaatcttcttcatcaatggagtcctttacttcttgaagaagaatggcagcggaacggagaaagaagatgattggagacccacttttaggagaagatgcgttaagaagaagctcaccaccataggaaaccattgataaaagcttgaaggaagtttaacatgagtggagggagagggagagaatgaccaccaaatttagtgcctcaaatgagggctgacttttgaggataatcctcaaatgatcaaagttgaaataatcacacacatgacttttattt

SEQ ID NO: 880 - DNA, 803 bp, Glycine max
  unsure (1)..(803): unsure at all n locations
accagcgcagtgtaatgacacacccacaccaactacgtaacagtaaaatttttcaaaacaaaaataagaaanaggggganatgagaactgaacctgcaaacaaaaaaanaagaacggggccgaccagagaccaaacgcatgaaccctcgggcgccgaaccaacaagagccgcgggacacaaaccgggaggcccgagaacacaacaaagggaaaaacgaacacacgggcctgagcaaaacgaaccaacaaggcaccacaagcaccggaaaacacccacaaaatcaaaaacaacgtgcaccaagaaggagcaccagcgcgacctctcttgaagagcaccagcaaacctacgggaacgagcacacaccagggcccaaccagaggcgacccccgaaggcgaaccaaccaacacgggggaacactggaacgccaagagagcaacccccggaaacgcactaaccgcgaacagtaaaaaaagggcccaacgacgcaaaaaccctcaactgcaaacgcagagcgaggggacctcccaaccaaaaaaaaacggaccagcgtggcggccccacccccaaaggaaagcaagacaggaccgacctgaacaacaaacaaatacaacgaccggcggctcacatcaacccggcaacaccccccaaccggaggagggaacacatctccaccacggaaaaacaccaacaacaggggcggaggcctcaccaatacgcacacgcccaccccgatggaacaaagacccgagccaacccaacgggctcaaaggacaaccacagcgccacaaccccactggacag

SEQ ID NO: 881 - DNA, 344 bp, Glycine max
agcttgcaatcgattacatcatttgtgtaatcgattaccaggcacaaaaaaattcaaatttcaagtctgaggagtgacaactcttcacaaactaactgtgtaagcgattactacatttatgtaatcaattaccagtaaggaattttcgaaaataactcccaagagtcacaactattcaagaagtttttgaatggccatcaaagccctataaataggtgtcttattattctcaaaatattccttggccaaaacacttgcaaattcaataaggaatcttgctcaatctttaattgtaatatccttcttttaaagagagaaaattcttcttcttcttattcaaagag

SEQ ID NO: 882 - DNA, 513 bp, Glycine max
tgggaaagatctaacagactcagcctaatgttcatgagattgactgttgcagacagtattaagacaactctccctaaaaccgatagtgctaaagagtttatggggttagtaggagagcgctctcaaacagctgataagtctcttgctgggacattaatgagtacactaaccaccatgaagtttgatggttcgcgtactatgcatgaacatgtcattgagatgacaaacattgcagcaagacttaagaccttgggaatggctgtgaatgagaacttccttgttcagtttattctaaactcattaccatctgagtatggcccatttcaaatgagttataataccatgaaagataaatggaatgtgcatgaattgcacagtatgttagttcaggaagatacgaggcttaagaatcaaggaagtcactcaatccattatgtaagccaccgagggaatcaaggagctgggaaaatatttgtaaagaaacatgataaaggcaaaggaccattaaagatc

SEQ ID NO: 883 - DNA, 507 bp, Glycine max
agcttggaagaagaatacatggagatttcatctgaatatggcgccactaatggaggaaataaagtttacatactaaagaaagccttatatggtctcaagcagtctcctcgggcttggtttattaggttcactcaagctatggtatctttggggtacaagtaaagccaaggcaatgatgagcttgaaaaatagaccctgagggagaggttagcagcccaatttgagatgaaggatcttatgaggctaaagtactttctcgggatagaggttgcttatactttacgaagggtatattcatttctcatagaaaatatatacttgatctcctcaaagaagctgacaagatgggctgtaaaaccactggagcacccatagagcaaaatcacaagattggaaatgatgaagaaagcccaaaggtatagaagacacaataccaaagactttggggaaaacttatcttttattccccaccaggcttgtatagcctatgcagatagtgtggttagt

SEQ ID NO: 884 - DNA, 275 bp, Glycine max
tgaccaggaattatttgtattggttggatgttgaattctggttgttcctggtgcggagatgatggtacagcgggtgaaccaggagcggcagtttcttttggtgaggaagccatggaaaaacagagcgtttggaatgatttcggaaatctcagaaaactattgggaaatgctggagaaaacacgaatgccaagcagatataaatttgaatgaagaatgtataggggcgtgtgaagcaacggacaaattggctttgaggggaacgtgctattaaagt

SEQ ID NO: 885 - DNA, 478 bp, Glycine max
agcttatgcgcatatttccttacgaatgttcgcttgcacaagacattcttttaactaagaaaaatgcacccatatacaatcaaggcagcttcagtacctagattatttacatgtacttccaaggtgtatttgatacttacaatacacacatctccttggctaaattaacatacatgcatactcaaagcattttggggtaccaaaaattgcacatgtgcacatcttggtatttctaatacctatacatacacaaccttcatgatgaatattgactatctacacaataaagggctacatttcatgctcttcttaagtttttgctacctaaagccgcatgcaaattcaagtatattttcctttgctgactaaaattggattaaaaggtatatatctttttgtagcgcaacatatttatatatattttttttgtgagacattttgacttccacaaattattcgtccatacatcccaagtatt

SEQ ID NO: 886 - DNA, 368 bp, Glycine max
ttggagcatttctgtggtttgctctggaaaatgccaactcacggattcactgagccaattcagctcaatatattcattgatggtttgaggccgcaatctaagcaattatttgatgcttcagccggagggaagataaagttgaagaccccagaggaagaaatggagctgattgagaacatggtggctagtgaccatgctgttttgtgtgacagaatgcacatccccataaaaaaaaagtttgttagagctttccttacaagatacattgttggcccagaacaagctgttagctaaacagcttgagttacttacagattgtgaacgggcaaagattgaagttgtactatggtgggaacattaagagatta

SEQ ID NO: 887 - DNA, 400 bp, Glycine max
agcttatgagcatttgaatttctcgtgaggttccgttgttcaatttctagcgtctcgatatctgatgtgcctgaatcggagatccgagtgaaaagttatgacaattttaatatatcgagagcttccattgctcaattttgagcgtcttgatatctgatgtgcctgaatcggacatccgagtggaaagttatgacaatttcaatttctcaagagctttcggggttcaattttgaacgtctccatatgtgatgcgcctgaatcggaccttcgtgtgaaaaggtatgaccatttgaatttctcgtcagcttgcagtgttcaattttgagagtctcgacatctgatgggcctgaatcggacatctgagtggaaaggtatgacaattttaatttcttgagagctt

SEQ ID NO: 888 - DNA, 326 bp, Glycine max
  unsure (1)..(326): unsure at all n locations
tgttgaaatngccatgtttggatgagtttaacatacccattcttgttttaggtttttatgaggattcttgtgatgttcatgtactgaaattggctattggaaacttgttgaaatgaaaaggagaagttaccctagggtaaaaaagtgagaatgtggtgttatgagtggaaaaagagtgaggctttgagagttgaaaggctaatctggattctgtagtaaatggaggttaaaatgagttaatcctagcttgaaatgccatttaggacttatgagaaaggttaggctgcgctagagagaaaaacaaatgaccaaagtgaaccaagagc

SEQ ID NO: 889 - DNA, 608 bp, Glycine max
agcttgtccttcacggcaaacatgatagcactggcatgttctgcagcattgcctacaattggaagcaagatgacagaaataaaagccactgacatattcaatgactcagatgctccctgcaagagaccagaaacacaatgtcaatgaatgaacttatgatgcacaatttatggataataggaatattgtgaatgtatgaatacagagttttgatgatgtcaaagtaaaatcaaacaaggttgtttcaacaaacattattgctttaagattaattcaaggtcaaacaaataagatcaagaaaaagataaggtctcaaataatctcactggttgattgatttttgccttaaaacaaattgtttccaagagatcaaaggctctagtattcgattactaggcaatgtaatcgattaccaggagacaagtttacaaatcaacttttataaaaagatttgaaattgaatttttgatcttgtaatcgattaccagatgtttgtaaaaagattaccagtaaccgaactcttgaaattcaaaatgaaaagtcataccctttaaaatataactgtgtaatcgattaccagtgagaatatttcagaaaagctttttgaa

SEQ ID NO: 890 - DNA, 487 bp, Glycine max
  unsure (1)..(487): unsure at all n locations
ntgaacttgaattctttgaattataatgcccatattgctacttgaacctgaattaggaatggtaatgccaagggtaaaggaagttccgctttggattaggattaatggaatgggtagttttttccctgtgatgatgaaacttctagcatttgattatagttaggagttaactgtgagtgcttctcctttggtggatgatgagaaggcaaatgggaaacaatggggaaaggactggtggtggagacaggatggaagtggagagttatgtagtaaagactacgtaatggagtggatagggagtcagatttgtccatccaacgctgattgggatgatggtaagaacaatgttcacgcgaaagtagagttggaaaattcaaatcccaatgattaagaccatgatgctattgcaccccaaccacatgggtttgggattggacataatacttcagataatggggttgagaaaaaagagtcaaggggaaagaaa

SEQ ID NO: 891 - DNA, 500 bp, Glycine max
agctttgctggcacttctcccacataatatactttttttctctctttctctttgttcttctaccttattttctttccctagtcaaggagattcatctctgcagcaggtaaagtttactacttgacaccccatttcctgattaggtatcttgtgtgcaagattatgtcaaattttaaatcttgccttactatggtatcatgctatgagctgaatcattgtggctgtaaatttggtcttaacaattgtgatggggtgtagttagtctcttgtagatgatgggtttgattctgattagtgtatgagtgtgtaaatctttaaccattttctctttcttgtatggtaagttgttccattttatgcttgatccatgctgacaatgggcttgttttgaacctctttggcattggatctaatcatcttctattaacagtggtttgtaaagtattaaaagaaacatcgtcacttatttttatctccgaatggctaatctacctttttta

SEQ ID NO: 892 - DNA, 476 bp, Glycine max
aactaagcttataagtctcttggattgaaacagcctcccgccagtttttttaaaatttatgagtcatttcttcattcgctttgaagagaatgtcatggatcactgtatataccaaaaggttagtgggagtaagatttggttccttgtattatatgtagatgatattctgcttgcgactaatgataaatgtatgctatatgaggtgaaacaatttctctcaaagaactttgatatgaaggatatgggagaggcatcttatgtcataagcataaagatccatagagaaagatctcgaggcattttatgcttgtcttaagaaacctatattaacaaagtttttagagagatttaatatgaaagattgttcaccaagtgtagctcccttgtgaagggtgacaaacttgctttggtcaatgccccaaaaatgattttgagcgggaacacatgaaaaatattccatatgctttagcagttgg

SEQ ID NO: 893 - DNA, 495 bp, Glycine max
agcttcatgcaaaaatagaaaatgaactctatgatcatattggattttctaaactaccatgataagactgaagagggatttctttttcttagttatcaaattaaggaataaatattgagtgggtactttactagaaaaatcatgtagcaaacatctttcaaattccatggaagttaatggctagtgaatttgtcatatgagtcattaaaattcaacacacttgtgtatatgtaagagacacaggcatttgataaatgcattttggattgacatacttaccaagagctacagaattataaaccctgttgtcatatctccataaacttgtgttgaaataaaagaaaaacaacaacgatcttcaacgtttagattttggataaatgttgaaaaggtgtatctgactggatcacattgttctgtttcatcaatgaactacttccaccggctgcatgagaataatatttaatcaacaaaaattatttaataaaaagaaat

SEQ ID NO: 894 - DNA, 465 bp, Glycine max
atactagcttcacatcagaccacttccagggtgctggaactacttcacatggacttgatggggcctatgcaagttgaaagccttggaagaaagaggtatgcctatgttgctgtggatgatttctccagattgacctgggtcaactttatcagagaaaaatcagacacctttgaagtattcacggagttgagtctaagacttcaaagagaaaaagactgtgtcgtgaagagaatcaggagtgaccatggcagagagtttgaaaacagcaggtttactgaattctgcacatctgaaggcatcactcatgagttctctgcagccattacaccacaacaaaatggcatagggaaaaacaggactatgccagaagctgctagggtcatgcttcatgccacagaacttccctataatctctgggcatgagccatgaacacagcatgctacattcacaacagagtctcactt

SEQ ID NO: 895 - DNA, 553 bp, Glycine max
agcttgccgcccagctcgcccaggcgagcaaggttgcttcctccagaagcaacagccttctggaggaatcttctggagggcccaagtgggcctggttgctatttgcacccccatttttactaaatacacccccttctatttttttggtgattctttttccgtaatgttacgaaactttatgaatttcgtaacgatacttatttttcttccgcaaggttacgaatccttacggattatgtatttactcttttttagctttcgaagaagttacggaaacttacggattgcgcaaaaacacctcttttcgacttccgccatattacggaatttcacggatcgcacaagcctgcttcctttagatttctgagacgtctcaggacttcatttattgtgcaacaaaggacgccaagtatctcaaagcggctaaccaaaggttgcatgtcatcaaataataatccccggacgaaattagggtatgacacacataaactgaattttcgtctcaagaatgttatttctagggcattcttcttccacaaggtttacaaatgct

SEQ ID NO: 896 - DNA, 528 bp, Glycine max
atataatactcaagctttgcggatttggtcttcaccggtaaaaggatcgaaatgggtcttaaaagaggcaaatttaataatcctgctttgatgaatgagaaaactggggcaaatgaggagtgtgagaatgaaggagaaacccatgctgcgactgtcgttcctacatggccaagtttcccaccaatccaacaatgtcattactcagccaataacaaccattctccttatccaccacccatttatccataaaggtcatccttaaatcaaccacaaaacccacctaccacataaccaatgcccaaacaccacccttagcgaaaaccaaaaaggaattttgcagctaaaagcctgtagaattcaccccaattccggtgtcctatgcttacttgctcccatatctacttgataatgcaatggtagccataacccctactatgtttcctcaacctccatttttccgaggatacgacttgaacgcacatgtgcatatcatggaggagcccctgggcattccatgagcactgcatg

SEQ ID NO: 897 - DNA, 480 bp, Glycine max
agcatcaacctcatcgtctctgacagtttttatattagggagctaatccaatccttgggtccgggctctcagccacttatgacagccgccgatgatcccattactgcttcccctaagctctctgtcctttcttcacgccgcattccatgccttgcgaactccttggagtaccctcgcggtgtggttaccgaaaccccgtgcgatgaaaggcgtgatgctttcgtttgatggcactcctctcatgggggtagccaagctgtcttatggcgaggacgggattataattaatacaaccccttgttcccatcaagggaacatttggacatccttcgcatgaagataaaatcttgattcttccgtccttctagccgagggaaccaattaacagacgcccccccatgctagccaagaagtaggccccaatttgccttttctttttcgacgcacgagcggtaaccttgtagcggatagacgggccta

SEQ ID NO: 898 - DNA, 380 bp, Glycine max
  unsure (1)..(380): unsure at all n locations
ttgtcctcagatccctcttgttggactagacttagactaaacaacattattgtaacaacatattgaaaaccaaaacttaattcgcatatccctcttgtaagactaagtttcaattctgcttcattcaagttgtaaggcaaaaatacatttcccaatgctaaagtcacctaactaggcacacaaatggttgatctgaccaagagcatacaaaatttaagcactgaaagaagcattgaacacaagaaacacaatcaattagatattaaaataattacattagttgttctttagaaatccctaacaagggtgtntagccaaccattacaaaagaaaccctaacaataatgagcttacaaaacctaggtatctctgcaaaagct

SEQ ID NO: 899 - DNA, 562 bp, Glycine max
agcttgtttgttgataatccctatcgttaggattcacgggtgtcatggccgttaaattttttaaaacacgttttgtggcagttttaaaaccacccgtgacggttaaaaatcacactagaatcaattaaaggaggtgaaaagattagatatccatttcacgaaagattaaattataatgtattttatctcatcttcatactcttttccattaaaatacataaatatggtagggaaatcacttgtgatgttcttcatactatgatataaatatatgaactggatagatgtgggtaagtgaaaactgagaagcatgcacacttatatttatggataccagtgaatatagttttcagagacaccacttatgatgtgcttcttacaaacaagatccagattacatatcacttagcaaaaatgctttggaagaaaaaggcgcaataccacaccagtgggagcaatccatttaccaagctctgtcctgtataaccacacaaagtagtagaaagatactactaagaaattttgatatggacaaaacttgagatatgaactatgaaagtca

SEQ ID NO: 900 - DNA, 491 bp, Glycine max
tattgaatgttttttattttaagaaattatgattatataatttgattaatttttaattaaattatatagcatatgatcactttgttaatattttctctaatttttttagtaaatatatggaaaaaatgataaaataacaaaagattatgacttccttaattttataaaagataaatttaaattatatgaatttaaatttcaaattttacaaattaaaaaaaaaacagatgctaacttaaaggattctttttaaatgagtattaaaagaaaatatttatatttaaaataatacgtaatgtaatattggaaaattatttaatcacttatattagaaagaaaaaaaaaagtaatgcttaatgtattttgtaaacctctagtatgcttgatatttttaacacgtgtttgcttcatttggcttttagtatcagacaaacatcactatattactttctttaatctttactaaacttttattttcaatgacattggat

SEQ ID NO: 901 - DNA, 511 bp, Glycine max
agcttggaggagagcaaatcagctatatctttcccaaacgatatgagtctcccataatttatatttttcataaacccaagattctctttgccattttgaaatgcaccggaagaatcattgttcttgttcttctttacactgcaggtataggatacatcagctgaccaatcaaggccaccccatatagtatacccacctttgggtatcattgacatggttgaatcccacgttcgggtcatccgcattagatgctgtaaagttttaagaccaaaaacatccttattccaaaaacctggtgcgaaagtcctgtatgaggtttagagattcattagattatataaggtatcacagctaacatgattcatttttaaacaatatcatcaatggaaattacataaaaattcacccctacaaaatctggataaaattcttatatattggcaaggaaacacaattttcgaagaacttattaacagaatccacagccttataaaaatattttattggagga

SEQ ID NO: 902 - DNA, 411 bp, Glycine max
tcttcaccagagcagcatcaaggaaagtggtttgtactatcaatggggtggggaaactacttttgaacaaagcgaagtccagaatttgtagaccaggattggagctactgaagcttacaattgccagggctgaagatttgcctgcattgatttggaaatgaagcaagccttgagggaatgccataacatcccccttcttaagagttttgaggtagacaatgttggcagaagaaatgaatccagctaggatgctcccttcaattacaacaagtaattctgaagctccaggatgagtgtgaagtggtataacttcacctgctgctaagtccaaacgtgctgcggaaatgccaagaccgttgagaccagcaaactgagcatcaaatgcaggggtcactgcagctttgataatgt

SEQ ID NO: 903 - DNA, 557 bp, Glycine max
agcttgcatgatttacattctccccctttctcaagaaaattcttaaatcttcttgacatcatcaaaatcttcatgatttacattctccccctttttgatgatgacaaccacctgtaggttaggagcaacaaaaaagaaaaaaaaaatctatttgcatatagtttactcccccttggttttgcaatgattgcttatatgagacagttgaagatttcatattttttatatgtaaacaaattgtctcataaacaatagataatttttcttactaatttatcttttatctttctctccccctttgtcatcatcaaaaacaaatcatgaatagagaggagaaagatgttaccacttgttgcaatgtatgagaatcaagtgataccaaaaggcattaaaacaatcattcaatattaatcaagcaaaaacaagtacaataacacatcaatcatacacaatcaaatacaatcaatcatcaaatatttcaaatcaaattaatcacaatcatcaagaacagtctaaactcaagtagaaaacaagcatcaaaagtaatcaatcaaaga

SEQ ID NO: 904 - DNA, 487 bp, Glycine max
actaagcttaagaaaaatggcctcagcaaacttcttatttccaaaaggaaattcaatcaatagaccttcaatctttaatggagagggttaccactactggaaaacccgaatgcaaatttttattgaggcaatagacttaaatatttaggaagccatagaaatagggccttatatacccaccacagtagaaagaaccacaatagatgggagcacaacaagtgaaagcataacaatagaaaaacctagaatagatggtctgaagaggatagaagacgagcacaatataatttaaaagccaaaaacataattacatttgccctgggaatggatgaatatttcagggtttcaaattgtaagagtgctaaagaaatgtggaacactctacaattaacacatgaaggtacggcagatgttaaaagatctaggataaacacattaactcatgaatatgaactatttaggatgaatgcaaatgaaagcattcaag

SEQ ID NO: 905 - DNA, 598 bp, Glycine max
agcttctcccccaattttctataaatagggggagaagtgaagtacaaaagggttcagccccttaggcacttctctctctctcgaaatagctgaggaaaattacttccgtgaagaaaatccaagccgaggcacttccgtaacgtgtccgtgagtaattacgcgaagattctcgaccggtcttcaagattcattcgttcttcatcgatcttcagtcttcaacgggtaagtacctcaaaccacgcttttcaattcattctatgtacccgtggtggtccacattttgtttcatgcatttttattctcggcttcgtttactttatataccccatttggacgtgcttaagccatttatgtaagccatttctcgctcaatctaaaaaaaaaataaatttccaccgatcgtttgaattgtatcatccgctaatttcggtttaaacgaattccgacagatcggtcgtgccgtaaccacgttggaaatcctaaaaagaggtgaaataattatataatagtaaaaaatatcttttagtaaaataaagcggaaaaatcaatcggacgttctctttgggatgtctcgtccttaattgaattggctaataac

SEQ ID NO: 906 - DNA, 459 bp, Glycine max
tgtttcaagatgtaaagccactgcttgtgatgatacctctacttcctttaacatggatgattacaattttttccaaaccaagtttgaaaatttcaaaaatgatcaccatgctgaatttatgaaattacaaacagagctttcctaccttaaagatctgtttggaaattaaaaggaaagagtgatcttaatcacttgctcggtgtgcaaaagcatactacagacaagaccagcttggggtataacaagcaaacctccttttccaaaaaaaaaactcagtttgtatccttagaaggggtgaacttaaccaaggtctcaaaaaagaggaacatggtgtattctaagagaaatgcaaaaacatgtcattattgcatgaaaaagggtcatacatcatataattgctatgttagaatgtttgacattccgagaggaaaatgcatgtggattctaaaatatttattt

SEQ ID NO: 907 - DNA, 576 bp, Glycine max
agcttataaagaaaaatgatggcatggttttaacccaatcacattatgttgataagctattgaagaagtttaattattttgatgtaaaacctatttctacttcttatgactcatccattaagttaaagaaaaaattgaataaaggaatttcttcacataaatattctcaaattattggttctttgttgcatttgacaaacttctctaggcctaacattgcatatgaaattggtagattaggaaggtatactaataatcatgatcattctcattggattgcattagaaagagtttttagatacttaaaaggaaccattaattatgacattcattatacatgttctcgtgcagtaattgaagggtttagtgatgcaaattgaatttctgattctaatgaaacaaaattgacaagtggttatgtctttactgtagctggtggggtagtatcatggaaatctgctaaacaaactattatttcatgttctaccatggaagcataaattattgctttaaatactcctactagtgaggttgagtttcttaaagaattgttattgtgatttgccattggttaat

SEQ ID NO: 908 - DNA, 383 bp, Glycine max
ttgtccctaggctaaacccgtatcacagaagaaaaagaagatgggagaagaaagatgcaaagctgtcagaaaaaagtagacaaactccttaatgctaaattcattagagacatcagatattctacttggctcgccatcatcgtcatggtcaaaaaggtcaaaggcaaatggcgaatatgcaccgactacactgatctaaacagggcgtgccctaaagatgattaccctctgcacaacatcgaaaaactgtggaaggaatgccttccaagattattttgatgatgccaaagaatcaagtgtaaaacaagtttcaagaatcaagatcaagattcaagattcaagtaaagtatcatgaactcagattcaagaatcaagagaagact

SEQ ID NO: 909 - DNA, 713 bp, Glycine max
gttgaactccttctttcatggcttattccttaaaggatggctcctgctctctcctgattcttattagacatcagaagcatcagcatggtggggaccaccaatcaaaagaatttgagtgatctcactattccacgcttccttgctgctttgcgaaggaagtttaattaataaaaagcttcatgttttattttttatatgtaaacaaaagtgctcagagaaaataaataaattatccttcaatataacctgttatgagtatgtgaaccatttgcatcttgccgatacagatctttaagtgaacaagaaataaaattctgcctccttgttatatatgtactgacacatttcttttccttccttaagggttgtatacaataatgctatattgtatgtaggctaattactaatgactctgtacatatttacctacatacaatctcataccatactgtctattacaaattataatttaagtttattcccaccttcctgatacttctaacctcgacttaaatattgcattactagctttcgatcagttaacatctccgattggtttctttacatttaccgatgggctgattaaataaaggttaattggcatcttcatctatagatattttaatttttggggagaagacttgccctttagcttcttccttaatacacaattccttttatgtgaaaaaatagaaataactatttgctcgccc

SEQ ID NO: 910 - DNA, 459 bp, Glycine max
taaaaagtgtggtaccactagtagcattataagtaacaagagaaggaacgtactagtacttatgtcatttagcttccatttatccccaaaggactgcgccacaaacttgaacgggaacttttgctctgagaatattcctctggaatacttgtagttgtatgcactgcggggagaaatcacatgaattgaatagatccgctgccagagtattcattgctgtataagcacttatgtttgaaggtctcaacatgatacttaatgagcacaataaatggaaaatcctggacaatttttcatttgcctgtgaatggatgaatatttgaaggcttcaaattggaagagtgctcacgaaatgtggaacaactctccaattaacacatgaaggtgccgcagatgttaaaaaaatctacggataacacattacctcctgtatatgaactatttaggattgaatgcaaa

SEQ ID NO: 911 - DNA, 506 bp, Glycine max
  unsure (1)..(506): unsure at all n locations
agctntgagctaattcaaacgacaataactttttactcggatgtctgattgagtcctgtcatatatcgacacgctcgaaattgaatgttgaagctctgagccaattcaaacgacaatatctttttactcggatgtctgattgaggcccgtaatatatcgagacgctcgaaattgaatgttgaacctctgagcaaattcaaacgacaataactttgtactcggatgtctgatatagtcccgtaatatatcgagacgctccaaattgaatgttgaagctctgaggaaattcaaacgacaataactttttacttggatgtctgattgaggcccgtaatattttgagacgctctaaattgaatgttgaagatctgagccaattcaaaacgacaataactttttactcggatgtctgtatgagtcccgtaatatatcgacacgctcgaaattgaaatgttaagctctgacccaattcaaacgacaattactttttactcggatgtcagatt

SEQ ID NO: 912 - DNA, 357 bp, Glycine max
taaacattcaacttcgagtgtctcgatatattacgagtcttattcaaccatccgagaaaaaaggtattgtgctttgaatttgctcaaaaggtcaaccttccatttccaagccgtttgtttattaccaggcctcatccgaccttccagttaaaagttatggtcggttggaattgctcagaccttccccattcaatttcgaccgtcttcgatttttacgggcctaattcagacaatcgagtaaaacgttattgccgtttggattggctcagaaatttcaacattcaatttcaagcgtctctatatatgaccggactcaatcaaacatccctgtaaaaagttattggcttttgaattggc

SEQ ID NO: 913 - DNA, 495 bp, Glycine max
agcttctccatcgttcaggaatgaaagaatcatctataagcactctcttggcatcttcttcattgttgaagcctgggattacaagtgcctctttcttcttgggtgttattattcacaaagatcaattttttcttgaaaaataagtgattttttaaatttgattcctcatacataagaaaaaaaaggcacacaagagttgtcagagttcaagatttcaaaagagtcttttagatgtccaccttctccttttatatgtttagaaaagaaagagaaagatgaacaataacggttaaaatctcatttaatatttttcaaaagccgtttttcaatcatggtgaaaagtgtaacgacccgcctcattgctatgatatcaccactctaaatcacgaaaattttaatttttaaatgaaaactctgttaatttgcttataaaaaatgaaagtaaattttttcgcgatatacattcaccaaacaacgcacaaatacttaaatgag

SEQ ID NO: 914 - DNA, 484 bp, Glycine max
  unsure (1)..(484): unsure at all n locations
acacttgaatctaagctttaatttcaatgcaggaacatgactatgcctangattctaatttttgggtttgaatgtaaaaaatgcatgaattnttnnggacatggtttgaggggttttattataaatttaatatttgtgcttnncccactgaagagataccctngccccctaaggttggcattgggaaaataccctttcaacgggtatatatatatgggaatatatggcatgaaaataccttgcaaaatgagtgaatagttaataatgcctttcaaaatatgtatatttgtggataggtagcataaggagcctttcaaaaaaatgtgcccatgccaaagatggcacaagaatgcttcccaaatgaatatatgatgtagaattgcccctcaagtgtagattagatggcatgaaagtcccttttgaatgcacaagtgtgtgcataatgtaattagctttcggacatgcatataaatgaatatgagag

SEQ ID NO: 915 - DNA, 584 bp, Glycine max
  unsure (1)..(584): unsure at all n locations
agctttgatcaagccctagctgccattccgagctattttcgcccaccgtgataagctttttaccaatctactccgactaaagctttttttgtgtcaattgaaacaaattaaatctcaccaggtacttgtacgggaaacaaagcctttgggtggagacaagatttgagggtttcatgcttctatgtgaagggatttgaaggattcgaaggcttcgtgtttgttcagttatatttcaatcttcattctttgtttagtctcttcagttatatttcaatagaacttgttttgagtaggtgattcatacctcgntgttggtgctgatgttgtgtgaacaaagataaagtctgccttcaaaaatattattcagtccatttttaacttcccataaggtgtttgtgaaaatgctataatgaggaggaaacttttgatgactcagtaagatatcttcctttattttcaactttattgttaattacaagtttaattagtgattattattaccaatatgtatctttaatttgtatcataaaattgagagaatttacatatgattttttttatcatggttaagtgttggctcaact

SEQ ID NO: 916 - DNA, 412 bp, Glycine max
tcccgcgaagaggtccaggaaggacaccacccgaaaaggcttccatggctgccccgcaggttgccatggacttcaacagacaccgattctagagcacagaacatcagtagcattttgagatcatcaaaggatagtcattcctcagggagagacaggtccaactaagggacgatgagtttcctgtcttctagggagagatagcctacaggcattgggcaccgcttgtgacacccatggctaaatttgatccaaagatagtcatggagttctacgctaatgcctggcctaccgaggaaggggtccgagatatgcactccagggtgaggggccaggggattcctttcaatggagatgccctcagtcagttcctgggacacccactgatcttgggagagggccaacaatatgagta

SEQ ID NO: 917 - DNA, 480 bp, Glycine max
agcttcttacaaagcatacggctttctggatgtatatgatgatatctatacagatggatcttatatatctatatatctatagatagatatatagatgtagatatatagatatagatcatacaatgaagtaccgcacgagtgggtatataggaatccaaatctgccgaatcactcatgttatgatcttctacatcctaggtcttcccgttccttcatctggcttatgttcttcatgtagcattcagactgaatgactctatgaaattacgtcgctacttccacatggtacgggtaacgtaggagacatctctatttttcccggggggaatccttagaattaccacagcttagcttttaattcgcctctgaccatcaaatgaaatgtgaataacgccgtctccccttttttgagactttgaaacaaagggtgcttccggttctgtcggtggttgaaacaattttgtcttctccatattacta

SEQ ID NO: 918 - DNA, 365 bp, Glycine max
  unsure (1)..(365): unsure at all n locations
gaactcctgcttccatcatctcttccaagattatgttccaatatctttttgtcatttatatttatccccacacttttctttcatttcaaaatcgaaattctataaattttttgaaatgaaagaaagagacccggtatactgaaatagaaataagtgttccaaaggaaccttctcttttaccgaagattggcctttgataaatgatcgggccattttttctatttaatatttaatatgattattctctntataatctttcttttattatacaaaataaaatgaccgaagatgaatccgctcttaagaatcattattttaggaattataaatactcagatgctgcgatgtatcgcataaattctttg

SEQ ID NO: 919 - DNA, 917 bp, Glycine max
  unsure (1)..(917): unsure at all n locations
attgtccagagtgagcaggtatcgtattcncacatctaataagttaagattatgagtttattagtcgtggcctatatcnanccacnnnccaggacagcantttgatgcatccatggcaggaccacgcgaacantagactgaaccgtgcgagccatatactgagatcatagtgcggagtgtgtgtttatcaaaacctgaactgcgggagcacacacaacatacacatattccaggggggtaagctgcaaggaaaaccagtctgggaagaacatcactatcatatctgcatacgttgatcacctcttatgagaaaatcctaattgaaaacccacacaaataatacaggtaccaggtgaagcacgcgaataatttacctgttagaggccctgaaaatgctatatacacctttgcaagtgcgagttactagccacagatgaccacatagatcaattggacaacacacatgaaactagataagtatcacattaggcaaagtgacatcaggtccagttaatatactacagtggacaatatgaataacctgtgtaaagcgagagacgtgaagggatgcaaatgtagaacccggattaatctacattttgggtgaagcctagaggaacaagggggcaataaacccgaccccatggggggatgaacagaaagaagacctgagcactatttcccaaagctaaaagaggcttaagcgaagaactcatgctcaaacctaagagcccacgtggtgaattcatcggacgcactttcttttgggtaatataacaacaataacacatccggttgacaaagactggggaatggtcttacaaataggctaaaaaatatcccctttgggggtcgggcacccaggtgtaaagaaaaacgtctcgtatgtaatatataggctacgcaagcgatgggcg

SEQ ID NO: 920 - DNA, 369 bp, Glycine max
tttaaatttcttttaagatctccatgctgaattaatttttgttttgaattcttaatacatccttttgttgcattggatttcttatatattaaatgtgattttgagtttttattgtataacgtgttacatctcaatggtagatatatagtaggaattgactgttgagatgatatcatattatcactcacttactcaaaataaaagttttgacatattagggatattatattataaaaaaattatttgagacccaagtaaaaattgatcatctatttattatgatatcaaagatgtttaaacatttttttggcattttagagtgaattgagatgtaaagaaagagggatatttgtgaattgctagaatcat

SEQ ID NO: 921 - DNA, 481 bp, Glycine max
agctttgaaagccgcatgaattaatggactttccttgctgcgggtgaaatgtcttggcacaactctgcgactaatcttgggaaatgaacacttgtcctcctgagttcaggggttgcgatgccaacgcattcgacaaaaccgtcagagcatttctacagcacaaggttgtcgggaacccatcgtcaccccacttgtttaaaacctaattcacatcgccgcactcaccaaatgccacatattgggacgtgttgaacttcaacacacatgttcctgcaccacagcaccagtaacgtggtgcaaactactcaaactctatattttggatggtctaatctaataatgagttttctcagagttatggctatggtctatatatcaccacctctaataagctttctggtgtatatctaaaaagttattaatgaacatattctttgtcacactttttttccatattcgattgaaacctataaaattacat

SEQ ID NO: 922 - DNA, 484 bp, Glycine max
  unsure (1)..(484): unsure at all n locations
aatactatgctttgncaagtgttttgccaaaactccttttaagataaccacaccctcacgaaccaagtcatatttttcttcgtctggagcctaagacaatgagggaaaatctattactgaagcatcacatataactcttaaaaatgttttaagtgccaaactacagagaaagaaaagaacaatagaacagtatccagcagatcaatctcccacgtgataaggaactcacagttttgtttaagtagttctcaaagatggggaataacaaggagacattatcttttccatttttatcaatgatcaatataccagcattaatcattctgcctctaacatcagcattcagatcagcctgcaaatgaaatcaatacccaaagtcaaacgtttagtagaaaagttacactatagatcaaggtaacagttcactgacagcatcaatacaaaacaacactaccgtcaaaaatttacatttacctttaatttt

SEQ ID NO: 923 - DNA, 331 bp, Glycine max
agcttgtagggttaaagtctcatgattgtcttgtcctcatgcaacaattttcaaccgtggctatacgagatatcttgccaaacaaagtccggttatcgataactcgactgtgctttttcttccatgctatggttagcaaagtcattgatccattcaagtttgatgagttggaaaatgaggccccaattatattgtgccagttggagatgtatcttccccctactttctttgacatcatgattcacttgattgtgcatctggacagagaaatcaaatgttgtggtcctgtttatctactgtgaatgtaccccgttgagcgatacataaagat

SEQ ID NO: 924 - DNA, 353 bp, Glycine max
  unsure (1)..(353): unsure at all n locations
agcttaaatacggtggccttgttcgtgctcgtgtgcttagcgcacctatggaccacttagcgcacgttagtgatttttggcttagcgtgcctttctcgcttagtggatgaactgaagtggtgcgcttagcgaacctatatagctcatcttcttctggattcttcctcgcgctgagcctatgagtgttgcacttagcggatgctcgctaagccagcagattggcttagcgagaaggtgaaaacaaccttttccaaagcttgcctnnttaacctgaaattgagagaaaatgagtattaaacatacaaaatgaaaagactaagtatttattacctatgcttaacagaaaatactta

SEQ ID NO: 925 - DNA, 541 bp, Glycine max
agcttcatagaagattcattatgatataatataacttgtttcaataaagaaaaggttaaaactgtttttaactacaaacactataagaaaggaaaacaagcatgaaaccaagacaatcaagcaagttggcaaggatgttcatgatacactttgacatacaaactaccacattaccaccacaaacagagaaagatcctatttcattttgggccaatttaagtcatgctctacttttttgtattaatcgactccataatgagtagaaagttgtccttgaaaatccaaaacttcctccaatatctttgggcagtggttcaataataacaacaataatgtgtatggttctagtagatcaatgtcaacttatcaagtaggctatttggaaagtttggtgaccactatatgcccccttttttttggatcagtttctttttaaattcaaaggctttagcaggactgataatgaagtttattcgatagtgggggggtatcttctttgggtctaattggtttaaaatgcttgatttaaaaaaaacatttc

SEQ ID NO: 926 - DNA, 440 bp, Glycine max
  unsure (1)..(440): unsure at all n locations
tgtaggccttggatcttcttcatcaatggagtcctttgcttcttgaattttaatggcagcaaaatggagaagaagaagagttgagcggagacgccacttcaagaagaagatgagtctagaagaagctcaccaccataggaagccacggataagagcttgaaggtaggagaagatgaatggagggagagggagagaaggagcaagaaattttgtgcctcaaaagaggtgtgaactttgaagtttaattctcaaatgataaaagttgaaaaaatgcacacacatggcctttatttatagcctaagtgtcacacaaaattggagggaaatttgaatttctattcaaattttacttgaatttgaaattgaatttgtggagcaaaaatttcactaattatgattagtgaatnttagctatggtttagccccctaatcgaagatca

SEQ ID NO: 927 - DNA, 289 bp, Glycine max
agcttctacattcaatttcgagcttttctatatattacgggactcagtcagacatccgagtaaaaagttgttgtagtttgaatctgcttaaggcttcagcattccgttacgagcgtctcgatatagttactgcactcgatcagacatgaaaataaaaagatattgttcgttgaaagggctcataccttcggttttccattaggagcgtatccatatattacgggactcaatcagacctccgagtgaaaagttattgacgtttcaatgtgctcagggcttcagtattcca

SEQ ID NO: 928 - DNA, 240 bp, Glycine max
aactccccctttgagaaaattcaaacgacaataactttttactcggatgtctgattgagtcccggaatatatctagagggtcgaaattggataccgaagctctgagcacattcaaacgacaaaaactttttactcggatgtctgattgaattccgtaatatatcgtaaagctcgaaattgaatgccgaagctctgagctaattctaacgacaaaaactttttactcggatgtctgattga

SEQ ID NO: 929 - DNA, 488 bp, Glycine max
agcttatgctaatctaccttgcaccccaagttcaacacggtcccaaataaatcaaacactatcatatataggcataggcacatccatcattctctcatcaattcatccattattagcttttttgtttcttcaattttttcccatttctttagcccacaattccaaggaacaaaaatgatgagagagggtcaacaacatggtatggtgagatcttattggatcctactaaatccacttaatcctagacctaataccagaatcattaatcggtctaattccccttacaccactagaaatatttggtagggtttcttctaagccaactaatcactcaaagtacacaggaaagtgtggcaaaccacgttgccctgggtgccacctctactcagcttggaagtccaagggccaaacccaaggtaccaaaaagcacaaacacttagtaacacactactataaaaaataagctttaaccgatgtggattcaatga

SEQ ID NO: 930 - DNA, 588 bp, Glycine max
actaagcttgccaccagctcgcccaggcgagcaaggttgcttcctctagagcaacagccttctggagggcccaagtgggcctagttgctatttgcacccccatttttactaaatacacccccttgcctttttttggtgattctttttcgtaaagttacgaaaacttacgaatttcgtaacaatacttgttttctttccgtaatgttacggaaccttgcggattacataatcatcccttttttgacttacggaatgttacggaatctcactaattgtgcaacgatgcttccctttgatttccggtgtgtcacggaaccttacggattgtgcatcaatatcttcttttgacttccagcacgtcacggaatttcacaaattgcctaatgatgggcgccaagcacctcataatgaccaaacacaagttgcatgccaccaagcacaggtccccggacgaaattagggtatgacagttgcccctctttacttgtcttttattggagataaaacggaagtaaagataagacactaatgtcgttcctcttcggtgacgagagtcgcggatgacaataaaatctctgcatgcaaatg

SEQ ID NO: 931 - DNA, 418 bp, Glycine max
agcttcgcctttgcctctctctcttccttttttttttcttcttttttttatctctctctcgattgttttttatttctatttggtggtgattttatattgagttttgctcttcattactcgagcgctgctaataatagtactatcctttcttctattagccctatctgtttttttttttttttgataaaattacatttttttcctctagttatatctaattttgatttcaatttttctttaaattaatgcattaattgagagctcaaatccatatttagatattgataataaaaaatattaaccgacatgtatcatgtttttatttaactttaatatgtttatgacagtcaaagtcaacatttaataatttgtaaatcacatttagagactttgatattattaagagattaatttgggg

SEQ ID NO: 932 - DNA, 373 bp, Glycine max
  unsure (1)..(373): unsure at all n locations
aactatgatactaacctcacctttgaatgccatggtcctaagctttttaccaccttcaacggtgacaaagggtgtgttgactgtgtcccccaattcacaccaatcccactccctgaccccaccaacaacacaaaaacaacanataaactactaaacttcccaccccccatcattataattacaagaaccaaaatctgatgctcaaagttaatactttaatttgttgatctaaaaaaaaaaagcacaagtgaagaagtcagggtcaagagagttggttagggaataataatgaaacacacaatgaggcattaactactgtgagtgcagaacggatcctacaggacatgttgttgttgctgcttctgcttttgag

SEQ ID NO: 933 - DNA, 555 bp, Glycine max
agcttctagctcactccaaacatcttctctaagatcacaatggtcagatgatggaaaattgtcttgtgaagttgtaaaccaaatttagagaagatccaacggttaaggaaggctgggcagtgtttttaccgaggcagctgcatgtagttttctctagaagcttcattaagaggcttcctccagaagcttcattaagaggcttcgagcacactccagataacttctaaaagatcccaacggtgagatcatgaaaacgtgtcttgtgaagtggtagaccaaatttcgagaagatccagcggttaacgaaggctgggcatcgtttttaccgaggtagcttcatgtagctttctctagaagcttcattaagaggcttcctctagaagcttcctcgtggcttctttgagaagctttctcaagaggcttctttgagaagctagatccttatctatccacacccctctattaactaaaataaacttccttaaaaaatattacagatgaaaataacgcaacaaataatcaaacatcaaacataattactaataatatatagat

SEQ ID NO: 934 - DNA, 460 bp, Glycine max
  unsure (1)..(460): unsure at all n locations
tgtaaacttgtccaaaatcgcgaagtgaacctcggatccctgtcagatacaatactagaaggaattccatgcaaccttactactttcttgatgtacaactccactagcttctccattctatacttcatattcaccggaataaaatgagcagatttggtgagtcgatctactatgacccacacagcatcatgtccacgactagtcttangtaaactagatacaaaatccatagatatgctctcccatttccattccgggatttccaatggcttcaattctcccgatggtcgctggtgctcaaccttagccttttgacatgtcaaacatcttgctacatattcagctacatctttcttcatgccatgccaccaaaaacttctcttcaaatcttggtacatcttagtcattcctggatggaaactaagacgacctttatgcgcttcttccaagatcttaactc

SEQ ID NO: 935 - DNA, 633 bp, Glycine max
agcttctatagaaggttcgttcctaatttctctacaattgcatcacctctcaatgagctggcgaagaagaatgtggcatttacctggggtgaaaaacaagagcaagcctttgctttgctcaaagaaaaacttactaaggcatctgttctagctcttcctgacatttctaaaacttttgagctagaatgtgatgcctctggagtgggagttggagctgtattgttacaaggtgggcaccctattgcttattttagtgaaaaacttcatagtgccaccctcaactaccccacctatgataaagagctttatgccttaataagagccctccaaacttgggaacattaccttgtttccaaggaagttgtcattcatagtgatcatcaatcacttaagtacattagaaggcaaagcaagttaaacaagaggcatgcaaaatgggtagagtacctatagcaatttccatatgttatcaaatacaaaaagggaaatacaaatgtggtagctgatgccctctcttcgagacacacattgttttgctccctaagagctcaaatttacgatttgataatatagggacttgtatgctttagatgaacatttctcttccatttatgatagttggggaaaaaaggc

SEQ ID NO: 936 - DNA, 106 bp, Glycine max
agcttagtcctaacctctaagcgatagcttgtcataggccaatctttacctagtgtcaccaagcgcaattccttacggccttaactggggttcataaacctaaccc

SEQ ID NO: 937 - DNA, 446 bp, Glycine max
gagcttgctcgctaagccactcagccctgctggctgaataagccttggctaagcgagcttgcccgctaagcccaaggcacatatgattttatgtatattatgtgatgcgctaaacacaatttactctctatttatgcaattgatggaattgggcttagcaagccttttcgctaatccatttatgtacagtagaggggtcacgctaagcgcgtgaggccgcgctatgcgcaatttggattctattgcggaatggggcttaacgcgcctgctcgctaagctgattctgcaaaacattctgatctgtgtcaactcggtaagcacgtggctgtcgtgctacgcgcttgagtaatttttcataaggcgcgctaagcacccaatatgaatttcagtcttagtctacagcttgtcgtttcaaatataaacctattttaacttggtttctatgt

SEQ ID NO: 938 - DNA, 842 bp, Glycine max
  unsure (1)..(842): unsure at all n locations
aacagctatcgctgatacggacacatgaaactaagctgtagggctgactgcgttttatttgcccaccatcttttatgatgcctggagaatttgtaacactggtgagccttgtcagagagcaggcgtctcactttcatgcagacaacaaatgccctaacaacccatgttggtctgtgaagtgtttgaatgtccggggataaactttaatgggcccctccctgtctcttttgggtttgcttatattctccatgaatgtgattatgtttaaaaatgggtggaagcccaagccaccagaactaacgatgctaaggttgttgtggattttgttagatctaatatgttttgcaggtttggagtccctagagccatcgtcagtgatcaaggcacccatttttgtaacagatacatgtatgccttgctcaaaaagtatggggtccgtgcacataatttcaacaccttttccaactcccaaacctaatgggcatggctgagaattccaaatanggagaataaaaacgatctttggagaagaattgtgcagccaaaacaaaaaggatttggagcacccaggcttgtatgatgctcttttggcgcactagaattgcctaccaaagcccccataaggaatgtctcccttttaaggatgtgtttatgcacagcattgttattcttcttgttgagaatgaagcctatacgccttctggggttgttataaaacctgttaacatttctttattgatcaaggccttaaaggggaaaggagaattgcaaactatattgagcttttatgagatatccggtataagaccttattgagaattcccaatatttccaaggggaag

SEQ ID NO: 939 - DNA, 344 bp, Glycine max
agcttcggtattcaatttcgagcgtctcgacatattacgggactcaatcagacattcgagtaaaaagttattgttgtttgaatttgctcaaagcttcggtattcaatttcgagcctctcgatataatacaggactccatgagacacccgagtaaaaaagttattgtcgtttgaatttgcttagagcttcaacattcaatatcgagcgtgcggatattttacaggactcaatcggataaccgagcaaaaagttattgtctgtttaatttgctcagagcttcagtgttcaattcccagcgtctcgacatatttagggactcacttagacattcaagtaaaaagtta

SEQ ID NO: 940 - DNA, 378 bp, Glycine max
gacactatgaaactaagcttgagcaacttcaaacgacaataaacttttacttcggatgtctgtatggagtgcccgaaatatatcgggacgccccgaaatggaatacggaagcttttagaaaattcaaacgacaaataactttttattcggatgtctgattgagtcccgtaatatatcgaaacgctcgaaattgaatgttgaagctctgagcaaattcaaacgacaataacgtcttactcggatgtctgattgagtctcgtaatatatcgagacgctcgaaatggaataccgaagctctgagcaaattcaaacgacaataactttttactccgatgtctgattgagtcccgtaatatatcgagacgctcgaaattgaat

SEQ ID NO: 941 - DNA, 521 bp, Glycine max
agctttgagccaaaatcctgactcaccataaaccttgacccagggtgagaatgccaatccttaccctcggaagccaaaaaaaagaagagaaggaaaatttccaatcaaaagataaatgataaggaaaatttccaatcaaaggaaaggaaattcccaatcaaagagtgggagaaagcaaaaagaaaagaaagaaaattcccaatcaaagaatgggagaaagaaaaaaagagaagtaacaaagaagaaagctcctggtcaaaaaaaccagaagaaatgtgccgagaggtccttggactaaacgatatctgaacaatacagaattgtcaccaaatgaacaaaagaaagaaaaggaaaccatgacctaagaggggtcttcttcctttgattaccaaccaaaatcctgtgcgctagcgactttttcgccccgcactaaaccaaaacagaaaatgaaaaagccaacatataaatcaaaagccaaaaacacacaaaagccgaaaaacccatcaaaagaacccattccc

SEQ ID NO: 942 - DNA, 183 bp, Glycine max
gatcaaaagatttgggatggatagtgcaaaacacatgtctacaccgatgagcactaattgttacttagataaagatgaatctggtcagtctatagacataaaacaatatcgaggtgtgatcggatctcttctttatttatctgctagtacacctgatattatgtttagtgtatgcatgtgtgc

SEQ ID NO: 943 - DNA, 584 bp, Glycine max
agctttggctgcgcacgagctccgatttcgtgagtatttatagaagatgacgcattgtaatcgattacaggtattggtaatcgattacaggcccaataagccttctggtaatcgattacaggatgttgtaatcgattacaggctgcctgttcaagtgtaatcgattacattgagtggtaatcgattaccagagcctatcctaggctagtttctaagagaatatctatatttatgctcaaatacatcttatatgactaattttcactactaatacactaaattcaatcattcaattactatatacacaagaaatcataaattctatcataaaaacaagaattcaaacaagatcaaacaaaataatctacaatcaaaaggtaaaaagtaaatcaatcaatcaatcaactaatcaatcaaccaatcaattcctatttttctaaatctcttacatctaagagacctaattctcttctaataaagaaaaacactttcttggggagagggttagtgaaaatatcaccaaagttgattcttagtatcaacaaattctaatacacaatcttcctttaagacatgatctttaa

SEQ ID NO: 944 - DNA, 486 bp, Glycine max
ccggtcatggaaagacttggcaactgccttcattatgtagtaccaatacaacatgggtatggctcctgatcggaaccaacttcagagcatgaccaagcgggaacatgagtccattaaagaatatgctcaaaggtggagagacctagcagcccaagtcgtcccacctatgactgagagggaaatgatcacgataatggtagatacgttgcctacgttctactacgagaagctgataggatatatgacgactaactttgcagacctcgtcttcaccggagaaagaatcaagtctggactgaggaaaggcaagtttgaatatgcctccaacactgtccccaacaacaatagaagagccccagtggtgggcacactgaaaaaggaaggagatacccacgcagtcaccaccgccccaacatggatgaaaacgccccagaacggccaaaactcataccagcacaaccacgcgaatcttttttatccgagccg

SEQ ID NO: 945 - DNA, 615 bp, Glycine max
agcttagaaaagatctaacaaactctgtctaatgttcatgagaatgattgttgcaaacagtattaagacaactctccctacagctgaaagtgctaaaggatttatgggattagtcgaagagcgctcttaaacaactgataagtcttttgctggaacattaatgagtacactcatcaccatgaagtttgatggttcacgtactatgtatgatgtgacaccctctacccctcacatatatactaataaggaataaacaaattcaaatattaattaaaagtatttttaaaacatttttttttctttcaaaggggaaaaaggttcacattcattttcttttacatcatattcaaacttggccaaataaataataaagtattctcgactcaacaaggtcgtctaagctttatacaattaatatagaacctatattctaatgtcacatcctatcagagcggtatgtttcccaatcctttagcatgaaaatcttcataatccatcccctattttctgctcccccgacaccagtttcagatcattacaggatccacacacaaccacccacaggggaggagttatacattcctagctaatagagaaaccagacaattaaatttt

SEQ ID NO: 946 - DNA, 543 bp, Glycine max
  unsure (1)..(543): unsure at all n locations
gacactatgaatactaagctttctcaagcctttatgtgcattgttcagacgaggtttattctgttatttcattaattaactttgatgtttgactgttgttcaggttggtgcaatggctcatggaaaaattgatgctgactacattgatgatcttatatcaggttattcaaataattgtgtttatttggtattcaagttctaatttgtggttacgttgcttttttcatatggtatatctgagtcgggagataatatagtttttgtgatgcttatagttaataatgattgacatgcttatagttcctgtgatgcttatagttctcatgataatntgatacagtttttgggtccccaactattcttttgcatcaatttgctaacgataagcttttggaggattttcanagtcttgctgtgtaatgaaataaaacagaagacaagtttatttaatgagggatacaaatgggtaattttaataagcccacatatcaaccttctaaatatgaatgaatatatcttaaatttgggggtttgattagttac

SEQ ID NO: 947 - DNA, 471 bp, Glycine max
agcttggaagcattttgatagaatgcattctatgtttactctcctaggaatgtcaaattagaaaaccttactcttgttggctagttatcttaactccatataccccccccccccccccctgatttttgcaggaagagggaaattatggttttgaaattcttaattccatgtccatcaaatccaaagcacaaaattgatgtgactttgcaattgctaataaatgagttatgtaccttatggaatgatggcgtactaaatcaccatgtggctttgaggctaattcttgagataaggctgttttgatgtggactttaaatgacttctcaacttatgggattgtgtcatgttggatgacgacagggacacttggattgtctatttgaatggaaacatacaaaggcattcacaaatataaactttgtcaaagctttggatttttgattgtcatcaccaattccttgcccttgatca

SEQ ID NO: 948 - DNA, 407 bp, Glycine max
ctcaagcttcttcttccttggtttcgttcttctccttccaaaaaggttcttcttcttccttcgtcttctgtgtattagataacaagcttcttcttccagctttgaaatttggttcccttcttctcctccacaggtgttggcatcctccattgactagcttttttcgtttcttccgccatccaggttagtgttctaacctcgtgccttcatttggaagcgttaatggtcgtaggatagacgacatgagtgatgtgtggtggctgaggttgaagacgaaggttcttccgcgagaagaaccttctttcgcgcatgtggaaggggaagttagatattgaagcggaagaaagagttcttccgtggaatcctgcggaagaaaggggagaaggttcttcccctggttccggtgg

SEQ ID NO: 949 - DNA, 520 bp, Glycine max
agctttcataagtgaaatcaggtgcagccatctccctaagagtcctctcacgaggtggaggttgagccatgttctcggtatgaaaattagtagtggaatgctcaaaatcagaatattcagaatcaccctcaacagaatgcacagaatgaccaggatgcacactatatgtagtaattaatgtgtttctcaacaagcacctaacaagggggtaaaactacagctatactcaaacgatatcaaaatgagctgaaattttgtgaggaacaccctaaaatcatgaaaagatagcacaaaaaatttcaaacaaaaattcaaagtctaactatgaaaactacctaagcaaagtttagaaaaataggacagtaatacttgaaacatgaaaaaaaaaaaacttattatacggttgatttttggagtttgggagaccacaactggccaaagtcaattcttatagtatgggaaatttttttctaccccaaatgcctatataataataagcattctgatccccggagcaaaa

SEQ ID NO: 950 - DNA, 456 bp, Glycine max
  unsure (1)..(456): unsure at all n locations
ttagtgtctatgtgtaaccacaaattttacattgagtgtcctcattgatatgttctatagttgattttgcatgaatttctaattgtcataacatatgattcatggatatgatttaagcattcattctttctttacattttaagccacttgccaaaaagctatctgaatgtatattattttatcatttgcaagccctttgagccaaacacttcatattttgttggaacactaacttaggataaaagtttcctaccttcccttaggttaggagagcacgggtgttttgttgggaatttctatcatttggtggctaatgtgatgtaaatactctttttttaaatgagggtattaagggtaattaaatatttaattatggtatagaaaagaaaaagaaaaagggaacangttctttatgaataaataaatgtctgaattatgtacattatgttataaact

SEQ ID NO: 951 - DNA, 464 bp, Glycine max
agctaacaagctttttttatagtatgagcttgtcctttgtttatctagaaacactttttaaaaagcttaagcttgacctttagtggtgacaagccgagaaaaatgaatgattatcctgaggccctcgacaagcaggtcggctcattttcatccctatctgcgattatcttttttgttttggggagtctatggacacatgcattagaaattttagagtaagtctaattttgcacttcagttgctattattatgattattattactcacgtctagtgatcatgactatgctagggtgttgcctaagatatttgcgtgattcaaaatttttagaatgagcaagtcatggcaaacccctatatttgaagaaaagagtgttccttttattatacacttcaagtttattggatttgaattctgcatgctgtgataggctaactgggcatttttgttttggggatttgaca

SEQ ID NO: 952 - DNA, 401 bp, Glycine max
tgctctaagctgtcaattcccttagaaaaattttgatttttatagcttcatcaaaaccatgagtgggagtttgcctaagcaaatatctaaatctttcccaagcttctctaaggaactcatcatatgtttgttggaaaatatatagcagcctttcccttgttgatctttgaccttgggaaatacttgtacggaaacttggccattacgtcatcccacctaaacaagttattcggaggaaaggatcttaaccatgagatgacatctctagctagagaaaaaaggaaacaagcacaaacttcattcgccacatgatttatcttcacggtgttgcatatgtcaatgaaggttgattgatgtgtttatggattctcatgattatgctcatggaattgattattttg

SEQ ID NO: 953 - DNA, 521 bp, Glycine max
agcttgcagtagaaacctaattaacttcttatgcaaagagttctgaatgacatttaaaaagaaaggatggttacaaatcataaactctaagtaatcaggggtcttgtctccctacataaatcatagcacaagtttacaacgtttaaataacaataccactacagattaatttggcttgtcagtcaatattccatctaaatgttcacaatcacatcaagcattaaagcttacaaacaagaaactaccactcatcacctgcccatcccatagagtgctaccaacattttttttaacctgcacatctgtcaagaaatatttttaaaaaaatagaaaaaatatgcctgcacaataagcatgacctctgcaataccaccaaaagtctcagcatcaacagcgttcccatttgttcttccttctcgaaccttacaagagaaatgtgaacaaaaatcgcttcaaacagggtaagagtattataaactgatccacattatccaaatgctccactaaatttttaacaccca

SEQ ID NO: 954 - DNA, 383 bp, Glycine max
tattcaaatatgacttaaaacaaaaaagaatttcatatttttcagggatcaagaatacattttagtccagaattgaagataacacgttttttaaaatttggacattgctgttcctcaatggttattttggtttgtgttgtagggagtctctgctgttagggccttttatgagctacttagccagtccagcttaaatgtcctaaatcctgaagagaacaagcatgtagccccagtggagctctgtcccatcttgaagatgttatacagaatattgataataaggtaacacatttagctacctccttttttacctttgaatgatcaaaacagagaactgaattctaattgtgaaactaccattttcaatggtttttgctgatctt

SEQ ID NO: 955 - DNA, 509 bp, Glycine max
agcttgaccaggaattacttgtatgggttggatgttgaattctggttgttcctggtgcggagatgatggtacagcgggtgaaccacaagcggaagtttcttttggtgaggtagccatggaaaaacagagcgtttggaatgatttcgaaaatctcacaaaactattgggaaatgctggtaaaaacacgaatgccaagcagatataaatttgaatgaagaatgtagaggggcgtgtgaggcaacggtcgaatttgctttgtggtgaacgtgctattaatgttaagtgattcgtttgggcacgttcagattgcagtagctgctataattcctctagcagacaaatgcccagcttgcccctcagttattcaaactgatttgcatccaaagcctttgagaaaatatctgctatttgttcctcagtgtcaacatgcttcagtgtgatcactttattatcaacaagatctctgatatagtgatgcctaatgccaatgggcttggttttgctgtgtt

SEQ ID NO: 956 - DNA, 768 bp, Glycine max
  unsure (1)..(768): unsure at all n locations
cgaccttnnnaanaaatataggaaaggctagangtannnacnaaaacnnaagaatactaaagcttataagtccaagttaagggttggtgcctacattctttcaatggtagacataagttaatgacttttacctatagttggagggtgagaaccactttaatattttacctattattaaagggtggttatataagttaactttaacctacccccattttgaatggtccgaattgccttatataaccatcaaatgttattgttgataaagttaatttttagtaaaatcttttttaatgattttattgattttaattggccttaaaagtccctttaaattaatttaaaaggtgtcctaaaaaaagccttataaatttaccaataaattttaacactagaaaggttttgttataaactgggaactttttttgaagtgtttgaagggtggaatgtattttaccaaaaggggtattttggtggggtcttgtgataaactctttaggggccaaatcttttggcccccttttttttcttcaacaaaaaacagaggttttattttttatttattattaggtcctggtaaaaattctttgaaaatctttgttctccactttccccaaatggtataatattttagagaaaaatctcttttttcacacaaatataaaatggcttcttatttcttattttaaactattgttattgggagtctttcgtgcgtcaataccttattataacaaattttatttttgcccctcaatcactttttct

SEQ ID NO: 957 - DNA, 544 bp, Glycine max
  unsure (1)..(544): unsure at all n locations
agcttctcaaccaaatccaaaaccctcacttgcttcgtgaattgccagcagtaacctctcttctaaatggtgtttagatggatactccggcgagctaatagaataatctgcttgaagaaaattccgttttgattatttcaaatcacacgactataatgatccatcaaaatataaatatagcctatagcttacagataatcacactgaatggtaataggtatataggcctatagggaattttgaaaagggggaaaagacataccaagtatgagcagaaggcaagtgatcaggacttccatatgctttgtgtatctgaaacttctgggagcctgaaattccttgaagagcgctaaagccttccaaaggcacctgaaacattagtgaaaaaaatgttttaacggcttcaagtttgcaaaaataatatgccaacatcattaatatatcataacaaatcccaggacaaagagaaagctctgatccaaggtgggcaaaattgagatcttatggggagaagaatganagaactcgtgaacatgaatcataa

SEQ ID NO: 958 - DNA, 479 bp, Glycine max
tgctttgaatgagaagcagttttgaatcttaattagagatcacaaagtgctgaaaagctttttactcaaacatttaaatattctttggatgatcaaatgctctgatagctttattcattgtccaacaaagattctattgtatttgctctaattcaattatctccttgcgagagttggattactcgtaaatcctccaaacctttagtttgatagagccaaaaatgatttagtaggggccaaagaatattttgtttattattctcttggtgagattgagagttttcatatatgacccataaaatgctgttgtaagccaggaatgactatgataaatccttattgatgaaatccttcttcattagtgaaacccttattctttaattagtggaacctttttacattgaaagggatatgaatgtggctcaaaaaatttggagaatttttttatttttctattctgggatctctaacttgatttc

SEQ ID NO: 959 - DNA, 1032 bp, Glycine max
  unsure (1)..(1032): unsure at all n locations
nggctccannnnnnnnnnaaatatcgagtttangagttgnnannnnatangaaactaaccgggggtcacatcacatacatgctccaacttgagggaaatttcaaattccttctggaaataaacccggagggaaatttattaatatatttattgccttattctcctaataatatccaacacanattatattggaaccccgttaatatcaaatccctgaaattcctctttttcctaattattatatcaataataaaccctggggggtggctgggctcaacaccttttcaacacccccttttccacagtaaaaacaccctcggttatataatatactcaattatgaaaaaaaagaaatgcgtatcgaaatataattgttaaatttttttcacagcggaaccttccactaataaacgtatttcaattaaaagtggtgagaaaccaaattccttcccaaagaataaaaatattacctttgagccttaacacaaagatcgccttatagaagtcaaattttcctaaaacaccggattggaatttgaaggcatataatgggaaaccaaagtatcccaaaaaaaaaaccctaatggtagtatatctaacataaatctaaactttccaaaaatctcaaaaatatgacaattatactccttcccgctatctgcttcacaaaattgaaatcttcatttgaatttagccacaatctactccccaacaacatttttctcccataatttctcaatatatataatattgttccgtccagcggaatatttaatattattttaacataatatattcttacccaaaaaaatcaattaatactttaaagggtcctaccccctcttaaataaagttctctattcctataaaacatgctctctcacataaacacattcaaaaaaatttgtatacactactcaatctctccctaaaaaccctctaagttcataaaaatcctactacaaactctttacaaaccactcgtaatcatacatctcatttcactattgtcaaacttaatacacaaatccg

SEQ ID NO: 960 - DNA, 533 bp, Glycine max
  unsure (1)..(533): unsure at all n locations
agcttgacaactacatcaaaggaatagttaataggtcagttttaatttgtaacacatttactttatccttagtatttgacagtttgattttaatcgtacaatgtacatgcatgtttatcttaactggtgccttgaaaggattcaatgataaaaacggaagtaaatcctaggaaaatgcttgaatggattctagttaaagtaagtaatttaaacaatgtttgatatcttcaaaatgacattttattgtagaagcaaacttcatgatgatgcaccaagcaattttgttgatgccaaaagcccaagtgattgattcaagacttcaagatcaagcatcaagaatccaatccaagattcaagattcaagagaagaaataaagaagcaacaagtcaagacttcatataggataagtcttaaaagattttttcaaaaaccaaatagcacggttttgttttacaaaagaaatttcttanattttctaaggtaccagagtgattattttctggtaatcgattaccagtgaccaaattggttt

SEQ ID NO: 961 - DNA, 864 bp, Glycine max
  unsure (1)..(864): unsure at all n locations
ngggcgcaannnnnnnnaaatatannaactttacgactgacacttagatactaagcgtagtctaaaatatcttatttgaattgctagtggcggatttctcatctccatgcactaaaattcccgtgggttgtaattatccaagggtgtcctctccctctcccagccaagagggtttaagcctccaatctttctccccaagggtttcattttcctacccataaaaatattaaacctaagggatggaaccttatgtgctaatgaggtcccttaaaacgttatcctgcccctttttggaagattcttctcagggcttttcgggcctcctttatgctacactccttaccaatctcccattttaagtgctttccattaggccaagaccctgcctttatcttaacttaacccctttagtttggctcttgggcccaattctaaaaccattggtgggcctagaccccctaacaaccctttggattcccctttgaggaaccacacttttcccaaccaaaaacgccccttccttgtaagggccctttagattgttccctcctaaagaaggattaattccttggtgaataggttgggaagcctttcaaacttatcctaacagagttttccaacccctaatgatagcgcttgagtttgccccacgacctcaaaattacactctattattctccaaaatgcacccttcccaaaatgcggtggaacccataatatccgccacccatcctcatagggactccgacactgttatatctttcccctgtgacgagactttcactctttntagtttcctnnaatcttttnnngnnnnnnnntnnnnnnntanccacaaacttacaaccggtagtcccgcgcgcg

SEQ ID NO: 962 - DNA, 506 bp, Glycine max
agcttcaacctttggccatcatttctgccccaaatcgtgaaaggagagcgtttttggagacgtgaagtgcgtggctacgagtgggacttcgaaatttcaggtttgggtggacttatttctctcttaaatttcgtgggtatggggttttgggagatatgatgggtagtcttgctagttttctgcttcatgataattatttgtgaagaaacttgttgaaagcttgttgaaattgccatgtttggatgagttagacatacccattctgttttagggtttttgtgatgatgtttgtgatgtttgtatgttgaaattgctcatggaaaactgttagaaatgaaaggtagagttaacctagggttggaaagtgagaatgtggtgttatgagtggaaaaagagtgaggctttgagagttggaaggctaagtctgaattctgtggtaaatggaggttatagtgagttaatactaccttgaaatgtcatttatgacttgggagaaagcttggact

SEQ ID NO: 963 - DNA, 373 bp, Glycine max
tttgttggggggagaatctgcagaaacccaaacctggaaccggaacccgttctgaaagctggagatgagtttgtgagtggttgtgaaatcctaaaggtgaaggagacatcctcaccacttatatttcttgcaatctttcatcttgttcttgtttttgttgtaaagaggcttcctggttatggaaagctataatcctctgttggatcttccttgtaagacttgatgtaaatatctttctatctatttaatgatgttttgggggctctctatgctatcagcttttcattctagtttgcctttcccttgatcacgtagatgcatgctttggtacggtcattcattagcggaaaccggtctgattctgatgaccttg

SEQ ID NO: 964 - DNA, 574 bp, Glycine max
agctttagctctcagcccaaactcccttcataaaatctgattttaggcttaaataggtggccttgtttgtgctcatgcgcttagcataattctgaatcgcttagcgcacattattgaatttaggcttagcgcgtgcatttctcactcagcggatggactgaagcggtgcgcttagtgagacgaagtggtgcgctcagcgaacctgtacaactcatcttcttctagattcttcctcgcgcttagccaatgagtgttgcgcttagcggacgctcgctaagccagcatattggcttagcgagaaggtgaaaaacaaaacttttcaaagtcgcctaattaacctgaaattgagagaaaatgattatttaacacacaaaatggaagtactaagtatttatacctatacttaatagaaagtacttataacacttccaaataaccatatattgaggaagtttgatacaatttacacatgctttatacacaaaaggttagcgtattcattcgactaacaataggtcactttgagcaaacaaaaccaacagcttacattcatatttcagtgatagttaaataa

SEQ ID NO: 965 - DNA, 300 bp, Glycine max
  unsure (1)..(300): unsure at all n locations
cccttgattaaaaaccttgaaaaggatgcttaaatggaggaaaaaaaagagggagagaaagagagaggggggagcatgaaattgaaggaagaaaaagggagagaagttgaactttgagttgtgtctcacaagactctcattcatcaaagttacaacaagtgttacacatacttctatttatagactangtaacttccttgagaagatttcttaagaaaacttccttgagaagcttctttgagaaaacttccttgagaagctagagcttagctacacacacccatctataaactaagctca

SEQ ID NO: 966 - DNA, 714 bp, Glycine max
  unsure (1)..(714): unsure at all n locations
atgggttgaggggggtttgcggataacccccctgctgtactatttaagactcatcgcctccaacattactagagcagtaggtagataaatagctaggtatgctgcttgagatatgccccacatgtatagccccacattttcaagtgagcaagaatgatgacagatggtcttctacctgctgtggggagaacgtattggatcctactaaattaccccaaagcttgacctaacaccctaatcatctatcgggataataccccttcacgactagaacattagtgatggtttcctgtaaggccactgatctctcaaagtacccaggaaaggtgtggctaaccacgctgcactgtgtgccacctgtacccttattggatgtgcaggggcgtacctaaggtgccaaaaagactaacacttgtgacacccctttatgaaaataagcggtatctaatgatgatatcaagacgggtattccaaagccttgttcgaaaaaatcgccggacgtttttgagatcgagcaacacactcacgccggtacgaaaacaagtatgaagctctgaattatctagcattttatgaggaatgtcgtcgaaactagatagttaaaggcaacgtntcgaaagttagctttacaagcgttgtgactgtagtctatggactcctacgccattgcaagccatgctcactctcagtaagcgtccgtgatgatctctgtcg

SEQ ID NO: 967 - DNA, 397 bp, Glycine max
aaattcctcaacctttgatgatatggtcttcaccgacaaaaggattaaaatgggtctaaaaagaggcaaatctgatcatcatgctttgataaatgcaaaccatttttacaaaaaactcggccaaatgaaaagggtgagaataagggagaaacccatgctgagactgcccattctatacagccaattttcccaccaacccaacaatgtcattactcatccaataaaaaaaccttttccttacccaccgcccagttatcgacaaaggccatccctaattgaaccacaaagtttgtctaccgaacttccgatgacgagcatcacctttagcacaatccacaatcacccgccaagaaatgagttttgcagcgaaaaaaaacctgttgaactaacccaaatt

SEQ ID NO: 968 - DNA, 923 bp, Glycine max
cacagcagcgcgaagcttaacactaacctactgcgtaaagcgcgcgcctaagagctgccaacggtgtgaacgcacacaccacccacacgcagcggagtgatgcatcgttgccagcgcccgaactactagcgaccggaggaacgcaagatgacaaataaaagaaaggatttttctgtattccaccatcggtggaaaggcacgtagcacacgatggatacgaatcctcggaaggacgaacgtctctaacccgccagcgaacttcgaacaacccgcccctaaatgggcctcgacgtaatgaagctagctattaagcataacaagcgcatcgcgcccctgaacgccccacgtaccgtctgccggacccaaacgatgccgcgcatgaatcgagcccctacgaacgaaccatgcgaccacctcgcacggcaccaacgtccgactctaggatctgccgcacaaacgaaccaaggaacactccatctcaacgagacccgaatgcacacactgctagatgcaccatcccgagacacaacaccacgacccctcgcaatcaacggcgcgaccgccctcatcgaactacggcactacccaacggcgccgttaacaacatatccgggacgcatgacacgggcactcaatgggcctcccgacgtcgaaacgacaggacgcacggacgttatgcctggaacgtctgaaaccaccgaggggccgtattccacactgggcaccgatgcacgaaaactctctcactcagaccagcgccacacgtaaccagcggccagcacgtaaacatccgcaatccaatcgaacaaaacgtagcaagacatcgtaccgaagcccaggaacgtacctctatccatcgacgcgaccttacacaaagaacggtgcggaccccagcggatcccacgaacggtaccgcacgctcg

SEQ ID NO: 969 - DNA, 846 bp, Glycine max
  unsure (1)..(846): unsure at all n locations
nagatttcannnnnnnnnnaaatatcgggtttangatttgnnananttangatactcaaccgnggcaccactaanaccgantttgtaaaaagagaataaatctttttataaactaaaccaagaatgcgagcgccaaattaaatgatttgttgccctccaaccaaaaaatgaagtgaaacaaacgaatgattctcactaaagccagtggaattttttaataatccacaataacgtatgataatactgttaccatatttattcaaaaatacatagaataattatagatgacatttaaattgatatcctcactaatattatatacaatcacattttaatcatagatctaattactcattaatcaattttcatttttaatattataatttaacaatcatataaaatcataaataaaccattccaatcaattaataaatttttaattcttatattctaatatattatataaatttttcaccataattatttcttatctttactctattatagtatttaaatattttaatccactacctattaaccattacatttccataatcttattctatacaattcacctcttttattcccattatacttaattaatataataattacaatccactacaactcttcaattttacatatccacttacatatatttaaaaaattaactagatctacaatatatcaaatttattcattattattacataattctaaccttatgaatttaatcctattattgtgatcctattcaatattacaatcctttaatcccatattctatttcaacttctataactctttcttatcgcttccaatatttccgatttctccatatcattt

SEQ ID NO: 970 - DNA, 308 bp, Glycine max
  unsure (1)..(308): unsure at all n locations
agcttcgtgaggtctctcttttgaatgagggggggggcaaatcgnaacacattaactttatccttaatatttgacagtttgattttaatcagacaatggacatgcatgtttatcttaactggggccttgaaaggattcaatgagaaaaactgaagtaaatcctaggaaaatgcttgaatggattctagttaaagtaagttattctaaacaatgtttgatatcttcataatgacattttattgtagagacaaacttcatgatgatgcaccaagctattttgttgatgccaaaagcccaagtgattgatt

SEQ ID NO: 971 - DNA, 283 bp, Glycine max
ttgctctcaaaatattttatttgaattgctagttgtggattctagactcgtggcacggttagaggagcagagtttaaaaataaaaatagagtggctaacaaaatttatttttaggaaaagtggtagaaatatttttgagaaaaatagttttcaaaactaatttttgatttcgggagccaatcatgcatagaaaagatgtaacattctgatttttgtaccttattaaatttttaacaaaaaatgctaacgtttgatgaaacctaggggttagcatttttttttt

SEQ ID NO: 972 - DNA, 408 bp, Glycine max
taactttatgaagctctctggttttccaaaccttgaaaacttgtgctattcatcttttcattctcttctccctttgccaaaaagaattcgccatggactaaccgcctgaattttttttgggtctctcttctcctttttccaaaagaacaaaggactaaccgcctgaattcttttgtgtctcccttctcccttggcaaagaattcaaaacgacacaggctgagaattcttttgatgcttcccattccctaatacaaaagtgttcaaaggactaaccgcctgagaatttttttgtattcccattcacaaagtatcaaagggttaacccgctgagatctttggctcaacacattggagggtacatcctttgggggaccagttgagggtacctctacctgggtttgactaag

SEQ ID NO: 973 - DNA, 402 bp, Glycine max
  unsure (1)..(402): unsure at all n locations
ttagcttctcaaggaagttttctcaaagaagcttctcattgatgttttctcaagaaagcttctcaaggaagctacctagtctataaatagaagcatgtgtaacacttgtggcaactntgatgaatgagagtcttgtgaaacacaactcanagttcaacttctctccctttttcttccttcaatttcgtgctcccccctctctctttctctccctctttcttttcctccattgaagcatcctctccaagcttcttatccaaggctcatcttggtggtgaagctccttcttccatggcttattccttaatggatggcgcctcctctcacctctttttctttgtcttccgctgcatctccatggtggaaaatcaccattaaaagaccccattgaagctcaaagat

SEQ ID NO: 974 - DNA, 379 bp, Glycine max
agcttgcctcaaagaggtccaggaaggacaaggcggccgaaggaactagttccgccccggagtacgacagtcaccgctttaggagcgttgtacaccatcagcgtttcgaaaccatcaagggatggtcgtttctccgggagcgacgcgtccagctcagggacgacgagtatactgatttccaagaggaaatagggcgccggcggtgggcaccactggttactcccatggccaagtttgatccagaaatagtccttgagttttacgccaatgcttggccaacagaagaaggcgtgcgtgacatgagatcctgggttaagggtcagtggatcccgttcgatgccgacgctatcagccagctcctgggatatccgatggtatt

SEQ ID NO: 975 - DNA, 433 bp, Glycine max
taggttatggatcactgtatggtttccttgacccttagtgtacacatatcgcaaggaacaaacgtcaagaatgtcaacaatgcattcaaacatgggtcaaggaatcacaacgacaagtgtacctaggagcttatctgaatcagtaagtccatttgatgttcaacaatgtttaccaaatacattataattgtgtgactaatctttttttttcttcagagcacattggcaacttatttttctatgtccacaggacaatattgttgtctggctatgttctctgcgtaagaagcctaatgttaacatcaagggtgcaattaacaggttacttagtaaatttaaagtcaaatagtgtataacaattatagtggttaaacacaatgttttttatattatatacgttactggtatttttgaactagtgcaatgaagacat

SEQ ID NO: 976 - DNA, 426 bp, Glycine max
agcttcttagtttcagatgatgcagatgggtttgtagctacctcatgcactcctctaatgactatggcatctgtcataccctaatttcgtccggggacctttgcttgatgacatgcgaccattctttggtccttgtgaggtgcttggcacccatcattaggcaatttatgaagttccaggacatgccgaaaaccaaaaaaaaatgttgatgcacaatccgtaagtttccgtgacacatcggaaatcaaatggaagcatcgttgcataattaagtgaggttccgtaacattccgtaagtcaaaaaggggatgattatgtaatccgcaaggttccgtaacattacggaaagaaaacaagtttcgttacgaaattcgtaagtttccgtaactctacgaaaaaagaattaccaaaaaatagcagaggggg

SEQ ID NO: 977 - DNA, 228 bp, Glycine max
ttaaaaagtttgggtttctaagctggggattacatttggtcacctattttgactttcccatgctgtgtctacatacataaaacagccccactgatcgaggccgtacccgaatcaaataaacatgaaaatgcagtaactaggaagtgatcctaggtcgtttcccaatgagcagtgacaagccaaatgttcataatatacttgcagtaacaataacgatggggggggggg

SEQ ID NO: 978 - DNA, 468 bp, Glycine max
agctttttgttatagagtttgatgagttcatgacagagctggttagaagaaactggcacaaaatgctgaccaaccttatggaggggagcatagatgtggctctcgtgaaggaattttatgcgtatctttatgacctggaggataagtctccgaagcaggttagggtaatagggcacttgattaagtttgacgctgattccctcaacaccttcctggagactctggttgtttaagagccagaggagactcttcctgcttactccaagttctgcaaattcaaactagaccctcaggagctggctgcccgactttgtatccctggtaggggatttgttctaaatgctgagggcctgtcatggaagctgctgaggaaggaccttaccactctggcctagacttggagcgtcatgttttatttcaaccttgtccctacatcacatacatttgatctgaatttggacagggcaa

SEQ ID NO: 979 - DNA, 717 bp, Glycine max
  unsure (1)..(717): unsure at all n locations
ngttttannnnnacctcgagttgaaggttgtannacnnaannatagaaannaaccggcctaataacctgaatggaagaaatgtttttattttacaaagggaggcctaagtttttggacctatcttaacagaaatccttatacactacaaaaaccctaattgggagaagttggaccactacccaagtttatccacaaaagtaggcgtattaacggcctaccagacccgaatctgaaaggaaggtagtatataaaccatgatggcaggcaaaactcaaagaaaatggattatgggcaaaaagtaattgattttacaatcccaaatacccaaacaaattcacaatgagggtgagaacacctttcagtttgggcactcatttttttcagtagctaagcaagagggacattgaagttttccatggacttgcaaatgataacatcaatccaaattaagagcaagggaaagaagaactatgttatagaacctaagggagggtatgtgcacctttacccaaatcctttttgaaggaacaggaaaatgggggatttaaagtttattcaacctaataaaactttcattagtaaaatttccttccatggcaggttaactttaactaaattataaacggttttggcccaaaaaaaatgcccggtttccattaatttcccggaaaacataaagttcttgtgttactcattctaagacagttttataaaac

SEQ ID NO: 980 - DNA, 491 bp, Glycine max
  unsure (1)..(491): unsure at all n locations
agctttaggagggactttaaggtcccaaagctgatggaaacccgaaccttgggcttccgagaactgctcagctttaataaggttgtaggcaaatttggtagagaagatcccattaggttcagctccccacagtcaggtgtccttcagattgccacttattctgataactgcgatatgatcaataaaaattaaagctacccccatctcactgtcgaacaaatttcatctccaagagaaagtccattcccacccattttcagaaaaataacccatgtcttacacaatgtgtaatctttgggaagagatttggtataattatggaaattgctctttaagaggtaacccgccgtcaacccaagggtcttcccaaaaaagaatttggtctcccctacccacctttcaagagaactgcttggagacatcctccatgtttgggtgctgattaacatnaccttaagtcagaccaccattgagagaagtatttctttgat

SEQ ID NO: 981 - DNA, 816 bp, Glycine max
  unsure (1)..(816): unsure at all n locations
agggannnnnnnnnnaaccacgtcaatactagnanacnnnnnntggnnnnnaggnngagaaagaaaaagggaaaaggggtattttaatatttttaaggccacacacgcttgcacacccgggcaaacattgggaaataagaaggagggactttatgatggaattaaggaatatataatttaacctttaggaacagacccaagtaaaacaaaggtggaccaggtaagaacaattggaaaaagtaaaaggactaagtaataaaataacgattagaatggtgggaaaatagggggctaaaaaaaaaagggaaatgaataagggtggggggggaaaatgaaaaatattgtggaatgcacaaaaaaagggagacgggaaaaagattttttagaaagaagttctgggaaattggggggttgacaaaaagcctttggaaaaggagaacgaagggcattttacaacgaaagcaaaaaaaagggtagaaacttttatggggggggaaagagaatattatttgatagaaatcgccttatagggaagggaaagagaatttggatcttcccctccttggaggacaaagacaggggggaaatttctggattgaaaaaggaaggcaaaagcttctctaaagaaatggaaacccccattaagcttgggggagcaaaaaaggagaactgggaattcggggaaacaccaagaagggggtgcgcgaattataaaaaagggtggaaaaaggggggtctgtttaaaaaatctaaaaaatgtgaatgtttagaaaaaactaataaaggggggagaaacgccgcatgagaaatttgcct

SEQ ID NO: 982 - DNA, 212 bp, Glycine max
  unsure (1)..(212): unsure at all n locations
tacttactaaggtagccatacnatgctgatggtagagcaatacatatgaattgatactctactctacattataccattattagttatcatagttcaatccacatcgatatgtacaagtngcctctgtttaatatttgcacgaatggattncatgaatagctggatattctcatggagataggccgtaatatcatgatgatgtttctggtatg

SEQ ID NO: 983 - DNA, 218 bp, Glycine max
  unsure (1)..(218): unsure at all n locations
gacgacttggctgacatacacctgggttggaagactaagaaacttatcgatgttagataggctggaagaagagncatgtgngaatgaggagaatagattaaaccatagtatatcggtggagacatggtgtttctcatgggacttactaaagcaagagcataacaactatgcagagatngaagtgacagtggattatcaatggagaaatggagcccgag

SEQ ID NO: 984 - DNA, 242 bp, Glycine max
  unsure (1)..(242): unsure at all n locations
tgtgtgttaggtagcgaanataccttatatatgcatgtatgtaatttaggtagcananaatacctcacagaatatatatgtgtgtgtctacgtagtgaacataccttatatatgcatgtatatagcacaaatacctcacacaacatatatatgtatgtttaggtagcaagataccttggatacgcatgtatatagcaganattcctcacaaatatatacacatgcttaggtagcaaaatacc

SEQ ID NO: 985 - DNA, 659 bp, Glycine max
  unsure (1)..(659): unsure at all n locations
tctcccacatctctacctgcatgtcactgaattagngctgtatttantcttactnnnnnnnntatttatgtgcatgaccngcganctntanagacgaccggcaggcatgcnagctttgacacgttgnatgnacacgnctctgnatntatatcagttctatgttacaanaactacttagtaattaatttatagtgtgcggtaccaatactgcttcgananctantctcttttcggtcgcatcattgaaagtctataccatgcatgtttacgtttggggtacgcaatattctatttagattattaaaatacatgcatgcatcgtatatttaatacgcaccctattataatagagaattcataagaaatcttattatgacatacattcaaaggagaacatgcatataatcatagtgatgaatgctcaatagtgatgaagcgcctttacatcaatatatcacattctacgcggttctgactgtctataggccgcgtcatgaagcaagactttcacacggcgaaaaccacatcttgagagtaagaacaaccgttttcttcacacatcttgaagaaccatcaaatggtttacatacatcgcgaataangccgtacctcatactagttttaaataaatataaatgccctctctgcttagaacaacc

SEQ ID NO: 986 - DNA, 346 bp, Glycine max
  unsure (1)..(346): unsure at all n locations
tgctaatagcctcatttggagattatgagataaaggagacacaataagagttgattctaanaatattatgtcctgngctatatggaatacacttcaacttcttgaagaacctttgggagattatgaacgaggatatggtgaggttcattttcgaattccatgctcatggaantctacctagaggtactaatgcttctttcataactcttgtgcccaaagtagaagacccatataactgagtgcgttatacccataccttggtgggatgtatgcacaaagttctaacanaactcttatagaatagaatgacaaacgtgatgaatggggtgaatgatcatagacaaag

SEQ ID NO: 987 - DNA, 211 bp, Glycine max
acattatattcttatgagataatgaagttaaaggtattgaatgcaagataagagttcagtgtacatcttccagtgattgccagataggagcatctaccaatagtgaatctatgcatggagttcatctggttccaggggaaaatgttggactacttgatagaacatctgaagttgaggctttgagcatcataacgaaatagaagcttgaaat

SEQ ID NO: 988 - DNA, 152 bp, Glycine max
  unsure (1)..(152): unsure at all n locations
cagaagtgatcaagaacactttaatcaattacatcaaaaatctaatcgattacattgttcttgaagagtttccaattcttgggaagaacactntaatcaatcaaaatggtaataatcaattacttctttgaaataattgattacattgtata

SEQ ID NO: 989 - DNA, 565 bp, Glycine max
  unsure (1)..(565): unsure at all n locations
tgctagngcatcttaagtgactgggcccagtgnacatgtgcngcttgacacgacttgatcacgcgctcnctttaataggagaggtataaccttctctcagattggtaagacaattgtcacaaattcaagagtaattcattaagtgtgtggaagatcaagcctcattagagtaattagaaatattgataacaatctctatatccaattcagctaatattctgatgataacaacaattataatcaattnttttatcagatataacaaataatgtcatacgtatataaaaatactctatcaattcattaaatttgatttggctacagataattcaattattcttataattattttaagactgatattctttacgagaagcaatctagctggagcatactctatatagataatcaacatcttcttccacatgattaatataaatgagtatgtaaagctcacgctcancactatttatggctcaagtgaagagaatctcattcaatcgactcatatatnntaataatttcttttagtgataaaatttatatatcagaatgtttagatctn

SEQ ID NO: 990 - DNA, 419 bp, Glycine max
  unsure (1)..(419): unsure at all n locations
agctgagtctagtcttacatgagggatctacatacganactcagtttaagttagtctaaacctaagagggttgtctaaatngngtgtagtcttaaatgaaggatctgtggacgaatcttggatattcagcctgacgagggatcganggtttagtaatntaggctacaacatagaacacaagagcacgatngattagagaaatatatttctatgcatcaacttngttgntagaaagacccaacatatatacctaatgctgtcattntatttaccttgcaattgatagttntagcatacaagttagtttaaattctgttgaattatcactatatatgttctctcaacatgcttgatctgaactaattaggctacatagtccctgtgtcgatctcgatcaccgtttatttaatactgacact

SEQ ID NO: 991 - DNA, 519 bp, Glycine max
  unsure (1)..(519): unsure at all n locations
aagaaagagagaaggatggagcacgaaattgaaggaataaaagagggaaagaagtggaactttgatgtttatctcataagactttcattcatcacaagtacaacaagtgttacacatgcttctatttatagactaggtagcttccttgagaagctttcttaagaaaacttccttgagaagctttcttaagaaaaattccttgagaagcttctttgagaaaacttcctttgagaagctagagttagctacacacacccatctaanaactaagctcaccttcttgagaagcttccttgagaagctagagcttagctacacacccatataatagctaagctcacccccatgaaananaaacatgaaaatacanaanaaaanatcgtctacaaagactactcaaaatgccctgaatacanggctanaccctatctactagaatggccaaatacagggccanaagaagaaacaacctattctactattacaaaagagtgacccaccttggccatggctcaaaan

SEQ ID NO: 992 - DNA, 248 bp, Glycine max
gctccttcttccatggcttattccctagtggatgacacctcctctcacctcttctcctgtgtcttccgctgcatctccatggtggaaaatcaccattaaaggacctaattgaagctcaaagatccagtctccatagaagccacacaagcaagcttccatcaaaattagacctacgtagttctttcataagaacagaacgttggttaagttggtttgaatattttccgcaagatcgattgtaaccgaac

SEQ ID NO: 993 - DNA, 372 bp, Glycine max
  unsure (1)..(372): unsure at all n locations
cttcactgnttgctgggtgccccagcaataatgctgggtgcacgtagcaactcccattctagttggcttggtttttctgtctttgggcttttccccttcagcanaaaaaaaaaattctctttgcagaaagagttcgagctcntgctttatattttctttatctattaatgatttattctatctcaataaaaaggaattataaaaagttgtgaaatanaattaanaaggtcacgtgaaatactgagttattgacaatttggaaaagataatacgagttgtagtgatattctttaaactcttgtattggtgaatgatnnttaattctntaatcaatgctcannattactttttgatagaacatttacaaatcac

SEQ ID NO: 994 - DNA, 220 bp, Glycine max
gcacctccaagatcccacaccttcatgctcctattgttcggtccaccaatgttcaaccaactgttcagatacattgcaccaattcccgctgtgtcttttatcattgacctatcatagaagggtgtgagatgttgtggtaatgacaaagatgatgacaatgactgttctgtgaggttagtattattggagcaagcatatgcccatgctttgagaaacaaag

SEQ ID NO: 995 - DNA, 338 bp, Glycine max
  unsure (1)..(338): unsure at all n locations
ctccttgcgatactgatagaagtcgcggtagcaacgatagtctcttcaccacgaaggtgcccctacaaacacaaatacaattctcaatttcataaatggcgctgacgctgtaataataccttactatactacttacctgagcaaggcatccacattctgagatntccgttcttcgatatcgtcgtcgcccgcgcccgtcgcccgaatcagaagaaacaccaacccactttcatcttctctttcttcattctcacgctcacgccgcccncgccaaacattttcatttaaatcttatanattcaattcccttcactaaattaataacactcgtctaattt

SEQ ID NO: 996 - DNA, 396 bp, Glycine max
  unsure (1)..(396): unsure at all n locations
ccgacatgcaataagagggtctgtgtgggcgaacatnngactcttaaactaaaactgcatcntttgaggtattactagttattgatgactngacactgttntctcttaatattntcctaatactggtcgagaacagtttagttggtttgtcacctctgaatataaaacttgattgaagaaaaaaaaattatgatttgttgagctaaagtcacctgttgttgttgaagagcaacgtacttgaccacaagggatattatgatttgtganntttcttgatttttgtaaagttctttagtatggtttattgctccctaaatttactggtcccaccatactttcttgcaagtgctaataaatgcacaacctatangttcgaactggagctgtgacattaca

SEQ ID NO: 997 - DNA, 217 bp, Glycine max
cttatgctctccttctggaaatacacatatggcctgaactcctattacaatatgccctttgagtcatcaactgattatgctttggatcatacttgatcacactaacccattatcaccatgacactattggcgatgaatactttttgctgagaaatggacttgaaagcgtttgactccttacattggccaaattacctgcacatgtagttggggtaac

SEQ ID NO: 998 - DNA, 451 bp, Glycine max
  unsure (1)..(451): unsure at all n locations
ctacaagggtatgataaatntgctggaagaatcaatgaaacattggactatcgctccgcgagagatgcgcaaggacatggaacacacacagcctcaactgcagctggtaacatggtgagcaatgccagccctttcggcttggcacgcggttctgccagtggaatgaggtacacctcaagaatagctgcttataaagtatgctggcgtntaggctgtgctaactctgacatattggcagctattgatcaagctggtgctgatggtggtgatgtgtagtcactctctntaggtgggatgctaaaccttactacaatgacagcagtgccatagcctcatttggagcaacacacaaaggagttgttgtttcttggtcagcacggcaatctggtccctctagatcaactgctggatatgttgcccatggatcatgactggtgctgctagctacact

SEQ ID NO: 999 - DNA, 214 bp, Glycine max
  unsure (1)..(214): unsure at all n locations
tctagtcccacaagcggcatctgangataaagcttaatttaagtgagtctaaacctaggagggctgtctaaatcgagcctagtccaacaagagggatctgacgatgaagcttggatggattcagtctaactacggatcaaggtttgtagaagtaagcttcatgatgatgaatcaagatcgactcaagggagtttgatgataacaaagatgatga

SEQ ID NO: 1000 - DNA, 414 bp, Glycine max
  unsure (1)..(414): unsure at all n locations
ccttagactcatcttcactggtnaagacacttcataggtagtcatttccgaaacatcaacaatctattttgattgctntcaagatcaatgattataacacagactaatacgagactcttcaatatgctatgtttacactcacancgttttcgacaaaaaaattcacaagctcacactttccatcaattgtctaagtcaaatactgttaactatggagttcttgagaaatagattatcgaagagtaaatatatctcgtagtataaatattataattcattctttaagcattctcaatatacgactcatacctgcatagtnctcattcatctcatctagtgtgattcgttggatgtacatgtacacattcttgaatttcacctattatgcccatttggctaatatattatgtctat

SEQ ID NO: 1001 - DNA, 304 bp, Glycine max
  unsure (1)..(304): unsure at all n locations
atatcggtaaccaaattcacacgggtaaaaggttcacattcacttcactattatcaattaaaacttattaaaacatatttggcacanaataaggccgtcaaaatttataataatattttgttaaatagtgagataaaataaaataaaaattcacttttcaataatcaatcacactttntcactcatcaatcacattacacaagaatcacacatttcgatcaagacataataacacatcaatttcataataaacaattagcaagcatatgcaacagttatgctaagactcanacctatatgcaat

SEQ ID NO: 1002 - DNA, 174 bp, Glycine max
tctcagctctccaccgacctgaggacgataccgctccttggagatagtcacttgctggtctgacggctgctcagaaggtatggacaaaattgcagcctcggtgaaacaaatgaaatcctcctggtaacaaaggtacatagggatcttgctgtcccttggagtttgggacatcct

SEQ ID NO: 1003 - DNA, 235 bp, Glycine max
  unsure (1)..(235): unsure at all n locations
taaaaaaaatctactcaaggaaaagattcaaaaacacacaaatcanaagcagttacaacgataaagcacatatatgaattaaatccctanaggttttgatgtaacaaagtataaactttatgtgttaacctttcatgcttaagctatanngttatctatctctantagatacaaacaanaagcatgagtataaaatggtttggatgataagcaaagtataaatcattggacgata

SEQ ID NO: 1004 - DNA, 310 bp, Glycine max
  unsure (1)..(310): unsure at all n locations
atgacaccctctaccccgcatacatataaatatataaaacatataanaatatgaaattatgccttcacgatcaatcacatattcaagacaacacatctcacatacaataccgcatctcacacttacacaactcattacacaccatcacataacaagtcataatgatcattacacacacgttatgcaacagatacactaagactcaatcctatatgcaatgtggtaccatgtcagtgaagaacaacactatggcgcctaagagtacataacaagacatgtcacacaatgagtatgtcatgtcactctcact

SEQ ID NO: 1005 - DNA, 348 bp, Glycine max
  unsure (1)..(348): unsure at all n locations
tgaggaaagcatgctccaataggatgtatttgtgggtctcaatctctctcaagttatcccaatgtagcaaaaactgtcaacaaagtcagaaggtggatgaaatagagacaagagatagataaggaatacgcaccatcaccacnctcatgttaaagcaagcacagcatcatcttaagtccaaaagatatttccattcttcgctttcattgaattnttctggtccatgtgcagtctactactcaagacactggtgtctagaacatattgcatangtctatctttctctgcacttgttgtgacatataaacaccaatgcctgtagactganaggcacaattaatactccac

SEQ ID NO: 1006 - DNA, 216 bp, Glycine max
  unsure (1)..(216): unsure at all n locations
gtcttattgactctcaactgtcaagactctangttatttttgtcatctatcttaacattgnggagcgttaaatgtctaccttgttttgctaggaatatttaagaaaatgtataatatatatatatatatatatatatatatatatatatatatatatatacacaattataaatctctatttttatattctctattcattaaaatttattatgcatc

SEQ ID NO: 1007 - DNA, 554 bp, Glycine max
  unsure (1)..(554): unsure at all n locations
gacgctttgttcatagcaagttatggaaacnactgtgtacgctatatgtcacatagtcacgcttaagctcaccttgtcatacttaatccaatggccacatcgacgttatgaaccgcataattgagcaatttctgcatgccttctgtcatgatcaatcatcgatcgggcgtaagttcttaccttgcgtcaagtggtcatataatacttccaagaatactagcattggcacctccgcatttgattcacatacgacaagagaccaccgaccatccttcagtatatcatatgctcttcttcagtggaggcagtggacacattactcaccacatgggaggaaatattcgatagcttacgtcatanattgttaaagcacaagctcgaatganacatttcgcatacaataacctcgtgagaagtacactatgtatgaggtgactggngttatagtcaactccgtccaactcaccannatgtttatggcccttcanggttntgacncatangactgtggcttacagctcttcttcngaggactacgtatcactttgcttatn

SEQ ID NO: 1008 - DNA, 296 bp, Glycine max
caactgagtaccatctaccccattgattgtcaactctaatggagctttgctctgctaaatgatatctgatggcatttcctactaacttttaagaagttagagggcctcaagctgtgcttgtgtctgtgtgatggagagactagctgctggacacacacttaaacgaggcagctgtggtgtggaagactgcctctagattgatatcctcacctgatgtatctgtgctgaagacatatattgtgtgtggttgtgtgagagcatataatgtgacaaactcagtgtatgatcaatgtgaa

SEQ ID NO: 1009 - DNA, 603 bp, Glycine max
  unsure (1)..(603): unsure at all n locations
atgatnncccctcgataccgcgacctcagagtcacctgcngcatgcagcttgagccaaaaaccaactcgccctataccttgacctgngatgagaatctccatcctcgccctcagaagaaaacacaaggaataaagaaagttcccgacccaagatcggaagaaaacaaanagaaaatataccgaaaggtcttcggaccaggcaacatctgaacagaacataactgtcaccagcaaacaagaaaagaaaggaaaccacaatttgaagtggtcctcttcctttgattaccaaccaaaatctcatgcactggcaactntcttcgtccgcactaanacaaaacagaaagggaaaggccanaacactcagagccaatattcccaccaaaaacactattcccanaaagtcctattgatccgtgatcacatgtgtaatcttngatntgatanganatggctcgcaaattcaagtcatgacatatctatggtttgggaatangatgaaacactngcctgtgtgaagttatacaccgcgagtgatttctttctgtttgtcngacccagtgttcttcanatgatcattatgagtggacacaagcaccctaatcg

SEQ ID NO: 1010 - DNA, 281 bp, Glycine max
  unsure (1)..(281): unsure at all n locations
gctatgctgcanaaattacaatagacctcctcaaccctagcagcaaaatcaaccacagcagaacaattatgacctctctagtaacagatacaatcccggatggaggaatcaccctaatctcagatggtctagccctcaacaacaacaacaacaacaacctgctccttccttccaaaatgctgctggtccaaacaggtcatacgttcctcctccaatgcaacaacatcaacaacaatagcaacaatagccacagagacaacaatcaactgaggccccttctc

SEQ ID NO: 1011 - DNA, 124 bp, Glycine max
  unsure (1)..(124): unsure at all n locations
ccgcgatcttaagtcactgggctgcagcttgaactggtagcagtgcttatgtcgagtctccctcgatgcaacctcgctgatccgatgctgctntaatggtagcctgtgtgatgttaggcatgga

SEQ ID NO: 1012 - DNA, 575 bp, Glycine max
  unsure (1)..(575): unsure at all n locations
atgacccccttgagtgccgctgttangtcacactatataatactcaagcctgtgcccgcatagaatatagggcccattgntacacttactcatactgtagtgtcaaaatctcaatcacttgcgctccaatgactccgcttatccaagtcagagaccatatggtcttgccacctatgtctcacctagattatacactggaatcatacacttctctgtcgcagacagaccagtatacaatgaaccctgatcgccacacatcccacgccaatgagctgcttctaatggatcatcatatatgctcacaatgctgagcccaattatgacccaagagagacagaccccagagaatgtcacctatggactaacaactatgcatcaaaagtgatgggacgaatcctcttaaggccattgacgcctagcagatcccatggtnactataacatctgtaataggaactacccacagtcactactatgggtccaattgcatcctatatatatggtatgtaaacactgaattctgatgaactgtaagatacttcaatctgatacgatgtttgcacacactccatcgaa

SEQ ID NO: 1013 - DNA, 399 bp, Glycine max
atgtcccctgtccgcgattcttaagccctgggctgcagcttgcctgagctccaaatataactggctgatttatagaattttcttttcttcacctcttcggcagattcataacttcacttttctacaggaattccgatcttttctttaacgtttaaagctttgtcaactttcttcaaaagtcttgtcaaactggcatctcttttctggttcccttgcaaaacaagagtacgctgatcttggttcctctccttcagattaagctccgctgaatctttgattccttcttacaagatgaagctaccgtaagtcttgttccttcagacaagctccccgtatctttccacctgggactctggtcaaaggcccctgggtgttcgcacaaaggctctggacattggg

SEQ ID NO: 1014 - DNA, 516 bp, Glycine max
  unsure (1)..(516): unsure at all n locations
atgtagtcgtcttatngatggttatacaagctcttacaagctgtcctgtaatctgtcaccatatgctaggcagtagccttcatcatgaactatcttttgcactatctgaacatctctatacatatacatatctatatatatcactaactctacatcttacacaacttaggatgacgagtcttattgagcgcttctcacactacacgcaacatatacactatgactcagagctatatgcgctgagcatcttagtccatggaatctacactacgcctttatgcaacataccagacatgccctcatgagatgtcatcttcgataactactactgcaaagcactacctantcaattgattgttgatgccttccgctgcactaaaaagtcgaccatctcatgctcacattacgacggaacaaataaaacctgcgcggccgaaatttataactatgaaactagtacaccgttgctatgtcatgtaccctagcagaaagccatactcttgtaattaaccgacg

SEQ ID NO: 1015 - DNA, 474 bp, Glycine max
  unsure (1)..(474): unsure at all n locations
ntctcaagaagcttctttgagaagctacatccttatctatccacccctctattaactaaattaacttcctttaaaataattacggatgaaaataacgtaacaaataatcaaacatcanacataattactaataatatatagatatatatatatatatatatatatatatatatatatatatatatatatatatatatatatatatatcanggggggacactcagcgcgttatcgtaatttcagacaaaaccatatggggcttcaccccttttatccacattgcgctaatgggcgtttaagtacctatatcctacatgactaacctaaactataacctacctacatatacactaaaacaaaagtctcttcttatgttgaatgaaaaaatgaatgttccctcttagtgtgatgaaaagcaaagtggtaagaaaccacgcccacaaaagcacattctatgtagaaggcgagttagcg

SEQ ID NO: 1016 - DNA, 243 bp, Glycine max
  unsure (1)..(243): unsure at all n locations
tatctaatngattatgttntctatgttcaatgcttccttcaatgcttaatggttgtatgcctttggtctgatcatccatttgtgtgcatagttaggtgactttagcattgggaaatgtactgtngccttagaacttgattgaagcaggatcaaaacttagtcttacaagagggatctngcggattaagtttggttntaattatgttggtacaataatgctatttagtctaggcctagtcttac

SEQ ID NO: 1017 - DNA, 241 bp, Glycine max
  unsure (1)..(241): unsure at all n locations
agtcccgtccaggtagtcccganatagactagcctcacagtgatcaganatgagaacgatgagctgattcctactcgggtgcagaacagttggagagtctgcattgactataggaggctgaaccaggttaccaaaaaggaccatnttcccctgccattcattgaccagatgctagaacgcctggcaggtaaatcccactactgtttccttgatggtttttctgggtatatgcaaattacta

SEQ ID NO: 1018 - DNA, 332 bp, Glycine max
  unsure (1)..(332): unsure at all n locations
tcctgactcactatanaccttgacccagattgagaatgtncaatccttaccctcggagcanaaaagaaaagaaggaaaaattccaatcaaagaggaagcaaaaaaaagggagagaaggaaaattccaatcaaaggaacgaaaattccctatcaaagagtgggagaaagcaaaaagaanagaaagaanattcccaatcaaagaatgggagaaagatnaaaaagagaagtaaaaaagaagaaggctcatgggtcatagaaaccagaagaaatgtgcagagaggtctttagaccggacaatatctgaacaatacagaattgtcaccanatgaaca

SEQ ID NO: 1019 - DNA, 348 bp, Glycine max
acttaaatcttttcgacactgactagcattattacctattacttatatagcatcataaaagagaatccaaaaacgccatgacttccttatttactaaagatttaatatattacctttttattcacgggtacgacacgacggcgaatattaccaaataacgtatcatcaacacggggaatattatttaataaggaaagataataagctagccgaaaaggttaaagaatgaacaataaatctacaatggaccccgactaataagaagctgtggctacctaacgaaacaacgcataatgaacgcaattctatctcgactcgacctgtgattttgactattctaattaaaaa

SEQ ID NO: 1020 - DNA, 161 bp, Glycine max
  unsure (1)..(161): unsure at all n locations
tctntgcgaaattcctcacgganaacgttacggataccgttcggaagcgcctcggcttagaatttcttcactgaaaccaattttccaagcaaattcgaaagagagagaagtgcctaaggtgctgaaccccttccttcttgccttcctcccctagttatagc

SEQ ID NO: 1021 - DNA, 250 bp, Glycine max
  unsure (1)..(250): unsure at all n locations
ccacagagtggtacctagagatatgtcngcggggtcaagatacctatgggacgtcaggtggcgtgctatagcccaaaaccaagcttgaccaatcctgacccaacccgggcatagtcagtcagtgagaacctgtgatgtacctaaacaggcgagctcctggcagtcaaccgatgaaagaacaaagaccacaaagcatggaggcttgtgtggtggctggccatgtgtgaatcttgagtgatatatgggatat

SEQ ID NO: 1022 - DNA, 464 bp, Glycine max
  unsure (1)..(464): unsure at all n locations
tcgattataacaatctggtaatcgattaccagagagtaaaaactctttggtaaacatgtgttgtagaaaatcatgtgcctactcaattttgagaaaaactttntatacttatcatgattaaaccttctcttgattcttcaatcttgatcttgattnttgagatcttgaaccttgaatcttgattcttgactcttaactttcttcttgaagtcttaattcttcttgattcttatcttgaactcttgaatgggtcttttttgaataagaatatatattgcaanaaaagacattaaaagcagctgaccaagaccggcccaactgacagtcaaggaagcagactatattctactacagatatcatgatttgattgttctacttttaaatacattttatgggcatatgaactctcttctacctctgaatatatccgttctaccacatatatatcgtngtcagcactgca

SEQ ID NO: 1023 - DNA, 242 bp, Glycine max
  unsure (1)..(242): unsure at all n locations
taccattgtatagaaatcctactatngcttagagttagatgaatgaatatgacatacagaagttaatgaangataacactatcacttgcttgcattcaagacttggaaatcatattttcaccacaatcaaagacttggaaacacctcaatagatgtgggacaagatccaaaatggacttgacagcaataataaggtcaaatctgttaggcttctcatatcgaagagagagtttgaatcaatg

SEQ ID NO: 1024 - DNA, 244 bp, Glycine max
  unsure (1)..(244): unsure at all n locations
tttttatatatataagatatttccgacagagataagctatagacagagccaaacttctaaataagtgtagtagatatttagctataacatgtgcacgtttaccttgttcttatatatgatatttcagacactgagataagtatatatagacactgccaaactttntattaagtgtagattatctagctaanaagatcggcacgctttnttttcttctatgatgaaatatttcagatactttcag

SEQ ID NO: 1025 - DNA, 173 bp, Glycine max
  unsure (1)..(173): unsure at all n locations
cactaataattagattatatcntagtgttttaatttattaaggactttagaattttaggtttcattgtacgcaaagaaaaggaattgatgattnttggaanaatagctattggaagatcaagccacacctattggaagcaagtttcaaggtcaattntcactttattttcttc

SEQ ID NO: 1026 - DNA, 238 bp, Glycine max
  unsure (1)..(238): unsure at all n locations
catgtggtactaggtggcggtcgggcgatggtgcacaacatgtattccacatccacnatgcgcgcataaacgcaccatcctctgttgcccacctccaactgagctcacgtactcccacgtagcccatattctcgtttctctcaacaccgggtccacatgaatcctcccaagcgtccacaacatccaggcaaaacaacattcaaacagcacaagctattacagccaagcaaaatagagc

SEQ ID NO: 1027 - DNA, 338 bp, Glycine max
  unsure (1)..(338): unsure at all n locations
catgaacaaagacgcttccaaataattactcataantaatttaaaataaaaattctaattccaaaaattactacacttaaactgtacctcttaattttagtctaacaaagaaaattattacttcaactaatatgttgtcaatgataaaaatacaaaaaaattatatgcttgctctattaaacttaaactagacattcatactttattctaaaaaaaatgattactctaattaaataatttatgatagaatcctcaacttcaaaatctgcaggtatcacatatatatattcttaaggctgaaataccttcaacataggcttataaatggaagagttata

SEQ ID NO: 1028 - DNA, 357 bp, Glycine max
gctatgaaatagtttattatgactccttcgataagcttatgagacaataagaagttcgcgacattaagctctctaagagcttatggaatatgggtggtgttggataaataacttaattaattacttattgaataagtgattatcatggaaaagttgtttatagaaccaaagaggaaataatgtaaggtgtaaggtgttctcataagctatcgtagagagcttattgaagtaaagctgaaaagagcttatatgcatattgtaaccgattttttataagcttttccaccagttacataaatgtttatgtcataagataagtcaaataagctgtgtaaataagctcttaaactcaaactt

SEQ ID NO: 1029 - DNA, 546 bp, Glycine max
  unsure (1)..(546): unsure at all n locations
atcgtctagagctgacctagctgcatgcaagctaggcgattatgggatggcatagttggtggatccaaggttgtcgactcacacaatangcgtggtggngacatatgggtacctcgccccacaatacatcaacgaacgtcgggctagcaaggaatcagacanttatagttatcgggttgtggctctagaaattgcttctggtagaaggacttatcatgatggagcagttcacgcgcctctcgtgagcggtgtgtggcaactgtatatggaagggaaagttctggattgtgttgatgacagattgaacaaggagcttgatgtggatcanatgacaagcttgatcattgcgggttgtggtgactaatgcatatgacanngaangcctanggctcacatgtaataaagttcttagcttgagaatatngcggggcttcacttgaatcatgatcgtcgtctcttcttaatacgaatacctgcacgccactattatttcgatcctacctcatacagcttgaatgtgacgtattcgcagccacttgatcattn

SEQ ID NO: 1030 - DNA, 376 bp, Glycine max
  unsure (1)..(376): unsure at all n locations
atgctctngcatnctcanacactcggtctattgntgatctgcctgaaggtaagcaaccatatggttgcaaatgtgtgtacaagatcaagcatcatgctgatggatccattgaacgatacaaggcccgtttggtggcagagggatacactcaactagagggtgtggattatnttgacactntntcaccagttgctaagcttaccacaattcgcacccttctatctgtggctgctattaaggactggcacttagaacaacttgacgtcaacaatgctnttcttcatggtgatctgcatgaggaagtatatatggatctgcctcctgagtcttactgcctgttcttctttaataagtctgaaatacataagtcttatat

SEQ ID NO: 1031 - DNA, 192 bp, Glycine max
  unsure (1)..(192): unsure at all n locations
tccctcttatttactagctatttgaattctttagttcctgaatgtacaacccttcaaatggtgcttggtcccctctntctgttcttgcanaaaagaaaatcaaatggtgtcaaaacatcgatgaagtcctaagaanatcaatatcanagaanacatggatgaaatcacaattaanaagcacaactacctatc

SEQ ID NO: 1032 - DNA, 531 bp, Glycine max
  unsure (1)..(531): unsure at all n locations
tatgtggtactaagtgttgatngngcgatggtgcanatcatctctcccacatccacaaatcagacatgaacccaccatcctcagtggcccagcttcaactgagctcacgtacccccacgtagccccttatccttgttctcttagcacggngtccccatcaaacccttcaagcttncaaaatatccaagaaattcaatatccanacttcatgaactaccctaaaccaagaaaacagggcagaggtagaanactctgcccanaacacanttcaataccacaaactttcctactcaaataccccagtaacatgcgttacgaatctttataccgtggatcgacaagaaaatttactggatgtccctagtacataattctacantttgaccgttgggatctgctagaaaatgtccagaacccaatatgtactaccttntccgtaaccagcaatgcacatgcatttttctgtcaagaacaanaattctgctgacaantcancagcnnatttctgcattatagggcagatgtttaagn

SEQ ID NO: 1033 - DNA, 205 bp, Glycine max
  unsure (1)..(205): unsure at all n locations
gacttaatcacgataactatganaaggattcttcacacactgagtagcacatggatgtctctcataacatgtatactaaacagtatttactctctggtaatcgactaccagattgttgtaatcgattaccactcgccaaattgtcttgacaaagttctcacatcgaatgtactatgttccaattaatttcaaacagctgtaatcg

SEQ ID NO: 1034 - DNA, 292 bp, Glycine max
  unsure (1)..(292): unsure at all n locations
gcagcttaccctcccatntaatgtttgactaacagctcctagcgactacccatttttttgtaaatccctgcacaattaagctattctagcatgttatcattttgtaactcctatggtcacaaacaaactaggcgcattcaaatgaaattcaagaaaatagataaatgaattttatagaacagaattagagatactagactgcctnctaaaagctcttctttaacatcttgagccggacatgggatgaaatgtgatngatcatgggcctancacttngtcatacctgccccta

SEQ ID NO: 1035 - DNA, 197 bp, Glycine max
  unsure (1)..(197): unsure at all n locations
gagaaggttgaggatggagaatngcactaagcaatcactacacatggctccaaactcgtgggtggaggacgaatgaacgaaaacgcaattcatggngctacgtaatangattgagaatggagaattgcactaagcaatcactacggacgactccaaactcgtgggtcaaggacgcatgaacgaaaacgcaattcatg

SEQ ID NO: 1036 - DNA, 520 bp, Glycine max
  unsure (1)..(520): unsure at all n locations
caatgcggncgaaggatctagttccgccccggagtacgacagtcaccgctatatgagcgtcgtacagcatcagcgtntccaatccatcattggatggtcagttctccgagagcgacgcgtncagctcagggaggacgagtatactgatttccaggaggaaatatggcgccggcggtgggcaccactggttactcccatggccaagtttgatccagagatagtccttgtagtttacgccaatgctcggccaacagaggaaggcgtgcgtgacatgagatcctcngntaggggtcagtggatcccgttcgatgccgacgctatcagccagctcctgggatatccgatggtattggaagaaggccaggaatgtgagtatgcgcagaggaggaaccggtctgatgggttcgatgaggaggcccatcgccagctgctatgtatactcgggcangatnttgcctngactgctgcangaaagcgagtgcgaatcatgcgcacaacatgaccaccctgcccanatatg

SEQ ID NO: 1037 - DNA, 532 bp, Glycine max
  unsure (1)..(532): unsure at all n locations
ggtctcagcgtctatgcgagacggagaccattatgctagctatcatcgccaagtaccaagaagagttatgtctagccgcgngccacgagcatatgattgcagacgaatatgcccaagtatccgcgggaaaagaggctagaggaanggtgatcgactctttacaccangaggcaaccatgtggatggatcggttcgctctcaccttgaacgagagtcaagaacttccccgattgttatccaatgccaaggcgatggcagacacctactctcgccacgaagagattcataggcttctcggctattgcagcatatgatagactcaatgcgccacatataaaaatcgtaggaacttgtatggctctcgaccttgctgatacacttcttttgaataaatggttggccctgttctatcaaaagctgtgaatcaatactctactttatttacagcatgatgttgctctcttgcacgaagcgaggtcgatacttctatgaccatggactggcccaatgccagagagaatattcggcttct

SEQ ID NO: 1038 - DNA, 573 bp, Glycine max
  unsure (1)..(573): unsure at all n locations
catgattnccattgataccgcgatcctctgagtcacctgaggatgcagcttgagccaaatcctgctactatnaccttgcccagtgtggaatgcaatcttaccctcggagcaaaaagaaaagaaggaanattttcaatcaagagggaagcaaaaagaagggagagaaggaaaatntccaatcaaaggaacgaaaattccttataaagagtgggagaaagcanaaagaaaagaaagaaaattcccaatcaaagaatgggagaaagaaaaaaaagagaagtataaaagaagaaggctcaagggtcaaagaaaccagaagaaatgtgcagagaggtctttagaccggacaatatctgaacaatacagaaatgtcaccanatgaacaaaannaagganaggagaccatgacctataatggtcttcttccttttattgcaaccagaatcagtgcgctagcgactttntcgcctcgactanacannaataganaggaagagccacccaaaatcaaagccaaaacacacatagccganaacccacaaagaaccattctangggagtctattgtcatgatcn

SEQ ID NO: 1039 - DNA, 592 bp, Glycine max
  unsure (1)..(592): unsure at all n locations
agatatanacacanatganagctatgatggaggctatgatagagaacgtatccnanagcatagtanaacaacttcagctggtgataccgtcaaaacaaccaattctctcatgtgaagaatatggaggcaaccaccatgctctgtactatatggaggaagtagccaaggaaaccaaattcatgagagaatgcactacannagtagaagaaatnngtatcaaccttagcatcacatcttactccaacctcgagaacaccgtgaanggtaataaatttttaaaagatcaagtaanagagttagcagtgcanaaaaaagaaattgctcacaagggtgactgtaatatcgtaacaacaagaagcatgttagcaactaaagagccagtaagaaaagacatggaggtaaatgatggagtgaaggaataagacatannagaggacgacatgatagttgaagaaatagcatgagagccaatttaagacaagaggcaactaacacgagaagctaaacaagcattacgtgtgagaagtngatctcacanaccacaaagcangacangagcggcgattatgaaggctattaactgatcaacgan

SEQ ID NO: 1040 - DNA, 188 bp, Glycine max
tctgtatggtgatctgtagaagaacatagaccacagactcttgcaacaggtgcagatttctgattcaaggcaagatgagttactatggtgaccaaggcatcaagttttcccttcaagcttttattttcagtagatgaagatgaatccgtggacacctcatggactcctctaaggataataacatcatt

SEQ ID NO: 1041 - DNA, 637 bp, Glycine max
  unsure (1)..(637): unsure at all n locations
atgtcgttgtggccttgngantactcatgcttgagcccacagtctaactcaccatataccttgacccagtgtgagaatgtacatctttactctctgaagcagacataaagagaacgagaattttcaatcaaagagaaagcaaatataataaagagagactgagaatctccaatcaaaggatataagagagganaggaagatcccaatcttagagtgcgagaaagcgacatgaaaagatagataattcctaaccaaagagtgagaganagtataaggaaggaaagagagctcctgatcaatgatcgagagataacagaagaaatgtgcatgataggtctctggaccatacaatatctgaacattacagaattgtcaccaattgaacacatagatggaaaggaaaccacgacctatagtggtcttctcctttaataccgaaccaaatcctttgntcagtgactgttcgcctcgactatacaatacagaaaggataaggcgctaaaaaatagaaaggttaaatgcacaaacctacataagagccattcctagggatgtctatgatcatgtcacgctgtattttcgtttataggaatatttgcaagcatgtctgcatattatggtccgaatcgatgaaccn

SEQ ID NO: 1042 - DNA, 231 bp, Glycine max
  unsure (1)..(231): unsure at all n locations
tagactaacttanactaagctntgtccttatatgcctcttgttggactagactcagcttatatagcttacaaaantttagactaatttagcataagctntgtcctcagatcccttcttgtggactagacttagaccaaacagaattattgtaacaacatatntaataccaaaacttaatccgcagatccctcatttaagactaagtttcaatccgggttcattcaagttct

SEQ ID NO: 1043 - DNA, 383 bp, Glycine max
  unsure (1)..(383): unsure at all n locations
gtaccgataatgtgtctaccatcacgattatcgtctccctttntgcacatgttctgtagttgcatcctatccggaaccatatcagaatagtactgatactgcctaacgaaggcaaccattangtccttccaagtatggactcgggaaggttccaagttagtgtaccaggtaacagctaccccagtaagattntcttggaaggaatgtatcagcagttcctcatctgttgcgcatgcncncatcttccgataatacatctttagatggttgttgggcaagtagtccncttgtacttgtcaaagtccatcaccttgaacttgagaggggtgatgatattgngtattgngaacaactcttctaggttagcanaggcataatcttca

SEQ ID NO: 1044 - DNA, 236 bp, Glycine max
  unsure (1)..(236): unsure at all n locations
cttatacttatcccaagtttcagaatntctacacctagaccactccttgttacanctcctttttactctaactntgctctgaacattntcattccaccaccacgattctttacccctaggtccaaaacctctagattcacccaacgtctctttagccactntaataatctcttgggacatcttgttccacatatcattngcacttccttgtgattgccacaccatccctnccatat

SEQ ID NO: 1045 - DNA, 275 bp, Glycine max
  unsure (1)..(275): unsure at all n locations
gagtgtcataagaatatatctatgtttatgagtattagtntgtgtntctnntgaaatgttattaatcaaacatagtttgaanattgatatgagaattggtagtcatggacaaacaggtgtcaacagtctnggcatacgacacagagcttctcanttttttttgctntcctatgatgggtgaaacaagttgagagggatctaattaaatagtttcatgtcaagagcaggagaagcttcaggaccatattctattgcanantacaattaacaattaa

SEQ ID NO: 1046 - DNA, 457 bp, Glycine max
tatgctaccgcatcttaagtcgacgcggctcagctatacttcaaactgagtagaaccacttttatttgcaagtcggtgttcatgctttcttgtctatcttcttgtgctggagttcttgtttggataatacattgattcctaactatgtttttcaacagaaagcctcactacataaccttgatttgagagaaactgattctttagtcattgggtaacatgtgatacagtgatttgagacgcatctgttgatcaccaatctgaactttgtgataaactttgtgggtgttgtccgcgtaaaagccgggaatagtggggaaagaatatgactcacatgcaatctctcctgtgtaacatcatccttattttatttaaaggtgcttaaaatctatcttgcaattgagcatgcttcctttttataatcaccgaagttccacataattacaggatcctaaatgcg

SEQ ID NO: 1047 - DNA, 372 bp, Glycine max
  unsure (1)..(372): unsure at all n locations
cactgttgactcccaactggctcaatgcattcttctgngaacttagtacctggtctctcacaattaccagcttccaccaccatttcttctacaaattccttagaatcaaaaggctaatcagctctatattaaattattaacacacgtttaactattttggacaacatagccttaaagaatatccaatcacattaaaatgaaaagtgttgaatgtttctatatgtcatctnttcattaattagtatacttacgaatgtgcataagtattaatttttcattctattgaaatatactttgttttntatttgtaacattttaagaggattaatagaaaaaccaaatatatatgattattctattgaaatatagatg

SEQ ID NO: 1048 - DNA, 178 bp, Glycine max
  unsure (1)..(178): unsure at all n locations
gttgagcctagtcttanatgaaggatctgcggatgaagcttantttaagttagtctaaacctatgagggctgtctaaattaagcctagtccaacaagagggatctgaggatgaagcttggattgattcagcctaactagggatcgaggtttagtagtntaggctacaacatagaacac

SEQ ID NO: 1049 - DNA, 219 bp, Glycine max
  unsure (1)..(219): unsure at all n locations
cttctcgtccctggaatacgcacccatcttgcgacaatacanttttaggtgattcttaggacaagtcgtccctttgtacctatcgaagttaggtactttgaacttcggagggatgacgacgtctggtactatgcatatgtcggtcatgtctgtgaacggataatcaccgaaccctntaataaccctcaatctttcttaatgagatcgagtgtccctttc

SEQ ID NO: 1050 - DNA, 512 bp, Glycine max
  unsure (1)..(512): unsure at all n locations
gatatatcacgagacttaatcagacattcgagtaaaaaggtattcggtcgtagaatntgctcagagcttccagactaaattaccagcgtctcgatatattacaggactcaatcagacatccgagtaaaacagtattgtcgtttgaattcgctcagagcatcaagattctatttcgagcgtctcgatatattacgggactcaatcagacatcagagtaataagttatggtccgttgaatntgctacgaccatcaacattcaaatntgagcatctcgatatattacgggactcaatcatacatcccgagtaaaaggtataggcttttgaatttgctcagagcgtcagcgatcaattgttgagcatctcgatatattacgagtctcaatcagacatccccagtaaaagtatttgcgntcgaatttgctagagcatcaacatcattccgagcggtcgattatacggactcatcaatatcgagtaaaagtatgcgttgaattgtcgactcacattan

SEQ ID NO: 1051 - DNA, 647 bp, Glycine max
  unsure (1)..(647): unsure at all n locations
tatgtgacgtgatgtacactgtagantactcaagcttgagcacnnatcctaactcaccatatacctngacccagggtgagaatgtcaattctaccctcgtagcaaaaaanagagaatgaacatttccaatcaaagagaatgcgaaatactaaaagagagatggataatctccaatcaaaggaaataagagaggataggatattccctatcaaagagtgggagaaagcgataagataagatagaagattcctaaccaaagagtgagagaatgtaataggaatgaaagaaagctcctgatcaatgatctagagataacagaagaaatgtgcacaatggtctgtggaccagacaatatctgaccatacacaattgcaccaaatgaacaataaaaggaaaggaaccacgacctggatggtctctccctttattacgatccaaatcctttgcgtcngtgacttttctcgctgactacacaaatacagatattgcaattggcctatatataaagaatatgcataagctcataaaccaccataagaactattcctatggagtcctattgatcatgatacgcatgtaatctatgatccatcggaataatctgcaacgcaagcgtcaactctcttntgtgngaantaagttacacg

SEQ ID NO: 1052 - DNA, 290 bp, Glycine max
ggattctgtcatcgtgtaccagagcttttgccatcaccatgaaatggaataataaggttacctaggcttaattgcttggtaaataacttaaagcagtgacctataagatagggccttgacttgtgattttaatgagacatgcggcctctgtttaagatctgatgagcattctgaaacagctcatggaccatctggcaacttcatcagtatgggtgacataatctatttcgggtaggtgtagtaattgcctacttcttcatttagagcccaaggggtaaattcttcatcaa

SEQ ID NO: 1053 - DNA, 619 bp, Glycine max
  unsure (1)..(619): unsure at all n locations
atgaccccgattgngngccngttgttangtgacactatagacccctcaagctntgaccanactccagcagcagttgtttccttagagactngtctcatcacctgtctcncaagatgagaataattgcactgtgtgccttctgcagtagtgctttcatatccccatcagccatcatcttttcaagtttggcttctccatcaagtgcttccaccaggccctgctgaacaagaagagctctcatcttcaatcgccatgacccaaaatcagtntgccctgtgaatttatcaaccttatatttggccgagcccatcgaactcaatatcgctccacgctcaccgcaccactnttgtagggccaagatcatattttaattcacaaaagactgatgttcttgtatgaacaagaataagcagaatgcaggatanaggatgaacactatgctcacaacagccactttagtcaatctctgtagaatttctaagtacaaactctctacacatatgcttcaagaagaaaatagaacactttcagcctactacgcaccacttaaactattactgtactatatagcgatacaataccaaaatccagtggaagacaaagactactatgtgtatag

SEQ ID NO: 1054 - DNA, 440 bp, Glycine max
  unsure (1)..(440): unsure at all n locations
gtaacaagcttagaactataaacttggccttctcttannatgctttgggcttggcgaccacgatcaacanagtactttcggcacctactatatgtngacttgaccaacgcctgtattggaatgctgcgacaatctttcaacaccttaatgacacattctgataggtggttgcatgtgccatatcgcgtcagatgatcgaagcctgctccattttctttgaatgcgacaatccatcttgcttggtggactcagtgacaaatnttctagtttgacaacactgctgcagaggacctgataaattgtatatcaaagtgtcgtaactcnactcaataaataatgataaatcacctacccattctgacatctctttgttccgtgtaattgcatgaatgtgcttggtgaccatcaatatacggngagtgcacaaagtcgtacacgcg

SEQ ID NO: 1055 - DNA, 326 bp, Glycine max
  unsure (1)..(326): unsure at all n locations
gtattctaaatctgcaccttctgctgctacatcgtccttttctctttnnttctgttttgaatcctttntccctcttattatattcacttttatntctgtatattcggttatggtgtgcatatggaatgtctactgccggtgtgtgctgaagccatgcgattcctatgattttctttttattattcttcatnnttgtgtatgttattaatattaacatngttntgntattatatctntacgtatgtagaaactatcattaaaggaaatagttacaaaaactttaaataaaatattggtgaaagtttagtgaagtaaaattctaaaat

SEQ ID NO: 1056 - DNA, 415 bp, Glycine max
  unsure (1)..(415): unsure at all n locations
ttgcggatttggtcttcgccagtgaaaggatcgatgtatgttcgataagaggcannattgatcatcctactangacgactgagannaactgggcaaatgaagagggtgagagagacggagaaacccatgctgtgactgccattcctatacggccaagtttcccaccaacccaacaatgtcattactcagccaataacaaacctcctccttacccaccgcccagttatccacaaaggccatccctaaatcaaccacaaagcctgtctaccgcacttccaatgacgaagaccacctttagcacaaacaananaaaacaccaacaaaaaggaagtttgcagcanaaagcctgtagggttcaccccannattccgtgtcatatgctaaacttgatcccctatccactcgataattcaat

SEQ ID NO: 1057 - DNA, 588 bp, Glycine max
  unsure (1)..(588): unsure at all n locations
ttactccaacgatgangcgcagctagtangcgcactatgantactcagctacttatgcatgcacattcatggtggtgaagctccatcttacatggctcatgctctaatggatggtgcctgacctctcctctaatactatgccttctgatgcatatacatggtggagaatcaccatcgaaagacctcaatgaatctcatagatacagcctccatataagctccacaagcgagcttccatcacgtggtatgaaagcacactagcttcaagcaggtgctccttagacctctattaatactatgctttaccttctcttccattggtgattcatcatgtttctccattgtatctctcacatgtcttgtgctacacgctttgacataatctttagagttccaccaattaacctgctatagaactagacttgatntctatggtcaaattcttgtcttatcttgatatgaatggtgagttaggtccttcatttgcttgattcttgaaccgaactatngagctcattgagttgaggccagacgtctatcaggatccttgctctgagagatgcaaaatgaaagattaagagaacccct

SEQ ID NO: 1058 - DNA, 598 bp, Glycine max
  unsure (1)..(598): unsure at all n locations
tgagccanaatcctgactcaccatagaccttgacccagagtgataatgtcaattcttacnctcggaagcataataaaggcgagagggaanattttcaatcaaagaggaagcataagacgagagaaggacaatctccaatcatatgaatataagagaggaaagggaattccaactcatgagtgggagaacgcattacgaatagaaagaatattcccaatcattgaatgggagatagaataaagagaagaatacagggaagaaagttcccgatcaatatataataatatgcagaaacgtcttttggactcgacatatatttgaacaatacatgaattgtcatccaatgaataataagaaggagagggaaccatgacctataatggtcttcncctttagttgcaggcaaaatcttgtgcgctagcaacctttttcgtcccgcactagaccagaacagaaaatgaataagccatgaaaatcaaatgcctaaacacactcagtctgatataaaaccaccataagaacccattctcagggaagtctattgatccatgatacgcatgtatttttgattgtatgaataattgcaagtcagtatgat

SEQ ID NO: 1059 - DNA, 283 bp, Glycine max
  unsure (1)..(283): unsure at all n locations
tcttgtacttcatctcatgccataaagtcagaaatgcacaaatagattcagaaggactttcatatgcttgtagtgaggcttggctacaagaattattggtttttctaggatcaaagggttaaattctaagataggatgaatcctagactcatccaatttatttcttttcaatttatgtagctcactcacttgccttgcatttggccttattacaaccacacacgctctctnntattngcatttactcttttttattnnttattttttaacacataacttattt

SEQ ID NO: 1060 - DNA, 117 bp, Glycine max
gagctggaccagcacttcgaacgatgcgaggggatctcttagatccaaccggcttcgcgaaatgtcatgtaataaccttggactcagcgggggttcccaaaaaaatttgaacaatcc

SEQ ID NO: 1061 - DNA, 583 bp, Glycine max
  unsure (1)..(583): unsure at all n locations
gttttccttgatgtcgttgangccgcttgantctctgcatgcacctcactcgtgtacgtagctcagctcacgctaacgagcacgattagcttctataggggcgtaaacctcatttgtgactctcaaagacggacacagcgcgacatggatctatgtctcacctcactgtcactcataangacctacaagacngtgtttcacgtgctgctatgtatagactaagtggcttccttgtcaactagcgtgagaaaccttgctagataacataatgtgacagactctcttggaaactgatcttagctacaacacgcgtgaatgttccgctcacttcttgagacctcacttggacatactgacatgtcgagctaactcacagcctttctatatcaagcacgactcgtacatagaccctagtttacctccccctgttggagcaagcgccgctttgacctatactgccgtctaccagaccgactgagaactctagatgaccgcaacatgctaaaccttatataatggcagatcatgctacgagactatatcatgacccaagaatgtgatctctaccatgctagaatctacg

SEQ ID NO: 1062 - DNA, 443 bp, Glycine max
  unsure (1)..(443): unsure at all n locations
gatgaatganagtcttatgagacacaattcanagttcaacttctctccctttntcttccttcaatttcgtgctccccctctctctntctctccctctgtcttttcctccattgaagcatcctctccaagcttcttatccaaggctcatcttggtggtgaagctccttcttccatggcttattccctagtggatggcgtctcctctaacctcttctcctttgtcttccgctgcatctccatgggggaaaatcaccattaaaggacctcattcaagctcaaagatccaacctccatagaagcccccacaagcaagcttccatcaagtggtaatcagagcacaagagcttcanatangtgctccttaaacctccatttaattttaacttaccttctcttccattgggtgttcttcattnntctccatgtatctcctcacatgtcta

SEQ ID NO: 1063 - DNA, 286 bp, Glycine max
  unsure (1)..(286): unsure at all n locations
tggtggtcatgaagtgtntaataaaattattaaggttcanacaaatcccagagacaacattggccatggtttcaaaggaaaaaatgttttgcatgatgaagaagttactatttgttattcttgtggaaaggtgggtcatggaactcataagtgcaaggacctccctananagggcaacccatcatagggttcgtccaatgcttaccaacacccataagctaacatggaanaagggacccataagattcggtacttaagactaatataattcttggtgtggatctca

SEQ ID NO: 1064 - DNA, 366 bp, Glycine max
  unsure (1)..(366): unsure at all n locations
gcgtctcgatataatacgggactcaatcagacatccgagtaanaagttatggtcgttggaatagcctctgaggttcaacattcaatttcgagcgtctcaatatatttcgggactcaatcagacatccgagtaaaaagttattgtcgtttcaattggctcagaggttcaacattncaatttgagcgtcccgatatattacgtcactgaatcggacatccgagtaaaaagttattgtcgtttggaattgctcaaatcttaaacatttcaattcgagtgtctcgacatattacgggactcaatcaaacatacgagaaaaaagttatggtcgtntgaatttgctctcagcttcaacattcaatttcgagt

SEQ ID NO: 1065 - DNA, 290 bp, Glycine max
  unsure (1)..(290): unsure at all n locations
ccgagctcgatggtggtccgagcctgtgatggtactcggcgggaagtaatgtgggaaatcgacattcccattcagataggcccncacactcgcaatgtggtgtttcaagtaagggatataaatcccgcctatagctgcctcttgtgaagaccttggattcatgccctgngagtggtcccttctacgcttcaccacaaattgaagttcgcagtgggtggacttatagtgattgtgtcgggtgaagaggatatgttagtgagctgcccttccttcgcaccgtacgtataaac

SEQ ID NO: 1066 - DNA, 359 bp, Glycine max
  unsure (1)..(359): unsure at all n locations
ctatgaatctccggtagtatcctgctaagcccataanactcttaatctcaaaaacaaacttagcactctcccactcaagaacagcttctatgttagatggatctacagctatacccncttgagatatcacatgtcctaggaaactaactttctctaacgaanactcacacttggacaacttagcatagaagtgtcagtccttaagagtatgcaacacaatcctcaaatggtcttcatgctcctctctagtcttagagtataccanaatatcatctatgaatactaccacanaactatcaaggtaagggtggaaaactctattcatgtagtccataaacacttctggagcattagtcaca

SEQ ID NO: 1067 - DNA, 425 bp, Glycine max
  unsure (1)..(425): unsure at all n locations
ctctntgttcttcttcttcttctntgtgccanaagctntccaagagttttctggttntctataccttganaacttgtgctattcattcttttcatcccttctcccttttgccaaaaagaattcgccaagggactaaccgcctgaattcttttgtgtctctctcctcccttttccaaaagaacaaaggactaaccgcctgaattcttttgtgtctcccttctcccttgtcaaataattcaaaatgacacagtctgagaattcttttgagtattccctttcccttatacaaaagaattcaaaggactataccgcctgagaattctttttgtatccccattcacaaagatccaaagggttaaccgcttgagatctntgcttaacacattagagggacatcctttgtggacaagtagagggacatctac

SEQ ID NO: 1068 - DNA, 247 bp, Glycine max
  unsure (1)..(247): unsure at all n locations
acatacaagtgagctnganacanatcttctacacttggagcttgtaacaanatctttacagnntaatataatatttttaattgaagttatatntgatatctntaaggccctgctcaagagctgntngaanaacactaagtgtattcaaagttgatcttccaagttcactacaagctggccttagtggccagatgtcacaacctacccttcgacgggagggcgatgcgtgactcgcggggtgcgtgtt

SEQ ID NO: 1069 - DNA, 462 bp, Glycine max
  unsure (1)..(462): unsure at all n locations
cgtcgtgcctcacatctcatctcatagatctctctaactcatgacaggcatacatatgcnccgcgcgctcgtactgtctcggctctagcctcctcaccagagcctcgaagccgtggaaggcgccactgataggaagatacaggagtgatgacacatcatccagcatgatcgtcaactctcctatcgcagatgaagtcagcactgatgggtcacgtggcccaccagggaatccctcatcagcatgtgacccctcagcaccatcacgacctaagtcctctgcaacagtgcatctattgtcgcaagcatctgaggtgcatcttcagtcatatgaggaacatcctcagccatatgagggacatcctcactcatctgaggaacatcatccgtcatatgaagaacatcctcagtcacctgaggaacaccctcatcaaccgcaacatgtacccgtngcctatgggctga

SEQ ID NO: 1070 - DNA, 623 bp, Glycine max
  unsure (1)..(623): unsure at all n locations
atatcgtgaccgcgatctctagagtcacctgcggctgcagctctacggtgcaccgagaccttaagtcaccgcagcttgcaactgtcacctaatgcataagtcttattggtatcacctagctatggatgtaatttgctatctctccacacccaatttggccaagttgtaaactgtgaccaaagaagtaacaacaatttcgattcttcattaccaggcaaataaactattggtttcttcgatagaccaanatcattttatatgttggataaaactgttggcacaaagctgattctctccagcacgatgaacaacaataaggaaaacaaactgtctcaccaagccactaggagagaagccaatcattgccaagcaagtctgcatggatgtttcatgctcaatntcactaccactattgacaaaaatccatccatgcnntatgttatataaaccncactctntttactcctaggagatcgggtgtgtctgttctatgtatcaatntctttctcaccttcatcactntctagctntgaaaatgggcaagataggatcaccaacagttgcaataccccntcacaccatcacatncttcanggtgacatgtntctcaccctaggagccgn

SEQ ID NO: 1071 - DNA, 246 bp, Glycine max
  unsure (1)..(246): unsure at all n locations
atagaacacaagaacactcttaattagagagatatctttatatgcatcaactctnttattagaaagacccaacgcttttaaaccactggtgtcactnttaattgcttgcgtttactcattttctaattaggatatatcatacttttattttcaatcacaattattatttttcgtcaacaaaatgcctgattattgaacaaagctttgccgaataaaccaagtccttgtgctcgatactcggataat

SEQ ID NO: 1072 - DNA, 192 bp, Glycine max
tcaagttacaaataagtcagaatttgaatggtaacattattattggagaattgtcatattcaaatcgcaccatacaaattaatgctatagtcatatccggattgtcaacttacaaataacactatagtcatatccgaattgcacgagttcagataactcaagatatgaatcgaagttatagattagtgatat

SEQ ID NO: 1073 - DNA, 352 bp, Glycine max
  unsure (1)..(352): unsure at all n locations
gctgtctacttttatcagggatataataactacatgacagaattgtaattaactttgatttaacttaaagttacattttaattattctcgagttttttttttttcctttttacctattttaaaaaatattgaactcaacattgaatacgtagcttaatctcttctatggtatttaatactgtttgggtagggaagctttcagttttaaaaaaatattntatttttcttcctcttcaaattcttttatgtaaaagttggatgtggactagatacatatatcgattcatgtaaccttctttatttatttacttcagtgcattattactgtgttttcaatntttacactttatat

SEQ ID NO: 1074 - DNA, 652 bp, Glycine max
  unsure (1)..(652): unsure at all n locations
ttcccattctatgcgccgtatgngcgccgtctatatgtacactatagactctcaagctcagcgtcctatatcgatatgctgaatatataggaagacatgtcacgcaatatcctaactccacatggtcaacaaatagaaagccacaggcgtatctatctgatcgcgcaacgaggttaacaccgacaattgcaaccttcatataaactaatggcataacacaatcaatacatgatatcttgcacnctataaagacacaaccaattgcacaatgtgctcaacacatgataatgcctcttatacacatgataaaagttcctgtccagcctctgctattctgacaaaagagaagagtgctacataccgctaaaaaantctatnatntgttcatttctaagtacaacggatctttacacattagtgctgaatgggcagagtattataagagacgacacatagggtacatatcttagatacatatactagaagtaatactctatacaaatgcgcgccacataacagagaagacgtgttacgccagctgtgcataatatgtgaagctatcattaacacgttcgctcacacatgtctgatagatgacatgcactatgtagcagctcaatatatagcaagtctgctgatgtagtgagagaag

SEQ ID NO: 1075 - DNA, 338 bp, Glycine max
  unsure (1)..(338): unsure at all n locations
gccacctggagacactcgtcgttaggagtgtcatggtaatcaaagaattgagaaatttctaatatccaggacatggagttagaaccattgaaatggggaacctccagcttcacaagaggtggagtcttccgcaaagaatggatgagggaggcagtntcgatggagcactactacaatntattgatttaacatcgcaagcttaacatcngtttctntgatatattgatgttaagataagcgcgcaataaatcgatgttaacaaagatgcggtgacattttcgtaaataagttgatttaattaaccatcggtttaagacaatgatgttaacatcatatag

SEQ ID NO: 1076 - DNA, 635 bp, Glycine max
  unsure (1)..(635): unsure at all n locations
atgcccgtattgacgcagttgtangcgcactatgantctcaagctcgtactcttatgtgtctttgatattgctacacgtagagtatgattatgacattcatactagttttaagtatagtatcttataagaatagcggcacgaaagtagagctcatatcaccttcgcctatacctccagaggagaataaagaagaatatataacggctgcacgacgagaacaggagtatgaccataattcccccttatgtggcttattgtctccattgaattccagattagacattacattctcatattgcttctggtctgtgtataatcaattctcgttgagagatttaagtatatataataatattactatttgatagcagtatcgtagatataaatgtcgattctaatagtatataagaatatcacttgatagtagcaatactgatatacaagattagagtgctattaacctanatgctaatagcttgagagtatccaacacttaacatcggtgcttacgtcaccngcgatcgtaaaacacattctntacatctgtcacgactactacacgtgcatcatacgtagtaattctacatacgtggcaggatacacncttgtagaaacatagtattctcgactgctt

SEQ ID NO: 1077 - DNA, 348 bp, Glycine max
  unsure (1)..(348): unsure at all n locations
agcttagttatgagaggggtgtgtgtatctaagctctatcttctcaaggaagttntctcanagaagcttctcaaggaagttntctcaagaaagcttctcaaggaagctacctagtctataaatagaagcatgtgtaacacttgttgtaactntgatgaatganagtcttatgagacacacttcanagntctacttctccccctcttttattccttcaatttcgtgctcccccctctctctttctctccctctttcttttcctccatngaagcatnctttcaagctttctatncanggctcatcttggtggtgaagctccttcttccatggcttattccctagtggatg

SEQ ID NO: 1078 - DNA, 266 bp, Glycine max
  unsure (1)..(266): unsure at all n locations
tggaagctgtcgagaaantcanatggtcctatcttctcanacggatgtttgtattggacacataatatatcgagacgctatgatattgaacgaattggaacctctcgagaaaaattcaattggtcataacgtttcacactttatgttcgattcgggcgcattatatatcgtgacgttcgaaattgaacaacggaacctcttgagatanttaaatggtcataactattcacacgaatgtccgattcagggacttaatatatcgagac

SEQ ID NO: 1079 - DNA, 468 bp, Glycine max
  unsure (1)..(468): unsure at all n locations
cttgcttcgtgaattgtcagagtnacctctcttacaaatgtngtttagatggatactccggcagatctaattgattgaagctgcatgaagaacatccgtttgttatatttcaatacacgactatatgaccatcaaagataaagatagcctatagcttacagataatcacaactgaacgataataggtcctatagggacatttgttacggcgaaaaagacataccaagtatgagcagaaggcacgtgatcatgacttncatatgctttgtgtatctgacactgctgggagcctgaattgcttgagagcgctaaagccttcaaggcagctgaacattatagaaaaatgtatacagcttgagttgcaaaatgggtcattggtcaacttgatatatcaacttaactaactaatgctattagagccatagattggtctatataaccgaacattgacaacccctaagacaaagt

SEQ ID NO: 1080 - DNA, 329 bp, Glycine max
  unsure (1)..(329): unsure at all n locations
tgataagcatttgcttcaagaataattcaagatggcttcaacanacaaagccttggttcaagattcactanagaccaagccttgccttanaacanagtgctntcaagacatgcaaggctctggtaatcgattaccaggaagtgtaatcgattacccgaagacaggggtgagaaatagctgggtgaaaatgttntgatatttgaatttcaacatgtaatcgattaccatatgtctgtaatcgattaccagcaacgaaactttggaaattcanatcanaagtcataacccttcaatataactgtgaatcgttacacnacattgtatcgata

SEQ ID NO: 1081 - DNA, 521 bp, Glycine max
  unsure (1)..(521): unsure at all n locations
caatggagtcnttgtctttacagactagnntggacatctgtgagtatgtaaatagcagtgtagactgcttcagcccagaatgtgttaggtagtcccttntccttgagcatcgatctagccatctccataactgtgcgaatctttctctcggacacnttcattttgtgaggagaatatgcgactgtnagatgtctctcaatgccttcatccttacaaaaactttcaaactcgcgagaggtgtactctttgccgctatcacttcttagtactgntatccattttccactttgatttcagcaagggccttgactttttgaatctccaaagactctgatttttctttagaaatatatcatgccatctagaaagtataatgaaagatgagtcctgtgtccctgtatgggtctcatggcacaacgtcgatggtcactcaatgacttccgttcctgctcactgtgagaagaattgggtgtacagagacatctcacactatggttctttctggaaattatatgttttct

SEQ ID NO: 1082 - DNA, 94 bp, Glycine max
  unsure (1)..(94): unsure at all n locations
cttgctagtcgaaattcagtgctctcagagtgagttcatgaccaacttgtacaccattccctnacccacagagacggacgaaaaggatattttt

SEQ ID NO: 1083 - DNA, 605 bp, Glycine max
  unsure (1)..(605): unsure at all n locations
ttctcgtganggcactgttantctcaagctcctactggtagtgtcgcacaatgtatangctaccacatgctcgttgccttgttcgtactcgatgctanagtccagtcccatcagctgttcaagtgcgcaattctgtatgaacgttggtggatgcagtctatcaagcgcttgaccgcctggtgagcagatatgacgaataagcagttcacaacaaaggtatgaggacatttctagactgcaaacaagacagtataaaactcctattcatatgtatacaatacatggatgatggcgccataagcttgctgatatacactattggatgtacctcgcttgcaatcagactagccgcgaagccatattcatacgcactgtgtctccatagtgaatggatgaccataatcaagaacngtggtctaggagctatatcacgctacttcttgtagaagatgccgtgtggactccatccactcatgtcgcatcttgtacataactgtgcaaggtgactatcttcctattgcaacgatatctgaatgtctataagcaaggagccttgactttacagagtggctagcagtgcatggctgatcatacatcgatgaccg

SEQ ID NO: 1084 - DNA, 395 bp, Glycine max
  unsure (1)..(395): unsure at all n locations
atctttactngaatntgaaacatactcacaatagccatgtntgtgtntattggagtggttgtatccattctctccttcatattcttccagattagccagagacacaagagagatgcacctattanccaatggccaatcgttggtatgctacctttggttctacaaaatctgtccaatatccacgattatgcaaccatagttttgaaacattanggaggtactctaatggttgaaggaccctggttcacaaacaccaactttagttttcaccagcatcctatgaatgtgcaccacatcacgagcccataatttgcaacaatggtaaggacccaatacaatgagatttngaagtttaggagatgggatcttaatgctgattcttatacatggaaaca

SEQ ID NO: 1085 - DNA, 374 bp, Glycine max
  unsure (1)..(374): unsure at all n locations
gcttataataatctcgtgccggatatgccgctntatgatattcgcatagcttatagaagtatattctttattctgtctttatttctacaattgattaaccaataaagttgacaaatatagatgtaataacttacatgcttatgcacattaatgttgttattatataatgtgtacttgttaaccaacgcgtgtgttttctaacgaatacaagattgtttgctgatcaattgcatatatgtctgtgcacagagaatatgagtggtctccgacatgttattgtaagttattatgaacctgtacacatgttcttggtatatatagaaagctgctttcacttaccaattattagatatgcaatctctacctacctacct

SEQ ID NO: 1086 - DNA, 360 bp, Glycine max
  unsure (1)..(360): unsure at all n locations
gccactctgattacttttcctcctctgngagcataattctaagggaagccattcttcctaaaacatctatcaactgtatgaatgtctttgccacagtaagtacatgaaaatcctgaattcgatgaggttgtgcttgctgcattgatcaagctactgtttcctatcatatcattgctattaatctatctttcttgttgaattgcataagaaaagactttagttatgccaggtaaaggatccatcatcaatacattggatctgacagtgttgtactgatcatttaatcccctaaggaattgcataactcgatcttgcttctttctttccataacactaacaagagcatcacatgtaccattt

SEQ ID NO: 1087 - DNA, 380 bp, Glycine max
  unsure (1)..(380): unsure at all n locations
atgcatcgtgacaatcaaatttcanattacaattcatttcccatgacttagccaacagaaatgactcanggttatcaattctaatgggattcanaattatcaattcaccgaatcattaaagtcctaatatgtcaattcattaaaatcatatcccttgagaatangatacgataatgggctactcgttctctnttatcctctntntttttcaatgatattcatgtgaactgtcaatattattgaatganacttaaagagacggataannaaaaaaaatactaatgaagatcaacnatgaagggcatctttgctacctcacataagctaaatttctctctttttgtgtattttactcatgtgcttccttccctgattcctac

SEQ ID NO: 1088 - DNA, 556 bp, Glycine max
  unsure (1)..(556): unsure at all n locations
ctctatcaattctctgatgagtcgtgngctgttagagcgagttgcaacatggatggcactgttctcanacagatcanactgcttgagcaagttctcctggtcgtccttcattattttcttgaagtcttcccatcgtttagccatggctgctttctgagccaatttcattttctcattaaacaatggagattgttccattctctctctttctctcccctctatgtcacagctcactctntagcactgaccatgtaagtccactcattctcatcatgcccatatatctatatgtgcacttggtaantatgttcactcgcttacaagagagtgggagtggatatatatcggaatggtatcatatagcatanatatgaagtgacaactctctcatcatgagaaataannattttaagctgatatgcgttatggaccatacaagtatatcgatgggcaaaattaaaaagtaataataataaataattattaanaattattttcgtntcattaatctcgacccttaatatatatatgattatattatagtctatttatatat

SEQ ID NO: 1089 - DNA, 359 bp, Glycine max
  unsure (1)..(359): unsure at all n locations
tattttaatggagagggttaccactactggaaaaccagaatgcannatttcattgaggcaatagaattaaacattggtgaagccatagaagttggaccttatgtacccaccatggtggctggaaatacaacaatagagaaacctagagaagagtggtttgaagaagaaagaagattagtgcagtacaatntaaaggctaaaaatatcattactttngccctangaatggatgaatattntagggtgtcanaattgtagagtgctanggatatgtaggacactctacaagttacacatgagggaacaactaatgtcaaaagatctaggataaatactctaactcatgagtatngaatatt

SEQ ID NO: 1090 - DNA, 418 bp, Glycine max
  unsure (1)..(418): unsure at all n locations
cctagtcctcttccacacatttcatcaaggactccatcctagtatgccctctgtaaactcctagatgaggagctataatgccatntaatagaactggatcagaatgtggaaataaaatagaatgtttattgacagaaacctctatctctgtatcaatgggtcacacacaactcacaagatcaaagatgagaaaatgaagatacaaatatagtgcagaataatagatccctaacccctctattccaatatttgagagacctgactctccctaacttctctctcaagctcatcaatcataactccttgatacccacttctctccatctccttgctatacatgatttctaactatangtgagtgataattttntcttgtatggtcaactaatacatatacttaaatgatagatggactgag

SEQ ID NO: 1091 - DNA, 381 bp, Glycine max
  unsure (1)..(381): unsure at all n locations
agacagataacgatnattttaattaaacctttcccttgaattagagctttctagaatactaataaggangattgtgaatactaataatgttgcttgtaatattcattaaatgaactaaggaaaaaattaatgatagaggatcggaatccatgaaaattgtcgttagaanagttntattatgtatgttctatgtctgttgttcagtctttatacgctgactttgttgtatctagtagtagntggttacaggagtctagggactctatggtactctttttctgtaaacttcttttatattaaaatctgcttagtgtgagagatactcaagcatctttgtgcctaaactgataacgtcaactattctgaatattcttaaactta

SEQ ID NO: 1092 - DNA, 563 bp, Glycine max
  unsure (1)..(563): unsure at all n locations
gagtcacctgaggctgcaagctngcanacccaggtctgctcttggaagtctcgccanaatttaggacagacgtatcgcttggtcgttcaccaaaaggctcgcanaacctaaggttcatccttggtgagtcctacatgtcgattcttcaaagccttngtaaccctaggtctgcccttggttagtctcttcaaaacccaggatagacaattccctggtcggttctccaaagggtttgaaaacacaaggtttgctcttggtgagtcttacaggttgtttcccccatagggctcacaaaacctaaggtctgcccttggtgagtcctatangtcatttctccaaaggactcgtgaagcccaaggtccgcccttagtgagtcctacangtagaatctncaaaggctcgtctaacccaaggtttatctntagtgagtctcttcanaacccaagatgaacaattccttggcgggtctccanagggctacaaacccaaagtccctcttggtgagtctacngctcgtaaacccaaaagtccncttgtgagtctacngctcgtcaacccaagtt

SEQ ID NO: 1093 - DNA, 600 bp, Glycine max
  unsure (1)..(600): unsure at all n locations
tatgctccgttgangtacagctgttangtgccactatactcacgtaagctggacatctattgtatatcatacaaacagctcgaggggctcacttgcacacattgtatcncgtccagaatacatcaattgaagcagtgagaaataatagatgcttgtgtggcaatgtcactgtctcgtagccttgcacaacatcgactgcgaagaaatctcatagccatatgacaaagaacgtctgaatatcagttatacctctaaggttggtcagtctaatgcttgcattatctgttcttcgagtctgtgatcatttacgccaaagttcacagaaataacacgaccagtctacagatgtactatctcacaggagtgcagacttattattaccaacgtggagtttggtgcgagatgacgtctaaatatagtgagcccagatatatgacgacaatatttatgggtgacggatgantgttacaagcatgtgctacgggaagcgcagtgcgagaactcttcttccaatggaaatgtcatcgaagcttacaacgaagcaagcttgacgatatcactctgacttgcaggtctgggttgtacattcatactatatgg

SEQ ID NO: 1094 - DNA, 508 bp, Glycine max
  unsure (1)..(508): unsure at all n locations
atganccccttgtaccgcgatcttaagcaccgcagctctgcttgttggacttatggaatgaggagaagaaatctctgaggagatgagagaagcttctgaatatgtgggctgagtgacgagagaagagctgctcttaggattaaaaaggctctttcctctctttctattattgtatttaagcaatgccacatgtctccatttgagtggagcacagaaggcccactttctctttgattgtgactcatactcaccacaaaagtgagaacattgaccttaaaacgcttaaatctgcctcggttgcgtgccggtctctggatcagatcctcgtgttctctgcatcgccgggccagtttcgaagaggcatatattatattatcgaacgctaaatataccccagcgtggtcagaggtggtttgtatatctagtccacgcaacgagatttaactaatataaaataccataccccatatgatttctctatagctaccggattgcccatatctacttt

SEQ ID NO: 1095 - DNA, 647 bp, Glycine max
  unsure (1)..(647): unsure at all n locations
gatgcccgtgatgtacagctgntangcgacactatagaatcactcaagctaccacatagtattaactcgatcccttgcacccgttgtgagctgaatgatatattcataatgatccctgaactcaaatgactatctacaaataccttgctcagatttaggagagaaaatggccagcgcattctaccccacatttgtgggagttaactgggactcaaagagaaacgtcaagcacatcatcacacacaacagataagttgtgttacaaaaatcaaagaaagtgtgtgttgatgatatagtgcgcactcacgttatagtgaaaggtgtgacatactgtgaatttctacccggaattttgagagcgatgtctctctgacgattatatatatatgacgtctattcatggcttatgcatatatgttctggatagaagtaggaatagtgtcggcaagatacgcgcattacgctatataaggaatataagtccataactgggaaacgtatgggtaagctctatataatcagtcaataatcatgcgnttgccgcgacttacatatagacataccacctctgaacacgctcngngtctattctgacatgtagaatatatatataattactctcgagactggctccatagacgcataat

SEQ ID NO: 1096 - DNA, 299 bp, Glycine max
  unsure (1)..(299): unsure at all n locations
acgagcatagaatcgcggatgagtatgctcaagtatatgccgaanaagaagctagaggaagggtgatcgactctttacaccaagaggcaaccatgtggatggatcggtttgctcttaccttgaatgggagtcaagaacttccccgattgtagcaaaggccaaggcgatggcagacacctactccacccncgaagagatcatgggcttctcngctatngtcagcatatgatagacttaatggcccacataattagaaatcgttaggaaacttgtatggtctctcagaccttgactggata

SEQ ID NO: 1097 - DNA, 345 bp, Glycine max
  unsure (1)..(345): unsure at all n locations
attcgagaatcacttgaaattagtgaaaaaaaatggttccatgaagaatatccaagccgagccgcttccgtaacgttttcgtaacgtttccgtgggtgatttcgcgaagattttcaaccgttcatcgacgttcttcattcgttcttcggtcttcaaccggtaagttcccgaaatcgaacttttcaattcattctatgtatccttagtggtcctcagttggtttctcgtgcttntattntcatttcatttactttgcgtaccccagtttggacgtgcttagtcatgtacttaagtcatttgtctcgcctaataaaaaataaaataaatntccaccgatcatttgag

SEQ ID NO: 1098 - DNA, 504 bp, Glycine max
  unsure (1)..(504): unsure at all n locations
acctatatgacactcttatgacagcttctacagatgaccagggcacacaatgtctagcggccacacgtctatatggtgaagagagccttacaatcagataagaggagcagcttgtgcattgaaacctaagttttgaatttgagagagaatattgagtagagagtgagtgtgagattctgagaagaggacgaggaatccctcttcttgtgtaagaactatcactctctgctcttaatctcacttaatggtaggagtgctttggaatggctggctacaacacctactaagagaggggtagtgacaactgaagttgtacctaaatctaattgttatgcttctgtgncaatgctacatcaatgcttatgttngattgcttntggccatcacctattgtgtggtagtagggggctntgcaatggaaatgtctattgccttatatcttgatgaacacgagtgatactagccttcatgaggatctatcgagtagtttgtntttatatgctn

SEQ ID NO: 1099 - DNA, 401 bp, Glycine max
  unsure (1)..(401): unsure at all n locations
ctttgtccttgaactacactcaacgctatntgcaccanaattattacaaatntggtgattctggtggttattagggttcatatggtcgtggtggttatcctaaccgcagtgttagatgcggtggtggtggctccagcagagggtcgtggtggtggtcagttgccaacttttagtatcanatttggcttatgtatggacactgccaattcttgcactataggtctgatatgagttntcagcctcatgaatcagtcactctctttgattctaccacacttcaaccaattccctactccactggttcaatcagagcttctaatacctggattaatcctaattctaaggttggtgttccagcatccaatcaacctagtgctctgatcacaaatttctcctctcat

SEQ ID NO: 1100 - DNA, 99 bp, Glycine max
  unsure (1)..(99): unsure at all n locations
atgcaagctntcgagaagatctaatggtcataactnttaacatcgatgttctattcaggcgcatatataatcgagacgctcgaaaataaacgacggaag

SEQ ID NO: 1101 - DNA, 558 bp, Glycine max
  unsure (1)..(558): unsure at all n locations
tgtgcaccttgatgccattgtcgccgtcganaactcagctatctttgtgtgctctgaatcgcatccggttaaatgtatgaccattgaactctttgagctctcgagagcaatacaacgtggtgaatattactccctgaatcggcctccgagcganaattatgaccattngaatttctctagagctntcggtgtttaatttcgagcgcctcgatatattatgcgcctgactcggacctccgagggaaaagtgatgaccattntaatttctggagagctgccggcgtacaattcgagcgtgtctatatattatgcgcctgaatgtgccttcgaggtatagctttgactacttgaattccgagagcttcttgctagattcagcgttccatatttatgcgcctgaatgtgcctccagtgaaagtatgacaattgatatctcagagctcctgtgtaattagacgttcttatggagacgtgttcacctcgtggtagtttaaattttattgggggagattgtgttcttcaacgttggatatatgctgatcaactctgtacaattag

SEQ ID NO: 1102 - DNA, 447 bp, Glycine max
  unsure (1)..(447): unsure at all n locations
agcttagtaaagctaagcactaacaatactcctctttggcgaattatgtctagaacatacttagacacttnctgagcaggtacgagcagatatgcaagtgggatcagcaactntcattatcagagtaatcaagcacagcggtatctgtagtggcgacagcaaaattctgcaggttgcaagtcgttgtcaggatgtcaagacatctcatgtgacatcagctntctgctccccctgtctccatgctgctactgctgtgaagcagttcactgcagcatcttctatcagctactatgcttctccaggatgcaagacatctcacgtgacatcagctnttngctaccnctggctccatgctcgtactgcatcttctatcagctactaagttcagtagcgtacatcagtcatcatcagcagcagtctccccctcacaatcatatacatacaact

SEQ ID NO: 1103 - DNA, 201 bp, Glycine max
  unsure (1)..(201): unsure at all n locations
cctatgcaagtagtttcttaataagaatcctaactgggctaatngcaagtcaacaattaaagtgtccttactgaatgaaatcatatcaggtattggntccagcctcaccttnntatattggcattgtgtcaatagtatccaagaatatgagactatntatntcatatgcatatgctntgtcttgaaaatgacaatgagtct

SEQ ID NO: 1104 - DNA, 181 bp, Glycine max
ctagttagacttattcttatatgtggctaatttaggcttgcctgacattttgaaagttaataattagtgaataaatatgtttagaatgtaataaatcagtaaattctgtatttgtctatttaatttttcttttgcattgagttcttaataacataataacttttgttttggtcatggacat

SEQ ID NO: 1105 - DNA, 51 bp, Glycine max
  unsure (1)..(51): unsure at all n locations
tagtattatatacgacaagnntagatntatatatatatatatatatatata

SEQ ID NO: 1106 - DNA, 220 bp, Glycine max
  unsure (1)..(220): unsure at all n locations
agactngcctcagcacacttgtcttcgagactgatgataattacactgtgtgccttctatgatatcttatccccatcagcaatcatcttttcaagtttggcttctgcatcaagtgcttccaccacgccctgctgaacaagaagagctctcatcttcaatcgccatagcccacaatcattgtgccctgagaatctatcaacctcttacttggccgagtcca

SEQ ID NO: 1107 - DNA, 281 bp, Glycine max
actcggatgactggatgagtcccgtcatatatcgagacgctcgaaattgaatgttgatgctctgagcaaattcagacgacaataactttctactcggatgtctgattgagtcccgtcacatatcgagatgctcgaaactgaatgttgaagctctcggccaattcaaacgacaacaacattttactcggatgtctgcttgagtcccagaacatatcgagacgctcgaaaatgaatgtggaagctctgagcccattcaggcgacaataactttttactcggat

SEQ ID NO: 1108 - DNA, 242 bp, Glycine max
attcgctcagagcatcaacattcaattatgagcgtctcgatatgtgacaggactcaatcagacatccgagttaatagttattgtcgtatgaattggctcagagcgtcaacattcgatttcgagcagtctagatatgtgacaggactcaatcatacatccgagtaaagagttattgacgttcgaattggctcagagcatcaacattcaatttcgagcgtctcgatatgtgacgggactcaatc

SEQ ID NO: 1109 - DNA, 345 bp, Glycine max
  unsure (1)..(345): unsure at all n locations
tattataatgtgtatattgttatttcaatgggtatcaaagctcgacttcttgtgttgagctcctgatagagcacaagaagaaagatggaagacgaaggacaagttgtgaacatgccaccattcttgaagggtgtaagatatgactattggaaacaaagaatggttgcattctntgagtcctgccttattaacctgttgtccttactcaaccaatacacgtttacaaatggatttgattagattgtgtttaattntnttctttgaaaatcgacccanaataatccgttaaaaatttattggattggtcagaagtttggcaaaccaaccaacttgcttacaccctta

SEQ ID NO: 1110 - DNA, 215 bp, Glycine max
  unsure (1)..(215): unsure at all n locations
agggaaagaagtggaaccttgaagtgtatctcataagactntcattcatcanagttacaacaagtgttacacatgcttctatttatagactaggtagcttccttgagaagctctcttaagaaaacttccttgagaagctttcttaagaaaacttccttgagaagctagagtttagctacacacacccatctaanaactaagctcaccttcttgag

SEQ ID NO: 1111 - DNA, 373 bp, Glycine max
  unsure (1)..(373): unsure at all n locations
cacactgtttctattggcctanatntctcataatgggaagattacgacctgatacgtggaatagtgaatgactcaatcaataaattagtgttatgactcattttcttctcaatcattntgttccaagcttttggaggttattaagaaactctacatgtctagttattctcgttctcgtctttggtttaatctattagaaataatgaaaatctacatggtggcgctctctcttatccaaatatctcaataaattcacaacgctatacttttacagtgtgattgggttgatataaacaggngttgcanaactgataacttcggtatgacattnagtgatntcaattatntgcaacatatanggaatgatatatgt

SEQ ID NO: 1112 - DNA, 240 bp, Glycine max
  unsure (1)..(240): unsure at all n locations
atggcaagcaatgaagcaacatccttccaagttccacttctaaagaggagcacctatgataattagagcatcaaaatgaaggccctacacatgaaagttgtgaaatggttgaaaaaggctataaagagctacatatgagacttcattatcccaagcacaaaaagagactntaaaggattcaagagagagagacaagaagctctcttcctcctctatcaagcattagatgatgaatgcgtc

SEQ ID NO: 1113 - DNA, 215 bp, Glycine max
  unsure (1)..(215): unsure at all n locations
tatctaaatagtcttacatgaacanaatatgagttggataagccttatactatggcattttccattatttgttaaatacggacggattcaggacttccaccccaactctacgtatagtttgtgcagctgagctccatatcataactaatttccatttgtcgatatttgatgggtaagtcataaaaaatagtgatagggtgtttccatatggttta

SEQ ID NO: 1114 - DNA, 341 bp, Glycine max
  unsure (1)..(341): unsure at all n locations
cgttcaaccctcctggtatctgaggatgccttgaaattagtgagaaaaatcatttccatgaagaaaatccgagccgaggcgcttccgtaactcgtctgagacatttccgtgggtgatttcgtggagaatttctgccatcctttgttcgttcttcgtcgttcttcggtcttcaatcggtaagttcccgaaatcaaactgttcaattcattctatgtacccttggtggtccccatttgtttcacgtacttttattntcatttcatttactttggttcccncctttgacatgctnntagtaattatntaagttattttctcacctaatcaaaaaataaaataaa

SEQ ID NO: 1115 - DNA, 307 bp, Glycine max
  unsure (1)..(307): unsure at all n locations
gcttcatggacgcctactcgagttcaaccagatctgaaagctctccgatgatgaagaataaatggctttcattctaagacactcaattactactataaggtgatgccatttggattaaagaacacangcacaacctaccagtggcttatgcacaaaagtttagccagactcatgggaaacactatcaaagcctatgtcgacgacatnagtgntaaaacttcaaatgccattgagcattgtgccgacctccaatgcgttttcaacaccctctgtcaatatcagctaaagctaaatacataaaaaaaat

SEQ ID NO: 1116 - DNA, 659 bp, Glycine max
  unsure (1)..(659): unsure at all n locations
gatgcgcgtgangtcagtatntangcgcactatagactactcacgcttagcatgtcggagtcggactcgatcttgcgaaaccctctactgtgattctagacgggatgtctcaaagctctagagtgatcttctggagatattctatgcacctcatcatacgtctntgcaagcttgtgagagacttcatgagctagatccaagctctggagaacatgatcagcgagacatatggccctccatatcacacaatcattctacctgagacataccactcacaaactgtgtctgacatcatacatagagtggcttgatcaataggcaacgtgctatctacgccctaccatgtgctcataagacactggtactctactatgatatgctctctcgaatgtcgacattcagacttatgctgtccaggcgtatgagcctcatacgacactatacagcttgtgcctctatccttattctctctanggcatctctgataacgaagctgatcacttcgacacacctatgctctgtacatctnatggattntatgacatatacaaggcagctcatcttcattcttcgagtctcgtcagatgaatactcagatgaatcatcgactataagtgcttgtgatgaacgtctcngacatctactatggatgtgatgct

SEQ ID NO: 1117 - DNA, 339 bp, Glycine max
  unsure (1)..(339): unsure at all n locations
aatcgtgatctagattccatagaattagaagaggggttattaagtcataagaagttaaagcggaggggaatttcataaatagaatcttagtttaactagttggtgactaattaaagtgtctaattatatgatgtagaataattaanataagctagagttgtaacaccttgaanaattacaactcagactaacagaggaaactctgttcttgtcattttgcatgtatggatctaatntcagtagttatatctctttaatcatagaattccttgatatatgtatgtgtatgtgtgtgtgtgattcatttagtanagcttgatacggaaatagtaattgttc

SEQ ID NO: 1118 - DNA, 597 bp, Glycine max
  unsure (1)..(597): unsure at all n locations
atgtcgatgacggcactatangcgcactatagacactcaagctctatgantcgtaacanatgttactggtgcaagtcttctctgtntctagatctatganatgttgatacataagtgtccagtcacataatataagatcggaaatatgtcaggtacttccttccattcctggctatgttcatattggcgttagatgaacctctaatcaactgcatctctcgagctcgatcgtatgtggcttgcacatntaatgaagcactctacctgcatctagaagttagaggcgtcttcatgactagctagacggatatttgctatattctataacttctaggctacgatatcagtatatcctcatgtcatcacacctgganggttatactttgacatcatagctatgatctctaagaatgtccctaatccagatgtctcttattactgtataggtctagaaatagaagtcgcttctgatcataattgatgtcactangatatacttgctcttcttctgcacagatcaaattgcctaatatggtatcgctattctatgagtgactcataaagtcggactaaacactcgtgcttgatcactgtgcg

SEQ ID NO: 1119 - DNA, 599 bp, Glycine max
  unsure (1)..(599): unsure at all n locations
cccgcancattgtntccacttcgaccngcgatcctctgagtcacctgcggcatgcaagcttctacttncatggcttattccctagtggatggcgcctnctcttcacctttctnctttatcttctactacaacttcatggctataaatcaccattgaaggaccccattgaagctcatagatccagcattcatagaagcttcttaagcangcattcatcaagtggtatcagagcaccagagcttcatgtaagtgctctntaaaaccctcgtaattttcagctatacccttctctccattgggtgttctgcattnnttttctncatctatttcctcacnatgtctgtgttgaatgggtgtaacatgattctttagaattntcaccgattaaactngctatagaagctagatttgattttctatggttcanatttctttgtcttgttctggaaccatgaantnngtgtgagttgggttcttttgagtnntgtcttgctctttttggctanacctaaccatanattctacaaaaaataaagagaaaaaacctcaaatcagagtacatgctactcatttgtagttgcatagaagcatgctagtan

SEQ ID NO: 1120 - DNA, 279 bp, Glycine max
  unsure (1)..(279): unsure at all n locations
acgttcagaaactgctggtaatcgattaccatatatgtgtaatcgattacacagtgcanattttaattcannatttaatagctgttgtaaatcnagtttggccactggtaattgattacatcctctggtaatcgattaccagagagtaaatttcttgtaaaagactntntaacttanatttcttggaccaaacctttgctacttcaattggaattcccttcctatntaatataccttctaagactctaaagactgtcttgatcatccatcttgaatatc

SEQ ID NO: 1121 - DNA, 268 bp, Glycine max
  unsure (1)..(268): unsure at all n locations
agcacactctacaaacaaattattggtagttngatgtatntaactgcaacgagacccgatataatgtanttctgtagtatgactagtagatacatggaggaagctacataattacatttgttggctgctaaaagatcctacacaacgaatcagagaatttggttattctatataaagggtgaagaatctaatttatcgtgtctcacggtcagtgattatgcacgagatcaagatatataaaagagtacttttgattatgtctttatgt

SEQ ID NO: 1122 - DNA, 144 bp, Glycine max
tgatacgttagtggagaatctaaacatactaaatgtacacactagcaacctatttcattggcacagactatgatatgtgttctctcgaagttacgaagacaatgtatgaatgagaatctctcatctgatcatcggttatgacta

SEQ ID NO: 1123 - DNA, 194 bp, Glycine max
  unsure (1)..(194): unsure at all n locations
ctcatgagccttanggtagatttcgagcccatgggctaagtatgggcccgctcgtctttgtaaatattagaataggttttcctttcgttgggccttgtattttggccattctagtagtatagggttttagccttgtatttcggggcattttgagtagtctttgtagtaacgacttttttttttatatttcatgt

SEQ ID NO: 1124 - DNA, 236 bp, Glycine max
  unsure (1)..(236): unsure at all n locations
agtaagtcacttacttggatngctgagcacagaagcagaatggaagcaaggtgagtatagtgcatggagtgcaagaatgcatatgatgaggaatgatataaaatntgtacaagagaaactgcccagagcagttaagtcttatttttggcaatntcgattgcctcacatagcgcgggtcactcgctaagtgagcactttaatgactttngaatttcagaattcaaactcacgcactt

SEQ ID NO: 1125 - DNA, 406 bp, Glycine max
  unsure (1)..(406): unsure at all n locations
agcttcaccttntggtcctnctcatagntgctgcatgagaaaacatgctctattctcatctgccactccaagtacgcctacggatcattctttgctttaaatggaggaatggtgagtgtaataccatcaagttnggtttgtctatgaacaccatcattccctcttctgctacttcttcttcattatgagctctattctccatntgatccaacctctcatggagcgcatcatctcgttgtttcattaacctctccaaatgttgcatcgaagcttgcatttgaattgcgaaagcccactccatcattatgattagtacctgacatctcanacaaacaaatcatatgtaacaagacaattatagntgttgtttgaatacctcacccactcaagtgtatcacacaattat

SEQ ID NO: 1126 - DNA, 252 bp, Glycine max
tcaacaccttcctagagactcaggcggcattgtagactgcggagcactacatcactaactccagattcatgtgcatcacatacagactcccatgaactggcgttcagactctgcctttctgtgcgacgatatgttctgaacgctgacggcgcgcctcggaagcttcttatgaatgacatgatgaccctaacctcgacctgaagtgtgagatcatactctaacctcgtctccacctctcacactctcgatctt

SEQ ID NO: 1127 - DNA, 465 bp, Glycine max
  unsure (1)..(465): unsure at all n locations
ctgcagctaagctgttacatttctaaaagtccctgaatttanaattataatggccccttcataatnntcaaaactttttcaataggatcactgaatccaatctgctggtaggtccctacanagatccaattgaaagaataaacaatatggggacccaattatagttnttaaactataggaacctatntaagaataccctacacataaagggggctggcaganntaattaactactaatatattcttcagctcccgcctattatgtgaacaccttgnncaacagaatattnttgttcagtttatattanaatcacatatacgtagaagtagaatcaactactaaantatttacctcaacactattcttgccaatccatgttcctataagacaatcttctttatcctctccaggatatgtatactgaaagatgaagcaatctncactattaaaatttgactgatcag

SEQ ID NO: 1128 - DNA, 427 bp, Glycine max
  unsure (1)..(427): unsure at all n locations
ttccacactatngcaggcatctatgtgaatganaacataaccaanactgagataacattcaaaccaaattttaggtatgattnttcctattatatgagactaatatganaaccatcatgttcacaaacttgcatttatgggaatctcgcatgtctntntccttctttgcatttcttgtatttggaattacgtatgtaggaatgaccatccaacatgtcaatcaacttgtataagaatattntaagtctaatcaataatctcaagttaaaaatttaattatacaattatgttaaatacttaatgggaacagttatcatccgtagtaattctataagaatcaagaaagatatntcctatgaaaaaaatatcgtccgcatanacaatatatatatatatatatatatatatataggtttataaatatata

SEQ ID NO: 1129 - DNA, 549 bp, Glycine max
  unsure (1)..(549): unsure at all n locations
agaagtgagagactatatttctgcgtggaaacnctctgtgaagtgaanatctatgtccgtgcacttaaaacacanaaccnctttnngtgtgtaagtcaaacaatggttgtcaaggttaaaatccagtagtggttgtggtctaattgaggctatggtgaaagtctaatagaagtattagcaggttgttgaaattcagtnggttggtgtgtttgtgaaatctcatcttanagggcgaggactangcgtagctcaagcttgggctgaaccagtataaaaatcaatgtgcactctntnttcttntctctatttgcactatnnttgaacaannattgttactcatgttttgtaatctttaaacagaaaaanacttcacaatacacaaaanactgaactaagtttatcanaatcttttaaataaacaaccttttgaacaagactctgatagagaattttttttctcaaatgctgcatctttgtctaactcgaatagtctcattntctatgatataaattngtaaactccatttcaccccttctgngtgtnttgag

SEQ ID NO: 1130 - DNA, 165 bp, Glycine max
  unsure (1)..(165): unsure at all n locations
gctcaagagaatgatntcaagactgagtcaacaagttcaagatcaagattaatttcaagtttcatganaagaaatcaagaagattctagattcaagagaagtttgatttcaagattcaagagaagatgaattcaagattcaagagaagaaatcaagaagacttca

SEQ ID NO: 1131 - DNA, 256 bp, Glycine max
  unsure (1)..(256): unsure at all n locations
tcgctggggcagcatctagagtcctagaagcatattatatcaccctgtgcaatntatcaattntctgagcaaggacagcgcccaatgcataatttgatgcatcacacataagctcaaaaggggctgttcaatcggctgcctggatgatggaggtggtagtcagcgctctcataatgcaatcaaaagcctctttgcatctgtcattaaagtcaaactccacctcctttngcaacatgttggacagtggaatggctac

SEQ ID NO: 1132 - DNA, 239 bp, Glycine max
agtgaggagtttgactaaagtgagacaattatgccaatatttgatttgatatactacttaatattaaaggcttttaaaacagcatagttataatgattttgaatgaaatgaaagatcttggggtcattgtaatgttatgcattacttctgttgctcgatataaataagatgaatattgaagagttccacctcaacttgatgacaggaatgctagaattaaaaggatatgtcactgggcg

SEQ ID NO: 1133 - DNA, 333 bp, Glycine max
  unsure (1)..(333): unsure at all n locations
gtacttccatacgatcnctaataacaacattcttcccttttaacttggttcagaatttaagtgtcgatattgcaatatacatatttcatgtgtttcactcttgtattattaatctcaataactttttatggtctagattaaaaatcatgtgtattctttaatctattagattagaaactaattacattatgtgtgacagttattcatctaaaagaatttatacatattaaacattaaatacatataattctttaactagataattctttacaactgtagataaatacgagatgaatcctatacttctgtggtgtcgatacatggaaatatcta

SEQ ID NO: 1134 - DNA, 587 bp, Glycine max
  unsure (1)..(587): unsure at all n locations
atgaatccactcgtacacgcgatcctctgagtcacctgcggcatgaagcttgggaggatgcttcaatggaggantagatagagggagagatatagagatgggggagcacgatattgaggaagaaaaagggagagaangtgaactttgagttgtgtctcacaagactctcattcatcanagntacaacaagtgttacacatgcttctatttatagactaggtagcttccttgagaagctttcttaagaaaacttccttgagaagcttctttgagaanacttccttgagaagctagagcttagctacacacaccccatctataactaagctcaccctcttgacaaatacatgaaaatacannaaaaaagtccctactacnaagactactcataatgcccntgaatacaaggctaanaccctatactanctagaatggccaannatacaggcctanaagaaggaanacctacttctattttacanagaagagtggatccaaccttgcccatgggctaananatctatctatggtcatgagaccttagggcctcttagttctctacccaagcctctcggagctnttatcag

SEQ ID NO: 1135 - DNA, 285 bp, Glycine max
  unsure (1)..(285): unsure at all n locations
tctcatggtctngtgtcatagtcatatatatacatgtgtgcggtccaccccattgtgtcactttcaatgcatcagtnnttttggatgaaaatgccctcatataanaagggcaaggagactcttcggtgttgttggggcaacaaacgatatatttgtgtgatttcgtttcaacaaccttaanagttngatgcaccttcatcacatatnnngttcagtgcattttgaccgcatctttactgtcanaatccatgccaacatataattcttgtccaacattaaaagtcg

SEQ ID NO: 1136 - DNA, 587 bp, Glycine max
  unsure (1)..(587): unsure at all n locations
cttttccctgaccgcatccttaagcacctgngctgcaacttggataagaagtgtgaaggtaaacttctgctttattttgtgaccacagagtggtacctggagatatgtcgcggggtcaagagaccttggtgacgtcangaagggtgctatttgccanaaccaagcttgaccaatcccgacccaacccgggcatagtcnagtagtgagaacctgtgatgtacctaaacatgnncagctctggcagtcaacagataanaggaacatggaccacanagcaaggaggctggtggtggctggccagctatgaacttgattgatatatgagatatggcctctggtaatcgattaccaanggtgggtaatcgattacaaggcttaanaatgaagacaggangctaagatagtctctggtaatcgattaccaggcttgaaaacgaagtcangaagctaggagagcttctggtaaaccgataccaagggggtgtaatcgattaccaggctannaaaaggaactgngagatggtggaggcctctgggtatcgattaccagcctgtgtaatcgatacacagaagaatggtcacttgtn

SEQ ID NO: 1137 - DNA, 598 bp, Glycine max
  unsure (1)..(598): unsure at all n locations
tatcgcgtgtgtcactattagcgcactctcactctcagcttatatttctatagacgaacacagcggtctctatcatatctacgtcgccatgtgcaatctatcaatactgtgatcaaagaccgtcgtaaatatcttaccagtatctacacacatgtcactgagggacattctaagacggntcctgcaaactgacttagaatgtgcgccctacacacagctagctttagtagtggtcatgtcctatctggttgcatcatgcatagtacgaatctgagtgtctcactacagagatctcaacacctttanggtaccacaggtcgacatgtaatggtgctactagatacgtcatagctctcttaactactagaaatgagactctatggacatgttgatagccgccacatgcaacactaccanataaaattatatgttgcttattcatatgtatacgacttaaaaatagcatgaatntttctatataacaatgtaattcattatcattatatgttatccaattatcaaacacagtaatataagcgcacataagatatgcttactatatagagattcttactatgacagaataacatctactagg

SEQ ID NO: 1138 - DNA, 325 bp, Glycine max
  unsure (1)..(325): unsure at all n locations
atcattctttcctttaaatggaggaatagtngatttaataccatcaattcgggtttgtctaggaacaccatcattccctcttctcctcctttcttcttcattatgatctctattctccatttgatccaacctctcatggagcgcatcatctcgttggttcattaacctctccaaatgtngcatcanagcttgcatttggaattgcgaaagccccactccatcattaggattagtacctgacatctcanacaaacaaatcatacgtaacaagacaattatagttggtgtttgaatacctcacccactcaagtgtatcacacaatga

SEQ ID NO: 1139 - DNA, 240 bp, Glycine max
  unsure (1)..(240): unsure at all n locations
tctgctcttggtaagtctcgcccatattatgacagacgtatcgctggtcgnttcaccaaaaggctcgcanaacctaaggttcatccttggtgagtcctacatgtcgattcttcaaagccttgntaaccctangtctgccctcggttagtctctccaaaacccaggatagacaattccctggtcggttctccaaagggtttgcaaaacacaaggtttgctcttggtgagtcttacaggttg

SEQ ID NO: 1140 - DNA, 214 bp, Glycine max
gagctgaaatataagctgtgggatgtactgctgacctgcccatactgaaaattattcttacaaaagcttttagttacctattggatttagctgctattgttcggctggtattcccaaataagaaaacaaccgctcgatactattcagatcaactatatacacgggattggggaatgagtcaaattatgacccaaaatttgcacaatttatgggt

SEQ ID NO: 1141 - DNA, 229 bp, Glycine max
  unsure (1)..(229): unsure at all n locations
atgaatgctntagctngngcctctgaaatgtgtgcaagaatttcaatgatgtaaatccatcagtcattnttcctggctgaanatctttgacgaccatgaaagaaatgaagaaggtgaacagaattagctgcaagcgaatggagaaggatatgaagaagatgaacgcgaactgtgaaagatgtttcacaaaggaagacaatgtgggtttctgaaatcctaaattggatta

SEQ ID NO: 1142 - DNA, 248 bp, Glycine max
  unsure (1)..(248): unsure at all n locations
cttcacggagctaatgactntatctttctntctatagaaatggtgatggtttgngcaagcanattcatcatcaatatatattgagaattcaaggcanaacacctaggcttaccaacttgtatatatagaacaagaaaaagaaaaataagtaaatccaatcatatcatagcattcttggtaaaatctatcacaagggaaagaaatatggngagaacgttgcatttacctcattngctacatcttcatca

SEQ ID NO: 1143 - DNA, 530 bp, Glycine max
  unsure (1)..(530): unsure at all n locations
catgtggtactatgtggcgatcgggcaatggtgcacaacaagttntncacattcacaaatcgcgcataaacccaccatccctttgttgccacctgcagctgagctcacgtactcccacgtagcccatattctcatttctctcaacaccgggtccccatcaatccttccaagcttncccaacatccaagtaaatcaacactcatatagcacaaactatcacagccaagaaaatagggcagaggcagaaaactctgcccanaacaccaaccaaaatcacagcgtntctcacttaaagacctcagtaacaattcctttcgtccagntnncgtaaccgtggatcgactcgaaaaatnntactggaagtctctagtacataagtctacattnggacgcgttngatctactagtanacatccagaactcattctgcatttactctttcacaaccagcannatacatagcatcttctgcacttatgcanaantctactgcacaatntcacagcaaaaatctgcataaagtgcagatn

SEQ ID NO: 1144 - DNA, 385 bp, Glycine max
  unsure (1)..(385): unsure at all n locations
gctacatcactggggaagataacaatatcgattcatccggagacctcaaanatgaagttgtanatntaagtctcatggccaacaactatgaaagcgaagaagagaggatgctctanacacatgatgggagatgcatcaaagtttactcatatttctcccaagaatagtggacatgtgacttatggtgacaacaacaaaggtaaaattcttggagtcggaaaaataggtatgaatccatctacctccattgaaaatggtttacttggtgatgatcttaagcatagtctgctaagtgttagtcaattatgtgataaaggtntctagtggtcattggactctcataatgtgatattaaaaataaacatgatnaaaaatataaacatta

SEQ ID NO: 1145 - DNA, 203 bp, Glycine max
  unsure (1)..(203): unsure at all n locations
atcgaaagctaaatcctctngtggatcttccctataggtacctgatgtaaatatatntntatttatntaatgatgtttngtgtgttctctgtgctatctgctnttcactccagtatgcctttaccttgatcacgcagatgcatgctttgttagggtcattcaactatggaaactggtctgattctaaagtccttgagagtaca

SEQ ID NO: 1146 - DNA, 564 bp, Glycine max
  unsure (1)..(564): unsure at all n locations
ngaagtgaganagtgtggaagagtcngtctccctacatttatctcgtgaccacatagtggtacctggagatatgtctgcggggtcaggagaccttgtggacgtcatgtgaggtgctattgcccacaaccaagcttgaccaatcctgacccaacccgggcatagtcagttagtgagaacctgtgacgtacctaaacaggcgagctccttgcagtcaaccgataaaagaacaaagaccacatagcacgtaggctcgtgtggtggctggccagctatggatcttgagtgaatatggcctcttgtaatcgattaccaacgggtgtgtaatcgattacaacgggctaacaatgaagacaagacgttaagatggtctctggtcatctgataccaagggtggtgtatcgactaccaggcctaataatggggcatgaagtgacatggctctggtatacatacccatggatgaatcgatacccgcttagaacgggatggatatcgtgtggctctgcatcactaccgcactgactgataccgtgttgtgacttcatgttgagcggtctctaagn

SEQ ID NO: 1147 - DNA, 419 bp, Glycine max
  unsure (1)..(419): unsure at all n locations
ttaaatgtttaaatattttcatatatttatatattaagtagttaagaattattaataatcagttntttcagggagacttattaattgatatgtgatcatcgattgagaaaattatatatgtgatggttgatgttagatgaattatggtactttatcagattatagcaacggtctttatgatttaataaaagagcttgtatgcaaatatatntagtaacatcctctgtgatttcctataataatgctgtgtaaattaaaagcatacactaacattgctttgaagcataccctacactcttcactntcttcaatcttatctacacttctagataagagaattatattaaaacagagatcttgataatatacaaattagaaatatatataatggtctcatttaaatcttagatgttaaaaat

SEQ ID NO: 1148 - DNA, 137 bp, Glycine max
  unsure (1)..(137): unsure at all n locations
ttcagtagaacagatgaatatatgatgctctaatntacaaaacgaaataaaaaaaataaattgtctgtcatggtgatgtaaacctttngagttnggacacttacacattctggtgaagctgacaaatgcagtatatg

SEQ ID NO: 1149 - DNA, 402 bp, Glycine max
  unsure (1)..(402): unsure at all n locations
agcttatgcgctgtgtagcgcagcccatctatttcgggtacagggacgacgaggggttcctggaaaacattcaagaaacaatgtaattgattacactcttgatttaatcgattaagtgttcttgatcacttttgggaacactttcaagaatgatgtaatcgattactatatcctcgcaatcgattaaaccagaaactcgaaaaacaatcatgatctcaatttgagttgtgtaattgactatgaatatatgataatcgattaaactagagacatgatttctctacaagttatcaaagacttatgtaatcgagtatacgcatgtggtaattattaaaccaatgagttattaacacatatgagttttttagtttagaaactattttcctacntctatatgatgat

SEQ ID NO: 1150 - DNA, 299 bp, Glycine max
gcatgaagcccctagtttagttatggttcgataattttacaatggctaacacgttttgatagatgaggcatttgtattgatggattttagtctaggcatgtgagtgctttaatttatttttctatctttttcatgccttgagcttgattagttatgaagtagatgaagattctttttctctaagcttcttaaagaactcacttctacttgaaacatgtcttgcaacattgaataaatcgattgcctcatttggtaatcgactgcccaagtcaatttcagaagaaggaaggttctatagc

SEQ ID NO: 1151 - DNA, 342 bp, Glycine max
acagcacattagctgacttaatatccctatgaagaacactctgctctgcatcctcatgaagataacgaagggccaaagctaccccatatgctaccttgtacctgtgaagagaattgagaatataaaagagaattaagaataattgtgaataataatgtgtaatttcactagcataagctaattccatcacaagagacagaactgtatatacagagcaaaaaaaaaaaaaaaactaagaaaataatggttaccctatttggataagcctccttataagcacttaaatatatatataaaataatcttcttgcataaggtcaagttaagttatgcataagttaaa

SEQ ID NO: 1152 - DNA, 349 bp, Glycine max
tactaagcttcaacctctcccaaatgggccctaaactgtagtaattcaatatatttttacaagaacttcacactaaaaacttactttttaaacttttacagaattgttatcaggttttttatatactaaatatagcctaataataactaaaataagtcaatgttaagatttgtactaaacgaaatatgttcaagctggaagtatcttgcgtacatctgaatgcgtcgtaaattttacaaatgatttaccaaacaaacgtgggtacccaattaccagttttggtcaagtcaagggagcttgctttatacacctgaatcgtagtggaacaccttcaatcattcttggctta

SEQ ID NO: 1153 - DNA, 462 bp, Glycine max
  unsure (1)..(462): unsure at all n locations
tcacctgcggcatgcaagcttggtcatcttgagctagtaggtcatcatccttatttgaagttggtggngcaacatatttctttggcctaataggaactccaatatttttgcagcttctgatgttatgattggtttggccacaccttccacatgtaaagtcaggcaatttcctctttagcctatgtcctatgacattgtcttcatctacagatctcattctatttttcttaggccttcctctttggacctttttatgtggtggaacaggttgtgcatgttgtgtctgggcccaatattgtggtccttggactggttcaataaaatggtggtatgtcttgttataagcctctattgacagccactcatgacacatgtcctcaggcttgcctcctttgtgacttattgntgcaatggcatgtcgcatggcatccctacatcaaagttgtcaaatcagcacacatg

SEQ ID NO: 1154 - DNA, 307 bp, Glycine max
tcatgattgaatcaagaatgattcaaggtgttttgatgattacaaagatgatgacttaaagcccaagagaatgatttcaagattgagtcaagaacaattcaagaatcaagagaaatttgatttcacgattcaagaatcaagtttcaagtttcaagaatcaagaatcaagaatcaagaataatcaagatcaagattcaagactcaagattcaacaatcaagaaaagactcaatcaagataagtactaaattttttttcaaaacattgagtagcacatgaagttttcacaaaagcttttaccaatgagt

SEQ ID NO: 1155 - DNA, 449 bp, Glycine max
  unsure (1)..(449): unsure at all n locations
agcttaacaaaaggcatgtgaagngggtggaattcctatatcaattcccttatgttatcaaacataaaaagggaaaaggtaatattgtagccgatgctctttctcggcgtcatgcattactttctatgcttgaaacaaaattgattggtcttgaatgtttgaaaagcatgtatgaaaatgatgaaacttttggagaaatttttaaaaattgtgaaaaattttcagaaaatggtttctttagacatgaaggctttcttttcaaagaaaacaaattgtgtgtgcctaaatgttctactaaaaatttgcttgtttgtgaagcacatgaaggaggtttaatggggcattttggggtccaaaagactctagaaacattacaagaacatttttattggcctcatatgaaaaaggatgtgcagaaatattgtgaacattgcattgtatgtaaaaag

SEQ ID NO: 1156 - DNA, 438 bp, Glycine max
agcttcctcggcgccattcctgctaaggcaaacatttggaaagttagttgtaccagtgggacattactcttaaagcaaaaatggcatataacctcctcccataaatacaaacatcaatgtaaatttagagcaagcttatgcgcatatttccttacaaacgttctcttgcacaagacattctattaaccgaaaaaaatgcacccatatacaatcaaggcagcttcgttacctagattatttacacgtacttccaaggtgtatttgttacttacatcacacacatctccttggctaaatgcacatacatgcatactcaaagcattttgggggaccaaaaattgcacatgtgcacatctcggtatatttaatacctatacatacacaaacctcatgatgaatcttgactatctacacaatagagtgctacatttcatgctc

SEQ ID NO: 1157 - DNA, 302 bp, Glycine max
tttcatcaatctacaagaggtggaagtgactaactgtaatacgatggagtatttattgaaacgctcaactgccacaagtttgttgcaacttgagaacctatctataagtgaatgtgaatcaatgaaggaaatagccaaaaaagaacaagaagatgcttctgatgagatcacatttggaagcctcacaagaataatgttcgattcattaccaaggctagtgatgttctattcaaggaatgccactttgcatttcaagtgtttggaagataccacgattgcagaatgccataatatgaaaacat

SEQ ID NO: 1158 - DNA, 346 bp, Glycine max
tattctaataatgataactgagaaagaatggataaaatttctcccaatagaaatatcttataaaatccttacaactcaatttcattatataccacatgaatcctgttagattttttaaaatattctcttagtccactttgggatcatgaagatcttcatgatcgaaggggtggagaactctggtataacataaagagatttttaaaaatagagtagaagtgaaatgaaataaaaccaattcctatacacaacttctgcagcgacgaccaaacttgaaaacgttgtccaattatgcctccaggaacaggctacttctccaattactcacccataactccaatgcgcc

SEQ ID NO: 1159 - DNA, 446 bp, Glycine max
  unsure (1)..(446): unsure at all n locations
agcttatatgcccaacaattaaatcagcgtgcttatgctttatagtgtgggggaaggaattaccaggatccttgcacaagatgaaaataattttctctctttgaccgtttaaaatgataattgctcaaataatcggtttaatcagctctcaaaccgatcaattagagaattgaattgataaagaacataataaaataaaaccaaattaatggcaaaaacggatttgaactggagtatttcttatgctttttattcataaacctttgttaaataacactcgtacaagaaatgtatctgtaaaacggaattttaaataaaatactaaagataaaagtatgaagaaaaaaacttatangttntcaaagttaattcaagtaccttcttctaaaaaataaattattaaaataagtttactttataaacanatagcttataaactagtcaaa

SEQ ID NO: 1160 - DNA, 118 bp, Glycine max
cttatatatacacttctctagctcatggtgtgtcaaccaccctctgggaatcaaatgatccgtgcgccacatgatcactcgatgaccaatcttgccgacatattttattttgaatgat

SEQ ID NO: 1161 - DNA, 448 bp, Glycine max
  unsure (1)..(448): unsure at all n locations
agcttgtagaatggccagacatgatacatgtcaaggtttggtttggttcaagggtaaaagggatgccccacattatttccatgacacaaatgcaaaaatgatgatttggaaactttatgcaaaactggtcatgcatgcacctatgcggacactcaagtgtcaaatttttatggtcatgtgatgctagggctcaagattcatttcctccattttagtcaacccaatatttccaaaatatgttcttttatcaatttgtgcattcatccgagtccatttcgggcgtccgggaaaatattcacagcattcacccttcaggtgtacacatnttttttcaaaaactagttatgatcagcgatctttttcaaaaaaaagttagaagtcatctcttttcagaagcatgtcgggttttcagctaaacaacttaatttttcttctttttctttatttc

SEQ ID NO: 1162 - DNA, 444 bp, Glycine max
  unsure (1)..(444): unsure at all n locations
agcttgtagaatggccagacatgatacatgttatggtttggtttggttcaagggtaaaagggatgccccacattatttccatgacacaaatgcaaaaatgatgatttggaaactttatgcaaaactggtcatgcatgcacctatgtggacactcaagtgtcaaatttttatggtcatgtgatgctagggctcaagattcattccctctattttagtcaacccaatgtttccaaaatatgttcttttatccatttgtgcattcatctgagtccattttgggcgtccggggaaatttcacagcgttcacccttcgggtgtacacacattctttcaaaaactagctatgatcagcaaatttcccaaagaagagttggaggtcatctcttttcaaaagcatgtcggttnttccagctaaacaacttattnttcttttcttntcctctc

SEQ ID NO: 1163 - DNA, 359 bp, Glycine max
tcgggctgctcaattgctccaggttgctgcatggaagggctaaggtctgtatggtggtcagtagaggagcacaaaccatagacccttgcaacaggtacagatttctggttcaaggccagctgggttaccaagttaaccaatgcatccagtttgccttcaagcttcttagtttcagatgatgcagctgagtttgtagctacctcatgcactcctctaatgactatagcatcatttctggcgctaaactgctgggagttggaagccatcttctcaattaaatttctggcttcagcaggagtcatgtctccaagggctccatcactggcagcatctatcatacttctctccatattactgag

SEQ ID NO: 1164 - DNA, 413 bp, Glycine max
  unsure (1)..(413): unsure at all n locations
agcttccatcagtgtttactttgtgaaggtgcgttgagtcggaccacgatccgctaagccgcatgtcttatttttctatttttcaatttgaataacttgtggtctaactaactttttgggttcctttgtgttgcagatggcctccaagaagcgtaagagcattggggcaaggccaactacttagtatgatactagacggttccattcgcttgatgcttggaaccggtatacagataacattttgggaaggagcattttgccagagagaaaggttgagatataccacatagagtttgatgacttcaagacagagttggagaggcgtaatcttcacaaacgcctcaccaacttggctgatgggactattgatgcttctttggtgaaagaattntatgcaaatctctacagctctg

SEQ ID NO: 1165 - DNA, 407 bp, Glycine max
  unsure (1)..(407): unsure at all n locations
tgtctcagcgtttatgcgagacagagaccaacatgttagctatcatcgccaagtacgaagaagagttgggtctagccacggcccacgagcatagaatcgtggatgagtatgcccaagtatatgcggaaaaagaggctagaggaagggtgatcgactctttacaccaagaggcaaccatgtggatggatcggtttgctcttaccttgaacgggagtcaagaacttccccgattgttagccaaggccaaggcgatggcagacacctactccgcccccgaagagattcatgggcttctcggctattgtcagcatatgatagacttaatggcccacataattagaaatcgttaggaaacttgtatggtctctcagaccttgactagatatgatntcttttttttataaaat

SEQ ID NO: 1166 - DNA, 407 bp, Glycine max
agcttatcaaaccactgaatggtgcggttttcataaatctaaacaacctgccatttaagtggcagggcagaataactcatttcccagaaaaaaatcctatcctcaaaaaaatataaactttgtatttaattaggtagaatcttattatgtgttttttatcctccccttcctatctcaatctcaacaaccttgtatcctgccaatttgtaggcacaatgtaggtttaaaatagacctaggcttcaatggtttctgcaacaaccaaagccactaatctccaacgacaccaacaaaaacatcaaggaaaaacatacaaagcaaaacacagccataccagcacattacactttcttgacacacacatgccaagttcattaagcatattagtgaagcccagtatacatattt

SEQ ID NO: 1167 - DNA, 428 bp, Glycine max
tctggataactgtatcatatatgttctcatttatttctctaagcttttagcttttggttttaagttgtcagttagacggttataactgacatctctccttgaagagcttctactttatattaggggttgtaatagtctaacagaagctcatcagttttgtacattttcaataaagtttcagttcagaattctctcttaaattacttcaataagcatttattcaattggcccatatcacgtgaacacttacgccataattttgaccatgaaacttttcggaaaaagctgagaagagcttattttgataagttacgcaaagaagctaacaatggaagcttatgagagtcacaggctatatttataagttcaaataggctcttctaatgctttcttaatataaaaccatttatgtgtcttcaccttatagc

SEQ ID NO: 1168 - DNA, 356 bp, Glycine max
  unsure (1)..(356): unsure at all n locations
agcttcctttagtgcgtctcgtctaanacctagttcgatggtggtacgagcctttgacggaagtcggcgggaagtgatgggggaaatcgacatccccattcagataggccctcacacttgcaatgtggtttttcaagtgatggacataaatcccgcctacagctgcctcttggggagaccttngattcatgcgctgggagtggacccttcgacgcttcaccagaaattgaagttcgcggttggtggacttttggtgatagtgtcaggcaaagaggatatgttagtgagctgcccctcctccgcaccatatgtagaagcagcggaagaatcattggaaacaactttccaatccttcg

SEQ ID NO: 1169 - DNA, 343 bp, Glycine max
attacggacacttaactctaagctttaaataatatgagcgttgtgctaataatgtgaaagtgccatatgaaagtcctggatgggtccaaaattattttgaaattaattttcaattgtatataaaaatcaaaataatgtgcaataaaccaaaattccatatggacccatacagattgtgaatccgtaatgattttatggattcataatttgtatgaggtttaccgaaggacaactttggaattgtccaaaatgtgttgcgtgtccaagtatagcaatgggtacaggaggaaaaaccttcgttgatcaacctcgcttcattcttaaaagcacaaatagcgtatgt

SEQ ID NO: 1170 - DNA, 435 bp, Glycine max
  unsure (1)..(435): unsure at all n locations
agctntataagcgcgggtctgggagacaaatgtcaagtgttcgcgatatgcgaagatgatgttccgagtactttggaattggtacgaccatgccctcctgatttccagctgggaaattggcgagtggaggaacgccccggcatttacgcaacgagcataatgtaaacctttacggttttaaaagctctatagttgggcctaggctttagagtttttccttttgtaaggctttgtgtcttttgtttttgaatttataatacaaggatctttcttcatctgttcctggtctctacccattctcattcatttgcatgtttacttctttttctgaaacggcagatccgatgacgagtcccccgaaggtactaatacctgggacccgcctatcgacttcgagcaagaaatgaatcanacggaagatgaaggaatgaggat

SEQ ID NO: 1171 - DNA, 277 bp, Glycine max
  unsure (1)..(277): unsure at all n locations
cttaactcggaggtccgatacaagcgcataatatatcgagacgctcgaaattaaccaacggaagctctcgagaaattcaaatggtcataacttttaactcggatgtccgattcaggcgcataatatatcgagacgctcgaaatntaacaacggaagctctcgagaaattcaaatggtcataactttttactcggacgtccgattcaagcgcataatatatcgagacgctcaaaaattaacaacggaagctctcgagaaattccaatggtcataactt

SEQ ID NO: 1172 - DNA, 340 bp, Glycine max
  unsure (1)..(340): unsure at all n locations
agcttgataacacgcagagactaacgtcgncttttgtgatcttcttcaattgcggccgacaagcctgttgacacgtggagatttacgtcatcttccgcgcttacaagatctgtcatattgagttttgagtcacgctgacgggcggaaatactcgagtagttatccttataaactttgtgctgtttgaaaacgaanagcctgatagcacgcagagactaacgtcgtcttctgcgcccttcgtcaatcgcggccgacaagcccgttgacatgcggagatttacgtcatcttccgcgctcacaagatctgttatactgactattgagtcacgctgacgggcga

SEQ ID NO: 1173 - DNA, 347 bp, Glycine max
tgtcggccgtgattgacgaagggcacagaagacgacgtttgtctctgcttgctatcaggctttgtgtcttacagacaacaaaaactttatacggataaccactcgggtatttccgccagtcagcgtgactcaaaagtaagtatgacagatcttgtgagcgcggaagataaagtaaatctccacgtgtgaacgggcttgtcggtcccgattgacgaagggcgcataagacgacgttagtcactgcgtgctatcaggcttttcgtcttatagacagcaaaaagtttatacggataaccactctggtatctccggccgtcagcgtgccttaaaagtcagtatgactgatc

SEQ ID NO: 1174 - DNA, 425 bp, Glycine max
agcttataagaaccgaaatgcctaaatcatttccaaatatgcatgtgaattacgaagcatcaacaagaatcaagccaaggctattgtgcaagcaatcaatggggcaaaacacaccaaaagattatgatgacggatggctcgaattctcacaaaggtaaacttatcactttcaaattgagctttcaaaactatcatgacatgtaaaggaaaaacaaggatttcaaatcacacaatgtcaagagacttttattttcagaacaattaaccatttcttgaacatatcctataattcaaagaaaaacatgcaaatttgtacatgcaaacaaaattgaccaaaattaaactagaacccaacaaaactaacaaaattaaactaatttaacacaactaacaaaaccaaaaccaaagaacacactccccccata

SEQ ID NO: 1175 - DNA, 108 bp, Glycine max
agatcgagaacctgagtcccaatatccaattcgcttcctaaaccttgtgtcatgtttgccattccataggacaacattctctaaaatctgggtagaatttggcattca

SEQ ID NO: 1176 - DNA, 425 bp, Glycine max
agcttagtattggtgggagaatactcgccagtgcctagaggctgtttgtcaagatgtgacctgtgatgtcttcaagagggtatttttggagaaatattttcctgaggatgttaagaataagaaggagatggagttcttggagctcaagtagggaaacatgattgtggctgaatacgcagccatgtttgagaagttggtgaggtactttccccattatcaaggtagagatggtgaaagttccaaatgtgtgaagtttctgaacagcttgtgacttgaagtgaagcaagcagtgaattaccaaggtgttcgtcagttcccactcttggttaacatgtgtcggatttgggatgaagactcccgagacagggcgacctattataggagtataggtccaatgaagaacaaaaagaatggacctcaacatc

SEQ ID NO: 1177 - DNA, 106 bp, Glycine max
gcgcctgaatgcgacgtccgagtgagaagacttgaccgttacacttgctcgagagctcacgcaccccaattatgagcgagctcacctgcgagggacgcgaactgga

SEQ ID NO: 1178 - DNA, 344 bp, Glycine max
agcttctacattcaatttcgagcttttcgatatattacttgtactcaatcggacatccgagtaaaaagttattgtagttcgaatttgctcagggcttctgtattccatttcgagcgtctcgatatattacgggactcaatcggacatcagagtataaagctattgatggttgaattttctcagagctatcgctttccatttcgagcatctcgatatattacggtactcattcagacgtcccagtgacaagttatgtgagtttaaattgcccagggcttcggtattccattgcgagcgtttcgacgtattacgggactcaatctgacatccgagtaaaaagatat

SEQ ID NO: 1179 - DNA, 289 bp, Glycine max
  unsure (1)..(289): unsure at all n locations
aacgacaataactntttactcggatgtttgatggtttcccgtaagacatcgaaacgctcgaaatggaatagcttagcgctgagcaaattcgggggacaataactctctactctgatgtctgagtgagctccgtaatatatcgagtagctcgactgtgtatgaggagacttttagcaaattctatcgactataactttttactccgatgtctgattgagtcccgtcatatatctagatgctcgaaacggaataccgaagctcggagcaaatctatacttcaatgactttt

SEQ ID NO: 1180 - DNA, 300 bp, Glycine max
atcacattgataatacagtgcttcatattgagcggataccaaagctcaaggcgattattcattactttagcttgtcttttgcacaatcatcttattcaggatgctttttgcattcttgagaactactcttgggattcataaagggggcctccatgtaaggttgagaactaatcttgtctcttgcacaatctcctatgtaggctgttgcttatatttcactgaaacgattaaatatggatctacagcgtattactgaccatccttattaacaaaaaagactaatgtatacattttttccat

SEQ ID NO: 1181 - DNA, 91 bp, Glycine max
gatcgacctatttggggtctcacataccgagataaattgctgcctggggtctaggtctgtaaaaaatatctccctgcggacatgacaggga

SEQ ID NO: 1182 - DNA, 346 bp, Glycine max
  unsure (1)..(346): unsure at all n locations
agcttgttaagctntntcttaagctttngctatttaccttttctccccctttggcaacatcaaaaagccaaagatctcggaaatcatcacaattataacaatggagtagcaagatataagtatcagagtattaaagacaataagccaaactcataaacaagaaataatcaaaccagaatccaaataactgaaaatgtcaacaaccacaaaacatccaagactgaaatttaaaatccacaagataaataagcaaagtacttagcataataatgtaaattctaagaaactaanagccaaaatacacggcttataaaagataaataatcagaatctataagctaagaag

SEQ ID NO: 1183 - DNA, 347 bp, Glycine max
  unsure (1)..(347): unsure at all n locations
ntntattttcagcatatgaagatgaatctgtgtgtcaccttattgactcctctaaggataatagcatcttttcttgcactgaattgctgagagttggaagtcatcttctcaatcaaattcctagcctcagcaggggtcatatcaccaagagctcaaccactgacagcatcaatcatacttctctccatgttgctaaatccctaatagaaatattgcagaatgagttgctcagaaatctggtggtgaggacaacttgcacacaatttcttgaatctttctcaatactcatacaagctctctccactaagttgcttgatgcctgaaatgtcttttctgatggcaatggc

SEQ ID NO: 1184 - DNA, 382 bp, Glycine max
tgtagagggcgcgactccttttacatctcctgaacctaatatttgttggttgtatgggtgagccctccactcctcaaacgccatgaacaacaaaataacaataaaaaaaaaccatagtatacaatctacgtaaccattacgtgtggttgtttaagcaaacaatactctcgcatcctaagcgcataactattccactttgttcacaatagggtccaaccactaccaccaaacctcccaggtcatgatggttttacactcttatatggatgaaaattgagagtgatcaccacatacagatacaatgtacatcaatcctcagcccccaactcaaaaagcatagtctcagaaccagtgaggaatagcaaagtgaagcctgtgagct

SEQ ID NO: 1185 - DNA, 404 bp, Glycine max
ataagcgcgggtctgggatacaaatgtcaagtggtcgcgatatacaaagatgatgttccgagtacattagatttgggatgaccattccctcctgatttccagctgggaaattggcaagtggaggaacgccacggcatttacgcaacgagcataatgtaaacctttacggctttaaaagctctatagttgggcctaggctctagagtttttttctttttgttaaagctttgagtcttttgttgttgattttataatacaaggatctttcttcatctgttcctacgtctctacccattctcattcatttgcatgtttacttctttttctgaaatggcagatcggatgatgagtccccccgaggtactaatagctgtgacccgcctatcgacttcgagcaagaaatg

SEQ ID NO: 1186 - DNA, 321 bp, Glycine max
  unsure (1)..(321): unsure at all n locations
tctgcatatgttatggagttgcatgccattgtcgctgcagtttgcaaatgccngaaatatctacttggccataaatttacgatattcactgatcattgtagtcttcgagagctcatgtctcaaataatacagaccccgaaacaacaattctatctagccaagctgcagggatatgattacgatatccagtataagaccagagtttcaaatacagtcgtggattccctcttgcactgggatacctcacctccaagccattattgtgtgcttttgatccctcatcttgatttcatgacntcagtgaatggaacattattagct

SEQ ID NO: 1187 - DNA, 420 bp, Glycine max
  unsure (1)..(420): unsure at all n locations
ctcagttcgtttatgcgagctaagntgcttcctccagaagcaaccgtcttctggaagaattttctggaaggcccaagtgggcctggttgttatttgcaccccaattttactaaataacacccctgctcttctttggagattaattttccgtaacggtacgaatacttacgaattncgtaacgatgcttgtctcttttcgcaatgttacgaaaccttatggattacgtaatcatccccgttttgccttccggaatgttaccgaactttacggattacaccctaacactttcttttaatttttgggatgtcacgtgactttacggattatgctacagatgttttcttttgactctcgacatgtcatggaacttcacgaantgtctaacgatggttggcagtaccttaaatggtcaacgaggt

SEQ ID NO: 1188 - DNA, 430 bp, Glycine max
  unsure (1)..(430): unsure at all n locations
tataagaacaaaatngcctcaatcatttccaaatatgcatgtgaattatgacgcataaacaagaatcaagccaaggctattgtgcaagcaatcaatggggcaaaacacaccaaatgattatgatgatggatggctcaaattctcacaaaggtaaaatcatcacttccaaattgagctttcaaaactatcatgacatgtagagaagaatcaaggatttcaagtcacaaaatgtcaagaacttttattttcaaaacaattacccatttcttgaacatatcctataattcaaagaaaaacatgcaaagtcgtacgtgcacacaaaattgacccaaaatattaaactaaaaatccgacgaaactaacaacattaacaaattaacacaactaacaaattaacaaaaccaacaaactagcataaccaagaacactc

SEQ ID NO: 1189 - DNA, 453 bp, Glycine max
  unsure (1)..(453): unsure at all n locations
agctngatacaacccagtattctttgtcctactcaagccgttattggccctatacaaaccaggtagatttgttgtttgattgcacaatgactaactctcaagcatcttactgacagatatacaatttcatcacttagtcttttctctcaaggtgttcaagttgttttaagagctttttagaactatacacaaatatacataaagcttttttatagaaataatttgaacgagagcaagtaagttcaaatccatgtcttcaaagcttatggtatttatggcctttttcaacaagtgttcattgtctctaatcaaacaggtttcttcactttagcccgcgtttgaagattgtgactgttgggaaattcaatgcttgcattaaatgcatgtactccttcatgttgaaaaaccactcttgtgtgcatntgtgttcatcacttcaacaaanaaccactt

SEQ ID NO: 1190 - DNA, 409 bp, Glycine max
  unsure (1)..(409): unsure at all n locations
tctgttagtgttatgcctctgtctatttntaattctctatcttaggtcccttgcagtcaactgatgtggtaattcatttagctaatagaagtgttgcctaccctgttggtttcatagaagatgtcttagttagagttggtgaactgattttccctgttgatttttatattttgaatatggaggatggattttctcaaggatcagttcccatcattctaggcagaccctttatgaaaactgctagaactaagatagatgtttatgcaggcacactatccatggagtttggtgatataattgttcattttaatattctggatgctatgaaatacccatatgaagatccttctgtatttcgtgctgaaataattgaccatgtcgttgatgaatacatgactgatctttactc

SEQ ID NO: 1191 - DNA, 439 bp, Glycine max
  unsure (1)..(439): unsure at all n locations
caagcttgaattggatgtcaaaaatgggtgcctcatatgtggtntttgagcttcagtgcaaacctagtaaatggggttgcatctccatcacatggctacttggattntctttgtgaattttattagaaaagctatattttccaaactcaatagtgaattttattagaaaagcaatcatgttgtccaaactttagatagagtgacaagatttcatgctagcgtccaaacttttaatcgtattcaaaattgtattctctctattatttgaaatggaatgaagtaatctttttcctttgaaaaaagtactggttagctacgtctttcaagttatttaatctgcgtttaggttattaacgtcactctatatctaatttaaaaataanaaatacaaaatatctagtaatatacattttaacggctgaattgattataattttaa

SEQ ID NO: 1192 - DNA, 434 bp, Glycine max
  unsure (1)..(434): unsure at all n locations
ggctgtaaggatgacgaacaggttttttgccatatcgaccgtcctaaaatggcacttccatgtactgagaggtatgcagcatttaatctggtaaaggaaacaaggattggtcagaaacacattagaagccaatatgctcatgtaaaggtgtttgtgtcccaacttttacaagaaagggaaaaaaattacttatcaacatcgggcattgccaatggatcatacaattcctccctttgttccatggtaggcacagacatacccgataggtcttgagcaccttcaacctaaaaatagacaatccgtgtgcatgagtagcccaataaaattattctctgcatagaaaccaatatagtatgtaaactgaatntaacattaacagcttacnnctgtggggtattgtgcatagccaagatatgcaccatatgcatacaatg

SEQ ID NO: 1193 - DNA, 443 bp, Glycine max
  unsure (1)..(443): unsure at all n locations
agcttatggaatgaattcatcgatccaaccatttcaagagatgaaatcataaaaaatgtgccgataggcatagataaagatcaatgggctcgttttgttcattatcgtcataaaccatccacattggtacaattagattattttaattattgaattggttttatagctaattatatgattactattacaagttgtaaacttgaaattgctttgcatataggaactttgtaggggaaataaagaaattcgaagcaagcaagttattccacacactggtggatccaaagctaatcctagaagaagaaatgagttggtaatgacactaaatgttaacttttacntaataaaaaaagtcaatgtttacttactttnntattatcttnnagtgtagaaactgggaagctanccagtcgtggacaattatatatttgaactcataaaag

SEQ ID NO: 1194 - DNA, 331 bp, Glycine max
cggaactctagaacttaaatagtcctcaagatttatattcttcaatacttgccctgaagacaattgatgttgaacaaaaattaatggagtgcagattcatgaataaagtagtagttcaaaaaaagaaggatcatcttaaaagagttaaagaagaagagaaaaacactgaaaatggacatacttccaaaccaatatttacaaagaaccaacctccattcttacatcaccaagaaatatattgcaaacaatatatgcctttctcgtgttctgtaaccaaaccaaattgttattgcaataagctcaatttaaaaatgatttattttcaagagag

SEQ ID NO: 1195 - DNA, 387 bp, Glycine max
  unsure (1)..(387): unsure at all n locations
agctttaataccatcttatgaattggacttatatcctatttgattaattcaatcccacaaaaccaacttgtaaggcaaggactgccaaacttctttataagctttatttaagtcatatctctagctgatgtggaactaaaccaccacctttgaggctgcaattaaggcagacctcatagaggctgccacaactaaggcaactttccaacaggtaccaatatcacattgtcaacctctgttctgaaactgtactatccaagggacaaacatntttattaagatataggtcatgaacagagagatatgagagcgagagagagagagagagactgagtgagagagagtgagagagacaaagaccaagtgagagatagtcagagagagctc

SEQ ID NO: 1196 - DNA, 398 bp, Glycine max
ctcagcttgtgaagcaaaggccagctatggtcttcaaggtggattttgaaaattctctatgactcagtctcatgggcttttctggattatatgctgcaaagaatgagcttttgccccaaatggagacaatggatttctgcctgtctcaattcagcaaccatttcaattcttgtgaatggcagtcctacaaaggagattgctcctactataggcttgatgcaaggggaccctttagctcccttactcttcaatatagttggagaaggcatcacaggattgatgagggaagcagttcagaagaatgtatatagaagttacatggttggaaagaaaaaggaacccactaatattttgcagtatgcagatgacacagtatttgtgggaggctgcttgggaga

SEQ ID NO: 1197 - DNA, 306 bp, Glycine max
  unsure (1)..(306): unsure at all n locations
agctntgagcaaattcaaacgacaataacttttgactctgatgtccgattgtgtcccgtagtatatcgagatgctcgtaattgaaaacagaagctctaagcaaattcaaacgacaataacttttgactcgggtgtccgattgtgtccggcgtatatcgagatgctcgaaattgaaaactgaagctctgaaaaaaatcaaatgacgataactttttactcggatgtccgattgaatcccgtaatatatcgagacactcgtaattgaaaatagaagctttgagcaaattcaaacgaccataacttttg

SEQ ID NO: 1198 - DNA, 230 bp, Glycine max
  unsure (1)..(230): unsure at all n locations
cgtatagagatatcacaggacttgatcggttatacgagacaaangctattgactcgggagtatgatcggagccccagttatcaatagacactctctagagatactacaggacacaatcagacatcaccgacaaaagctattgactcgggagttcgattgaagctcgtagtataaattgccaccggcaatagataccacaagacccaatcagactcacacagacaaaacta

SEQ ID NO: 1199 - DNA, 452 bp, Glycine max
  unsure (1)..(452): unsure at all n locations
agcttgtggtgtattccacttaatagaatgtgtttcatgtaaagatctctngggtgtgtagataattctattgcgtgcagaaaattttcaccgacaaatgatttttcaaccccaacaacttcaatatgtggagtagatgtaaattgtaaattttataataaagataaactctttctctttctctttataaactccacaaaagctttaaaataatttatttttgaccacgtaaaaacaagtaaacatagattatgttatctaaagtgttgcatacttgaaggatgacaaacgataaaaaaaaaaaaacttgaaggatgataatgaataatgaattttatggttattaataaaattacttcatgataaggtaattattcatctgatgagttggagtacaggtaattagttattcgtaaaatttgattaaatgaatatgagtggggatacagata

SEQ ID NO: 1200 - DNA, 302 bp, Glycine max
  unsure (1)..(302): unsure at all n locations
ctagaatactccttctacgatgatacagcatttagaattgtgtctgatattctctaaactatcttaaatctttattgccgttgaaactatgcacagaagccagtccaagagagtggctgtgatcaatttcagcagcatttatcatatatttgacagatgcaagagaataaagtgcttcctttgctttcctaagcatttgcaacaccatgtctgatgcagaatctaaatccncacatttcaaatggcgtatgatcaaacaattatagaactgtcggaactataagtcagttaaattaggagct

SEQ ID NO: 1201 - DNA, 442 bp, Glycine max
  unsure (1)..(442): unsure at all n locations
agctngcaccaganaaagatagtccagagtttatcagatatagacaactttccaaaactacactaaaatctatacctaaggccctataatttcatcactataccatttatattattattatgtttaaatgaaggtaacaaaaagaccattttttaataaattgtacttacaatcttttatttgtaacgaaattattttcctttcaaaaataataaatagcaattaacataagtttactatgagcctcatgcactaggtcaccctttttaacattaataggagttacactataagaagaatctcttcatcctttcttcactctcctaattcctgaaccagattgacttttagataaaggcaagtaaatgtaaatgagtattatctcaatgggttcgttatttacatttcacaataattacaattaagacacacaaaatgagta

SEQ ID NO: 1202 - DNA, 352 bp, Glycine max
  unsure (1)..(352): unsure at all n locations
ggagcactgtgggaagcttctntgaatattacttcatatatttcttgcatgaaactattctccatatgtaattcttcagtgctgcatctaaactcactcacaatatcttcaaagaaacatttatatacatcctgaattattgaaacttgagtatgtgcatcctctatatcatccttaagcttctgaatggtttgtaacaaaattttctgtgtcagttgttgctgtgacaatttttccacagaagcagaaagctgggaagatagactcttaaattccttcttcttatctgatagtgtgtccttcagttgatgattctccgattgtaagaagtccaatctatcctttaaactgc

SEQ ID NO: 1203 - DNA, 456 bp, Glycine max
  unsure (1)..(456): unsure at all n locations
cagcttgagccnaaacccaactcgcgctaaatcttgatctgttttagaatctccatcctcgccctcagaagaaaacaaaaggaaaaaagaatgttcccgaccaaagatcggaagagaactaatagaaaatatacagaaaggtcttctgaccaggcaacatctgaacagaacataactgtcaccagcaaacaagaaaagaaaggaaaccacaatttgaagtggtcctcttcctttgattaccaaccaaaatctcatgcactggcaactttctcgttccgcactaaacaaaaacagagagggaaaggccaaaacactcagagccaaattttccaccaaaaacactattcaccaaaagtcctattgatccgtgatcacatgtgtaatctttgatttgataggaaatggcttgcaattcaagtcatgacatatctatggtttggaattaagatgaaacac

SEQ ID NO: 1204 - DNA, 438 bp, Glycine max
  unsure (1)..(438): unsure at all n locations
ctcaagcttatgctgcatanattacaatagacctcctcaaccttagcttctaaatcaaccacttcagaacaattatgacctctctagtaacagatacaatcccggatggaggaatcaccctaatctcagatggtctaaccctcaacaacaacaacaacaacaacctgctccttccttccaaaatgctgctggtccaaacaggtcatacgttcctcctccaatgcaacaacatcaacaacaatagcaacaatagccacagagacaacaatcaactgaggccccttctcaaccttccttagagcagttagtgaggcaaatggcaatacaaaatatgcagtttcaacaagagacaagagccttcattcagagtttgacaaatcagatggggcagatgaccactcagttgaaccatgctcaatcccaaaactctaacaagct

SEQ ID NO: 1205 - DNA, 441 bp, Glycine max
agcttgacagaagtcacataatgttagaaactatgagcatctcatttcataatcaatgaaccctctgcataattatttaaatatatcaaacaagaaagacatctttcttattttactcggaacactccatcttctctatgatctattaaaattgtgaagttctccataattatcaagtaaaggttcagctcatctgatcatatttgtttagaacataaaaagtatgagtcaaaggaatgcaaaagccacaccaaaatattttcataaccaacaaaaatgcaacgttgaacaagactgaagaatttattatatatctaataattctggtgtatcttcatagtgcatatttctcatcaatattttgtattcaagtaatattttcatgttctactatggaaaataaagacacataacacaagatattgggtggttcatacgaca

SEQ ID NO: 1206 - DNA, 400 bp, Glycine max
  unsure (1)..(400): unsure at all n locations
ggatatcttcctttccctaagatgaaatccccaaaaagtggtatgaaaataagtagagaacagacatggagctacatgtttgcatcatgtatgtaattaatatatagacattcaatgagatatttggcgaaagcataccttatcaggaccaagcttcctctttgaagtagaattcccaaggagttccctataagcaccagtaggcttttttagcacctgaacaattgctccatttccctataattaacaatatagttttgatcaatgctcatcactaggaggaggctaaaacattgaactaaacattgaaaaacaaaaattttgtatcctttgaagtagaaagtgcaccaacatttgcatccctantttgctttgaaattgtgagactatcttgatgttt

SEQ ID NO: 1207 - DNA, 386 bp, Glycine max
  unsure (1)..(386): unsure at all n locations
agcttagagccaattcaaacgacaataacttcttactcggatgtctgattgagtcccgtcatatatcgagacgctcgaaatttaatgctgaagctcttagccaattcaaacgacaataactttttactcgaatgtctgattgagtcctgtaatataacgagttgctcgaaattgaatgttgaagctctgagccaattcaaacgacaataactttttactcggatgtctgattgagtcccgtcatatattgagacgctcgaaattgaaagttgaatctctgagccaattcaaacgacaataactttttactcagatgtctgactgagtcccgtnatataacgagacgctcgaaattgaatgttgaagctctgagctcattcaaacga

SEQ ID NO: 1208 - DNA, 326 bp, Glycine max
tatcacggacctatgaaactaagcttaacattcaatttcgagcgtctcgatatattacgagtcttatatcaaacatccgagaaaaaagttattgtcgtttgaatttgctcagaggttcaacattcaatttcgagcgtctcgatatattacaggactcaatcagacatccgagtaaaaaggtattgtcgtttgaattggctcagagcttcaacattcaacttcgagcgtctcgatatattacgagactcaatcagacatccgagtaaaaagatattgtcgcttgaattggctcagagcttcaacattcaatttagagcgtcttgata

SEQ ID NO: 1209 - DNA, 400 bp, Glycine max
  unsure (1)..(400): unsure at all n locations
agctntaacctcattgtctctcactttctttatatttgggagccaatccaatccttgtgtccggactctcagccacttatgatagccgccgatgatcccattactgcttcccctaagctctctgtcctttcttcacgccgcatcccatgccttgcgaactccttggagtaccctcgcgttgtggtcactgaaaccccgtgcgatgaaaggcgtgatgctttcgtttgatggcactcctctcatggggtagccaagctgtcttatggcgaggacgggattataattaatacaaccccttgttcccatcaagggaatatttggacatccttcgcatgaagatagaatcctgattcttccttccttctagcgagggaaccaattaacagacgcccctccatgc

SEQ ID NO: 1210 - DNA, 328 bp, Glycine max
tgcttgtggagcttctatggaggctggatctttgagcttcattgaggtccttcaatggtgatttttcaccatggagatgcagcagaaggcaaaggagaagaggagaggggaggcaccatccactatggaataagccaaggaagaaggagcttcaccaccaagaattgccttggataagaagcttgaagaggatgctttaatggaggaaaagaaagagagaaggggggagcacgaaattgaatgaatgaaagagggaaagaagtggaactttgaagtgtatctcataagactttcattcatcaaagttataacaagtgttacacatgct

SEQ ID NO: 1211 - DNA, 432 bp, Glycine max
agcttgttactataaatgatgttctgttgaaaaagtattggttatgcgtgttctattaaatccttggcaagtgtaccacatcgtccaagtaatattttaaaacgataagactgagtgtcaagtccacaaggactttgactgtatttagagtctgtatatgcctaattttaagcatttaatgaattgaattgaatatttgtcaagtgatgacgcataaatataaattcgatgtgaattaaactacaaagaaaagcatgtgcaagggtgagaaaacaaacactcagagtagtgaagtgacgaaagatgcaaaattacggacatgtcatgggctcagcccaccaaaactactcttgatgcagcatcaaggagttttctctatttaaggctattccaattattacctacatacactaacctactctagccatgatt

SEQ ID NO: 1212 - DNA, 306 bp, Glycine max
  unsure (1)..(306): unsure at all n locations
tcggaagaaagtgatgaggtacaagccctaaaggcagagcttgaaagagcccgggtagtcaaagagaagttcaagtccatagccatcaaagtctgaagagagtatgatgaactaagggacgtcaatatggccaccgctgaagccttggaacgagaaaccaagaaggcccgaaaggaagaacacgaccaaaacaaagttntgaggggatttatagggcagcaatagtgagctcaaactccgaagaggtgaaaggaatcatcacgggtcaaaggcatgatctggaaggacgagctaaaggcttgcttt

SEQ ID NO: 1213 - DNA, 246 bp, Glycine max
agcttgaattgtgcaaggggattgaggtcatgcatggacatcacaaaatccctaacactaacatattgcggtcaccgtcgtcgtcgacattcgttcacaatatcaagttgttctcctttccagtctatagctacgcctattttctatttttcttttttcgtttgttaggttttggttttggtttgtaggttttgcttggtgctattgtttttcacaacggaggtgagatggtggtgttgactattg

SEQ ID NO: 1214 - DNA, 401 bp, Glycine max
  unsure (1)..(401): unsure at all n locations
taatacccaaaatcacatctacacgaccaaggtctttcatatcaaattttctagacaagaaagacttcacatcatttacatattactaccaaatatcaatatgtcatccagatacaaacataaaatgacacatccactatcatcaaattgtttcatatacacacattatcactatcattaatttgaaaaccatacgaaagaataactngatcaaacttttgtgtcattgctttggagcttgtttcaaaccatatagagatttaacaatttatttttcaaggaaaaacattttcaaagaaagtgacatctctagattccataatagtaccattagaaatttttgacacttctgaattaacaactaagaatctataagaagtatcatgttaagaatatccaac

SEQ ID NO: 1215 - DNA, 438 bp, Glycine max
agctttccatatgaatttaatgtaaatttcacttcagttccatgtaaaaaggagaaaaatttgaaggtgcacttgccggttagatttcacatccacaaaaacaagtagtaccaggatgcgaacaagtattttggcaccgttgctggggaacttctctttatttggaaaagtttagttcaatttgtaggtgtttattctttattcattaattcgttgttttgtttttgtgaatatttgtttactacaaaatttatttttcttcggaattggttaactgttgtttatgattagttgtgtatgcatagaaagtcctctgcaggcaatttgattccaatagacttggaaatcgaagcaacttgtagaaggatcagagcatataggcataggaaatttttacaagatatagaaacaacaacaaatcttgaagaacctcagtct

SEQ ID NO: 1216 - DNA, 429 bp, Glycine max
gggaaggatgcttcaatggaggaaaagaaagagggagagaaagagagaggggggagcacgaaattgaaggaataaaggagggagagaagtggaactttgaaagatgtctcacaagactctcattcatcaaagttacaacaagtgttacacatgcttctatttatagactaggtagcttccttgagaagctttcttgagaaaacttccttgagaagcttctttgagaaaacttccttgagaagctagagcttagctacacacacccctctcataactaagctcacctccttgagaagcttccttaagaagattcgtaaagaagctagagcttagctacacatacctctctaatagctaagctcacctccttgagatgagaagctagagcttagcttcacacccccctatatagctaagctcacccccatg

SEQ ID NO: 1217 - DNA, 440 bp, Glycine max
  unsure (1)..(440): unsure at all n locations
agctntataagtgcgggttcgggagacaaatgtcaagcgttcgcgatatgcgaagatgatattccgagtactttggatttggtacgaccatgctctcctgatttccagctgggaaattggcgagtggaggaacgccccggcatttacgcaacaagcataatgtaaacctttacggttttaaaagctctgtagttgggcctaggctttagagttttcattttgttaaggctttgtgtcttttgtgtttgaatttataatacaaggatctttcttcatctgttcctggtctctacccattctcattcatttgcatgtttacttctttttctaaaacggcagattcgatgacgagtcccccgaaggtactaatacctgngacccgtctatcaacttcgagcaagaaatgaatcanacggaagatgaaggagatgaggatgtgg

SEQ ID NO: 1218 - DNA, 346 bp, Glycine max
taggctaaattgggctaaaattttgtaagctgcttaagcctagtctagtcttacaagagggatatgcggatgaaactcagttaaagttagtctaaacctaagagggccgtctaaatagggcctagtccaacaacagggatctgaggacgaatcttggattgattcggtctgacgagggatcgaagtttaataatttaggctacaacatagaacacaagagcatgattggttagagaaatatatttatatgcataatcttgtttgttagaaagacccaacatttctacctactgttgtgacttttactgagcctgcattttatagcttttagataaagtttagttta

SEQ ID NO: 1219 - DNA, 412 bp, Glycine max
agcttgaagtgagaaagtgtggaagagtcagtcttcctacttttattcgttgaccacagagtggtacctggagatatgtcgcaggggtcaggagaccttggggatgtcaggtggggtgctattgcccaaaaccaagcttaaccaatcccgacccaacccaggcatagtcagtcagtgagaacctgtgacgtacctaaacaagcgagctcctggcagtcaaccgataaaagaacaaagaccacaaagcaaggaggcttgtgtggtggctggccagctatggatcttgagtgatatctagaatatggcctctggtaatcgattaccaagggtgtgtaatcaattacaaggcttaaaaatgaagacaggaagttaagatggcctctggtaattgattaccaagggtatgtaatcg

SEQ ID NO: 1220 - DNA, 417 bp, Glycine max
tgtaccaacattcattagtccagtacacactcaacaaatagtcatcatccatccacaattccaatcattcatgctcaatatgatgcatgcacctgacctcaactatcatatgcaatgtggtaccatccccaaggaaatagcctaagcgtgtccacacgacactctcacttgggaaaactaggcagtaagtgtcgaagtcaccctatcgtgcacaggcaactccaccccccccccttcacagtgatcagcctgagtctcaagggagttccaaaccgagtgacatgcccccaagtacaagtattcctcctcatgagaaactacaagtacttactaataaagtttatactatttccatgtcatatgaagtatgaaacatgggcactatcaaatgcattaaccgtggataattaaaagatt

SEQ ID NO: 1221 - DNA, 453 bp, Glycine max
  unsure (1)..(453): unsure at all n locations
agcttgtgcgaatcanaatcactcctgcattttatctctagcatgcattctttctttctttacccactcctcacgtttggtttttttttggggaaaacaccataactaaacgcgccacaaggcatccctatcgcaccagatccaaatctagaacgatgggtgatcaagaggagacacaggaacagatgaaagccgacatgtcggctctgaaagaacagatggcctccatgatggaggccatgataggaatgaggcagctcatggagaaaaacgcgactaccgctgccgctgtcagttcggctgccgaagcagacccaactctcttggcaactgcgcaccatcctccctcaaacatagtaggacggngaagggacacactgnggcatgagggcagccctcacctgngatacaaccgagcggcttacccttatggattgccgcccaactactcac

SEQ ID NO: 1222 - DNA, 326 bp, Glycine max
  unsure (1)..(326): unsure at all n locations
ctaagcttctcctctttccctataatagggggaggagggaagatcttaaatgttcaaccctcctggtatctgaggatcacttaaaattagtgagaaaaattgttttcgtgaagaaaatccaagccgaggcgctttcgtaacgcgtccgagacgtnttcctgggtgatttcctgaagattttcctccattcttcatcgttctttggtcttatacctgtaagtttccgaaatcgaacttttcaattcattctatgtacccttggtggtccccacttgtttcacgtacttttattttcatttcatttacttttccgtacccccttttga

SEQ ID NO: 1223 - DNA, 450 bp, Glycine max
agcttgtaaggatggcagaaatcaaggaaggattatcaaccacatcctcacagtcattgtttcactcaagctcaagtgtttaggctcattccatcataaacaactaacacaagtcccaacctttgcatttcatctcatgtcatacagcaatgaacacacaaaatgaatccgaaggactttctagtcttgtaatggggttaggcttccaacaaattatggtttttctaggattcaaaagcttaggttctaggagagcattcatccatagataaaccttcacttttcattcattcacaccccaatactttccttttacttaggcactcaactttatttcattattttgcagcatacacacttattagtttcatttgtatttacagttttttttaacacaatatatacaaagacattatgtgtatatacaaaaatagtgtgtgtatgctcttt

SEQ ID NO: 1224 - DNA, 306 bp, Glycine max
tgaattcattctatgcacccttaggggtccaatcttgctttgtatgttttcatcttcaacttgtctactttcggtattctttttcttcgttttaagcgggtttcgatcgatggtttaagctgtaatctcacttaattaatgtttaaataaatttcaaccgaccatttgcgttgtaatctcatttaatcgcctctaaaataaaattcaaccgatcgtttatcctgtaacctcggttaatcatcaaaaaggcatgtttcaactggacatttactttgaaagttctcttttaatgagttgagaaataac

SEQ ID NO: 1225 - DNA, 406 bp, Glycine max
agcttgaagaaagagcttcaactttcatgaacaagtcatggtctaaaacaacctaaatcatggacaaaattgagcctaaagttgaagacgctaatttgcttagacaacttgatgtgtgtgcaataatttaaagattgcttgatctacaaaagtgaatttgagattatctcattgcctatgggaatctaataaaaatatctacatatttcatgaagaagtcatgagctaatatggctttcatcttggacgaaattggtgatcaagataaaaatgtcatttgatatgtgtgcagtagtttgcgagtgcaacagagcaaaaagccctaaaactggcggttataattttacattctttaggcatttatgggttgatgtcacttgcactggacgatgtgatgacatgaatt

SEQ ID NO: 1226 - DNA, 395 bp, Glycine max
  unsure (1)..(395): unsure at all n locations
cggatggagaagaagagagtgcgaggaaaatagggcttgctttctaatatttntaaatgtagcttcaacatcagttttcaatacaaaactgatgttaactatgtgatgtaaacgttaacatcggctttatgaaaaaaatcaatgttaatgaagtcatgttaacatcggtttttgaaaaaccgatgttaatgtaagttcgttaacatcggttttctgcaaaatcgatgtcaactaatgcacattatttacaattatgccaccgcatttatgttaacatcggttttaccaaaaaccgatgttaacctgatgatgttaaatctatagtctctagtagtgcctttgaagcagatgtaaaagaacgtcaacgaaagattacgatttgcccttcattgatt

SEQ ID NO: 1227 - DNA, 461 bp, Glycine max
  unsure (1)..(461): unsure at all n locations
agctnnttgtaattaaataaataaagagaaataagtgtattaaaatattagtttgagagaaaataaaaaggcattttatttatgcatttgataacaaataaaatagagtttgtttttataaaataataggttgtgagtaccctagatataaatagtggtatgttaggtcagacagaaatttgagcaccacgttcgcaaaaccctttctttttcccgcagcccaccaaacctgtctcagatctcggactcattcaccgttggatcgtagtgaaatttgagaaccacatttgcaacccaattccgagcatcgcatcgttgggaattgaaaaaacatgtcgggtctaagagaaatatcctttgcatcatagctntctcttttcccgcagaaacccaaaacagtctcagtaaaactacaattccaggtttcgttaaccggtggaatttcattgatatttgatatg

SEQ ID NO: 1228 - DNA, 410 bp, Glycine max
  unsure (1)..(410): unsure at all n locations
ctcagcttccaactcactacgtccacaatatatacctgacataaccgtaccgctaacatatgttaacataaagcatatcttatattacggtcgtaatttaagttaaaatacaaggaaaaattgtggtctaaaattggagcagatagtaggtgaagaagttctcaagatttttctcccacggagaccaaaaccaacttggaactggcatggcaactataggaattggagtaggagtgacgaagctccaaccccacaaaccaaagtctaagtccttgtttcttggccagaggcttangattagaccattttggggggagcctcaatgcagtgaaagaagattattcagtgtctcaaaccccccaagagtggttcaagtttttgcactagcgggtggtgaatggcttgacact

SEQ ID NO: 1229 - DNA, 435 bp, Glycine max
  unsure (1)..(435): unsure at all n locations
agcttgttgacttttacaataaaacgttaaatttcatattaacataatttatgattcaatgtcaatgtgaattntttttacaatgtcattacatgatcgatcattaaactcttcttataacaacatggtgttatctttgtttaagaaaatttctccaagttacaagttaattaaaatatcgatgactaagctttcgacaagattaaagtgacgttgtttctatcaaaatattgtctttcgataaaagatggtttcttgacaaaattattatgcacatggaagaatagagtgctcgcaggaggagtttgaatttgaatttgaaataaaagttacaaaagttagcgaaaagggttacttgaagacattagacgtcgttagatctaaataattaggaaccttgtgtactcgtgtcaaatatctataattcgaacattt

SEQ ID NO: 1230 - DNA, 441 bp, Glycine max
cgcttgatgtttgtgttgaatgcattaaaggtaaatataccaatagaaagaaattgggtgcatatagagctacaaacgtcttggaattgatacatacggacatttgtgggccatttcatacaccttcatggaatggtcaacaatattttacatcactcatagacgattactccagatatgcatatatgcttcttatacatgaaaagtcacaatctctagatgtgttcaaaacatttaaagttgaagttgaaaatcaactcaataaaagaatcatgagtgtcagatctgaccatagtgatgaattatatggcagatatgacagttcaggtgaacatcgtccgaggccgtttgccagctacttagaggaatatggaatcgtcccacaatacaccatgtcggggtcacttgcatgaacagtgtgactgaaagacgaaacataac

SEQ ID NO: 1231 - DNA, 442 bp, Glycine max
agcttattccgttgttttttttaagagaacacatgttggttatttatagagaaaacagtcataactgcctatgatcgattaaatctacaaggtaatcgattaattcaatgaactaatcaattagattatctttttaatcgattaagatgcatgatgcacaaaatatatgttatggactaagatgcaacattcaatataacaaccaacacatatgccactcaagggagttgggcatgtaaaagacaaaacatcttcaagcttttcttcaagcttcaagctttagtcttcatgttgttcatgttgcttgatgtgtcatcattttctcatatttcttaaccctctttgtcaacattttaattactgattagccttaattgtcacattaattatgcaattttatcatttgggcctactggataactttgtgttttaactcaatctt

SEQ ID NO: 1232 - DNA, 334 bp, Glycine max
  unsure (1)..(334): unsure at all n locations
tatcgctggagctgacccatcaactgccctaactctcttttactagtgattcctaggctcttgaccatgacttgagagaaacctctttntaagcgaaggcgcctgactcgatgccatgttttactaaagtgaaacaaaatccagggcgaatcgaaactccaacatctatcatgggtggaatggaagaatgcatgaagaaatgcatatgacgcaaaagcattctatgaatacaggagcccgggaaattgtcctcttcttggatacaacattctggcaacatggcgctcgacatatgcattttagaaggcgacactgacccttcgtctatttgaca

SEQ ID NO: 1233 - DNA, 308 bp, Glycine max
tagcatcactcttaattgtatcattgtgagctttatgtgcttagggaggaaaaacagaagcaaccaaataattcacaatattggaaaactagggagtggggaaggaatcagaaatactatacagaatgtacaaatggtcatccagaaaatcatcccgaataggtgagtccttagacacacgctcaatcctactcaagtggtcaaccacaaggttctgtgcaccgctccgatcacggatctccaaatcaaactcttggagccaaagcatccacctaatcaatctaggctttgattcagccttcttcaac

SEQ ID NO: 1234 - DNA, 444 bp, Glycine max
  unsure (1)..(444): unsure at all n locations
agcttctaagaaaatntanaatttgtttcaattaatagactagattattatcctaaactagaatagagtttttctaataagccaataataaaactaagtgaaagcaatgttgcaggtgaatgcagaccttgacatggaactaaatccccaagcacaaccatggccatatcaagcgaagagccttaatagaatgtttggaaatggtaatcctcacaacatttgcaaattgcaaggacacatatcactaacagttccctcttcccatgctaaatttaattaagagcatgttgttccagtttttcttattttcatcctctagtgtgctcagcataggagattatgtgactgcggaaggaagggtagtagtacgagatcatgtatctatcatatcaaaggtatgtaattgtttcctgatcttacaagttaacctctttggaattcttt

SEQ ID NO: 1235 - DNA, 276 bp, Glycine max
  unsure (1)..(276): unsure at all n locations
tctacaaattataagcgcacaagtggagcttatctcatcatgttaaactcaattcatctnactcgtattcttctcctataaataataatgaaagagttattcaacacagcttaatgctttgaagtatgcaccttgtgtactagtccaaaacccccttctcctcacttgttatttacagagaacctgtttgttatagcaatgattgatgcataactgaagactcttgaatcactcctcttcttaacttcacaatgatgtttactaacagcatatcta

SEQ ID NO: 1236 - DNA, 450 bp, Glycine max
agcttgcctaattaacctgaaattgagagattatgattattaaacacacaaaatgagaatactaagtatttattacctatacttaacagaaaatacttttaacactacaaaataaccataaattgggagagtttgatacaatttatacaagttttatacacaaaagttagtcattttcaccgactaacaaccacacccatatgagcaatgtgctcatgaaaaactttaggtatcaaaccttccgtaagtgggtcagctagtatatcattagtccttaaatgttttatggaaatctgtttattctgaactctttccttaacaaccaaaaacttgatgtcaataaactttgatttggttgtactcctattgttgttggagtaaagaactgccgatttatcgccacaataaatttgcaatggtctttcaatgccatggaccacacgcaaacta

SEQ ID NO: 1237 - DNA, 410 bp, Glycine max
ctttcgattcattctatgtacccatggtggtccacattgtgtttcgtgtatttttattctcatttcatttactttttatacccccttttgacgtgcttaagccattttacttaagtcatttctcgcttaacttaaaaataaaataaatttccaccgaacgtttgaattgtatgatccgtaaactctggttaagataaattctgaccgttcggtcgtgccgtaaccacgttggaaatcaaaaaaagagattaaattataatataataacaaaaatataccttttagtaaaataaagcggaaaatcaaccggacattttctctttgggatttctcattcttaatcgaattgactaataactaaggtgaaactaaggctaaaatcaactcgcctagtcaagctcgtccacgaa

SEQ ID NO: 1238 - DNA, 413 bp, Glycine max
  unsure (1)..(413): unsure at all n locations
agctntnntattttagcagatgaagatgaatctgtggccacctcatggactcctctaaggacaatagcataatttcttgcactgaattgttgggagttggaagccatcttctcaatcaaattcctagcctcaacaggagtcatatcaccaagggctccaccactggcagcatcaatcatactcctctccatgttgctaagtccttcatagaaatactatagaaggagttgctcagaaatctggtggtgaggatagcttgcacacaatttcttgaaactttcctagtactcatacaagctctctccactaagttacctgatgcctgaaatgtcttttctgatggcagtggtcctagatgcagggaagaatttctccaagaacactctcttaaggtcatnctagctggagatgga

SEQ ID NO: 1239 - DNA, 349 bp, Glycine max
  unsure (1)..(349): unsure at all n locations
taggctaaattagtctaaactntcgtaagctatttaagctgagtctagtccaataagagagatctgaggatgaagcttagtttaagttagtctaaagctaggagggctgtctaaattaagcctagtccaacaagagggatctgaggacgaagcttggattcatttagtctaactagggatcgaggtttagtaatttaggctacatcatagaacacagaagcatgattaattacagaaacatctttatatacatcagcgggtttgttagaaagacctaacacctttacctactattgtcaatcttacttgcatttttacttattttagcctagacttagtttnaatttgt

SEQ ID NO: 1240 - DNA, 434 bp, Glycine max
  unsure (1)..(434): unsure at all n locations
agcttgcctcanagagatccaggatggatntttcgaccgaaggaaccagttccgctcccgagtatgacacccacctctttaggagcgctgaacaccagcagcgcgtcgaggccatcaagggatggtcatttctccgggagcgacgcgtccagctcagggacgatgagtataccgatttccaggaggagatagttcgccggcggtgggcatcactggttacccccatggccaagttcgacccagacatagtcctcgaattttatgctaatgcttggcctacgaaggagggcgtgcgagatatgagatcctgggtaaggggtcagtggatcccgttcgatgcggatgctatcagccagttcctgggatatcctttagtgctggaagagggccaggagtgcgagtatggtcataggaggaactgggctgatggtttg

SEQ ID NO: 1241 - DNA, 295 bp, Glycine max
cttgagccaaaatcctgactcaccataaaccttgacccattgtgagaatgtcaatccttaccctcggaagcaaaaaagaatagaagggaaatttccaatcaaaaaagaatagaaggaaaatttccaatgaaagcaaaaaaagaaaagaaggaaaattccccaatcaaagagtgggagaaagcaaaatgaaaagaaaggaaattcccaatccaagaatgggagaaagtaaaaaaggaagaagaagaatgaaagaaagctcctgatcatggatcgaatgaaaaacagataaaatgtg

SEQ ID NO: 1242 - DNA, 454 bp, Glycine max
  unsure (1)..(454): unsure at all n locations
agcttgttgtgtcttatccaatgantttctttgatagatagtaggcaaattacaatttgatttgatagctcactaagattgatcttatagagattgcctttcctcttagtagaaaagagcttagtcccatttttattttggacaatacacccttctttgttaaaggaaacatcatttccattgccacataattggcttatgctaagcaaattatgtttgagcccttcaacaacaaaaaaaaaaaaaatctataagaggatggggatgaatacttatcttatgtactcctgttatcttcactttatgattcttgtcaaaaaagactattccaccatgcataggggttaggcattggaagatacacctttctcctatcttgtgtcatgagcattcgttgtccaaataccatgaatgatgtatctttcttttggttaaagatatatgcaacaagaat

SEQ ID NO: 1243 - DNA, 366 bp, Glycine max
  unsure (1)..(366): unsure at all n locations
tccattggtgtctngaagtctaaagccgatgaaggacatctgttaatcacataggctattgtgtttgcagcttctccccaaaaggtctttggcagtccagcacttatcggcatgcacctcactctttccaaaatggtcatattcattctttctactaatccattctgctatggagtgtaacggactattgagcgccgtttgatacctgatgctccgtcaaactaaacgaattgctctgaaacaaactccatgccatttttactccttaaaactttttgtgttgtaccaagctgatttccaataaaagtatgtcactctctgaatattttaaaagcttctaatgtgttatttaaaacatacagccat

SEQ ID NO: 1244 - DNA, 426 bp, Glycine max
  unsure (1)..(426): unsure at all n locations
agcttgaagggacacccacatttcctagtctcagtgtctcttctgataaattctttnttcctacacttatactcgccactcctttcacagccaattaacacaaacgtactccttcctctactacctgtgtttgtgtccgaccttaaaatcatcgccacaaatccgttttcatgagccacgaatcgagcccaccgcanaacatcctctcggcactcaaatacctacaaaattcacataatttaagttttctaccagtattcattttattaaatatgtgacaaacattaacattataacctgagaagtcttgaacgcatccgaacaatcaacatgtagttcattcgcaccacatgattctgcattttcataatccatatccgctcgttcagacattatttcatacatccactcatcttcatccatcta

SEQ ID NO: 1245 - DNA, 274 bp, Glycine max
agtttatcttaaagaaaaggatagactcaaaattcttatctctagaatataggaactggctaattaaaaacaagtggagtggttcaaaatttcaggtaaagctattttattatttcgaacaaactttcttaattagtttatacttataatataaaatcatttatactctgatgtacgaaaaaatcttgacaaacaaagctaatcgaagcaaacaagaaataaaatcaattattggcacaaaatcaattgtgccaaaaacattttaaatggtaac

SEQ ID NO: 1246 - DNA, 452 bp, Glycine max
  unsure (1)..(452): unsure at all n locations
agcttaaataaatgcaaactctcatttgtttcttagaagaaatataatatattataaattaagtataactttaagtttgttcaaatatttaaaaaaatataacttgctaatatattcattctcaaatatgagactatattaacaattttaaatattttgtactattatattttgagaaaggaccatgttctctcatagatagacactacgtactttaacaaatgacattttttagcatttaacaaagctttactcttattactatatataaaaaaaaatccttgtaattgatagcaatggtcctcacacaatacttaaaaagcatgaattagtaatttttacatgaaatgacaccagaaactacgcagtgttagtagaaggccaactcagttntaaatagtgttcttattatgaaaaaacattattgctgagagcgatgtgatacttaaaaa

SEQ ID NO: 1247 - DNA, 311 bp, Glycine max
  unsure (1)..(311): unsure at all n locations
nngaagcatttttacaacagagagtttcatctccagatcagcagtgttggttggccaaactgctaggctatcaatttgaagttaagtacaagcctgacttagagaatagagccgatgatgctatgtccagatgtcatggttaggtagaaatgaattctattatttcttttcccttgtgggctgatagacagaaacttttggatgaaataactaatgacccgtacatttaaaagttactgaaagaagtgtaggagtctcctaatgttagacctgngtttcaggtgaaacatggagttttactttatcatggc

SEQ ID NO: 1248 - DNA, 453 bp, Glycine max
  unsure (1)..(453): unsure at all n locations
agcttgccgctggagctgacccatcaactgccctagctcttttaggctggngattcctaggctcttgaccttgacttgataaaacctctttttaagtgaaggcttttgacttgatcccatgttttactaaagtgaaacaaaacccagcgcgaatcaaaactccgacatctatcatgggtggaatggatgaatgcatgaagaaatgcatatgatacagatgcaatttatgaacacgggagcccggtaaattgtctccttcttagatacaatgtcttggggtaacacagtgcccaacgtatgtatttaagaaggtgacacggacctttcgttggtttgccaaagagaggggattaagacgggacccacgcatgatgcatatgcgaaaggtacaacccggggatgtacatagtatgacaatattcacagaatataagccaaagggtacatgacact

SEQ ID NO: 1249 - DNA, 383 bp, Glycine max
  unsure (1)..(383): unsure at all n locations
tgtaggattatggggtacccatcacatgtggtactaggtggcggtcgagcgatggtgcacaacangttttccacattcacaaatcgcgcataaacccaccatcccctgttgcccacctccaactgagctcacgtactcccacgtagcccatatcctcatttctctcaacactgggtccccatcaaccctcccaagctttcccaacatccaagtaattcaacattcaaacaacacaaactatcacagccaataaaacaaggcaaaggcagaaaactctgcccaaaacaccaaccaaaatcacagcttttctcacttaaagaccccagtaacaattccttcgttccagttcgttaaccgttggatcgactctaaaatttaatgga

SEQ ID NO: 1250 - DNA, 438 bp, Glycine max
agcttcaggttgctcattgactccaaatttctgcaagattgacaaagatctgaatggtgatctgcagaagaacatagaccacagactcttgcaacaggtgtagatttctgattcatggcaagctgggttactaggttgaccaaggcatcaagttttccttcaagctttttattttcagtagatgaagatgaatccgtggccacctcatggactcctctaagaacaatagcctcatttcatgcactgaattgttgggaggtggaagccatcttcttaatcaaattcctagcctcagcaggggtcatatcaccaagagctccaccactggcagcatcaatcacactcctctccatgttgctaagtcccttataaaaatattgaagaagacgttgctcacaaatctggtggtgagggaagcttgcacatcaattcttgaat

SEQ ID NO: 1251 - DNA, 454 bp, Glycine max
  unsure (1)..(454): unsure at all n locations
ntccaaatgaagaatggagaaaccatttcagaacttcaaacaagattctcccatattgtgaatcaccttcttggtcttggaaaaaagtttgaaggtgatgagctaaagatcaagatcctcaactgtctcacaagaacttaggaaccaaagatcacaaaaatcaaggaatctaaggacttagcgtcaatgttgatggaagctctctttaaaaaattgcttgcaaatgaacatgagttgattcaacaatctcatgcataagaaacagaaaagaaaagaaaaggagttatactcaaggtcaaatatttaaaggaagattacaaagaaagctctagtgatgacaaagatgtagagaaattaagcttaatggtgaagaagtttggaaaatttctcataagaaccaaagactaaataatctcttaactctcaaagaagatagaaagtaacaacaccttca

SEQ ID NO: 1252 - DNA, 445 bp, Glycine max
agcttcatgcaactatcaaaagaacatatgctctgcttagtgcgcacattcgcgttgattggatggccaaaatcagacaacatccatcggtatgttttcgacgaatatttactgacggtctcttttcgacggatatttactgaccgactacaaaatttcgtcaattaaaatttcctatgagcattttatcaatggattttggtccgttagaaatactgaaataccgacggattttcgaggttaacaatggatttgtgtcatcaaaaataccttttttggtagtgaacacatcattaactcacaagatcaaatattgtcaattagttctgtcaaataatagtctttctttggatcgaccattattcatatgaaaatactttataattgtcacatatttatcatcatatgtatgttattatttggtcaaatcgtgtcttcctttggg

SEQ ID NO: 1253 - DNA, 270 bp, Glycine max
  unsure (1)..(270): unsure at all n locations
ttggagtntccaagtgccaattcgactgcttctttagtccagtcttcttctagcttcaatccatcagtgggctttccttctgtgtccagcatcttgggatgttcccagcctttgatgacagctttccaggctctgctatccagtgatttgaggaaggccaccatccttgctttccagtattcatagttggttccatccaggattggtggtctgttcactggtcctacttttttctccatgttcatcagaatttatcttcctagatctcac

SEQ ID NO: 1254 - DNA, 427 bp, Glycine max
  unsure (1)..(427): unsure at all n locations
agcttgaagaggatgctntaatggaggaaaagaaagagagaaggagggagcacgaaattgaaggaataaaagagggaaagaagtggaactttgatgtttatctcataagactttcattcatcaaagttacaacaagtgttacacatgcttctatttatagactaggtagcttccttgagaagctttcttaagaaaacttccttgagaagctttcttaagaaaatttccttgagaagcttctttgagaaaacttccttgagaagctagagtttagctacacacacccatctaaaaactaagctcacctccttgagaagcttccttgagaagctagagcttagctacacacccatataatagctaagctcacccccatgaaaaaaaaacatganaatacataaaaaaaatcgtactacaaagactactc

SEQ ID NO: 1255 - DNA, 460 bp, Glycine max
  unsure (1)..(460): unsure at all n locations
ttacggaccttgaaactaagcttcttatccaggctcatcttggtggtgaagctccttctttcatggcttattccctagtggatgacacctcctctcacctcttctcctttgtcttccgctgcatctccatggtggaaaatcaccattaaaggacctaattgaagctcaaagatccagtctccatagaagccacacaagcaagcttccatcaaaattagacctacgtagttctttcataagaacagaacgttggttaagttgttttgatatttttccgcaagatcgattgtaaccgaacaaaagtcgtttaaggtgttgggcctttaaacgatctttntgatntttgaaaggaggggagcactgttaaggcgctggacctttaacgatatcttgtttttgagaggagagaaatgttaaggcgttggatctttaacgatctcatggtgtcgacaaaagcggg

SEQ ID NO: 1256 - DNA, 211 bp, Glycine max
  unsure (1)..(211): unsure at all n locations
agcttgcttctacaggcctcacaccttntattgtatgaggtttcagtagccccaacgcagaggtgctgcaaggagtccgcaaggcatgggaaatggtgcaaaagaaagacaaagaacttatgggaagtatcaacggggccgtcgacagctaccataggtggttgaaagcctatgcacaaggtctgagttggcttctgaagctgagagctgc

SEQ ID NO: 1257 - DNA, 311 bp, Glycine max
  unsure (1)..(311): unsure at all n locations
tcttagatctgtcagatccaagcccagatctatgtctagatttaaaaatagtattagaggaagttgctcaacttccccaacctccaacactaagtttccttcgtcggtggagacgtcaaggagttcatgttgattcattcctctattgacaacaagattcaggccatttgcaaagggttgactgagttgtggaaacaaggaaaaatctagttacgtgcatggaaatntgaacccaaaaccaaagatttgagaataattcgtttctttgatttgattttggttgaatttctgtcatggtgtgaataatgcat

SEQ ID NO: 1258 - DNA, 432 bp, Glycine max
agcttgccttcaatcacagccactgtcgtcttttttgtagctgatttctgaactccaggtgtactctggtatagtgcctgtggcctgcaaatatcgttaactgctgttcaccggcgttgactgattgcaaccactgtgttttggattggcaaccccaccagcagattatctacgttttatcttaatataaacaataattcaacatttcaactatataataaagcaaagtagcaactagcaagtctctgtgagacttctaggaaaggaccttcagttgataccaaatgatgagatacttgggagaaccacaccgcaaaagctagctgatgtagttctagagccaaaggcctaataaacctcacactagaatccatacttccaatgtgggactccaggtcccatatctttcaactggatcctaacgctaaacat

SEQ ID NO: 1259 - DNA, 246 bp, Glycine max
  unsure (1)..(246): unsure at all n locations
tatgcacggaaaatgtaatttgagatgctcgaagaaacactctttttctagttaaccatgcattangtaccatgttcaattatttcgtttgggaggtgtgcgtctttatttttaaatgggtttatgatcccaacatggttggctaatggtgcctaacacatgcaacttagaatgtatcgagaaagtgaacgctttccccctttcgtttttgccctggtgatgaaaacgcaaggttgagcaaacatg

SEQ ID NO: 1260 - DNA, 451 bp, Glycine max
  unsure (1)..(451): unsure at all n locations
agcttcttgtgcatccatgttntttcttttgctgtgataggaatnggagtacatactactttattcattattttaagagaaacaaaatggatccaaaaaagggcttaaatttggtttatatgcactccaatcatcaacttttgtcaagaaaggattaaacgtataaaaaagaggagacaagattgtgggacattagtggagatgtgtaatatcccaaatttatggactttagaaatattaataaaagataccttgtaaggattagctttaataattaatggttaaaggatacccttaagcattattaataatagataccttatattacgaactaatgagcataggagaataagacctagatggggagccaaggcccaacaaatctactcacacaagtgatttatatggaagaatgaatggagtagtagtgtgagaaagagaaagttagaga

SEQ ID NO: 1261 - DNA, 382 bp, Glycine max
gtggaaaattttggcacggaatcatcagaggtggctaagtcttaagatggtcgcgttgttggagtctccaaaatgatatcctcatctttttcacggtcagctgagagagctccttcctttaacaacgagacacaaatagtgttatgccttgtggacgggtgccactctgatctcagtaactgcaaagactatcatagacgccataaggtccgtgaagtccattccaagactacacaggtcacaattggaggtcagaaacaaaggttctgccagcagtgtagcaagtacatgtttcatatgaaatttctcatcatttgctctcttaattaatgttgttactatttttttaatttggataatgtataatttgatcacccggagt

SEQ ID NO: 1262 - DNA, 438 bp, Glycine max
agcttagttctctaccagtcttcgcacagcaaaagctctcaaaactctctggaacttggacctttctctccctagaaatctctaaaaatgcagaagctcaaggaaaagcccaaactcccttctccatttttgatttcaggcttaaataggtggccccgttggtgcttgcatgcttagtgcaactctggctcgcttagcgcacataagtgaatttcggcttagcgcgcatcttctcgcttagcgaatgcatgcacgctgtgcgcttagcgagatgagccttcacttagcatgtgtgtccagctcatccttcttccagattctacctcacgctcaactgcaggagttgtgcgctcagccacaagagtggtgcgctcagtggatggctcgctaagctgacagattggcttataaagcagatcaaaatcaacatttcacaaa

SEQ ID NO: 1263 - DNA, 418 bp, Glycine max
gcttctcctggaacccgtaatcgcataccttctcgttacccctaaatccttaattcccaaaatcacatcagcaatacgaacccaaactgaatccttagaacgtgagacacgtgaggtgattagtctcctccttctcattggtgttcgtcgagtttttgggcttctgattcagtggaattcgttgtcacttggtggttgaacgacgggaggtgtggaagctttgtgactttgtgcgtgtgagcatcatgatactcatagggaaatggagcaccagtaattttgcaggtaagattccttattgtattgaagctttttgtatattgccatggtcgatggttgtggtccctatgtggagttgtttgattggtgtggtctacaagttgtttttcacatgggtggtcattctttattcatgttc

SEQ ID NO: 1264 - DNA, 440 bp, Glycine max
  unsure (1)..(440): unsure at all n locations
agcttgtaggattatggngtacccatcacatgtggtactaggtggcggtcgggcaatggtgcacaacaagttttccacatccacaaatcccgcataaacccaccatcccctgttgcccacctccaactgagctcacgtactcccacgtagcccatatccttgtttctctcaacaccgggtccccatcaatcctcccaagcttccccaacttccaagtaatacaaaattcaaacaacacaaactatcacaaccaagataacagggcaaaggcagaaaaccttgcccaaaacatcaaccaaaatcacagcttttctcacttaaagaccccagtaacaattccttcgttccagttcattaaccgttggatcgactcgaaaattntactggaagtctctagtacataagcctacanttttaccatggggatctactagaaaaca

SEQ ID NO: 1265 - DNA, 307 bp, Glycine max
  unsure (1)..(307): unsure at all n locations
ctaagcttctatataagctgaaccattntatcaataaacacaagttgagttttattcagaaaattagagtttatctcttttatcctagtgagagtgattctcctaaattcttgagtgattcaagaacaccctggctgtatcaaaggactttcacaacctttgtgtgttgccctcgctggaaagagtgattctttccttcctttcatcttcacccttgttctttcaaaccacaattccagaaaatccacctctgcccagaattttctcgtggccataactcccgttttacgcactcaaattaagtgat

SEQ ID NO: 1266 - DNA, 409 bp, Glycine max
agcttcacaaaagtttatgtggcttgaaacaatcaccgtgtcagtggtacaagaagtttaatgagtttatgagcaactcaggattcaacagatgtgacatggaccattgctgctatgttaagaaatatactaatagttatgttatccttgtcgtgtatgttgatgacatgttgattgcaggatctagtatggcataaattaacaagttgaagcagcagttggcagaaaactttgaaatgaaggatcttggtccagctaaacaaatccttggtatgagaattcttagaaacagatcagaaggaattttgaagctgtctcaggagaaatatatacacaagttgcttgacaggttttaccttggagattctaagaccaagaatacccctttaggatctcatttgaagttttt

SEQ ID NO: 1267 - DNA, 212 bp, Glycine max
ctcagcttaccaacgagcgacaatggtggaaggaagaagatgcagtgtgcacggtgtagaagatacgtgaactcgaacgagaagacgaaaagaaatgaaggccgaacagtatcctatgtacaaaagagctcttttgatatattttactataaacgcaatatggctaattcatataattgtcgggtgctccagtaaaattgcttagagctctc

SEQ ID NO: 1268 - DNA, 424 bp, Glycine max
agcttcatgatgaatcaattgattcaaagaattttgattattacaaagataatgacaaaaaactcaaaagtcaagaacacttcatgttaacaaagatgatgatttcaagaatcaaagaatgagttcaagattgaatcaagaacacttcaaggttcaaaaggaaatttgatttcaagaatcaagaattaagtttcaagattcaagttccaagaatcaagatcaagattcaagaatcaagaatcaagagaagactcaatcaagataagtattaaaaagttttttcaaaaactgagtagcacatgaatttttctcaaaaacctttttccaaagagtttttactctctggtaatcaattaacagattattgtaatcgattaccagtagcaaaatggttttcaaaaaagctttcaactgaatttacaat

SEQ ID NO: 1269 - DNA, 315 bp, Glycine max
  unsure (1)..(315): unsure at all n locations
tcgaggagtcataactgttgacataacttttcaatacacctatttgctatatatttatttactatatccattgtaactgataatcaaaccatttgttgagccatttgtctaagaccttaaacttccaccaaaacaacatgagcacatcgacatccccctcgaatgttgtaagtttctttccctttaccatccttcatttaaaccttatgagtatatgttgtagttttctccttccaatgttttctcttttcctctatcattgatctttgacgttactattgttggggttctgttncttatctgtatatgtgtata

SEQ ID NO: 1270 - DNA, 481 bp, Glycine max
  unsure (1)..(481): unsure at all n locations
tggggtttgaaccttggatctacagacncttgnaataancaagcgnctcagaacataatagccataatcaatcccaaacatgcatgttgatcatgaagcnctctcccgaaacaagcacccgctgttgtgcaagctttccatggggcataacactcctaatggttattatgatgcatgactcaaatgctctctaatgtggactcatcacttttataatgggcgtcttaatcgatcaagatatgtataggagaatctaacattaccgttacaaatatgtaacaacatttattatcaaaacaattacccttgatagtacctgtgctcttatcctaagattaacatgctaaagtgtatctgtcgcacaaaattgacccaaatttaaaaactaaaatgtgaccaaataatcacttgatcaattgaaccctcgacatgtaacataccatcaatcatcatgccacaaactccccgccaatttaacact

SEQ ID NO: 1271 - DNA, 391 bp, Glycine max
  unsure (1)..(391): unsure at all n locations
cccatcacatgtggtactatgtggcggtcgggcgatggtgcacaacaaagtttccacatccacaatgcacgcataaacccaccatcccctgttgcccacctccaactgaactcacgtactcccacgtagcccatatcctcgtgtctctcaacatcgggtccccatcaatccttccaagcttccacaacatccaagcaaaacaacattcaaacagcacaagctatcacagccaagcaaaacagggcaaaggcagaaaactctgctcaacacactaaccaaaatcacagcctttctcacttaaagaccccagtaacatttccttcgatccaattcgttaaccgttggatcgactccaaaattntactggaagtctatagtgaataagcctaca

SEQ ID NO: 1272 - DNA, 324 bp, Glycine max
  unsure (1)..(324): unsure at all n locations
nngcattggaattgcgaaagccccactccatcattaggattagtacctgacatctcaaacaaacaaatcaaacgtaacaagacaattatagttgttgtttgaatacctcacccactcaagtgtatcacacaattatggcttttctctaatgaaacactcttgccttttaccactctaattccccttgagttcttaggcaattcaagagattatggccacaacaaagaacaattcaccaatatgtgtcatgtaaggctagagagacaaggaaaaggttaaccaagaaaaaggctaacaatgtttttaggcacaaatgaaggaaat

SEQ ID NO: 1273 - DNA, 197 bp, Glycine max
  unsure (1)..(197): unsure at all n locations
gagtcacctgcagctgcaagctttaacttttacaaaagaagctctatcggtcttccgagtgaaangntatttctgttcgaatttgctacgagcttcggaattaaaatgcgagcgtcacgatatattatacggactcaatctgacttccgagggaaatgttattgtcgttcgaatttgctacgagcttcggtcttaaa

SEQ ID NO: 1274 - DNA, 441 bp, Glycine max
agcacatgctaacgacaataacatttcactcggaagttcgattgagtcccgtaatatatcgagacgctcgaaatttaaaaccgaagctcgtagaaaattctaacgaggataacattacactcggaattccgattgagtcccgtaatatatcgagacgctctaaatttaaaaccgaagctcgtagcaaattctgacgacaataacttttcactcggaaggccgattgagtcccgtaatatatcgcgacgctcgaaattgtaagccgaagctcgcagcaaatgctaacgacaataacatttctgtcggaagtgcgattgagtcccgtaatatatcgagacgctcgaatattaaaaccgaagctctgtgcagatgctaacgacaataacattgcactcggaagttcggttgagttccgtgatatatcgagacgctcgaaattta

SEQ ID NO: 1275 - DNA, 381 bp, Glycine max
  unsure (1)..(381): unsure at all n locations
agctngtaactctnggcaatntatttaanaatctatatcacttataaagttatgacttttgaaaaaatcttcagaaacaagtcacttgaagaattgtgacttttggaaatgtattttttgaaaatagtcagtggtaatcgattacaattaaggtgcaatcaattacacatcagcagatgtgactcttcattnntaaatttgaaaatcttaacgttttaaaacaatggtaatcgattactacantttggtaatcgattaccagagagtaaaactctttggtaatgattntgtgaaaacttcttgtgctactcaatgttttgaaaaacttttaatacttatcttgattgagtcttctcttgattcttgaatcttgagtcttga

SEQ ID NO: 1276 - DNA, 382 bp, Glycine max
tgacaggttcaggtgtaggtgctgctactggtggaggcacttgaatttggttgccggacctcaaggtgatggcactcatatttttcggattctgcacagtttgtgaaggcaatttgtcagaattttgggactgagcttggttcaactgagtagccatatgccccatctgatttgtcagaatctgaatagaggctcttgtctcttgctgaaattgcatattctggatggtcatttgcctcactaaatcttctaaggaaggttgaggaggggcctcaattggttgttgcctttgttgttgttgttgttgctgctgctgctgctgcattggaggaggaacatatggcttgcttggaccaacaacattctggaaaggagggacatg

SEQ ID NO: 1277 - DNA, 335 bp, Glycine max
  unsure (1)..(335): unsure at all n locations
gctacgtgggagtacgtgagctcagttggaggtgggcaacaagggatggtgggtttgtacctgatttgtggatgtggagaacttgttttgcaccatcgcctgaccgccacctagtaccacatgtgatggataccccataatcctacaagcttgaaatgaagaagtgtggaagggtgagacttcctacttttattcgttgaccacagagtggtacctggagatatgtcgcggnggtcaggagaccttggggacgttaggtggggtactaattgccaaaaccaagcttgaccaattccgaccaacctcgccatagtcagtcagtgagaacctgtgat

SEQ ID NO: 1278 - DNA, 301 bp, Glycine max
tcttatccaaggctcatcttggtggtgaagctccttcttccaaagcttattctctagtggatggcgccgcctcttacctcttctcctttgtcttccgctgcatctccatggtggaaaatcaccattaaaggacctcattgaagctcaaagatccagcctccatagaagctccacaagcaagcttccatcagtcaactcccccactggaagatggaaggtgttggtctccctatgtcacctctccacaaatgcatatataagttcaggatcgccggtgaccatagaacacccaatcaatgaa

SEQ ID NO: 1279 - DNA, 407 bp, Glycine max
agcttagcagccaactcctaaggatcaggccttaagagtgaaaacctggaataggcacacaaattttccccctcttctagaattacaggggtcatcaggaatgtgttcaaagtatcctcatcaaatttcaccaagtgacctctcaccctcacttgcttaggtgatttatcctcggggtcatagaggttcgcgtaaaattccttcacaatagcagcatctatgttgctgtcaataaaatcagtcaactcctcatcctagtgtcttctctcgtgttcctccttgaactcgtcaaactcggtgtaataaactaccacattcctctccggtagtagtttcctaggcaccacaatatcggtatacctctcccaagcttcttgagatgtgaacctagaccgatcaaatctaac

SEQ ID NO: 1280 - DNA, 313 bp, Glycine max
  unsure (1)..(313): unsure at all n locations
acacttaaatctaagcttaagtaggtcgagattccctagaccaagaccttatctcatatagaatatgctgaggttaataatccttaggccaatattgtgtgcttaatgagatntccttcttacataacttgtgatgcttttatgatattttttgttgatatttctcttcgtttcctttagtgttttaacatttttgatatattttgaatttggttttcttttgaacatgaagatgtttgctttaaccttaatttctcaaattgtttcgtaaaggttgtagttgttaaactcatcgagcatttatgttgctgtg

SEQ ID NO: 1281 - DNA, 265 bp, Glycine max
aggattcgaggatgatgcttatacaaagttaacctaaacctatgagggctgtctaaactaagcctagtccaacaagacggatctgatgactaagcttggattgattcagcctaacttaggatcgaggtttagtaatttatgctacaacatacaacacatgatcatgactgattatacaaatatctttatatacatcagcttgtttgttagatagacccagcactcttacctactgctgtcaatcttactcacctgcctttctact

SEQ ID NO: 1282 - DNA, 435 bp, Glycine max
  unsure (1)..(435): unsure at all n locations
agctntcactcgcatgtccgattcaggcgcatatcgtatcgagacgctagaaatctaacaaaggaagctctcgagaaattcaaatggtcataacttttcactcgcatgtccgattcaggcgcataacatatcgagacgctcgaaattgaacaacgggttttttcgagaaattcaaatggtcataacttttcactcgcatgtccaattcaggacatcgtgtatcgagacgctagaaattggacaatggaagctcttgagaaattcaaatggtcataacttttcactcggatggccgattcaagcgtatacaatattgagacgctcgaaattgaacaacgagagctctcgagaaatctaaatgggcataacttttaactcggatttccgattcaggtgcataacatatcgagacgctacaaattgaacaacggatgc

SEQ ID NO: 1283 - DNA, 421 bp, Glycine max
acagcagatttagtaatgacccactaacctagaattattataacttaatgccattaacctagggaattaaaaaaacttaatggctagtgtaactgaaattgtggcaaccaaaagtcacccccaacagccaacaagtcagccaccatttggtctcccaaaaggctgatgcctaggttgccaattgggcccttattacaacttgaactaaacctaactaaagcccttttagttgattaacccaaaacatatttttggtcagccaactttacaaggattgggccattatttagacaaactaaacactctaaaattgaaacaaagtggtgtcatttagtcctcctccatttgggccatgatacaactcacaaccttggacttttctccttgaaacttgggcttgtatcaaacagtatggacaaca

SEQ ID NO: 1284 - DNA, 386 bp, Glycine max
agcttgtaatggtaagatattagcatcacactcattcatctaataagcagcaagtatataaaaaaaactataagtataaaaggaaagtgtgtgtgctgctatttaagaaaaagaaaagctaagtgcggaaaggcgagtaatagagatggaataaaaagaaaaaggttgatctatggatgaatgctctcttagaacctaagcttttgcatcctagaaaaatcatgaattgattgcagcccagcctcgttacaagcctagtaaagtcctttggtttcagtttgtgtgttcttaactgtatggcatgagatgaattgcaaagattgagacttatgttagttgttggttggtgaataagcctaaacacttgtatttgagtgaaacagtag

SEQ ID NO: 1285 - DNA, 294 bp, Glycine max
  unsure (1)..(294): unsure at all n locations
tagctccaaactctntgggtggaggatgcatgaacagcgctaggcaatgacattcatggggctccgaaaaaagtggagaatggaggattggactatagggtccacactaggcaatcatgaagcataactccaaactctttgggtggatgatgcatgaacaacgctaggcaatgacattcatggggctccgaaaaaaagtggttggcaggaccgaacggtccaccgggtttttccacctaaaaggaaaacatgctttttgcaaagaaaaataaatcattcacgagagcaccatat

SEQ ID NO: 1286 - DNA, 288 bp, Glycine max
agcttcatggatatttatgtgatgacatggttcttggaaagacacttcaagcatcagcaattgtggcctctgatatagctgagcatcgaacttcaattgggaatgaggatcttctgccatctttaattatttgcccatcaactctagttgtgcactgagcctttgagatagagaagtatattgatgtttctgttatctctagtcttcaatatgttggctctgctcaagagcgaatgcttcttcgggatcatttttgcaagcataatgtcatcataacatcatatgatg

SEQ ID NO: 1287 - DNA, 380 bp, Glycine max
  unsure (1)..(380): unsure at all n locations
gganagcgctggtgatccttcggtccaacctttccaatgttaacccagtaatataaaacattagaagcagtaataacttatatgaagcaaagacagccaaaaaagtctccaagaactcagatgatattcactgcaaaaaaattctacagaagttacactaacaaaaattcatcatttagacatagttcccatgttaaattattaatccacatccaatcgtcatatatataatatcataactcagaaggcattgacacagctaaatgtatatgaactagagttggcaggttatccttttattgcctttcatttcatgccttgatgtataatgaaatactataaattagtattcctttttttttgttcaaccaccataatta

SEQ ID NO: 1288 - DNA, 384 bp, Glycine max
  unsure (1)..(384): unsure at all n locations
agcttattgggaagcacactggtnctggctggtatggatagaataaaaccactggtgctagtgatgaatgatgggaaaccaaaatttaggtgtgtactattcaactaaaataaaggtagtgctagttgtacaattggtcaatgtgttgcttccaaaaagattatgaatagaattttgtctccaatttgagatcagtggtgtttgctcaatgtgtgatttttgtgcaagtcagtctttacccttattaattnttcaatagacaagacataaagaactatcagctctactaaaaacaattctttattaatctttcaatagtcgggcttagntgattgctttgtgatatctcttattggctttttggatgcttttatngaacactat

SEQ ID NO: 1289 - DNA, 320 bp, Glycine max
tgtttacacgcggagatatacgtcatcttccgtactcacattatctgtcatactcacatttgagtcacgctgaccggcggaaatacccgagtggttagccgtataaacattcttcttgctatctgtaagacgaaaagcctgatctcatgcgaagactgacatcgtcttctgcgcccttcgtcaatctcggccgacaagcccattgacacgcggagatttacgtcatcttgggcgctcacaagatctgtcatactgacatttgagtcacgctgacgggcggagatacccgagtggttatccgcataaacattcttttttgc

SEQ ID NO: 1290 - DNA, 426 bp, Glycine max
  unsure (1)..(426): unsure at all n locations
agcttgcanaatgtaatctccatctaccttgtcttgtgttgtaggagagcatcatagttcaaggaaaattggtcccaaatttgggggagtttattgggtgacagcaattgtggtaagaagatgacagcacacatagcaaaatcaataagcagcaagtaaaagctgctaaaaaaagaagaaagaaatttcaaaaataaaagctaagtgtgtcctgttgtcaaagctaagtgctgtaattattgaaagacaagtaattgaagctggaataaaggaaaaaagggttgatctaaggatgaatgctctcctagaacttaagatttttacatcctagaaaaaccatatattgtttgcaacccggcctcattacaagccaagaaaagtccttcggattcaatttgtgtgtttgtgactgtatgtcatgagatg

SEQ ID NO: 1291 - DNA, 361 bp, Glycine max
tagcgtgagtatgcaggcccaagtccactccatcaactatttaaagagtggtcaagccaaggagaaaagacacatcgagtctcaaagtactctaatacacatttaaagcctgagaactctcagggaatttttcttcttttccattattttctatttcttttttttcatcccttctcttccatcagtttctaaattcattttcaagtgcaaggccctttatgactatgagaggcgaaacccttagttagggtctggcaggcctaaaaaaccaaaagatgtattgtatgcttcatatctatcaatgcaaacatgtgttttctttcctattatcctttcttattttaatttcatgtatcattca

SEQ ID NO: 1292 - DNA, 438 bp, Glycine max
  unsure (1)..(438): unsure at all n locations
ttaagtcacctgaggcatgcaagctttggaagtggtaagcaatgcttatgtctattctctcctattttaaccacgctcatccagagctgcattgatggtagctcgtgtgatgttaaggcatgggtacgagcctggaaggggtttaagttggaacggtgacggtgcgacaagcttggtggagtttaaagaaaaccgtggaaggttcgagctatgatataagcccacacatgccgacataaggaaaaacaccctaaaaagataggaccgaagcatgcgcccgcagcatgaaccgcaagtggaagggacttccttatgtcatatcatttaaagcttcatcagcgtatgctggatgtgtgaagggcggatcgccatgatcaacaatgaagtccctcaagagcaatcaaactcagtatggtcatgcnctcctgagttcgagtt

SEQ ID NO: 1293 - DNA, 435 bp, Glycine max
  unsure (1)..(435): unsure at all n locations
nngagtttactagtatttgtttatgaaatcagttttcaaattctcgaaagtgaatcaaacctgccctaaaaaatctttgttttctctcttcttctatattcttcccattctactcattttttctcttctttccctatcacctacacttgacatggcagtataacaccccaaactttttaaccccatgttatagaatcatcaaatatacatatccaccaaagaagtacaaacatagacatcatactcaagcttacttctcattatgtaaccatggatttctttccctaaattaaagcaacccaatcaaatgactgcttgtagagcactagttattgaacatgaatccagcaggtggaaatgagatagaagtggaaaaaggtggattcaacagtctcttaaattaaatagatgacactaagatggcacatgagaaga

SEQ ID NO: 1294 - DNA, 415 bp, Glycine max
gagcaccgcagctgcatcaagattcactacattaggagaaaattgttctgtgaagaaaatccaagccgaggcgcttccgtaacgtttccgtaatgtttccgtgggtgatttcgcgaatattttcaatcgtgcttcgacgttcttcggtcgttcttcgtcgttcttcggacttcaaccaataagttcccgaaatcgaacttttcaattcattctatgtacccttagtggtcctcatttgtttcacatgcttttattttcatttcatttactctccttaccccttttgacgtgctttagtcatttacttaagtcattctctcgcctaatcaaaaaataaaataaatttccaccgatcatttgaattgtaacctccattaatttctgttaacatgaaatctgaccgttcgatcatgcc

SEQ ID NO: 1295 - DNA, 299 bp, Glycine max
tcgtgatgaatcaacaatgattcaaaggtgtggtgatgattacaatgatgacaacaaaagatgatgacaaagttgatgaacaaaaagctcaaaagatcaaagaacaactcaagtgaatcaagaacaagtcaagagttcaagaatgaagaagaattcaagactcaagaagaaagtctacaatcaagaatcaagattcaagagtgaagaacagactcaatcaagatgagtattaaaaagtgttgtgaaaactttgaatagcacatgagtttttgacaaaacctttaccaaagagtttttac

SEQ ID NO: 1296 - DNA, 331 bp, Glycine max
cactaagctcttagctttcgcgatgtatgctgaccctctccgtgaattatatacctcatggcgtaggcgctgggatagtatcacttgcgtgttactgtaactgaatgtgtggatctcaaaagtcacccccaagagcacacaagtgagccatcatgtctaatctctaaaagattgttctctttaatcgcttgagcacgtaatacctcgtgaacttaacttcactgaagatctgtatggagcataacaacaacatatgttttgtcaaccaatagtacaccgcttggatggagctctccacgaacgtatgcatctgttactactagttcgcgac

SEQ ID NO: 1297 - DNA, 447 bp, Glycine max
agcttgtagactaacttggccctatctcagattattatcagaagtatgggatgtcggggccaagttagaataagatagaacactccaggtttgggccagagtggtaagatctttcctcatgagcttccacggtagaccctcaatattaagtacaaatcccctcccaaggatacacagccgggctgcaagctcttgaggatcaggcctcagtctagcaaacctggagtaagagggcaagctctccccttgctccacgaccgctgggtctccaaaaaggtgttgagggaatcaacatcaaattttatcaggtgccctcgaaccctaacttgctttggttctttgtcctcagggacatataggtttgcatagaattctttgacaattgccacatcaatgcttccctcagtcaagttggtcaactgtttatgccagtttcttctaatcaat

SEQ ID NO: 1298 - DNA, 325 bp, Glycine max
gtttaaaagaaaaacaaacaaaaaatatatctttgtctaaaatgccagcacgcttttgaaaagagataacttccagcttttctttgaaaaaaatttttactgatcataaccagtttttgaaaaaaagatgtgtatgcacctgaagggtgaatgctgtgaaaattttcccgaacgcccaaaatagacttggatgaatgcatgatttgataaaagaacatattttggaaacgctgggttgacttaaatagggaaaatgaatcctgagccctagtgtcacataaccataaaaacttgatgcttgagtgtcctcataggtgcatgcatg

SEQ ID NO: 1299 - DNA, 421 bp, Glycine max
agcttaataagtacatctatggattgtaacatgctttcttccaatggtatctaagatttcatgaggtcatttcttcatttagctttgaagagaatgtcatggatcactgtatataccagaaggtcagtgggagtaagatttgtttccttgtattatacgtagatgatattctgctcgcaactaatgataatggtatgctatatgaggtgaaacaatttctctcaaagaactttgatatgaaggatatgggagaggcatcttatgtcataggcataaagatccatagagaaagatctcgaggcattttaggcttgtctcaagaaacctatatcaacaaagttttagagagatctaatatgaaagaatgttcaccaagtgtagctcccattgtgaagggtgacaaacttgtcttgagtcaatg

SEQ ID NO: 1300 - DNA, 305 bp, Glycine max
ctcagcttctatataagctgaaccattttatcaataaacacaagttgtgttttattcagaaaattagagtttatctcttttatcttagtgagagtgattctcctaaattcttgagtgattcaagaacaccttggctgtatcaaaggactttcacaacctttgtgtgttgccctcgctggaaagagtgattctttccttcctttcatcatcacccttgttctttcaaaccacaattccagaaaatccacctctgcccagaattatctcgtggccataacttccattttacgcactcaaattaagtg

SEQ ID NO: 1301 - DNA, 431 bp, Glycine max
  unsure (1)..(431): unsure at all n locations
agcttgtagctttcaggacttcataanagccttatatttcccccatcctagttctaaatttcaaatgctatcaaagcttaatttaaaatatgtgtgcactttggaccacaatgtgtgcaatttctgaaatggggttcaatttattataacaaatagtgatgtacataatgtttgtacacatttatatatgtgtggcataatgaattatactcgtaaatgaaatatactggtttaggatttgttttatttctgcataccttagcaaaggaaacaactcttgtaaatttgtcaagttaatatccaaaagctttagctacttgagacgcacgatctgcatatgccaaanaatattatcgttntctccatcatccaaacttttcagttttcctcctgttatatnntagtgtgtaaatccttcacgtagtttgcta

SEQ ID NO: 1302 - DNA, 345 bp, Glycine max
aagctgcttggggctttatggggctggtctttttctttttgaggtcctttaatggtgattttccaccatagagatgcagcgaaagacaaaggagaagaggtgagaggaggcgccatccactagggaataagccatggaagaaggagcttcaccaccaagatgagccttggataataagcttgaaaggatgcttcaatggaggaaaagaaagagggagagaaagagagaggggggagcacgaaattgtaagaagaaaaagggagagaagttgaactttgagttgtgtctcacaagactctcattcatcaaagttacaacaagtgttacacatgcttctatttatag

SEQ ID NO: 1303 - DNA, 433 bp, Glycine max
agcttagacccatgtatgcttaagcttactatcttttatgcctaattcagctacacttaaacctaaattcacctatgcttaagcctgaaatccaacaaccatatttttgcttgggcaaaaatcactcttggcttaagcataatgtttgtagaaatttgaatttattgagtaagacctcaaatgacttctaaatcaaaccgattcaaattagatatcatataccatacatactaatcattccacacacaaaaacaacatttcaagcatcaaccacttaaacaatcattcaatcaaagtaaagcttcccttacctatcaaactcgatgaactttctttgagatgaataaaggaaggaaaataggagactttgggtccaagatgcaagttctccctcacttctatagtagttctacatcatccgcaccaccaaacc

SEQ ID NO: 1304 - DNA, 205 bp, Glycine max
agcttctctctgacctatgttttctactcatttatattaattggtatttacagtaagtcatgattgctttttaaattttaattgcgaactactgaagatttaatcctgcagtccacaagttttcatacacaatgatgaaagaagcagcttctggtttgaatcttctactctgatacatggtggtcagttttgggggagggggtgg

SEQ ID NO: 1305 - DNA, 437 bp, Glycine max
  unsure (1)..(437): unsure at all n locations
ctgttattcagaatttcagctagaaattatctaaaagaatctcagaattatccaccttaaaagagaaatcattaaggaacaaattgaagacaacagccttagtattcaggtcttcttcccaattattcgcgcattcttttattattattattacttatatatatatatatatatatatatatattaaacactctactcttccatggatccatgcattgtgcagttttgcattattgcactcacatgcttgtccaggcccctacggccctactgcacatacgtacaatgaaagcgttntgctgcaatattcacaccgcaatatttcatatntatatgtgagataattataactaaaagataacattaaaaacatgtgtaccaatgagtgaacaataagataattacaagtcatgaagcacatcgcacggcaacgcttt

SEQ ID NO: 1306 - DNA, 430 bp, Glycine max
  unsure (1)..(430): unsure at all n locations
agctnttatccatggcctcctaggtggtgagtcttttctatactcatcttctccttgaaggggcgtctcctctctctcttccttctccattctgctgccattcatcttccaagaagcaaaggattccattgatgaagaagatcctaggcctacaagctccaatggagctaacatcaaaatatatcacatcccattagctaaaaacacagtttttcttgaaaaccagcatgcacaaggatagacatacatccccataattggttcactgaccccaactatggtatcaaaagctgtaaacaaacaataaactcccctcacttatctatatctctctgttagttccatgcggtgttgttctaagatctcttangttcacgtccgttcgtccaaacgtagagctctatataccaaatcanagataattcagtat

SEQ ID NO: 1307 - DNA, 258 bp, Glycine max
tatctcttctggcttgttgtggcacatggtaagcctcaataccctcagccatagcaaaaacaaaaacaaaaacaaaaacaaaatacacaaagcacaaaacacagaagcagaaaatgaagaagctctcttcaacacatgttagagagagaagagtgaagtgacgatgatgaaaagagtggatgaaaccaaagggtatgtgtaattatggtgatgttattgtattgaagcatgatagagagagaaagtggtttggttggt

SEQ ID NO: 1308 - DNA, 366 bp, Glycine max
  unsure (1)..(366): unsure at all n locations
agcttcacaaggaanatcatcttgatatgattgctttgagattaacctcaagctagcatgaccaaacttattatgacatacccagtgatgcattctgactgaaagtatgcatgacaccttttgactggacagatcactaagtttaatcttataaagatttccttgtctcttagtagagaagagtggcattgtatccactgtcacataattgacttatgctcaacagattatgcttcaatcctttaacaagcaaaacattatcaataggagaatagggtggaataccctccgaaggtaacaaccccaccagacatagggcttagggattggaaaatagactttntgcttgtcatgtgttgtgagcaa

SEQ ID NO: 1309 - DNA, 433 bp, Glycine max
  unsure (1)..(433): unsure at all n locations
gttgtgtccttatgtcatgcacacgtttactttntccaagttaatactaatttgcactctagcatatatatggtatcagccaaggcatcgcctatatgacttttatgatagcatatcataggattaatatcgcataaagcctacactcactgcaagctgaatatatctatctatatacatatatatatatatatccctacatatatccatatgtatatatatatatatatatacatactgtgtggatcttgcgcgataacgactctacatgcctaatacagacaggctggcttgctctataagggggtccgtctacacgagctcaatgaattactttaataaagcggcggtgtctctgctcttccccgacaaacaggagtttcgatactatcactaacctaaggggcgactatttttntcctaacatagacag

SEQ ID NO: 1310 - DNA, 448 bp, Glycine max
  unsure (1)..(448): unsure at all n locations
agcttcaagaaaaggccaaactcgcttccaaaatctgatttcatgtttaaattggtagctttgctcacgcttgtgcgcttagcgcaattctgaaccgcttagcgtgcattagtgaattttggcttagcgcggcttttctcgctcagtgaatggactgaagcggtgcgcttagcgggatggcccttcgctcagcaaacatgcacaactcatccttcttccagattcttcctcgcgcttagccgaggaatgttacgctcagcggatggctcgctaagccaacagattgacttagtgagagggtgagaatcaacacttcacaaactaaccatcaatttgaggagtttgattattaaacacacaaaatggaagtactaagtatttattacctatctttaccgaanagtaattacaatactacaaaataaccataaatttgaggagtttgata

SEQ ID NO: 1311 - DNA, 314 bp, Glycine max
  unsure (1)..(314): unsure at all n locations
ngcatgacacgctntagaattaagaaagaaaatatttggggttttagaattataagatgcatttaattttcataataattgttatggtgctctcgataaaaaaaatgtagttggttgtttggtttacatgcaataattattattattactacaatgcaattttagatagtgtgaattattatatttgttgaaaatcaatattaatattctgttatgtttggtagtttactacattcatttggttctctattctgaaaattctattgattntattttgatcttcttttgcaagacttcatatatatatatatata

SEQ ID NO: 1312 - DNA, 346 bp, Glycine max
cgccagcttctgttttcaatacgagcgtctccatatattactttcctcaatccgacatcggagtaaaaagttattgtcgttagaatttgctcagagcttctgttctgaattttgagagtctcgatatactacggaacacaatcggacatctcagtaaaaagttattgtcgtttgaatttgctcagagcttctgttcttaattacgagagtctcgatatattacgggattcattcggacatccaagtaaaaagttattgccgtttgaatttgctcaaagcattcgttgtcaattacgagcgtctagatatattacgggattcattcggacatccgagtaaaaagtta

SEQ ID NO: 1313 - DNA, 271 bp, Glycine max
  unsure (1)..(271): unsure at all n locations
ttagtaatgacccactaacctagaatataataactttatgccattaacctagggaattaaaacaaactaaatggctgagtgtaactgaaattgttggcaaccaaaagtcacccccaacagccaacaagtcagccaccatttggtctcccaaaaggctgatgcctatgttgccaattgggcccttattacaacttgaactaaagcccttttagttgattaacccaaaacatatttttggtcagccaactntacaaggattgggccattattt

SEQ ID NO: 1314 - DNA, 445 bp, Glycine max
agcttaacgaccacactggtccaatccaagattttaaagtggttttaatatataactatcgggtgtcgtaagccacagtttctccaccatgttagaatattattttagtggggggtccttgtttaaacatgcgttgctataaggctataactcaattattgtcctaaatagatttcagccacaacataggggtcccagctgcagcagacattagagccataattcatccagaatatatatcttcatgccatcatatggatcgctagtcaatgctcatatatgtaccatattctaataaccgcccaaatttatgttcttgtgctatgtccaggtactaaaagaaatttggagattgatgtcttagctattatgattacacgcatttgtatgttacccaatatagtagtactccagcaataatgctgataaagattaaagagatatc

SEQ ID NO: 1315 - DNA, 348 bp, Glycine max
  unsure (1)..(348): unsure at all n locations
ggaacacttctatttaggtgaatgtagcattccttacttcttacgttatatntcagaagacctgtgccgcaggttatgcgattccacagataaaacatcaatagtcaaatttttaattacagccaccctatcaatattcatgagtcatcacatgaattatttagctagctagaacaaattcctcaaaaaagaaatctgctatcatttgctttagaatcacatttgatcaccacttgataatcattccttaaaataagaatattcaacatctgtactccctcgcccaattaaatatgccacactcaatctaaacacttcacgccaaaaatacaaaccccctcataatct

SEQ ID NO: 1316 - DNA, 286 bp, Glycine max
ttaattatcaaaactaatgcattttttgcctgttacgctcatttaaatttctaatggagatgtcatatgtggcaatagtgtccttttatttattgtgtcgctctacaaaaaagtcacatgtcatgtcttgcaatccactctaactaaggaaacattctacattcattttaaaaactaatgatccaaattaactaattgactaaacagatggaacaaatttatgatttagacatattgagaagatagttgagtaatgaatggtgatttcatgtgggaaaaaactata

SEQ ID NO: 1317 - DNA, 315 bp, Glycine max
  unsure (1)..(315): unsure at all n locations
tccattntcaatttcgaccatctcgatatattaccggactcatccggacatccatgtataaagttattgtcaattcaatttactcaaggcttcggatcttaattttgagcgtctcgatatattacaggactcattcagacatccgagtaaaaagttattgtcgtttgaatttgatacaagcttccgttttcaatctggagcatctatcgataaattatgacactctgtcgggcatccgaataaaaagatattgtcgcttgaattctctgagagtttccgttttcaatttggagcgtctctctatattacgggact

SEQ ID NO: 1318 - DNA, 428 bp, Glycine max
agcggatgctcaaaacatatgactggagatgtatcaaattttacacatatctctccaaagaaaagcgggcacgtaacatatggtgacaacaacaaaggtagaatccttggagttggtaaaataggtacaaattcttcaaactccattgaaaatgttctacttgttgaaggccttaagcatagcctgcttagcgttagtcaattatgcgacaaaggctatctagtatcatttgattctcaaaattgtcttatagaacataagcatgacattaatataaagcatgtaggacatagagtcaataatgtttacatgatagacttaagcataaaactagaaaacaatcattgctttcttagcaaagatgatgatccatggttatggcataaaagaattgctcacataaacatggatcacttaaataaattaat

SEQ ID NO: 1319 - DNA, 313 bp, Glycine max
ctaaagtatgcccgagtcattcatccctatgagatgttgtttaagtattggcgatcagaattgccattccttggattatagggttgaaccaagctcatgcttttacaaaaaggttcatcaagtcaagttgaaatatggaagtaaccgtcttgcaaaattggggcaaaagatgagtcgagtcacatcactgcttcgtctactgccaaacatatttaggattattgatgtccttgttacttccagtttcaccttgacaaagatgtcatggaccatgttgaaaatctaaattgattcaaccccatatctgtgtaaa

SEQ ID NO: 1320 - DNA, 392 bp, Glycine max
  unsure (1)..(392): unsure at all n locations
agctngcatgtgggagaataatcaatttggttagattatttatggntgatttcttatgtgtgtaaagtttttgaacgggtcacagtcatacattgcgagtaagattagtctaatctagtgaattgatagacacatgtgatctctgatccataaaaaaaatatagaataaataattgaaattggttcaacatatatattgtttggaatattattattttggactagcaacaaccaatgcaagcacaattttcattcttactagtttaataaataagtattattagcaataaaaagattacattgtgaattagttagaaataatttttaataaaaattgaataattattatataaaataataactttatgatttttttttaaatttcaaatttg

SEQ ID NO: 1321 - DNA, 275 bp, Glycine max
agcttacaaaatttatatggcttgaaacaagcaccgaggcagttgtacaagaagtttaatgagtttatgagcaactcaggattcaacagatgtgacatgggccattgctgctatgttaagaaatatactaatagttatgttatccttgtcgtgtatgttgatgacatgttgattgcaggatctagtatggcagaaattaataggttgaagcaacagttggcagaaaactttgaaatgaaggatcttggtccaactaaacaaatccttggtatgag

SEQ ID NO: 1322 - DNA, 442 bp, Glycine max
  unsure (1)..(442): unsure at all n locations
agcttatcatgatcatcataattattggctatatgaaggtagacaaaagatgcaacagtggaatctgtaactgctttacttttcagcattttcccataacaatgatcagaattctgactgaaattattaaactgagcattaagaggaaagtcactaggaagaagccaggaagaatctggaaatggctcacaaaagagatcaaccatatccgctccagggtcaaccagtagaacacggttagtgaggagagcatagagaaaagcagaagctagggtcaaaatcctattccctaagccactaaacgaaatccatacaacatatttacactctgnaggactcagtaaatgaccaccagacctaagttgttcaactgttttgttataggaatcagcgtaaggtccacattgtttgtgctgagcttcatattttcttaacctagaaa

SEQ ID NO: 1323 - DNA, 263 bp, Glycine max
  unsure (1)..(263): unsure at all n locations
gctcaaatccccttcatttccacaccaaattgttttatnattttgtncatggagactaggagctaacctctacctcatgggaccttcaatttcatgtaagggtggacttctcctcacttgaaatctgtgggtgttgggttctcgggagctataatgggtagttctactaagttattgcataaaggtagttcgttgtgaaggaaattgttgtgactatgctcaacttgttgtgatttatgtaagcaaaactgcccatgttgatt

SEQ ID NO: 1324 - DNA, 403 bp, Glycine max
  unsure (1)..(403): unsure at all n locations
agcttgagatgaggaagtgttgaagggtgatatcttttgaatagagntgtgaactccgaatagaggtgtgaactggccattcaggactttatagcgaggattttccttctacacctagttattgtgaaaaagagaaagatatgaaaagggaacagaagaaaaaaaaaatctatcatcggttttgttatttaaatcattaccaccaaaccagtcattaatttatggacgccacaattggtggtatcagagcaaaagtttgattctagtgaacctgttatggtcttgctgtgtgaatgttgtgtatctctgaaacttggaagtaggtatcagggagtgacgttaagtcacacattgagtgtatntctgccttcttgtcttgagcatggatgtgtgactgactcat

SEQ ID NO: 1325 - DNA, 443 bp, Glycine max
  unsure (1)..(443): unsure at all n locations
ctaagctgacagttcgcgattaaagtttaaaaatttatgttttaattaataacgaatatacatagaatcaaatagaaattatcttttataaaacaatggtttatatttttatttttttattttaaattttggattaaaggaatgcaatgctcaccccatatactagagaagaccatcaatctcaacaagaatttacggtgagattacatatcacctaccaatagattacatttcaagtaagcttacactcccttccggtaactcattgacattctctaattaataaaatctaatagtgtataagtgtattttataaactaaatttatatattgttggttcaagaaactgaatttagatttgttaaggaagattntaagttaaaatcttgtaaatgaaaaaaatattgttgagagaatattctattaaaaaaggacacacaaat

SEQ ID NO: 1326 - DNA, 448 bp, Glycine max
  unsure (1)..(448): unsure at all n locations
agcttcctcgtggcttctttgagaagctntctcaagaggcttctttgagaagctagatccttatctatccacacccctcttttagctgaattaacctccttaaaaataattacggatgaaaataacgcaacaaataatcaaacatcaaacataattactaataatatatagatatatatatatcagggttttacaactctcccacccttttagaaatttcgtactcaaaatttaccttactcaaacaaggatgggtgagcttctcgcatctgactttctaattcccacgtggcatcttctcctgatgcacctccccagatcaccttgaccaacgaaatctctttccctcttaagtgttttgttcgcctatccttgatcctcanaggcaatgtttcatatgtcaaattctccttcacttgtacatcatccaattcaatcacatgggatg

SEQ ID NO: 1327 - DNA, 382 bp, Glycine max
  unsure (1)..(382): unsure at all n locations
ctcaagcttgattttaaatttggggctacgagaagggagattggttgaaagactntgttctctagacaagtctttatgatttgagcctatgataaatctacttgttggattttcatgaaatttatattattttactctatacaaaatttgaaacaatttcatgttgaagcccttgagagatgaggtcatttgaggcccatctgtgacatgcaaggcgactaccttgttttgcaagttgtgtctagtaatgtgttgttttctttaattcttggcttatgtagttgtcaacttgaaaaattggttacattttattaaactagaaagaaaattattttcaaccatatatattagaaaaattatggatttcagcttcatgttctaa

SEQ ID NO: 1328 - DNA, 407 bp, Glycine max
  unsure (1)..(407): unsure at all n locations
agcttgtagaatggctagacatgatacatgttatggttnggtttggttcaaggataaaagggatgccccacattatttccatgacacaaatgcaaaaatgatgatttggaaactttatgcaaaactggtcatgcatgcgcctatgcggacgctcaagtgtcaaatntttatggttaggtgatgctagggttcaggattcatttcctctattttaaatcaacccaatgtttccaaaatatgttcttttatcaatttgtgcattcctccaagtccatttcgggcgtccagggaaatttttacagcattcacccttcaggtgtagacacgttttttcttcanaaatcggttatgatcaatgaattttttttcaaagaaaagttggaaatcatctcttttcaaaagcatgt

SEQ ID NO: 1329 - DNA, 306 bp, Glycine max
tgcttctacatccgctatgtatttgtaataatgtagattcttctaactgtttggattttcgaaactatcttagactcttggtcatagtggcattggtgcatgctatctccttgaatgatgtatgggcttgtatttagtagtatttctgaacaatgctgaacctatgtgaaattgtaggaagaacactttatccttttatcaaagtatttagtagtatgtagtagtattcagttgtattttctacccatgctgaacctcttggtcatacttttgattttttttatcaaaggatgaacattatagtta

SEQ ID NO: 1330 - DNA, 438 bp, Glycine max
  unsure (1)..(438): unsure at all n locations
cgggatctcagagtcacctgaggctgcagctggaaagccttagcttatatgtgcttatcctgaaatgcaccaatttcatacaacanattaagattaacaaggatatatcatcacatactcacataagcctaagcatattatcggactatgaagcacacatgagaaatgcatatgaaaattacagatttgccaacacgggatgcattatcagatatcatcacctctaaccccaatgtacagtattacttgttttgcaaaccatttggaaataatatntttgtttccaatcacanattttaaatactaattaatcttagaaactctgcatattattccaattgaatgagataaaccccctcttctgaaaccaactaaatgcacattagtgaaatgaaggcataaatacaatgacatattatattataaatattataatat

SEQ ID NO: 1331 - DNA, 396 bp, Glycine max
  unsure (1)..(396): unsure at all n locations
atagagtttgtatgggccataaatggaatattaatnnattatgccaaataatatatttttaattgaaatagattaaaatagtacatatttattggaataccatactcaacaaatagtacatagaatttattaatgaaaaaaatattttattcaaatatacaatgttaaaaaataatgcattggattattttatcaaaataaaaaattttgaaaatgaagaaatttaattttttttatccaaacacaaaaatttgaaaataaagaaatttaattttttatccaaacacaaaattttaaaaattaaagaatttaaattgaagcatttgaaattcttaaaatttaaaatnttttagaattttaaattgtctaatccaaacacattctaagaatacttct

SEQ ID NO: 1332 - DNA, 385 bp, Glycine max
agcttatatatgttgtttagtaagcttaatcttggtctatttaaatgaataggcttttaaaaatcctgagcctaaccttttaattcaataggtcaggtcatgccatactttatgtaggttaggacctacgggcgtgtatgccaaactagcctattcccacccctaatgcctacccatgttttagcatgtctcttttattatatttttcatctagcaccattcaaattcaggcaatcgaacatatttttacttgactaattgcttaataaaaataatattaacgcatcttataacttgctaacattgagctcttgatttagataagcccccaacaaaaagagagaacattattaagatttttttatgggtaaaggttaatttttga

SEQ ID NO: 1333 - DNA, 619 bp, Glycine max
  unsure (1)..(619): unsure at all n locations
tctntgagaaaaagtcctatggaagcgagagcttagctacacacacccctctcataactaagctcacctccttgagaagcttgcttcggaagattcctaaagaagctagagcttaactacacacacctttctaatagctaagctcacctccttgagatgagaaactagagcttagctacacaccccctataatagctaagctcacccccatgacaaaatacatgaaaaaacaaaaaaaagtccctactacaaagactactcaaaatgcctcgaaatacaaggctaaaaccctatactactagaatggccaaaatacaaggcctaaacgaaggaaaaacctattctaatatttacaaagataagtgggctcatacttagcccctgggctcgaaatctaccctaaggctcatgagaatcctagggccttcccttggatctctagcccaatctacttggagtcttttatccaatgcccttgcggggtaggattgcatcacaaagggaaacaacatgttttaattctgttatnttctaattaaaaattgcttgctgtttaaattacaaaaacaaaccccccccccccaatttggtactattttataactatctattatgaacg

SEQ ID NO: 1334 - DNA, 542 bp, Glycine max
agctttgcgaaaagcttgccgttggagctgacccattaactgccctaacttctttagactggtggtccctaggctcttgaccttgacttgatagaacctccttttaagtgaaggcatttgacttgatcccatgttttactaaagtgaacaaaaaattggtgcgaattaaaactctgacatctatcatatgtggaatggatgaatgcatgaagaaatgcataaaacacagatgcgatttatgaatacgggagcccgagaaattgtctccttcttagatacaacgtcttggggtagcaaaatgtccggcatatgtatttaagaaggtgacacagaccctccgttgggttgccaaagagaggggatcaagacagaacccgtgcgtgatgcgaaaggcgcaacaccggaatgtacatagtgtgacaatattcacaaaatattagcaaagggtacatgacacttatgcatggcagtgtgaaaaaaatggcacgcagcgtgtttgctccgcgcccctattttatggacctacaagggatggagctaaa

SEQ ID NO: 1335 - DNA, 482 bp, Glycine max
  unsure (1)..(482): unsure at all n locations
tttgtgttgatttaatctcaacagttccatttcgtgttcctgtaactttccaattaatgtagcaagagacatgttagttaaatatcgcaactcagtaatggctgttaccttaagttgtcattctctgcttaaacatctcaatactttatttatgagatcttcatttggaaaaattttccctaaagatgcaagatgatttattatatgtgtaaaccttttttgcatgtcttgtatactttcatttgaattcattctaaataattcatactcatgagttaatgtatttatcctagatcttttcacatctgttgtgccctcatgtgttacttgtagggtattccacatttcttttgcacttttancaattgataccctaaagtactcatccattcttaaggcagatgtaattatatttttggcttttaagttgtattgcactaatctcttttcttcgtcactccattcttccctangcttttcta

SEQ ID NO: 1336 - DNA, 409 bp, Glycine max
aagcttttcggtctaacaagatattccaaactctcgatgtgtcactgggatagggttaggggaggtttatttgtattccgcgatagaataacgacaaatatatagtacgtaagtacaaagtactaaggcggctgctttattttcattttttgcatttataagaaaaaatcatgtgcttatgaaggaattctgatcagatatatattaaatacaactaattaacatttattttatctgccaaaaaaacaaaatttattttaaaactattttaatgttatttcaaaattttaatcagtcgtacttatatataaatatatgaatattatacgcatgtgaggaattgttcacgttacaaataatgagaatgaccttatctagttgttgcgaagagtatgagataatgatctat

SEQ ID NO: 1337 - DNA, 413 bp, Glycine max
  unsure (1)..(413): unsure at all n locations
tgctgtgctctctcaggagaagggctgcatgatggacttggttggattgcccagcgagtaactggcaaagcccccacatgatgatgcgctgctggaaacccgngatgagaggcatttttattgagccgaacttatctgacaaaggacgaaactttatgtatcatttatacttcacagagtcaagcaaagataatgtgtctgattcgctatcaagaacaagattattcaatactctgattaacacatttttttatccttagagcaagtttattattgaagtcacatgagagcatctgacgagcgaattataatggtatgtgaatgattaagattataattatgttaaacaattttgatcattcggaggtaggcgtctacttatgtcgtcttattctgatgagatactctacatg

SEQ ID NO: 1338 - DNA, 528 bp, Glycine max
agcttcaagccttgatcaaactgaagatccttggttccttacaatattttctgggcctggaagttgcaaagtccagcaagggcattgttttgactcagagaaaatatgccctttctcttttagaggatactggttttcttggctgcaaaccatcctctcttccaatggatccaaatttaaagctcgacatgctcagtggtgatttgctgcccgatccctcaatgtacaggtgcttacttggtcgtctcatgtacctcactatttcaatgccggatattacattttctgttaacaagctaagccaatacatgcagcatccaagaatacctcatctaaatgctgtgcatcatctcctacaatatatcaagggcactccgggtcagggtcttcattttccagccagtaactccttcaacttatctgcatatgcacatgctgattgaggaggatgttttgacacacgcaggtcgacatctggttcatgtgtgtttctacgagatgctttattatcaagggacatcaaaaaag

SEQ ID NO: 1339 - DNA, 171 bp, Glycine max
acgctatacaatacataagcttgccggctatgaccactgcaacaacatgctctcccgcttacttttactccaaggattgttttacggattttctgctcaagaggtattacttgtttggatttgaacggaatctggcgtcggagaggatggtgatggaatcagcaacgacgt

SEQ ID NO: 1340 - DNA, 548 bp, Glycine max
  unsure (1)..(548): unsure at all n locations
agcttgtagaatggctagacatgatacatgtcagggtttggtttggttcaaggataaaagggatgccccacattattttcatgacacaaatgcaaaaatgatgatttggaaattttatgcaaaactggtcatgcatgcacctatgtggacgctcaagtgtcaaatttttatggtcatgtgatgctagggctcaggattcatttcctctattttaaatcaacccaatgtttccaaaatatgttcttttatcaatttgtgcatccatccgagtccattttgggcgtctgggaaaatcttcacagcattcacccttcaggtgtatacacattttttcataaactagttatgatcagtgaatttttccaaagaaaagttggaagtcatctcttttcaaaagcatgttggttnttcagcttgacaacttatttttcttgtttctccttcttttttttttatcaatatcatttggttatttctttttcttggttggtttttcttcttcttttttttttcatgaggtattttgctacctaaacatgtgcatattt

SEQ ID NO: 1341 - DNA, 525 bp, Glycine max
  unsure (1)..(525): unsure at all n locations
tgggttcctaggcctagaattgcattcgggcactcattttaaatccttcatgctgtccctatacatataaaacagtcccacaacccatgctgtcacaaaaccatgctcatatgtcgttgaggcatttcaccgagcacttggtgggcgcatgtttaggcacgaatattaagagaatggggacaatgtggcatgcgccattacttcagaatacaccctaggccaaggccatcccttacaacccctcaattcaacaaaaacaagcaacaatttgaggataaatccctcacgtttcttagcaaacacatgcaatttagagcaccagaatacatcaatggaaagctagaaagcccaagaatgaggtacttacttgttggagacgaataatagagcaaaacggaatcaaaaacgcagaaaatggtgacctaagggctgcaaaatccgtgagtcccgtgagctttcttttttgaatgaagggggaaagttttgaatgaanaaaacgtccccccttcgtcattttatattttg

SEQ ID NO: 1342 - DNA, 373 bp, Glycine max
agcttgaaggtgtgtagcccaccatcttttcatagtagaaaactggtaatgtgtctactatcattgttatcatttttttctccgtcactgaggtgccacttgagctgccaggtctctccacctttgggcgcattctttgaaagatctgtgcccctttttgcacatgttctgtagttgcatcctatccggaaccatatcaaaattttactgatattgtctaacgaaggcaaccattacgtccttccaagaatggactcgggaaggttccaagttagcgtaccaggtaacagctaccccagtaagactttcttggaaggaatgtatcaccaattcctcatcgtttgcgtatgcccccatcttccaacaatacatc

SEQ ID NO: 1343 - DNA, 567 bp, Glycine max
cttgatctttcctcagttctttaacaagctttgtacaatatacttggccttcatttaactgtctttgggcttggcggccacgctcaacaaagtactttcgacacctactgtacgttgatttcaccaatgccgttatgggaatgttgcgacaatcctttaaaaccttattgatacattctgagaggttcgttgtcatgtggccatatcgacgtccttctctatcgtaagccatcgtccatttttcttttgagatgcgatcaatccatgttgctatggctggactcacttcacgaaatttttctaaatttttatcaaaaatgtgcttgcaaggagtataggctgcataaaattagttatgaataacaatttacagtataaatgaaagtaaaataaacgtgaccatcaaatatgaaattttacccaatttcttcaacatttctttttgtttggcattattgaattttcgattgaagttgcttgctatgtgtcgcacgcagtaaacatgataaccgtggggaggttgccagccaagtgctttgttagcgacagcggactttatactcgcgt

SEQ ID NO: 1344 - DNA, 424 bp, Glycine max
agcttctacaaaatgcacaatatgtatgaaaaaaactaacatacctatatttgactgaaggataatttgtctttacacatttttatattttaaaaatattatatgagtttttttcattgtgaatactatgaaaaatcggaaagataaagtaataaaagtaatatcaatctattcttttttttttatctcttataactctatattcatttaaagaaaaatgttttatgggggcaaaaaataaacggtatatatatcatgtaaaaaaaagaaatcttgtggaaaataattacctccacacccaatgagccagatcctcattgagtgacatctaatcataaacttgcagattattatatgtgacttttaagctaattattataaaaaaatgtagatctatcatactatgttattttagtggcacatg

SEQ ID NO: 1345 - DNA, 587 bp, Glycine max
  unsure (1)..(587): unsure at all n locations
tttatatatatatatatataacaatgatcttactgttagaaattattactggttgttgatgtcaataaatgatagcatcataaaatatcgtcatcaaaagtgtcatataaacaatatttgattattgtaaaattaaattttcatttttctacgtacaaaaaaaattcacttcgctttctcccattaagtttccatactttcatccattccatagaaattttctctatgttctcttaagctttcacaagtaaaattagatttcttccctctctcattcattaactctaagctctctcattctttttcttgagacatgataataattataataaattacactattttatgaaattatataaataccttttactttttttctacccctacactaacatctcttaattattgaaaaatatataccgacatgacatctttntattcattacattaactctccttaattatttgaaaaattctacaccaaactccccaaaggagaggttattataaatattaaaacaacatgaagtatttgtgtaacttcacaaaaatttatagaatattgtgttaatttactctgataatat

SEQ ID NO: 1346 - DNA, 558 bp, Glycine max
  unsure (1)..(558): unsure at all n locations
agcttcccaagtttttaagttcttcctcaaaactgtcctaagcaaagttcccaaagtcctattaacaacttccgtttgcccatcggtttgtgggtgacaagtggttgaaaataacaatttagtgcccaacttgctccacaaagtcctccaaaaatggcttaaaaacttagagtccctatcactaacaatgctccttggcagaccatggagtctcacaatctccttgaaaaacaaatcagccacatgggaagcatcatcaacttttttacatggaataaaatgagccattttagaaaacctattaacaaccacaaaaatggaatctctaccattgcttgtttttggcagccccaaaacaaaatccatggataaatcaatccaaggatactccggaattggcaatggagtatacaatccatgaggctttaccttagactnttgccttttacatacaatgcaatgttcacaaaatttctgcacatccttttttatatgaggcgccaataaaaatgttcttgtaatgtttctaaagtcttttggaccccaaaatgccccatt

SEQ ID NO: 1347 - DNA, 326 bp, Glycine max
tctacttatgtggcagggcgggcttccttcactttcttgtttcccacccaagctttgaccactgttcttccttcccccgatgcttcttttaatgtccccctgagtgggcttatagcctaaaccatacttcccacaatttccttgggcatttattaggctatttatgcccgccgtgtctttgcctaaacccattccgggttcataaccgttccccaacataactcgggccatcattactgctgcttcgaacaaacaaggttgcccaaaaaaggagtccacggaggaaatgctgaccccctcaaaaaactggaaaggggtttttaaca

SEQ ID NO: 1348 - DNA, 554 bp, Glycine max
  unsure (1)..(554): unsure at all n locations
agctttaacggtgttggcttaggagaaaaattaaacactaaataaatttcatgggaagaattgcacattcttaaagtgaggagcgtacaatgcacatgaagcaaaaattaacggggaaagctatatttgagcctttctaatttgtgtagtaaataattttaccgttatttacatcccaaagttgtcattttggatagttcacacagcacttaggagaaaaactaagcactaaaaataaatttcatgtgatgaattgcacatttttagagtgaggagcgtacaatgcacatgaagcaaagattaacggggaaagctatcttttagcctttctaatttgtgtagtaaataattttaccattatttacggcccanagaccactctggttttgaatttgaatgacacaatctttagagatagcaagttaatttgttataatataaagcaacatataaaaagtgatttgatgtaatgatcatataatcatgataaaagaaaatatatttcngaaaagagagagagagagagagaccgagagagagaaagagaaaagatt

SEQ ID NO: 1349 - DNA, 532 bp, Glycine max
tcaacctttggtgcccatttctgctccaaatcgcgagagagcatttttggagtcgtgaagtgcgtggctacgagtgggacttcgaaatttcaggtttgggtggacttctttctctcttaaatttcgtgggaatggggttttgggagatatgatgggtagtcttgctaggtttctgctgtgtgatgattatttgtgaagactcttgttgaaagcttgttgaaattgccatgtttggatgagttaaacatacccattctgttttagggtttttgtgatgatatttgtgatgtttatatgctgaaattgctcatggaaaactgttagagatgaaaggtagagttaacctatggttggaaagtgagaatgtggtgttatgagtggaaaaagagtgaggctttgagagttggaaggctaagtctgaattctgtggtaaatggaggttaaagtgagttaatactagcttgaaatgtcatttaagacttgggagaaagcttggactgtgctagagagaagaacaaatgaacaaagtgaa

SEQ ID NO: 1350 - DNA, 556 bp, Glycine max
agcttgaatacaatgaaactcgccaacttaacaaaggtaagattaactcaattttctcaagttcccttcgtccagtggactgacaacgttacaatacttgtttgttttgtctcaaaatattcttttgttttttcggccaccttaatacgagcatcttcaagctttatatagactttagagctttcatctgttgagagatcccaactaactgttgtctaatagttttggcgcttgacatgaggtcactacaatgtagagagagtggagaccactaatactttctataacatatctttagagaaatacaattttccaatgttgcataatgctcagagctaattttcagcataccaatcgaaagaaacattcacgacataagacaaatggaattaaaaatgtcaagacaaaacaacttaaatcttcctttttatgtgctataacactgagtttcttattgagtctatgaacattactttcttgtatgggtttcagttcttaaagatagagtaattgttcattgttttttcattgtgagacaagtgaaagtggatgcaaa

SEQ ID NO: 1351 - DNA, 339 bp, Glycine max
tccaaacacaagtcaaacaatctttcatcatgttgtaaccaatcctttttcccagtagcttaaccactaaagcattctgccatgaagtacataatccttcaaacatcgagtctgcaatgtgcaccatcggtttcaagggattactgttttcatattcaatagtagccaaattatgcttcaacgagttcaccttaggtcgaactggtggtttctctttattgtgaaacaccttgtcacaaaatgacaccttctcttgaacaaaactactacctcctttgtcgtccggaggctcatgaccaaaatcctgatcgcccactgggcttccagagaccccccccc

SEQ ID NO: 1352 - DNA, 538 bp, Glycine max
agctcgtaacaaatcttctacacttggagtgatcacatgaagtcctcttgaacccttaccacccactctgtcatcatgccgagactcaggaagcccaacgggtttagccttctctaagtattctgaacaaaattcaatggcttcttctacaatgtacctctcaacaatagatgcttctggacgatatatattctctgtatacccttttaagatcttcatgtatcactcaaccgggtacatccaccatagataaacaggaccacaacatttgatttctctgaccagatgcacaatcaagtgaatcatgatgtcaaagaaagcagggggaaaatacatctccaactagcacagtataattgcggcctcattttccaactcatcagacttgactggatcaatgactttgctacatatagcatggaagaaaaagcacaggcgagttatcgctaaactgaccttgtttggcaagatgtcttgtttagccacgactaacaattattccatgagcacgtgaaaatcgtgagacctttaccctacc

SEQ ID NO: 1353 - DNA, 498 bp, Glycine max
tcaacttacagtgagtgattcaggcttagtgccactacctgtgctaagcgcacgtccaatgacttcaaaacagaatgatgttggcgcttagtgcatcctttcccgctaagcccagcttgaaagctcaacttacaaaatgaatctggggcttagcataggatggcgcacttagcgtagttataataaattttcacagagaggaagtggcgcttagcgcatcatccacgctaagcccattgcttaaggtgcaacttataatgaagatgttgggcttagcgcagcgatgttcgcttagttgaaccattcagcaattcaatcaggggtctgtgcgcttagcgcgagcaaactcggcttagcgcgtgaagagatggcgcttagcgcaaggtttgcgcttagcgaataagcaatctaaaaattttctaagtcattttctgcttatctcttcacacaaaattttaaaaaacctttttgttcattactaaacaagctgaattcaat

SEQ ID NO: 1354 - DNA, 625 bp, Glycine max
agcttgtgatatttttactatatatgtgtgtgtcttcggttatctctacctgtataaaaatgtgataattcactcctcatgtgttgtttatgtttggatcatgtgatgatcttaaaccttgtgtttgtgagagcaaatggctatgtgaattactttaacaaaccttgtgatggaggactccgagacacaatattttgataggatgtaacattggaacaagagtttttattttatttgcatgacgtatcaaacatgtcattttactttatttgataaacttgaacagtcttgttttaagtcataaatatttctaatagattttatttggtaacagggaagcgaatgtgagcattacccacgtcgactgatttacgattttattgaataaatatgatttaattagattccgcattttatatatgttttttttttcattaatatgtatgttggagtagaaggatgagtttaagtggtacattaacgatggcagtgagtttattgacgaagttctttttcttggaaaatctattattattaaaaacctaaagtgggatttaagcttggacttgtgacattttcaaaaatggggctactcattactcattaaaaattgattctttttttt

SEQ ID NO: 1355 - DNA, 499 bp, Glycine max
tggtacttctactgaagctgagtttctaccctcctcctgtcctgacatagaatctctagtgcagctgaaggatgctatagggttcttgatccttcagattcagtctttgtttcttgtttgttctttttcttggatttatctctcattaaaaaaatatcaatgaaaaatatgatggattaactggttttcctttttctggtatcggagaaaagataatgattttcattggtctcattattcagtatttggatttgtacattttttattgcgtattatctattcattcattatattaggaaagtttaggtttttttaaataacaatatttgatgcaaaaataaaataaaatgattagaactaaaggtattaattaataattattatttcatttatcatttataattatttgtatgtacatgtattataatggtttaatatttattaatatgtaattttcgctaataccatatacaatacacgtcttctataataataaaaa

SEQ ID NO: 1356 - DNA, 590 bp, Glycine max
  unsure (1)..(590): unsure at all n locations
agcttgtcgctcccctttttggggcattttttgccacaaactagttgcttacaattgttacctttgcattagtaaaaccaatcgcatgctaatatgtaaaatgtaaaatataataaaagtaaagaattaaatatgtactaatggttagtcaatttctcatctcatttgtgttgacttgtggcatttaacgattattttcttctcttattgacggacatacactcactacatgaattctaattctacttgcttaggaaggtaactttgactataataatggtttaagtaaataatatataacggaaaaattataaatgttgtctttattaaagggtgacagttaccaacgtagttaattatcaaaatgaaatataaataagaaaataatgttagatcactagggttaaacctttgttcaagatgtgaatcaatacttgccattgatccttgaaatcaattagccctctagctaatccattctatctctcttctattaagggatacaaactangtatttgaagacacaattgctccttctttttcttctattctctggccatggatcttgagacaatgttcaaagaaaccta

SEQ ID NO: 1357 - DNA, 538 bp, Glycine max
ttcttcttgaaaaaatgataaaaattagatacaatttcatagatgcttttagtgttgtcatctaatccgaattagaattgtactttggtaatgtatattgacttttaatgttttagtgttctccacttataattggagttttacctcgaaaactctaattctaaccggagaatagtaccaaaaaacacctaaaaaattgtatttaaattttgttccggaacaaaaattgttctttgccttgcaattttcactgtttgagttatgtgtgattaactttagtgctttttgaatgacaaaacaaaagaagtatcaagatgtaccaagcttcttgttgggtgaatcaatgggtggaaccatttctttgaatattcacttcaaacaacatactgcatggaatggtgttgctcttattgcacctttgtgcaaggtgtatctccttgaatttaaagtacaactagaatttttttattgcttaatccatatgtctatacactaaaccagttttcttgaatagcttgcggaggatatgattccacat

SEQ ID NO: 1358 - DNA, 609 bp, Glycine max
agcttctatataagctgaaccattttatcaataaacacaagttgagttttattcagaaaattagagtttatctcttttatcttagtgagagtgattctcctaaattcttgagtgattcaagaacaccctggctgtatcaaaggactttcacaacctttgtgtgttgccctcgctggaaagagtgattctttccttcctatcatctccacccttgttctttcaaaccacaattccagaaaatccacctctgcccaaaattatctcgtgaccataactcccatttcacacactcaaattaagtgattcttgagcctaaattgaatttcaaaacgagacctttcacctcgttttggaatcacctcatttggagccctgtagcttccgttattgccatttctatatttctgtccagccaccacttaacctacgttttaccatcccattcatccattttatgccagaaaccaccttattaagacccacgagattaaccaccttattttccatcctttccttaatcaatttccgcattttccatcaaggtttaatcctagacgatcctaagtcagcccttgggccatgagggttcatatcacataatatatcgag

SEQ ID NO: 1359 - DNA, 502 bp, Glycine max
tctagatgagttatgtctgcgaatcggacatcctgtgaaaagttatgaccatttgaatttctcgagtgcttccgttgtttaatttcaagcgtctcgatattttatgtcctcaaatcagacatcggagcgaaatgttatgaccattcgaatttgtcgagagcttccgttgttcaatttcgagcgtctagatgagttatgtcaccgaatcagacatctgagtgaaatgttatgaccattcgaatttgtcgagagcttccgttgttcaatttcgagcgtctagatgagttatgtcaccgaatcggacatccgtgtaaaaagttatgaccattcggctttgtcgagagcttccgttgttcaatttcgagcgtctcgatatattatgtccccgaatcggacatccgtgtgaaaagttatgaccattggactttgtcgagagcttccggtgttcaattttgagccgtctagatgagttatgtctgcgaatcggacatcctgtgaaaag

SEQ ID NO: 1360 - DNA, 553 bp, Glycine max
agcttgaatgctctgttgtgtgctctcttagaagaagaatattcaatggtccacaactatagaagtgcaaggcaaatgtgagacatactctcattaacatatgaaggtttgacacagataaaacataacaagctcaacttgttaacacataagtatgaactcttcactctggaagaaaaggaagatatacaaaccatgtttggacacttcaaaccatattagatgaattacgttgtattgataaaacatttgataattatgataatattgacaaaatactaagaattttatccagaaagtggagactataggtaaccaccttatgagcagtgaagaacctagactccatgtccattgaagaactaataggaacattaaaggttcatgaacaagggaatcaaaaagagaaaggcactgactctaacagccaaaaagaccaaaacaccatcaacactcaagaatccacatcaaggcctacgtccagaagctcatcaaaagcaatcaacacagacatatcatctggtgatgagtccaataatgaaggatcagatga

SEQ ID NO: 1361 - DNA, 567 bp, Glycine max
tgttgacaaagctgaaaagtgtgtctttgttggtgtaagtgaaacatcaaaagcatataagttatttaatccactaacaaagaagattgtgaccagcagggatgttatttttgatgaagacaacacatgggactggaatgagcagcaacccaattcaattattgttgacaatgaagatgtaaaagaactacagctactcgtaaacattgtcttaacatctccaaatgaagctcaaatagctcctgagacagagatttcaacaccaacaaatgctggaacaacagatgcaactagacatggcaatggggcgggtcgggtacgggtattgtctccccaatcccttaccccgacgcctcgacatatccccatacccgtacccgatacccgacgggtttgagtttattgtcccatccccgtacccgtcgggtatcgggtattcccaaccccgttccacacaccatttagaaaaatattttttttttgtaaaaaatattaaaaatttgatttaaaaaaaaataaattgattgtaaacatttttttttactacttatatataataatttatta

SEQ ID NO: 1362 - DNA, 931 bp, Glycine max
  unsure (1)..(931): unsure at all n locations
cgatcgaatacaaaagacattactccaccaaacaccaatatcactcaactanaacaaangtcacacaactaaaccatccccccaccaggcacaaatggttgatgcatcatgccgggcnacntaagncaactgangcatgcaagcttgaaggcaaaccggaagcaacggaaaattggtttcccactggcccgcaacaaaaaaccgtacctgtagcaaggggatagcggactcgcgcccccatagcaagaaccaccaaaacaaacctatgcccttccatacgacaacctggagcaattgagcaccccgaaacctaagactgaaaatatttaaaataaacctactcaacctcaacagcaaaatcaaccacagcagaacaatcaagacctccccagcaacagatacaccccggaaggacgaaacaccctaaactaagacggtccagcccccaacaataacaaacacagactgcaccttccttacaaaaagctggtggcccaaacaaaccaaacattcctacaccaaacgaacaacaacaacaaccccagaaacaacccacaggggaggcccctacacaacccttccacgaaaacttgtgaggcaaaagactatgccgaacatgcagtttcaacaagaaaccagagcccccatacaaagcttaaccaaagaaatgggaaaaatggccaacccaaatgaaatcaacaacaacacccaaaaatcagacaagctgcacttttcaatgctggccaaaaatccaaaaaatgtcaatcgccatttaaatgacagccgcgaaaacaantgccaagaaaccttaaccccgngacaactggcctcaatatcggaaatggaaccttgccaaaacttcaacttatattcccaaagaaacgggaatggacacaaatttaacctaacaatctagtcgtggacagtgaag

SEQ ID NO: 1363 - DNA, 402 bp, Glycine max
tcaccggcttctaagtgacatggctatcctaaaagagaaacctaatgttctttgacttcaagaatatcatgctagagaccgccatactgcttcaagggctcttcatgtttaaaatacgtttatcacactaagagagactcttttgcgtgactctcacaggaactgactcacataaactctcattcctctaacgaggatatctgcgaaattatcttaagtgaagacaccctcctccctgaaaagagacaactcacgcggcccatcttaagactcacattcctgagcatacaacaaaaacgttgacgtgctaaagaatggtattcaacagaatgaatttgaccgtatatcctactctgcaagcgattccttatgccttactggataccaccttttcttaacata

SEQ ID NO: 1364 - DNA, 459 bp, Glycine max
agcttatgcatggaaaatgtaattatgaaattgagatgcccgaaaaaacaccatttcctagttaaccatgcattaagtaccatgttcaattattttgtttttaagtgaaacgggtttatgatcccaacatggttggctcgtggtgcctaacacatgaaactaagaatgtagtgtgaagtttcacgcttcccccttttttgtttttgttttgtagaggaaaacgcaaggatgagcaaacatgaaaacaaatggtatgcaattttgcagatcaaaaagtttgttgaacgcatatgcatgatgatgccatgactcatgcaaaatgtgaggccggaatatgataaccgacaaatgcaggatatgtccattatgatgttatgaagagatgcttatgcgatgcatgatatgaatgcattttacggacacgagagcccggagaattatctcttcttacttgcgcat

SEQ ID NO: 1365 - DNA, 498 bp, Glycine max
tgttgttcccgaacgataaagggcgtagaatctatctatgcgcgtttacctactcagggtgttgttcctgaattataaaggttgcagaatctgtctctgcacgtttacccactcaggttgttgttcctgaatgataaagggcgcataatctgtctctacgcatttacccactcagcttgctattcctgaatgataaagggcgcagaatttgtctctgcgcgtttacccactcagcttgtgtgtgcggataaccgcatgtcaagttactccagtgtcagtatgacagaaattgtctgcgcggaagatgacgtaaatctccgcgtgtcaacaggcttgttggccgcgattgacaaagggtgcataagacgacgatagtctctgcgtgctatcatgctttgtgtcttagagataggaaaagaaagtttatacagataaccactcgggtatctccgcatgtcaagtgactccagtgttagtatgacagaaattgtctgcgcg

SEQ ID NO: 1366 - DNA, 270 bp, Glycine max
agctttcagaaactcgggctcgacttttgctccgcctacttcctcacagataagattcaatgtgtttttttctaccctaaagaagagcgattcatctagcaccacgaggggaccctgatcacggtgctcacgtgccgctactctgactagcactgtgcctttgcggtcctcgaactactcgttctcgctgagatcaccatcgcgtgttagaactcgtggactctcactggggcaagaaaggaccaggacgcgctcgtcatgcgcgtgcat

SEQ ID NO: 1367 - DNA, 368 bp, Glycine max
gcttgaggcattaagaggggctaaagagatggataacgtttttttttttaatatagacagggagtcgcttacgaaacttctcttgcaagatgattcattttggatacaaccatctaaggcgctttggcttaaatgtggggatatgaataccaacttctttttctacgaccgtgatttacataaattgcctggacaatgtacttataacaatgatccaccacaaaaagacatttttcacgtgtatcgttaactctggatgttgtgaatgcatacaccttaagcctgttactcaacaattcattccaactgttgaatatatcattgccctttagatgcccctaataatcttcccaaccaaattcttacaa

SEQ ID NO: 1368 - DNA, 461 bp, Glycine max
agttgcaggaacatgagatggaattgcaaagactctttcaaaatgaagaacgtgaaaaaagaaaaaagggaatagcactcaaagcctcatcctccatccaagaagatagtgacaacgagggctcgaatgatgaagaagtttctctctgtttgtgaaaagatttcacatattcatcaaaacaggaggaaatctaagacgtcaaaatttcaatcaaaataaggaatcacaagagacttctccaaccctaagatgttacaagggcaatcaacctggacatctaagggaaaattgtccaacacataagtggtggactcagaaaactgagaagaaaaattatggagaaaagaaagctaagaaagcctacattgcttgggatgataatgattcatctaaaggttctgaaaaagaagacatcaaccttttgaccaaaaactatgaaagcgaagacgatgattctcaag

SEQ ID NO: 1369 - DNA, 551 bp, Glycine max
ttgcttctacaatctccccctttttgatgatgacaaatcctaaaatgaatagaatatatgcaatatttgatctatcgttcactcatccctttctccccttttctttttgaatttgtgcttaatttaaaattcaataaataattttgtcttgatttctaaaatacccatttttctctccccctttggcaacatcaaaaagccaaagtgcgtggaaaagtaaaatcatacacaagacataactaaagcatatccataaatgctagtcatagtcatataccaataaggtaaccaagtttaaacacataacacaaacaactaagtgcaaataattaaacaatataaccaagttcagaaaacatacaactaacataaagtcataataataaaacttaactgaatgcaataatcaaaccttgagatagttcagatgttacctcttttgagatataactgataatgttgtcaagaagatgtttttaggagatattctactctttttgctttagtctttgatttcttgagaatcatcttcttcgctttcatagtttttg

SEQ ID NO: 1370 - DNA, 974 bp, Glycine max
  unsure (1)..(974): unsure at all n locations
tcttagtacacagtcgcgacgtcggactcgaccncgacttanantcanaacgaatccaatgtactanactactgtgcaccagaacgaaccaaaccccaaggaccannnaganattggttcantgcatcgncgcgncnngcgancannaagacccgacgcgcaggcatgcaagcnggaactttaacgacaccgagattatgttatcaaatatggcacgccaaacatgactcatcaattgcaacaatgaaaacatgacccttcactaaatccaacttcgaatgaaaattgcgtccaatcatgccaacctgatgcatgattgtggcatggtcatcaaatgagaaaacattggttagaaagagactacatttatatttctcaacactaagaaaatgctgatcgaggtgcgaaacataaataacatctttgacaatgatgggacgctaactaaaaaaaaaattacctcgtgggcttggggttgcacaaaggcaccagatcctaacttgacattggggtgaagcgatcccaacgaagataaaaatcgaaagacattcaggtctgagactaatgcagacattggcaaggaggcgaagattcaatccatgcgaacccaggtcttaagaagccaaaaaacaaatggacggcatcgatggtatcgtcaaacaaaagtcggcaggtcgaaccaaagggatggggaagagcgtttctatgaccgaaaaaatttaacaccgaggacgaaggctgaatttgccaaagcttaacagaggaaaaagaggcgtcataaaacacaactatactcgcaccagggtagaatgtgtggggaacaaagaaatcagaggagagagcctccgttttcgattatggtgagagaacctcttccaacccatgcacgggtgcgcatagtgaacgaatactggaacattcgacaaagcaagtctctaataggtgtctcaactaggaagagaaacactctgacg

SEQ ID NO: 1371 - DNA, 544 bp, Glycine max
  unsure (1)..(544): unsure at all n locations
tattcttgattttttctaagttctttaacaagcttagaacatgttactcggcatncattcaactggctttaggcttggcggccacgatcaacaaagtactttcgacacctactatatgttgatttgaccaacgctgttatgggtatgttgcgacaatccttcaaaaccttattgatacattctgagagattggttgtcatgttgccatatccacgtccttctctatcataagccatcgtccatttttcctttgaaatgcgatcaatccatgttgttatggctggactcagtagacgaaatttttctaaattttgataaaaaaaatgtgcttgcaaggagtgtagcctgcctaaaattagctaggaacaaaaattttaagtatatatcaaacttaaattaacgtgaccaccataaatgaaatcttacccaatttcttcaacatttctttttgtttggcattattgaaattgcgatatgaaattgcttgctatgggtcggacgtagtaaacatgataaccgctgggaggatgccaacctagtgctt

SEQ ID NO: 1372 - DNA, 496 bp, Glycine max
agcttgatgtgagaaagcgtggaagagtcagtcttcctacttttgtttgttgaccacagagtggtacctggagatatgtcacgggggtcaggagaccttggggacgtcaggtgggttgctattgcccaaaaccaagcttgatcaatcccgacccaacccgggcatagtcagtcagtgagaacttgtgacgtacctaaacaggcaagctcctggcagtcaaccaataaaagaacaaagaccacgaagcaaggaggcttgtgtggcggctggccagctatgaatcttgagtggtatctagaatttggcctctggtaatcgattaccaagggtgtgtaatcgattacaaggcttaaaaatggagacaggatgttaaaatggcctctggtaatcgattaccaattgtgtgtaatcgattacacagagtaacagggcactggtaatcgattaccagttgggtgtaatcgattacacagggagaaaggacactggtaatcga

SEQ ID NO: 1373 - DNA, 410 bp, Glycine max
ttacatctaaagcgaacacacaattgacatgctcctgagatttactagtcgatctcgcaagcaactcgattagactagcgattgtttaccacatttcagcgtaaacaaattggcacgcccggtgggaccggtcaattgtgtttggctttaaaattattattaaagttttgtttagaacagttggtttattgcattcttaattgttttgatcttgtatgcatttaagaagtgggaaatctgttccacacttaacagaattcaaaactcgtacaaggatggctagaccacccccaagtaatcgaaacaatgaccttccaaatatggaggggcaaccaacgcagacatctgttaataatgccaatattaatttcggcataagagcaattcctgaacaaattgttggcacgata

SEQ ID NO: 1374 - DNA, 502 bp, Glycine max
  unsure (1)..(502): unsure at all n locations
agcttcgacctatgtgcatgaattgtgtgccatcacaactgccgttaagaagtggagacaataccttcttggccatcaattcatgatcttgactgatcacagaagtcttaaggagctcatgactcagattgttcaaactccagagcagcaaatgtattttgccaggcttatggggtatgactactccattcaatatcggtccgggagcactaatttggtagctgatgccttatcgcgcttgaaggagggatcagaaggaaccatgttattactatctgtaccttgcctgacatttttagatgaattgaagaagcaattaaaacaagaaccagcctttatcgaattcaggaagaatatattggcccaacccacagccttccctgaatattctattactcgtggattgattntgtaggggaatcgtatctggttactagaggatatccccttcattcagactctgttaatggagtatcattctactccaacagggggtcacatg

SEQ ID NO: 1375 - DNA, 586 bp, Glycine max
gacgcgacactatacaaaaccaagctttcctaagaaaacttccttgagaaccttctttgagaaaacttccttgagaagctagagcttagctacacacacccatctaaaaactaagctcacctccttgacaaaatacatgaaaatacaaaaaaaagtccctactacaaagactacccaaaatgccctcaaatacaaggctaaaaccctatactacaagaatagccaaactacaaggcccaaaaagaaggaaaaacctattctaatatttacaaagataagcggggtcatacttagcccatgggcccgaaatctaccctaaggcttatgagaaccctagggccttcccttggatctctagcccaatttacttggagtcttttatccaatgcccttacgaagtaggatttcatcattccctccaccttggaaaggatttgacctcaaatcctgaggttcttcatactctaggctccttccctcgacacctgtaaaaaaaacaaaaacatttgtattagtggtgtttggtatgttgaagtaagggaaagtctgaaaacccattttctgggcatcttcccatgaaggaaca

SEQ ID NO: 1376 - DNA, 592 bp, Glycine max
agcttcatggtgaatcaaaggtgattcaaaggtgttttgatgataacaaaagatgatgacaaaggtgatgacaaaaagctcaaagatcaatcaaagaacaactcatgtgatcaagttagaataaagaacaattcacgagttcaagatagaatcaagagaaggcttaatcaagctaagtatgaaaagtttttctcaaaaattgagtagcacatgatttttctcaaaacatgtttaccaaagagtttttactctctggtaatcgattaccagattgttgtaatcgattaccagaagcaaaattgttttgaaaaagttttcaaatcgaatttacaacgctccagttaatttcagaaagctgtaatcgattacaatgttttggtaatcgattaccagtgcctttgaacgttgaaattcatattcaaaagtgaagagtcacatcttttcacataaaagctttgggtaatctattacactgatttggtaatcgattaccagtgagtgtttctgaataaaatcaaaagatgtaactcttcaaatagtttttgactttttcaaattgtttttaggttttctaaatgcataactttctaat

SEQ ID NO: 1377 - DNA, 500 bp, Glycine max
ttgcggatttggtcttcgccagtgaaaggatcgaagtggatctgaaaagaggcaaatttaatcatcctgcttagacgaatgagaaaactggggcaaataaagagggtgaggatgagggagaaacccatgttgtgactgccattcctatacggccaagtttcccaccaaacccaacaatgtcattactcagtcaataacaaaccacctccttacccaccacccagttatccacaaaggccatccctaaatcaaccacacagcctgtctaccgcacttccaatgacgaagaccacctttagcacaaaccaaaaaaaacaccaaccaagaaatgaattttgcagcgaaaagcctgtaggattcaccccaaattccggtgtcatatgctaacttgctcccatatctacttgataacgcaatggtagccataacccctgctaggttccctcaaacccccattttctgaggatatgactcgaacgcaacatgtgcatatcgtgggg

SEQ ID NO: 1378 - DNA, 562 bp, Glycine max
agcttgtttaactgtcctgctgcaaagcaatgttatacccagctggaaagatgtatctcctccgatgaggaaacaatctatgctgcttctgcggcagacaatctccagtagtaccatcccaaaactgtaaatgtcaaggtttactgatactggtgcatccttctgccattcaggtgtcaagtacttgcttgtcccatcatcctcttttctcattcttgaatggtcagactttagcagccttgccaatccaaaatcagagatctttgcagtccacgctccatccataagtatattccgaggatttatgttgcaatggataatacggacctcacactcttcatgtagatacagcactcctctggcaatgtctaatgcaattttcagtgtgtctctccgagatatgtgtttctcatcgttgaagagaatacttgcaagagacccgttgctgatgtattcgtaaacaggaagcttcccagatccattgatgcaaaaaccaatgagcttaaccatattcctatgatgtgttcgagcaatgttagtaatatcattcaagaaaacactc

SEQ ID NO: 1379 - DNA, 511 bp, Glycine max
  unsure (1)..(511): unsure at all n locations
tgccaggataagctgtaagttcccaagttctcatgtgatattgctcttttaaaaaatgaaaagtgcttaatttaattcaactgtttgcacaaattcaagccaaatcatagaagacacggattcaccattgttgcacatattcatgatcaaatagcaaaatgtactcaatactctcattactattttaataatatcatgtgtggaaatgcaataggcttttatcttctatttgtataactatgtctctccccctgtgattgatgccaggttttcatttgatcccactcagaaattgggtctggatattgcttcttgcatccttacaaggtgtgatagattgtcaataattaatatggttttgctattggtataatatatttcttttttgtttcactacaatgtggagtcaaatcatctgtataactgcagggctccattgggacaagatgctgaaggaaaaccaaaanttgtcatacgcccgtaagttttcctgttcagacaatggatgtac

SEQ ID NO: 1380 - DNA, 661 bp, Glycine max
agcttaatagtaaaattaaaaaaacatacgaaaataaaaaatttacaaaagccaaaaacaaatattttttttctaatttttactaataaaaaaattagaaagacttgtaatcattggttgccacaccatattaatcaattatccatttaatgtatgatcaacataataaaaatagaagagttgttcaaagaatgtttgtatcagaaaatttgaatatacatccaaattaagatgttttaaatcaagatgaaattgagataaaatatatcccaaccaagtataattaaaaatgatgttataatattttttaatcatatgatatcaatataccattttaattacatatgttataacataaattggacacatgaaattatgattcatttttattttaaaagatataataataataataataataataataataataataataataataataataataataataataatataattatatgaactgaacacacatacttaacataaattgagcatataacaacgttagttattcatttgtccgatagatattcataagataaatttatgggatggttaatcattaatttttttatgtttaaagactcttaaatatttatatttaacattaatttatctaccaaattaataaatgatgttaaatgtt

SEQ ID NO: 1381 - DNA, 580 bp, Glycine max
tatccagattctgttttagatatttgtgaattacaacctggttacgtggaagttttaattcaatggcaaaatctccctcccagtgaaaatagtagggaatttgtgactaaatcccaagaggtttttctgacttatcaccttgaggacaaggtgagtcttttaggcaggggtattgataagcataagcataagccacacatcaccaaggtgtacacccacaaacaacgagcaagagaagcaataaccatggaccactaccagcaagacgcacaacacccaaggggtgcaaaccacccaacaattatgatccacccaaagggtgtaaaccacccaatagttacgattcacccaaagggtggaaggtcaaaagatgtgaatcagggggacatgaccattgtgaacagtcacaaccaatcaaggggacatgaccattgtgaacagtcacaaccaatcaaggggtcatgacccttgggaacagtcacgaccaaccgttatgatccacccaaggggtgcaaggtcaggagatgcgaaccaaagggacatgacccttgggaacagtcacgaccaaccgttatgatct

SEQ ID NO: 1382 - DNA, 445 bp, Glycine max
cgtgcgcgctcgcaacttctgatcttggtatgggcagcatttttggcaggccacagagctactattggggagggaggtagtgaaactttctccatttgcccttgtttatgttagaggactacggattgaaagagggaatatagtagtatgaaggggtagggggagaatgattcagataatgaagtcctgcttaaataaatgttgtcgaatcggcaaagaataagctgatgcatgagcctttacttctttaacattcattcccatcataacggaaaactgcccaaggagggggaagtatagattgctcacgctgctctgaggattgtgcaataagcattatttcatttacttggtcaaatagatggtacattgagacgccattcctaaggatcaaatccgaagggtttgcgaaggcgatgttctttaccttatccatgataccttt

SEQ ID NO: 1383 - DNA, 595 bp, Glycine max
  unsure (1)..(595): unsure at all n locations
tgttacaaatatatttagcttgagaccgactataagagattttgcggacatattagctagttgatcattggaaatgacaaaaccagttgtagtttctcttgcgagaacctttttctctaacaaagtaacaatcaattgtgtttgattcttccatgaaaaactatgttggaagcaacatgaaaagcatccaagttattgcaaatcagtttcatctcactgacatctcccaattttaattgttgaaataaattgtagaagcaaagcttcatgatgaatcaaaggtgattcagatgtgttttgatgataacaatgatgataacaaaagatgatgacaaaggtgatgacaaaaagctcaaagatcaatcaaagaacagctcaagtgaatcaagaacaattcaagagttcaagatagaatcaagaagaattcaagactcaagaggaaagttaagagtcaagaatcaagattcaaggttcaagatctcaagattcaagaatcaagcgaaggcttaaacaagataagtatgaaaatttttctcaaaattgagtagcacatgaattttctcanaacatgtttaccaaagagttttactctctt

SEQ ID NO: 1384 - DNA, 173 bp, Glycine max
tcaccaaggtttggttggcacaaaaaatattttttattaaacgttttaggaaatatggcatgttttcccgttaccacgctcattttgggattatatttgtatataactgtcgcaaatacgcttggtgtttcatttcaatagcgattatagatgcattcattatgtcctggaag

SEQ ID NO: 1385 - DNA, 322 bp, Glycine max
gttattaacgaatagctccggacttcctttgttccattcactcgacgccatcggaaaaagggatcctgcctggcttataaaattttttttccatctgtctgtttttttttttcaaaggggagtttagtgcatacacctccattttgccgatacggaaagaccaccctctaacggttaaaattcttttactggacgaaaaactccacagggctccaccctcttcccttgctcggattctctcgttaggtaccggtcatcaaaatatatttatgatttgcaatttccgacatgcgtagggggcatttcacctctttccataatt

SEQ ID NO: 1386 - DNA, 421 bp, Glycine max
agcttttggagtagaggtgtagaagatccatgcatcacctaccaagtttttggatctaatgcccatttatactcaattaaatcacatgaaccaaagtcacccgcacaagatgaagaacctttttgtagcctcactaagtcatacttcactataatgcctataaaaaaaattagtcgtattatgattgagaatgatctaagtcatacttcattattgacaaattaacataaaaggattgtcgtggatttaaagaatgagctatgcaatgaggtggggtacaactctcgctccacctttaattgagtatttcataaacaacaccatagaaattggatacttcattttctggctttacctcatgcctatagatgggtgccttcaccttttctattatagaatcccatatttcatacaacaaatg

SEQ ID NO: 1387 - DNA, 603 bp, Glycine max
  unsure (1)..(603): unsure at all n locations
ttctagcttttcattggtgtattttgatctccttttggtgctctaaattgtgggaatgtgctcaaatatgtggggcaattttggtttgttttctcgcttgattaagttgaattgggggtttgtatgagatggccctaggcctataatgcattttgaagtaatggggcatgccacattgtccccgttctcttgctattgatgcctaaacgcgcgcccaccaagtgttcggtgaaatgcctcaatggcattagcgcgtgatttttgtagggaaacaacccatggggcgatttggtttgcacatatttttgggacatgcattcattttcgaaagagctagagtaattgccccacatatgtcctacgcctaggaaccaaagtttttatgcaaaagtacacaaaaggaggtgcatattgggtaaagttaccctcttttgggccagcaatcagctatgggccacactataatattntccctacgcctagatgtctaagaattgtgctcgtcatgaatgcgtangtttaaaataggtagcaagataccttttgcaatttacactttgngtgtggagcanaatactcggatgtatgtatatataaattttg

SEQ ID NO: 1388 - DNA, 549 bp, Glycine max
agcttctcaaagaagccacgaggaagcttctggaggaagcctcttaatgaagcttctagagaaaactacatgaagctgcctcggtaaaaacgctgtccagccttcgttaaccattggatcttctcgcaatttggtctgcaacttcacaagacacttgtccatgatctgaccgttgggatctttgagaagatgtctggagtctgctagaaatttccgttcccgagagcatctcttatttaagcatttcaacctttgctttcgtgtagcttaggaaaaacgtcatttcttcttctttctttcttccaaagtcatttctaaagttccaagcactttctccatcacccacaactaccattagccaccacaaacaatcattgttcttcacaccgagaggaacccttcaaccgaagcggaatcttccaacttggcttgcggttttggtagagaacgaaaccctaatctgacctttcgttttctttcgaggtaaccatggttctacgcttgtctcttgttagattcatcttgtctttgcatctttctgactttgga

SEQ ID NO: 1389 - DNA, 535 bp, Glycine max
tctacttatgtggcagggcgggcttccttcactttcttgtctccaacgcgagctttgaccactgctcttccttcctgcgatgcttcttttcatatccgcctgagtgggcttatagcctaaaccatacttcccacgatttcctttggcatttatcaggctagttatgccaccgttgtccatgcctaaacccattccgggttcgtaaccgttccctaacataactcgggccatcattcctaatgcatcggacaggcaaggctgcccagagaaggagtccacggaggaaatgctgaccacctcaaaagactggaaagcggattctaacgattcttctgcggcttccacataaggcatagaggatgggcagctcaccaagatgtcttcctcgcttgacacgttgaccaagtgcccctccactacgaatttcaacttttggtggagtgtagagggcacaactcccactgagtggatccacggacgccccaacaggcagttgtagggggggttaatatccattatttggaagtgacttgac

SEQ ID NO: 1390 - DNA, 504 bp, Glycine max
  unsure (1)..(504): unsure at all n locations
agcttataagaacaaaattgccttaatcattttcaaatatgcatgtgaattaggacgcatcaacaagaatcaagccaaggctattgtgcaagcaatcaatggggcaaaacacaccaaatgattataatgatggatggctcaaattctcacaaaggtaaaatcatcactttcaaattgagctttcaaaactatcatgacatgtagagaagaatcaaggatttcaagtcacaaaatgtcaagaacttttattttcaaaacaattacccatttcttgaacatatcctataattcaaagaaaaacatgcaaagtcgtacgtgcacacaaaattgacccaaaatattaaactgaaaatccgacgaaactaacaacattaacaaattaacacaactaacaaattaacaaaaccaacaaaactagcaaaaccaaagaacactcccncccccccccccccatacttaaacaacacattgtcctcaatgttgcacaattaaaagattaaaaaa

SEQ ID NO: 1391 - DNA, 540 bp, Glycine max
  unsure (1)..(540): unsure at all n locations
tccgttcccgagagcatctcttatttaagcatttcagcctttgctttcttgtagcttaggaaaaatgccatttcttcttctttctttcttccaaatccatttctaaagttccaagtactttctccatcacccacatccaccattagccaccacaaaccatcatttttctccattgaaaacccacaccgagaggaacccttcaaccgaagcagaatttccaacttggcttgcggtttcggtagagaacgaaaaccctaatctgatctttcgttttctttcgagaggcttgtgtggaatcgacaagcaagaacaaaaaggaatcttcaagtgacgcgacgaggaatccgtggggtagctcacgataggtaaggggagtttattataaaatttaccgttttaacaccatagttagggtcagggaacctagctatgaggatatctgcctgtccctgtcgcatgctgagttntcttcaaagaaaattacgttttaactaatgggatgcgatatatatatgtatggtgatgaatgatattgttttg

SEQ ID NO: 1392 - DNA, 393 bp, Glycine max
agcttgtccttggtttagacatgattggtacatgatttgggacttgtaggattcaatttgggcaaaattggatgagggaaagagtggttttcgaaatctgcactttatgcaaaatttcgctgttgaaatgtgcagcagaattttgcataagtgcagaaaaatgctatgtatctgctggttgtggaaagggtagtacatatggggttctggacatttgctaacagatcccaacggtcaaaatgtagacttatgttctagagacttctagtaaaattttcgagtcgatccaacggttaacgaattggaacgaagaaaatgttattgcggtatttgtatgtgaaaagctgtgattttgagttgtgttttgggcaaagattctgcctttgccctgtt

SEQ ID NO: 1393 - DNA, 594 bp, Glycine max
tagcgcgcggccttgatgctgacgctctgccagattctccttggcgctaagcacactgaagctgcgcttagcggtggatgcacgcttagaccaactgctactttttgcacttcaaaacttagcctctttttcatctgaaattgcatatatttcatcattaaatttaatggacatattctagagactgctttaaccataaaacaagatttttttacaagattactccaaaataaccataaattggggaactatacaagttttggaaaatgatttctataaaaaagttattcgtataaggcgactaacaactcccccaaatttacaattttgcttgtcctcaagcaaagaaagaacaggtcactagtccttaagtgacaaagatagtggtcagtcaaaagaaaatggtgtctgattcataaaggaattcaaccatatgaactgaatatcatgaaattcttaaatcaattacttctcacaagcatgcagcttttcaaagatctcacagctaaaataagctagtaagcatggtagaaatcaaggaaggatcatcaacccaaaactcacagtcattgtttcactcaagctcaagtgttt

SEQ ID NO: 1394 - DNA, 544 bp, Glycine max
  unsure (1)..(544): unsure at all n locations
agcttttccttttttttccccaaggtaatttccctcaaggttcaaaggcatatctatattggaagcaatagatattgggaattgcaaagatggagatgatggggagctaattaaggttgacaaagaggcattgcttccaagagaaacctcctcaagcttttggaatggtttcattattggtttggtgatagggattgagtttgagtttgcttgggggcttaagagattcttaaggctgaaggcactgctagaagccattgcaaggagttttaaggagaaaagttcaactaggagaagggaggtcataagaaaaataaatttaaaaacataggaagtaacacttgaattctgaagctaagtaaagcctcttgaaagcacaaccataaacttccaaaaatgacaagattgagaaagtataggcttcttttgaacaaccaaataatgcactgagttgtccaagttatagaaaatagtgatagtttatgttaaatgcanattattctaatgtttcatgtactccctattcgtatgtatctaactatga

SEQ ID NO: 1395 - DNA, 491 bp, Glycine max
  unsure (1)..(491): unsure at all n locations
ttttgtcatcacctaaaaaccatttttaaggtccaacgccttgaaatggtcattttcgcttttattggttaaacgtggatttctgaaagcctaaagccaacgcataactttgtcactactttcaaaaaaattgaaagatcgtttaatgatccaacgccttaaatgtccttttattcaatcaaaatatatcttgcaaaaaaggataaaaacaacttaaccaacgtttagttctcaaagaactacgtaggtctgatttccttatcacaattgaggaatacgtatgagcaagggaaacacccttgtcgacgacaaaaagataaaaaaaatacaaaaaggcataaaaagacataaaaacgtaaaaaagggaaaataaaacaaattgaagtcatgtttgcacacttgattaaaggttgccgtcccttgtgacggacgcgtggggtgctaatacttttcccgtgcgtaaatacaactcccanacctttcacttaaag

SEQ ID NO: 1396 - DNA, 508 bp, Glycine max
agcttcatgatatggttgagtatatttatttattgtgtgttgtgaacattttttcacatctgaagttgcattgaggttgtcctcaccacataggtgttaggaaaacatgctgaaattaaagagatggggtccaagagatacaaatgcaagaaaaaccgctagactgattagtaaccctgttgacattcctatcaaagggagaaaattatcaatggatgctagaattgaaaatttccatgttggaagtgatgaacaagtggccttaataacttaagaggggggtgaattaagtttaaaactttctcgattaattgacttctaattccctttttaaatctatatgttaagaatattgaagatgaagatgaaaactatatcaataaaaatcttcaagttgtagaagcaaagactttgattttggtgttttgatgatgtcatatgatcatgatgttttgatgccttatggaaatgcgcttctcaagtttaattcaagacaacaattcgagaa

SEQ ID NO: 1397 - DNA, 841 bp, Glycine max
  unsure (1)..(841): unsure at all n locations
gcgagcgaagaagacgggttgcacactccaataatccgcttctacagnaccgacgaccgacggtaccacccacccccccacaaacncccgagcgntttgatagcctgctatgaccngacgcgacacaatanaatacccaaggcttcaggggaaatgagagcagcatagacaagagacgcaagggctttaataataaagagggagagcgagaaaaacaatcggcgcggtaataaaagagaagggacccccaccacgaagcaaacatggggaaaaccaaactgacggcccacttggagaagagactgagcatgcattgagccggcgtagacccatatgcgataaagaaatagcgaaccgggggccatggggcataattttactccaacaaggtaggaacaaaaagcaatgggcccgttggggttaaaaaaatggaaaaaggatttaggaacactagagaaattgccatccgggtaacttccagaaaaaaagagccctccgattaagccaaaaagaaaaaaaatggtctgtcacctctatgctatccccaagcccccggggatctttggcgctcggcaaacaccgggacttaaattggcagaaagggagcgaaccctcaaacaatttgtgcgaagaaaaaagggaaaccctggtgagaaaaatgagggaccaaaatacatcttggggaaagagagcccccagggacaaaacaggagaataaaacaaacttgggggggggggggcaaactaaaagggggagaggaaaaaacactaaagggggcggcagaaaacaacaggggggagcgactcaccccgggaggggaaacagcaagggacaatgccg

SEQ ID NO: 1398 - DNA, 381 bp, Glycine max
  unsure (1)..(381): unsure at all n locations
agcttgcacttgaggaggtaantcattttcttatttgcatgccgaatttaagacactttcttcatgaacctggctccaagcaaatgaacgagctatatatgttgcggatacgcacgatctcatcctatgacggagggctcatattctcccaaaggctaaagcatcactttcaaattgagctttccaaactatcatgacatgtacagaagaatccaggatttcaggacacagaatgtcaagaacttttattctcaaatcaaacacccattactcgaacatatcctaaacttttaatatatagtttgctctccttaacttcgcactttgctacccaaatattaaactgaaaatccccactttgctagcatcttaaatggattg

SEQ ID NO: 1399 - DNA, 549 bp, Glycine max
  unsure (1)..(549): unsure at all n locations
tcatggtgaatcaaaggtgattcaaagatgttttgatgatttcaatgatgacaacaaaagatgatgacaaaggtgatgaacaaaaagctcaaagatcaaagaacaactcaagtgaatcaaagaacatcttaagagaatcaagaacaagtcaagagttcaagaatcaagaagaattcaagactcaagaagaaagcctagaatcaagaatcaagattcaagatctcaagaatcaagatcaagattcaagaatgaagaaaagactcaatcaagataagtattacaaagttttttcaaaactttgaatagcacatggttttttgacaaaacttttaccaaagagtttttactctcttgtaatcgattaccatattgttgtaatcgattaccagtagcaaaatgagtttgaaaaagttttcaaactgaatttacaacngtccaattattttcaaaagactataatcgattacaatgttttgtaatcgattactagtgccctcgaacgttgaaattcanatttaatgtgaagagtcacatcctttcactcaaagc

SEQ ID NO: 1400 - DNA, 552 bp, Glycine max
  unsure (1)..(552): unsure at all n locations
agcttgaaggcaaactggatgcattggttaacttggtaacccagctggccttgaatcagaaatctgtacctgttgcaagggtttgtggtttgtgctcctctgctgaccaccatacagacctttgcccttctatgcagcaacctggagcaatcgagcaacctgaagcttatgctgcaaatatttacaatagacctcctcaacctcagcagcaaaatcaaccacaatagaacaattatgacctctccagcaacagatacaaccctggatggaggaatcaccctaacctcagatggtccagccctcagcaacaacaacagcagcctgctccttccttccaaaatgctgcaggcccaagcagaccatacattcctccaccaatccaacaacagcaacaaccccaaaaataaccaacagttgaggcccctccacaaccttccctcgaagaacttgtgaggcaaatgactatgcagaacatgcagtttcagcaagagaccagagccttcattcagagcttaaccaatcagatgggacaattggctacnccaattgaat

SEQ ID NO: 1401 - DNA, 293 bp, Glycine max
tgctctcacagggcgaatcgctcgatggcaagttttgctatccgagttcgatatagtctacgtcacccaaaaaggtgattaaaggaagtgccttggcagattaattgggctcaacaagcctctcaacgactatcagcccatgcatcccaaattcccggatgaggacatcatggcctctgttgaggaaaagctagatgaggaccgagacaagtggacatcatggccttgtttggggcagtattggtctctccaaacaatcaatgtgtccctttcacaccaggctggggttgact

SEQ ID NO: 1402 - DNA, 541 bp, Glycine max
agcttgtggatctttgttgtggtctcctaaggaagacatcatttaagtccttgtcccattccttttttatgatcttggttctaaaaaatgaatgagttagatatgttaggataggatggatctcaacctatgtcaaagtgtgagttttttacttttgcataaggacaagaaaagttcaagtttgggggagttgattatttccaaaaatacttaattgagacatgtggatttaggcaattatctcatctttttcttatttaggactttgtttatgccctttttatgtaaacttttaatttatagtttgctctctttaacttgtcactttgctatatctcatatgcttattgatggattattttgtaggaatttgaaatggattgaattgcattattggagcaaggttcagtgaaagcttgaagtggaaattacagctcaaatgtacataatttagtattggagggcccaaattgaaattcctttttggagaagatgaaaaaaaactgcaaggaaaaattcactgtagccaaatagcttttgg

SEQ ID NO: 1403 - DNA, 842 bp, Glycine max
  unsure (1)..(842): unsure at all n locations
gacacccccccacaactgcactacttcctctagaccanaccccatnacaacctagacgaccataacctaaccacacaacccccaggcnccgttgtgcatctgaaccatggaaccacaaaacnaaacnagagcgcacgggagcctcacggacaaaaatgtctgcattttagagacacaagagacgcaccggggacgaacgtagagacacaacacaccggacctagaacactacgaaaccaaagacagcccgagcccagaatccagaaaaatacaagactccacaacaaagcccacaaccaagaatccacaaccaagatctccagaaaccaagagcaccaaccaggaatggaccagggagtgcaacaacacgaccctcacaaagggcgtgccacaacctgaataacccacgggatctggaccaaactttcaccaaagaggactgaccctcctgaaaacccattaccacaccggtgtcatcgactaccaccagcaaaaagaggtagaaaaaagtgtcagcaggaacgacccacccccaccttgattaaaacagagaagaaagcgaacacgacggcatcggcaacccagaccctagaggccctcgaaccgcgaaaaaaaaacatctaaagcgaaaggacacacgcctccacaccaaagccgacgggcaaacacagacacctaactggggaagcccgacccaccgaccgggagccgaaaacatcaaaaaacgaacccctccaaaaaggggtggaacgtccaaaaagaggactaacaacttccancaccataacccatgtacgagggcgggccccacgccaacccggagaagcctgaaaaacaaggcc

SEQ ID NO: 1404 - DNA, 505 bp, Glycine max
agcttctaaaccccgtttctctccccctttggcaacatcaaaaagccaaagtacgtggtaagcaacacaaggcagaagaataataatcaaatataactaaagttcacataatcattcataaaccaaatataatccagtcataaaatactaaatgccaaataccgaaatataactaaagttcagagaatgataacttaaaaagtatagccaaatacacgacttaaaataaaagataatagtaatctaaaactaggaaggtggtggaaggtcgaagcacctacgaagataactcacatcctcttcaagctgagtgatgcatgtatccattccttcaaagcgaccatccaaggaatcaaagcgttagccaacataggtgcggaggcctcgtaattccgaaataacttcattcataagggttgaggaatcatctcgttgaggcggaggagagggagtacgctcgtcttgcggaggttgcgtgtccttcttcagccattgcccatctaca

SEQ ID NO: 1405 - DNA, 564 bp, Glycine max
tagccctagaggggatggaccttttcaggttttggagaggatcaataacaatgcctataggttggacctcccagaagagtatggagtcagcaccacttttaacatttttgatttaactccttttgcaagtggagctgatattgaggaggaggaactaacagatttgaggtcaaatcctcttcaaggggaaggggatgatgcaatcctccctaggaagggaccaatcactagaaccatgagcaagaggctccaagaagattgggctagagctgctgaagaaggccctagggttctcatgaaccttagggtagatttctgagcccatgggccaaggttgggtccaattatctttgtacatattagactaggatgtcattatatttggtccttgtatttagggctccatattgtaggtagggtaccctagaaatataggatttttcagcccttgtatttttgggcacctagactaatttttgtatttggggtagttctgtaatttcacatgcactaagtggatatttgatgtgtgtgggtggaaataaaattaattgaattggtaga

SEQ ID NO: 1406 - DNA, 404 bp, Glycine max
gcaagcgaaataatagcccatgtgactaagattcacatggctttatagaagaggaaaggggctgttgttgtagctgctgacagagctacgaaagaagctactgagaaagcaggtgtcaccacttgccaagctgaggcatttgccaaagctatggatgacacttttgcgtgcggtgtccttattgaccttacaagccctagtgccatggataagactggtgaaacgtcccatgcaactttggctaatgaacttgatccaatcatatccaaccctgcgtggtagaagtccactacctccagagaggccacttctcaagataacggtgaacatggtgttattgtatattacacaggtgcttgcccaactccatcttactatgctcaacctgctaccatcactcatga

SEQ ID NO: 1407 - DNA, 511 bp, Glycine max
  unsure (1)..(511): unsure at all n locations
tcttttggaccttgaacaagcaatcaactcctctntcagaaccatgctatgtgctcgcgactggtccctttcttcccttcgtaacttgagttcactattgctaccccatagagctccgcgaaatttgttccggccatactcttccttgcgagccctcttagtctcttgttcaagggctcttgcagtaattgcattctcttcccgtaacccggcacactccttccgaacgtgtgtagcagccaacttgaacttctccttggcgagttttgcctttcctaactcgcttttgagagcttggacttcttcgtcctcttccggtgcttcaaaattctctttgctgatgaactttaacttggcgagccaatctaaaccttgtatgcgaactntcagccattcggggacccaccaatgatgccattacgaatgcctctaagctcttgatctttccttaacgggggttgccatgccttatggattctttgtataatcttggaattttgtgcgccgagat

SEQ ID NO: 1408 - DNA, 571 bp, Glycine max
agcttgcagtagtacataatagtagcagtgtattttacaaatcaatggcgtaaacaaatgaaaacatattatttaatcaaaatatagagacatagcaaacaaataaaaaaattgttgacatagtaggcagtgcagtacaacaacattgtcaggttctaacctagatgatgatggaatgatctgttaataaaattttaaaggtcagtttgaatatgtaaatgtagagaaagtgttggttaccttgtctttggggatgggaacatgtctcacatataactgttatccagaagtctttggtttgtcaaactgaaattgaattaaaccctaaacatatatacattgtgagagtagtggtagcatatagaaaccacaattccagatgtagaaaagattaaataatacaacctcaagtcctttaatataaaaacaaccctcgtattttttgataaaatttgttgatatgttagctcaccaacaacaccaataacatctaatcaaccatagaataggaaaatatgtttaaaagagatgaagtttatactttaaaaagaaatttaaaaatgaattgggc

SEQ ID NO: 1409 - DNA, 636 bp, Glycine max
tgtacacacaagaaaatgaagcacttcagctggtttgggatctattataccgccaaaggtggtgacttttaggtggagattgatcctaaataggttgccattgcgagataaacttcttcagcgcaacatcatcactaatgcaactgatgctttctgtccgcagtgtaatacgacgcaagagacaaggacacatgtgatcctctcctgctcaaaaatatctcaactctggatggattggtacagacaagaaaatgtccaacaactttgccaaactcgatggagactcacctttggtagcacatgttcccaacaagttcaatctaggaggcaagattgagagctttgatctggacaagattagcatggtgtatatggcgtgcgaggaacaaaaagaattttgaaagcatggatttggatactataaaaatcaaggaagagttcaccctctgcacgtggtcatggctacgattccttggaaaactaccagtttgtctttcatcaatggtcggtttgccttgaacatgcattcttggcattaagtaattgacatgcacgttgcgcattggtttacctggccacaataatttttgaggcatattcaatgcaggggctttaaaacattttggttttagggga

SEQ ID NO: 1410 - DNA, 538 bp, Glycine max
  unsure (1)..(538): unsure at all n locations
agctttaaaaggcctaaaaagtagtgctagtgcagataattgaattaacacatacatacatacctttgaaaactccacatctggaacttgcaactttttttgaattcgcaatttgacatcagctaattctcactgtcatatataacaaataaaaaaggatccccaagattctaattttggaactgtatatcatttggtttaatgtctacattgactaaacaaataaaaaacttgaaatttaggggggaaaatgttgaatctcaagtacccgtgaatgtgcttgttctaagaaattgaaactttttggggcaaaactcctcatccagcaacacccacgccatcaatcatagntgtgtgtgaatcagttcccgtcatttgtgttgaacacaactctaccaagtattctaaattaacctgcaaaattaaaatgacaatattcagaaaagaaanttgaatcacatgatgaattttttttttcgctgcatgtaaaattaaaagtattctatatcggccaaaatagtattcaaataaaagtatt

SEQ ID NO: 1411 - DNA, 530 bp, Glycine max
  unsure (1)..(530): unsure at all n locations
taagggagggaatgttagttatttacgtgtcaataatgcttctatattatagggctgaatggtttttttattagttgctttatttactcctattttagtgccacttagttgtcgtgtcagttagtttgtttctgagagtttgtaaggcttatataagtcatgctttgcattgaataaacgtaccagtccacaaacgttttcttgtgagacttcgcatattttgagtttcaacaaatattagatctttttctgtttctctttttttttttgtatgattaattttgttttttttcattgtcttactcatggtgtttgaattgtgtgtggaaaactgcttattatgagaaagccgagaacctcttcaatcctgtgtttctaagctgtttgatatatcatttcaacaatacttatttattgattatcggaaactattgtaccatacaacttagcattntaatatttggtggtctcatttaatctttttcttaggaaatttgaaactgtctgtaattcacttttgaatctacttt

SEQ ID NO: 1412 - DNA, 633 bp, Glycine max
  unsure (1)..(633): unsure at all n locations
agctttggaaaatgatttctatacaaaagttagtcgtataaagcgacaaagacagtggccaatcaaaagaaaatggtgtttgattcatcaaggacatcaaccatatgaactgaataccatggaatgcttaaatcaatcaattctcacaagcatgcaacttttcaaagataggagcacaagtattagagtcacagctgaaataagctcgtaagcatgatagacatcaaggaaggatcatcaaccaaaacctcacagtcattgtttcactcaaactcaagtgtttaggattattccataataaacaaccaacacaagtcccaacctttgcatttcatgtcatatcatatagtaatgaacacacaaaaatgaatccaaaggactttctaggcttgtaatggggttaggctgccaactattcatggcttttctaggattcanaagcataggttctaggagagcattcatccataaaataaccttcatttnntttcattcattccttccccatacttgcccattntcttaggcacctagctttcacacctggaattatagcatacacacttatttaactttatntataccctaacaaaaaagatgaactatgcctacaaacacttttgcctacatgtt

SEQ ID NO: 1413 - DNA, 550 bp, Glycine max
cgggatgacttaaagtccaagtcaatctctttgttattacctaatgcattaacacgtggcttctccaagaatggaatatgattgattgacgaacataacgcgtatccaagttcttccttgaaattatttgtcatcaaagtccttactggttctaactctgctaactctaatcatcgatccatctacattgttccaagtttctcccagaatagcatctcattgatcgatgaacacacttggtcttgcatccctagaacattaatacgacacacatatggaatagatcagttctagcttatgctcaacacatgtcctctcattataactagataaatgctctgtctctaaactcttctcacccatttgttttatttcgattatcatatggtcatatgactggtcggcgatagctgttggtgccaaacttgattctgaaaacataatgaagaaggtgatttttgccattcaccatccataccctgaaaaataactcatacataatacatctcttaaagaactggaacttgagctactcagagcaattgatata

SEQ ID NO: 1414 - DNA, 937 bp, Glycine max
  unsure (1)..(937): unsure at all n locations
agctagtacaccagcattcgctcatcgtatcaaactctcattactactgcaatcnttactgtactaaacttcactataactattctcaccctctctatccnaagcacacacggcntttgattgcctgcattcgcttgaccggccatcctatacagttgacctgtgccatgcaagccaggctgggaatctcctcgtattttccttgtggtatcacactcacgtgcctttcatcggctcgctatggataactattcgcacacttgtgattttcttttatgatgacggtgatatgatgaacagcatcgttatataaaggactggctttaacttataagaacggcaggtgggcgaatttgaccctaatatgcgcatacaaatactctgctgtcaagataataagggggaaatggaaaatgttgaatgcgtgttgcaggcggaggagttagtaaatgggctaccatgcgttttctttctagcaaaaatcatatgcttcacggtttcgaggcgaacctagttgcaattaagagtgcctagatttgcgcggcggtcgactccctctgaatgacgacaactcataccggcctatggcgtcattgttctcaagcggaagaacgagaactgcccctattatcgcgcaaggcgcgtctccctttcccaacctgtccatggctgatggccaaaagaatactaccatgaccgttcccccgaggatgacccccttagaacgacatatgctctacggtaaattgatgtgtgcaaatgtaacaaaatctcgaaatcgtataaaaacgaatagcgtatgccgcaacggtctatgattggcccatccatcgccaaatcgtcatggcttgcatacaccaccccctcgggtccatcactttgatagacggcaaagaatgccccttacgaatcaaatctttctaaaaactcgaacact

SEQ ID NO: 1415 - DNA, 612 bp, Glycine max
  unsure (1)..(612): unsure at all n locations
tttaattctattcataatcctgcctcaactttgaaaaaccaggagttgattgtgttattaactagtcagtgagcaaattattccaacataaacgctgtcagctaagccctgggttgacatcctacttgtccagttgaagcagggttactaatgtgtagtcatgggctcacatcaaggttagactagatcatgcaactgttatattaattttctacctaagaatctatagattagaaaccctgtatttgccagctcagtcattcatgattaacatctatgaactggaagggaatgactcatttcttctatttcaacctacttaggttatgattctttttgagctaatgctacaaaaaggacactattatttgaaacacttgaagccataattgattctggattcatatgtccagcaaaatagcaacatattctgcaagccttataaccatatacctatattactcacttttgtagatttgtagcagcctaattatggggatcaaacaggtagatctaanttaatacttttcatgcatgtggnattatccaattcaaatgtttgattcaatatcttactattgcttaaaagtaaatgaaaagggcagagatcac

SEQ ID NO: 1416 - DNA, 561 bp, Glycine max
agcttataagaacaaaattgcctaaatcatttccaaatatgcatgtgaattaggaagcatcaacaagaatcaagccaaggctattgtgcaagcaatcaatggggcgaaacacaccaaaagattatgatgatggatggctcaaattctcacaaaggtaaacttatcactttcaaattgagctttcaaaactatcatgacatgtagaggaaaaacagggatttcaaatcacaaaatgtcaagagacttttattttcagaacaattacccatttcttgaacatatcctataattcaaagaaaaatatgcaaagttgtacatgcaaacagaattgacctaaaatattaaactagaaacccaacaaaattaacaaatttaacaaaactagcaaaaccaaagaacaccccccccatacttaaacaagtgttataaaagttaagaatgagataggaaaagaaaaactctctaagtcttggcgcaaaaaaagtaagttgaagtaatgagatcttttgagcaacgataaccctcaatgtgtaattggatgcatcgcatattaactcaaat

SEQ ID NO: 1417 - DNA, 546 bp, Glycine max
  unsure (1)..(546): unsure at all n locations
tgccacccagctcgcccaggcgagctaggttgcttcctccttaagcaaccgccttctggaggaatattctggaaggcccaagtgggcatggttgctatttgcacccctatttttactaaatacacccccttgctcttttttggtgattctttttccgtaacgttacgaaactttacgaatttcataacgatgcttgttttctttccgtaatgttacgaaaccttacggattacgtaatcatccccttttttgccttccggaatgttacggaactttacggattgcgcactagcacttccttttaatttccggcatgtcatggaactttacgaaagctttaggcaatatacattcagcaaaactttttgcacatttttatataaaggagcttgcggcgtcaaagcctcaaatgcattaacacttggcaaagtgagcacgacttacctcaatgaaaatcaaaccttgtgagcatgactgagcaccccaaatggactgcaaagtgaaacgtacctangtaaggtccttacaggagaaacaaacaaagag

SEQ ID NO: 1418 - DNA, 545 bp, Glycine max
  unsure (1)..(545): unsure at all n locations
agcttgatatgtggcactctatattacagaaacaagcccccacaaggaagtattttaactcccgtggctcaggttcttgtcgctgcattttccaaaagaaaccttccatcttccccatcatccatgatcagagtggaacaagttgagcaagtgaagatattgctatctgttattccgatattctcgtgcaccatcgttttcaacaccatcttagcacaacttcagacattctcagtccaacaagggagagcaatggacacccatctcaccaaatcctttaatatccctcccgcctcccttcagtccattccttacattttgctcatctttttagttcctctctatgacaccttctttgtcccatttgccagaaaattcaccggccatgagtctggaatctcacctttgcgccgaataggctttggtctttttctggctaccttttctatggttgcagctgctctgttggagaanaagagaagggacgcagctgtgaaccatcacaaaagtttgtccatcttttggataacccacaatacttgata

SEQ ID NO: 1419 - DNA, 443 bp, Glycine max
tcccttttcttgaagcaattctgggaactaactcccccttttttctgccatctctctttaattttatatacatatatattatatctttttcctacatagctaacttttccctcttacgcatacatatagatatttttatttcaattgagatgtttattgagcacacggattgttgaattttaatcaagtatgtgtgtgtgttatgagcagccttggcagctattggtgagaaggagtggtacttctatgtgcccagagataggaagtatcgcaacggtgatcgtcccaatcgtgttactacctctgggtattggaaggcaacaggaactgatatgatgatccgaaccgagaattttcgctctattggcctcaagaaaaccctaattttctattctgggaaagctcctaagagcatactaaccagttggataatgaacgagtat

SEQ ID NO: 1420 - DNA, 312 bp, Glycine max
agcttggccagtgagaactgccgattatcaataagttttatagcgcgaaaaacacgatgttcactcttgattctcaccggactttaccgcaccaaccatatcatatggttctccagcacccacaagcaccaatggccacgactagccaccttgcttgtagacgtaccaccgtatggtgaggaatgctgtaatcataacagaagcttgagaatgtacctcaatgatttggtatagaagacaactcgcgacccttccttgatggattctctgagagaaccatgactcccttgccatctcctagagagaggggag

SEQ ID NO: 1421 - DNA, 556 bp, Glycine max
tgctaagtgtttgtgtaagtgattctagcatcttagctagcagcttgttctgtgccaatagtgcatcttgggaagaaagctctaacatgcttctttttgtggttacgtgagttttatcacgcagaatagcatgatcactagcagccatgttctctatgagttccattgcttcttcaagagtcttcaatttaatttttcctccaacagaagcatccaataactgcttgaactgcagtctcaaaccatcaatgaaaatgttcagttgaatcggctcggggaatccatgagttggtgtcttctgcagaaagctacagaatctcttaagcgcttcacttagggattcatctagaaattgatgaaatgaagaaatagttgccttgccttcagctgtctttgattctgggaagtacttcttcagaaatttctctacaacctcttcccaagtctttaagttgtttcccttgaaagaatgcagccacctcttggcttctccagccaaagaaaataagaacaagctaagccgcactacatctttcggcacccctacaattttcac

SEQ ID NO: 1422 - DNA, 523 bp, Glycine max
agcttgaaaatcctagcagaacaaccaaaggaaaaacttgaggaatcttaaccactagagatgccgctattattgtcgtactacacacatgagcccgcttagagataagggatgagtttatcacaattgggattataatgaatatgtgtaaggatccttaaagaatcaaattggggtttattttgggatatttattgtattgtaattcttcctgtatgattataattatgagattgttgtgtttgacagactaattgatgctttgatgtgaattggttgataaaattgagtgctcttggtgttttcgtggttttgacctatgattttgattactttgattttgatatgattatgtgaaattttttgaggggttttactccccatgttgtgagaaagcatttttgtataatttgtttatgttttggacaagacttactagattagtgtgataaattgaatgtgtgatgaattgtgagataacaagtcgcttgagattgggtataagtgcaaagttgaacatgtg

SEQ ID NO: 1423 - DNA, 474 bp, Glycine max
ttgaaattaacagttgggtgcatcttagacgtagagagacccaggaagaggactggcaagggccatggactttttgttttattgttgtattattagtatattttgatgtattatgcatgattattgttgttttgacatttttttagtctatgttgtggttgaattactttctttttttttgcgttcaacaattgtttatacaacacgcgcctagtaacaaaaactattttttcaattgattcataaaacaaacatcaacatgaacaactaaagaaacaatgataatataaacttttcttaaaaagaaactcaacatgcaatttttataaagtaaaaacaaacatgattacatatatttatcacgcatcagagcaatgatctcatcaacatatcttgagtttcttggtttgcacgatagggtaaggacttcatcttgaaatcggccaaaagttgcattcaactcaatcaaacctt

SEQ ID NO: 1424 - DNA, 520 bp, Glycine max
agcttttgaaatcaaactttaccactggtaatcgattacaggtaattggtaatcgattaccagagagtaaatactttggtaacttagaaaattttgagaaaaactcttttgaaaaacaaaattgtgctatgtttggtttttgaaaaatcttttgaatacttcccttttgaagtcttcttgatttcttctcttgaatcttgcatttatcttctcttgaatcttgaaatcaaacttctcttgaatcttgaatcttcttgatttcttctcatgaaacttgaaattaatcttgatcttgaacttgttgactcaatcttgaaatcattcttttaggccttttgtcatcatcaaaactacttgattcatacttgaatcatcatcatgaagcttgcttctacacctaaagctcaagcaagggaacatgactgtggctgaatatgcagccaagtttgaggagctggtgaggtactttccccattattaaggaaaagatggcaaaagttcataatatgtgaaatttctg

SEQ ID NO: 1425 - DNA, 493 bp, Glycine max
  unsure (1)..(493): unsure at all n locations
ttttggagtagaaacatgggaccaactcattttatttcaaaaagaaaggcgtatgtagtcaaggtctgaaagaccatacaagtttcctaacgatttctaattatgtgggccattaagtctatcatatgctgacaatagccgagaagcccatgaatttcttcgggggcggagtaggtgtccgccatcgccttggccttggctaaaaatcggggaagttcttgactcccggtcaaggtaagagcaaaccgatccatccacatggttgcctcttggtgtaaagagtcaatcacccttcctctagcctctttttccgcgtatacatgggcatactcgtncgtgaccctatgctcgtgggccgtggctaagcctaactcttcttgggacttggcgatgatagctaacatgggggtctccatctcgcataaacactgagacaagctccttttggaccttgacaggcaactaactcctcttttaagacatgctttgtgct

SEQ ID NO: 1426 - DNA, 436 bp, Glycine max
  unsure (1)..(436): unsure at all n locations
agcttgcctagcgaggcttcagaatctgaaatgtcaaggagcctttaaaacactaaagttggcgttaaaaagaaagaggagtcaaaaaatagagcaagagaagaatctagaacgatagagcctcggcctccaagagagtttaggttagaggagtgattttagggttctaaaggttggaggagacatcctcaaccatttgtagccttagtctttcctcaaaatctatcatttgtactgaaagttgttaacttgtaatggaaggctaaatctcttgttggggagttctgctgaacctttgatgtaatattctcttactatntatttaaagttggttttatgtgttcattacttctatctatgcttatttctggatgcttgtgacttgatcacccatttgtatgcatagttatgatttctaatactaggaagtgcttta

SEQ ID NO: 1427 - DNA, 912 bp, Glycine max
  unsure (1)..(912): unsure at all n locations
tcaaactcactattctctttatcctcactctaacatataacaataatttatctctatcaatcacccccnctcaagagcagaagattctgactcttatacctcgcacntatacaaactccgaatctcatccagggactaatagatggagaacactccgtttttctttgattatattgcaaaaagagaagggcacgacctcttacctcatactcccatgacgtaccacatccaccttccccggagcactactaccacgaataggagctactatgaacactcagacaaccctatcatcgccacagtcacctcacgcatatctttcatccgaccggcactatgtagacacagacaacttcgacgaaggtcgcaacctaaaaccttttcataactgatctgtgcataaaccctcctaatcacagagcacggtccataaactgatctcccctgtaaacgcgtcccaatgcgagaagacgcaacagcgacagccatctgtaccgattaaacgtcccttcctactaccttcaattttcacgcacgaaccagattttctctcgccagcactaatccgcttccggtatcagccccaaaaactgcggaaccctttagttacctatgcacaccagacatgattcattatgcacccaccctaaccagatttaattaatacgaaaatattatatctacagcaaacctcctaactattaagtgcaccgcctatcacctacacccttgagttaacaatccccggacttagacaaaaccgatcaattacaaatcactatctccggcccgaaatcaaatgacaccgacctcccccaaataaacaacggacctaaactcgatcctaacaaatctagcccactctccatggcagtgaaccaatacccccttccccagactctatcgcttccg

SEQ ID NO: 1428 - DNA, 533 bp, Glycine max
agctttcaattttttcaagcattgaacgattcttatgaagaattatacaataaagacaatgaagtatcttaggacaaataatgacttggaatcctgctctaatgaattcaatgaattctagagagatgaaggcatggcaagataatgtattctatgttatactccacaacataaagtagctgaaagaatgaacaaaaccttgttggaaagggccagatacatactatcgaattcaagcttgaataagagtttttgggaagaagtagtcaacaaaacatgctatattgtgtttgacatgcaatcacgtaagtgaaggtaagttagagccaaaagccaataagagattctttatgggctatgaagatggagtcaaaggattatgagtctggtctctatctaaaagaaagtcattctgagtcaagatgttgactttgatgaaccctctatgctgcattctaaatatgatgaagatttggccaaggctaaggatgtcactaagcaagttgaagttaagagctccacaatcaaaaaca

SEQ ID NO: 1429 - DNA, 610 bp, Glycine max
ttgggatctgcaatattggagcaggttgatagaaacattgatggtggtgagtttgataaagagtgcattgccggagaatatgcagagttgcagtttgagaaggaaaaatcagaaatgaattcggtataagtaattcttcattaatagtgagaatgttgatcttgaaaattgtctaaaagatctggtttctttcaggagttcatatgtgagtgaaagcacatataatctaagccagacttgagtttcttattagaaaatttagtcaacccactagtcataaatacattaaaaggttaaatgaacactatattttaggcctaacaaacatgtgatcaattagtaaatataaatattaatttttttgttagtattattatatttattaaaaaaatatttcatatatagaattttgttatgcatttagcagcctcggtcacttgaagctgagagtcattttatttacatctatttttattctaactttgcatcttttggtgggttctcatgatgcaggtttcatctgatccaaagatagaagaagaaatactggaagcagaagaaaaactgcagttccccgacaacgagccagtatgtttaaaaaaaataatta

SEQ ID NO: 1430 - DNA, 472 bp, Glycine max
agcttcagaccaaagcaattcaaaatctaggtatttaaaacccctcaatttagtggattttcaaggtttgagaagtgaaaatgaaaatggggtaatttttggagcaaactctcatctcacacaagtctataacattaatctaaacttgctcaaactggttttatgactaaaacttcaccgaatcaaaatttgaccgctcaacacccaatttaccctataaatggctcttgctttcactttggtcactcattttcctcatttgttcaacccaagctttctcataagtcctaaaagaaatttttaactaggattaactcactttaacctccaattaccactaaatccagatttagcttttcaaacccttaaagcatcacactttttcactcatatcactacattctcactttttaaccctaagttaactctacccctcatttttattaggtttcatcagcatctcgcgcacaac

SEQ ID NO: 1431 - DNA, 523 bp, Glycine max
  unsure (1)..(523): unsure at all n locations
tgccacccagctcgcccaggcgagctaggttgcttcctccagaaggcatcgccttctggggaacttcctggaaggccctagtgggcctggtttctatttgcaccccctatttactaaatacacccccttacctttttttgctgattctttttccgtaacgttacggaactttacgaattacgtaacgatacttgttttcttttcgtaatgtcacgacaccttacggattacgtaatcatcccttctttagcttccgaaatgttatgaaactttacggattgcgcattaacacttccttttgacttccgacatgtcacgaaacttcacggattgtgcaacaatgcattcttttgacttccagcatgtcacggaactccacagattgcctaacgatgggtgctaagtacctcgaagtggtcaaacgagggtcgcatcccaacaaacggatggtccccggacgaaatttgggtatgacagatgccccttcntacttgtcctttattggagataaaagggaagtaaa

SEQ ID NO: 1432 - DNA, 544 bp, Glycine max
  unsure (1)..(544): unsure at all n locations
agcttgttgaactagcttttaaattcttcgtgtttgatttgatgcgtggtttttctagaaaaataaatattatttaaaacatgattaataatccgaaatatgaaatttttactgtaaaagaattattctgctcaaaatggttttgccacaagttataagaaaaatcaaagcttaccacccatccatacgtatcaatacgcacaattaaatgctggaaatcaataattcaaaactgaagcaatgaatcccccttgcgccccctcgatcaagaaccaagaaatagtaacttgaaaggtgtgcgtcaaccaatatttcatatatgatagcatcattagcatgcaatgtttttttgaactatgctaagtttaatatgattagctagcacgatcttttttttcgtgcctccttatgcctatgatgaattgaaatgccgcatctatatgcaacctatatatatatataccttttacacaaaattttgtggtcctcctttttcactttcgcagatggatttatctactttatgaagctaactntttgaaca

SEQ ID NO: 1433 - DNA, 275 bp, Glycine max
  unsure (1)..(275): unsure at all n locations
ctatttatgcaaggacgcatttgagtggtccctcgaatcacaagatgctttcgataccctcaaatccgctatgatcaacaccccagttctggcccttcccaatttccatgaaccatttgtcgtcgagacggatgcttcangcactgccatgggggctgtgctctctcagcaagggcacccattaccgttcttcagcaagaacttcacccttcgcctctttatgcgtaaacctatgtgaggaaactccatgctatcacatccgcagtgcgtaaatg

SEQ ID NO: 1434 - DNA, 595 bp, Glycine max
agcttgtttaccccatgttgaatttgcttacaatagagctggtcatagcaccactaattgttctccttttgaagttgtttatggttttaacccactaactcctcttgatcttttgcctatgcctaatgtttctgtttttaagcataaagaaggtcaagaaaaggtggactatgtgaagaagcttcatgagagagtcaaatatcaaattgagaggaaaaataaaagctatgctaaacaagccaacaaagggagaaagaaggttgtcttcgaacccacagattgggtttgggtgcacatgagaaaagaaaggtttccagaacaaaggaaatcaaagcttcaaccaaggggagatggaccatttcaagtgcttgaaagaatcaatgacaatgcttacaaagttgagctgcccggagagtataatgttagttccaccttcaatgtctttgatttatctcttttttgatgcagatggagaatccgatttgaggacaaattcttctcaagagggagagaatgatgaggacatgttctagacaagggcaaggatccacttgaagactttgaggacctttgacaaggctaaagcatggaaagc

SEQ ID NO: 1435 - DNA, 566 bp, Glycine max
ttgagccaaaatcccaactcaccataaaccttgacacgagatgagaatttctatcgtcacccttggaagaaaacaaaaaaagaaaaataaagttcccaatcaaagatcggaagaaaacaaaaaagaaaaaagttctcgatcaaagatcggaaggaaacaaaagaaaaaaaaagttcccagtcaaagatcggaagaaaacaaaggaaaaaagaaaatccccgatcaaagatcggaagaaaatgaaagaattatacagaagggtctttggaccagacaaatatccaaacaatacagaatagtcacaacccaataaggaaagaaaggaaaccatgacttgaagtggtcctctccctttgattgccaaccaaaatcttgtgcgctgatgactttctcgccccgcactaaacaaaaacagaaaagggaaaggtcaaaacactcagagccaaatatctcaccaaaacaccattcccgaaaaagtcctattgatccatgatcacacatgtaatctttgatttgataagaaatgaattgctaaaaacaaatcacgacatatctatggtttggaa

SEQ ID NO: 1436 - DNA, 473 bp, Glycine max
agcttttcccctattttgctataaatagggggaggagtgaagggagaaggggttcagccttcttggcacttcttattctattgaaattgctgaggaaaattatttctgtgaagaaaatccaagccgaggcgcttccgtaacgtttccgtgagtaattacgcaaagattctcgaccgttcttcaacattcatcgttcgttcttcattttcttcagtcttcaacaggtaagtacctcaaaccgagcttttcaattcattctatgtacccgtggtggcccacattttgtttcatgtatttttattctcattttcattcactttctatacccctttttgacgtgcttcagtcatttatttaagtcatttctcgcctaatctaaaaataaaataaatctccaccgatcatttgaattgtatcatccattaatttcggttaaaatgaattccgaccgttcgggtgtgctgaaccccatt

SEQ ID NO: 1437 - DNA, 436 bp, Glycine max
tcttatccaaggctcatcttggtggcgaagctccgtcttccatggtttagtcactaagggatgggaccttctcttacctctgctgctttgccttccactgcttctccccggcgcaagatcaccattataggaactctttgaagctcagagatccattctccatagaaatcccacaagcaagcttcatcatgtggaatatagcacaagagcttcaatatgtgctccttaaaccatcattaaatattgtgctttacctcatcttccattggtgattcctcatttttctccatgtatctcctcacatgtcttgagctaaatgttgttaacatgattctttagaggtgccaccaattaaacttgctatagaaactcgatttgattttctatggtgcaaattccctgttcttgttcttgaaccatgaattgtgttgagttt

SEQ ID NO: 1438 - DNA, 317 bp, Glycine max
tttgatggtggcaagaagaaattttatgtttgtcatcatcaaaaagggggagaatgtgaatggatgtctcatgattttgaagatgccaaagaataatctaacaaagttgcttcaaaggataaacctggcttcgaaattaatacaagatttcttcaacaaacaaaaccttgctttaaaattaacttaagatccagccttgccttggaacaaagtgctgtttagacatttcacgctatggtaatctattactacacagggtaatccattaccaaaatacaggggtgagaaatactttttgaaaatggatttgaacttga

SEQ ID NO: 1439 - DNA, 510 bp, Glycine max
tgggaggatttatggggacccggtgttgagagaaacgatgatatgggctacgtgggagtacgtgagctcagttggaggtgggcaacaggggatggtgggtttatgcgcgcattgtggatgtggaaaacttgttgggcaccatcgcccgaccgccacctagtaccacatgtgatgggtaccccataatcctacaagcttgagatgaggaagtgttgaagggtgaaacttcctgcttttattgttgaccacagagtggtacctggagatatgtcacgggggtcaggagaccttggggacgtcaggtggggtgctattgcccaaaaccaagcttgaccaatcccgacccaacccgggcatagtcggtcagtgagaacctgtgatgtacctaagcaagcgagctcctggcagtcaacagataaaaggaacaaagaccacaaagcaaggaggcttgtgatggctggccagctgtaaattttgtgtgatatgtggattatggcctctggtaatcca

SEQ ID NO: 1440 - DNA, 232 bp, Glycine max
ctttggcttttgagaaaaccttattggtccatggtttatacaaaaaggccggtgggagtaagatttgatttcttgtgttaaacgtggataacatttcgcttgcacctaaggataagggtttcctatataaggcgaaacattttttctcaaaaacttttgatttgagggatatgggaaacccattttatgattttggctttaaaacccatagggaaagatctcgaggaatttt

SEQ ID NO: 1441 - DNA, 409 bp, Glycine max
tatcaatggtgtactgttaatacatttctgaacgctccttatattatgctaaggagggggtggataaaaaaaactaaaattcccagtaatttatcatacacggaaatttaattattctacctaatttattttatatattattcgaataaaataaattaaatttgtcttttaaaatattttgatgatgtgtaaaataaaattaacattttttaaaaaattgggcggaataattaagtgcgcaactcatcaattcacctctaaatgaagtcggctatattttcaacctacttcttgctgtatcctccttaaggctggctgaaaatacacggacagattgactcactttaccatgctcctaaagagagagaaacaacacgaaaaaattaaagaaaagtgtgattaaaatgga

SEQ ID NO: 1442 - DNA, 633 bp, Glycine max
  unsure (1)..(633): unsure at all n locations
agcttgagaggattacattcactttgctttgtaagttattgagagttgagaccgacaaaatttgtggagtgtggactacatatcttggcgaaggatagtacctggtaggttcctgctgctttccatggccccaggctttgattcttttaaggaaaaaggtctcaaaatgcaattggtaagataatagtaattgtgattaggaagacttattttctctatctgtttacttcatagaataaatcttgtcactcgttttgaatgaaaaatgtcaattaatgttgggtcctctagtaagttaatagtctttagttgataagtcactaatgagttgtatttaagttctccatgaaacttgagggaagtttaaaataaaaatcggaagttacaaaataataccctcggtgaaattgatgtttatgatattgctcatgtcttaaaaaaagtaattaaaagaaaaccacactttggcattttaagcacagcgtatccagctaatcattttcatttgatggatgctcactagacacgggcagagctaactatattttgagtccactttttattcttattagtatattctggattntaatccttcaaaatgttaaatgatttttaaagatgaattaatcttta

SEQ ID NO: 1443 - DNA, 545 bp, Glycine max
tgaaatggaagatagaaagtgtgttaatgatctacaaagatggtatgatgtaccttcaaaatttgattggaatgaagctcgttcgctcctaccttttttaaagatgttttatgatgcaacgatgcagatttctggttcttactatgtcactagtaatatgtatgtgtgtgtgtgtgtgaaggaagtatttgcaattggtaggtagatccgcaagtgtgaaaatgataataatgtttgcataagttcaatgactactaaaatgagagttaaatatgacaaatattggggaacacctaacacaatcaacattttgctaatgattggcggtgcccttgatcctacgtgaaaggagaaatatgttcaccactttgttacctcttattttttgaaaaccggaccaatgaattgaaagtaaagctggcttctagtttaaaatcactttatgagccataccaacgtgttgaagaaaacttttcaatttaccaaccagtgcacaattggatgaagaagatgatgatgatttccatggatgagtttctatcctt

SEQ ID NO: 1444 - DNA, 591 bp, Glycine max
cgccgcatgcaagcttaagatatatgccttaccaattccgtatagctaataaaccatacagaaagtgatgtacatatttggtccccatgggacaaagccagccttttattttaaaggtctcaagtgccacatgatttacttaatttattgtctggtttgatagcaacgagatttgtcttattacatccacaggttttggccaatttaaagaggcatgcatatgatgcaaatgaatcggatttgtaggattatagatataggcacgtttgatgagttctctgattttttttttttttttaacaaagttctctgattttgtttcttgtgaggttaattggatatataaatgatagaggaaaactgcaattcacaggacattatatatcaagtgtattttatcagtgaacataatttttttttatataatcattacatatgttcctggcgggggattaatgcttttttctttaacatatatatgtatgcttggttgtgaagaaatattagaaaaaaaaatgagaaaattttaaaaaagatgtatgggctcacattttctaccacgttattttaaattaaaaatttgttttattt

SEQ ID NO: 1445 - DNA, 622 bp, Glycine max
  unsure (1)..(622): unsure at all n locations
tattgcatgtgacccttttctaattagtgaaaaaaccattaattcattatgatttttagttttgttttacttttattttagctaataaatttgaaatttaagttagttcccatcaacgagtactccaaaaaaatttaggacgaaatattgctatgtgcccacgtgagattcctcagctttttaccccacaaacgcaaaagctcttgtcgcgaaattacatgccaagaattgcaaagactaacacacagacaactagacaaaaattaaacgctctcacgaacccttgataacgactcaaaagtactcagaagtaaattttgattggcaaaatcaaacaaatttgatttttattacgaaacaaaaatgcatgccttaaataaaacgcatctcaaattaaaactcattttacggtaatcataatattatttttcttattcacttagaatatacttctatctaacttgtttgtcaagcataattaagaccaccgagagctntatttaatcatttatttatttattttcctatgaccttcatcattagagggagaatattaatttttgccccgttgtgaacgacattaatagttgtaaagagcagatgctaattttaaccgaaacta

SEQ ID NO: 1446 - DNA, 552 bp, Glycine max
  unsure (1)..(552): unsure at all n locations
agcttgtagaatgggtagacatgatacatgtcaaggtttggtttggttcaaggataaaagggatgccccacattatctgcatgacacaaatgcaaaaatgatgatttggaaacttcatgcaaaactggtcatgcatgcacctatgcggacactcaagcgtcaaatttttatggtcatgtgatgctagggctcaggattcatttcctctattttagtcaacccaatgtttccaaaatatgctcttttatcaatttgtgcattcatcctagtccatttcgggtgtccggggaaatttcacagcattcacccttcaggtgtagacacatttttcaaaaattggttatgatcaatgaatttttttcatagaaaagtttggaaatcatctcttttcaaaagcatgtcggtttttagctagacaacttattttctctttttccacctttttcttacatgcnttcttttcttttctctttggtctcttctccatttcatttgttttcttttctatttttacttttatcatgaattttgtttgttttacatatatatttt

SEQ ID NO: 1447 - DNA, 462 bp, Glycine max
  unsure (1)..(462): unsure at all n locations
tgagcccgcttatctttgtacatattagattaaggtttcattatttttggaccttgtatttagggctccataatataggtaaggtaccctagaaatgtaggatttttcagcccttgtattttaggacacttagactagttttttgtattaggggtagttttgtaatttcacaagcattaagtgaatatttgatgtgtgtggttggaaataaatttaattgaattggtaggagcccaatccaattaaattttagagggggaggtgagcatttgctagctacaccccattgccacatcatatagtcacactntgtgcatgtccttcatgctttacatgcctcatgacaccaaagcacacttagtggagaatcttggacttgatcttggattagtgggctgaaccataactaanattcattaatcataattagtgaaatttggctccaaaattggctcccaaaat

SEQ ID NO: 1448 - DNA, 572 bp, Glycine max
agcttttcaatttaatgaggttgaatgataaatcagcttggtaccaaaagcgagcaatatattgatgcacctttaagacttcattcttatccattgactctcttatgttcctttgcctcaacattttcatttttctccgattgattgcatttttggattcttacaaaacctgtccattggtccttttttagtctcatactttgtctttgcggccaaaacagtagtattgcaagagtcctcaaactcatcttcactttcatcacatccaattggttcaccaaattcaaaatctcttatatttggcacattaccagtactactgtaagtggtcccactttttttgttagccatatatcccttgagctcttcgactacatttggtggagttttcttgcaagatgcaacgttacctgacttccaaaccaagtgttctttggctctcgttattcctccctttgtgatttttccacagtaattacaaacaatgatgtttgtatccccttccacaagtggatgacaatacttccaaccagggtctgtcctatttttccttgttgtaagatacatgatgg

SEQ ID NO: 1449 - DNA, 494 bp, Glycine max
  unsure (1)..(494): unsure at all n locations
tactctaattttgaaaatattatacctatatatggtgacattactagagcaatcaatttatctaagaatctcatgcaacattcaaaggctaagcatattgaaataaaatatcatttcattcatgattatgtgcaaaaggcattttttatataaagtttgtaaacacaaatcatcaatggattggtatatttactaagcctttgtctgaagatcattttatctgtaaagcatttgaatatgatcgagctattagattaatgttgcattttcagaggcaatatcattttataacctctcattaatttgtttggactaatgtgtgttcaagtgtacacacggaagagaaagcctgttcacaaaaataaaaacccttcattttctcttaaaagggaaactaattaataaaaaaataaaaagatcaaaatcataaattaataattataggaagacanaatgtcaatttaatctaaaagtataatcacccaaacagaaat

SEQ ID NO: 1450 - DNA, 548 bp, Glycine max
  unsure (1)..(548): unsure at all n locations
agctttgtctctttactaaagcatgttcgcattgtagtgaagaaaacaccgagactattttagtctcacagttatctagaactacgtagatctgagttcctcattgaggatacgtaggagcaagagcctcgcttttgtcggccgccccacaatctctgtcatactgaccctgaggtcatgtgacatgcagagacaaattatgatcattccgcacacctttttccatccagatacgatcgtgtccgatggcacgcagagataaattatggtcattctgcgccttttgtcatccagaggcggtgagcccgatgacatgtggagacaaattatggtcattccgcaccttttgtcatccagatacgatcgtgtccgatggcacgtatagacaaattatggtcattctgcgccttttgtcatccaaaggcggcgagcctgatgacatgcanagacanattatggtcattctgcacactttttcgccatccggagacgatcatgtccgatggcacacaaagacaaaatatggtcattctgcgccttttttcatc

SEQ ID NO: 1451 - DNA, 571 bp, Glycine max
tgcttagtgtctctgtgagggtctctagttgcttggctaggagcttgttttaggctagtaatgcgtcttgtgatgtgagctcgagaaggatggcatggtgtgtaggctcgatcacgaaggatggcatggtcactggctgtcatattttccatcaactccatagcttcatcaggtgttttcagtttgatcttcccaccagtggaggcatcatgtaactgcttcgaatggggccaaaagccatcaatgaagatattgagttgaactgactcgctgaaccagtgggtgggaatcttccagagtaaaccatggaagcgatcaagagcttcactcagtgattcatcagggaattggtggaatgaagagatctccacctttcccttagcggtcttgggctctagaaaatatttcttcaaaaatttctccaccaccttttcccatttctgcaagctatttcccttgaacaagtgcagccatctttttgcttcaccagccaaggagaaaaagaataggttgaggtggatggcatctttaggaacttcatctgttttcactatgttgccaattttctatg

SEQ ID NO: 1452 - DNA, 507 bp, Glycine max
agctttgcttctacatattgatgaagagatgtcttttttggggcatttaatgcttgccaccaattggtcacatagagctgataaattactatgattatcctacaagacaagctttatatcttatgttagtgcacaagttcttcttttgtgcattcaagtactttattaatttattttggcatgccatttgggacaacatatagcttttcatttgacttctatctctttcatcctttttgacagattctataaagaataacaaacattttttgcagaaaggatcaagacgagcatttaagatgcataaaaaaaatccatactcaacatttgttgatttgtcatttattcaataggcatagagtgaacaaagctttgtatgttttgtcataaaaccccaaatatcagaactttaagatttgtttgcataaatcaaaactttgaagagtcctaatttgttctattgactcaacaccctctattattttatatggtgaatctatggtccta

SEQ ID NO: 1453 - DNA, 623 bp, Glycine max
  unsure (1)..(623): unsure at all n locations
tgatatgaaacatataagttttggaatgcattatgatgaatgaaaaaaggcatgcgaacttcgcaatgagtgcaggctttgtacccagcaatgcaatgcaaagggctttgagtcatgaaaattgtgcaatgctcatgccattttttctctcttgttatactttgctggtcttttttttttttataaaaaaaacacaaattgactgtctctttctaaaatatgtaatgattcatgcaacctcatcttgtcttctgtttgattcaaccgcttggcaattttggatgatggcagtggagccatttgacatttaatcaatcaattgaaatattgattctagggtttgttccttttttgtttaaaaaactttgattactctgcacaacaaggaaatataaggcttcaggattgactgtgtgaaccattgaaggatggcaagggattgttacactttggtatatgacccaagtgaaaatttcttgatttaagatcatagaggaataccatggctccatcaatcccattgaagcttgatgatatgggctgaccccgaaaggagttacttaacaaagactaccattagatttgaaagaaaccctanggactcagtgtgagagactgacgtc

SEQ ID NO: 1454 - DNA, 533 bp, Glycine max
  unsure (1)..(533): unsure at all n locations
agcttcataaatccatcacttttaatattctctacacaaaaacttaaatgatgttaatttaacaattatttgctcaaaaaataaaaaattagaagagaaaaattacaaattcctctataatttaacccccaaaatatactcataattagtagttatcagcttccagatagtggtatcttaagtttaatgatactattacgtggtatggtttcctagagaacaccgttgatcggtgtatctacatgaaggttagtgggagcaaatttgtaattttagtcttatatattgatgatattttgcttcctgctaataatgttgctatgttacataatgtaaagaagtatctctctaataactttaaaatgaaagatatgggtgaggcattttatgtgatacgaatagaaatattctgtaatagatcacaaggattgttgtgattgtctcagaaaggatatatcaataaagttttagggagattcaaaatggaaaaatgcnttggagggattgttacaatacaaaaaggtgacaagttt

SEQ ID NO: 1455 - DNA, 499 bp, Glycine max
tttatacaagctaccaaacaaaatataactatgaactgaaatttaaaaactgttctaaactttaaaagctgaaacataaatctaaattataaaatgtactaaagacataataataataataataataataataataataataataataataataataataaactgttcaaaatgtagggaaataaaaatcctgatcatgtgtatgctcattcgggtccagagctggtgcagatgatagatcctaagaaagaggtaggtccaacactggtgcagatggctcaagctgaagagatggctctggtactacaacatcctcttgtacaataactggatcagtctcaaaaatgaaaagctcaggtggagtggactctaaggtctctagaatgtcgtcctcctgagcctgctgaagctcatgggctgcagaggcctcaccccctcccaaaagagaatgttggactcctggccaggccaccttctgaagaaattcttcaatgctcat

SEQ ID NO: 1456 - DNA, 535 bp, Glycine max
agcttgaagaccagatggtttcaatgctttattcttcaagaaggcttggaatatcattggtgatgatatctttgaggcggttaatgaattctttacaactggaaaaattttaaagcagatcaaccatgctatttttgcgcttattcctaagcatgatcaggcctcccaagttaaccattttagacacatatcttgttgtaatttattatacaagattgtgtctaaaattctggccaaccgcatagccccagtgcttgagactattattggggaaactcaaactgccttcattaagaacagaaagatgatggacaacatcttcctcgttcaagagattttgcgcaaatatgcacggaaaagatcctctctgaaatgcctcctgaaaattgacttgcataaagcttatgattccatttcctaggaattcttgaattggatgcttcagtccattggcttcccaacccaattctgtactttgatcatgaaatgtgtttctttcacttcctttagtgtgacagtcaatggattcaattta

SEQ ID NO: 1457 - DNA, 560 bp, Glycine max
tactaagcctctaaaatccattattccaagaggagataatccaaattgatttattttttttgaagaaggtagctcaattagggtgcagggttactatttgttcacttgatataaatcaagaagcaaaaacaaagtgaagaaaatggaataagcaacatacatatatggtgtatccctaccaaacttcttttgattaaataatccagaaagaagcttgatgtaacctccaccacattcaatctcttgctcaaattttacagaatactgaaagaccaatattttgttcttgtttgtgaattctggtatttttgcagaaatggaaaagtgtttggcatcactcgatgtttgaatacctacaatatcctacaaaatgacaacatgttacaaaaccaaccaaattcctgtcactacccattttgacatattaagaaaggaaacaaatacaagttttatttttgttcatattaagaaaggaaacaaatactaccacttgtgtatatttcattttttcttgccttttatttttaaaattgatatacttttactaataattacaaaaa

SEQ ID NO: 1458 - DNA, 480 bp, Glycine max
agcttgaggttattcctcaagtaaaggagttgttggttgagggtttggttcgcaagagcttaaatcctcgtgctttgttggtgcctaaaataggtattattaggcacgaaatccctatgataggtggtatagtgaatgtgttgagtggtgcaacactcttttgtaaaatcactcatgcacccaacatcttcatgatttgtgtacatagggactcattaggtaggtttgttcttattttttgtttcaatgcaaacctaggtgctcatgtgggacaccttaggtttgtcgtaattttttttaggaataatcaacatgaaaataaagaaaaaggtatgtattattccattgctttccttaactttataaataatgatccagggctttccatggaccctaagagaataaaggtcattcctaagtggcctactccactaagtataaaaaaaatttggggcttcaatatcttaacaaacttttaca

SEQ ID NO: 1459 - DNA, 535 bp, Glycine max
tctacttatgtggcagggcgggcttccttcactttcttgtctccaacgcgaactttgaccactgctcttccttcccgcgatgcttcttttcatgtccgtctgagtgggcttatagcctaaaccatacttcccacgatttccttgggcatttatcaggctagttatgccgccgttgtctttgcctaaacccattccgggttcataaccgttccccaacataactcgggccatcattactgctgcatcggacagacaaggctgcccagagaaggagtccacggaggaaatgctgaccacctcaaaagactggaaagcggtttctaacgattcttctgcggcttccacataaggcatagaggatgggcagcttaccaagatgtcttcctcgcctgacacgatgaccaagtgcccctccactatgaatttcaacttttggtggagtgtagagggcacaactcccactgagtggatccacgggcgccccaacagacagctgtaaggggggttaatatccattatttggaaagtgacttga

SEQ ID NO: 1460 - DNA, 429 bp, Glycine max
agcttcacaccagaagatcccaacgtgttgtggaaggatcaagaagtcagtgtacttgtgaatgcaggcctggcaacatcactaatacggcttcaataatttcttgaatcactttgttttctttgtaattgtattatctgcggttttgctcatcgccccccgttgtatacttgtatttgtcggctgcaatttattttgtattctttggtgggctagtttgttgtaaaacttcaatactacttgacgggaaaatgaatttaaatgttgtgtaggaggatgatcagccttggatgaaagctaatggcaatgaaatatcataattgcttataagttctttatgaccgaggccatgctgcgtttcttgaagataaaatgatggaaaactatattttataggcaaaggtcaatgcttacattttaatttcattt

SEQ ID NO: 1461 - DNA, 598 bp, Glycine max
  unsure (1)..(598): unsure at all n locations
tattgactttcatgaagtgaaaaattacagaaagataacagataattatgtgagtgaaaatttaggcaccaaaaaattaagttctcttagaagaaacaagaatataaatgtgatcctgaatacacacagaaaagtcaaaagcatatcaaatataatgcaagttgctaaagaaaaaatattcaaaactacataaattaaataataatacagcccatattacttcctctatcggcagttaaataacttctaatttcttttgtcagcaatttcaatttgaatctaatggggatataaataacacacaatgataatcaaactatcaaagtcaacctttggtggtaaaggaatttatggattgaaagaagtttgacacaataaactcctaaatcacacagaacactgtaaactcccacccctggtcgcttctattatctgttcacgaactcattatttaggaagttatgtaagacttcagcttttaaactcatttttttgcaatgaaatatgcagatgntaaaagacaactaaagagaataacaatgttatggtctcaacaattaattatacaaataaactcaaacatagtctcttgatatta

SEQ ID NO: 1462 - DNA, 592 bp, Glycine max
agcttatgctgcacacatctacaatagacctcctcaacctcagcagcaaaatcagccacaacagaataactatgacctctccagcaacagatacaatcctggatggaggaatcatcccaaccttagatggtcgaatccttcacaacaatagcagcaacaacaacagacttattttcaaaatgctactggcccaagcagaccatacgtacctccaccaatccagcatcaaaaacaacaacagccccagaaacaacaaacagttgaggctcctccgcaaccttcccttgaagaacttgtgaggtaaatgattatgcaaaacatgcagtttcagcaagaggccagagtctccattcaaagcttaactaatcagatgggacagttggctacatagttaaatcaacaacagtcccaaaattttgatagattaccttctcaatctgtccagaatcccaaaaatgtgagtgccattacattgaggtcaggaaagcagtgtcaatgacctcaaccagtagcatcttcctcatccgcaatgaacctgcccaacctcactctacttcaggaaaagatgatgacaaaaatttaaagagtagtt

SEQ ID NO: 1463 - DNA, 307 bp, Glycine max
tctaaactttgtacaagaatgaagctctgataccacttgttagacaagtggcctcagatatcttaagaaggggggggggggttgaattaacatcttccaacctgttttccctaattaaaaatctactccacttttcactcaacttatgaattcccctaatgacaatcttcttaaatattaatgcacaagcaacaattcgaatatgaatataaatctctaataaatatttgagaataacggaagagaaaatgcccactcaattacatacttgattcaccacacccttgttcctaccaccagttcccaa

SEQ ID NO: 1464 - DNA, 1114 bp, Glycine max
  unsure (1)..(1114): unsure at all n locations
ctatcgagaactgctatcacgntcactctcactatccctatcctacatgaacttaacatcatactaattaattaaccacttcatcaatcacaacacagtgcgcttgactcaatcgcatcaccgggccgtgtacattatgagtgaatcgccgcatcctagctagtcaatacttatgggagcctttgatcaaaagggggagcaatccggggtggaacagagctgaatcattatattggtgaatggatcaagcgtgagaagatacatgtgatatgtaacgcggtcgcgcccttgtgagtctgctgcttggtagaacatagaacatttaaggctcgttggagggcgcatgaatgtgtgtaatatcgtggaaagatggattgatgcctgaatgactgtatgctgctagttgtacgcgcaagatgatcatggtgacctgcacgcataggtgggtgggcacaagactcacgaccattgacctcgaacctgaggggtatacaaagtgaggacccttgcatttgtttcaacgacatattgcgctaacgtcatggtgcttataatattcaaattccctcgtttgttgtttgcactcatttacaatgctttgaccttctcgtcgattgtatctatatgtctcatatgcgaatatagncgctctgtagcataaatatttcgcctcgacaatgtattgaagatctgatatactgctctcctgttctagagtatgtataagtcacttatgcgtatggtgccactaacagcttcaatagacgtatttatatgattcctctgtcccaatctcgatccataatatccaagatgcacggattgactcgactacttgatgtactaatattttcggatgatatcagcttcactcactcaatcactatctgcgcatattcctgacatctctatctctcttatacgtctcctctctatcgtgtcatacaccaatacatggtattgatctgatggaacatcgacatctgtcatctatgttatccgtagagtatccctatcaatcatgtgttgtctatgttccgactcatcactgcgtactgactntactactcactatatcgtatgatgcactcgttatacagtatngacttcagcg

SEQ ID NO: 1465 - DNA, 458 bp, Glycine max
tctatttcacattccccatatgcattttcatcttttctatttacaaatgcatgtggttctagtaatggcatccaatattactattcatgtttccacttactcacaccccttagtttctaactaatcctataacttatcatcctcaagacatgagaagtgcatcacgtatacggcaactggcagttatttcacaaaataaaaagcaaacttcaattgaatgataaccagtaaacatcccaaagagcgaacttattcaaaaacttcaaaaaatctagagtctctaaactttccccttttagttctgcatgtacatatacacttcaactacaactataataaagaggttcagcacaaaattccatcatctttgcttccagttccagactcatattgcacccacaaggacagaattagttaccaatttttaaaacatattctatattaaccgagtataatct

SEQ ID NO: 1466 - DNA, 362 bp, Glycine max
  unsure (1)..(362): unsure at all n locations
ncaagctccaagaattaagatcaagattttagatttcatgagtctagaatcaacagaagacttcgtctatgataaggatgaattttttttttcacaaactgaatagtccatacatttctctcaaaacttgtttaccaaagagtcttctctctctggtaatcgaataccaaatcgttgtaatcgattaccacttgcataatgttcttgaaaaaagttttcactgaatgtacaacgttctaattgacttgtaaaaggctgttaacgattacaatggttttggtatccattaccagtgtgcttgaacgttgaaatcctaatttcatatgtgtagagtcacatttctttccccaataagctttgtg

SEQ ID NO: 1467 - DNA, 244 bp, Glycine max
tatgatgcgcccgcacaggagatctttgagttatgttttgacccctggaatttcgagagaggctggggtttttaatttctagcgtatccacattatacaagcctgaagtcgtccttcgaggggaaagggattacacattttgaaatctcccaagaagctttcgttgtgtaagtcattagcccctcagataattatgggtgaaaaccgacattccgggggaaagggttgaacctttggaaacttc

SEQ ID NO: 1468 - DNA, 476 bp, Glycine max
ggctttataagtgcgggtctgggagacgaaggtcaagtgttcgcgatatgtgaagatgatgttccaagtacttcggatttggtccgaccatgccctcctgatttccagctgggaaattggcgagtggaggaacgccccggcatttacgcaacaagcataatgtaaacctttacggttttaaaagctctatagttgggcctaggctttagagttttcgttttgttaaggctttgtgtcttttgtttttgaatttataatacacggagctttcttcatctgatcctggtctctacccattctcattcatttgcatgtttacttctttttctgaaacggcagattcgatgacgagtcccccgaaggtactaatacctgggacccgtctatcaacttcgagcaagaaatgaaccaaacggaagatgaaggagatgaggatgtgagacttccttcggaactagaaagaatggtcgcccatg

SEQ ID NO: 1469 - DNA, 550 bp, Glycine max
tcttcggatgcattgcctacaaagacacatccataaaaaattatttttcatgaaatacataatcattattttagttatcctaagtatagcaaccaggaagtcaatcaattgtgtggtttttactcattgcatgtgttactatacaactaataaaacaaatcacaactcagtgtgtatcattttgaaagaaagaattagacattctacaacaatttaggtgcaatgtacccaccatagtgcagcatgtttaatcgacaattaggccaattcaaaccaaacaaatttaagcattcatgtgactcatgtatttgcatctaaagcaatgtctaaaattccaagcttagttcatgctcttgacatttaatctatcaacctaagttgatcctacatctaaaatgatggttggacatgcgtaaagctcattacttattcaaacttcaaaacaacacatggaatagccattgtgactctcatcagatagttggtgtgcacatgttaaaacatgtataaatgagagatgaggagcaatatgacatgcaaattcataaaa

SEQ ID NO: 1470 - DNA, 322 bp, Glycine max
atctagccggcatatacgagggtgctgcgtatcaatcaatgactatatcgcgtgtactacaggcgactatactttcaactcatcttaaggtattgatgttgttgtgaaaatcctataaacaactagatgtaaccgactgataaccagaggattatgtaacttgccggggacttaatattgcatgttggagacgttgtgtacccctggcgttttccacccttggattatgtattgagacacacgggatacgatgagattttgtatatgcaatactgtgacttgtccaagttatggagctgcggtccctacgatatttctgact

SEQ ID NO: 1471 - DNA, 444 bp, Glycine max
  unsure (1)..(444): unsure at all n locations
taccttaaaaataagcacatgatagtattggactccagtgtttatgaccgtggcaacgacgtttacaatacctacgatcaaggacatgagaggggacgacaaatttgcaactttggatgcccgatctacaacttctttggttagtgtgactgtgtgagagcgagagactgagagagcacgagcaaataagcataaatggaaaggaatttcaaagacggattttttaaaaccgtccttgaacacttgctttcaaagacgattttaatgaaactgtcattgactagtttcaattatttacaaaaatgtcaccatgtttacgaagacaatggttttgattcaaccgtctttgaattagtgtcattgaaggtgatttttgtagtagtgaccactcncaccatcatcaatcccaccaccacaatttgccacctacattgcaagtagtat

SEQ ID NO: 1472 - DNA, 1489 bp, Glycine max
  unsure (1)..(1489): unsure at all n locations
cagtcggtaataagagggcgtctatctcttgtctcatgtcagtgtacgtangtgctacgaatggttgtgcatcaacatcgctcaccgcctctcatannacacctatcacgagagnagtttggaatagcaattgcanctcgcccagcagcacacctcttacaatatctcagactgcatcgtcatcgccaacgctacgatacgctccctgaatcatactagaataaatatcggcgtggtatcgtcctctgtcctaccatcacgatcactcacgctatctgaccagcgctgcgctgagagtgagtcgcagncgnagccagtgtttgtagtgccatgatctcggcactaagtaagatctgcgacgttntcgactcggcttagtgacaacatgtcganactcgatgcgtgacgntgcggtcatgtatcgccgacaaggcgcgctcgccgacgtacgcgcagcctgctgcggaagngcatcgcctctgctatatacatcgttaacgaggcgttngcacctaaccgcgtgttcgtatatctatgtcgtgagcatgacgagactcactactacgcatagacgaccgtgtcgcgtcgccgcgggccagggttgactccctacgaactacactcaacacgtctgacatgctgtctatcactgtgcgagccccaacgcgactatgacagctcgcgcngacatgtgactgaccagcctggacgaatgctaggatagaccgcgtgtgcacatgacaccagtcgcacgatcatcgtcacttctatgtcggacgtgacgcctgatatcaccgacgtcgactatgctacgagatcgtatatantcgatacccagacggcgtgantcggacatgacagaagacaatgacgttgtcatgaatatgctcgcacatgcatgacatatgtactagtgtcacgcgcatatctctatacatattcaccatacgtgtcataactgaagactgtgctcgctacacgagattcttagtatctatcggctggtatacgcaccagtgcactgagtcgncaatctgctataccgtcggatcggttcgtgtcgcagcgtaccatacatgtcgttacatcgctggtgatcaacctcgtgagcttctggatcatatcgtacagtgataatgggatcgctacacgctcgcgtactggttgaatcgcgcatgcatatcatgtcatgtctcatctccagctagattcgctcgagtcgcgagtactcaccatacgtcgggtggacgatacagacgcgctcgacgngacattcgatgctacgatcatacgcctgcgatttaacgtcgcacatcactaacanatattggtctagcatctacgcgnatctggctctgcatgcggctagcataccgctagcgattcgctcgtggcttcgtactagcatgtcgcactanacagagtcacgctgtccgtggtgtagttacgatgcagtgtcatgtctgtagctagccctctagtctgccgg

SEQ ID NO: 1473 - DNA, 346 bp, Glycine max
ttaccatttgaatttcgggagagatttcgaagtttaaattcgagcggatcgatatattataagcctgaatcggacattcgtgtgaaaagatatgaccatttgaatttctcaagagcttgcgttgttcaattccaacctctcaacatattatgcgctccaaaccgaccttcccggggaaaggtattaaccatttgaattctcgagaagttgcgatggtttatttccaaccggtccatatattataagcctggaaccggccttccgggggaaaggtcttacccattggatttctaaagaaccttcggtggtcaaatttgaacctcttgacattttatgcgccccaaac

SEQ ID NO: 1474 - DNA, 522 bp, Glycine max
  unsure (1)..(522): unsure at all n locations
agcttgcttctacaatctccccctttttgatgataacaactctaaaatcaagaaacacacacacacactttttcctagtcgatcactcgcataaatttccattctccccttttgtttttgagtttatgcttcatttgaaattaagttaattacttatgtgagttcttgatttattccctatttctctccccctttggcatcaacaaaaagccaaagtgcgtaacaaatataaaacatacataaatgactaatcatacaagagaatagaaaacaatcaaacaagataacttaaccattcatcaatcttagaaagataatacttcatagaatgtcatataatccagaaagtcattcataataaccaaataaaagtacataccactgatcatatattatcaaaataattaagtttaaaattcataaccataaacaaccaagagcaagtaaatataatcatcatgttcaggcatactanacaaatattaaaaaagaaataataagtgctcaaatgtcatanaaaca

SEQ ID NO: 1475 - DNA, 536 bp, Glycine max
  unsure (1)..(536): unsure at all n locations
tatccttaaacaagtattagcaacatcacccaatacttgtttaatttttttctcaccatgacattggtgggagtatccaccgggtttgttgatggctaatctccaccgaaaaatttggttggtcatctatagtggaattttcccttccaaccacgtttgttccatccacaaagctaacactcaagaccttgcttactctgaccaacgacatgttagtaatacttgtttaatctagtattatgtgtacttaccaaggacgttgaaggttatccttgaaagcatgctttttgcaaacaatataattcttgagtaagagattaattctaaatttaagaattggagttaaaaattagaaccagaggatctttatcaagtagaagacacagtatatgctttgcagtttaagcaagaaacaagaggaaaatgccttggaggtaaaaattggagaagtcataccacaagtttctaagcttgactatttgattccaaaatgatgggaaaattaatgatgttacacacaaaatantaagtgggtg

SEQ ID NO: 1476 - DNA, 544 bp, Glycine max
agcttgtaccaaattcaaacgacaataacttttttctcgaatgtccgattgtatcccataatatatagagacgctccaaattggaaacggatgctcgtaagaaattcaaacaacaacaacttgttactcgaatgtccgattgagtcccgtaatatatcgaggcactccaaattgaaaacgaaaactcgtagcaaattcaaatgacaataactttttactcggatgttcgattgagtgccgttatatatcgacacactcaaaattgagatcagaagccttgagcattttcatatgacaataactttatagtcgcatgtcctattgagtcccgtaatatatcgggatgcttgaaattgataatggaagctcgtagcaaattcaaacgagaataactttatacaaggatgaccgattgagtctcgtaatatatcgagacgctacaaaatgaaaacggaagctcgtagcaaattcaaacgacaataacttttttctcggattcccgattgagtcccatattatatcgagatgctccaaattgaaaacg

SEQ ID NO: 1477 - DNA, 504 bp, Glycine max
tgtaggaaattcaaacgacaataactttttacttggatgtccgattgaatcgggtaatatatcgagacgctcaaaattgagactagaagctcttagcaaattgaaatgacaataactttatacacggatgtccggttgagtcccgtaatatatcgtgacgctccaaattgaaaacggaaactcttagaaaattcaaacgacaataactttttactcggatgcccgacagattgtcgtaatttatcgagagatgctccaaattgaaaatagaagctcgtatcatattgaaacgacaataactttttactcggatgtctgattgagtcccgtaatatatcgagacgctcaaaattttaatccgaagctctgagaaaattgaattgacaatgactttatacacggatgtccggttgagccctttaatatatcgagacgctgcaaattgaaaacagaagcttggaggaaattcaaacgacaataactttttactcggatgtccgattg

SEQ ID NO: 1478 - DNA, 655 bp, Glycine max
agcttcttcctcttttctctataaatagggggaggagggcaaaacaaaaatgttcaaccctcctggtatttgagaatcacttaaaattagtgagaaaaattgttttcgtgaagaaaatccaagccgaggcacttccgtaacgcttccgagacgtttctgtgggcaatttcacgaaggttttccaccgttcttcattgttcttcgtcgtttgttggtcttcaaccggtaagttcccgaaatcgaacttttcaattcattctgtacccttagtgatccccacttgtttcgcgtacttttatttacatttcatttacttttcgtacccccttttgatgtgctttaatcatttattctagtcattttctcgcctaatcaaaaataaaataaattgtcaccgatcatttgaattgtaacatcttttaatttttgttaaaatgaaatccgaccggtcggtcatgccgtaaccacgtttaaaaccaaaaaagagataaaataataatattataatcaaaaaatataatttagtagaataatcaaaaaaatcaatcggacggttttctttgagatttttctctcttaattggattggactaatactaaagtgaaattaaggcttaaaatcaatcacaaaatcaagctttgtccgcaaaaatac

SEQ ID NO: 1479 - DNA, 566 bp, Glycine max
tgtaggattatggggtacccatcacatgtggtactaggtggcggtcgggcgattgtgcacaacaagttttccacatccacaatgcgcgcataaacccaccatcccctgttgcccacctccaactgagctcacgtactcccacgtagcccatatcctcgtttctctcaacaccgggtccccatcaatccttccaagcttccccaacatcaaagtaatacaacattcaaacagcacaaactatcacagccaagaaaacagagcaaaggcagaaaactctgccaaaacaccaaccaaaatcacagcttttctcacttaaagaccccagtaacaattccttcgttccaattcgttaaaccgtggatcgactccaaattttactggaagtctctagtacataagcctacattttgaccgttgggatatactagcaaacatccagaactcattctgcactagactttccacagccaaccacacacaagcatttttctgcacttgtgcaaaattctgctgcacaattttacagcaaaaattctgcataaatgcagatttcgaaaatcaccctt

SEQ ID NO: 1480 - DNA, 530 bp, Glycine max
agcttgaaacataacatctattgcaggtaccaccgctttagcaactttgttttttatcgctttctccattccatcctaaaataaccaaaaagagaattcaccatgtaataagtattctgaatcggtaataaagaaaatggaaaacaaggacaattgaaataaaaaaatagtatgcaggatcaaaccatgaaagcatatgcagaaatggacccctaaatatatatttttatcaaaaaggtttttcctattaatagttgacagttcttgcatatagcaaacccttaagaaaattaaaaatatatatatataaaatcaaaacaccgtctaacactcattcttaggacatgaataactggacaagtaacccatggatgattgaaccatccctctgttgtcttcaagactaggacagcaaatatttgcctttctaggttctagggtctataaataaaagaaaaaaacccgagataaatcattcattcaatcataagtgaaagaaaacatgaagaatatatttctaaaaatactat

SEQ ID NO: 1481 - DNA, 559 bp, Glycine max
tgttgactttggtgacgtatttctaactaaggtttctacatcggtcaataatatagcaccgatttagaaaaaaaaaaaacaaagcttactacaacgtttgtttatggaccgttggtgaaatttttaagtttcaacatcattataattaaaaacgggcaatcaccgttgttgaatcgcgattctgaccgttttctagtagtgcaatgagcttcaggtttattggatacaccaagttacttatctgtttgaatgccttgaagtaatcatgggtcttgataacattcttgtacaatgaacaatccatgctagagacgaaatttaaagttaagtgatggatgaagcttattagacacattaagttggcttctacttagacgatacaatctacttaaaaatatttggatttatttatacatgtctggattgttatcattaaaaatcaatcttaaaagtcttaaacctgatttactttatagaaataatactctttttaaaaatatttttattcatgatgaaaccttttctcccacctagtttttttttatttaatggaacatta

SEQ ID NO: 1482 - DNA, 489 bp, Glycine max
gaagcttgacaagcagttgggccaaaagatttctctcggtgtcctttctctcaaacgagtctgtgacccagagagaaaccatggaaggatgaaagcctgggtagttcagatctttgatgcatagaacaacttcattcacatctctagcactggattgaatagcaactgtcagaaaaatatgtaacaagacaaaataacttgaaaaaatatcatcatcgtagcactacaaaaattagaaatcaagtttctttgtgactacttaaaaagcatagttactcaacagggattcgaatcgtgaattgcccagctaattttttaatcatgaaacataatttgtatcgaattgtaagactcaaaacaattaaaaattacttcaaatatatcatataattgatatgtagtgctcaatgtaaaaatttaaaatagaaataaataaaataacttaaccataagttctatataaacaaattattaggtatatctaaatct

SEQ ID NO: 1483 - DNA, 584 bp, Glycine max
  unsure (1)..(584): unsure at all n locations
tgccactgtagcagttaagtgaacaaatgaagtgtccacagtcattggatggttgcttggtagaggtacatgctaataactaataagatttcctgtgcagggtatcattgtttttgcatgactgatggctaccttggggctggagattttggttgaatctgcctcaagtgttattttgaaggtaattgagataatcttttgttgttgtttgtttattatatacctaaatttgggttgaagactagttattcaacatgtggattatctaccatgataagtgattttatcatttgagcagatgatattatcatttgaccttgcttttgctttgattccgctcctaaagttcagtagcagcaaagtgactagcagcacaagcattgaagaggtgtgtttcctccttgtttgtggattcatgaactatcagttaatacatgacactganaaatgttctagttataaaatttgattagctaggcttacatgaattgttgaattgatcagctaggcatacattatatcaactgttagtgtcattttttcagtcgtataatatttcgggtgatattatcattattatgatt

SEQ ID NO: 1484 - DNA, 244 bp, Glycine max
agcttaacaccagaagagcccaacgtgttgctcaaggatcaagaagtcgctgaacttgtgaatgcaagcctggcggcatcacttatacggcttcaatacttgcctgaatcacttcgttctttgtggaaacgcatcatggctgctttgctcaatcccccccgttgcatgctagtatttagctgctgcactccattttgtattctgtgaagggatcttttgtcgccatactctactactactgtga

SEQ ID NO: 1485 - DNA, 479 bp, Glycine max
tagaggctgcgatgacgagcataattacatagagaagactgattattgtgtgagcgataacgaaggcaccatacaattaagttctcttagaggacacactgagacgactgagaccctgaatacacacgcaagagccatgagcgaatcgaacatcatgcaggtcgcgaaagaaaaaagattcctatctacataccatatataatagtacatgccatattacttcctctatcggcagttagatcactcctaattggtctcgtcaacgattccaatttgagtctcatggggatataactaacacacaacgataatgaaacgatcgaagtcaacctttggcggcaaaggaatatatggatcgaaagaacttgacacaatagactgctaaagcacacagaacactgtatactcccacccatggtcgcttctatgatctgttcacgagcgcagtatttaggaacttatgtcagacttcagctgtt

SEQ ID NO: 1486 - DNA, 510 bp, Glycine max
agctttgctgatttagttttcaccgacgaaaggatcgaagtgggtctaaaaagaggcaatttgatcatcctgctttgatgaatgagaaaactagggcaaatagaaaggatgagaaggaggaagaaaccaatgctgtaactgccattcctacatggccaaatttcccaccaactcaacaatgtcattactcagccaatatcaacccttcttattaccctccacccaatcatccacaaaggccatccataaatcaaccacaaagcttgcctgccgcacatccaatgccaaacaccacccataacacaaaccaaaacaccaaccagggaaggaattttccagcgaaaaagcctgtaaaattcaccccaatcctaatgtcctatgctaacttgctcccatatctactcgataattcaatggtagccaaaaccccagccaaggttccttaacctccatttttccgaggatacggcttgaacgcaacatgtgctaatcatggaggagttctgggga

SEQ ID NO: 1487 - DNA, 495 bp, Glycine max
  unsure (1)..(495): unsure at all n locations
tccatcatatagataaagtgaactctatttcctgacttgtctgacattaagacaccccccaatcaatcctaaaatatatgtcctacaatgggctactaattgttgttgtgtgggttctactgggagaggcaatatattttcttttaaccacttaagtttcaacattgatctcactagtgaaacctttgggggaacggatcctagatattctacgcacatttgttcccaatcaaaataagttgggccaataactaatttttcatcgactcataaacccagatgaagagaaacattttctgaattgttgtgtcatatcctaatttcatccggggactattgttcgttgatctcttgatccttgctagtcgacttacggtgttgaacgccagtatcagtgcaaagcaaggaaccattcaatgtttcgatcaggaaggcaaaagatacaaagaaaggagggcaaaagggttttntcctttgttttcctggaccctagct

SEQ ID NO: 1488 - DNA, 500 bp, Glycine max
agcttatcaaactgctagtgctatttattgaacaaacattaagcatctaaagaagttccaacataacagcaatagtccaaacccaaacacaaaacaccaaatttctcgaaaccaaaccaaatgaaatttcgaaaaccatacacacataaaaggattgattggaatttgtgtggtttagtgatggaatttgtggtagacatttgcagatcatggttaagactagaggattaggccatgcgttaggtagggttgttgctagaggtttggggagaggggatgatgatgattctgacggtgctccccagcgccgaaagccaactgcatcgacacgcatgcggcgagtatctgtcattgttgacgatgttgtacctgcggactcgcctgcggtaccagaggcagaggctactgtaattggggatgagccaatggtagatgctgacgcacaggacaccggtccagagactgacgcacaagatattggtgcacaagatgcttcagat

SEQ ID NO: 1489 - DNA, 304 bp, Glycine max
tgtagaggctacaacaagaaagtggttctagagaataaaacagttaatatagataaattggccatggtaaacaatgacactatcataagtgtgctgctctattccacaatattggttttggttttcatgagtgtccaacagcatcatcattgtattactttgcttttaaaaaaggccaaacagctgcttctgcaattaagttgacatttgagaataaaatcatgtaatgtaattcatgcccctctattcatgtgaatacttaaatacacccatgctttgtttgcaaataaccgggtaaagggtt

SEQ ID NO: 1490 - DNA, 502 bp, Glycine max
agcttgaggacatgaaatggagtcataagatttgagtatccatgtttagcttctgcattctacagtgactttagacttactagatgattaaggttattgggtgagggtatatatataaactgttcattaattgagaactcctgtaaagtgagatctttttcctcctttcttccctttattatctttttgttgagaaagtaatgtgaatgtgagtatgctttgccgaggttagttttggccttttgggaccacgtcaccctcacaagaattaagtaatactgaaaacatgaattggtctttgcaactttaatttggtagctgcacattaaaaatattgaagacttaatgtacggaaacagactttccgggaacccaggttggtgacgggcaatataaaactttgacattgctatttgctattccttcaaccataaattcgtctgattaacgtcttttgcgacagaaaaagaccgcctcttaattataataatgtttgggaatt

SEQ ID NO: 1491 - DNA, 561 bp, Glycine max
aactcagcttctattccacagcaaccctttgggaaaacacacacacacacaatgcacaggggaaaacctagatttttaaaaggggtgcaaaattaaataaaaatcattttcagggaggcaagtcactgaattcaaatatatatttttttaaaaaaagttctccatatttttggtcctagtacgggaccagacaaaagttcagttacatagaggacccatgacaaccaggtgttgagtttcatttgaacattgttatttcaactcgtcttttcttttctaaaaagattgaatgtcacaaaaaggaatgattaatatataattagaggtgtaatacaaaaactgaagagcacaaagaacaaagaagattgaaaccttgaggccaagtaattgcatgggcattttctggccagggaccaggcaatcaaggccagctggttccactgtggccctctcacccaatccaccccctatagggtccggatgcctcatgacggagataccgtaatcggaaacaggtgttcgagaaacgccaagaagcggactgtgataaattctggggat

SEQ ID NO: 1492 - DNA, 439 bp, Glycine max
agcttgttgaaattgccatgtttggatgagttatacatacccattctgttttagggtttttgtgatgatgtttgtgatgtttgtatgctgaaattgcttgtggaaaaactgttagagatgaaaggtagagtaaacctacggttggaaagtgagaatgtggtgttatgagtggaaaaagagtgaggctttgagggttggaaggttaagtctgaattctatggtaaatggaggttaaagtgagttaatactagcttgaaatgtcatttaggacttgggagaaagcttggactgtgctatagagaaaaacaaatgatcaaagtgaatatagagccatttctagggcaaagttgggtgttgaagaatcaaattttgattccgtggaattttacgtgttaatccagcttgagcaagtttagattgatgttatagactttgtgtt

SEQ ID NO: 1493 - DNA, 598 bp, Glycine max
tgagtcttagcataattgttgcatacgcttgctaattgtttattatgaaattgatgtgttattatgtcttgaatcgaagtgtgtgatttttgtgtaatgtgattgatgattgaaaagtgcaattgatgattgaaaagtgaatttcgaatgacaaagtggtggaattacgttagttatgtttaagttttattttatttatatgatatgtatatctagttgtcttgcttctctattagttaggaatgtgataactcactcccagtgtgttgtttgtgtttggatcctgtgatgatctcgaaccttgtgttcgtgggaatagatgaataggtggatgactatgaagaaaccttatgctagagaacacgggaacacaatgctctgataggatgtgacattagggtataggttctatattaattgtatgaagttttggacgaccttgttttgagccaaaatgaatttattctttatttagacaagttttattatgatgttagaaaggtgaatgtgagccttttaccctcttgaaaggcttgtacttttataaaatgttttaaatacttttaattaatatttgaatttttattccttttattat

SEQ ID NO: 1494 - DNA, 517 bp, Glycine max
agcttgcctcaaagaggcccaggtaagataatgcggccgaaggaactagttccgctcctgagtatgacagtcaccgctttaggagcgctgtacaccagcagcgcttcgaggccatcaagggatggtcgtttctccgggagcgatgcgtccagctcatggacgacgagtatactgatttccaggaggagataatgcgccggcggtggacatcactggttactcccatggccaagttccatccataaatagtcctcgaattttatgccaatgcttggccaacagaggagggcgtgcgtgacatgaggtcctgggtaaggggtcagtaaatcccgtttgatgccgatgctatcggccagctcctgcgatatgcgctagtgctggaagagggtcaagagtgcgagtatggccagaggaggaaccggtctgatgggttcgatgaggaggccatcgctcaactgctatgtatactggggtaagattttgccccactgctgcatggatgcgagtgctaatcatg

SEQ ID NO: 1495 - DNA, 414 bp, Glycine max
ttgagccaaaatcctgactcaccataaaccttggcccagggtgagaatgtcaatccttaccctcggaagcaaaaaagaatagaagggaaatttccaatcaaagaaaagaaaaggaaaatttccaatgaaagagaaaaaagaaaagaaaggaaattcccaatcaaagagtgggagaaacataaaagaaaagaaagaaaattcccaaccaaagaatgggagaaagtaaaaaaggaaggaagctcctggtcaaagaaaccataacaaatgtgcacagaggtctttggaccacacaatatctgaacagtacagaattgtcaccacatgaacaaaaatgaaggaaaggaaaccccgacctaaaatggtcttcttcctttaattaccaaccaaaattcccgtgcgctagcgacctttttt

SEQ ID NO: 1496 - DNA, 564 bp, Glycine max
  unsure (1)..(564): unsure at all n locations
agcttcatccgtgggtcaagaatcatagcaattgaaagaatgacattatggtcactccaatacttgccaaacttttccatcatcaacactgccatattttgcaatactggatcatcacacttaagtgtttctcgcaacaaccattcaattttccatacttgcatgaagtattcattggaagttggataagatgtacctaaaaaaatttcaaataagataattaaactataaatataaatctgaaactatttattataattatgaagtttgaaaaaatataactgaaatcaaattagtcatcttataaaatggcttaaaaaattcacccactttttcagctcttttccattcctcattagatggacaacatttgtattttctatcacgaataatgaaacttgcaaaagcacaacgatacctaagagcactctcaagcatgatataagtagaattccaccgagtaggcacatccaacctcaagcccactntagtatcaatacctcttacttgagcaatacanttgataaatactatntttcttgactcagagctctcacatattta

SEQ ID NO: 1497 - DNA, 515 bp, Glycine max
tgggaggattgatggggacccggtgttgagagaaacgaggatatgggctacgtgggagtacgtgagctcagttggaggtgggcaacaggggatggtgggtttatgcgcgcattgtggatgtggaaaacttgttgtgcaccatcgcccgaccgccacctagtaccacatgtgatgggtaccccataatcctacaagcttgagatgaggaagtgttaaagggtgaaacttcctgcttttattgttgaccacagagtggtacctggagatatgtcgcgggggtcaggagaccttggggacgtcaggtggggtgctattgcccaaaaccaagcttgaccaatcccgacccaacccaggcatagtcggtcagtgagaacctgtgatgtacctaaataggcgagctcctggcagtcaacagataaaaggaacaaagaccacaaagcaaggaggcttgtggtggctggccagctgtgaattttgtgtgatatgtggattatggcctctggtaatccattacc

SEQ ID NO: 1498 - DNA, 438 bp, Glycine max
agcttatgtatgcttcattgtgcttgtagggatgaaggtgtgagaccttcaaagtaatggatttcacttgaaggtgaaaaagacaaacctcccaaaatatgtactcctcattatgcaaacttcctagtttgcataatgaacgaatagagaatagattctgttcattttggcacacaagctacatggattgattcactaattatagtagaacaacccatgaccattacataattcttccattagcacacttaaaaaacataatgacaataacccttctaattcttagcggctacataagaatgccttttaatcaaggcaacaatggcaaaaatatatcattaagactatttataaatttgtgaaactctacggtaatgtcaacagggtagtcataattatatatgatgatctttggaaaaacaactatttttattgaga

SEQ ID NO: 1499 - DNA, 614 bp, Glycine max
  unsure (1)..(614): unsure at all n locations
taatcttttgtcgtgccgtcgtccaccgttgcggcatctttgcttagtgctggtgtggcgaccactagtgctcccacggtgctgccttattcctctacaattctggtggtttctacctctagtgttttggcaacgatggtgtcgtcttcttcatcttctttcactcgcgtctccattaatcacttgtacacctctacttgtagaagcaagtttcatgatgatgaatcaagttgattcaagtagttttgatgatgacaaagatcatgacaaaaagcccaaagaatgatttcaagattaagtcaacaagttcaagatcaagattaatttcaagtttcatgagaacaaatcaagaagattcaagaatcaatagaagtttgatttcaagattcaagagaagatgaattcacgattcaagagacgaaaacaagaagacttcataagggaagtattgaaaagatttttcaaaaaacaaacatagcacagttttgtttttcaaaagagcgtttctcaanattttctaagttaccagagtttttactctctggtcatcgaatattagtttcctgtaatcaattaccagtgacaaagtttgatttcaaagcttttaactgaat

SEQ ID NO: 1500 - DNA, 610 bp, Glycine max
agcttgtgaaatgacctgcctcgtcgctacgatatcgctactctaaatcgcataaatttcaatttttcttaaatgaaaactccgcttatatgcatatgaaaaatgagagtaatttttttgcaatatacattcaccaaacaacgcacaaatacttaaatgaatatatatagatatattatctcagtacacatcatccacatgacggaaggtaaattagttcatacatataattaaatatgtaatttacatccccaattcaaaaagaattataaaactgctataaaggagttgattaacaaaacaaaactgtctcccaaaataatcccaacgtcatcacgaaagcttggtagctccaacaaaagaaccccactccatgtaatctactattgtccatctactcccacgaacgaaggttcgcgatcatcacaggtaccaaccacactgtacaaaaattgaagggtgtgtttattataaaagacaccaacaattattaaataaccataattatcaagagaaacaataacaagtgtcatgctcatacaaaagtatcaatcaacaaaacatccacttaataattattcttaaacttttccacaatgtcaatcaatca

SEQ ID NO: 1501 - DNA, 520 bp, Glycine max
ttcatctagccaagattttacaaaagtgttacaacagaacctaacgatttctaattatatgggccattaaatttatcatgtgttgacagtaattgattagcccgtgaatttcctctggggctgaacacacttcggccatgggccttgctttggctagtagtcgcgggaggtcttgacttccatttaaggtcaaggcgaacctatccatccacatggtcgcttcttgatgcaatgcatcaatcaccctccctcttgcttccttctcggcgtatgcttgtgcgaagtcctcttctagcttttgctcatgggtcaaagactggtttaactcttctttgtactgtcctattatagctagcatgctttgctccgtggcttctaagtgttgggccaaacttttcttggatcttgagcaagctgctaactcctcttttaagaccatgccatgtactcgtgattggtctctttcctctctccagagcttaagcttgttgttgctgccccacagagcccctcggaactt

SEQ ID NO: 1502 - DNA, 461 bp, Glycine max
agcttattaaactaacaattgaagtgattagaaatatggtttaaatattttgtggttttggattttataaaaaagcaaatatacaattgtaaagagaggcttttaagttatgataagaataaccagaggttatgattcactagtaccaatttttcccaactcctactcttaatacaatgcctttcctagttaattatcaatcccctcaaccaactaaagcctatgatcaaggtcagaaaatgttctctgcctaaaatcaattaccccaataatcatggatctgtcaatataagtctaaggataaaatatattcgaaggatgattaattaaaaaattactaatccatcaaagattattcgaacaatttgatcgtgccatttgggataaaacattctctaccataatcttcccaatacatgcacatgaccactactctgcaattgattaagtatcaaaatggt

SEQ ID NO: 1503 - DNA, 650 bp, Glycine max
  unsure (1)..(650): unsure at all n locations
cagcttaattgtcgagctcgtggagatcgttactagccaatcctttaactttctactttttagccttaatgggacatccgactcacaatatattgtgcacggaaagaaaaacctttttttttcacactacatttagcacatgtctacaaagaataccccaaaaatttaaacatgtgacaactacgacttgcttattttgaaatattgcatgaaaagtcacatgataattagactgctgtttataaatgtcatgaaccttgaatctggagacttcaatggacaatttaatcttgtgngcaacaaacaactgaaagacaatcgattcttcttgaaatattatgaacaatgctcgtataaaatcctgaagcttcttcttccataagataacacgcttgcattaatggttttgaagtcactattttgaaagccttatctctttgcctgttataacatgcatcagaagtcttctatattgtatcacaaacttatttcgtggagtacttgaattaagaatttcttaaagatttattcatggtttactactttgcgtgatggacattcaacacaaaaattttgacatttgtacgaatagaatatcttttctaaccaccttatatcttgtagcttatatttatcaatcattggcttcc

SEQ ID NO: 1504 - DNA, 522 bp, Glycine max
  unsure (1)..(522): unsure at all n locations
agctttgagccaaaatcccaacttaccaaaaaaccttgccctcggaagaaaacaaaaaaagaaagcaaaagaagaaaattcccaatcaaggagtgagagaaagcaagaacacaaaagaaagaaaattcccgatcaaggattggaagaaaacagaagaaatatgcagaaaggtctttgaaccagacaatatctgaacaatacgggattgtcaccaagtaaacaagaaaagaaaggaaaccatgacctaaagtggtcctctccctttgattgccaaccaaaatcctgtgcgtcggtggcttgttcacctcactaaacaaaaacagaaaaccttggcagatatcatgtccagccgttctacaagccttgagccaaaatcccaacttaccaaaaaaccttgccctcggaagaaaacaaaaaaagaaagcanaagaagaaaattcccaatcaaggagtgagagaaagcaagaacacaaaagaaagaaaattcccgatcaaggattggaagaaaacagaagaaatatg

SEQ ID NO: 1505 - DNA, 557 bp, Glycine max
  unsure (1)..(557): unsure at all n locations
tgggaatcgcgcttagcgcgaaggttatgtgaaatccaagttgaaatgcacctataaaaagaggaagaagagaaggagaaaagacacaaaatattcaagagaatacaattccttatagaaggtaaaaactagaagcaggaaaatcaatcattaggagtcattccttccctccattccctttcttacttacccccttcactactcattaccctcttgcaatggtaaagcatttcatgacaatgagatgctaaaacctctcttgtttggagcttagcaaccaattgcttttgatgtaattactcttcctatctagttaatgttattttaatttcattgtctttttttcgtgcttaattntattgattgtggtttgatcacccatattcatggtaagttttaagggttgcattgagaaatgtntatctctaaaagaacttaaaaagggcatataaatcattcatctataggaatataatgattttatttagtctattatacatgtctattcttaatgcaatttaactgttttacctcttaaagagatttggggagaaaaa

SEQ ID NO: 1506 - DNA, 536 bp, Glycine max
agcttattgtatgcatgcttgtggtttgatcacccattggtgtgtgctgttaggaactttagcattaacaaatgtactgtttccttggaacttgatagagcagggctagaaaattatagtgctagacatagtgtgcagggttctagtttttattatgttgtgcttataatgctgtttaaattaggctaagttcaacaagagacatctatgaacgaagcttagtttaaattagtccaaactcacgagacatcggtgttggtatttttgtcctcagcatagaacataggaataatttcaaatagagaaaaaccctaattgcatcaagtatctcggtggaaggacccaacgcttttacttatttgttttcacactcaattattcatgtttactgtttctttgattacaatagaatatacctttgtttcaattcatgatacttaattcttttacaaacaattgtattttgaatgactctcttccaagtaaaataggttccctgagttcgatactcggatcattccgttttaatatttact

SEQ ID NO: 1507 - DNA, 539 bp, Glycine max
  unsure (1)..(539): unsure at all n locations
tgaagagagttcttccacgccagcacgcgcccaacgcatatgcagctcgctaagcgagatagttgtcttttctgcgctaagcgcacctttgcaaacaggaagcccttttttttaagcctgatttgcggagaatgaggaggaggcaaaaaatacacaagaaggagtaaccgtcagagcttgaagagtgaaatacagaggcaaataagagagcaagaagccaagttttgatcttttaggaagatttgtgagtttttgagtgattgtgacattcctagaggtggaggagacatcctcactcctttgtaagcaagcaatttctcttaattcctcttcttcattgtaaaatgagtttccttgctatggaaggctaaaccttcagttagggattcttactgagtaattgatgtaaactctntccctatctaattaagggtgttttatgtgttcattgtttctatgagcactttattattgcatgtttggggcttgatcacccatatgtgtgtactgttangggctctagcattgaaaatgtattc

SEQ ID NO: 1508 - DNA, 530 bp, Glycine max
  unsure (1)..(530): unsure at all n locations
agcttataagaacaaaatttcctcaatcatatccaaatacgcatgcgaattaggaagcatcaacaagaatcaagccaaggctattgtgcaagcaatcaatgggggcaaaacacaccaaatgattatgatgatggatggctcaaattctcacaaaggtaaactcatcacttttaaattgagctttcaaaactatcatgacatgtagaggagaatcaaggatttcaagtcacaaaatgtcaaaaacttttattttcaaaacaattacccatttcttgaacatatcctataattcaaagaaaaacatgcaaagttgtacatgcgcacagaattgacccaaaatattaaactaaaagtccgacgaaactaatcaacattaacaaattagcacaaataacatattaacaaaaccaacaaaactaacaaaaaccaaagaacactcccccccatancttaacaacacattgtcctcaatgtagcacaattaagagattaaaacaattaaaccatcaaatagaattggacaaagtgta

SEQ ID NO: 1509 - DNA, 525 bp, Glycine max
tggctttggtttagacatgattgatacatgatttgggacttgtaggatttgatttgggcaagattggatgaggggaagtgtggttttcgaaatctgcacagagtgcagatttttgctgtgaaattgtgcagcagaattttgcacaagtgcagaaaaaaatgcttgtgtggttggctgtggaaagagtagtgcagaatgagttctggatgttttctagtagatcccaacggtcacaatgtaggcttatgcactatagacttccagtaaaattttggagtcgatccaacggttaacgaattggatcgaaggaattgttactggggtctttaagtgagaaaagctgtgatttttggttggtgttttgggcagagttttctgcctttgctctgttttgcttgactgtgatagcttgtgctgtttaaatgttgtattacttggatgttgtggaagcttgggaggattgatggggactcggtgttgagagaaacgaggatatgggctacgtgggagtacatgagctctgtt

SEQ ID NO: 1510 - DNA, 523 bp, Glycine max
agcttgcagtgtgtatttgccgctcacagcattcctatgaagccctatttactgtgcaaactcccttggacagttacatatcctaatgaattctgttatcagtgatccagcttcataacagattgcctttataagttttaaattgcaattgtggactaaatgacacgtttagtgttaagaaaaattgtggacaaaatgacatacttacaattgcagttccaatgcagtcacaggaagccaaaaaacatgacaccagcagctgaaacagcgattggttgcagacaaggttttacaaattggtctatgaccacgatttcagcaaaagaaagatttttggatctccgtgaccacaattgaatctgcatttgtccgcaaaggatcccaacaaaacgtgactgcaatttaaaaccttgttgcagacaatttttctaaaaccatgtgcctatcagagcacactacgaatatagaatctgaattgaattcaggtatctactcatattttgaaataaaatctctctgattc

SEQ ID NO: 1511 - DNA, 562 bp, Glycine max
tcttgttgttactatgaactttcaatatttcttccctccctctttcatctggtaatccaacagtgacctattggaacaattacaaattgtcatgtcttataattttgttgaatttttagtaactactaactagcttaaaagtcatacctaccaactgattgatcgatcgtgcaaaaagttttatactactagcatattataataaaattcattgtcttatacgttaaaatttgtttatttttatagtaattactttaaaagctatatttataataaattctgatgggttaatgatttacaatagcaatgcatggaaattaaactgataaataataattatataggcattaacaggggttaattataaaggattctaaagttgcaagtaacatacctgtctatcaaacctcccaggtctaagcaatgctgaatcaagaatttcaggtctgttggtagcagcaatgactataactccagtgttttcagtgaaaccatccatttcaatgagcaactggattagtgtttgctccctttcatcattttctccacctatacctgtacc

SEQ ID NO: 1512 - DNA, 466 bp, Glycine max
agcttgtctcagcgtttatgcgagacagagaccaacatgttagctatcatcgccaagtacgaagaagagttgggtctagccacggcccacgagcatagaatcgtggatgagtatgcccaagtatatgcggaaaaagaggctagaggaagggtgatcgactctttacaccaagaggcaaccatgtggatggatcggtttgctcttaccttgaacgggagtcaagaacttccccgattgttagccaaggccaaggcgatggcagacacctactccgcccccgaagagattcatgggcttctcggctattgtcagcatatgatagacttaatggcccacataattagaaatcgttaggaaacttgtatggtctctcagaccttgactagatatgatttcttttttttataaaatgagatggtcccatgtttctactccaaaagcttgggcaaatcaaatcactactaca

SEQ ID NO: 1513 - DNA, 563 bp, Glycine max
tgttttgtttcccacaaccttaccattctcatctattttgtttttgaacacccacttagctccaactgccttcttgtccttgggtaactctactagtttccatattgttcgctagttccggcaagtgcactgaatcgcacaagtagtataaaacggtaagaactgagtattgaacactcggggaacttgtgttatttggtaagctatttcagcaaataggtgtctggtgtgtaaaggtaagtgtgaatatgaacaggtgtataaactatctgtgcaaaaagaaagaaaatcacgcgagagaaatgatgtgtaaaaacaagtagagaacatgttggtcttcctaataggtgcctgatgctaaaaagatattctctatctaacaatgctcatgtgttcttatggtgtctcctgaaatactaaaccttgattcctcatgatagtttagcctaatcctgattaagcatcgtccgcagattcctcttgtaagactaaactcaaccaggaccgcattaagacatacatactcaactaaattatcgcactccaattcctcgtgaaagcac

SEQ ID NO: 1514 - DNA, 437 bp, Glycine max
agcttgaaattgatcaacagaagctctcgaggactttaaatggtcataatttgtaacacggaagtccgattcaggcgcataatatgccgagacgctcgaaattgaacaacggaatctctcgagaaactcaaatggtcataacttatcacacggaggtccgattccggcggatagtatatcgagaagctcggaattgaacaacgaaagctctcgagaaattcaaatggtcataacttttaaaacggaagtaagattcaggtgcataatatatcaagaagctcgaaattgaacaacggaagctgtcgatatattcaaatggtcataacttatcacacgaaagatcgattcatgcgcatgatatatcgagacgctcgaaattgaacaacggaagctctcgagaaattcaaatggtcataacttatcacacaagcgggctg

SEQ ID NO: 1515 - DNA, 484 bp, Glycine max
tctggaaggagatcaacttgatgttctatgcctcttgaaggtggcagtccatgaggaatctccataggaaagacatttttaaatttctgcaataagggttgaacactaggagaaatagaaatagtaaactcattagaattatcagtagaaattttactgtctttgcaatactgtagattgagtggttcatgagcaggtaacactttcctcacttcactcgcctctgcaaaataattaaattttctctcatgtgtatcactctctctcttatgtgtatcactcttttcctcgggtgtatcactcttctttttcatattcctttgtggggcctcactattttctttctcttgttctctcttttctctcattctgatttggtcatcacacacttctctaagggatagaggtttaagagtaaacgaggaagatttggctattcgtctgtaaggcttttctttgttacggttcaacaaatgttgcattt

SEQ ID NO: 1516 - DNA, 575 bp, Glycine max
  unsure (1)..(575): unsure at all n locations
agcttgtggacgtattgccacggattcaaaaaacatcccaattaactttgatagttggtcaaatgttccaaaattatacaacgatggttgctttaatattgtaaaggtatatgcatacaccaaattgtttagccttgctctctttaattatgatttgctaacatttttttttgtcttttttcaagaatctgtttcatttccaagcaccaaaatcagttgttgagtgctattgctttctttgcatgtcaagaaagtataagaatggcaagacaaatttgtggaatagtgtttatgatacttcattatccatagaacaattaattgttaatgttcctaatggaactcataaagattagtggtcttcatttgttgattatcatctaaggccgaaatataaggtaattttaacatagaattgttactattaatttttttagtttctattaataagttgtttattgcataggaattatgtangaaaaatgctgaagttagaaaaaagcaaaaattctttatactggtgagtcaaaacttttgtctataaaacaacatgagatggtaaggggtgtttggtt

SEQ ID NO: 1517 - DNA, 618 bp, Glycine max
taaggtgcaaagtctaattgatgcgggctggctgaaatttgaggagaatcgtgtgtaagtcccgacattgacaagagatgccacacatggggcaatttcaaaagctgttgttagatgtctctaatgtctcgtcaggattttcaagtttataccattattgtaaaccacagttacaatgctaaataaaatggataaatttgatatctttgtccctcatcctctcacaaacgcatcttttcttattcaactttcaccgaaatgtgggtgcaagccattggtctgtttgctcaagcgacctgcgctcctgagtttggactttcaagactgttcaatcagaaattactcgtgctacacatttggtgagggtgccgtaaaacaacgagtaagttcaaaacaaataagtttctaaaagaaaaagaaaaaaaagcatttgattaactgtattttcaagacgttcatgtgacctcattttatcattccagaaattttgtctttttagagagaagtgagttatcaagaataggatgttggacaaatggcctcagttattttaagaaagggaggggggtgaattatatccaaagactatttccctattaaactttcactccttttttt

SEQ ID NO: 1518 - DNA, 405 bp, Glycine max
agcttagcgggacagggccggcctaacgagttcatcaaaaaacccagaaattcatccaaaattgatgaactcgcttagcgagtacattgagatttccagaaaaaatggggcttctaagcccttactattcaaccactttcaagcctaagaatcctatgcaaaacacatcaaagcaacctatattacatgcgaaattaaacccctaacaacatactatctaacaactaagcaatcaacaacaatcatcaacacaaaaacacaattacagagaccacaacatggcttctatcctagggttcaaaaatagaaattaaaaaggtaaagtcagatgtacttacttggattacagaggttgttgagtacaaatatgggcaaaagaagtagagaatgcaagatgaatatagt

SEQ ID NO: 1519 - DNA, 717 bp, Glycine max
agctttgtgacaatcaaacagcgacaaagctatagtttaagccttttataacaaccttccattcttagcaaaatattcgacccgcattagttgactttgtactgatggatttcaattctcattttttgaactctaaaataataatttatgcaaaagttaaaagagaccacttatttagttaaacgaaaacccaaaagtgcatcacacaaattaactataatgcgaaagaaaattgcatgtttttattcaaatgcaccgcaatactgcaagcctacaactataaaaaaaaataaaaattaatgtcggcccacaccttgtttttcttaacatcagacttttaattaattttaacttggaaaataactgtataatcttgaactaccaaaatagttctaaatttatgggttaattaccagagatgagtatgttaacaaaaccttactaaattaagacagattttaaaaaaataggaaaaagatatgcattctgattaattttatatatatatatatatatatatatatatatatatatagttttatgtgatcaaacaataaaaaattatcatcatatgaattttaatattaaaaattttccggcatgttatgccggataacttgtgattggattattacatttgaaatcattttacatgatgatcaggatataacccactttttcattatggaattatgaatccttatagataatttttat

SEQ ID NO: 1520 - DNA, 263 bp, Glycine max
aaagagagagaaacaaaaacccctggtattataccataaatatacagaagtaataactcacctctttacccttcaattcctgagccttaattttgatcaactcagcctcccccaaaaattcttcctacaaatgcataacatatagataacattttgtaaatgcaagaaacatactaatgcactaaatattatgccttagctaagtttctcaaaaaactagccagaagccataaaatgaaataggaaaggggggggggggtttt

SEQ ID NO: 1521 - DNA, 473 bp, Glycine max
agcttcttcaaaaatattgggttatactcatgtgctccaagatcttcaagactttgaatcagttcaggaatgtcatcataaagaaaatactcatgaattatagttacagattcctttttgtacttcctcaccttctcatcttcttggatttccccatcttcagatgcaggtttggaaagtgaagcatcaagccatccttcagatattgccttggggacaaatgactgaaacaatgccttagctgatggaatatcaagagcaagatcatctagggattctgccaaacgagaaaaccctttcaccatttggctggaactaaccagtccttcttctgctgcttcttttaatagcttcaacattggaggttctgcggaacgtatctccatggcaagtatcacagccctcttaacaacctcatgatggaagaatgaaacccccaactccgtatacacctacaggctttcaatgtggca

SEQ ID NO: 1522 - DNA, 438 bp, Glycine max
accttgaaaacgtgtgctattcatcttttcattctcttctgcctttgccaaaaagaattcgccaaggactaaccgcctggattctttttgtgtctctcttctcccttttccaaaagaacgaaggactaaccgcctggattctttttgtgtctctcttctcccttttccaaaagaacgaaagactaaccgcttgaatccttttgtgtctcccttctcccttgtccaagaattgtgaacgacacagactgagacttcttttgattcttccctttccctaatacaaaagtgttcaaaggactaaccgcctgtaaatacttttgtatcccattcacaaagtatcaaatgtttaaccgcctgagatcattgtcttaacacattggagggtacatcctttgtggtacaacgtagagggtacatctacttgggttgatgactgag

SEQ ID NO: 1523 - DNA, 745 bp, Glycine max
  unsure (1)..(745): unsure at all n locations
atgctcaccactattagaggagaaaccttcaggttgtttcatataaacctcctcctctaaatcaccattaagaaaagctgttttcacatccatttgttgcaactcaaggtcaaaatgagcaactaatgccaagattatacgaagagaatctttcttagatactggagaaaaagtctctttgtaatctattccttccttttgagtaaatcccttagcaacaagtcttgccttgtatctctcaatgttgcctaatgaatcctttttggtcttaaagacccatttacatccaatggccttcgccccattaggcaactctacaaggttccaaactttgttactctgcatggaactcatctcatccttcatggcatcataccataaatttgactctttactactcatggcttgatcaaaagtttcaggatcattttcagctccaatattatagtcagattcttgcaaatatacaatataatcactaggaatagctgattttcttactctagtagacctccttaattgtgcatcaacattntcttggngatcatgttgttcaactggntgttcatcattttcatgaatttgatgatcacttgatctactggattatcaacaacaggttggtggaatgcccatcatgtggttgtcatcaatcctttgaactcgaagggtatgaattaccacccaatcttcattttgacgtggaaantgggaatctattataatcaatttcaaaacctcagcn

SEQ ID NO: 1524 - DNA, 328 bp, Glycine max
ctgttcctgaattagagtccagaaacttcctctagaatgaaatgtacgaagcgagaagttctgaaatttctcattgccttccctttattcattacatatatttatagcaagtgaatatggaaaacgatagtcattagtcctaacggtcttgccagcacacaggggacaagccataaccgaatggatagtgggggacaagcactagcagggataggcgctaacggaaaatatcagcaataataagagggacaagcactacacgagcactacaaggtaaattccttaaattcctatactatccttctgttgataactgcttagtgaatga

SEQ ID NO: 1525 - DNA, 574 bp, Glycine max
agcttttcggtctaacaagatattccaaactctcgatgtgtcactgggatagggttaggggaggtttatttgtattccgcgatagaataacgacaaatatatagtacgtaagtacaaagtactaaggcggctgctttatttttattttttgtatttataagaaaaaatcatgtgcttatgaaggaattctgatcagatatatatttaatacaactaattaacatttattttatctgtcaaaaaaacaaaatttattttaaaactattttaatgttatttcaaaattttaatcagtcgtacttatatataaatatatgaatattatacgcatgtgaggaattgttcacgttagaaataatgagaatgaccttagctagttgttgcgaagagtatgaataatgatctaaattctaaaaaaaacacaataatcaagagaagtcagaggcaaacgaggcataatagcacgcgcgtacataaaaatacaataaattgatgaaatgattgaagaaaaattaattggaagtggtagatcaaggttctcgtgaatggtgagtaatggtagttgaatattact

SEQ ID NO: 1526 - DNA, 409 bp, Glycine max
  unsure (1)..(409): unsure at all n locations
cgctgtgctctctcatgagaagggctgaatgatggtcttggatggattgcccagcgagtaactggcaaagccccaacatgatgtcgcgctgctggaaacctgngattattttcatttttattgagttgaatgcatatgacaaaggacaaaactctatgtctcatttatactccaaagaagcaagctaagataatgagttcgatttgctatgacgaaaaagattattccataatctgattaacacatttccttatccttagatcaagtttattattcaacttagatgaaacgcatatgaggagcgaactttaatcatatttgaatgactaagattacaattatttaaaacaatcttgaactttcagatatatttgtctacttttctcgtcctatattcatgagatactcc

SEQ ID NO: 1527 - DNA, 635 bp, Glycine max
  unsure (1)..(635): unsure at all n locations
agcttaccaggctctcaaattgctcaacttcgatgaagccgcatatggagaaaggagaaaattatagttgctggaattaaaggaaatgagactgaatgcctatgagtcctctagaatttacaagcagaaaatgaaggcgtatcatgacaagaaattgcataaacagaacttccagccaggccaacaggactctttaactctaggcttagattgttcctaggtaagttgaaatcgaagttgttaggaccgtttgtcattaaagaagtgagaccccatggagcaattgagttggaggatcctacaagaagcaatcttgaaaaaaatggatactcaatggacaacacttgaagatctacaatggcagacaattagagaggctcacaagcattgtctatttaaatgacccgtgaagaaaacacaacgtctagttaaagacgataaactaagcgctagttgggaggcaacccagcacatatgtacaaaatccatctttctggactttttcaaaaaaaaaaaagcccaacaagtgtatacagtagaaacaggggtgcaagaaagcaaaatcagatgngctcacgaagactcgtgctaagcacgctacttggcgctaagcgtgcaggatgtcacatgcgctt

SEQ ID NO: 1528 - DNA, 374 bp, Glycine max
tcatgttgttgcacagaagggcaacggtccgtgaggtggtctgctcaagaacataaaccacacagtctggcgacatgtgcatattttttattcaaggctagccgggtaatcattttaaccaaagcatatagtttaccttcaagcttcttagtctcacctgatgaagatgaattcgtggctacttcatgcactcctctaatgacaatagcatcatttctggcattgaattgctgggagtaggaagccatcttctcaattaaatttctggctacagcaggggtcatgtctccaagggctccaccactggcagcagctatcatacttctctacatgttactaagtcccacataaaaatattgggggagaagctgctc

SEQ ID NO: 1529 - DNA, 577 bp, Glycine max
  unsure (1)..(577): unsure at all n locations
agcttctagcacactacagatattttctcaacgattccaacggttaaatcatggtaaagtgtcttgtgaagttgcaaaccaaatttcaagaagatccaacggttaacgaaggctgggcagcgtttctaccgaggcagcttcatgtagttttctctagaagcttcattaagaggcttcctccagaagcttcattaagaggcttctagtacactccagacatcttcgcaaagatcgcaacggtccgatcatggtaaaatgttttgtgaagttgcagacaaagtttcgagaagatccaacggttaatgaaggctgagcagcgtttttaccgaggcagcttcatgtagctttctctagaagcttcattaagaggcttcctctagaagcttcctcatggcttctttgagaagctttctcaagaggcttctttgagaagctagatccttatctatccacccctctattaactaaattaacttccgtaaaaataattacggatgaaaataacgcaacanataatcaaacatcaaacataattactaataatatatagatatatatatcagggtggtacaactct

SEQ ID NO: 1530 - DNA, 498 bp, Glycine max
gctttctacaaaataaaaactataaactgaaattgaaaagctgaatctttaacataaatctaaagactgaaacataaacataaatctaaattgtctaatgtgctaaagacatgttaatcattaaactgttcaaaaagcggggaaataaaaatcgtgatcctgtcaatgatcttgtgcagagtccatggcatgctcattcaagtccagtgcagtaatgcctgatggtgaatcctgagaaagacgcacatctggcattggtgcagatgactcacgctgagaaaaagacatgttcagcactgcagtggaagactctggtgtcacctatggggcttatcgcaagtaactcgcttaacgcgccttagtaaaaactatttaagcgctaagcgcgatagccacatgcttagtgagtgaacacacaaaaaaaaattctatagaaatggcttagtggctctctaaacccaattcccaaattttcaaaatagataatgatttgcactt

SEQ ID NO: 1531 - DNA, 494 bp, Glycine max
agctttgcggatttggtcttcgccagtgaaaggatcgatgtgggtccgaaaagaggcaaatttgatcatcctactaggacgactgagaaaactggggcaaatgaagagggtgagaaagagggagaaacccatgctgtgactgccattcctatacggccaagtttcccaccaaacccaacaatgtcattactcagtcaataacaaacctcctccttacccaccacccagttatccacaaaggccatccctaaatcaaccacaaagcctgtctaccgcacttccaatgacgaagaccacctttagcacaaaccaaaaaaacaccaacaaaaaggaattttgcagcaaaaagcctgtagggttcaccccaaattccgttgtcatatgctaaacttaatcccatatccactcaataattcaatggtagccataaccccaaccaaggttcctcaacctccatttttctgaggatacgactcgaacgcaacgtgtgctta

SEQ ID NO: 1532 - DNA, 523 bp, Glycine max
ttccaaagtattctggttttctaaaccttgaaaacttgtgctattcatcttttcattctcttctccctttgccaaaaagaattcgccaaggactaaccgcctggattctttttgtgtctctcttctcccttttccaaaagaacgaaggactaaccgcctggattctttttgtgtctctcttctcccttttccaaaagaacgaaggactaaccgcttgaattcttttgtgtctcccttctcccttgtcaaagaattgaaaacgacacagtctgagaattcttttgattcttccctttccctaatacaaaagtgttcaaaggactaaccgcctgtaaattcttttgtatcccattcacaaagtatcaaaggtttaaccgcctgagatctttgtcttaacacattggatggtacatcctttgtggtacaagtagaggggacatctacttgggttgttgactgagatcaagaaatggtacatcttctgtggatcaattctactggaggatacatccactaggttcaa

SEQ ID NO: 1533 - DNA, 510 bp, Glycine max
agctttataaactctatttaagtaatatttctagtcaatgtgggactaaacacacctcctctaggttgcaactaaggcaacccaaattggctgcaatcaaggcagagcaggggaaaccaaaacttccaataaaaggtcatcaactgagagaatggtaatacctcatccatcaaaggttcactttctaaaagagcatgcacatttgcagcttccagagcctggagctctctcttcaacctttcagaaaattcctctgcttcaccaatacccatgacataactgcacaattaaaaaaaaaaaaaatctgaaattgacataacataccatttttttgttcaaattgatactgaaataagttataagatatgacttagcaaacctgaattatatatgtatctaaccagcataatattttcatttgaactttgacaaataagttacaataattatgacatgtacaacactttccaatcatttatgaattccctatatcaatgtgaatcataaaat

SEQ ID NO: 1534 - DNA, 390 bp, Glycine max
  unsure (1)..(390): unsure at all n locations
tgcagttagctgtacttgtgaatttatgaagatgacctctttgttcaccttcccagagggagtctctgatgccgacttagttctcttggtgactacaagacctacaactggaaatacacttgcttgggctgtggcatgtgaacgggaccaatggggccgtgctatagctggtacattatcctataattgtgttggtttaaatggtggtctttatcttgcatttgggatgctttgtaactgaaagtgcctttttgtttgtgtgcaggacatgttaatgttgctcctcgtcatttgacagctgaggcaaagactntgctttcagcgactctgatacatgaggtttgattatttttttgtgtctagaagagattatatttgaagcatggctga

SEQ ID NO: 1535 - DNA, 415 bp, Glycine max
agcttgattttgtgatttgattttagcattgtttcactttagttattggtcaattcaattaagaaagaaaaatcccaaagagaaacgtccgattgatttttttgttttattttactaaaagatattttttgattattatattattattttacctcttttttggtttccaacgtggttatggcatgaccgaacagtcggatttcgttttaatagaaattaacggatgttacaattcaaatgatcggcggaaatttattttattttttgattaggcgagaaaatgacttaaataaataactaaagcacgtcaaaagggggtacgaaaagtaaatgaaatgaaaataaaagtacgcgaaataagtggggaccaccaagggtacatagaatgaataaaaagttcgatttcaggaactga

SEQ ID NO: 1536 - DNA, 487 bp, Glycine max
ggaagctacctagggtatgaatagaagcatgtgttacacttgccgtaactttgatgaatgagagtcttatgagagacacttcaaaggtccactgcgatgaataatttattccttcgattgcgtgctccccccttctgtctttcttttcctccattaaagcatcctcttcaagcttcttatccaaggcaattcgtggtggtgaagctacttcttccttggcttattccctagaggatggtgcctcccctctacacttctcctatgccttccgctgcatctccatggtgaaaaagcaccattgaaggacctcattggggctcaaagatccagcctccatagaatcttcacaagcaagcatacatcattatgggcgacacccaacaacaaaacttgctttaccgcaaagaaatattggtggccagcggttgtaaaaaaagttccgcaatgttgtctgaaaaataccagtcacggctatttaactaccgat

SEQ ID NO: 1537 - DNA, 568 bp, Glycine max
agcttatgcgcctatttccttacaaacgttctcttgcacaagacatttaaccgaaaaaatgcacccatatacaatcaaggcagcttcgttacctagattatttacacgtacctccaaggtgtatttgttacttacatcacacacatctccttggctaaattcacatacatgcatactcaaagcattttggggcaccaaaaattgcacatgtgcacatcttggcatttctaatacctatacatacgcaaacttcatgatgaatcttgactatctacacaataaggtgctacatttcatgctcttttttcaagtttttgctacctaaagccgcatgcaaattcaagcatattttcctttgctgactaaaattgtattcaaattaaaaggtatattttttgtaatatgttttctttacataacatgcaacatatttatatatattttttttgtgagacattttgactaccaaaaattatatatacatacattcaagtattttgctattcatacccaaagtgcaaattgccaaggtatcttgctacctattctaaacctacacattcatgac

SEQ ID NO: 1538 - DNA, 584 bp, Glycine max
tctacttatgtggcagggcgggcttccttcactttcttgtctccaacgcgagctctgaccactgttctcccttcccgcgatggctcttttcatgtccgcctgagtttttttatagcctaaaccatacttcccacgatttccttgggtttttatcaggctagttatgccgccattgtctttgcctaaacccatcccgggttcataaccgttccccaacataactcgggccatcattaccgccgcatcggacagacaaggttgcccaaagagggagtccacggaggaaatgctgaccacctcaaaagactggaaagcggtttctaacgattcttctgcggcttccacataaggcatggaggatgggcagcttaccaagatatcttcctcgcctgacacgatgaccaagtgcccctccactacgaatttcagcttttggtggagtgtagaaggcacaactcccactgagtggatccaagggcgccccaacaggcagctgtagggggggttaatatccattatatggaaggtgacttgacaggtgtgagggcctatttgtactgggagatcgatctctcccctacctc

SEQ ID NO: 1539 - DNA, 591 bp, Glycine max
agcttgtacacgccatattagcatgattatctactatgtgagtaatttattttctattttccatttttcttgtcaacactcatgaattgatatccttaggaccccactaattatcccttttcttttgccttgcaaagcaatttgaacgccttttccagtttacccgaaggattgaggacttgatgttcactgttgcacctgaagaggtttgtgtgtataatgctgtatttttaatcttccaaaggttcctgctatacagcatctagtcatgtctagaattctacttatcaaacaatatggttgcaatgtttcttagtttctctggttgaaattatgaggttctagatatagatggggtgagggataaaagagaatgaaacattgaattgatattagttgagatgtattacaatgtattgatatgttcataaaacagagcactgaccccttatttataataatcataatcctgaccaattatggaaacaaaccatgataagaaaatatgataatcaatcgttagagatagtgaggaatatgaaaactcaaccttgagaaatattgatgatattcttagatatgaatcaaaaa

SEQ ID NO: 1540 - DNA, 793 bp, Glycine max
tgattgaacctttgcatcgccgccactttgactcctcagcttcataaagtaattttggtggccttgggggactaatattttttgtgcccgatggagaaaccgtccgccccacggtttttgttaaatgcttacaaagaaaaagaagctttaacccttaaggtaatgttccaaatgatatgggggaaatgatattttgccattctacgaaacaatttatgaaatctgtgaattaagccaacacggaaccagcggtaaataagcttttccaattatatatcaccactcttccaaattgctagcactttgtcactttttaataaacatattgttacctgaactttactcgtcttaaaagggcttcaaaataggatctcggaggttgttccgtttgggagctcaaccttaaataaaaatccgccgaagaagagtctccttcccacctttggtactatctattataaaccctagcctggtgtaatagggaggttttcatttgtgtggggcttggaaaaaaagcacaccttgtttttttatcacgggagatttacactggcccctccaaagggttgaggtaaaaaacaccaagttctttattcctgtgggcgcaagaaaggggtattttaaaccgcactctttttttttccaaacacaaaattaatgtcccccttttgggagttcttttggagccccttttatttataacaccgttttttttgtcctaacaaaccctttcccaattttgtggtaaaagcccatattgggagctttttggccgcaaatatatataaagaat

SEQ ID NO: 1541 - DNA, 496 bp, Glycine max
  unsure (1)..(496): unsure at all n locations
agcttgtaggattatggggtacccatcaaatgtggtactaggtggcggtcgggcgatggtgcacaacaagtttttccacatccacaatgcgcgcataaacccaccatcccctgttgcccacctccaactgagctcacgtactcccacgtagcccatatcctcgtttctctcaacaccgggtccccatcaatcctcccaagcttccacaacatccaagcaaaacaacattcacacagcacaagctatcacagccaagcaaaacaaagcaaaggcagaaaactctgccaaaacaccaaccaaaaatcacagcttttctcacttaaagaccacagtaacaattccttcgatccaattcgttaaccgttggatcgactccaaaattttactggaagtctatagtgcataagcctacattttgaccgttgggatctactagaanacatcaagaactcattctgtactactctttccacaaccaaccacacacaagcatttt

SEQ ID NO: 1542 - DNA, 562 bp, Glycine max
tgcttctacaatcattacgatgaaatgaaactttaggggaggagtattgatagatactcattagatgttagattacttagtcaaacaaatatacgaatatatgtaacaaagaatggtattgggcatgcaattgattatttcttatttactttccaaattattcaataaaaactactttcatggcatagctgaagatgttgttgcaagttgtcctgtactcaggaacaagtgcttataaatcaaacagttctacaactatgcaagtaatgcatacaaaaacaatttgaaagtacttttcaaatcaaagatataaatacctgagttggaggcttcagcacaattgactttccaacaatgaccgcaggaccacttctcgaaacagcaatgagcgcatgatcaagaatgactaaaatcactcctaatggaatctgaaaatagtatggcagcacaatttagtgtttatcaaattaaaaaaggctaaataatattctaaattccaccaatataacttttaagtcgctttatttttagaatctgtgttgatctctcaagacctacccta

SEQ ID NO: 1543 - DNA, 77 bp, Glycine max
agcttgcacttgaggagggaaggaaattttctgctaatgaacaactttgttaactatgtgtcctttcaaactctgct

SEQ ID NO: 1544 - DNA, 478 bp, Glycine max
tctaaactttatacaagaatgaagctctgataccacttgtttataagtgacctcagtatcttaagaagagaggttgaattaagataccaaactatccccaactaaaaattatctctctctttaactaataatgaaaccctaattatgaattatttcaagaacaattcaaaataaacttctttaaagcgaaatataaactgcaataaaataaaacaagtttaagggaagagagaatgtaaactcagattttatactggttcgaccatgtcctgtgccttcgtccagtccccaagaaacctgcttgagatttccactatcttgtaaaatccttttacaaaattctgaaccacacagggacaaccattcccttgtgttcagataaccttacaacttaagagaccctcggtctcttaatcagatttctttgaataataagaagaagcattttctctgtttacacaaagatgtacaatgaaag

SEQ ID NO: 1545 - DNA, 640 bp, Glycine max
  unsure (1)..(640): unsure at all n locations
agcttgcctaattaacctgaaattgagagaaaatgattattaaacacacaaaatgaaaatactaagtatttattacctatacttaatagaaaatacttataacattacaaaataaccataaattgggagagtttgatacaatttatacaagttttatatacaaaagttagtcattttcaccgactaatagtcacaatggcaacctgattatcacaatgaagtagaaggatttcttaatctggatgatctgttaatgcaattcatggatacggtagagtcaatgcaacaagcctttagaaggactgaaactcagattaggaagttggttgataacatgactaacgcagtagccaaaaaagaggaagagcgtggagagattgaaatacatcaagaaagcattcttcaagttacctcaatccatcatcaattgaccaatgaagaagaaaagcaagtgtaaatcatgaagattttgatgatgtctaanacatcaagccttgaatttgctttgacaagggggagaatgtgaatcatgcaagctttaatgatgtcgagaagaaatcacatgcttgtcatcatcaaaaagggggagaatgtgaatgtatgtatacatgattttgatgatgtcaaaagagaaataaac

SEQ ID NO: 1546 - DNA, 252 bp, Glycine max
tgcccagagaaggagtccacggaggaaatgcttaccacctcttttactggaaagcggtttctaatgactcctttgcggcttccacataaggcatagaggatgggcaactcaccaagatgtcttcctcgcctgatacgatgaccatatgcccttccactatgaatttcaacttttggtggagtgctgagggaacaactcctactgagtggatccatgggcgccccaacagacaactgttgggggggataatat

SEQ ID NO: 1547 - DNA, 612 bp, Glycine max
  unsure (1)..(612): unsure at all n locations
agcttgcacatgtgcgctaagcccaatacgagtgaaattcaaacaaaattttgtgggcttagcgagacgtgctcgcttagcaggtatacaagacatgaagggtgtgcttagcaagtaatctcacgctaagcacaattagcaaaaacttctgacagtgagatatttgggcttagcacgtacctcctacacttagtgcatagacaaaaatgatctgtgcccgcttaacgtgacaagacgcgcttagtgcacaacagcagaattgaaacatagcctatttcaacaacaaccaacatacttacacttagattttgcacttgatcaaattatcaaaataacatgttataagtcagcaagttcaaatcatcaaggcataacacagcaagcataatatcacaaaaaattattgtacaaaaactatgcattatctaaaatagtatatttaaaacaaaaaaaatagaaagggttcgaaatcttgacttggagaaggctttcttgttgaatttctacttgcaagcacttctcccattggtgttngttctctcctcattttctctttttctctgaatcttgctttttacagactctcttatgtgcttaaccttctaagttttt

SEQ ID NO: 1548 - DNA, 457 bp, Glycine max
tcagagactgcagcaggatatgagaaggtttagcaaacccctgtgtaatctaaagcagaatctgatcaaagccagagaagatcttcaatttgctcacgaaaaccttagaaacaataacatgaatggagatagaattgatagagtgaggcagctgacagaagaggttattaatcttaatgaattggaggaaaagatgcttatgcagagagcaaaagtggattggataaggaaaggtgatgggaataactcctttttccatgatattataaaaagcagaaataatagaagaagtatatacatgctgtagaaaactgatggaaccttgcttgaaaaccagtctgagatagaggatgagatcatggatttctacaagaaactcatggggactgatgatagccagctgcaccatattgacatagatgctatgagaaatggcaaacaagttaatatggagcaa

SEQ ID NO: 1549 - DNA, 578 bp, Glycine max
agcttatgctgtttttttttatcagccaaattaaatatataattatattagatgagtaccagaggtactaacaaggtacataaaagattacaattatgacctatttgaaatcagcccactgtttgttccaccccaggatggggcacaaaacaggcccaattacaaatgattcccctgccctcatactgattactacatctaaaacctagtggcagatttgaagaccattgattgtaatgagtggtgaaatccttctctaagtttttcatccaagtccataccaaaaacaatgcatcctccatgagtctgtttgcattgaacctgctgttagaaaaaactagcatttctgtgcttccatatggtccaagtcagtgctatccaccatcctttccacctagatgcaaccattccttcaacgatataggacacatgctggataaaatgttgtcttgggtgcaaagggaaaacattcaccaaattcacccaagacaatgattttctccaaactggaattattttcctacagtgaaaaaacagatgcgatgcgctctcttcctcatttctacaaaatggacatg

SEQ ID NO: 1550 - DNA, 431 bp, Glycine max
tatatatcaaagatatgacaacttataagttgttagctacttatacttagattttgttggttgcattgactctcggaagtctcaacatctggatacatcttcatgatggctaatggagcaatatcttggacaagtgcaaaacaatcattagtttctacttctaccatgaaggttgagtttatttcataatttgaagcaacatcatagggtatttggttaaaaagtttcatggccgatctacaagtgattgattacattcctagactggtaaaggtgtattgtgataatccagctgttgtttttctggctaaaagcaataaaagagaaagtcaaacattgacattaagtgtttagccatgagggaacatgtcaaagtgaatgaaatcattatttaacacatcactattgaactaatgattgtagacccattg

SEQ ID NO: 1551 - DNA, 665 bp, Glycine max
agcttgtcaatcttttgagcaaggaccgcccccaatgcataattggatgcatcacacatcaactcaaatggggctgtccagtcagatgcctgaatgatagaggtggtagtcaatgcatgcttgtggcaatcaaaagcctctttgcactggtcatcaaaatcaaactccacctccttttgcagcagattggatagtggaagggccactttgctaaagtccttgataaagcgcctataaaaccctgcatggccgagaaaggaacgaacctctcacacacaagaggggtaaggcaattgtgaaataacagttatctttgcagggtctacctctatgcccttattggaaattatatgccctaaaactataccttgttctaccattaagtgacattttttaaaattcagcacaaggttagtttcaatgcgtctattaagaactctatccaaactatccaaacatgcatcaagagaggatccataaacagtaaaatcatccataaacacctcaatgcaactctctaaaaagtcactgaaaatgctaagcatacaccgctaaaaggtaccaggggcgttgcataagccaaagggcatctttctataagaaaaagtgcaaaggacaggtgaatggggctttttctgaccctaggagcatatgaattgtaaata

SEQ ID NO: 1552 - DNA, 629 bp, Glycine max
ttccatgaagaagaagtttggaggtataggattttgtaatcttcgcagattcaacctagtcatgttaggaaagtagggttggaatttgattaataacccattgtcataccctaatttctttcggggaccattgtttgtcggcatgcgaccttcgtttgaccacctcaaaatgtttaacacccatcgttgtggaatccgtaaagttttgagatgtttcgggaagaaaccggtcaaaaacacaaaaacgggagtgtatttagcaaagtgggggtgtgtgtaaataaactgttacactttaatttcatctgaggaccattgttgatcgcttcggaaggcttaacactcatcgtggtggaatctgtaaagtttcgtgagattttggaaagaaaacagccaaaaacacaaaaatggggggtgaacttatcaagatagggatgtgaatagcaatttcaatctaggcgcttttgaaacaattttggaagttggggttgcttaaggatgaaacaacctgggcggcaagctcctccacctttttgttgaaaaatggttaccgggccttccggactttctaatggcttcgtaaaatttccaaaacctgggtgaaccatttcacttaaaattgggaaagg

SEQ ID NO: 1553 - DNA, 583 bp, Glycine max
  unsure (1)..(583): unsure at all n locations
agcttttgacaaaggaagaagaagaagttcatatagattcaaaaatcaaagtggaaaagttgttgtcaaaagaattgttgaatgaatatcttcttttaaaatgcaaatcaaagtgttgcttttatagactcttcatgtctggtcaagagaaccattagaagagttataacctttagaaaaacttaaaaaccatttggaaaagttacaacttttagaaaaacttgaaaactattggaagagttacatcttttgattttgttcagaaactatcactggtaatcgattaccaaatcagtgtaatcgattacacaaagcttttttgtgaaaggatgtgactcttcacatttgaatttgaatttcaacgttcaaaaacactggtaatcgattaccaaatcattgtaatcgattacaacattttgaaatcaattggaacgttgtaaatagttttgaaaaacattntgctactgataatcgatttcaacaatctggtaatcgttaccagagagtaaaatctctttggtaaaaggtttttgagaanaattcatgtgctactcagtttttgaaaaaactttgaatacttatc

SEQ ID NO: 1554 - DNA, 892 bp, Glycine max
  unsure (1)..(892): unsure at all n locations
ccctccacccacccatcttntctatttccaacacatactcctaattctctctaccttcactcctagatattcatncatcctcacatcaccccagaaccaccacaaagtggnttttgacctcgttgtagcgcgccacaaanaataaactggccctgcgtatgggtcgcctgaggaaatgcctaccagctccttttattgttgaagcgggcccaaaccactcctctgcggggccacaatactgctaatgacgaatgccccctgaccaaaaagtacgactgacctgacactatgaccccatgcccttcccctacggatccaaactctcgggagagagctgaacgaaacacacctacccaagggacacactggcgcccacccggatagatgcattggccgttaaaaaacataatgtgaaaagtgacgcgaccggagagaggctcaaagcattctaggggatcggaacttaccctatcctcaatgtaggtgcctatgaagcgcgcaacacccattgaaccctgccataaacgagagacactaaatcgataattccccacagagcacatgcgccaaacggcttaaaccggatccattgaccaaaggagcgggcgcattcagatggcgaaaagccgtgggcccacctcttataacactattctggaaaaactggtgcccatgggcccccctacaggctcttcccacaaaacccccatgagaaacttgcgtcaatggtattataacgcgggacaacaaaatcggttatggttcccatttgacacaccttaaattctcccctactatacccgggaccctagggtttccccaaggaggcggatttccaccccatttccccaacactctgcgggaaatattcacaaaagcggggactctcccc

SEQ ID NO: 1555 - DNA, 731 bp, Glycine max
  unsure (1)..(731): unsure at all n locations
aaatttcaaagaatttaaactcataaagaagactcagctcagccacaacgttgcaagattcagatttgcccttcctactccttcttcagtattaggccttcctgttggaaaaaacatacttgctaggtttaatttggaaaagattttcctgatgttgctctaatactatatttaacttatcccgttgaataaaacaccataaactttaaatacaagaattataataataaagaaaaagagatgtaaaactattttatattaactgttaagcagggggaaagatagccaaggagaggaagttatgagatcatatactccaatcacgttggattcagatattggctacttcgagttggttgtgaaggtacattattttttgtggaaacatttcgcaaggggataaatgatttancctttctccacacacacacacatatatatatatatatatatatatatatatatatatatatatatatatatatatatatatatatatgtattaatttagcgatgaaaatagtaataatatacatattttgttgtttttcccaacagatgtaccccaatggaaagatgtcgcccctttcttacaaaggaaggaggtgattacttggccggacgtgccccaaggtcttaattgccgcccttatagggcgaggtagggataataaaaaatttatcgtcccccaaaatttttgtgaggctaaatataggcgttgtttccaatg

SEQ ID NO: 1556 - DNA, 512 bp, Glycine max
tatcatcacttattagccttattagagatatttgattgatggaccatatgaaacaatgttttttgtgtatttaattttccaacaaattttctaactgagtcaagatggtattttatattccaaatttcaagtaaaataaaaatatttgagcttccaaggatatatgatggctcatggctgccacaaatatttcatgcttaacatctttatacatgaaaatattggtagcacataatggcttgagatctgttaggaacaaccaccgtgagctcatagcagttgtttatctttaagtaaacattgtacttcatgctcttacctttgctacacagtcaaggagtggactgagcttgaacaccctaacctttttcttcttgttgcttttattatggcacaactggtagttgtaatgaagaaagtttctttttctaatattgttactctttcatataaaaaaaaaaattaatgagtgttgatatgttggtttatggattatttcttacattgctatg

SEQ ID NO: 1557 - DNA, 508 bp, Glycine max
agcttgcatccattagaagagaatgagcatgtgattggaagtatgactgaatatgttagtcagtttgtcagattgattgtgaaggaatgcattgagcgtatcccagtgacagcgtgatatttaaattttgagagaaacgactgtcatttagtactgatttttgcatgaatctctgaagtatggactgaatgcatgaaattgattgtgatagccacttagccaaaaagttgaccacgtgctagaatgatttatcccatgcacccagtttgagctgaatgaattattaattgattgaaccctgagcctatatagtgttatctcctgctaccttgacttaggttgtaggagagcatcatccataggaagcgtggttcaaagcaaatttgtcccaaatttgggggagtaattatcaaggtaaatttgttcaaaatttgtgggaggcattgggtaagaattgaatggtcaaagtaaatagcatgcacacactatttctgtatatacacataat

SEQ ID NO: 1558 - DNA, 428 bp, Glycine max
  unsure (1)..(428): unsure at all n locations
aatctaagctttataagtgcgggtctgggagacgaaggtcaagtggtctctatatgtgaagatgatgttccaagaactctggatttggtccgaccatgccctcctgatttccagctgggaaattggcgggtggaggaacgtcccggcatttacacaacaagcataatgtaaacctttacggttttaaaagctctatagttgggcctaggctttagagttttcattttgttaaggctttgtgtcttttgtctttgaatttataatacaaagatctttcttcatctgttcctggtctctacccattctcattcatttgcatgtttacttctttttctaaaacggcagatccgatgacgagtcccccgaaggtactaatacctgngacccgtctatcaatttcgagcaagaaatgaaccacaccgaagatg

SEQ ID NO: 1559 - DNA, 552 bp, Glycine max
agcttggatcaactcatattactttttattattttactttggtcaaaaaattagacaagcgctaaatattgaaatttctgatatttatgaaccacaagcagacattgttacagcttctttgtcaacatgtaattggactttgcaactatccaatcaatcatagttataaattagtaatcatatcacaaattatagatgaaaattacttatccattcatttaaagattaaccattggttaaaagaaaaacttatacgatatcaattaattacatatataatatctatatctagaactataatgatctaattgtctaattgacaagattacaaacgtctcgtttaatatctttccgtcaagattaccttagcttagggtatatatatttcgcaacgacttcgttgacattaatggtgaagtagttggcgtgcatttgtcacgaagaagcaaagaagaacccttactcggggtcactaacaaggcgtgcgtgctcgttatgctacttgtctacacttcaaaattaaaataaaataaataccagggctttaaaaca

SEQ ID NO: 1560 - DNA, 364 bp, Glycine max
tgagggagtgtctatagggatgggtatgtggggttggtgttgtcgaggactacctaggctgcttaggaaatcaggggtggtaaacatatgaatacctctttgtgatagcctatggaccaatatctaggacaagtgcacaacattcgaccttctttacacctaccctgaaagttgaacacacatcatagtgggaaccaacatgatatggtatgtggttaaaaaagttcatggccgatctacaagagattgatgactttactagactgggggagggggattgtgaacatccacctgttgtttttctggctagaccctataaaatagaaagtgaaagcttgacactaatcgtgtagccatgagggaa

SEQ ID NO: 1561 - DNA, 594 bp, Glycine max
agcttctccgtcttttccctataaatatgggaacgagggaagaacaaaaatgttcaatcctcctggtatctgagaatcacttaatattagtgagaaaaattgtctctgtgaagaaaatccaagccaagacgcttccgtaacgcttccgagacgtttccgtaggtgatttcgggaagattttccaccgttcttcatcgttcttcgttcatttttcgtcgttcttcggtcttcaactggtaagttcccgaaatcgaacttttcaattcattctatgtaccctcagtggtcctcatttgtttcgcgtgcttttatttttatttcatttgctctccgcacccccttttgacgtgctttagtcatttatttaggtcattttcccgcctaataaaaaaaataaatttccaccgatcattcgtattgtgacatcttttaatttctgttaaaatataatccgaccgttcggtcatgccgtaaccacgttgaaaaccataaagagggcaaataataatataataataaaaagatatctcttagtaaataattataaaaaaatcaatcggacatttttttttggggttttctttcttaatcaat

SEQ ID NO: 1562 - DNA, 329 bp, Glycine max
catgcgacagcacacgactctgtatattagaagaggatatttgtggagcctttacccgcacaagacactggcatgagatgataatctcgtttttggacacatgacgaccatgagggctcaactgaatcttattcccatcaagacagctacgcaactgtgatcatctcctcatataagctataccttgacgggtaatcaagccatgcgctatgacgtattgtatgaaaaggggcgaattccatgccatgccagaacgattggcctatatatgcgtatcaataacacaatgtctaatgattagatcagccggatactgactatcacagaga

SEQ ID NO: 1563 - DNA, 479 bp, Glycine max
agcttttagcctgaagtatgatattgtattttggttgtttaagttattgttttgaaatttggttttgaggttttttggtttatattaatgtatgaaagtataatgtttgtttaagatattttgtttggtgtgaatttgtattttgaaggttttagtggtttattactttatttatatcctgtatggtagtgaatatgcaattgaaaataggaacacaaactaatggttgcagctttactttgaacacaaactattaagttttgctcaaagtttctcctacttatgtgtttgaaacccttaagtttagtgactcattagaatcccaaaaggatgctaaaaaaattagaaccctataatcctttttaaggactttctagagcattcctacttcccttgtttgaacttaaaaacattggattcaatgcaagagagcccagtgagttctcaaaagtgtacatgttcacataccccaacatatg

SEQ ID NO: 1564 - DNA, 561 bp, Glycine max
tatccttattgcttgcctccggacttcacttcccgtgccgtttctgaagatgtgagccaagcccctacctttgaggggcaactttcttcttatgccgattaccccctgcaagaagacgacgaaagagatacccatctaggccctttgcttcccctcaaggatccatccccccatgaattacctcaaccaaacatagtccgccatgtcccatcttcacccgcacccgtaaaagaatcttttcccttcacagaagataagggaaagattgatgcgcttgaagagaggctaagagcagtagagggcctcggcaattacccgttctcagatttagtggacctatgtctcgtgcctaacatcgtcatccctcccaagttcaaagtaccggatttcgataagtacaaagggacgacatgtccgaaagggcatcttctgatgtattgccgaaagatgggggcgtattctgcggacgaaaagctgttggtccatttctttcaagacagctttggccggagcggctgtggcatggtataccaatctggaagctgcccacatccgatcatg

SEQ ID NO: 1565 - DNA, 579 bp, Glycine max
agcttgaatcggacctcagtgtgaaaagttatgaccatttgaatttctcgagagctttcgttgttcaatgtcgagcatctcgacatattatgcgctcgaatcgaacatccgtgtgaaaagttatgaccatttgagtttctcgagagcttccgtggttcaattccgagtatctagacctattatgtgcccgaatctgaccttcgtgtgaaaagttatgaccatttgaatttctcgagagcttccgatgtttaatttcgagcgtctcaatatattgtgagcctgaatcggagctcagtgtgaaaagttatgaccatttgtatttctcgaaagcttccttggttcaattccgagcgtctcgacatattatgtgcccgaatctgaccttcgtgtgaaaagttatgaccatttgaatttctcgagagcttccgatgttcaatttcgagcgtctcaatatattgtgcccctgaatcggacctcactgtgaaaagtatgaccattggaatttctcgagagctttcttggttaaattcgagcgtctcgattattatgggcctgatcggaccttcggggaaaagttat

SEQ ID NO: 1566 - DNA, 190 bp, Glycine max
tgctacaattaacacctgaagctctcagatactaccctggatgtaggaattaccacacactcacatggtggaaccctcatctataaaaacagtagcctgctacttacttacaaaatgctgaaagcccaatcggaccatacattcctacagcggtccaacttcggcaacgaccacagaaacatgctacaga

SEQ ID NO: 1567 - DNA, 579 bp, Glycine max
agctttaggatcaaattcttttctctcttttttctctcaattgttcttcattctttttcctcttttcagttctcttcttcctttttcttgcttaatttttgtggcttttccattggtgatgatcatggaaggctaaatactcaatcaatccaatgaatttgagttcaggtttagtatttctattttgtatgattgttcattttttctcctatctaattttcgattttcatgattataaatatgcttaggattgaaaatggattaggttatggattcatttcctaattgcgaaatttaatcatagattgtttggatgatattctaacctaatttgcggtttcaatgaatttagggattaattcgattgaactaactctaatgacattgatcgaactttcccaacatgatcatccactatagaactatgataattcggcttgccattggcttggggaattgaattgatgctattaaacctgttcaaattttgtttttgtcctgtcccgttcttaatttctgttttgtgattcccatttccttacattgccagaaactacttgtgaattctccttgtgttat

SEQ ID NO: 1568 - DNA, 434 bp, Glycine max
tattgactgcacgcgactctgtctattagccgaggttccttgtggagccgtcacccggacaagacgctggcacgacgttattatctcctttgtggaccatgtatgacaagctgggggcacgtgaatattctttccatcaggacgtcgatgcgactgtgatcgtctccccatataggctatatctggacgggtattcgcgctatcctttatgtagccttgagtgataaggagcgtaccacatcccatgccacaaccattggtctatacatgcgtatcaactacacaatgtctaatgtctggatcagccctacattcgctatcaaagacaagggtctcgtttctttcatatgcaacacttactctcttccttcatttacgtcattggagatccactgtgcatgagtggagcctgatgatatacctgctcagcgccc

SEQ ID NO: 1569 - DNA, 625 bp, Glycine max
agcttttgagtgaaaccatgtgactcttcacttttaaatttgaatttcaacattcaaggacactggtaatcgattaccaaaacattgtaatcgattacagccttttgaaaatatttggaacgttgtaaattcagtttgaaaactttttcaaactcattttactactggtaatcgattacaacaatatgataatcgattaccagagagtaaaaactctttggtaaaggttttgtcaaaaactcatgtgctattcaaatttttgaaaaactttttaatacttatcttgattgagtcctttctttattcttgaatcttgagtcttgaatcttgatcttgattattgagatctttaatcttgaatcttgattcttgattgtaggctttcttcttgagtcttgaattcttcttgattcttgaactcttgacttgttcttgattcacttgagttgttctttgatcttttgagctttttggtcatcacctttgtcatcatcttttgtgtcatcattgttatcatcaaaacacctttgaatcattggtgattcatcatgaatctttgctttcacaatattgcctaccctgaataccctaacctaacctgtaccctgtatgcatgtgacctact

SEQ ID NO: 1570 - DNA, 520 bp, Glycine max
tatgctgcaaatatttacaatagacctgctcaacctcagcatttaaatcaaccacagcagagcaattatgacctttccagcaacagatacaaccctggatggaggaatcaccctaccctcagatggtccagccctcagcaacaacaacagcagcctgctccttccttccaaaatgctgctggcccaagcagaccatacattcctccaccaatccaacaacagcaacaaccccagaaacagccaacagttgaggcccctccacaaccttccctcgaagaacttgtgaggcaaatgactatgcagaacatgcagtttcagcaagagactagagcctccattcagagcttaaccaatcagatgggacaattagctactcaattgaatcaacaacaggcccagaattctgacaagctgccctctcaagctgtccaaaaccccaaaaatgccagtgccatttcattgaggtcgggatagcagtgtcaaggacctcaacccgtagcacctttcttatctgcaaatg

SEQ ID NO: 1571 - DNA, 603 bp, Glycine max
agcttgcctcaaagaggtccaggaaggacatgtgttttcgaaggaactagttccgctccggagtatgacagtcaccggtttaggagcgctgtacaccagcagcgctttgagaccatcaagggatggtcatttctccgggagcgacgcgtccagctcagggacgacgagtatactgatttccaggaggaaatagggcgccggcggtgggcaccactggttactcctatggccaagtttgatccagaaatagtccttgagttttatgccaatgcttggccaacaaaggagggcgtgcgtgacatgagatcctgggtaaggggtcagtggatcccgttttgatgccgacgctatcggccaactcctaagatatccgttggtgttggaagagggccaggaatgtgagtatggccagaggaggaaccggtctgatgggttcgatgaagaggccatcgcccagctgctatgtataccggggcaggatttcacccggactgttgcagggaggcgagtgcgaattatgcccaccaacatgacttccctgacccagatatggatgacgttggtcctctacaaccattctgccccccgatcataattccgacc

SEQ ID NO: 1572 - DNA, 353 bp, Glycine max
tagaacaaatattttgaattctaggtccccttagagattttgttaagatgtctgctagttgatcattagaactaacaaatttagtaataactttgttggatcaagtggcctatgaataattaagaaggggggttgaattaattattgctaaacctttactaattaaaaatttctcttctgagacttttactaaattgttaagagaatgaggagtgaaagataaacttaacagatagtcaaagcgaaaattaaatgcacagcggaaagttaaagagtatggaagaaggagacaaacacacaagagtttttatactggttcgacaacaacccgtgcctacatgcagtccccaagc

SEQ ID NO: 1573 - DNA, 601 bp, Glycine max
agcttctggggatcagcacctctcaagttgcataactttgactgcatcagtacatgtgaaagataaaacattcaacataactatggagttcgatgattaaaagctaattttctggcaataatagtatgattcagagcacaatagcattcaaaaaaataaattgttacatacacatgcacaagttgtatgtgtttgtcaagctaacaagtaataaactaggcaagtcaaaatttatgtagaaacacactgggatttctacataagaaacaactagttatgcttacagaagcatatgaaacagataatgtaaaattcaactcaaacacactcaagtttattaaagggaaaacatgctaatattacaaagaatttagactcgtgcagtcatgtttaaaataaagcttgaaatgctggaggataaaaatgcaaaacaaatagcaagtttagtgggaaacttatgccgctctttcatctttgggaacaaatttaaatacaaagcaacaaacctgcagcattatgggaaactgcccaaatttatattttctctaataataggcccatcattatatcgaagccaacatttatagtaatcttccctgca

SEQ ID NO: 1574 - DNA, 515 bp, Glycine max
tataagaacgaaattgcctcaatcatatatccaaatatgcatttgaattaggaagcatcaacaagaatcaagccaaggctattgtgcacgcaatcaatggggcaaaacacaccaaatgattatgatgatggatggctcaaattctcacaaaggtaaactcatcactttcaaattgagctttcaaaactatcatgacatgtacaggagaatcaaagatttcaagtcacaagatgtcaaaaacttttattgtcaaaacaattacccatttcttgaacatatcctatgattgaaagaaaaacatgcaaagtcgtacatgcgcacagaattgacccataatattaaactaaaaatgcgacgaaactaacaacattaacaaattaacacaactaacacattatcaaagccatgagaactaacataaaccaaagaacactccccccgatacttaaacaacacattgtcctcaatgtggcacaattaagagtattaaaacaattaaatcatcatatagaatc

SEQ ID NO: 1575 - DNA, 653 bp, Glycine max
agctttgatgatatggtcttcatcgacgattggttcaaagtgggtctaaaaagaggcaaatctgttcatcatgctttgataaatgcaaaaaaaaaactagggcaaatgaagaaggtgagaatgagggagaagcccatgctgtgactgccattcctatacagccaagtttcccaccaacccaacaatgtcattactcagccaataacaaaccttctccttacccaccgcccagttatccataaaggcaatccctaaatcaaccacaaagtctgtctaccgcacttccaatgatgaacaccacctttagcacaaaccaaaaacaccaaccaagaaatgagttttgcagcgagaaagcctgtagaattcaccccaattccagtgtcctatgttgacttgctcccatatctacttgataattcaatggtagccataaccctagccaaggttcatcaacctccatttctccgagaatacgactcgaacgcaacgtgtgcttgtcacggagaagcctcggggcgttccattgagcattgtatggctctgaagcataaggtgcaaggtctaattgatgcaggctggctgaaaattgaagagaatcgctcgtaaatcctgaccattgacagagatgccacacatgggtcaattttgaaagc

SEQ ID NO: 1576 - DNA, 509 bp, Glycine max
tctaaactttatacaagaatgaagctctgataccacttgttttaaagtggcctcaaatgtcttaagaagggggggttgaattaagatattataaactatttccccaattaaaattttatttcactttctattcaagttacaaattcccttaacaatgaacttcttaaatattgattcaaatagaacaatctgaatatgaatataaaacaataataaataaatgagtttaagggaagagaaagtacaaacttggatttatactggttcggccacacccttgtgcctacgtccagctcccaagcaacccgcttgagagttccactatcttgtaaaatccttttacaagttctgaacacacaaggacaatccttcctttgtgttcagaattcttttacaacaagagaccgtcggtctcttaatcccttagagaatttgaaagaagagaagaatgaatctctcttgaaagagatagattttacaatctgagcactctaatgattccttaatga

SEQ ID NO: 1577 - DNA, 553 bp, Glycine max
agcttgacaagtttataaggtcttcctcatagctgttctaagcaaaggtcccaaactgcctatctgcgacattacgttagcccattcacaatgtgcggacacaagtacgatgaaaataacattttattgcccacactgtggtccactaaggagctacctaatggataataaacttatagcgcttactgctaactatgctccttggaaaaccgtggagcctcacgctttacttgaaaaacaaatgcgacccctgtgaagcatcatcaacttttttacatggaataaaatgagccattttataaaacctatctgcaaccacaaaagtggaatctctaccattgcttgtttttggcagccccaaaacaaaatccatggattaatcaatgcaaggatactccggaattggcaatggagtatacaatgcatgaggctttaccttatactttgtctttttacatacaatgcaatgttcacaaaatttctgcgcatcctttttcatatgaagccaataaaaatgctcttgtaatgtttctagagtcttttggaccccaaa

SEQ ID NO: 1578 - DNA, 933 bp, Glycine max
  unsure (1)..(933): unsure at all n locations
cccaccacaaactccggctccccctctccatactttcacctatacccacatactctcaaccaccaccaccccgcaccccaccgctgattctccttgcgacctgaaaactcaactgggcgcggcaggagaatctaaaagagctcccgcgtcgctatttgttctcccgcacacgcgtgaagagaaacaccctactgacgagaggcataaatgtgggccaacagggaaagaccccgaataaacacgaaacttacttatgtcacatcaaacaacagatttctcaacactagcctatatgtgagaaagggcgggtcgccatgaaccatccggaagttccgcaaaatcaatgaaaaagggtgcgggcatgccctgctatagacaactcgtgaaaaacgggaaattacgacaacaaccgagatatttgtgggcaacatgaggaaatgcgcgaaaatgaaaccaatgacggaacctcggcttgtcctattgacttaaaaatatttgaaccataataaggcttgaatgatcttaggccacacatacccaatgggggcctggctctggcgatcagatatatataaagaaggaggccatcctaattttaggaatgaccgtaacacccggcctaaattgcgacaatggtatagtgacgtgcacaaagaacgagcaaaaaaccgcccaccgaaccctgagcaagggaacaagaaccacgggcaccccaactataattgttgagtacacgcacaaaccccaacccggggaccgagaataagaaaaaaatgggcggcgcgtctcncccaagcgacatatctcaanggtgtcgcccacacaagagactccctaancggagaactccctccgacacaaaaaccaccacacatctccacaaatcgcgcgctttctgtgtagnaacaaaataaacatagtgacaaggtccgn

SEQ ID NO: 1579 - DNA, 639 bp, Glycine max
  unsure (1)..(639): unsure at all n locations
agcttctatataagctgaaccattttatcaataaagacaagttgagttttattcagaaaattagagtttatctcttttatcttagcgagagtgattctcctaaattcttgagtgattcaagaacaccttggctgtatcaaaggactttcacaacctttgtgtgttgccctcgctggaaagagtgattctttccttcctttcatcatcacccttgttctttcaaaccacaattccagaaaatccacctctgcccagaattatctcgtggccataactccaattttaagcactcaaattaagtgattcttgagcctaaattgaatttcaaaacgagacctttcacctcgttttggaatcacctcatttggagccctgtagcttcagttattgccatttctatatttctgtccagccaccacttaacctacgttttaccatcccattcatccattntatgccaagaaccaccttattaagacccacganattagccaccttattttccatcctttccttaatcaatntcccgcatttccatcaagggttaatcctagacgatcctaagtcagcccttgtgccatgtgggttcatatcaaggtttaaaaaagaagcatcaccggatgacgccgatagaacatt

SEQ ID NO: 1580 - DNA, 389 bp, Glycine max
tggttcgaggtacttacccgttgaagatcgaagaacgatgtagaacgaatgaagaacgtcgaagaacgattgaaacctttgcgagattcctcacggaaaacgttacggaaacgtttcggaagcgcctcggcttagattttcttcacggaaacaatttttccaagcaaattcgaaagagagagaagtgcctaaggggctgaacccctttcttcttcacttcctcccctatttatagcaaaataggggaggtggttgccgcccagctcgcccaggcgagcagggatgcttcctacaaaagcaaccgtcttctggaggaatattacggagggcccaagtgggcctgggtgctatttgcacgcccatttttactaagtacactctcctctgct

SEQ ID NO: 1581 - DNA, 485 bp, Glycine max
agcttcaagaatcatgtttcaaagaatcattattcaagaataatcaagtttctagattcaatcgagtttcaagaatcaagattcacgaacaatcaagatcaagattcaagaatcaagagaagactcaatcaagataagtactaaaaaagtttttcaaaacattgagtagcacaagaatttttcacaaaatcttttaccaaagagttttactctctggtaatcgattaccagaaggtagtaatcgattaccaatatagccaacattgttttcaaaaatgatttacgaaggtgtgatcaattaccatgagcatgtaatggattaccaatgttttaaaatggtagatttcatatttcaagagtcacaactagtcataggatattttcagatcattttacacttgtgtaatcgatacacgatacttgtagtcgagtaccagaggttctaaacattctgattgtcaaatttaaacatgaagagtcccatc

SEQ ID NO: 1582 - DNA, 837 bp, Glycine max
  unsure (1)..(837): unsure at all n locations
ccctttgatcctttgctattcngtgacactataaaatctcccgcttctctgataaaaccttcttgagaaactagagcttaacttctctcacccttataaaaacgaaaccttaacattccttgaaaaaactttcattgtgaaatcttgagagttaatcgcccccacccccattttaaaactgggggtttcctttcttgtgccggtgttccctggaaattccccataaaagtgtccctcctctagaaaactttttttcaaatgcccggtaaaaaaaggtttaaaccccttttttctataaaggggccaaattcaaggggccaaagaaagggaaaacttttttttttttttgcaaaaagagaagggccccccctggtgccggggcgcaaaacacccccccgggttatttggaaccccccggggtgtctttttatgttttgtacaaaacccctttgtgtgttttttttccaataaccccggggggggggagggaggtaccccccccccccggggaagagaggggcccaataaacccggggggtgtatatttggggcggttctcctttccccctgttttggaaaaaaaaaacaaaatttttatttccgggggtgggtggtataaaaggaggtggtcgttataaatatccctttgtgtgagatgctttcctggagaggggggcgtcgtccttcctctacatgggaaggggggggcactttgataattaaaacgtggccccttttccttgtgtgagtgtggggtgagcgcccgctttttttttatctttttgtgggtggtggcgtcacgtaaagactaattcttatgctgggggggggctgggg

SEQ ID NO: 1583 - DNA, 593 bp, Glycine max
agcttcttatccaaggctcatcttggtggtgaagctcctccttccatggcttattccttactacaaagactactcagaatgccccgaaatacaaggctaaaaccctatactactggaatgaccaaaatacaaggcccagacgaaggaaatacctattctaatatttacaaagataagcgggctcatacttagcccatgggctcgaaatctaccctaaggctcatgagaaccctagggccttcccttggatctctagcccaatctacttggtgtcttctacccaatgcccttgcggggtaggattgcatcacttcatattattctccatgtatatcctccattttcttgtggtttggtgctgtttagagtagattcaaaaaaataaaccgattaaatcttagatctacacttgttcttgcatttctatggttcaaattttgtagatctactcttgaatcatgtttttgtgttgagtttacgttctatcatttttcattcataatattcttgtgctgaaccttagatctaatttttctttcaaatattgattagaaaaaaaaacacaaaatctaagtgtaatcacttaatccatg

SEQ ID NO: 1584 - DNA, 425 bp, Glycine max
tgtgcacatcaaggcactcccgcattatatctctagcattctttgtatggaggcctcgtcctttgtcacgggaagccggaaggtccatatcaccttcttaattgtacacatggggcactgcaccaccgaatgcgcaagtaataacagatgatatttcgggctctcgtgaccgtgcaatgcattcatatcatgcatggcatagacatctcttcataacatcgtaatggacagtatcctgcatttgtccgctatcatattaccgcctcacattacgcatgatacgtgggatcaacatgcatgtgcattcaaccatgctctcgatctggacaaatgcataccatctgttaacatgactgctcatacttgcgtttccctctaccacacctaaccaattaacgggggaagcgtgacacttaacactacat

SEQ ID NO: 1585 - DNA, 580 bp, Glycine max
agcttgatgaaaaacagtgcttttctctttgtcttgtcatgtgttaacatttttgtgatctaattgaaaagcctgttattattattattattattaccacttgtttgtcttttcacaggtctgtgattttggtctgtcacgaatgaagcaccatacatatttgtcatccaaatcctgtgctggaacggtaacttttcagaacttggatataagcttttggaaattctgtttttactccttattcaccattgatataaattatcaccatagttggtttcattgtaggatctacaatttttacaataaaaaaaactaaatatatcttttgcctgcagccggagtggatggcgccagaagtcttgagaaatgaaccagccaatgagaaagaagttaattctgcgtctgtgtcagcttcatggaaatatgattttgaagttcgcaatgtgatagttaaagtttgcatgcacgtgtgatgtgtattagtttggtgtgatcttgtgggagttaactaccacaagaattccctggcaagggtttgaacccatgcaggttgttggagctgttggatttaaaataaacg

SEQ ID NO: 1586 - DNA, 396 bp, Glycine max
ctctcgctcttggcccttgtcctgactggatatacccacactccccctttttaaacgactaatcatactctcttgcacttgacaaaaggggggagagtgtaaaattccattctaagatgtaacatttgaccatgactagagctttgcctatcatatgaagattggatgggatatggaatttctcctttatatgagagatacccttggttcttgggcagagaactccccctcaatattatgtgagacaacttgtagagatcaacctatggcttatcgctcccgttctcatatatttctatgctgaggcgtcttagtacctttctatatcagcactatacataattgttacattatgatttctttaaggagaggcatccatgacctatgatggtgttc

SEQ ID NO: 1587 - DNA, 548 bp, Glycine max
agctttgcataccccaaggatccattattattttacttgtgaaagagagccatgagggtgggctcatgggccactttgggatagaccagacccttgtcttactcaaagaaaagttttattggccccatatgaagaaagatgtccataagcattgcactaggtgtgtggcttgtttacaagccaagtctagggtgatgcctcatgggctatacacacccttacctatcccatctgcaccttgggtagacattagtatggactttgtccttgggcttcctagaacccaaagaggtgtagactctatctttgtggtggtggataggtttagcaagatggcacactttataccatgccacaaggtggatgatgcttaccacatctcaaaactctttttcagggaagttgtgagactccatggtttgcctaggaccattgtgtcagatagagatgctaagttccttaaccacttctggaaaaccttatgggctaagttaggaactaaacttttttctctaccacttgtcatccacaaactgatgggcaaacag

SEQ ID NO: 1588 - DNA, 485 bp, Glycine max
ttgagtgaaacttggtggtttgtcaagaacaggacgtattctctgtgagacaaaccaatataaatttcttgtgtctcattcttattattttctcttctactatttaaactaacccatggtttgaatttgatcttttgtgtttgaaaaattccgtttgttttacaaagatttgaaactatcgtctgatttgctttgcaaaagtctgatatttgttttcttaaggcttgctcatctgatgataactttgttatttacgaaaagaatttaaattttctcaaaatcccaacctttttatgatatttgtctctacacatgtttaactctattttgacctgtcatgggcctaacatgtttctacctccctaaatgcgtatttcataataaaaaaattatatagggctatttccatatttaaacctttgagttatatttatatttaaataagaatccatactttttgtccttttaaatatacctttttttgt

SEQ ID NO: 1589 - DNA, 532 bp, Glycine max
agctttgtgaggtccacaataaaagtggagctccaatcaatgctacctctcaagtaagatttgctctttcttcctctataaatactggatcatggttcagtgcttggaagcatagcagcatcatacaaagcattgaattcaaaaactaagttcatttcttgtgctttgctttattcctcaaaaccaaacatgtcgaacacatgcggcaactgtgactgcgctgacaagactaactgcacgtaagtgcttcatttgttttctgcatttgtgtgtaaagcaagatttacatatatatatatatatgtagttcatgttacaattagtcaattaccatatttgatctctaaaggattaatctgtataggacatatattatgcatacagtagactgaggtctgatgtatagcttgcatgatacatataaaggctgttttacttatatccttacatactatgccatgcagcaagggaaacagctatggtgttatagtagagactgagaagaggtaaaagttcactttttgtatccatt

SEQ ID NO: 1590 - DNA, 980 bp, Glycine max
  unsure (1)..(980): unsure at all n locations
ccgctcccttcactactctgttaccctttatcctctatctctttcttattgtatatatctcatccacccaccccgctgatcttctacgcacaaaaaacaaactcccatttggacaactagggaggtgactcgcttttttggtatttgaaaaaaaattaattgcttttaaggtgggaaaaaaccttcctgcctctgtggaacaggcaaaaaatattctatataacaaacggagagagcctctgacataaaaaatcttttgatgacatgaacaaaattttgcctagggcccgacggggggatttttcccaaattccaatatgccccgcttattaattaaatgccccgtggacctccttccccctatatatcactttttagatatactggaggaaaaagggggcgtacccgaaagaagaaaaattgctgatgcattttcgtcaacaaagtgtctttgttggcagccgcctcctcgaaatgcttattatgtaaacctttcccgaggaccctattcccggataagaacacaaatggtgtcgcctctttattataggcaaatatacgtgtgccaaatatccgaaattgtgggtcaatagaaaaaaagcaggcttccaaaaccaggtggaaacaacggggatagggaaaattttcctactatataccccttgcgagggggggggggtatctggggcaccttaaagattcggcctctctctggtggtgggagaagggtatgtaatcacacgggtactcctggcaccaccttcctcttgtgttccactaattaagaaagagagcgcggatatacataccgctttacatcacttctgtaaattaatatagtgtctctcgggatgcagaaacgacgtcatacacattgttgttctacagtaaaagagcgacatatgtcctataatatctctcgtctccactactacctagaaaagccgctctcacaacnatgtggtgatagtatatatcgn

SEQ ID NO: 1591 - DNA, 557 bp, Glycine max
agctttccacaaagagggctagaatgaggtcacgggggagggctccagtaccgccttgaaatttgatagtcaccgttttcggagcgccgagcaccagcagcgcttcgaggccatcaaaggatggttgttccacagagagaggcgcgtccaactcagggaagatgagtatacggactttcaggaggagatagctcgcagacatcggacttcgctggtgactcccttggctaagtttgaccctaagatagtcctagagttctacgataatgcttggcccacagaggagggagtgtgagacatgcattcataggtgaggggtcagtggattccctttgacgcaaatgccctcagccagttctgggtgactcgctagttctggaggaaggccaacaatgtgagtttatccagaggaggaacagggccaacgggttcgacgaggaggccgttgcccaactgttatgcacaccggggcaggattttgcccggaccgctgcagggatgcgagtgcggatcatgcgcaccagcatgaccactttgacccagacgtggatgacact

SEQ ID NO: 1592 - DNA, 439 bp, Glycine max
ttgagccaaaatcctgactcaccataaaccttgacccgggttgtaatgtcaattcttaccctcggaagcaaaaaaaaaggggggagagggaaaatttccaatcaaagaggaagcacaaaaggatagatggaaaatttccaatcaaaggaaaaaaagagaggaaagggaattcccaatcaaagagtgggagaaagcaaaaagaaaagaaagaaaattcccaatcaaagaatgggagaaagaaaaaagagaagaacaaagggaagaaagttcccgatcaaaaaaaataatatgcagaaaggtctttggaccggacaatatctgaacaatacagaattgtcaccaaatgaataaaaagtaagaaagggagccatgacctaaaatggtcttccccctttagtagccaggcaaaatcttgtgcgctagcaacctttttcgccct

SEQ ID NO: 1593 - DNA, 594 bp, Glycine max
agctttgcattaagatagactttgtacattttaatactttctgaggtgttgattaaaaaccatttcaagagacttgattatttcacaatgatcaaatatctctccccctcaaccagtcttcctatttataggcaacacactttaattttgaacatcttggtgctagtaactagagtatgtagctaactaactaagtaatggatatgtgtgaatactcgtgatgatcatttcagagttttgattctcatgcgtggatttttctatgggttgaaagtaagtatcttatggtatttcagcatctcaatacacatgttacttaatttctacaacctttcatgcactgttcagttgataatgtctatctctatatatattgacatgaaaatatttaacctttaaggcatttccagatttttgtgttgagaaatatagttagagctagagagaattgagtgaaagtagaaagggtaactaattacatgtgtatctaactaatctccaattaaccacgcgtgttaattggtgagtatgtgatttgcagttgcattttgattttcttctgctccatagacctctggtgcctcattaattgct

SEQ ID NO: 1594 - DNA, 303 bp, Glycine max
atttacggacctatgatactcagcttctcacatttgctctctacttatggatgtcccatccttcatttgcatggatattggaaaaaaaaattcaattgctttttgtggtgggaagagtccttcctgccatggtggaaagggaaaaatttgctcatataaaaaaaaggttgagagccattcacaaaaattatgcttttgatcacgtgacaaatttgttcctagtgccctacgtgatcatttctccaaagtaaaaagcgccggattataataaatacggggggacttctcgccccaataatctct

SEQ ID NO: 1595 - DNA, 691 bp, Glycine max
  unsure (1)..(691): unsure at all n locations
agctttaaaagttagggtcacttataatttaactcattgatttgccgagaaaactaatgaaaaaacgagagtgtgtaatgatttttttttttgtcttgtatgaacatcctttagtaaaatgaacatttctctctatatgattaactttggattttgagtcataccttatccaaaactagacatacatgactttttatacaggtaaagtttataaaattttgttatctaataagtataagttatgcaatagttttataaatactctataaaaggaaaaaaaatgaaaacttgagtattaatataaatttataatccgataaatatatttatgtataaatttggtttgggttggattagattgaattttaaaatcaaatccaaaatctgattttatccaaaacaaatgggtttattaaattttaatttgttcgactattggtttatttgattttcagttntttgcttgatttattcataaagttatttgataaaattagtttatgaacattcctaagaaaaccgataaagtaaagacatcanatgtacaattaagtctattaactagtaaagtacgcctttgttgacanatctacagtgttaaacattcgtagattaatatgtatagnacattctttgcctattgattcttaatggacatctctcgtactaattttttcagtttaaggaaaag

SEQ ID NO: 1596 - DNA, 565 bp, Glycine max
tgcactgcccaaagtggacaaccttccagaaaacgttgaagccaccattgatgtcccttatgatgtcgttcagtatctcaaaaaagcctacgatgatttggaagaacccttgacctgttttctcaaatcttccaaagttgattggcatttctatgacccatatatgttacagttaccaaaaaggttcaaagagaaaaccaaatggtgtggaatagtaagccccggttgggcaccatagttgaaggtattgagccacaaggcagttggtggggttttgactcactctggttggacctctgtggtggaggttgtttagaatgaaaaacctctagttttgttaatgtttcttgcagaccacggattgaactcgagggtgttggaagtgaagaatatggggtattcaattcctaaggatgaacaagatggatcattcacgagtgatgcggtcgctaacttaataaggttggttatggttgtggaaaaaggaaggatttacagagaaaaggtttaaaaggtgaaggatttatgtctgaatattgttagacaagaaaaatatattaacaaa

SEQ ID NO: 1597 - DNA, 562 bp, Glycine max
agcttcattggaaagaaactaactttttggttttatttaaaaaatttgataattatatcaattataattatatttctgtcattaattgtatttattaatggataatattgtttattaaacttgttatattacaacatatttaatttggttttatttttaacattgattattgtatgttatgagtattgagtaatgagtaatggcatttataagtgaaatttaaattttaatattatcagatcatgaatattaagagggcgtgccctggtgcaacagtaaagttgccctttgtgaccagttgatttcaggttctggaaatagccataaatactatgttttgttttgcttaatatcgcttgacatattatattaaaaattaaaataaaatgtgttaactattacaggttccttggttatatcattaaaccttaaagttgccttcaccagtttaataaccagtcctattttaaaaccttgcacttgcttataatataagggactgaagtaagatgctgcttgccatttagtagataatatttatgactgaaaaccctaacacgtt

SEQ ID NO: 1598 - DNA, 514 bp, Glycine max
tatagctggtaccctcaccaccctcttctgcctcatttttttgttgcaacataccaatccaaaacagaatacatcagaaccatacatcacaaatatatataataaaaagagattcacacacacatatatacctcttctttgaacaatggcatcggctagaggaactgccacacttggcagagcccaagttctcagaactacacttcctcttcaacgaagaggacgaaagtggaggctttcccccggaggatacctgagagagattcgtgatctgaaaagccgtggacggcgacgacgagcacgggtgtttagtgtctgtgtcaccggcggtgagggaggagacgaacgagtttgaatatgagaaattaatggtcttggaagagtcctttctctcaattttggggaccaatgagtggtaagtgacaacaccgtgagtgtgaaaggtgggtggcgggatctgctgcaccgacgtatcacggtacacactgggtttcgcatgtggaggagggggagc

SEQ ID NO: 1599 - DNA, 561 bp, Glycine max
agcttgagatgaggaagtgttgaagggtgattcttcctgcttttattgttgaccacagagtggtacctggagatatgtcgcaggggtcaggagaccttggggacgtcaggtggggtgctattgcccaaaaccaagcttgaccaatcccgacccaacccgggcatagtcggtcagtgagaacctgggatgtacctaagcaggcgagctcctggcagtcaacagataaaaggaaaacaagaccacaaagcaaggaggcttgtggtggctggccagctgtgaattttgtgtaatatgtggattgtggcctctggtaatcaattactaagggtgggtaatcgattacaaggcttaaaattgaagacaggaggctaagatggtctctggtaatcgattaccaggggtgtaatcgattaccaggcttgaaaacgaagttaggaaacttagggagcctctggtaatcgattaccagcctgtgtaatcgattacacagaggaatgggtcactggtaatcgattaccaggcatgtgtaatcgatacacagcgtatattgcattttcatgt

SEQ ID NO: 1600 - DNA, 367 bp, Glycine max
atatcctcgaatcgaacctctcaccgaaatgttatatcccttaaagcctttaaccaacggacttagaaaaatcttaatggctgagagtaactgtgaccgcggcaaccacatgccacccaaaattgccaacacattcatactccattgggagctccccaaaggctaattcctagcgtgtcaatagggcccttattacaacttgaactacacctaactagagccctcctttttgattaacccaaaacatatttttggtcattcaactctacaaggattgtgccattctttaaacagacttcacactctaaaattgagaccatgtggagttatttagacctcctccatttgggccatgagacaactcaca

SEQ ID NO: 1601 - DNA, 602 bp, Glycine max
  unsure (1)..(602): unsure at all n locations
agcttgcttctacaatctccccctttttgatgatgacttctttcgaaatcaagaaacacacacacacattttttcctagtcgatcactcacataaatttccattctccccctttgtttttgaatttatgcttcacttaaaattaagtttattactcatctgagttcttgatttaatccctatttctctccccctttggcatcaacaaaaagccaaagtgcataacaagtatgaaacatacaaatacaactaatcattcacacatcaatcatggaaaaatataaactaatcatgaagcaagaaacatgactagatcaaatatatagaaaaatcacatagtcatataacataattcataattgttcaaacaaaccatgcaaataaagaaatactaaattgttcaaatgtcataataatatagccaaatacacggctggaaatcaaagtactagtaatattaaaataagagaaaaactaaaataatggtggcgacggtggtggtagatcaaagcttgaacgaatataagagacatcttcttcgactntggtgattcttgactccatctcattgaagcgcatgtccacttgtaactccaaagtatg

SEQ ID NO: 1602 - DNA, 927 bp, Glycine max
  unsure (1)..(927): unsure at all n locations
caccacacctctctaattctccttgtactcacactctctttctcatctactactgntagtatacaactaccgccgtaatcttccctcaactaaccactnacnccaccagcnnnttttgattcgtgcccgtatcagcacctacacaactctcaagcttgccattgtacatatgtgcaaaaataagaaaagggatatatactttcttacaataaaaaacacaggacactcgggtcacattgatcccgacgcaaaaataaaaaccaccactgtgggaatttccatacctcataatgacgcactaaaaatatagatgatgattttcaaacttttttctttgactctactctcacctgcaaaatcgaaattgtgctgggagatccgaccattacacacatgtacgttctaatatttatgaataaaatctctgccaccaataaaagagaaaaccggttataatatgtgccactaaaacatgaaagttcccatattatttctctaatatacagaatatgacccatattcttttggaaaaatcgctggatgtaagaaaaaaagttaatagcggcaaaagcgcgttgaaaaaacctttttattgaggtgctctgaatagctgttagcacaaaatatcaacaagattgttatccgaatgacggggaaccaaaatccttgggtaaaacgcgaaggactaggattttggggaaaaacggataaaggtcacccttacaaaaaggggtcaaacccaaatcataaaattggcctaatgatgggaaaacaagtccgattgtgaattaaataagggcaacaaaaacaggggagcgcacaacatatgccaaaaaatgtgcgcccaacaacacacaactttagttaatcgtaacaaaatgcggggggtatgccttttcacgaccccttaacaattgaaaactcccg

SEQ ID NO: 1603 - DNA, 571 bp, Glycine max
agcttgttaagtaatacttcttccttattacaaatatgcatcactgattgaattatttaagaagtctgatcaagcttcatcaccctctcttattctgcattatgagaacagtaaactacttttccttttaggtattgcttcaaagttcaaatgcctttctgtactgctttgagacttatatttatagcctgatttggcatctataaaaatgaaggaaaaaaaattatctatgcaacactaattaatcttctcctttgtttaggaaacacaacttcaaagtgtctcactcattgaagacaaagtcctattctaagccatgggtggaagaagacaaagaagtcaccatggtttcacacatgcccttcaagaaatattaaaaccatggctgagaggttaaatattgtattttcttcattccatcatgattcttattctcctcgagcctattggttgaactttacataatgaaaattacatcattgtgttgtatggctatccctagccttctgaagcatatccaatgtcttactatccttagaagttctaatgaggaaaacttgtcatcacattc

SEQ ID NO: 1604 - DNA, 564 bp, Glycine max
tgaacttccggaacactctcgcatccatcctgtgttacattgttcactattgaaacccttcgtgggcttggctgatgcagtaatagcaaaaaaacttccttccgaagtggaggataatcaacccctcacgacacctttagctattctgggccagaagatggttcccacagaccaagggcccaaacgcatggatctggtacaatggcaaggcctgcatccggatgaaacatcatgggaagagtgggcgtgcctttaggaacaacatcaccttgaggacaacgtgttatttgaccaccgcgggtatgttacgaatagcaactgggagtcacaggcctctaggcccacaagaaggagtagtgttcctgtgtacttgaaggactacgagctttatgtttgagaggtccccgtgagggagcacaacacgaatggcgttgggggtcattctaacaacttacgggcgttgatgtattcattactataagtcgacagggtggtatgcaactacctgcatgtataagagccaagaacgaccctttgaagaataaagaatattgaataataata

SEQ ID NO: 1605 - DNA, 561 bp, Glycine max
agctttgaggggttgatggggacccggtgctgataggaacgaggataagggctacgtaggagtgcgtgagctcaagttaaaggtgggcaactggggatggtgtgcttatgcctgacttgtggaaatgggatagttgatttgcatcatcgcccgatcgccacctagtaccacatatgacgggtgccccataatccaataagcttgatgtgagaaagcgtggaagagtcagtcttcctacttttgtttgttgaccatagagtggtacctggagatatgtcgcgggggtcaggagaccttggggacgtcaggtggggcgctattgcccaaaaccaagcttgactaatcccgacccaacccgggcatagtcattcaatgagaacctgtgacgtacctaaacaggcgagctcctggcagtcaaccaataaaagaacaaagtccacgaagcaaggaggctttgtggcggctggctagctatgtatcttggatggaatctggaaattagcctctggtaatcgattaccattcgtggataatcgattacaggtcttaaaaatggagaca

SEQ ID NO: 1606 - DNA, 926 bp, Glycine max
  unsure (1)..(926): unsure at all n locations
ctaccctcccttcactgatcctatcactatctattacttcctactctcttattttcctatatcttttanttattactttcctnccctccgtctctacgtgnnttgtagtgcctctcttacgcgcactctatatactcacctcgtgctgttctaagggtataccatagaagagcccaggagaattctacattgaaggacctgacgaacttactgagtctgggggggaatgaaccgattatacagaaaaccattggagctaatagctcacgtggacctgaggaacatgctatttctgtgagccctatatgtaacgtttacccaccatgctcaaatgcaagacactttggggggaaaatcgcactgcactggatcggcacgcgtanatatgacgccctgtgagcggcacaaggcaaattgctggacgaataatgagctgcagttccagtatagtgtctctctggtgtgcgtgaccgttgggcaaaaaaagaagatacccacacctagtcgaaatgatttttgccaacttcagcaattgcttttcggtgtgggattctttacaagaggcgggtctcccttgggtagtgttgttccccatgggctacaggacattttttccgctttctttgtacaaactgagcatttgggccgggttcaaggcgggaggacaggtgaaaaagtaaaacagttctttggccaaccctcacgtgtcttctagccatatattcttttcatcaagcaaccacatttgggggtttgatccggggaataagggtcacgtaaaaaacttccttccacacgctctatcaacgggggtctcggatgaattacaaaaaaggtctcactgaacctcttctgctaccaaaggggttgaagatggccattgaaaaaaaattttggtaatattgatatcataacccaccatctcc

SEQ ID NO: 1607 - DNA, 540 bp, Glycine max
agcttgtagggttaaagtctcacgattgtctcgtgctcatgcaacaattgttagacgtggctatacgagacatcttgccaaacaaagtcaggttcacgataactcgcctgtgctttttcttccatgctatatgtagcaaagtgatttatccagtaatgtttgatgagttggaaaatgaggccgcaattatactgtgccagttggagatgtattttccccctgctttctttgacatcatgattcacttgattgtgcatctggtcagagaaatcaaatgttgtggtcctgtttatctacggtggatgtgcccggttgagcgatacatgaagatcttaaaagggtatacaaaaaatctatatcgtccggaagcatctattgttgagaggtacattgcagaagaagccattgaattttgtttagaatacttagaaaaggctaaagctgttgggcttcctgagtgtcagcatgatgacaaagtgggggtaaggggtcaagaggactgcacgtgatcacttcaagtgtagaagatttgttacaagc

SEQ ID NO: 1608 - DNA, 453 bp, Glycine max
taacatgtagagattggaacacatcatcgaaagtatcccatatggaatgtgctcggttctgtaagttaaggaggttgaagtataacttcttaatggtccttttgaaaaattgcatttgcaggtgcaagaaagaaaaggactacctatattagcatgaagtttaggcgcttcaagaagctgagacttggctttgatatgcttatgaaggatagggacacaggctaataaaactagtgtcgagcaagagtaatgttataaacaatcgtgcagattatcttcatgtattcattatgaatagaaaggggtcaatccttagtgacaccctgatattcgaatattagaaacgtgtaatttgctaagatgaaattcaatcttgacgatatttcatctatgcagtagtttgcggaatgttatgactttggtgatttgatcggtaatacactaaaatggggg

SEQ ID NO: 1609 - DNA, 468 bp, Glycine max
agcttgtcgtcattcatatcgcgtgaatattctcatcatcatacacaaactacatcatgaaagtactaatgttcgctatctttgcttcagttcttggtcatcccaaatgcttccttatttgactatttattgctaatctgatccttattcaagtttttttgttctcttattagatcttcctataatttggattaagtgtaaaaattccttatttatctattattcatttgtttcctgatgtttgttcttggtgtgggtaagtgctgcttttttgagaatgaagcttcctttaggtgagattcaccacaaagttcctattctatgttgaggattaatggtgctgaacattaatgcataagagcatctcaaatattaaatcttattttcaaaccttaattatcggtggggtggattccactaattcacatcattcttagaatgtcttttatttttaactttaataattta

SEQ ID NO: 1610 - DNA, 524 bp, Glycine max
aactctgctttccaccaatcttcgatctctttcaggatcagaatagggttgtttatgaccgggaatcgattggtgatttggatccctacgagtatcaactggtgctacaatgtgacataccagactctttaaatatgtctaagcgcatacttccttagtctaaaactgactaaagaaatgtacttttagttgagcaatgtatccttggtcatttcttatgaagactatatcatctatatagaccaccgagtaagaacatctactctatgacgtatgacaataaaaaactgaatggactgcttcacttcggtatatcccaaaagcctgaacagctgagctgaattttccacaccaagcacgtggggattgtttgagtccataaagagacctccaaaatctgcaaaccaagctatactccccctgagcaacaaatcccggggttgctacatataaatcggctattctaaattcacatgtagaaatgcatttttaatatccaactgatacagcggctaaagacagat

SEQ ID NO: 1611 - DNA, 521 bp, Glycine max
agcttttatttaaaataattccatacctctttatctttatcaaaaataaaaactatctcatatctgttattttaagaagcattctaatataggacaaagataattcataattagccgcatgatcacatgatctgatcctattatgtaacaatagaatattattgttattttatggacaactttgacatttataaaataatactcccttggcagtattaattatattcttggtgctagcgaaaaatataataatattccactagaatatttatgtggttagatgaaattctgtaatttaattatcaaataaattattttgttttgcaaagattataacactcatttgtatgtgacctcatatgttcaatactacacggataatagtacattaatcatcattaatttactagtcaaggtgagcatctaacaacactccttaacgtccggatggtatgaagtaacatcttgtacttttcaagaaccaatgaaagaataatataacgttttcttccatcatttat

SEQ ID NO: 1612 - DNA, 465 bp, Glycine max
tctactcatgtggcagggcgggcttccttcactttcttgccttatctgcgagctttgaccaccgctctttcttcccgcgatgcttctctttatatccacctgagagggtttatagcctaaaccatacttcccaccattacctttggcatttatcaagctagctatgccgtcgatgcctttgcctaaacccattccgggttcggaaccggtccccaacataacacgggccatcattactgatgcatcggacatgcgagcttgcccagagaaggagtccacggaggaaatgcttaccacctcacatgactggaaagcggtttctaatgactcctctgcggcttccacataacgcatatatgatgggcagatcaccaagatgtcgtctattcctgatacgatgaccacatgccctttcactactaatgtcaacatttggtggagcgaggagggaacaacccccactga

SEQ ID NO: 1613 - DNA, 579 bp, Glycine max
agcttgtggatcaattattagggttcaatttctcgtgacatcacaacagctcctccttctgtgtctttttaatttccatttgacattacaacagaatgtacttggctttgaaacttagctagccatcgtgattttccaataaattttctcctgcattttactaagcttatccgagagtatttgaaaatcttcttgaacactcttacccaattgccagaaaaattacataaatagaagaaataaaaaaggcttaattttcttaaaattttgctccaaaattcccttccactgtacccgaatgctaatctgaacctgtagggtgccaagttggaaactttttccctgaaaaatgatggggttatcagaattagaggagctactgcttcttcagtggcacccagaatctgaaaaacagcaacatgttctgtatcgaaagatggtaatgcctctgttgagactgatgtacctttccctgctgattactctgagcttctggaacaagtaagtgtttcattgtccttcctttgcaccaatcttttggttcattgcaacattcaactttgatattgatggaccgat

SEQ ID NO: 1614 - DNA, 229 bp, Glycine max
accacggctttagatcatatcttcgatcgaaagtactcttacagcgccgtcttgataagctgcaactcttatatgtggtgggccaagtctatattctgtgctttacgttgggatacttagcattcctgaccgtaaattctgacccttttacaatgactgtctaaaataaacataaattcgcgaccctaagtgaccaatatgactcattgggggactacagatacatata

SEQ ID NO: 1615 - DNA, 548 bp, Glycine max
  unsure (1)..(548): unsure at all n locations
agcttgtcacttgatgtcaaccagtctgctacttgttctcttgtcatcttccattatatttagcaatttggaaatttattgcttttacaccaagtgatgtttcatagtttagttattaacatctacgatcaaactttatggttagcataaactggaacgctgaacaacagtaggtgttggctttgggttcatgctttctgatagaacaagtactttgaagacatgttttaataatatttttcataattttgaaactgttttatttaagcttcagcagttgttgcttgctagtactcatgctatgttggttactctctagtctacttactactaatgttggagctttttcccatctatgctctctatatccagtatttgaagntaagagctctttaaaggcaatcctatacacattacttctatgaagcaactgtcggagctggtctttcaattggtagcactctacgtggcctccttgaaactggagacaaaatattacaaatcgaaggcatctttagggttgctttgatggggtatatctctttttt

SEQ ID NO: 1616 - DNA, 570 bp, Glycine max
gacacttgaaactcagcttccaaccaatcttcgatatctttcaggatcagaataaggctccccatgattgggtagcaatttttgatttggatccataggagtatcaattggtctacaatctgacataccagtttctttaagtatgtctaacgcatacttccttagtctaaaaatgactaaataaatgttcttatagttgagcaatttttccttggtcatttcttatgatgactatatcatctatatagaccaccaagtaaaaacatctactcgatgaggtatgacaataaaaaactgaatggtctgcttcacttcgttttatcccaaaagcctgaacaactgagctgaattttccaaaccaagcacgtggggattgtttgagtccataaagagacctccaaaatttgcaaaccaagctagactccccctgagcaacaaatcccggtggttgctccatataaatctcctattctaattccccatgtacagatgcatttttaatatccaactgatacagtggctaatgacagatggcagctatggcaagaaagagtcaaacaaaagtaattt

SEQ ID NO: 1617 - DNA, 531 bp, Glycine max
agcttgccacccagctcgcccaggcgagcagggttgcttcctccagaagcaacagccttctggaggaatcttctggagggcccaagtgggcctggttgctatttgcgcccccatttttactaagtacaccccctgccttttttttggtaattcttttttcgtaaagttacggaaacttacgaatttcgtaacgatacttgttttctttctgtaatgttacggaaccttgcggattacataatcatcccctttttgacttacggaatgttacggaacctcactaattatgcaacgatgcttccatttgatttccggtgtgtcacggaaccttacggattgtgcatcaatattttcttttgtttttcggcatgtcccggaatttcacaaattgcctaatgatgggtgccaagcacctcacaaggaccaaataaaagtcgcatgtaatcaagcaaaggtccccggacgaaattagggtatgacagttgcccctctttacttgtcttttattggagataaaaggaaagtaaagat

SEQ ID NO: 1618 - DNA, 408 bp, Glycine max
ctaccgttacttgtttactagtagtattttcttttctctctttgataacactgcttgataatatttgcaatcaaaagtacttctgcagaggcaattatgaaaagctgcaactcttatatatggtgtttcaattctatcttctgtgctttaggttgggatacttatcattcctaaccataaattcacaccctataacaatgactatctaaaataaatttagattctcgacccaaggtgacctatatgtccattgggggtctacagttacatatatgatgtggatgggtctgtctatatgccccttagataaccaacctaaattttcagtggccacccaaaggtcattaaatttctgggtatcttataatgaaaaaaaaaagatgccttcgattattaaatgtgcatttt

SEQ ID NO: 1619 - DNA, 603 bp, Glycine max
agcttgcaaaatctataattttaattgctttcttagttcctctgtgaatgcatcaggttttggtaaaaaaaaaaaaaaatttaactcattctttgccccctcccctagctcttttactttttgtcattgatctcaaggaccaggttttcaatgaggttatataaatttttacatgggacaatgtcatgacagtgagtaagaaggaattgcaaattcatttccttattatatttaattttctaatttcatgattttttcctacttgtaacaccaatatcaaattctctgggattcttgctcttccatgctttatggtggtatttaacataaccattttttgataatttagtatttttctgtacgattttatggtgacaataacattttttgtttcatgattgacattggaagcaagctgcgggatacaatcaaatcttttggctgtgtgcagggaattctgatctcaaattgtccacggctatgcagcgaaattcttgacaagtgaaccacccttttctacttgcattatctatatgcttcctttcaaggtttgtaactcgaatactacttttaaataagtaactgaatgattagtattgatca

SEQ ID NO: 1620 - DNA, 528 bp, Glycine max
tgtgcagttgtgctgtatctgggtacagattaagtacagactcattcctcatattcattcaattcaatggctctctactccttcttctctccctctcttttataccctccctcacatattccccgtcgacttttttgtcccaaggcttccttaagctcttcctcccctgaatccaaagcatcgcaaagtgtttcttctgcaacttccaccaccacttcccctaccccttcggttgagtctaggccacctgaccccgccttcaactatgcactcaccaaccctaacggcaacccaatcgtaaggattgttcgagccaccgagtcttccattgaaagggtatctctctacttctctgtcttaattctgaaaccgcattttatttaacttggttgagtagagtgcacctgttgttgtaaatggttggagggttgctaagaaaaatgaatattataacatgtcttatggcactgaactccttatgcatgaatggtgagatcttatactataatttatttatcaaaaatccgt

SEQ ID NO: 1621 - DNA, 619 bp, Glycine max
agcttgcggtaaagtaataacaaaactagacattttcaataactcacaatacaaagctttgtttgattctaccaagagaaataatcaaggatgtgcttaaaagacccacgtcaggaatgctggacctctttctacacaccaatctccctgtggcctcactgtaatgggttagcacagaaaatatactgtccatggcagtaacagcacttcgcttctcatcatcactcgcctcacacggctcttctctctccacttctgcatcccacaaagctaaaaaatcagtagaacccaaacactaggacaattactgggagaccaaaaggaactattacaattctgcatcaaatatcaagtttaaaatacattttaactttttttctttatttagcataacctaacatgatcaaaaagcacatgtatctacgttttgtcctaaaattatttttaattatgcgactaatttaattattatggttggtgaagcaacgcttgagtacgaagcactcacttgacatgcatgaataaggaaagaaaaggaagaaaaaaaaaactaaaccaagaaataaacctctgacatcaggttcgagcacttgctccaatgaacaaacgcgatcaatct

SEQ ID NO: 1622 - DNA, 543 bp, Glycine max
  unsure (1)..(543): unsure at all n locations
tactgtaataagaatgtttagcattaagtaacaatctacttgtcataagagttcaactgaccatatatattaattaaaacactcgactcgatattaatgccagctgatcaaaagaaggtaagcaaactgagcacgactgcatcaaattacttaatcaatttgatgcattattaatattcttagaagttgataaagaaaaaccaagtgattcaatcttcaacatatcatggtcaagtcaagtgggttgtatataagtgtttaatgtaagaacattttttcattataaaaaaaattaatgggatcatttccacacgaccttaaattatctgggatgacctcaactttttctattagagctaaggtaaatttaatattaatgtgacagtcttttccaataaattatgtgtatactacaaaggaagcggcacttaacgttacctaattccgatgtggaatgccgatggccattccagtacaattatatatgctacacatgctttattaataatccccaagtgttntcctttttaattgcgtaaaata

SEQ ID NO: 1623 - DNA, 616 bp, Glycine max
agcttcaaccaagattctctttcacctgactcagtgcttcttctccatccaaagctccaaaccattctctcaggaaaagaagccactgactcagaacctgatgagaacccaagaacgcaggttaggcctcatcctgaggtgttgtgtcctaagaagaacaaaaaaatctcaagcagtagaactaggaagaggagggagagcaagagtttgtcagaccttgaatttgaggagcttaaagggttcatggatctgggttttgttttctcagaggaggataaagactcaagcttggcttcaattattcctgggttgcaaaggctacggaagaaggaagaggaagaagaagaaaatgaagattgtgatgagataagtgttccaaggccttacctttctgaagcatgggaggttcaggaatatgataggagaaaaaaagagaactctttggtggaatggaaaatgcctgctatcaacaatgaaactgacatgaaagaaagtcttagatggtgggctcatactgttgctttcactgtcagatgatgatgcacttgtcataatccaaaaatttcttcttttttttttggttcgatatacattttctcgtcttttttaatttttt

SEQ ID NO: 1624 - DNA, 518 bp, Glycine max
tctgaatattcataaatagaacctcataaaaaaaaagataatttatcaagtcgtcacaaaaattacaattactaccatctcgattgatttacttacaataaaaattatcttgatgattgactactaaagatatttcaagcaatccatttagatcaagaaaagtaaatagtacaaaggtttttgatcgatgcattagcatcctcacctaacatttactatttgcccacacaatgtactgatagtaagcaggttaacataaccttcctagggtatatttgaaactctttttttcaagttgacaatattcccttataagaaagcaccaccagagaggtctagtattaggatatttcttgcaaacccagttagctagccaaagttgaagactctggtggatctgggtatagtcaaagatccctcaacaaatgagaacatgcatcaagactaaatactaaacaagaaaggagaacctagagaaagagaatatgccagaaaatagtttatctaaaaaggaaagg

SEQ ID NO: 1625 - DNA, 598 bp, Glycine max
agcttgcttctacacttaagtgtttggggtgattatagagaaaatgttggggggagttaaaacaaaatgggcttttcaaataaaaatccgacccactttaagtgactcagtacaaaaacattgcatttcattaagcttgcgtttagtgatcacaatccatatgttggatgcatgtgtatagtgcacaagacttactaagctcattggacgatagggcctttggatgcatatcaatgtgttgagaccttccacataaatttgaaacttcattccacaagaagcatgccaagcaaactcttagcgagattaacctatcctcagtaaagggttttgtaaataaataaacaagttgatctcctgtagatacaaaatgtaattccatagtacccttctaagtgtgatcccttatgaaatggtgttttatttctatatgtttggctcatgaatgcatgataggatttttagaaagatcaatagcaacaatattatcacaaaggatagtaatgttactctcaaataggttatagtcggcaagctgatgttaatccacaggagttgaaaacaaagacatgcaggtgatatatactctatttatgct

SEQ ID NO: 1626 - DNA, 512 bp, Glycine max
tttacaacctaagtattgtattctaccacttctatctctaaaaaaaatcaacggatttgtttaaggttgggtgcacatagacaagattatcatattacaaaagatgaatatgcaagttaagcactatctatttttctctcaagattttcaaaagtgttttgagagctttacaacttatgcaatattcgaatacaaagaacttgaatgtaggagataatattcagttcaaaatttgaagcttcaacaattcaactcttctggtatacatagactttagtagcaagtaactgttgtctcacaacgaccttcaaattgtgtctgttgctttgcatggagaaggtgttcattcaagcattaaatgcaagtcaaatcaacttgagcaacacctcttctgttgtaagcatttgtcaaatcaacttttacttagagcacgtgtacataatagtggaaaatctttttatgtgaagaaagtgtgtaaactcaaatgttctttactttttttcaactagaca

SEQ ID NO: 1627 - DNA, 609 bp, Glycine max
gcatgcaagcttcgaacgatcatcgcttcattcttgtttcgatagattatttcaccaaatgggtagaagcggcttcttataccaatgtcatgaagagtgtggtggtcagattcataaagaaggaacttatttgttgatacggactccctaggaagatcattactgacaatggcaccaatcttaataacaaaatgatgcaagaaatgtgcggggatttcaagatccagcatcataactccaccccctatcggccaaagatgaatggggttgtggaggctgcaaataaaaatatttagaagattattcagaagatgacagtgtcatacaaagattggcatgagatgttcccttttgccctgcatggatatcaaacctcggtacgaacttctactggggcaacgccgtattccttggtttatgggatggaagcggcgctcccatttgaggtagaggtcccttcccagaagatactagcggaattgggcctaaaagaatcagagtgggctcaaacatgctacgaccaactcaaccttattgaaaggaagcgtttgacagccgtgagccatgggcgccagtattaacaaaggataaagaacgcgttcgacaaga

SEQ ID NO: 1628 - DNA, 514 bp, Glycine max
tgcatgatttacattctctccctttctcaagaaaattcttatttcttcttgacatcatcaaaatcttcatgatatacattttctgtatacacacgcattaaaaactctttctctttgtatcaacacggtttatataaaaactctattcctgttcaaagatttcttttccgtttttcaacaaacactcgtggtttatacaaaaatttatttatatacactcattactcacacacaagaatttctttttacacattattttcacacacaaaatgtctccatacactttttacatataaaaactcttttcttttctttatatatagacatgacatttgttcacaacgcctctttcttttttctattcttagcgttatcatgattattttgttgggtttatttttacgacgacgttcctaaaggagaactctacaaggtttcggaattctcacaaacattatctacgataactaacacaacagtccacacaaaatgtatgctcaaaacaaaatatgat

SEQ ID NO: 1629 - DNA, 508 bp, Glycine max
  unsure (1)..(508): unsure at all n locations
agctttgagcaaattcaaacgacaataactctttactcggatgtctgattgagtcctgtaatatatcgagacgctcgaaatggaataccgaagctcagagcaaatttaaacgacaataacctttttactcggatgtctgattgagtcccgtaatatatcgagatgctcgaaattgaatgttgaagctctgatcaaattgaaacgacaataaatttttactcggatgactgattgagtcccgtaatatatcgaaacgctcgaaattgaatgccgaagctctgagcaaattcaaacgacaataactttttactcggatgtctgattgagtcccgtaatatatcgagacgctcgaaatggaataccgaagcgctgagcaaattcanacgacaataacttattactcggatgtctgattgagtccccgaatatatcgaaaagctcgaaattgaatgttgaagctctgagcaaattcaaacgacaaaaactctttacttggatgtctgattga

SEQ ID NO: 1630 - DNA, 232 bp, Glycine max
ctataaatctacgcttctacattaatttcgagcttttcgaatttccggacttttctacttcggtaaaagtgatgtcttgaattcgctcaggcttctgtttcctctccagcgcctctatctattacgggactcaatcccacatctcaagaaaaaactattgccgtttgaacctgctcagagcttagggattctatttcaagcatctccatctattaccggactccatcagaca

SEQ ID NO: 1631 - DNA, 532 bp, Glycine max
agcttttaacactttttgaatgaaaacttaaatgatgttaaaattccaattattcacataaaaagaaggaaaataagagagaaaaattaacaaatcctacataagtcaatcccaaaatatacctatacataacagttattattgacaggctgcagcaactctagactcttgtaaacttattttaaatgaatccatatttttaatagctctaggatgtattggaatctaatctaatgtaccttaatccaatatgcgctttctataaaacttatggatagacataaaaagtgttacacaaaattccagtttgaatttaatggagtattttcttttgcaagtgcaagttatttgttttgtttgtctctgtttttcttttttgttgtgttttggaagctatattcatgaataatttgtagaaggttggtttgctaggggccaggaaggagaaggctaacaaatcttatattggtttcttggctaatacttatcttccatcaaatcatattgttttggaatcgtatagatccatatg

SEQ ID NO: 1632 - DNA, 448 bp, Glycine max
tgagaaaacctaattaagcctgctgattcctttatggtctctgtaatttactgctgttgctaccttcttccacttgtattatatgcatttggcaaaagatcacctttacttgctttaccccacagattaatcaaaaagtgattgtggatcagaaaatcaaatcacttgcattgggtactgatataaatagcttcctcatcaaaatccggtgcccttcactttggccaaaaggtttcatctgttcaacatctaggctacgcagaattcccttttcagaacaagcattaatagaatggcctcctagaagattaatatcgctctctatgggatgtgggctgcctagacttataactattgctcacctcaatactttgttgttgaaaaagcttctttacttcttctaagttactatcaaaatcacgaaaatcttcctgaactttttgttgat

SEQ ID NO: 1633 - DNA, 510 bp, Glycine max
agctttcagctgtctacttggatgattctgatccatctagcatgtttgatgatgtgctgctgtgtaaggatggtaagagtccatctattttttatgctggccgtgaaccgtcaccatcgcagattgctgactcaggaggatctaatgggaagaaaacacgatcgaagaaaggttccaacaagaggacaagtgcaagcgcaacggtggatttatggactttgctaactcaatgtgcacaggctgtggctagctttgaccaaaggactgcaaatgaaacactcaagcagattaggcagcactcttcaccttatggcgatggacttcagcgtttggctcattactttgccgatggccttgagaaacggttagctgctgggacaccaaagttcatttcctttcaatcagcatctgccgcagatatgttgaaagcctacagagtgtatatctcagcatcaccatttctcaagatgtcaaatttcttggctaacagcactattctgaagctagcac

SEQ ID NO: 1634 - DNA, 367 bp, Glycine max
agtgtattaaaaataatgcgttaaacatgctcttttcaggctactattcatttaatggaattgaatcgtgatgcagcagcaagctctcattagatgtacaaaaagcatgcgaacgagtgaccttgccgtgtgcacctctgggactccaaccacgtgggtgatgggttggacctgtaaaatgcccagtcactgatgctggccttgcctaaaacgatatccgtaccttggcttaatcaggacactacgcctgcatctctatgcaccacagggcccacatgagcgaatgagcctgcaggggtgttcatgttatccttgggaggaatgatgtccttaatatgcatgggtattccatgcacaggtgaaagag

SEQ ID NO: 1635 - DNA, 564 bp, Glycine max
agcttatccttatggcttgcctccggacttcaccccccgtgccaccccggaagatttaagccaagcccctactttcgaggggcaactcccaccttatgacgactatcccgggcaagacgatgaggaaggagatacccatcttggccccctgctccacctcaaagatccgtccccccatgaactaccccaactgaacataatccgccatatcccggcctcacccacacccgtaaaagaatctgttcccttcgcggaagataagggaaagattgaggcgcttgaagagaggttacgagcagtcgagggccttggcaattacccattctcggatttagcggatttatgtctcgtgcccaacatcgtcatccctcccaagttcaaagtaccagactttgacaaatacaaagggacaacatgtccaaaagggcatctccggatgtattgccgaaagatgggggcgtattccgcggatgaaaagttgttggtccatttctttcaagacagcttggccggagcagcagtagcatggtataccaatctggaagcttccagatccgatcatgg

SEQ ID NO: 1636 - DNA, 749 bp, Glycine max
tcgggtgatctactacgcttctagaactttggatgctgtccaagcaaattacactaccacagagaaggagctattagcgatagcttttgctcttgagaaatttcgttcatatttgcttggtactcgtgttattgtttatactgaccatgcagctctgaagtacctgttgaagaaggctgaatcaaagcctagattgatcaggtggatgctttggatccaagagtttgatttggagatccgtgatcagagcggtacacaaaacctcatggctgaccacctgagtaggattgagcgtgcgcctgaggactcacccattcgggatgatttttcagatgaccatttgtacattctgtataagatctctgattccttccccactccttggtttgctaatattgtgaattatttggttgcttctgtttttcctcccttagcatctaaagctcaaactgataaaattaaaagcgatgctaagcattatatttgggataacccctatttgtggaagttgtgcaatgaccaggtgtcataccctaatattgtccggggaccattgtttgtggcctgcaaccttcgttgaccgcctcaaggacttaacacccatcgttaggtaattggaaggtttgcgacattcccagggcaaaaacaagctttgttgccaatcccgaaaagttcccaacatttctgcagatcaaaacaaccattgttgcacaatttgttaaattcccaacattttgtaagaaaaaaag

SEQ ID NO: 1637 - DNA, 523 bp, Glycine max
  unsure (1)..(523): unsure at all n locations
agcttgtagagtgtccatgttatgttcctataattcaaggactaggagacctccagaaaaaaggggattaaggagagcaaatttattgattgttattgcttgcatttctattacaatgattgtccatttataggcaccaaatacttattctagttccttctacaagtcctacgagggaggctaacaataatggattttggaaatatcctaatagaaagatatattccagcagacagaatatcctaattgtccatgttatgttccttttagtgcttgtctccttcttacctgctagcaattcttctgtgttgggttgcctcatcataacatttcttggcccatcaaaaacaccttgtcctcaaggtgttgggacctcaattccagaccccgagacagcttggtggcacagttcanaaacaaaatagctaaaacacgaggtgggtttagaaaagagaaaaaaataacacgtgagtgaaatttgngccatggtgatttgggcttgttatgggaaagatggaggtgt

SEQ ID NO: 1638 - DNA, 377 bp, Glycine max
atattcgtgggttcaatataatcatactgttattttcctggatcgctactgatctttaaggggtcatataaaactgggcaggtgtgaacatgtgctgcaatatgttttgaagcacaaaaggaaactgaaaaaacgcttgcttctttcattcgaaatccagtatgtactcatattccatcaatatcataattcgttatgacaaaatgctaaatggctaaacctatattcgctggatgagttggctgactgattcatataaactttaataaaataatctacatgccatttttcttgagctgtttccctttcttttccacctttacccatgtcacgtaaatactgaatagacgaggtgaatggagaatcatctatgccac

SEQ ID NO: 1639 - DNA, 561 bp, Glycine max
  unsure (1)..(561): unsure at all n locations
agcttttaactgaatttgcagcgttccaattgatttttaaatggtgtaatcgattacaacatattggtaatcggttaccagtgtatctaaacgttgaaattcaaattcaattgtgaagagtcatatcttttcagaaatgttttgtgtaatcgattacatggttatggtaatcgattaccagtgacaagttttgaatgaaaagtcaagagatgtaactcttccaatggttttcaggtttttctcaacgttataactcttccaatggttttcttgactggacatgaagagtctataaaagcaagaccttgacttgcatttcaataactttttataacaactttttagaatttcttgaacaacttttgagaaatcttgaaacccttactacttatncttcttcttcttcctttgccaaaagctttctaagttttctggtttccaaaccttgttctttcacagaaaacaaaagngngctatatctttttattctctcctcccttgccaaaagagttcaacaaggactaatcacctgaatctttttttggctctcttctctttttc

SEQ ID NO: 1640 - DNA, 376 bp, Glycine max
ttatatatcgagccgatgtataataattacttatcaacttatttctctcattagtgacgagcacagagtatattaaaaagaatgtgttaaacatggtattttcaggtgactattaagtatatggatttgacttgggatgcgtgaacaagctctcattcaatggcgaaaaagctcgtgaacgagtcaccttcccctgtccacctctggcactccaaccactgagtgctgtattggacctgtaaaatgcccactcactcatgctggccttgcctaaaatgatagccccagcttctcttaatctggaaactacacctgcatctctaggcaccacagagcccagaagagcaaaagagcctgcagtggtgttcatcttatc

SEQ ID NO: 1641 - DNA, 649 bp, Glycine max
  unsure (1)..(649): unsure at all n locations
agcttgtatagttccccaatttatggttattttggagtaaattttgtaaataaatattgttttatggttaatgttgtctctagaacatttccattggatttaatgatgaaatctatgcattttcaggtgaaaaagaggctaagttttgaattgcaaaaagtaacagttaggctaagctcagcagttgggctaagcgcatatccaccactaagcgtagcttcagcgcgcttagcgcaaaagagaatctggcagagcatcagcatcaaagtcgcacgcttagcgcaagatcagtgcgctaagcccagcaggtgccttcagccaggctaagcgcgagactggcgctaagtccaatttcacttactcgcgctaagcatgatggtggtgctaagcgcaacgtcataaattcagagcctatttaaagcttgttttgtgcaaatttagggtaagcagatgattggcatagcaaccacagtgcccattttgggaaaagagccctaaatgcagcanagaggaacaacttgtgcattgaagcctangttttttcatttgagagagattattgagtagagagtgagtatgagatgctgagaagaggaggaggaatcccccttcttgttgtagaaactatcattctctacttttaatctca

SEQ ID NO: 1642 - DNA, 440 bp, Glycine max
tgaaattgaacaacggaagctctcgagaaattcaaatgctcatttcatttcacacggatgtccgattcagatgcataacgtatctagatgctcaaaattgaaaaacagaagctctcgagaaattcaaatggtcataacttttaacatggatgtctgattccgaagcataacatatcgtgacgctcaaaattgaataagagaagctctcgagaaattcaaattgtcataaattttcacacggatgttcgattcggggataaaatatgttgagatgcttgaaattgagagataaaagctcttgtgaaattccaatggtcataacttttcactcggatttccgattcaagacatttgaaattgaccaacctgagctctttaaaaattccaactggtcgtaacttttcacacggatgtccgaatccgggaaatattatatcgag

SEQ ID NO: 1643 - DNA, 666 bp, Glycine max
agcttacccataaattgttagccaataatttcttatatatacacctttgcacaaaatgtcaaattatgttaccaaggaattagtataaataaagcaattgtaaggcacaatggagatatgaaaacttaagcttaccttccactcttaccttgtctggaggtgctggcctcgaatccaatttttctcttcgattttctgtatcaaatacacagcatcagtagtatacaataataccctagggtatatatattcaaaactagaagtgtataattgtcgacgatctggcctgtataatcgtcgacgacaaccatgacagtgctggtgtgcttcacgacggcaaccaacttagagagacaagcttaagggcgcaaaatgagtgaggtaatgccggctaaagtagagtgcaagtatgctagggaaaaagatgaaaatttacttcagattcaaagacggtgtttataaaacccgtctttggataatgcaagtcaacaacggtgtccactatacacgtttttgtaacgcgcagatgaccgttgttttaaacataaccgtatgtgacataaatctcttattactataatgccaccggctctaaaacaacatcatttttggaaccaccgttgttgaagcgcatcgtaaaaactatattttagtagatttattgtt

SEQ ID NO: 1644 - DNA, 504 bp, Glycine max
ttcttcttatttcccttgttctaatattgtcagactcaagtgtttgttgcggctttgagctttcactccataaattccattgcgttatttatgtttgaatcggattggattttacatgtaataagaatttatctataaaatatataaaatctgttaaaaaaaagcatgtggtccattctatgtaagtatgtaataaactggttgttgttgcttttgagaaactgcagtaacatgttcatggcagcataattggaaggttttcaaatacacaggtccatgcagcacaaatcatcttagtgttaatatctgttgttcacaaattaatcatcttctcacactacacaacattgatggaagcttaagtcttatgaggagttgccaattaaatgggatactatgattgattaagcaaaaagattccttactttttttggacgaaaggcttagctttagaaatataataatattcacaccgaaagtgacgtgaacatggtttcaaaacta

SEQ ID NO: 1645 - DNA, 620 bp, Glycine max
  unsure (1)..(620): unsure at all n locations
agctttgatcttccaccaccgccgccaccatcatcttagacttatattttaatattagtactctgattttcagccttgtattttggctatattattatactatttgaacaatttactatttccctatttgcatggtatgtttaaacaaatattaagtatgttatttgactatgtggaatttataatttatctatgcatggttgtttgcttcatggtttcatggttcttgcttcttgcttcatgatttgattgatattttttatgaacattgtatggatgtttaaattaaatttatttgatacgcactttggctttttgttgatgccaaagggggagagaaatgggattaaatcaagaattcacatgagtaatcaacttattattaagataagcaaaaattcaaaaacaaagggggagaatttatgagagtgatcgactaggaaaaaatgtgtgtgtgtttcttgatttcagtagttgtcatcatcaaaaagggggagattgtagaagcaaggcttcatggtgaatgtgattcanaggtgtnttgatgataacaacaatgatgacaacacaagatgatgacaaaggtgatgaacaaaaagctcatagatcaaagaacaacc

SEQ ID NO: 1646 - DNA, 487 bp, Glycine max
tcttagtctcacctgatgaagatgaattcgtggctacttcattctctcctctaatgacaatagcatcatttctggcattgaattgctgggagttggaagccatcttctcaattaaatttctggcttcagcaggggtcatgtctccaagggctccaccactggcagcatctatcatacttctctccatgttactaagtccttcataaaaatattgggggagaagctgctcataaatctggtggtgagagcaactggcacatagtttcttgaatctctcccagtattcatataattaagctctctccactgagttgcctaattcctgaaatatcttttctgatggtcgtggtcctggaagcagggaaatttttttctaagaatactctcttgaggtcatcccaactcgtgatggaccgtggagcaaggtaatatagccagtcctttgccactccctctaaagaatgatgaaaggcgttcagaaatatgt

SEQ ID NO: 1647 - DNA, 598 bp, Glycine max
agctttgagcaaattcaaacgacaataaatttttactcggatgtccgattgagtctcgtaatatatcgagaagctcgaaatggaataccaaagctctgagcaaattcaaacgacaataactttttactcggatgtcttattgagtcccataatttatcggaacgctcgaaatagaataccgaagctttgagcaaattcaaacgacaataacctttttactcggaagtcggattgagtcccgttatatatccagacgctcgaaattgaatgttgaagctctgagcaaattcaaacgacaataacctttttactcagatgtcggatagagtcccgtaatatattgagacgctcgaaatggaataccgaagctctgagcaaattcaaacgacaataactttttactcggatgtgcgattgagtcccgtaatatatcgaaacgctcgaaattgaatgttgaagctctgagcaaattcaaacgacaataaatttttactcggatgtccgattgagtcccgtaatatatcgagacgctcgaaatggataaccaaagctctgagcaaatacaaacgacaataactttttacttggatgtcttatt

SEQ ID NO: 1648 - DNA, 465 bp, Glycine max
tcggtattcaatttcgagcgtctcgacatattacgggactctttttacatccgagtaaaaagttattgttgtgtgaatatgctcagagcatcggtattcaacttcgagcctctcgatatattacaggactccatcagacacacgagtaaaaaaggtattgtcgtttgaatttgctcagagctccaatattcaatttcaagcgttccgatattttacaggactcaatcggatagccgagcaaaaagttattgtcgtttgaatttgctcagagcttcggtattgaattgcgagcgtctccatatattacgggactaagacggacatcggagtaaaacgttattgtctgtggaatttgctcagagcttcggacttcaatttcgagcgtgtagaataatgcgggactcactcagacatccgagtaaaaagttattgtcatttgaatttgctcagagcttaggcattcaa

SEQ ID NO: 1649 - DNA, 547 bp, Glycine max
agcttataataagacataccagcattttattgttccagtccaaggaccacaatattgggcccagacacagtatacacaccctgttccaccacataaaaaggtccaaagaggaaggccaaagaaaaatagaaggagatctgtagatgaggacaatgtcacaggacataagctaaagaggaaattggctgagtttacatgtggaaggtgtggccaaaccaatcataacattagaagctgtaaaaatattggagttcctgttaggccaaagaaatatgttgcaccatcaacttccaatgaggatgaccacctattatctcaagatgaacaagctttgaatgaggctgaagaagctgctgctcatgttcaacaagatccggtggagattaatttatctcagcctcatttgtcacaagatagtgacatggaggtccctgcaactattgttccaccaatagcaaggaataagctagccataacaagagccaaaaaaaggaaggttgctgataaagatgatgcagaaaactgaagaaccattttttgttgcatt

SEQ ID NO: 1650 - DNA, 826 bp, Glycine max
  unsure (1)..(826): unsure at all n locations
ntttgaacccttgcaacgccgcgcacttaactcctcatgaagtccttatgacgaccgaaaaaataataatagaaacccttttttgtccattggatttacacaccaaagaatatatgctactgcatctcattatgctctaataaccactttcccaggaccacaaatatcgaaacccacataggcccttgtgaacccctctcaagatactattccagcatgggatatctaatcccgctcataataaccgccatgtaccatataacaacaccgccactatagagaatggaacctttacataataatatgcgataatttttaatctcggacaaaagatcaaaacggacgcagatttcgaccaatgccctttgccttatctagaggacctaccaattgtggcctgtaaggtaataaagacctcctttctggtccggccccatgttacgttcccgtgtgaggcttttccgacacgtgtgttcttcgaagatttgaacaccgatggtgtgggatccttctgacgaagaagtggtggtccattattattaataaccttcccgcggatgggatttcgcaagaagataatatatttgcaagaatctctccaaccggttcatggcccggacctcgttgagtgtcctttatctttgccgttcctccccaaatgaaatattgtgggtccccacccggaccccgctttccggttgcgaccaacccttataagtgaaaccctttcttgtctttgccaacagagcggacggcacttttttcctctttaaaactatcttttcttaaagaagaaaaaaaccctgcatcttgtctcaataatttt

SEQ ID NO: 1651 - DNA, 557 bp, Glycine max
agcttcaacattcaatttcgaccgtcttgatatgttaagggactcaatcagacatccgagaaaaaagttattgtcgtttgagttggctcagagcttcaacattcaatttcgaccgtctcgatatgttaagggactcaatcagacatccgagtaaaaagttatggtcctttgtattggctcagagcttcaacattcaatttcgagcgtctcgatatgttacgggactcaatcagatatccgagaaaaaagttatcgtcgtttgagttggctcagagcttcaacattcaatttcgagcgtctcgatatgttacgggactcaatcagacatccgagtaaaaagttatggtcctttgtattggctcagagcttcaacattcaatttcgagcgtctcgatatgttacgggactcaatcagatatccgagaaaaaagttatcgtcgtttgagttggctcagagattcaacattcaatttcgagcgtctcgatatattacgggactcaatcagacatccgagtaaaaagttattgtcgtttgatttgctcagagctcaacattc

SEQ ID NO: 1652 - DNA, 625 bp, Glycine max
ttgagccaactcaaacgataataactttttactcggatgtttgattgagtcccgtaacatatcgagacgctcgaaattgaatgttgaacctctgagccaattcaaacgacaataacttttttcacggatgtctgattgagtcccgtaacatattgagacgctcgaaattgaatgttgaacctctgagcaaattcaaatgacaataactttttactcggatgtctgattgagtcccgtaacatatcgagacgctcgaaattgaatgttgaagctctgagccaatacaaacgaccataactttttactcggatgtctgattgagtcccgtaacatatcgagacgctcgaaattgaatgttgaagctctgagccaatacaaacgaccataactttttactcggatgtctgattgagtcccgtaacatatcgagacgctcgaaattgaatgttgaagctctgagccaatacaaacgaccataacttttttctcggatgtctgattgagtcccggaacatatcgagacgctcgaaattgaatgttgagctctgagccaactcaaacgacaaataacttttactcggatgtctgattgagtcccgtaacatatcgagacgctcgaaattga

SEQ ID NO: 1653 - DNA, 561 bp, Glycine max
agcttgtagcaaattcgaacggcaataacattttactcggaagtccgattgagtcccgtaatatatcgaaacgctcaaaatttaaaatcgaaggtcgcagcaaattttaacgacaataacatttcactcggaactccgattgagtcccgtaatatatcgagacgctcgaaatttaaaaccgaagctcgcagcaaatgctaacgacaataacatttcactcggaagtccgattgagtcccgtaatatatcgagacgctcaaaatttaaaaccgaagctcgcagcaaatgctaacgacaataacatttcactcggaagttcgattgagtcccgtaatatatcgagacgctcgaaatttaaaaccgaagctcgcagcaaatgctaacgacaataacatttcactcggaagtccgattgagtcccgtaatatatcgagacgctcaaaatttaaaaccgaagctcgcagcaaattctaacgacaataacatttcactcggaagtccgattgagtcccgtaatatattcgagacgctcgaaatttaaaaccaaagctcgtagcaaat

SEQ ID NO: 1654 - DNA, 645 bp, Glycine max
ttggctgcgcagcagctctgatttcgcgagtatttatagtttatgacgcattgtaatcgattacaggtatgggtaatcgattacatgcccaataagccttctggtaatcgattacaggatgttgtaatcgattacaggctgcctgttcatgtgtaatcgattacactggatggtaatcgattaccagagcctatcctaggctagtttctaagagaatatctatatttatgctcaaatacatcctatatgactaattttcactactaatacactaaattcaatcattcaattactatgtacacaagaaattataaattctatcataaaaacaagaattcaaacaagatcaaacaaaacaatctacaatcaaaagataaaaagttaatcaacctatcaatcaaccaatcaatcaaccaatcaattcctatttgtctaaatctcttacatctaaaagacctaattctcttctaatagagaaaaacactttcttggggagaggtttagtgaaaatatcagcaagttgattcttagtatcaacaaattctaatacacaatctccctttaagacatgatctctaaaaaagggtgtctaatctctaatatgttagttcttgaatggtgaactgggtgtttggatagaattat

SEQ ID NO: 1655 - DNA, 514 bp, Glycine max
  unsure (1)..(514): unsure at all n locations
agcttagagaaatatgtcaaatatcgatcttaaagaaaactaacaagaaagaaaaaaagttaaaagcattgagcaaaaaaacaaacaataaatttaaacaaaatgccagaaatgtgattgaaaactgagagaaaagatataacgtggattgataagaagaatagcaacaaagtaagacatttagaaaatagggaaataaaaataaaggaaacaataaaggcaaggaattaaataaataattaccattactgggaatgtaaagcttatgacatgtaagaaagaactgtatatcggcaagtaaataaatggatagaaaataacttanggtgtgtttggtagagaggaatgaaaagggatgaaagtgtgaggaatgaaaagagatgaaagagagtgtaaagtgaagttgtttgattgagatgaaagagagtgtaaaagagatgaaagatttaaattaaagttgtaggcaaataataaaagtaactaaactagagatggagcacttattaaaaaatag

SEQ ID NO: 1656 - DNA, 598 bp, Glycine max
tttgctcatttgatgttgtgaagttgttgataatttgcatttctagatgaaataagccatgttctcttgtgtcaggatgaggtctgttaggagaacacaaacctttaacatcaatcggactatacctttctcttcaaatccagcgatcaactgtgtaggcagaaatttggagaagtatcaacttggtggggtcatatttggttgcaagaatagtactttaaaagaatgtcaatcaaaacaactctttggttagtatttctttcttttgctttcttttattgtaacatttgtaatagattaacagtaattagtatgagtttaaaggattaatgaatcaatgatttgtgttttaacaggcttaccaacaaaccacttttcctatgtgaagaatattgatcctggtctgcctatattcttattcaactatagtgacaggaagctccatggaatatttgaggcatctagcaaggggaaaatgtacatagacccttatgcatggattgatgataattcagatttggatagaacacagtatcctgcacaggtatcacttgttatatcttcttatcaactctatctcacaagggtcataatgata

SEQ ID NO: 1657 - DNA, 546 bp, Glycine max
agcttcacattattaacacctgagttttttttttgactcctttaaataaaaaagtcaatcttaagccaaatttgggcaagccaagtttgggctttaagtgctcagcttggcttgactcatttacaccgctacttaaaagtatgctattgccaaaaagcaaatcatctacaataaacaagtaatacgctttcctagttttcaaatttcttgacggaagatatcataatcaggggttgtgtgttgatttcaatacaaaaccaaccagttcacagtatgaagactgaaagtagagtctgaggagtcaagattttatgcttggacggctgaggtatccctatagaagaaaacttgcaggccttccaaaggatgacttttctcaaataaagatgatttggcatttacaagattgtcaattgtcatgatacttctgatattagagccagccagttcctatgataaataacaatgtggttagggtaggaacatgccttataattgcttcatttctgaaacaccccattatgtgaacgtcctttgggcttgaaa

SEQ ID NO: 1658 - DNA, 571 bp, Glycine max
aaactttcggattaaacctcttctacttggttttgttttagggaaggtttgaaactgagtataataataatctatagacggggcaaaagtgattgacacttggtttggtattcaattaacaatatgtgcctcccaaaattagtggatatgtaaattttgtattggctatttggcagaaagaagatagggcacttttattgagtcgctgtcactaaccaacatggaatttctacatgccaaaatatttatggctgatttaagagcttcatcaagttctgtgatatgattcttttttatgaaacaaaccaaagttcctgtaaagatatagtaccttcttttagatggattacatttatgttgggtcatatttttcattgcataacattaattatttggttgcatcttgcatcatttcagttgcactgtagtactgcattcttctgatacaccatggagcttggggttatttgctgtgattgattgcatcatatgtaatgccagcctattatggtgatttgaaatttgacaacatggacttcagatcatggatgggtatgggcacggttttaaa

SEQ ID NO: 1659 - DNA, 496 bp, Glycine max
agctttatagtgatccttttcaaaagctttgtcttgaaattgatcactcacactaatcaagtcattctcaagaaattttgtatttcttgattccacaatcctagtgctatgtgatggacaataaaatctataccctttggacttttcagcatatccaatgaaatactcactaatagtcctagggtctagtttcttctcttgtgggttataaacactcacttcagatgggcatccccaaacacgtatatgtcacaaactcagtttctaaccttttaacttgaaaggtgtctttaagacaaccttgattggaactcgatttaatgtatacatagtcatctttaatgcttcaatccacaagaattaaggaggttttctattacttctcatacttcttaccatgtccattaaagttcggtttcttctttttgccacaccattctgatccggagaaccaggcatagtgtactgggcaaaaatctcatgtttttgaagaaac

SEQ ID NO: 1660 - DNA, 511 bp, Glycine max
tatcagctaattttttcaaacaaagccttaatataggacatgattcacttactgcaaggtgtgacaacatgtttggtgagaggaaaaagttgtgctcgaggtcctcctcccaatataagggaaacgaacttttttgggacaatctttgatctcgagaatgaaaaaatttgtaaggcctggaactaagaatgtagtgattctaagaaataagttgataaaaggacaaaaatggaattgtactactcggagtcaataagccttcatattcaatgactgacggagtagatatcttattttagttcattaaagtcacctcatctatatcaagaaagagaaaaagtttatctctactaattatacaatgaaagattaaggtaagatccaatacatattatcaataagataagatataatcttatcttacttataatatctaaatagggaattacgcctatggagataagataagatattacttataatatctaattatggcattaagcctatgaac

SEQ ID NO: 1661 - DNA, 540 bp, Glycine max
  unsure (1)..(540): unsure at all n locations
agcttgttaaagaactgaggaaaaatcattatcaagcttgtgcgcacatcgttcgcgtatatgatatccactccacaaggtttgaagtagaggagagcttcaaccctataacgcaacgtggcggacaaaagtgggcagtaaacttgaatggtcgtcattgtcaatgcggaaggtattctgcgcttcactatccatgttcacacattattgcagcttgtggttacgtgagcatgaactacgaccaatatatagatgttgtttatacaaacgagcacatcttaaaagcttactccgcacaatggtggcctcttgggaatgaagcggctattcctccttctgatgacgcatggacacttatccctgacccaactacaattcgtgcgaaaggtcggccaaaatcaacaaggataagaaatgagatggattgggtcgaaccatctgagcaccgaacaaaagcagtagatgtggagctgaaagcataacangcatcgctgccaatgcaatctgagcggggagttgttcaaatgttgatttatgtat

SEQ ID NO: 1662 - DNA, 272 bp, Glycine max
ctctgaaccgcgcaaactcgtgctgtttgttctttgcatcgcttgtcgctttgccaaaatgaattcgccgaggactcaccgcccgaattttttttgagtctctattatccctttttctaagagaaccatggactaaccgcctgacttcttttgtgtctcccttctcccttgtcttagaattcattgcgacgcggtctgagagttcttttgatctcttccctttcccttatacataagtattcaaaggacttaccgcctgagaatgcttttgt

SEQ ID NO: 1663 - DNA, 572 bp, Glycine max
agcttggaggcaagctcctgaggatctgtgttcgacctgcaaaatatagagtacgaggggtactgctcccctgactgaatgactggtggtgtctccaagaaagcattcaacgatgtagcgtcaaattttattagcttccttctgactcaaacctattttggtgatttatcttctggatcatacaggttcgagtaaaattctttaactagggccacatcgatgtgcctgtccatatgctgtgtcagcgccttatgccagttgtgctggatgagctctcgcctgaactcatcgtactcagtcacgaagaggttaacgttcctctttggaaggatgttccgggagtgaacgttatgagaataacgctcccaagcaaccttggaaacgaactgggtggtatcatagggttaccgaggttgggaggctgtggatttcctcttcctggaagccatccgcatcaaaagtacaagaatcaagttagacaggtttttatttcaactaaaagcagaaaaataaaactgaaaaatagactgtgcgcttagcgagactgactctcttagcgcgccttataaaaa

SEQ ID NO: 1664 - DNA, 511 bp, Glycine max
tgtaatgtatatgttacattgttcttaaatttctaaaaagtttttaagaacaacctgtctaggtaaattttttcagaaagacttctaacaaaataagaaaagaaaagtttttcgtaattaccttataaaccagctaatgatagaagctctttcatattagtttttttcaaaagatatttttagattatgtataaactagcattaacttatagaaaagtttatttaattttttttctttttggtttctttttttagtagtacttctaaatacatttatccagatagacccttaatattaatatatatcaacaatacttagaatcttatgagactgagcaggattattgtaagcaagtagtatttgactcctacgggtctctttttgatctcttgcaatctgagctaacatgaccgtggagtaaatattccgaaatgactttgtaaatgcccttagtttaacatcgtaacgatacctgtgcacaaaaattaagcagtgaactttggaacaatc

SEQ ID NO: 1665 - DNA, 597 bp, Glycine max
agcttatgcgcatatttccttacaaacgttctcttgcacaagacattctattaaccgaaaaaaatgcacccatatacaatcaaggcagcttcgttacctagattatttacacgtacttccaaggtgtatttgttacttacatcacacacatctccttggctaaattcacatacatgcatactcaaagcattttggggtaccaaaaattgcacatgtgcacatcttggtatttctaatacctatacatacacaaacttcatgatgaatcttgactatctacacaataaggtgctacatttcatgctcttttcaagtttttgctacctaaggccgcatgcaaattcaagtatattttccttcgctggctaaaattgtattcaaattaaaaggtatacatttttttggtaatgtatcttctttacatagcatgcaacatatttatgtatatatttttttgtgagacattttgactaccaaaaattatatgtacatacatccgagtattttgctatcatacccaaagcgtaaattgccaaagggtatttgctacctattctaaacctacacatttatgatgagcaaaattcctaaccatct

SEQ ID NO: 1666 - DNA, 513 bp, Glycine max
aaactaagctttccaagttttttggttttctgaaccttgaaaacttgtgctattcattcttttcatctcttctccctttgccaaaatgaattcgccaaggactaaccgcctgaattctttttgtgtctctcttctccctttttctaaaagaacgaaggactaaccgcctgaattcttttgtgtctcccttctcccttgtcaaagaattcaaaacgacacagtctgagaattcttttgattcttccctttcccttatacaaaagtattcaaaggactaaccgcctgagaattcttttgtatccccattcacaaagtatcaaaggtttaaccgcctgatatctttgtcttaacacattggagggtacatcctttgtggtacaagtagagggtacatctacttgggtttgactgagaacaagagagggtacatctcttgtggatcagttctagtggagggtacatccactagggtttcaaagagaacaagggagggtacatcccttgtggatcttt

SEQ ID NO: 1667 - DNA, 552 bp, Glycine max
  unsure (1)..(552): unsure at all n locations
agcttccttgcgaatgtgttgctttatgattttctttggtagatagataattatgacccctaactgaagccaacgacaacagggaaaagcatagcaggtagaggcagaaaaaatgagtcttttggaccaccctgtcaaataaatagagcatatgggttgtctaaacaactaaagaaggagatacagatcgtggaataacagttgtccaaatctgcactcacttgaaagcacaaaaaaaaaatggtttctttcggcttgtctcaagagggaagaaagggataaaggtcacacattaaaaaagacacaagcttcataccaagatcttcagtatgtgttgtgtatgcctatgtaacaaacaaagttcttgttctcactttgtaatataaccacgttagaggtattcgaatatttaatatcaacatacccgaaagtttttgttcggagtgataataaattggagggggtgggggacttaaaaaaacacccatgtataatataaaaaaaaatggaatgttatcttagagctagtgaaagacanagaaattattcgag

SEQ ID NO: 1668 - DNA, 475 bp, Glycine max
tagtaagactagtaagtactatataaggaatgcaaaatttgttttgcttattggctactcctctaaggcatgttacgttatatctttttcggttagcgtattttagtactacacatgttagacattaatcatacgaacaacgacttctcatttctggattttcaaacttagtttattgttgccgacaagtaattcattttcagaatatcttcagaatatgcttccataaaaaaaaagttgctattgaattgaaacaagccgtgccacgttggaaaaaaggacatatatatatatatatatatatgaagtggcatacatcaaatataattagtacgtaatacactttataacatatccttttattattgattaatttttaaaaaaactataaaattatgagtgtaaagattaaactaggaataaaagtcacataattttataatttcaaatatttgtttaagctataataacgtat

SEQ ID NO: 1669 - DNA, 643 bp, Glycine max
  unsure (1)..(643): unsure at all n locations
agcttgcttatttacttgagacagactatatatgctcaactgaaaaaatagactntaattctaaatagcaataaaaagatatataataaacctgtttctgaaaaagcttcctcaaaagggaggctacttcaatctagtaccgtagttgacttactaagtactaaacaacaaattaatgagactgctgactactgatttcatagaaagatttaggaacatgaggagtaagaaatgtatggtaaagcttctaggagtagaatatgttactatgtcttaaagtaaaaaaatatttatgtttaaaagatgaattatgattcataattattttaattaaatataaataataaaagttatatataatatattattggatcataatttataattttatgtttgtattttcagtcaatacatttattaaacaatttagcataacatttatgaactaaatttaaaacctttatttaatattttaagattctttcatgtaaaagatattttcctaggagtatatatatgatatatgattatgttgggtcatatttatgatatatgattatgttgggtcatatttatggtatctcaaggtttcaattgacagttttgggttttttttttgaaaatattcttttcttattttttt

SEQ ID NO: 1670 - DNA, 527 bp, Glycine max
tgtaatgtatatgttacattgttcttaaatttctaaaaagtttttaagaacaacctgtctaggtaaattttttcagaaagacttctaacaaaataagaaaagaaaagtttttcgtaattaccttataaaccagctaatgatagaagctctttcatattagtttttttcaaaagatatttttagattatgtataaactagcattaacttatagaaaagtttatttaattttttttctttttgttttctttttttagtagtacttctaaatacatttatccagatagacccttaatattaatatatatcaacaatacttagaatcttatgagactgagcaggattattgtaggcaagtagtatttgactcctacggttctctttttgatctcttgcaatctgagctaacatgaccgtggagtaaatattccgaaatgactctgtaaatgcctttagtttaacatcgtaacgatacctggccacaaaatttaagcagtgaactctggaacaatcagaaacaagctgcgta

SEQ ID NO: 1671 - DNA, 656 bp, Glycine max
  unsure (1)..(656): unsure at all n locations
agcctgaaggtggtttcttctatgggatctattttttaagaaccctaaaaacggtaataaaaaatggttgggaacctcccaatatggcattaatggccccatctttctttatatatttaacccagaacctaaatggaccttggccctaacataatggcaccacccttatgggggcccatatttaattaagtgacttggaatccaaaaacttaatatcagaaaccttgcctttgcattaaatttcatcttgttggcatcatcttgtgtccattcaaacttaagacaaagaactccaagagattagttcttagaggttcatgatctacattcaatataatgacataggatacggtgagtgtatttgttaagatgggctttaagaggcccagatatatctttaaattaaagtagttgaaagattatataggntgaagnatatattntgattattggttttattataaataatgagatgttgacacttgaataattattatccattaattaacatcctttaggggacattcgataggacantaaatntntatttcttgggaatcatatgtngaaaaacttaatttctcatgttnggtangcattttaagaaaataacattcctaagaaaaagaatgttctcaaaatgtcttttaattaac

SEQ ID NO: 1672 - DNA, 574 bp, Glycine max
  unsure (1)..(574): unsure at all n locations
ttctaagcatttttttgggccattccagatcctcgagcgaatctgacccgtagcctatcggctcctccttgcaccggagtcactgatacaccccgtgtttcactgctttctcctccgccctcatcacggttccccacccgccaccacgtacacatggcccttacaggttcgagatgaccagcccctcaggcgtccgctgtgtttccttgactataaagacgacaccgcgaccaccccaccaacacgaatggtccttacccaatgggaaggcgagccaccggaggacacctcgtgggaaaaatggtctgacctatgccaggcctaccaccttgaggacaaggtggttttcggggaggacggtagtgttagcaatgccggcaactacaactccgatagcgagcatctccgtcacgacaccaacccaagaccagtacgtatcaggggagcgccagcacgtctgcgagattatcacgtgcaatacctaccaggaacaaaaggataggctcgtacatacgataatagcaggtgcatgtacagaatcanggaaatgcacacgtgatctaatacacacgtg

SEQ ID NO: 1673 - DNA, 446 bp, Glycine max
agcttaacaagtttgggttcctaagcttgtgattgcatttgggcatctattttgactttcctatgccgtctcataaaacagccccaccatcccaatttgcaaaatcatattcatatatcattggggcatttcaccgagcacttggtgggcgcacatttggacacaaattgcaagaggatggggacaatgtggcatgccccattgcttcagaatacaacctaggcctaaggccttttcattcaaatcctcaattcaagaaaacaagcaccaaaaacaaaccaaaacttccccacaaatataagcatgttctcacaatttagagtaccaaaagatgaagaaaatgtaccaatgggaagcaaaaacatcaaggatggaatacttacttgttggagtgaacaataacaccaaaaatgaaagcaaaaggcaaccaaaagtagcttgagggg

SEQ ID NO: 1674 - DNA, 432 bp, Glycine max
tgagttaagcttgagttaagaaggcagaagtggcagtgacaaatacttgtaacttgagtgaaacttggtggtttgtcaagaacaggacgtagtctcggtgagacaaaccaatataaatttcttgtgtctcattcttattattttctcttctactatttaaactaacccatggtttgaatttgatctttgtgtttgaaaaattccgtttgttttacaaagatttgaaactatcgtctgatttgctttgcaaaagtctgatatttgttttcttaagtcttgctcatctgatgataactttgttatttacgaaaagaatttaaatttactaaaaatcacaacctttttatgatatttgtctttacacatgttaaactcaattttgacctgacatggcctaacatgtttctactcctaaatgcatatttcataata

SEQ ID NO: 1675 - DNA, 655 bp, Glycine max
agctttacattcttccaagttctaccttctttacaagatccttcaattgctttcttccttgaagcatgcgcaaaccaggggtattgggtgatgaaacattaatcacctagaaaaggatattaaaaacattaaacagaatagattaccaaacatttgtcttacaaatttgtagtaagctgcacagatgcttgattaaaaaaaattggaatccctatgtcagttgttttttgccatccatttctcacttttctaaaccagggaattggcaatggaggtgacaacacccttgaaagaaacacatttgttgaacatcaaggacaacctaaaaacataatccttcaaattggatgatcaatcatactactcacatcatgttctggtgaaaggtttgggtgggaaatttggaggatgtaaaaccgttcccattgctgagtttccatcctttcatttctccataatgaacttaaaaaaaatgaccggtgattttaagctggcagtaaaggcaatgatcctgggtataaatcttagatctctttagtcattatacaccacaacacttctgttccttagtaaaccaacattttatatagaagatgtatctttcaatatgttaacttttgtatgcaattacacataataccgataatgaatgatg

SEQ ID NO: 1676 - DNA, 441 bp, Glycine max
tcaagatgtagttaagacccctgacaacttctgttcgtgttttaggcttgatagaaacacagatgttagatataataatatgaggaaggttgcttctcgtgcagattccagggacaactatttatactgtcctagggctgtcgatctacaggatgaggatttaaggcattttcagcggcattgggaaaagggggagcctgtcattgtcagcaacgtgcttgcaaaaacatctggtttaagctgggaaccacttgtcatgtggccgtgcattccgtcagatgactaagaccaagcatgaacaacatttggatgtgaaagcaatcgattgcttacattggtgcgaggtttgcgtaacatctcaatcttgaactgtgagggatatttgcacaaattccattgctcacatacatatatgtgaagcttatgttgataatgtttaat

SEQ ID NO: 1677 - DNA, 598 bp, Glycine max
agcttgtaaacgattgtaagagattgattgttaaagtattcaagattgattgaatgaattaattaaaatgcaaaacaaagccttgcttttatagactcttcatgtctggtcaagaagaccatttagaagagttataacttttagaaaaacttaaaaccaatttgaaaaagtcaaaaaccttttgaagagttacaacttttgatttattcagaaacagtaactggtaatcgattaccaaataagtgtaatcgattacacaaagcttttatgtgaaaggatgtgactcttcacatttgaatttcaacattcaaagccactggtaatcgattaccaaaacattgtaatcgattacaactttttgaaattaattggaacattgtaaattcaatttgaaaactttttcaaaacaattttgctactggtaattgattacaacaatctggtaatcgattactagagagtaaaaactctttggtaaacatgttttaagaaaaatcatgtgctactcaatttttgagaaaaacttttcatacttatcttgattaagccttctcttgattcttgaaatctggatctgattcttgagatcttgaacctt

SEQ ID NO: 1678 - DNA, 663 bp, Glycine max
aaactcagctgctttacaaaaatgaatagggctaatactcatttttcaggatccttatcactagttatctctattggtgctccaagcagtctatagatttaatagagacaaacttcaacatgtttcctaactaaactacaaatgaaaaagagaccaagcttacctcgaacccaaacagtgacaatggcagtgagatctaacaaaatggcacgaaacttgaagctttcctcgtacctcaatcagcaatactgcaactaaagacgtattattattataatcatcaataaaacatgaacacccacggaaaattagcatacacgaagttgacctacgtacctcacggagaaagctttgagctttgagcacccacaagtgtttcagcaccctagtaccaagagtgtatgtagggttttcttcgagccacacttccaagagcagtgtaggggttctgtgggtttgagcgaggggtttccggcagtattgaaaacaatgtgggacaatgtgggtgtcgagggagcggtttccgacagatttcacgcgggaggagagagagaagagcaatttcaggcaggagaacaaagagaagagggagggcaagattttcgagcgcgccgagtgtgaaatgttcaagtttaacttataaacataacaacatcggttttt

SEQ ID NO: 1679 - DNA, 683 bp, Glycine max
  unsure (1)..(683): unsure at all n locations
agcttaaaaggctgattacttcaatttttttgcttagggagctcttttgcaaatagaagttgaaggctcaggtttcttatatagacaagtccgaaacatggtaaatagtcttgttcctaaataatctaaaatattattatgcagttgcaaaattactgtatagttgttccacttttgcaatgaacatctatgtttgcttttctaggtggctttgttgcttcaaattggtagggaagctatacctcctgacattgttccacatattctggcgagtcgagatcgaaaggagcttgcaaaatactccttgtctgcccctcctcatggcctttgtcttgtttctatcaactataatgaaagtcacctgttgcctccaccggggtgtccccctgcaaacagttttggtaggcatcataccataaggaaatgcaaggttccattctttttgtaatataggcagcaaaacaaacaatctaggtatcttaggactgattctttntacatttagattttaaggttggttcaacttcaaagatgtaattagattgaagtactctatttgttngattcaaatatgcagttaagtgaagttaccggtattttactacatntttatgtttagtaaaacattaaatcattaattcagtccctctaattaacacccaccatcaatttgatcacaatac

SEQ ID NO: 1680 - DNA, 429 bp, Glycine max
ccatgactgcatacaaaacggcaaaagtgactttttctttgcatgaaaagaatggcattaggtgaaaaagagaaaaaaaatctgattattttacatttaaaagctttatgacttgtatattacatttacaatgaaataaacggtttgtgattttgaattgtgaaactcatgctatgagtaaaataacggattctgccataaatttacacgaggtaattactcggattaactcaagatgtgatcctaatccattttagtgtccgaaaaaggcttatatggtctcgtgttacttcagtgacactattttctaatagaaaatcatgatcaaccaccattatcctgctaagctaaagcagatttgaagagagtgagacaacaataatggtaggctgaaaatgcttgtacgtcctatgatgggtagctaaagac

SEQ ID NO: 1681 - DNA, 588 bp, Glycine max
  unsure (1)..(588): unsure at all n locations
agcttctcccccaattttctataaatattgtgatgaagtgaagtagaaaagggttcagccccttaggcacttctctctctttcgaatttgcttaggaaaattgtttccgtgaagaaaatccaagccgaggcgcttccgtaacgtttccgtaacgtttccgtgagtgatttcacgaaggttttcgaccgttcttcgacgttcttcattcgttcttcaccgttcttcagtcttcaacgggtaagtacctcaaaccaagcttttcgattcattctatgtaccacgttggaaaccaaaaaaaagaggtaaataataatataataataaaaaaataaaaaaatacccctttagtaaaataaagtgaaaaatcaattggacgttttctctttgggatttctcattcttaatcgaattgactaataactaaagtgaaactaaggctaaaatcaactcgcctagtcaagctcgtccacaaaaataggtttttggaagtttatcatttcaatttcttactaagtaaaatggatcatttttaaggtccaacgccttanaatgatcacctttcaagtaaaaaagaatcacttgattcac

SEQ ID NO: 1682 - DNA, 598 bp, Glycine max
ttgagccaaaatcctgactcaccataaaccttgacccattgtgagaatgtcaatccttaccctcggaagcaaaaaaagaatagaagggaaatttccaatcaaagaaaaagagaaggaaaatttccaatgaaagcaaaaaaagaaaggaagggaaatttccaatcaaagaaaaaaagaaggaaaattccccaatcaaagagcgggagaaagcaaaaagaaaagaaaggaaattcccaatcaaaagaatgggagaaagtaaaaaaggaagaagaagaaggaaagaaagcccctgatcggggatcgaaggaaaaacagaagaaatatgcatagaggtctttggaccggacaatatctgaacaatacagaattgtcaccaaatgaacaaaaaagaaggaaaggaaaccacgacctaaaatggtcttctccctttgattaccaaccaaaatcccgtgcgctagcgaccttttttcgccccgcactaaacacaaaaaaaccagaaaaagaaaaagcccgtaaaatcaaaagcccaaaacacacaaaagccgaaaaacccacccaaagaacccatttccaggggaagccctattgatccatgatc

SEQ ID NO: 1683 - DNA, 454 bp, Glycine max
agctttaaggactgaaaacagagaattttttgttaaaaaattcattattctttctgcaaaaattcttttataaatccttgtaaagttaaaaaaaatctcaaaataccttgaacatattgagagaaaaggactaagcacttatttgtatattcgtctataagacatttctacactactacaatttatagatttaacatcgcaaggttaacatcggttattcacaaaaccgatgttaacaaaagcacggtgacatttttgtaaataagtagacttagttaacatcggttttggaaaaaccgatgttagtatctcgttaacatcagtttgggaaaaaccgatgttatcgagttgatgttaacattcgattttttacctagttgatggtaacatcggttattttaaaaaaaatgaatgttctatcattatatattaaaaatctggaattgcacaaccc

SEQ ID NO: 1684 - DNA, 616 bp, Glycine max
tgtattcaagttcaaaagacggaaagcatagtgcattgttctgtttgaataattttaaatagtactacttgctttaccactagtttataataatggttttgtatgttggatatcttttgttgtttttcacttttgattggtaagtaatgtttttcctcctcttggttttgacaaaaagctacactgttcgttcctttgggattagaagaaatgagaagattgcatgctatgtcactatcagaggtaacaaggcgatgcaacttttggagagtggtttgcaagtgaaggaatatgaacttctcaaaaggaactttagtgatactggttgctttggctttggtgttcatgagcatattgatttgggaatcaagtaagttgaagaaatctttgattttttctattttttttactttttcctgaggtaaacattttacgacagacgtgaagttgaagatttgatatatgttgtggtgtgcacaatgcatattcactttatactgcattccacttttgacttaaaccaaatgctaactggtgtattaatataggagtttcaaaattttctttcgttgttttggactttggtgcttatataaatttttttttttttgatatt

SEQ ID NO: 1685 - DNA, 451 bp, Glycine max
agcttcaacgtcacaagtttccaacctgttttcgtggtggagttcagcacaaccatagtgtatctttctagctaatatctttaaagctataaatatggactattttctgtatctttgacctaatttataaatttgagaacactttaaggggttttgaaagttttgaagcgtggacaacatcatgaggatggatcctaatcatcgttcctaccttgtggtatgtctatgctaatttctcataggctttttagttttactttgatcatgagcggctagtcaacctaatttgggtgatgatgtaactgtctaattgtactcatttttctggtcttaatggaattcctcaatgttttatgttaattaattttctttttcatttttattgcttatatgggaattgatcaatcctatgcttaatttaatgtaccgcggtgatcttttgcgtattttt

SEQ ID NO: 1686 - DNA, 182 bp, Glycine max
catgatatggcggaaactccatcaacgaaatacttagaaggggggttgaaaacgactcaagaccaaggggactgcatatgagcaaaacacaccctatgccaccccctaatgtcatcgagaagacaatgtggagggctttatgctctagcggatcttatcaccggaagagagggcactgtata

SEQ ID NO: 1687 - DNA, 562 bp, Glycine max
agcttgtaagtcatatgctggacccatttttatgtagaacaaatgaaggtattggaagtaggagtcgaccaaagagcgggagtgatgttgaacttgtggtttatctttcttgggttgatcctcaatccttaagtgaaaatcatttcattcctttcaattgaactactttagcatcaacaaagttaaaatgggtcctctatttgagaggataatggtccatcaattcccatggtatataacattctcacattatattatatcctcatattcttataaaatagtaataacattgttaacaacattaactttgctaatgctagtaaattaagtagctaagcattaattgaatatagaaacagagaaacatgcaacagatcaatatgcttctgaacatatgtgttaaacattgacagaggggccataccatggttattatagtgtcttactggtcaggattcatgtttgtaatgatgatgaagtgaaaagaagaagagcagaccgaaagagagaaattcattgcaatgcaagtgtacaacaatcataattccattggtattttttt

SEQ ID NO: 1688 - DNA, 361 bp, Glycine max
cagatgatgcactctgagtttgcacctaccctttttctcctgtaataactatggcatcatttctggcgctaaactgctgagagatggaagccatcttctcaattaaatttctagcttcatcaggagtcatgtctccaagggctccaccactggcagcatatatcatacattgtctccatattactgagtccttcataaaaatattggagaagagactgctctgaaatctgatggtgagggcaactggcgcataggtatttaaattgctcccagaactcatacatgctctctccactgagatgtctaatacctgagatatccttcctgatggctgtggtcctggaaacaaggaaattttgtt

SEQ ID NO: 1689 - DNA, 622 bp, Glycine max
  unsure (1)..(622): unsure at all n locations
agctttgttactgttgcatcaaacttgttatttgatcttgaaataactatgtttcctagacatttaattaccttttgttgattcctgtgcaaacatgtttacttgtgttgttatcctttccatttacttggataagactttgatatttaattgttaattttactaaggatgtcctcctctacaagtgcttatattttgaaactatttctatgtgatggttgtgctggaaatggttttggtaatttatgcttaattattatttagaaggagtaagtttgtaaattataactataaatttttataaaatacatttgtttgtaacttactaaatttttccttttaaagagtaagtgtatgctagtaagtgtgtataatacttgttaacttacactcaatttttcaaagaagtaagttaacaagttattattattaaattttcttaaagtacggtcaggtacaacttattaaattacaccttcaaaataatgattactaatgtagatggtgttattcgttcgtattttttaactagataatttcattntcagcaatattttattttacaaatatttaaattcattatttaggtaaaataaaaaaatttacataaatatcatgaact

SEQ ID NO: 1690 - DNA, 439 bp, Glycine max
ttgaataccccaaggatcaattaggaaattacttgtgaaagtattattctcatgaggatgggctcatgggccactttgggatagacaagatgtccataagcattgcactaggtgtgtggcttgtttacaagccaagtctagggtgattccttatgggctatacacacccttacccatcccctctgcaccttgggtagacattagtatggactttgtccttgggcttcctagaacccaaagaggtgtagactctatctttgtggtggtggataggtttagcaagatggcacactttataccatgccacaaggtatatgatgcttcccacatctcaaaaatcttttttagggaaagtgtgagactccatggtttgtctaggaccattgtgtcagatagagatgctaagttccttagccatttttggaaaaccttatgggct

SEQ ID NO: 1691 - DNA, 586 bp, Glycine max
  unsure (1)..(586): unsure at all n locations
agcttgcccagagaatgagtccacggaggatatgcttaccacctcaaaagactggaaagcagtttctaatgactcctctgctgcctccacataaggcatagaggatgggcaactcaccaagatatcttccttgcctgatacgatgaccaaatgtccttgcactacgaatttcaacttttggtggagtgtagagggaacaactcccactgagtggatccacgggcgccccaacagacagctttagggggggttaatgtccattatttggaaggtgacttgacaggtgtgagggcctatctgtactgggagatcgatctctcccctaacctctcggcgggtgccgtcgaaagcacgaactaccattgaacttggctttaagtgggaggctttgaatggtaatttgtccaaagtgctcttaggcatcacgtttaaactggaaccattatcgatgagcactttggctacgatatggtccatacacttgactgatacgtgcaaagccttattatgccctctcccctcggcggngatttcttctttggcgaaagcgagatagtntgtgggcatgatattgttgatcaaccct

SEQ ID NO: 1692 - DNA, 494 bp, Glycine max
tctagccaaatggacttaccttgaattaattcctttgatagttctttttgagccttgtttccctttccttgttttgaagctcactacaagccttaagtgaaaaaccatgatattaccatatccttaaggaattttggagctttggaattgttttgggaataagtgtggggggttttttgtttcattggacaacttgttttgttggctatgcttcatgatgtattttgggccatacttgatgtacattgtatattggttaaatgttggacatgctgaatgaaatgttgttctcaaaggctaaagagtaaaaaaaaaaaaaaaattcgaaaaaaaaaaattcgaaaaaagaaaaagaaaagcaataaagttgagtgaataagatcttaaatggcacaagaatgatgaaactcttggttctactcttcatgtttaatttttatctttacttctttttaatttcttatttttttttcttaatatgcacttattcccct

SEQ ID NO: 1693 - DNA, 621 bp, Glycine max
  unsure (1)..(621): unsure at all n locations
agcttatgcgcatatttccttacgaacgtttacttgcacaagacatcctattaactaagaaaatgcacccatatacaatcaaggtagcttcattacctagattatttacatgtacttccaaggtgtatttgttatttacatcacacacgcctccttggctgaatttacacacatgcatactcaaagcattttggggtaccaaaaattgcacatgcgcacatcttggtatttctaatacctatacatacacaaacttcacgatgaatcttgactacctacacaataaggtgctacatttcatgcctttttttcaagtttttgctacctaaagccgcatgcaaattcaagcatattttcctttgctgactaaaattgtattcaaattaaaaggtatatattttttttgtaatatggtttcttcacataacatgcaacatatatttatatatatttttttgtgagacattttgactaccaaaaattatatatacatacatccaagtatcttgctatcatacccaaagtgtaaatggccaaaggtatcttgctacctattctaaacctacacattcatgacgagcannaatcctaaacatctaggcgtanggaaaatattgtagt

SEQ ID NO: 1694 - DNA, 533 bp, Glycine max
  unsure (1)..(533): unsure at all n locations
tcttagtctcagatgatgcaactgagtttgtagctacctcatgaactcctctaataactatggcatcatttctggcgctaaactgctgaaagttggaagccatcttctcaattaaatttctagcttcagcaggagtcatgtctccaagggctccaccactggcagcatctatcatacttctctccatattactgagtccttcataaaaatattggagaagaagctgctctgaaatctgatggtgagggcaactggcgcatagttatttaaattgctcccagtactcatacaggctctctccactgagttgtctaatacctgagatatccttcctgatggctgtggtcctggaagcagggaaatttttttctaagaatactctcttaaggtcgtcccagctcgtgatggaccttggagcaaggtaatacagccagtcctttgccactccctctaatgaatgaggaaaagccttcagaaatatgtgatcctcttggacatctggnggtttcatggtggagcagacaatatgaaat

SEQ ID NO: 1695 - DNA, 581 bp, Glycine max
  unsure (1)..(581): unsure at all n locations
agctttcataaaaaatgagtgatattttattatttattttcacaataaatcaaggttataaaaagaacttagcaattgatacatttaaaaaggttgtatgtttcttataattaaaagaataaaatatcatcattggttcttatacaaaggacatttataatgttttaattattttttctctcctttggttgtatatttcatacactatttctctaaccagccaaaagaaattctctctcaatcatttcaaattgtcttaattaatttcttttatcatttaaaaatggtaggactagtatgagaaataaagttatttttttagtatttaacgtaactacgtatttaaaagttgagactattggttaagctgaaatgatatcatgtcagttgatttatgcacccgatgatataatttattctttttaatctaccatattttatctttatctttaaattgaaattaaataatnttttaaaagaatatgtcaacagttaaaaataaattcatattacaatttaaattattcattgagtacaaaataatttatatattgaaatatatttattattaaaaaatttaa

SEQ ID NO: 1696 - DNA, 479 bp, Glycine max
tctgatgattccactgcttgtagctccaaaagggtgaaaaaattcttttatttaaataccttattttcacctaattttttttaaagacggttattagcaaataatcatctttgaatgtcgaagccgacacagcattcaaagaagattctcaactaatgaccgtctttgaatatcaaattagacacaacattcaaagacggttattcaaataaccgtctgaataaccgtctttaaatgtccaatcagacacaacattcaaagaaggttattagcaaataaccatctttaaatgtcaaataagacataacattcaaaaacggttattagcaaataatcgtcgttgaatgtcgaagcagacgcaacattcaaagacggttcttaactaataaccgtctctgaatgattgtaattctcaaagacgattgttaaaataaccgtcataaaaagcattttacttttaacaatacaatatacaacga

SEQ ID NO: 1697 - DNA, 609 bp, Glycine max
  unsure (1)..(609): unsure at all n locations
agcttgatgattcgactttccttttatggctttaacacattgagtcagtcatcaaatcacatcaccttcaacgtttcattgtcaatcctcaaattcctctctgttttctttctgcagaagaatgtgaagctggactggttgccaaaggttttaatcaagttaaaggctttgatttttcagaaactttttctccagttgtgaagcctattactattaggcttattttaactctagcaatcacaaatcaatgggtgcttgctcagctagatgcaaataatgcctttcttaatggcttgcttaaatgagactgtctacatgtctcaactccctggtttccaacaatcaaatccttctctggtctgtaaactaaataaagccttgtatgggttcaaacaagccccaagacaatggttngagaggctgcaatctgctctaacttagtttggttttgtggctagtaagtgtgatccctctctctttgttttcaagacttcatctcactgtgtatcttttagtttatgtggatgatatcatccttactagcaagtccactcaatttgatcagcacctgacatctaacctaattcaaagtttttcttaaacaactcg

SEQ ID NO: 1698 - DNA, 554 bp, Glycine max
acctgaatgaaagaaatgaagaaggggatagagccttttatgcaatccaagccatggacgcttggttcagattgttccggatgcaaattcaagaaccaccattgttgatcttccaagaactcaagaacagaaaaatagaaaatatggataagatgagaagatgaacggaacgatgccacgatccacggagaattgataagctgaaggagaattcaccacaaaggaatagcttccttgataagaatcaatttgattttcagccaaaaaccaaagaaaaggctaagctctttctaagcacaaacttaatttcaattatatcaaaagtttctacaatttagagtttttgagtatttatagaactagcttaagaggataactaagcctctaataaggcctatttacatcaagctcaagcccattacacaaataaacaaaaattaggaattttcgtaaattcacactaaaggtgtgcgctaagccatacagctcacgctaagcccagtttctcctcgggttagaattgggctaagtcagacagcttgcgctaagccact

SEQ ID NO: 1699 - DNA, 509 bp, Glycine max
agctttcattgttcaatttcgagcatcttgttatattatgcgcctgaatcggaccttcgagttgaaagttatgaccatttgaatttcacgagagcttccgtggttcaatttcaagcgtatcgatatattatgcgcctgaatcggacctccgagtgaaaagttatgaccatttgaatttctcgagagctttcgttgttcaatatcgagcgtctcgatatagtatgcgcctgaatcggacctctgagtgaaaagtaatgaccatttgaattgctcaagagctttcattgttcaatttcgagcgtcttgatatattacgcgcctgaatcggacctcctagttgaaagatatgaccatttcaatttctcgagagctttcgttgttcaatatcgagcgtctcgatatattatgcgcctgaatcggacctctgagtgaaaagtaatgaccatttgaatttctcgagagcttccgatggtcaatttcgagcgtctcgatatattatgcgcctgaat

SEQ ID NO: 1700 - DNA, 450 bp, Glycine max
tcccttgttcaattttgagcgtctcaatatattatgcgcttgtttcagacatctgagttgaatgttatgtccatttgaatttctcgagagcttccgttgttcaatgtggagcgtctcgagttattatgcgcctgagtcggaccttcgagtgaaaagttatgaccatttgaattgctcaagagctgccattgaccaatttctgagcgtctctatatattatgcgcctgacccggacctgcgtgtgaaaagttatgaccatttgaattgctcaagagctgacattgttctatttacagcgtctcgatgtataatgcgcctgaatcggacctccgagtgtaaagttgtgaccatttgaatttctcgataggtttcattgctcagtttcgagcgtctagatatattatgcgcctgaatctgacctccgtgtgaaaagttatgaccatttgaatt

SEQ ID NO: 1701 - DNA, 591 bp, Glycine max
agcttgggactgaacaaaagcaagacttatatggtttatacctgaaattttcttagtgtaagttggtagatttaggttctgtcaaattttgttttcctcatattgcctatctaatgtatcatggtaaaccccggagagtgtctaaaactatgacattttcatagttctggcaatgcaaatctcttgaaacaatactttttttgttgcaagagaaaaaccttattttccttgaatctaaattgtattaacttcaaccttcacatgtcagaagaccgagttggaaattagaaatttcaaaatcacggtttttcttttttaaaggccagtacttgtactaaaagaatgctgtaccatctaattatcatggcccaaaagaaaattcaagctattttgtgtattactttatctctaaaagaatttttaatgtaaagtataaatgatatttatattttttttcttccaaaaataacataaactaggtgcacatataatcttaattcaacaatttatatttcgcatgtgatggttttgtttttttgacaaatatttcgtatgcgatctgtatgctgctccttggtgtgttttgaattg

SEQ ID NO: 1702 - DNA, 499 bp, Glycine max
tgaacgttgttgctttggttgtgagactcataaaaggccttttttatgaaaaaagtgcgccactttgctctcctccaatgatggacttggttaggcaacaaatataaatatatgcgtagcataagagtataatgacgctttatatatgcttgctttgacgttccgctatggtatgtatggcggtgtcactgtcaagttcggttattaaacaacatcgattgaaaccgacggacaaggtttctccttttgacccttcttcaatggccatggaccttaaaatgcttcgaggaggtaattctgcctctctctctctctttctcacaaagtaaagcggaattattaatatgagtacgagaaataatatatcaccgagtcttcattcgctatctctctattactttttaagagaaaatggggccttgcaaactaggcggcacctgaagtataacgtcacttgttgcatgtttgttaccacgtcactcttctctcatatagcatc

SEQ ID NO: 1703 - DNA, 602 bp, Glycine max
  unsure (1)..(602): unsure at all n locations
agctttagcaaaagaaatagaccccttatattaagtaaaatggttagatcgaatgggcgaaccaatcttggacaggattttccctaaggcttgaggattccaaagctccagaggaagatttctgagtttaacccaaacagggatcttgctgagctcctcattgccaaagtcaaagaatgctggcataaccttcagaagtaggggtctttgaaatatgaagtaagggcctgcagagaggacttggttcagatcgtcctcagactcaaatttaaacaccagccaaccactttcatgagctgagaatgaaaacttgactccccatttttggcaacaatccagcagagctttctttcatgggaagcggccagccacatatccaataaggctatgtccccaagcctcttccaggggttgcaaatcagtttcttccaacagcacttcatcatcagagggtggaggggagaactttcattccaaaactttggagggtttctngtatctttgacagattgacccatgagtgggagccttattgtcgtctagctgtggtgatgacttagagccataggagtgagatgaatcatcataagtagttgaatcat

SEQ ID NO: 1704 - DNA, 595 bp, Glycine max
ttttcctctaatttgctctgatagggtttccaagcgttttatataacgagaagagattaaagccttcattttgtattatctttgtgcaattcctttttctctctccgtaaatattatttcacaaatcgcaatggtgaaagtgtggggaattgaattgcaaactaggtgtctaaatttgatgatgattcaacggttaatgagtctgagatcatagttttactggacaggttttgagtctctgtgggaaaagaaaaagctactatgcgaaagatatttctcttatctcacaaatgagttgtgaagatggtgctgaaatatctcgatgatccaacgattaatgagtccgagatcgtcgttttactaagacagatttgaatgtacgcaggaaaaagatagggttttggaaggggaaaagagaaaacgatattgagaggaataggaggctatcttcagtcttaaaacatacctaacatgtctttattatagtagtgtactcacaacctattactcactctatatatctaattttttatttcataaaagagaactctattttttttactaaaaaagcctttttaattgatttatgaaaaat

SEQ ID NO: 1705 - DNA, 463 bp, Glycine max
agcttgcattgttaattgtagtatttgtgtttcttgcttttctcattgaaattcatgtgtttcatcatattgggtgctaagatattgtttactttaggggtaggccttggccagattagtagaagaaatagctcaatgtggtattccagaaggttcaaggaagatcaatggaaagtacattcattctcaccttgttgctagattagaaggtatattggtatttgctctaactattactcacgattagagcctaccctatatgattaacaagagtacttcctagttctggataactatgtgttaatgtttgtgtggaatatgctaataaagcttctcaacaatgtcttttttttccaactttgccctatttgtgcccttatcagtgcaaatgcattgttttttcctacatagttgtaaatgaacaactgaaggaaaaaatataggatgtcggtacgacataatc

SEQ ID NO: 1706 - DNA, 589 bp, Glycine max
  unsure (1)..(589): unsure at all n locations
ttaacagcatagccttgtaataggacttccaaagctgtcatatcaagatgattctctctgtgaagcttgctagaaagggaaacaagtaaaaagttctttcaaagtcaaaaatgttgtttccacttattggccgttagagctcctccaccttgacctatttggaccaaccaatactacatccctcactggacatagacatggtctagtcataatgaatgattacaccagatggacatgggtcatgttcctaacccacaaggatgaatcttttgatgccttctataaattttataaaagaattcaaaattaaaaagtttttttatatttgtatctcttcaatcagaaacgaccataggggagagtttgaaaataatctttattgaaaacttttatgaagagaatgatattcaccataactattccactccaagaacaccacaacaaaatggagttattgagaaaaaaaatagacctcttcaataaatggctagaaccatgcttaacgactactctacccctaaacgcttctaggctgaagcaatanacattacctattacatatagaaaaaatttatatatgtcaatctta

SEQ ID NO: 1707 - DNA, 437 bp, Glycine max
agctttaacctcatcatctctcatagtctttagatttgggagccaatccaatccttgtgtccggactctcagccacttatgatagccgccgatgatcccattactgcttcccctaagctctctgtcctttcttcacgccgcatcccatgccttgcgaactccttggagtaccctcgcattgtggtcactgaaaccccgtgcgatgaaaggcgtgatgctttcgtctaatggagctcctctcatggggtagccaagctgtcttatggcgagaacgggattataattaatacaaccccttgttcccatcaagggaacatttggacatccttcgcatgaagatagaatcttgattcttccttccttctagcgagggaaccaattaatagacgcccctccatgctagccaagagttggtcccaattcgcctttcctttttc

SEQ ID NO: 1708 - DNA, 508 bp, Glycine max
  unsure (1)..(508): unsure at all n locations
tgttgttttgaacgataagcttagaagcaatctaaaatgggatctcacttaattggcttcaacacaaagtgagcttgataaattgaagcaagaaaatgaaaaacttgtttcaagttataaagccaccggttgcgtttatactagatctcttaatatggataattacaaatctttgtaagatgagtttgaaaagtttaaaaatgatcactatgaagaatgcatgaagttgcaaactgagctttcctgtcttaaagatctttttagaaaaatgaataaaggaaagagtgatcttaatcactaactcagtgtgcaaaagcatgctactgataagactgatgtgccatcattttcttctattttctaaaccctttttgcaccattttaatcattgattgatcttaattgtcaattaattacgcaggtttattatttgggctcatttagctaatttgatgtttttaatctaatttcaggaattaatganaacatgggctttaatccgattttg

SEQ ID NO: 1709 - DNA, 487 bp, Glycine max
  unsure (1)..(487): unsure at all n locations
agcttcatatttgaatacaagaatgtgctttcttgctcttctcacatcctttgtgcctttatgagtgacttcaagcatttttcatatttcctttacacttttccaccttgtagtatgaaagaattcatcagaagataaaccagaagttaaaatgtttttagcttttttatcatcttgcccttttcttttctcatcatctttcatctcttcccattttttaggtaccaattcaccatttacttctttagttggtgtaaaagtacctttaacaatagcattccatgcatcggggtcaattgactgaataaagatttccattctcttttgccaaaaagaaaaatgttccgcctcaaacaaaggatgtcgatttaaagatgcaccctctttgaaaatgatttgttttgagcccactnttagaaaanttgtgatcttgagtaacttacaatatgtagctctgataccaattgaaaaagatgatggaactcac

SEQ ID NO: 1710 - DNA, 562 bp, Glycine max
taagctccttcaactgcacaaggctcttaatatttgaagagtatccttgtggaaccttcacccgacgaaaacttatcttctccttcttggacaaagtatggcaggctgggggcaagtaaattttcttcccatcagaccttggatgcaactgtgatcttatacccatattagctagatcttgacgggtattcaagccatccttcgtcttgccttgaatgttaaggagcgccccaatcacactatcacaaacatttttctccacatgcataacatcaatacaatgtctaacgtcaagatcacaccagtacggaagatcaaagaaaatggacctcttcttccatatgcaactttgacttttatccttcttttgggtcttcccaaatacagtattcaggtgttcaacccgctgatatacctgctcaccagtcaacggtatcggtgcaatatcatgctcttgacttccattaaaaagcttttctcagtcgtctataaggatgattgggtgttagaaagcggtgatgcctactgtagaactatttttctccatgtttaagttgtatgt

SEQ ID NO: 1711 - DNA, 477 bp, Glycine max
agcttgttacgtgtctttctacagattaattcaaagtatgatgtgtatatgtcaatcagtagatatcttattgtgaagatcctagaatgcttgccttgaccgaaggtggtcatcaagtccacatagcctctggtctctaccatctcacttgtaaagtcaaggaatggaccggcatgaggatggacaatgttgggggagatgtctctggaaagttttccaatataggatatcaatagaactaccctggtcgataaggaccctagacaccatgaagtttggaataatgatggagacaaccacgaggtcgtcttggttgatggggttgatacccttgaagtccctatctgtaaagtgataggagggaaacttcgttgtagtggtgcgtcaacaaaattaatgttgatgtttcggatagcatatagatgacatttttgggactggtaggactggtctccataataatgtgctctgatttac

SEQ ID NO: 1712 - DNA, 893 bp, Glycine max
  unsure (1)..(893): unsure at all n locations
cctcaatacctccgcccgctacactgatcacctctctctaaatcgcatgcataacaacgtcctcctattgtcactcacacttatcagactaaccatcgtccccnnnnccccacccacctgatgataccattggaatacccacactatataatactcaacgcgcttatacagcataaccctgtaaactgacgtaccaagctgtgcttatcgaagaatctactagagaaacacgcaccaaagggaaacacatacaagacgctctgaaaggccaaaagggagaccccacgaaaaggccgggtgagacaccacacctggacctaagcggagcacccaatactatcacccgtcacgcgacataaagacgcgcggtcatgaggagcgaggacaacccgacggacatggggcatgatgctaacccgcaaagatgaatcgtctgatgcctcacataaattttacagaagaattcaaacacaaaaagcctctatatagatgaagcccttcgatcagaatcgaccacaggggagagactgaaaacaacccttactgcaaaccctcatgaagagaatgatgaaccccataactatgccactccaagaacgccacaacgaaatggggtcctgagaaaaaaatatacctctccaataggggtggaacctgccaaagatactctccccaaaacgcttttgggtgaagcaacaacattcctatacctatagagaaaattcactgcggcgatctaaaaagacccccttaattaggaagggctgtggcccaaacccttatatccccattcgacggcggggtcatgttaacacccgggaaaaccccggaagcctgggccacagggggaattggaacctactatggacctccgatcttccggggcgagtgan

SEQ ID NO: 1713 - DNA, 404 bp, Glycine max
  unsure (1)..(404): unsure at all n locations
tgcacaacaagttttccacatccacaatgcgcgcataaacccaccatcgcctgttgcccacctgcaactgagctcacgtactcccacgtagcccatatcgctcgttctctcaacaccgggtccncatcaatccttccaagctttcacaacatccaagcaaaacaacattcacacagcacaagctatcacagccaagcttaacaaagcataggcagacaactctgccataacaccaaccaaaaatcacagcttntcccactcagagaccccagtaacaatatcttcgatccaatgtgttaaccgttggatcgactccaaacatttactggaagtctatagtgcataagcctacattttgaccgntgggatctactagcacacatncagaactcatttacattact

SEQ ID NO: 1714 - DNA, 225 bp, Glycine max
  unsure (1)..(225): unsure at all n locations
cgcttacctatcgtctctacagtctnntagattgggagccaatccaatccttgttttcggactctcagccacttatgatagccgccgatgatcccattactgcttccnctaagctctctgtcctttcttcacgccgcatcccatgccttgcgaactccttggagtaccctcgcgttatggtcactgaaacctcgtgcgatgaaaggcgtgatgctttcgtctaat

SEQ ID NO: 1715 - DNA, 334 bp, Glycine max
ctcgtcttcttctatagtccagtcttcttctggcttcaattcttcagtgggctatccttctgtgtccagcatcttgtgatgttcccagactttgatgacagctctacaggttctgatatccaaagatttgaggaaggccaccattcttgctgtacaatatatatagttgcttccatcgagaattggtggactgatcactggaccgccttctttcttcatgttcatcagaatttatctgcctagatctcactctgtgatttcgagtgttggctctgataccaattgaaattctgataccagcggacagatgtcgtaccggatgtcacgacatcac

SEQ ID NO: 1716 - DNA, 261 bp, Glycine max
  unsure (1)..(261): unsure at all n locations
ctcggatgtctgatcgagccctgttatatatcaagacgctcgatatngagaatggaagcactaagaatagtcaaacgacaataacctttgactcggatgtccgattgagtcccgtaggatatcgagacgctcgtaattganaacggaagctctgagaanaatcaaacgacaataactnttaactcggatgtccgatcgagccctgtaatatatcgagacgctcgaaagtgaaaacggaagctctaagaatagtcaaacgac

SEQ ID NO: 1717 - DNA, 353 bp, Glycine max
  unsure (1)..(353): unsure at all n locations
ctgctggaatcgataccattatgtgaatcgatacacagtgcancatttgaattcaaattgtaatagctgttgtaaatcagttntggccactggtaatcgattacatcctctggtaatcgattaccagagagtaaatntgttgaanaagactctntaacttaaatttcttggccaaactttntgctacttcaattggatgtcccttcctatttaatataccctttctaagactctagagactgtcttgatcatccatcttgaatatctntaatntctttgtcttgaataaagctntgagacgcatgtgaaactntggcatcatcaaaacattcagcttgatcctttttctacat

SEQ ID NO: 1718 - DNA, 639 bp, Glycine max
  unsure (1)..(639): unsure at all n locations
actgcgtgatngcactatgaaatgtcagctcgtggantatggngtacccatcacatgtggtactaggtggcggtcgggcgatggtgcacaacaagtgttccacatncacaatgcgcgcataaacccaccatcccctgttgccacctncaactgagctcacgtactcccacgtagcccatatcctcgtttctctcaacaccgggtccccatcaatccttccaagcttncacaacatccangcaaaacaacattcagatagcacaagctatcacangccaagcaaacagggcanaggcagaanactctgctcaacacactaaccaaaatcacagcttttctcacttaaagaccncnnagtacaatnctttcgggtcaanntcgtaaaccgtgggatcgactcaaantntactggaagtctatagtgcataagcctacattgtgaaccgtgggatctactagcaaacatccagaactcattntacattactctttccacaaccagcannatacatggatnttnctgcacttttgtgcaaaatctgctgacaantntacagcanaaatctcacaaagagcatatttcgaanaccacacttcccttcatncaattgtgccaaatcaaatctacaagtcccaatt

SEQ ID NO: 1719 - DNA, 220 bp, Glycine max
atgccccacattatttgcatgacacagacgcaacaatgatgatgtggatatttacgcagaactgtgcatgcctgcacctatgcggacactcaagtgtcaaagttttatggacatgtgatgcgatggctcaggattcatttcctctatatatagtcaacccaatgaatacaaaatatgatcttttatccatttgtgcattcatacgagtacattatgggcg

SEQ ID NO: 1720 - DNA, 83 bp, Glycine max
ctatgctctgtattaactatctctgtgtatatatgatataatggagtatgtattcaacgctcaatatgtaatactcggaccca

SEQ ID NO: 1721 - DNA, 408 bp, Glycine max
  unsure (1)..(408): unsure at all n locations
agcttcatgacanactatgtatggcagaacttcattattggtattcaatatatacaaatgagctggttccaaagcaatgccttccaagatntatttgatgatgccaaacgatcaagagtcaagcaagttccaaagaatcaagagtcaagcaagtttcatgaatcaagatcaagattcaagattcaagaataatcaagatcaagattcacgaatcaagagaagactcaatcaagataagtattaaaagagtttttcacaaactattgaatagcacaattgtgttcaaaataatttttcaaaagaagaattttaccagagttctactctctgggtaatcgataccagaaggcagtaatcgattaccaatagtcaacattggtttcaaactgatttacaaagctgtaatcg

SEQ ID NO: 1722 - DNA, 530 bp, Glycine max
  unsure (1)..(530): unsure at all n locations
tggggnaatgttgcgtgatgacncactatacgcacacttagatactcaagctgcaccagctcgccaggcgagctnggtngcttcctccataagcagccgccttctggagggagaatntctagaggcccaagtgggcgctggtgctattngcacccncatttttactaaatacaccccattgctctttattggtatgtttttccgtaaccgtacgagaactctacgaattcgtaacgatgcttggtttcttccgtaatggtacaaaaccttacnggatacgtaaccatccattctttgcttccagaatgtacggaactttgggattggcactacacttctttaatttcacatgcgcgaaactccggatgggctcaattggttgctatgccatatctgatacacatcagaagctagaatattgatacaatcagccacttgacacactaactatatagctatgtgaacttgaaaaaaaagtacacaactctcagatggttactgttgacaaacgctggatataatcaaacccn

SEQ ID NO: 1723 - DNA, 98 bp, Glycine max
tatgctctaattactcatgctttcaaggtggtggacgccatatttttcttcaccagaccggggtttatctcttcctcccaaggaagactctgactgtc

SEQ ID NO: 1724 - DNA, 275 bp, Glycine max
tccgcctattcttatctagagtagtggagcacagcaacttactactgacatatattcgactttagtaggggacagtgtacgtgagccttgcatctggcatattcatgttactaagctagcaccgataaagggatagcttgcactagcgctttttcttgtaactttatcaccaacataggccacatcataagagctgggtagactgaaactttctctgttttggaacataagaccaagagtagaagttcaatttaatatctacaaatatgtttaat

SEQ ID NO: 1725 - DNA, 589 bp, Glycine max
  unsure (1)..(589): unsure at all n locations
cctgtgcntcttganncgctgaccaggtcttaagctactgcggatgcaactttgtgataatagtacgttctatgataccttcgtttaagcagagacgttagtgatccaatcaacattggagaaagagatnaaacgaatggcacattacaaaggttagctcgttcgattctgattgatccgaacacactcttttgcgtgatttggctcgctggtgcttgtttntattcaacagaaacaaagtgaagataagcatgcgcgatattaattaacacttatgatacctgacttagatccatgtcaaatgatcacacatccttatanagaanggttgaaattngtacttatagattnggggtctactcacgttaagttgtcatttattggtcattgtgatccaaacgggttacaccgatagttaattgtangcttttctgagataganaatctgacccagaanatatctgttctgttgcgtattactatgactcattcgagggcgagattatatgctctcgattttgttggaatgatagaaggatatggagttgggtgtcagcttctgnataccagatgacatgatgcntcctgg

SEQ ID NO: 1726 - DNA, 261 bp, Glycine max
  unsure (1)..(261): unsure at all n locations
gaatgataatcttcgatggctgcagaaattccngaacagaattgaccagtaacaacctctcttaagctcactactctttctctttccctgtatacctcgcgttgcttggagatgtatcactaagttgtatttaattatcaatcatgttagaagtcaaccaaattattatttattcacaatacaagtctagctcaaatgtgtcatggaanaggatacaatacaaagttatatataacggcgcagaaaaaacacattttcatc

SEQ ID NO: 1727 - DNA, 353 bp, Glycine max
  unsure (1)..(353): unsure at all n locations
tcagctctgtgttgggatccaatcagtgtatagaagaatctacaaccagaccacattggagatcaagagtgattccactatctggtacagccttaccaggcgaggtcaccgagaatgggcagttntgattntctgggccatccatcttattaatcttagaagctntgtccttttcaacaatggacagcaattctttccatgctacagaagcctctntaactccttgagnctgttcagccaaagcatctgaccttgacagcaaggaacgtaaggaatcccanattagcacagaattcgtctcttctttcgatagaattttcatgtcatacagatcatctagccctgcaacatgt

SEQ ID NO: 1728 - DNA, 561 bp, Glycine max
  unsure (1)..(561): unsure at all n locations
ntactagacctcgtncgacatctctaagcacctgcggctgcagcttagttcgtgcttaagtatgatgaatgcttctttgataacatgtgctaaagtacatcggcgaaaagatatgtgtcgatggatagagatagagatctgctgccgatgattcctattgacagacatgaattcaaagaatgcccaatgctctatgtgtggggtatcacggtattanagtgaaggatgatgangagtgtactantgatgaaaacttcaagaacggctcgtcagcgaaggtggtgtggtatcttcccatcatttcaagggtaaagcgtctattttctaatggagatgatgcanaagacctaacatggcatgcanatgngagaaacagcgatggaatacttcgtcatgcggctgattcctttgcatggaagaagattgatcgtntgtatccggatttcgtcanagaggcaagaaactctacgctaagactagccactgatggaatgaatcatatgggtagttagcactcacacagtcgtggccagttgtagtatttacattgctcctagtgcg

SEQ ID NO: 1729 - DNA, 581 bp, Glycine max
  unsure (1)..(581): unsure at all n locations
atgcgtgatggcnctttgatctcacgctantttatatatatatatatatatataaatcagggtttggcttagtcatttatatcttgcgagacttatatttaaatcattttacagtaggtgttacgaaattntcaatcaccattattttgatattagtaatgactaagagagataatataattctaatagtcttctaagattggccacaaatcatgattaaaaaataacctcatatatacagctattacataatcaactttgtatatagagatcttgaacaacatttatagatacatagttttgatagtcaaattcatgcccagattgaatgaanaaaagaacgtacatttaatgaatatagctgaatcagacctaacatggtntataataattaaagctcgtatatttacacacaagataaattgctactgactaatcatgactagcacaggacactgatcatatatnggtctgaaaatgaacttagaatgattttcttataaaaaatacttagactgtttgactatttattaaaatattatattccatcaatactatgatttatattatcattatatgta

SEQ ID NO: 1730 - DNA, 212 bp, Glycine max
  unsure (1)..(212): unsure at all n locations
acatgcacagtggccaaagatgcatgggagatcctgaaaaccactcatgaaggaacctccaaagtgaagatgtccacatggcaactatnggctaccaaattccaaaatctgaagatgaatgaggaagagtgtattcatgacttccacatgaacattcttgaaattgccaatgctagcactggcttgggagaaagaatgatagatgaaaagct

SEQ ID NO: 1731 - DNA, 419 bp, Glycine max
  unsure (1)..(419): unsure at all n locations
catcatagtgcctctatacgacctttactccagctgattctagaccttatacagtctagcgtgtagtctggcatggctaattgcaataatatacgcaaatgaatcagcatgatacagtaatctgtacacatactattggatggacaacacaacatcttgccatgagacccattcgctactggaatctctcatcttagatgctcaagggcctggggaacttctggactgaggctgataaagtcagtgtattgttcagatgatatgattcacactgctatagggatgatatcactaatatcatactctgctgaagatatgaattgctactttatagnatactcctgccaaaaaactattacttatgttcacgaatctctgaactcagtagtataaacacactgcttggatacatgacacan

SEQ ID NO: 1732 - DNA, 588 bp, Glycine max
  unsure (1)..(588): unsure at all n locations
ncctgtgctcgtgaccgcgtcttaagcgactgagctgcagcttgtatcattacacaaatactgtaatcgattacccgagcatnatttcataagatattctcaacagtcacatctttntatgtggttcttgaatggctatcaaaggcctatatatatgtgacttgagacacgacattgctacgagtttttcagaacaaaaaggtcttatactcttaaaaagaaaatcgttttatcctcttaccaattccttggccaaaacacttgtgattcaataaggaattanttgagtgctcaaatngttcaatctatctctttcaagagagattcttcttctcttcttctttattctgaaangggataagagactgacggtctctcgttgtgaaagaattctacacagaaaggaaggattgtcttgtgtgttagaacttgtaaatgaattaccagatatgaactctcaccgggtgcttgggactgacgangacanggtgtgccgaccaanataatcgagttgccttctctccctaactcttattatattgttatatctatcaactgtctattgcctaatatagaatcatatagggn

SEQ ID NO: 1733 - DNA, 215 bp, Glycine max
  unsure (1)..(215): unsure at all n locations
gtacgtgagctcagttggaggtgggcaacaggggatggtgggtttatgcgcgcattgtggatgtggaaaacttgttgtgcaccatcgcccgaccgccacctagtaccacatgtgatgggtaccccataatcctacaagcttgagatgaggaagtgttgaagggtgaaacttcctgctnttattgttgaccacagagtggtacctggagatatgtc

SEQ ID NO: 1734 - DNA, 456 bp, Glycine max
  unsure (1)..(456): unsure at all n locations
agcttacacanatggngcgagaatgatgtgtaccgtctgatttattaataaanaaaaggaatagttaggattccttgatgtctaccggtttgggggatatttgtaagaaataagggtattgaaaatgtcttattgttgtagtggccaaatgtttcttatatgtttcgaggcgcgggttcctgcaatgcttngtttctctctttatgttattttaagggtgcttttgttaacaaaaagggaagaggaacaactaattgaaaatagaagtaagtacgggtcgaactcacgatacattgttgctcgtgatcattaacattaaattatcacccttcaataaccaattaagcaactataaatattttataaacgttatctaatatgnttaattacacttaaaaataataataaaatatctcgatagtttgaattggtatatattatgaatatatctttaac

SEQ ID NO: 1735 - DNA, 286 bp, Glycine max
  unsure (1)..(286): unsure at all n locations
gtagacatggaaataacaatcaatacttagcacataatagaagcttccaacatatagagtgagcaaaaaaactaagatggaatataacttggaagaacacaagggaagcaaattcaaaatacaatgtacttgcatactcataatcgaatttgtagaattggcaccataaataccacattttacaccctgcanacaagagatatatgaattaagcttatgagaacannatgctagaaactataaatataatcatatgcacatatgagatatcagaatcatataaaat

SEQ ID NO: 1736 - DNA, 620 bp, Glycine max
  unsure (1)..(620): unsure at all n locations
acgttgattgaccttcgactcgacgacngcgatncantagagctgacctcgaggcatgtcatcttgacacatctccacccaacgccagcatagncgttctgtgttaacctgtgatgtacctgagcangcgagctcctgtctgtcaacagataaaaggataataataccacatagcatggaggcttgtggtggctggccaactgtgaatattgtgtaatatgtggatagcggcctctggtaattaattaccaagggtgggttatctattacaacgcttataaatgaagacaggatgctgagatggtctctggtcatcgattaccaatgggtgttatccattaccatgcttgataacgaatcgcgacacttatcgagcctctggtnatcgagtaccagcctgtgtaattattacacagaggaatgcgtcacatgtcatcgataccactcatgtgtaaacgactacataangaattattgctcaattatagcctgatgctgtgaatcaagttacgctctggaatcattactaagtgtgtatccatacatatataaagctatgatctcctttacgcatgcttgctataaagctgggcgtacgcacttatcttcgataaattcct

SEQ ID NO: 1737 - DNA, 155 bp, Glycine max
caacgacaatgtctacaagactgacttgcctagtgagtataatgtaagtgccactttcaatgtgtctgatctatctctatctgatgcagagggaggagccttggatatgaggacaaatccttatcaagaaagagggagtgatgacgacataacca

SEQ ID NO: 1738 - DNA, 555 bp, Glycine max
  unsure (1)..(555): unsure at all n locations
ctcagggaggtgagcttagttattggttgtgtgtgtgtagctaagctctagcttctcaagccaagtttcttaaagaaacttctcaaggaagttctctcaagaaagcttctcaacgaagggttctcaagaaagcttctcaacgaagctacctagtctataaatagaagcatgtgtaacacttcgtgtaactttgatgaatgaaagtcttatgagacacatttcanagntccacttctcttcctctgttattccttcaatttcatgcctccacctctctctgtctctacctctgtcttttcctncattgaagcatncttccccagcttctatccaaggctcatcntcgtggngaagctccttcttccatggctttatccctagtggatgacgcctnctgtcaccctctctctttgtcttccgtgcatctccatgtggatatcaccattaagggactcattgagctcaagatcagcctcctagaagcccacagcaggctcatcaagtgatgaattaaaatcacctacgttctgaatatgaatcgtttatggtctgaan

SEQ ID NO: 1739 - DNA, 508 bp, Glycine max
  unsure (1)..(508): unsure at all n locations
nggttggtcccttgactcgcgatctctgagtcacctgcagcatgcagcttctaanactaagtntagatactantannaacttacttgttattaatnttatcaatcgaanatttcatatatatatatattagatagaagatctaatatataactctttgattaattctttaatcaaaattattctatatttcaccttgnttttggattgactattactgcanaaatcaanttcaaaataattctatgtgacctttcacgaatcaacctctttatgatattttaactgctacattcaattctatcatctttcgaacatttaaaatgtttttttgttaaaatgtaaaattgtttttaaagatattcaaaatatttaaaactattagaagagattctaatgatttttaatcattacagatatttcaatgtaatgtgaagatgacacttattctgcatctattaaacggatgtatgtgtgaggctctcttatcgaaatgtgtaagacacatga

SEQ ID NO: 1740 - DNA, 215 bp, Glycine max
  unsure (1)..(215): unsure at all n locations
tctaagctgtctgagtgactgacgcnataacgaaattctataactatgctactatgttatatgaagccaagaccatctcngtaatccagttcacttatctctagaatntcattntccatacactgatacaccgatgccaattntctttttgaaaatatttgccaatgtggaaaggaaactatagctttccagttcgtgcaaattgcaaaatacta

SEQ ID NO: 1741 - DNA, 456 bp, Glycine max
  unsure (1)..(456): unsure at all n locations
catgtgctcgtcgcgaccttaagcacgagctgcgctagaganataaacaacgtcttacaaaatactgtcctttctgcactatcacctgttcatgacacaatacttacatcaattaactgctaaatatcaagtctcttattataggtggctttctctaacatccactngaataattccactagaatagatgtcctagaataaatctctaccacttatggttagaaactaagaaattaaaatgccaaacaataacgtatctgactatacatccataaattgaaatctagaagaagaaatattaggcttatgatcttaccaactagtatcaccaagagctcagtccattgtacatctaagtggctaattctcagtgctgattgtatcttgatgactaatactgatctttagtacactctgacagctgcaactttactttacttattacatggcttattn

SEQ ID NO: 1742 - DNA, 586 bp, Glycine max
  unsure (1)..(586): unsure at all n locations
ntngacgaactatacacagctctangaaccagngacggagaaagatctatatatatgcttgctaagggtagagagaggaagactagagatttggatcaagtaaagtgtgttaaggatgaagaaggcaaagtcttagtgcatgaaanagatatcaaggaaaggtggaaggcgtatttccacaacttatntaatgatggatatggatatgactctagcagtctagacacaagagaagaggaccggaactataagtactatcgtcggattcagaaacaggaagtaaaggaagcgttgaaaagaatgagtaacngtaaggcggtggggccagacaacatacctatngaagtgttaaaaactcttggagatagangtctngagtggctcaccanactctttaatgaaatatgagatcaaatgcatgccngaggaatggangagagcacgttagtgcaatctatanaaacaagnggatatacaaatatgcanatataggggaataactcatgagtataccatgaaatatgggaagagtgacaacagagataagaagggactcagtactgaaatatttgttcatgcggangct

SEQ ID NO: 1743 - DNA, 530 bp, Glycine max
  unsure (1)..(530): unsure at all n locations
aacaatgtctagctcatggtcttgatgatggangtcaaaataacactctcttggtggngctgagaccccanactatacttatgcttaatgcgttcactagaagaganaatatgtccaagacaccagatgaagccaatgagatcattgagaataacacctcacatgactacgacgttcttcatgatagaattcttacgtccacacaanatggaggagttctcgagctacattctcatgatgcaatnctagctcacaacaagctactcacttaacaacttgatgcactaaccaagcagatttcagaacattctcaacttcaaagtgtgcacgctacataatctggtactcaacaagtgttaagttgcactctctgtagaggtggttgtccatgtgcataatgcttcatacttgngtggtcccaagaagacnagagtacnntggaaatcangatctacagagagactatagaaatcctcgtacgacatgcctttantantggtggangagcacgacactatgatggcagcacg

SEQ ID NO: 1744 - DNA, 208 bp, Glycine max
  unsure (1)..(208): unsure at all n locations
gaaagaaaagaactacctatataagcatgaagtttagccgcttcaagaagctgggacttggctttgatatgcttatgaaggatagggacacaggctaataaactagtgtcgagcaagagtaatgctataaactatggtgcanantatcttcatgtattcattatgaataaaaacggttcaatccttagtgataccctgatattcgaat

SEQ ID NO: 1745 - DNA, 106 bp, Glycine max
  unsure (1)..(106): unsure at all n locations
gcggagatcganagaatgagagtcgcaaggagaagctaaagatgacaatcactanggttaggaaagaatgtgatgagctgagaaatgtcaacatgactatggtaga

SEQ ID NO: 1746 - DNA, 184 bp, Glycine max
  unsure (1)..(184): unsure at all n locations
gctgtatggtagaaagagcacacacacagtcatctaataagcagcaagtattttttaaaaaaactgtaagtataaaataaaagtgtgtgctgctatntaagaaaaagaaaagctaagtgtggaaagggcagtaatagagctggaataaaaagaaaaaggttgatctatggatgaatgctctctt

SEQ ID NO: 1747 - DNA, 181 bp, Glycine max
gctgatagagttagacaagtggcctcagatatcttatgcaagtgggttgaattaagacattgcgaactatctccccaattaaaatgctatttcactttctatgcaagttacacactcccttacaaacgaactcttaataatgattcaccccgaacactctgaatctatatatatagcaata

SEQ ID NO: 1748 - DNA, 180 bp, Glycine max
caatgtataatgtgggatttctaccatcgttctagagtcaaaactgatgtacaatgcgaggttcctatatcggttatcagtcaactgatgtagaatggaggcgatccttattattctcacataaggtagctagtcacataatgcaaatatgatgtacctagcttattgctcatatgagac

SEQ ID NO: 1749 - DNA, 569 bp, Glycine max
  unsure (1)..(569): unsure at all n locations
acattgtgcatcgaccgcgagcgatccttagagtganctgaggcatgcaagcattgggaatgatgaatcgttatgaccgtcattatgtgtctacagccatagngagntcactatgactgtcgtcgaaaggctaacagttgttaccaaggggcatcattatattaccatggttgtcatgctcaccatggccatgttggatgtactatgaccaacgtcaagtggcagaggcttcaaatcttcaagtaaaagtgaaaatctctactattntcacttcattaagcggccattcttgctgcagacaaaactaggacttaaatgttagtcgaccaacatatatcatgctaatggaacatatactcacacaatatactacaaaactagtttgcaacctccatacttgacagtgttgtcctacgcattctctagtctctatacaacaaatatctgaataaactatgatcaaaccccattatgaaagagaactacacatgagctaacatgctcagatcataactatttaccacacagccaaagctcagctgtgctcatttatgtatcatgagccacta

SEQ ID NO: 1750 - DNA, 270 bp, Glycine max
  unsure (1)..(270): unsure at all n locations
gcacaacaagctntccacatccacaatgcgcgcataaacccaccatcctctgttgcccacctccagctgagctcacgtactcccacgtagcccatatcctcgtttctctcaacaccgggtccncatcaatcctctcaaacttccacaacatccaagcaaaacaacattcaaacagcacaagctatcacagccaagcaaaacagagcaagggcagaanactctgctcaacacatcaaccaagatcacagctgttctcacttaaagaccaca

SEQ ID NO: 1751 - DNA, 204 bp, Glycine max
actcgtatcaaagattagtctacctcattgaaattatactaggctcttgccgttacctgaacaaacatagccaagaaaccacaacagttagggtttggactatactactcgaaggaagatatcgtaagtattaaaactagtgtagcaaaatgcaatacaatagattgcttctatcaaatattcgatcaaagtagaatccaatac

SEQ ID NO: 1752 - DNA, 125 bp, Glycine max
  unsure (1)..(125): unsure at all n locations
tctggttacacatatccaggccacttacatcaagatcatngcaaataaagtatgccctcttctacccatcttggatgcaactaagaagaaaggattcaaactctatcactatgttgaaatgccta

SEQ ID NO: 1753 - DNA, 326 bp, Glycine max
  unsure (1)..(326): unsure at all n locations
tgctgacgctcagccaaattctgctttgtgctgagcgcgctaaagctatgcttagtggtgaatatgtgcttagcccaactgttgagcttatcccaactgctacattttgcaattcanaacttagcctctttctcacctgaagatgcacagatttcatcattaaattcaatggaaatgttctagagacaacatgaaccataaaacaagagttattaatcanagttacttcagaatgaccataaatctgggaactatacaagctttggaagatgattctatacaaatgttagttatatatagcgactaacaagactccccacattaca

SEQ ID NO: 1754 - DNA, 194 bp, Glycine max
  unsure (1)..(194): unsure at all n locations
agcttagctacacacacctctctaatagcttagctcacctncttgagataagaagctagagcgtagctacacacccnctataatagtttagctcactcttatgcccaacaacatgaaaatacaaaaaagtccctactaccaagacgtactcaaatgccccgaaatacaagactaanaccctatactactagaat

SEQ ID NO: 1755 - DNA, 120 bp, Glycine max
tcacatgactaacacgtgatctttgtttttgtttaacaaacgctccctatgatatattatttttggtaaaaacgcaacacctttagcatacttttcactttcctcctttcatgtacatca

SEQ ID NO: 1756 - DNA, 227 bp, Glycine max
  unsure (1)..(227): unsure at all n locations
cacagagaacattatggtgtgcacaatgatgaaataaagatgtttanggctagcanagaggctcgatcactggtagagggaaacatccaatngcaatatgctaagctnttggactattcacatgagttaacaagaagcaatgaaggatcaactgtgaaaatgaatngcattcccatacctagatcttatccacaattccaccaaatttatatatgtttagatgcatg

SEQ ID NO: 1757 - DNA, 350 bp, Glycine max
cgcatagtatatcaagatgcgtcgaaataaacatcaaagtgcaaggcaaattcaaacggtcataactttcgactcggaagttcgattcaggtaaataatatatcgagtcgctcgataattaaacaacggaaagtcacaagacatttaaatgggtgtaacttttcacctggatgcccgattcaggcgcatagtatatcgagatgctagaaattaaacatcagagtgcaaggcagaatcaaacggcccataactttgagtcggatgtccgattcaggccaataatatatcgagtcgctcgaaaatgaacaacggaagctctcagctatctcatatggcataacttttcactc

SEQ ID NO: 1758 - DNA, 51 bp, Glycine max
acatacatagacgtgatatccggacgtgtactgcaatctacgaacgtcgac

SEQ ID NO: 1759 - DNA, 206 bp, Glycine max
  unsure (1)..(206): unsure at all n locations
gaatatgacagccatcgttntatgagcgctgagcaccaacagcgcttcgaggccatgagaggatggtcattcctccgggagagatgcgtccagctcagggacgacgagtataccgacttctatgaagagatagttcaccggcggtgggcttcactggttacccaaatggccaagttcgacccagacatagtcctcgagtnttatgc

SEQ ID NO: 1760 - DNA, 307 bp, Glycine max
  unsure (1)..(307): unsure at all n locations
tactttattcgttgaccacatagtggtacctagagatatgtcgcggcggtcaagagacctttgggatgtcaagtggngtgctattgcccanaaccaagctngaccaatcctgacccaacccgggcatagtcagtcagtgagaacctgtgatgtacctaaacaggcgagctcctggcagtcaacagataaaaggaacaaagaccacaaagcaaggaggctggtgtggtggctggccagctctgaatcttgtgtgatatatgggttatggcctctggtaatcgattaccaagggtgggtaatcgattac

SEQ ID NO: 1761 - DNA, 211 bp, Glycine max
  unsure (1)..(211): unsure at all n locations
tagcctaccatctnttcatagtagaacactggtaatgtgtctactattatngngatcatctctttctccatcattnggggtgccacttgggctgccagatccctccacctttgggtgtattctttgaaagattcgtgccctctnttntgcacatgttctgtagttgcatcctatctggaaccatatcagaattgtgctgacactaactaac

SEQ ID NO: 1762 - DNA, 264 bp, Glycine max
  unsure (1)..(264): unsure at all n locations
tgcactcctctaatgactatagcatcatttctggtgctaaactgttaggagttggaagccatcttctcaattaaatntctggcttcaacaggggtcttgtctccaagggctccaccactggcagcatctatcatacttctctctatgttactgagtccttcataaaaatattggagaagaaagtgctcagaaatctgtgggtgagagcaactggcacatagttttttaaatctctcccagtattcatatagactctctccactg

SEQ ID NO: 1763 - DNA, 186 bp, Glycine max
  unsure (1)..(186): unsure at all n locations
cttgatgtaaatacatgtatatctatttaatgaatatttgggtgttctttgtgctatcaataagccatttcagtgtgcttttgccttgatcacgtagatgcttgctctgntaggatcattcaacagtggaaactggtctgattcttagaacttgataggacagggctagtttatcgtattatcatg

SEQ ID NO: 1764 - DNA, 351 bp, Glycine max
  unsure (1)..(351): unsure at all n locations
gacactactcataaaacananatgacatacaacctcctcccataaatacaaacatcaatgtcaatgtagagcaagcttatgcgcatatttccctacgaacgttcacttgcacaagacatcctattaactaagaaaaatgcacccatatacaatcaaggtagcttcattacctagaatatntacatgtacttccaaggtgtatctgttatttacatcacacacgcctccttggctaaagttacatacatgcatactcaaagcatttcggggtaccaaaaantgcacatgcgctcatctnggtatttctaatacctatacatatacaaaacttatgatgaatcttgactacct

SEQ ID NO: 1765 - DNA, 295 bp, Glycine max
  unsure (1)..(295): unsure at all n locations
gtgtctcgatatattatgctcttgaatcggacctccgagtgaaaagttatgaccatatgaatgtctcgagagctagctctgttcactttcgagcgtctcgatatattatgcgcatgagtctcgaccccgagtganaagatatgtccatttgaatntctcgagagcttccgttgttcaatgtttagagtctcgatatattatgcgcatgaatctgacatntgagttaatagttatgaccaggtgaattgtttgagagctatcgatgtcaattttgagcgttcgattattatgcgcg

SEQ ID NO: 1766 - DNA, 566 bp, Glycine max
  unsure (1)..(566): unsure at all n locations
tatgcacggaaatgtaatantganatngagatgcccgattatacaccattcctagttaaccatgcattaggtaccatgttcaaatatnnttgttttaagtgaaacgggttnatgatcccaacatggttggctcgtggtgcctaacacatgaaactaagaatgtagtgtgaagtttcacgcttccccctttnttngtntttgttntgtagaggaaaacgcaaggatgagcaaacatganaacaaatggtatgcaatttgcagatcanaaagttngttgaacgcatatgcatgatgatgccatgactcatgcanaatgtgaggctggaatatgataacggacaaatgcaggaacgatatgttcattatgatngtatgaagagatgcttatgcgatgcatgatatgaatgcattttacggacacgagaacccgganaatatctcttctacttgncatttgagggcanngccatgtgtcaataagaagtgatatgaccttcngcttcngtacaaggacgagaccacatacatgatgctnagataaangtgggagtgactgatcgactgat

SEQ ID NO: 1767 - DNA, 118 bp, Glycine max
  unsure (1)..(118): unsure at all n locations
gctccacgcncgccatgcgctccttcgcgtcctttgttcgcgcgagtcttatctgctcctccatcggatctggcgcggccgggtgcatatctggtttaactgtcaccggattcaccac

SEQ ID NO: 1768 - DNA, 531 bp, Glycine max
  unsure (1)..(531): unsure at all n locations
ntngagcatgtacatgggtcaatactttcactcggaggtccgattcaggcgcattatatatcgagacactcgatcttgtacaacgaacactcttgagctattgatatggacaatacctatcactcggatgaacgatgccngcgcagaatatatcgagacgctcgagattgaactacgcaagctctcgagacatgcaaatggtcataactttcaactcggaggtccgattcatgcgcataatatatcaagatgctcgaatatgaacaacgcaagctcttgaganattcacatggtcattacttttcactcagaggtctgattaggcccataccatatcgagacactcgatattgacaacgaaagctcttgagaattcacatgtcataactttcactcgaggtcgactctgcgcatataatcgagacgcttgattacaaccgaagcttcggaaatcaaggcatactttactcgagtcgatatgcgctatatattaagccaaatgacaagagcctgaaattaaggctacctcct

SEQ ID NO: 1769 - DNA, 596 bp, Glycine max
  unsure (1)..(596): unsure at all n locations
ntgacccctacctgagtacctcgtacgagccatccncattgggnnangaagnttnaagnctgctgctgnnacgatatgaccttttattatatnactgtctgtgaagcacactntattactatattttgtatttccatgaacttaattttccattataagacaaataaagaagaaactgtgatgcacataaatgtgctaactgatcttttggtccttgaatcttagatgctttatttttgtgtggctgtctaactgggctttaatcttctttctttatctgcttttataaagcatgttatgctgtactctacgatctaacttattaacttgtagtttataaattaagccgtacccgtctctatatatttcccaattgagttatgaagtgatttttgacttngttggtttctgaaaataaactcaatcatagntttctttttgcatgtcttatacttttggtcccctgctttctctaccattgatattngttcatcatttggcagtccagatgactgggagagntncttcattactannngtgttgtagaagatgacagattggtgtgatanggtgtaatgatccattcatcccaaag

SEQ ID NO: 1770 - DNA, 529 bp, Glycine max
  unsure (1)..(529): unsure at all n locations
ctgttcgcacattgtcgcgtgtatgatatccactcgacanggnttgaagtanaggataccttcaatcttataaacgcacgtggcgganaaaaagtgtgctgtaacttgaatggccattattgtcaatgcngaaggtatatgcgcttcactatccatgttcacacattattgcagcttgtggttacatgagcatgaactactaccaatatatagatgttgnttacacaaatgagcacatcttataagcatactccgcacagtggtggcctttttggaatgaagcgacaattcctccttctaatgatgcatggaaaactatccctgaccaacctacaatcgtgcgaananctgnncaaatcaacaagattggaatgagatgattgttggacctctgccacgacacaatgtgtaattggacagaagcacatangcctatgtccatcaactacctggagtatcattaattttatgttgttatgaaacttnttgatgaggctgtcatgattacttgtgggtcaagaagcgcatt

SEQ ID NO: 1771 - DNA, 204 bp, Glycine max
  unsure (1)..(204): unsure at all n locations
tgatgtcatcttatgacaataaaaaaaatagaacaactgcttctacatncacatgccaagccagtaatccttattccaatataacacagtcaggcattcatacaggtaatttttattggtatgctattatcaaatatctacatgcacacattntatntatttatacatncttttcatatnttcttctatagtcaacttatatat

SEQ ID NO: 1772 - DNA, 232 bp, Glycine max
  unsure (1)..(232): unsure at all n locations
acctacttacaagttcttaaaaacaatatgaatntacacttctcaaaacttaattgggatntattggttataaaaaaacaaatattttgttaacttggcctttgtgatttagttttgtagactaggttttaccttatctttgacttggtcttggaaaatcctatcttttttattacaaatatttgtttcataaagttttagaaagctctctcacacattntctctccacatt

SEQ ID NO: 1773 - DNA, 298 bp, Glycine max
  unsure (1)..(298): unsure at all n locations
ctgcagctcttctgttctccccattgaaacaatnntttttaatatacctcattcaaaggtgcttccaatgtactaaaatccttcacaaatcgcctataaaaacttgctaggccatgaaaacttctcacctcggtcacacttttaggtgaggccactcttggatagccttaaccttttcttcatncaactngtaccccttggaagtcactacaaaaccaagaaacacaacatggtctttcaaaaataatgcatntttcaaggttagcatacaatngttcccttctaagcacacacaaca

SEQ ID NO: 1774 - DNA, 389 bp, Glycine max
atcctatggccttgatctcaacttaatggtaaggctaatcacttcttacataatcaactgtcaataatataagcattcaccaagaggcattagttcatcattattagacctattctatgccatctataacgtgtgtccggtcttactgagtctctagcatcactatcattgtccccaccaagtaaacatacagtcaaccaacagaacagatgagttcatttatacaaagaacccacttgtccaatcattctactattaatattatattgatatataacttatttaatccctcatctatcatccagaaaccctctaactaacctatttataaatacacgtcaattctaatactttgcaggctgagaactctggcagtctcaacacccaat

SEQ ID NO: 1775 - DNA, 245 bp, Glycine max
  unsure (1)..(245): unsure at all n locations
tgtgtgtgtgaatatgacgttgtagtaatctgtgatgagggtgcgcatcataagcgtgtgtgtgcgtctatgatgactgtctgtgtatgtngtgagggtgtgcgcgcgataagtgtaagcgtgtgtatcatcagaatgtgtgtgtgtgatgagtgtatgtgtgtgtatcatcagcgcgtgtgtgtgtatgtgtgatgacggtgtgtgtgtgtctatgtgttaggacacggtgtgtgtgcgcttgt

SEQ ID NO: 1776 - DNA, 548 bp, Glycine max
  unsure (1)..(548): unsure at all n locations
gtcgtgtggcncttatctaccttngagtaaactggaccactactatatncacaaggaagcatatctagtcaggtctgatataccgatcaagtttcctaacgatntctaattatgcgggccattaagtctatcatatgctgacaatagccgataagcccgtgaatctattcggtggcggagtaggtgtctgccatcgctttggcctttgctaacaatnggggaagttcttgactcccgttcaaggtaagagcataccgatccatcacctcgtttgcctctggtgtaaagagtgaacaaccctcctgtaaactcttttttcgcgatacttgggcatattcgttcagaatgctattgctcggggccgagatagaccctactttctcggacttacgatgatagtaacatgtggtctcatctacataacgctgaacaactactttgtcttgacagcactactctgttcaaacatgcatggctccatgaccttctcctccacttggtactatgtaccctgactcggaattgttcgctctttctgcagctttgct

SEQ ID NO: 1777 - DNA, 176 bp, Glycine max
tgtagagcatgcgaaccttctacccacgtgtaattgtgtaagccgattggactatcatgagctaacaatatcccagatgtctatatctctctcttgaggctatgtatgtggctggagagggtatcacacacgctccgactcgctgtctctctcgctatctgtatatagatatatcc

SEQ ID NO: 1778 - DNA, 154 bp, Glycine max
  unsure (1)..(154): unsure at all n locations
cagtttcgagcctctcgaaatattatgcgcctgaatcggacatccgtgtganaagttatgaccatntgaatntctcgagagcttccgatgtttaatttcgagcgactcgatatattatgagcctgaatcggagcctcgtgtggaaagttatgac

SEQ ID NO: 1779 - DNA, 365 bp, Glycine max
  unsure (1)..(365): unsure at all n locations
gaccgtgatgcatgtttgtgccagatcattgacaatgtttcataatgcagaataatttattcttttgcagcattgcgatttttcaatcacacttggatttggataggttccaattaacgcacaaattatgatattcgcttgatcaactaanatgttctttgtacatatttctctgtgtatataatattaatttatgtatatctaattnttaatatttctattatgtaatggtactggagttctttaattatcatgtgatgtcttgggtttatttgtaggttcttttatcattctaatcacatcggtgatgatgttaattaactgtgatctattttctgaccttgtatgaaatgatataaagatgt

SEQ ID NO: 1780 - DNA, 229 bp, Glycine max
  unsure (1)..(229): unsure at all n locations
acaccaaccaaaatcacagcttttctcacttaaagaccccagtaacaattccttcattccagttcgttaaccgttggattgactcanatatttcactggaagtctctagtacataaacctacattntgaccgttgcgatctagtagtaaacacccanaacgcattctgcatcactctntccacaaccagcaaatacatagcatttttttctgcacttatgcaaaattct

SEQ ID NO: 1781 - DNA, 658 bp, Glycine max
  unsure (1)..(658): unsure at all n locations
tccacgggcgcttatacgattatgatatgacgtctttgttttcnnncnnnnncncccccnaagagtgatgactgcactgccagcgtacaanaacccagcgtnagatgtaattngcccccgnatccntgatgtaagactaggctcttattattagncctcttaggtgtagactaactcaaagtgaggttgtgccgtagattcctgatgtaagactatgcctagactaaacaacattattataacaacgtattaatagccaaatgtgaacccgcagatgcctcatgtaagataatttcgatcctgcttcaatcaagtgctaaggcagcaatccatcttccaatgctaaagtcaccgtagtgtgcgcacaaatgagtgatccgaccaaaagcatacaacctatagagcttgattgattcattgagcacagataacacaatcacttagatgttatgtattcacatcagctgtctattataaatccccaactagggcgtttagccacgcattacaaagaaaccctancattaaaagagcttacaaagcctaagatgtntgcaaaagtgctccttttgtngctctaagctcttttccaaaataagactgtagtgctctggaaaagagcacactatcgcctatattgttccgaaaaggctcttcn

SEQ ID NO: 1782 - DNA, 280 bp, Glycine max
agagatggatattcaatatctagatagaagaaaagagaacacaatcattatctactgtctgagctttctaccaagctagtgaaatggaatcgtttcaatccacatgtgtcatagaaacaaactaaatttgtcactcagtcaatagtaaagaggatacaaagtataagttaatcgatgacatcgccatactgtgagtccttcacatgtattataattgatgatcacgcaaacttgttcatcaagtggttccccaacacctcgactatcatcatggagaata

SEQ ID NO: 1783 - DNA, 238 bp, Glycine max
  unsure (1)..(238): unsure at all n locations
aagagttgtatgttatatgatatgtaatgtgtncgatctggtgtagcaagttatatgaaccacacttagactngtcggaattgaattaacacatagtgtagttgatataacaatctatatgaatcataaacacttaacatgtgttagtgatctaccattcacagtacacttccacaattcttgttgttatcgatgtgtttcattatagagccttgtgtgcgtccgatattcatgagtg

SEQ ID NO: 1784 - DNA, 582 bp, Glycine max
  unsure (1)..(582): unsure at all n locations
nncttgtgcacnnctttgtntgntttttttttttgcattcttttcatctcacacaagtaagtgccatctncatccaatttacctttttccttgtggattntggggctttattntgtattttctttgcaatgattgtgagataagttgtttgtgaatccatgacatgaatgctttgattatgggctgcaatggatggccctangcctatcattgatcctattgtagatatgcatgtcatgttgttctccatgtcctcattttacatgcttaaacatgtgcccaccaaccgtctgataaaatgtcgcaatgaccatttcatgtgtnngtttggaatatgaatgtganatgagctttatgcatgtncagaaatcatttaaaatgtatgagcaacttannattgatagataaaatgccaagagtatgagctaggcttggaaatctagacttttgtttacatgtgaaatacatgaattacatanacatcgtaaattgattgcgtggaatagtataatattacgcttgctcactatgatggcacatagatctagtagctgagaatgttttanaaaaaaaaaatcacct

SEQ ID NO: 1785 - DNA, 250 bp, Glycine max
  unsure (1)..(250): unsure at all n locations
ccggatccttaagcactgggctgcagcttggtggcacactggggaggacaanagaataatagctgctgagagaaggagactttaaattttctgattgctgagtgagagagaaacactttggattttaaaaaagggtcttctcttttgctattattatatttaagctatgccacatgtacccatttgagtggagcgnaaagggcccactttctcttatgatggtgacccatactcaggcacaaaaagagag

SEQ ID NO: 1786 - DNA, 327 bp, Glycine max
  unsure (1)..(327): unsure at all n locations
tttggacccatgagctaagtatgagcccacttatctttgtacatattagattanggtttcattatttctgggccttgtatttagggcttcataatgtatggagggtaccctagtaatgtangatgtttcagcccttgtatttagggcacctagaactagttttgtattaaggatagttttgtaatttcacatgcattaagtgtgaatatatgatgtccttcatgctttacatgtctcatgacacctaagcacacttagtggagaatcttggactcgatcttggattagtgggctgaaccatagctganattcactaatcgtaattag

SEQ ID NO: 1787 - DNA, 172 bp, Glycine max
  unsure (1)..(172): unsure at all n locations
acacaccaaatgattatgatgatggatggctcanattctcacaaagggtaactcatcactttcaaatngagctttcaaaactatcatgacatgtagagaagaatcaaggattttcagtcacaaaatgtcaagaacttttattttcaaaacaattacccatttcttgaacata

SEQ ID NO: 1788 - DNA, 483 bp, Glycine max
  unsure (1)..(483): unsure at all n locations
ttgaattctagtcccccttatagactctgtgaagatgttngctagttggtcattagaacctatcaaatttgtaatgagttctcttggaaaaaccttttcctgaatgaaatgacnaataaatttaatatgcatagttcatccatgaaacatcatattggtggctatatgaagagctntgcttgattgtcacaacataatttcacctattggatgtctctaaacttcaattcttgaaggagatatttaatccaaacgtgtgcacaagtagctgtacacatatncttatactctacttctgcacggtgcagtaacattgtgcttttactcttcaagagacatattcctccataggtcacaatccccaaaacacattgtcatggcgactgcccactatatacaaatcttgcttgaggaatcctgcctgtgctntatttatatacttaaggcgtgttaagatctatgatccaaaatcatctatatata

SEQ ID NO: 1789 - DNA, 365 bp, Glycine max
  unsure (1)..(365): unsure at all n locations
acaagttgtcccacagagaatgcaaaatatgcggcattgaagtacgtngagagcttctttaactgctttgggtcgttttgctcgaactggtctgctncataagcaagcatgtttggcttcacacacccactccctaatgccaccaagtagagtgctacatagaatatcatggccttcatgctcttggcttctacgcactgttctccatcagtcacattgcatggangtggcttcaattgaggaacatgagcttggactgatagcagtatgaaaccgtggaatcgtattatatatacatgactaanggctctcgatcaatggcaataatatattntgttagagagagagagagagagagaagagat

SEQ ID NO: 1790 - DNA, 398 bp, Glycine max
  unsure (1)..(398): unsure at all n locations
tcgctggtgttcgcagcttgaacatacaaacttgtataaattactgggaatnggcactatgaatttgaactganattttactcgaatttttagacatctggccaaaataataataaaaaaagaagaaagctatttggattaaaggaaaaaataataaaaattacacaagttggcagaaaaatcaatatccaggaaaaaaatgtgaaagggaagtgtgtttgttggtttggcttgaaatttgttctataattggtgcctattttataccaatcttagttctganattngaattgaaaattaatgtgaaaacaagttccaaaactagagatttcttgagtctttnttaatagttttttttactctagagccattctaagtttctctttgagtcctagctc

SEQ ID NO: 1791 - DNA, 215 bp, Glycine max
  unsure (1)..(215): unsure at all n locations
acgttaaagaaacgctcctaggaggtagcctagtatctctaatnttgtctttaaaattntgctttatacttgttgtttcttgattatatctgaattacttaagttgtgtgcaaccatangaatgtaggaaaatatatacantaaccttgaacaaacacattntntgcanatgctngggtgatcatgtgtgatgcagaagtttaaaaagaggggga

SEQ ID NO: 1792 - DNA, 200 bp, Glycine max
attatatatatatatatatatatatatactatatatatgtatatatacaaatattgtatagtgatctagaaataatatgtggacgacctgtctcgatctactcctgagtaatcattctactcttatcagtaacgtggtaccgcatgtgaataatcaagagtatccaaattactcactacttctcacttctaatgaacaaa

SEQ ID NO: 1793 - DNA, 114 bp, Glycine max
  unsure (1)..(114): unsure at all n locations
cttattactagctatatngaattctttaggtcctgaatgtacaaccttcaaattgttgctcgctcccctcttagagaatgaggaggatcttcataggacttcatccaattgatg

SEQ ID NO: 1794 - DNA, 557 bp, Glycine max
  unsure (1)..(557): unsure at all n locations
atagcaatatctagtagaagaacaatgaccatngaagagtctatacatgttccttcgatgagnctaatgccattcttccaaggaanggatttctagatgatatttcagattccttagaagatacacatattcatgggaatgactctaaagannaagatgaaggaagcaattatgattctcaagataatggagttagagcatataatgaactttcaagagaatggagagcctcaagagatcattccctcgacaacattattgatgatatatctaacgggtaacaactagacatttctcttaagatgtatgcaataatatggcttttgtatctatgattgaacgttaacattaatagaaccatagtagatgataactggatcatttgcatgcaagaagaactaaatcagtttgaagaaactatgtgtggaactagtngacaactgtagatattctgtctatgaacaaatgggtttataaatacatggtgacatggctaatttatgatacgcgttgtatatcaacggttgatacataaggattactctgagaactgtgtt

SEQ ID NO: 1795 - DNA, 550 bp, Glycine max
  unsure (1)..(550): unsure at all n locations
gcttatcttccttaagaaatggagatagatggatntcgtgtatgtattcgcaacagtctcaattgtgcattatataattgccaatttatgaanagcacatgaactttntnntagtttgctaatgcttataaagggagactccagtgccaagtttgagctcagtgattgaaaattttctaanaaaattggaatctgaacaagtaaaatattcattnttattggtaaatattacgggaatttgaacttctgactttnnttcgtctcttctctgttcactcttatcattcaatcatcaattgtatattttcataataaattaagactattagattaagtntttagctttaaccatggtaattagagggatgaatacatcntctttactgatataagcaccgaggcaataatgtttttatctggttttggctctcttttatgtctgactgaatatctttttaaaaaacatgatttttgtacaagtcttcctaatgtcgtcgtatgatgagtgtgaaataatgaatgatgaaggactaaataaatttaaaatatt

SEQ ID NO: 1796 - DNA, 133 bp, Glycine max
attaatatcggaccacctgcttcggtatactgacttcatctatgtcactagggagtcctacagcatttacctcagtaggcccgtatgtttgccgtgagttaatgcaacatattaacgttactgcaacgtagga

SEQ ID NO: 1797 - DNA, 251 bp, Glycine max
  unsure (1)..(251): unsure at all n locations
tctctctaaccttactctngaatntacatctcatagtggtgattacttcagagactaagagaacgttgtcaagaatagaacgatcttcaacataagtttattggtattgggaaatgcatttggtaaggatgtgtttaagcccattggctaggaccttgaaaatgaatttatagataacattgcaaaggaataagagcccaaagtttttcatagtagtgggactacattttttggggataaggacaatggat

SEQ ID NO: 1798 - DNA, 383 bp, Glycine max
  unsure (1)..(383): unsure at all n locations
attctatgaccttgatctaagctattaatgttcaggctcatctaacttaggcggaaaatgaccacttgaccatctggaagtatatgattttgagaataacgaatgtcaatttatcagaggtataagagactgatgcttacttaccagctgcataagtagtattttttaccacatggagctttacatcttaataatatgctttaccattacatgatccaatggatanaacaagacatctagtttttttcgtgattctgctgcattgttatgacactttggaatatattcctctacttaaatgctgactgtcttataaacttgcatgtgtctaaagtaattaccacaatcatgtacagcacttctactttccactatgcacaact

SEQ ID NO: 1799 - DNA, 434 bp, Glycine max
  unsure (1)..(434): unsure at all n locations
tcttgcatagtctgganacagtgtatatatatcagtaccactngtactaatcttattattataatacatattaattntgctgacaaanaanaaactaactgttccaaccagtcaactcatactaaccagtaagcacctctttaattggggacctgccaacagttnttagtttataaaatctcttcaagagacatggaaaaagttataagtaagcatactactcatgaagttctgatgaaacggtgtctatgacacaaaaagcacaaagtccagtatgaacacatggtttaggagagggcatagtagagaaaattacaaaaagaataaattacctcgtcaccccagcanacataaatgggactactacatctncatgcanggccaaaagtcaacggataggcctgctaaacataacctatatataaaagtatgga

SEQ ID NO: 1800 - DNA, 267 bp, Glycine max
  unsure (1)..(267): unsure at all n locations
atgtgacatctctggtgtgctctatcacagtatcacacaaccctntaccttgtgctgcatntaacttatttaaattggtagtaagaatggacggtggtaaggacataactatagatgaagatggccatattgntatagagctccaatatcatgccatanaccaactatcctaagaagcttaagctgtaggagaagacaaatggatggttntatattacatcaataacacatttctaataaacaaagaaaaaagcaatattgggtaac

SEQ ID NO: 1801 - DNA, 416 bp, Glycine max
  unsure (1)..(416): unsure at all n locations
gaagagtagagggtgccacttttgttgagtggttntattagcattntgttagttgaaataaaggcccaaacttgtgttaaagtggctgtcaattctcttgggatttgcatcacctatgggcttantttaatntanagaaattaaggttaggattgtggctggctcttggctgaccaaagagttgcacaattttccatatgtttgtgtcttaattctagttntaattacgcataataacaccatcaattgttggtatcaattctagttntaattanggttaatgacaccatcaatttattgtattggtgatcatttcacttgtctaaccaactctntttctaatanaanaacagaccttgaatttgaatntttaatcaccttctaaagtgcgagtgaatctccttagttactggagt

SEQ ID NO: 1802 - DNA, 488 bp, Glycine max
  unsure (1)..(488): unsure at all n locations
ngagatgangaagtgtngaagggtganacttcctgctnnttattgttgaccacagtgtggtacctggagatatgtcgcgggggtcaggagaccttgngacgtangtgggtgctattgcccaaacccagcttgaccaatcccgacccaccccggcatagtcgtcatgagacctggatgtactaacagcagctctgcagtcacagatanaggatacatgacacaagcaggaggctgtggtgctgccactgtgatatgtgtatatgtgaatgtgcctctggtatcgataccanggtggtatcgatacaggcttanatgagacagagctanatggctctgtatcatacangggtgatcatacagctgaaacgagcagaactaggaccttgtatcatacagctggtatcatacacaagatggcactgtatcatacagctgtgatcataccaggatatgctttatgctgagctggatcagtagctctgatcatc

SEQ ID NO: 1803 - DNA, 448 bp, Glycine max
  unsure (1)..(448): unsure at all n locations
gcgatctctgagtcacctgcggcatgcaagcttacctgtcagagcatatggggggactctaatgtctcatgggatagtgttccctcagttcaccctttctggggaatactatgcttatggaataattctgtctttgaagtagacagctgggtgaaaggcaacaacttcctaatgcttgcaggtagatggataaaggatgatcagaggatataccattgtaatatatatgctccttgtgacctacaggggaagagagctctgtgggaagagttgaggcagctaagaatctctcacactgatggtctctggtgtttccttggggacttcaatagcattagaagccaggaagagagaataggcacatctcanagaatgggaaatagctctgatatctctgaattcaataactgggattctgatatggaactgcangagatcaaatcttatg

SEQ ID NO: 1804 - DNA, 182 bp, Glycine max
  unsure (1)..(182): unsure at all n locations
atcttcatctggtatatcgacaacaactnggctaactgatatatcatatcaactggttgaatttggctaacaaaatttttctgggtaataacaataactaaaggcacanagctctctaaaaaagcaattaaacttgtgagttatgagcagtggcatggcanatattataacttcttcgtaat

SEQ ID NO: 1805 - DNA, 204 bp, Glycine max
  unsure (1)..(204): unsure at all n locations
atagagagcttgctatcagcattctcaatcacanataccactcttatntactatgtatatttatatgttacaagagacagaatattcacatgttatgcgagttatgttataagtaaatatctatatgtttatatgaacagattataactgatcactcttaaaagaacgtgcttactttaaaaatcaatcttatgactatacagc

SEQ ID NO: 1806 - DNA, 266 bp, Glycine max
  unsure (1)..(266): unsure at all n locations
atatctcaccatgaccaggcgtgaaatatctntctgacagttagtttcttaattctccttgtgtgagtcattggcttgtagtntgtagaatccttagatacatcanagggtcacctagaaagggacgttgttacactgacaggggacatagtaacattattggatactcacatgaagactcggctggagatgcangagatagacaatccacttcaagcaattgtatttttgtgggttgaaatcttatctcatggaagtgtaaaaag

SEQ ID NO: 1807 - DNA, 282 bp, Glycine max
  unsure (1)..(282): unsure at all n locations
actttacgcttcagcatagaacacgagaacatgatcaattagagaaatatcttcatatgcatcaactcatttgttagaaagacccaacactttntacccattgctgtcaacttttaattacttgcatttactgctntttaacatagaatctagtttacttttgtttatattctcaattatcaatgttgttcacacaatgccctanttttgaataaaactctgtctaataagcaagttccctgagttcgataatcagatcattcccgttntattttaaatact

SEQ ID NO: 1808 - DNA, 177 bp, Glycine max
  unsure (1)..(177): unsure at all n locations
gttagtgatcgctccatcgcaagaccatatggagtgatngaagatgctttggtgaaggtgaaacaccttatattccagctgatctcgttgtgatagacatagaagaggatgctgatattcctctcattcttggtcacccattcatgtctactgcangctgtgtagtaaatatgggaa

SEQ ID NO: 1809 - DNA, 393 bp, Glycine max
  unsure (1)..(393): unsure at all n locations
tagacgtcgcacttagcgccatattcgcgcttagcgcgagtaagtgaattagagcttagcgccaattttgcgctgagcctggaaagcaacagatgactcgcttagcgangtgatatcgcgctnagcgcgagcttgcgtagcaatggcccttccagattcccttgacccgctaagcgctattgagctgggcttagctgctgatacgcactaagcgcacggagctcgcttagcgtgacatccactatggcacttcttcanatttgctcctttttgcttgaattgaagagaattaacattaattccatataaaaaggcttctaatgaacagagatcacagcanagaaaaattatttacaatcctacacaagaaactagtattgggggattatatac

SEQ ID NO: 1810 - DNA, 497 bp, Glycine max
  unsure (1)..(497): unsure at all n locations
ggggatgttcctatgcgcatttagaccttaatccgctaaattgataactatactgtgtatataccattttatcatactatgcaattaatcactttaaagtgtgtaatcagtttggcactggtatcgatacatcctctggntatcgattaccagagagtatatctcttgataaagactcttaacttanagttcttggtcaaaacctgtgttacttcaatnggaattcccttcctatntaatatactcttgctaagactctagagactgtctngatcatacatctngaatatcgttgatttctctgtcttgaataaagctgtgagaacatgtaccctttgcaccataaacatcagctgatcttttctcactacactgtagactacctatgttgacaaaggtatcttaatggaaatctcagatctatatacttcatgcctatctacgatatnatcgatctctgtatatcacatacgatataatgggtggtgatcccgcgt

SEQ ID NO: 1811 - DNA, 310 bp, Glycine max
  unsure (1)..(310): unsure at all n locations
ccttcacccgacgaagacactgacaaagacttatctcttccttcttggacanagtatggcaggctgggggcaagtaaattatcttcccatcagaccttggatgcaactgagatcgtatacccatatcagctagatcttgacaggtattcaagccatccttcgtcttgccttgaatgttaaggagcgtcccaatcacactgtcacaaacattnttctccacatgcataacatcaatacaatgtctaacgtcaagaacacaccagtacggaagatcagagagnatggacctcttcttacatatgcaactctg

SEQ ID NO: 1812 - DNA, 272 bp, Glycine max
  unsure (1)..(272): unsure at all n locations
agctggtgacacgtggagatatanggttatcttcacgctcacaagatctgtcatactgactntngcttgacgctgactgccggaaatacccgagtgggtatccgtataaactntctgcattctgtaagacgaatagcctgataacacgcagagactaacatcgtcttctgcgaccttcgtctatcgcgggcgacaagcacgttgacacgtggagatatacgtcatgttccgcgctcacaagatctgtcatactgacttntgagtcacgctga

SEQ ID NO: 1813 - DNA, 173 bp, Glycine max
ctctggatgcgaatattacctcttcaccatcacaactgacagtgtcattattgatggaagcttgcttgtggcgattctatagaggctggatctttgagcttcaatgaggtcctttaatggagattctccaccatgaagatgcagccgaagacaaaggacaagaggtgagagga

SEQ ID NO: 1814 - DNA, 567 bp, Glycine max
  unsure (1)..(567): unsure at all n locations
cttgatgatatggtcttcaccgacgaaaggatcaaagtgnngtctaaaagaggcatatatgatcatcatgccttgatanatgcanaanaaaaaactanggcaaatgaagagggtgagaatganggagaagcccatgctgtgacagccattcctatacagccaagtttcccaccaacccaacaatgacattactcagccaataacaaaccttctccttacccacnncgccagtatccacaaaggcaatccctaaatcaaccacaaagtctgtctaccgcacttccaatgacgaacaccacctttagcacaaaccaaaaacaccaaccaaaaaatgaattttgcagcgagaaagcctgtagaatcacncccantncagtgtccctatgtgacttgctcccatatctacttngacantcaatggtagcataaccctagccanggtcatcaacctcatttctcgagaatacactcgacancacgtgtgcttgacngagagcccccgggcgtcatgagcatgtaggctctgagcgtanggtcanggctaatgatcgagctgctgaattgaga

SEQ ID NO: 1815 - DNA, 505 bp, Glycine max
  unsure (1)..(505): unsure at all n locations
tctcctcgatgggagaaatcagtctctcctcaagctcttctagaaatctcttacttctatccatgtcgatcccacctaaatcaaactcttcctctttggatagtcctaataagttagatcaaacattttcttgttagttacttagaatccttagcaataaaacatattccaagaacacatggtcattgctaaataggtgcatcgttagaataaagattaggagtactttcgttcttccatactctaattcaaatatagactatgtctatagcgataagtaagagattgagtattcgtcaatattagaacctgacttgatcaattaaacntgtntgcttaattaanataataaacagtacgctaacatgagtttgatatgtcaaccagattaatctaaatntacaaattgacattgctggaagagaggatataacgatctaactcagtgctatagtctatatcagctatggtgtgatagtcgtatatctctacataacagtgttan

SEQ ID NO: 1816 - DNA, 453 bp, Glycine max
  unsure (1)..(453): unsure at all n locations
ngacgcagtctngngttctaatcataccaatgtcctangaaagactgactgtattgttgatcctcttggaatctaatcagtagaagaggtcacttngggaagaagagaccatcatcagaggtcaattcctcnactctgcctgagatagacatctttgaactgaagatccanaagctaggccctatatttatactgangtgaaaccaaatagaaagagtcttgaatgtgagttgggggaattgatagtagttagaggaaaaggaaggtatgaggttctcatagtggaagcctgcctattttatattgcttcctgttctgtgaatactagctgcttgagaagattgtcttagatgtacaatgttagtcagactgcaattgttctcatggaactantctgaagaagtagcaacactcactgcaatcatttgaagacatcgctgagtagtctataat

SEQ ID NO: 1817 - DNA, 366 bp, Glycine max
  unsure (1)..(366): unsure at all n locations
cactaacgtggaatgttcatctacatatgtggatgttgcacatcagcaacgatatgttacacacgcactcaacattaaaagaaataaaggatacttgatggatggactaagctgtcgcaatattttcacctttatggactaaattaatcattatcaaattatatggacaaaaatagtcactgaatgcaaagtatacggaccacagttgtgttttatccttatatgattaaagaaacaagatgaagcatacaaaatgatagatcatatatgatttgatttcaacttctctctctacaagtctatggtggttcccatatactngatgaacataatgcangtgacataacttgacacatatagtacaca

SEQ ID NO: 1818 - DNA, 163 bp, Glycine max
  unsure (1)..(163): unsure at all n locations
agtaatcagaccaacgaanactaaaattagtagataataacaaatgggatatttctctgtaaaggatgctatgtgaatgtttgatgtagaaaatctaatgaaatgtcaaacttgaataactaatagagaagaattaacacttggtgacagaatctacgtcaat

SEQ ID NO: 1819 - DNA, 424 bp, Glycine max
  unsure (1)..(424): unsure at all n locations
tcatcttgttatgcttgatgtgagagaatgtgcaaggctggcggaaattntggtagagaatgaagcagcctttgaagggagaaactaaacagttcattttccattgtctgatatcaataacactaagggaaatgccagagctcaagtatttctacaatggaaaacactcactagaatggcctatgctagcatatcttgatatatatcattgtgacangttgaaatctgttacatctgagcataatagtggtgaaagtgcagatatagaggatcaagttggtatttcanatcatcagcaagccattttcatagttgagaaggtattaattaaaaaaaattcttctcgagtttccatattgtgcttgcatgtcttaatatggataaattgaaaagaactctagtcacttactttntgacatcccat

SEQ ID NO: 1820 - DNA, 286 bp, Glycine max
  unsure (1)..(286): unsure at all n locations
cattctgtcatgtcttgacctctaattctcgctgatgaaataaatgggaggtgacatgcatcagagacttatgacttatgaactacctactaatntaccgtcatgctcctgattgaatacgttcctctnttcatagtcttgtctcgtgttgtatactctcaattgtgacattgattcaaaaattaagaaaaagaagttctatggctaaaagcatagacaanaataatcattgatagcgccagtcgtggacctatgcttatgtgatgattaacaaatacaccttctc

SEQ ID NO: 1821 - DNA, 257 bp, Glycine max
  unsure (1)..(257): unsure at all n locations
gcttctagcacactccagacataatttcaaagatcccaacggttagatgatggacaattgtcttttgaagttgcgagctaaatattgaaaagatccaacggtgaacgaaagctgagcagcgtatttaccgaggcagcttcatgtagctntctctagaagcttcattaagaggcttcctccagaagcttcattaagaggcttctagcacactccagataccttcgtgaagatcccaacggtcagatcatggatatatg

SEQ ID NO: 1822 - DNA, 278 bp, Glycine max
  unsure (1)..(278): unsure at all n locations
agtacaatctaactactgganagaatatagactaatagaaatttagctgtctctactaaatatattgtgaaattcgaagacgaggtgattgcgacatcgctaaacaactgaatgcaatgtttatttttntgctttttcgttgatgtaacctttatctgtttatggcgtgtttaaatcccataataaagttcaatgtgttatttcaatggtccaaagataanttattttaattgtttgaccttcacaccttacgcatacttagaaaggatcagatccta

SEQ ID NO: 1823 - DNA, 204 bp, Glycine max
  unsure (1)..(204): unsure at all n locations
ggatcataccattccctccttctttgaaaagaattgtccttgaatcaagttcatcatctacatcaaataaactgaagtcaacaacaataaaaatgacattgacttgatacccaccatgaaactcaagtttataagcagtatcattgatctntttaaccacttggaaaggacaatgtccctgggttgcaacatcaagtgtctttg

SEQ ID NO: 1824 - DNA, 595 bp, Glycine max
  unsure (1)..(595): unsure at all n locations
ntgggccgtcgacttgcgtncntttgaccgccannnncnnnngntcaagctgctgctgcttatngcaccaggaagcngcatgttaggattatagattttctgtttccnagcaaaagagatctacgctcttaacatatgagattctactattcgctgagacaagcacaattgtaaatactactctatgtacagagtaatttatagctgattattgaattgttagctcgaataattaaatcgcgcgaagtaggggagcctaagacaatcacatggaagcttaaaacatttctcacacattatcaaccttatagcaatngattactcatcccaatacttatattccgctgtatagattaaaatttattagccatagagactacgagatacaaatcatgctatggtatagcctatggcgactcatanataatattctaatttaaataattacttatctcatcagatcaacacatacatcaataagtaaatacttatgattaatggtaggagacatgcactctacttagaagaattgtcctctttcacattatctanaaaaatttagagtgaatataaaaatatagagatagtctgcatg

SEQ ID NO: 1825 - DNA, 320 bp, Glycine max
  unsure (1)..(320): unsure at all n locations
gactacttccaccttcatctgccttgagagcatttcttcagtgtagtacaccttgaaccctttctttttggcagcatcccaaataggtagtcatggacataccttatcaacaattatcttgacactggtgacccttgagatgtgcagtctagaagggtagctaatggctttatctctcacatacatttgtgcctggaggtttccaagagaggcggngtcttcttgngataggtgtagatntgctagatgcactggtaaaagctttgaaatggcattcagagatgcactntcttttngaaatttctctttggaggttctac

SEQ ID NO: 1826 - DNA, 603 bp, Glycine max
  unsure (1)..(603): unsure at all n locations
ntgtcctgctgacgccgctgtagtgcactatgatactcaagcctttatttcagagatgaagatgaatccgtggccacctcatggactcctctattaacaatagcatcatttcttggcactaaatggtggnngagtggagccatcttctcaatcaaattcctagcctcagcaggggtcatatcaccaagagcttcaccactggcagcatcaatcatactcctctnncatgtgctaagtccctcatagaaatattaaagaagaaagtgctcagaaatctggtggtgagggcagcatgcacaccaattctttgaatctttccagtactcatacccagctttctcaccaagttgcctgatgcctganatgtcttgtctgatggtagtggtcctagatgcanggaagaatttctcccagaacacccctcttanggtcatccnagctanaatagacctgngagcaggtagtatagccaatcttttgcactcccctcagagatgagganagcctatagaagatatgatctcttgacatcnngggctcatggtgaacaacatatggactcttagatgctatnggatctactgcagacatgaacttggtacn

SEQ ID NO: 1827 - DNA, 519 bp, Glycine max
  unsure (1)..(519): unsure at all n locations
ttctctctttgcttttgcttcttccctaaggcattgtttcttctacaagttcttcgaatcttgtgatccaaagggactagatcttcttaagaaactctaccttacatacatggaacaaagcaacaaaagaacatgtttgccaagtacttcagagttattccaaaaccgaattttaaagccnagaattgaagaataatgaatcattgcatagaatatgaaattagcataagttgcctaatacgagaaacacagtcctgacaacgaagccagaaaacttattacatcattgacaaatgtaccaattagtggagtattttcaatagtaagtagaaagacggtctnctcacagacctggttgtactcaagctttttgtgacactcaacaactaagccatggtnatntcttcttngagatangggtgcatanattgaagtcagctctacaataaactactaaaatagggtcacttcacaagacatatatcaaacagtgatgtgcagtatggaacacactaacan

SEQ ID NO: 1828 - DNA, 304 bp, Glycine max
  unsure (1)..(304): unsure at all n locations
tatgtcagagattcatgacacttactatnttttttcccgcattctatgcaccataagaagcaagcttttgtcagcataagcattgccttcgcggtatatatgtaaaattctaaaactaaactttttagttggatctatacaattcacctagcagttgtaaagagtctatggggctgaaaaaggatgattatataatgcacaatattgagaatattggtgtatgattgtgctaatcctaattgattaagaatattgtacatgatatgctgatcttaatgattctattgattaatcttattgatga

SEQ ID NO: 1829 - DNA, 594 bp, Glycine max
  unsure (1)..(594): unsure at all n locations
tgtttgcgtcatcgaccgcgatcattaaatgacgcctcgcatgctatctgagcttggcttgagaaaaaaaaaatgattcctctgtcttactacttgactcatntatctaatgcatgctaactatacattagacatgacgacgggatctacatctgtccaaattcaccccaattatgatgggggaagactgagttgactacgatcaaatgtcctctagttcttacatctggtggcagggatagacctggtaatgatgatatctgtcctgcccctgcctccgctcctactntatatatatatatatatctatatatatataacagcggatatactctgatcgctacttatatataaattntttgatgcgatttctggggtgaggaatatcaccctcatcatgtgcgaggatgggnggaggcgcggaacngctatctttgtcttgtgtcttatgacgacaaacatatatatatcacctctctacgtctacagcactctctccgctctataanaactcaacatgggtctatactcaacaacggcgancatactttgtcattccgctttcttactgtttggagcacctcgacagattct

SEQ ID NO: 1830 - DNA, 619 bp, Glycine max
  unsure (1)..(619): unsure at all n locations
ttacctatagcncgtgtacggcgcttagatctcagctatccaggagatatattatatgatagccgcatatgtgaaattatttttactagaagtaatgatacttgcattggacatattaaggtcatttatactggcatctgatcacacatcgtcatatatgataactctggtgacttttgcaataattatcctgaaagatattatgatgaattctgatttatcaaccatggaaaagcttntacactaactggacatgcctatngagttcttattaaaaagagcttatagaaagttcatcatctatgagcattattaagntccatgtaagctctttcaaatggcctctaaatccttcttaaccaatngaagcctcgaacanaatggatggagaccnnnacataatatcttgaaangtcatataantatgaaatatgaatgantaataaatgtaaagcttttacattgacaggacatgccctatannactctngtaaaaagagctatacatctgtgaagcatataaagctcgatgcangatcttcanatgccccctanatctttctacccaatgaaagttnngacacattgatnganaanggntaatcatgaagagganatn

SEQ ID NO: 1831 - DNA, 560 bp, Glycine max
  unsure (1)..(560): unsure at all n locations
agtgttgcntccttgacacgcgatcttgagtgacctgcggcatgcatgctttaaataatctgacacgagcacaacacgtcatgttgatttctgcagacatcaagacgttgcatgtgtcattccatatacgagatgaggtactggtgaaactgcaaccttatagacagcattctgctgacctgagaaagaatcacacgcttgccatgagatactctggaccagttaaggtgctggccaagattggtgacgttgcttataagatggagttgccttctgctgcacgaattcatcctgtgtttcatgtgtgccagctgaagccattcaatgtgactgctcaagatccttacctgccattcctatgacggcacagaatgggaccgcgatgcacctgtgaaatctacatgcgaatatctcagaggccaatcaatgacggatctttgcgcggagatggttgcagaccactactggaggtctgagattcacgcagcatctacctcactgagcaagagttgtagggaagattacaatgatgctctggaaagtacaacgcgacatatgag

SEQ ID NO: 1832 - DNA, 354 bp, Glycine max
  unsure (1)..(354): unsure at all n locations
cgatcgatctcagccttatctcccaatatattataatctggaccagaactgtgtcgtatgcaaggagtcatcgtctaccacgcaagntgtgactgatatcatnntttcaattttaaaaactgtaattattctatgaattatgttctttttatccaaacgtaacacttcatttgatgacnatgaaattgaaaagaaagaaacaaagaagggaaattaacaaagaaagagatgaattttgaaatgaccttgacattcgatatttcaatcgaattaccatataaacgaactcgtcatttaatcaagagtcaaacacgagtgtaagatttcacacaagtattacactaaaatataata

SEQ ID NO: 1833 - DNA, 170 bp, Glycine max
  unsure (1)..(170): unsure at all n locations
agatctatgcatataagatactaacagacacaacgattatgcaattcaataagaaaagatatatgtgaatagaagacagatattcacagataatcaaagaataacgaatagatagtagacacctaataacgaacaaactttcacaataaaaagaagttcncagcgacgat

SEQ ID NO: 1834 - DNA, 569 bp, Glycine max
  unsure (1)..(569): unsure at all n locations
ngcctaantaacctgacatggagagtgatatgattatanacgcacagaatggaagtactaagtatttattacctatctntaacaganagtaattacaatactacanaataaccatatattgaaggagttttgatacaatatacantaattttatacataaaaagttagtgtattcattgactaacagttagccatacacagaaaccctaacccaaatgagatagagagtgcanaataattgttgttacacgagaaaggggatccctttctctctgctcagcacctcacaatcactcaaacactctttaatctcccctaaaatgtaaaaccctangcttctgtgcatagnntgctctcttttgctgctctacagcactattctcgaagtttgtcaaaaatatgcagctctgatctctcaaaatcctcacccctattntgacanntcangctttanatangctntaaaatcgcgacgtcgtgttagcgccaccttacgcttttggctttgtgcagtcgtcgctgagctacaagaacaatgttcctttacagctgattccattagtggcgcg

SEQ ID NO: 1835 - DNA, 302 bp, Glycine max
aatttccattagaaatgaccttatcatccacaaggtgactttcactagaaatgcatgcatttattttgtcaggtaagctggatatagaagagttgatatcttcacaggtgcttccttgacttactgcctgagaacaacttatgcaaagactgtatgaacaactaatgcagcttctatgaagatccaaaatgggtgttctgcagtaattgctgcgacagcgtataacagatacttacattggttagcgagcagcactatagaatcatttgaatttcctaataacatccacagacgagaactta

SEQ ID NO: 1836 - DNA, 560 bp, Glycine max
  unsure (1)..(560): unsure at all n locations
ntgattacccaacagatacaatgttacctgtcatgannaatgtgtgggataagacctcagatctcaacagatagttgacttcttggaagactgctaaagacccctctnctggaagctntacttacagcttcctccatatcgaatttcccgagtntttaatccgncagggaatggatattacattcagaagtgggaattgggatggcactcgttttaattcagataaatggttattcaatgaaaatacagccttcaggccacacatttcagtgtctagcaatgaggtagtgtattgggatgaagcctgagatagattgtcaaggtttgtgatgangggtgatggactgcttcaaagatatatatcggacaacaaaactctaatgtggatngagatgtatgagataagaaaagactttnngtgacantatggagtatgtggggtgaaccggtgtttgcatattgaggatgtgcctgttactgcgaatgntgaanggctcataccatgtcacaggaagaatggatcattnacangtcctgtggtcatangagacacattaatn

SEQ ID NO: 1837 - DNA, 562 bp, Glycine max
  unsure (1)..(562): unsure at all n locations
nattgtggacgtcgatgagcgaccttcangaccgcgagccganagacacctgangcatgcaagctngagtctttgactaaactggcctgattagttattatatttaatggcgacactgacttttncctctaagggtagaactgtgtacatctaatctaatcttttccagacctctgaacagtaaaatttctgtacattaatcataaacgcaaggctcgtggggagagtaatgatgcaatatggataatggttcattcctttctttactatcaaagatttgcaggatcatctctattataatatatatgagtagcccttcgcgatatcagttgtttcactcttctaagaaattgtctgattacacaacctatgaaaagaaatatctggaactaaataatgatactttaaaaatgcagctggagaggtacatatttatttctatgtaaaattaggatggattacctagaatcatgatctatttacctactataaaaactatgagtataacagcacgctaaagaatcagagtttatttgggctccgcttacctgacataaaacan

SEQ ID NO: 1838 - DNA, 631 bp, Glycine max
agcttcctgtcgccattgatccacactttttaccaatgatctcttaaggtgataccattaggatattcaaacaataccctctcataagttgataccacatcaccatcatattacataatagcaacgactcccttcatcttcaacccaatatggggaaatatcaaaacaatgcaatgaatcagaccacttgtatttattagcatcctatattgtgagtcaattatcaacaacaaccaagattgctcgacaaaatataagattcaaattacattgagctctacaaggacattgttggcttgtcagactgtcataaatatgattgctaaattcccaaataaaacattaagttttactttttaaaaattaaaacacttaaaaaaacacaatgaaatcataattcctttgtgtaaatcatacaacggagtcatgaattcttttccttgtcagggtaaaaataaaataacaaaacaaaatcatactttgggtaccaaatttgggaagagtactcaaataacaccaacaaatcatgagtccattttgttatttaaccatttaaaaaaataacacttaaaattttgattattgtggcccagctaatacacaaaatctatttttctttactaattttttt

SEQ ID NO: 1839 - DNA, 857 bp, Glycine max
  unsure (1)..(857): unsure at all n locations
cccctcaacacaaagatataaaccaccaagaaattcgccatcctctggcccatatcacacacaccgactcctccccggaaacaagaggtttgagacatggaaacccgccacataaaanccaccctggggacgcgaaggctgacagaacaacaccctaagttttttaccctatgacgagagacaaaccgggagagatagaccacgaaaatccatcggggggaatgaagcccttaacaaaaatataaaggggcaaagaaacccgaaagacaaatataaccacgctttctaaagcaaaaaaaacgtgcaaggagaagaacctacggggtgccactaatggggaaaaaagggtcacaaaacgcataagtgccaggagctcactacaaagggaaacccaacaagcgggttgccagcgctcaccagcatccacaagcgaaccaaggaaaaaagaccccaaaaaacctgggcaactaacaaaaaaaaaaactccataacagacctccacgagaggaggaaagaaacaccaccgctgggacccggaacagagatcgtcgcaacacaagaaaagcaaaaaagcgatgttctgagacccaaaacccaaagtctagaggggtaggcactcttggaaggaaaacaaagagcccacaaccggcggagggaaaagtgggagtccccccgaacctcccaaaaaaaaggggcacatgggaaaaagaggaagcaaaatgcgcaagcacaaacaaagaaggacccgggggacaactgcacacttacaagggaagggcagtatccccaacaaaaaaaccccctaatcttttcggccaaaaaaaggaaactttaataaaaacaagcggggagccggc

SEQ ID NO: 1840 - DNA, 523 bp, Glycine max
agcttaacaacacttaaggttcaatgccccttctaaactatgtgttcaactaagcaatgcattaaagacatgttaatttaattgaataataaatgcgagtctttattaggaggtgtgattaattcatttaatataataaatgggcggattattcagggagtagttgaagatttgatttattctagactattactttttgttgaacaactgacctcaataacttaagagggggtgaattaattaaattttaaaattttcccgctaacaaattttaacccccttttaaatgatacatgatagactcagaatgcagaagaagaagaagaaacaatcaatttaataatgttcttttaaatgcgcaagacaaagtaaactgcaataaaataactgagataagggaagagagaattgcaaaatcattttatactggtttggccactccccgtgcctacgtccagtccttaaacaacccacttgagattttcactatctttgtaaactctgtacaacttctgaacacatc

SEQ ID NO: 1841 - DNA, 336 bp, Glycine max
  unsure (1)..(336): unsure at all n locations
tatggtaagacctgngacctaaccatggcggaggcctgcactgaggccattgcctccctcgcccaacattatgaccagcctttgaggtgcttcacctttagggacttccaattaacacccacggtcgaagagtttgaagagatcctgggatgccctctgggaggaaggaaaccgtatcttttctcaggattcttgatggatcgagtggcctcagaataattaagaagggggggggggttgaattaattatgactagacctttactaattaaaaatttacccttcttaggcttttactatattgttaagaaaagaaagaatagaaaagacacttaac

SEQ ID NO: 1842 - DNA, 445 bp, Glycine max
agcttcatgatgatgaataaagttgattcacgtttttttgatgactactaacatgatgacactatgctcaagataatgatttctacaccgagacccctgtttaagaccctcattatttactcgttctatgatctgaacactttaatacccccgactcgatacttttccgctatgtccattccctatataatctcccgacgactttttaagggctgtattgatcatatgtggacaacatgaaccatatctcatttgttcttttttgagaatgtcctctccaaccctcctatatctccagagggaagactccttggttatcaccctccaagtgcctccattcgatccttggtgctaccatatgacttctactctttgccctagatcttattcttacctccatgactcatcactgtatgtagggtatacaagctctctcccgggataa

SEQ ID NO: 1843 - DNA, 563 bp, Glycine max
  unsure (1)..(563): unsure at all n locations
tcaagttctaaggccttccaatccattgaagaccaagaatctcgatcaactttattgtttttagcttggtacgtatgcttttcttcaaccattctcttcttaccaagttttcttgtttttcttttgcaaaatattaggttcaagttgttttgggtgattatggcccaaagggaagcttttagagctcaaattcttcatgtcttttctaaaaaagaagtttttgtaattggtacatgttttttttatcactttctttgggagctttaagggagaggaaagcttacccttttaattttctacattttctaccggttattctacagtttanagtattgtaaggctgttggtcgtttcaaaatattgtcttggtgaattttgttcttatttgttttaagggagagggatgcatgtgttatatacaagtgtacacattcattttaaacaatgtgttatataacttgatgaaaagttctcatcttaatttattttcttcgttcttcaccgtgtgaaaatgataaccattgtttaaggccaatcattttttatttaaaaataaaaagtga

SEQ ID NO: 1844 - DNA, 510 bp, Glycine max
agcttgaaattcagaaccgaagctctgagcaaaatcaaatgacaataactttttactcggatggccgattgtgtcgcgtagtgtatcgagacgcttgaaattcagaacaaaagctctgagcaaaatcaaacaacaataactttttacacggatgtccgaatgaatgccgtaatatatcgagacgctcgatcttgaaaacggaagctctgagcaaattcaaaagacaataactttttactaggatgtctgattgagtcccgtagtatatcgagatgctcgacattcataacagaagctctgagcaaaatgaaacgacaacaactttttactcggatgtctgattgtgtcccgtagtatatcgagactctcgaaattcagaacagacgctctgagcaaaatcaaacgacaataacgttgtactcggatggtccgatggatcccgtagtgtatcgagacgcttgaaattcagaacagaagctctgagcagaatcaaacgacaataacttttta

SEQ ID NO: 1845 - DNA, 545 bp, Glycine max
  unsure (1)..(545): unsure at all n locations
tagccgaattcagatcgaattgaagttagcttagctgaaccttggccagcttagcggaatgaatcagcctcagatgcaagggttgggcgctaagtgcttgagactcatggcttagcgcatgaacagagatgcgcttagcgcaaggcttgcgtttagcgaaaggactgttttttttttttcagaaaagtgttttctaagttatttttcagtcctttttccaagaaattgaaacccttgtgttaaacattcaaagataagctgatatactcctatgtacaaattatacagcaagttccacatgatataatgcatgaaaaaacagagataacaaaaattaaaactgggttgcctcccaagaaacgcttctttaatgtcatgagcttgatgcttttatctcactgggtgatcaaatgaacagtgccctgtgtccttgtaaattcttcatcatgatacaattntaacctctggtgatatgaaccctcatggcacaagggctgacttangatcgtctaggattaaaccttgatggaaaatgcggaaattga

SEQ ID NO: 1846 - DNA, 546 bp, Glycine max
agctttaccctctaccatgctttcacatgttcatgtttcttaagctggtttgcattttcgtgctatcgttcgtatgctttacgtaaacttgaaatgtaacttttctgtcttttgtttgtgtttatctgacaaaagaactgccaaaggcttactaaaagcttaaactaacggagtctcttttagatagcaaggtatttcttgaagcctccatcaactttacttaatactcattgttccaatgcaggtggcatgttttctgaattaaatatttctggcacaatcttgaagtagaaaaaatcaacgatgaagaaagagcatctttggcagcttcatttgcatctgaagccactctttgaagggtcctcgcttgcccaaaagatgatgacatgccttcaatagaagctcttcttgctcctttggaagctgaactcatgcttgctcggaaggaggtattacctttttcttggaggtcatattggattccccctcgagacagaacttgatggaaaggactttaactggccttaaatgaagtatttttttgat

SEQ ID NO: 1847 - DNA, 588 bp, Glycine max
taccgaaaaaaacaactatttgttgtctctgaaaattgtggtcttcaactcaccaccaatccaatatacacacttggaagtttaagaaaatcacaaacttaatagaattaactactagtttaggctaatacattttaagagatccaatacgtccttttttttctttatctctactgaattataatttagtgcacattcaattgttgttttattcacattatctaatacgaatatgcacgaaacagcgaggtaggttcatttaggcaagcttgatgttaatagtttcttttaggaaaacgactccagttgttacgtggcaacatgttattatcaatttgagtttaatttaaggcttctcctctctttgggatgttttagtgcgtgttgggcaaacaatttgagccattggagacattctggtccagatgcacctgattgagggcgatggtgccaaagtcaaatgtagaatatgtaaccaaaaatctgcctaattttccaaattacatgaagatcggttctttcttacgaatcaaatatgaaggtattcaatattcatgttttggtgagttcctgaccaaaacaattatc

SEQ ID NO: 1848 - DNA, 634 bp, Glycine max
agcttcctgtcgccagtgatccacacattataccaatgatctcttaagttgataccattaggatattcaaacaataccctctcataagttgataccacatcaccatcatattacataatagcaacgactccctccatcttcaacccaatatggtgaaatatcaaaacaatgcaatgaatcagaccacttgtatttattagcatcttatattgtgagtcaattatcaacaacaaccaagattgcacgacaaaatataagattcaaattacattgagctctacaaggacattgttggcttgtcagactgtcataaatatgattgctaaatcacaatataaaacattaagttttactttttaaaaattaaaacacttaaaaaaacacaatgaaatcataattcctttgtattaatcaatacaacggaatcatgatttcattccctagtcagggtaaaaataaaataaccaaacaaaatcatactcttgttacaaatttgtgaatgttatcaataatacaacaaaatcatgattccattatgttatttaacaatataaaaaaataacaataaaaatatgattatggtgtacaagcatttaacaaaaacatattttcattattaatttttttcacccca

SEQ ID NO: 1849 - DNA, 638 bp, Glycine max
  unsure (1)..(638): unsure at all n locations
taagggacgtgaggtcttgaaggaactacctctttaggttgtaaaactctatgaggagatagaaaccttgagagataaactaggaaaatttattggtggtcatgaagcccttaacaaaattattaaggtgcaaagaaaccctaaagacaaatttagccatgctttcaaaggcaaaaagattgtacatggtgaagaagttattgtttgctatttttgtggaaaaatgggtcacaaaactcataagtgcaaggatctccctacaaagggaaacccatcaaagggtttgtccagtgcttaccaacatccacaagcaaacaaggaaaaaggacccaaaaagatttgggtagctaagaataaaataattcctattacagacctncttgatagtaggaaagaaacaccattgatggtacctggacagtggctgctcgcaacacatgatagtcaaaaagtctatgttctgatccctaagccctatgtctagtggggttgccacttttggagggaataaaaaaggtccgataactggtgtaggtaaaagttgcattcctccctatccttctatagataantgtttactttgttaaagggtgaagcataatttgctaagcataaatcaattatgtgacagtggatat

SEQ ID NO: 1850 - DNA, 459 bp, Glycine max
agcttaatcattgtgttttctttctttcttttttttttaaaataggcttataatcctaacatggatggctcatggtacctaacacatgcaactaagaatgcagtgtgaattttcatgcttcctttttttatttttgttttgcagaggataattcgaggatcatgcatgagtaaacatgaaaaacaaaggtatgcaacaaacatgttagatgcagatgctgtaaaggtacatgttgattttatgcttttgagcagtccatgttaaccaataaaagcaaataggaccgattaatgcattggaccttaaagcagtttttagtgatttttgcggacaaagcttgatttgtgagtagattctaactatagattcactttggttattagtccgttcattcaaggaaactgtctaaaaaaagtccgattgattgttttttattattctattccaggatattttgac

SEQ ID NO: 1851 - DNA, 559 bp, Glycine max
tttggcacaaagaagaagaagttcatagagattgccggctcgtaaaggattgtattggattgattggatttgagaaagattgattagaaaagtgtatattgaaaagcaaatcaaagccttgctgttatagactcttcatgtatggccaaaaggaccatttacagaaggtatcacttttagaaaaacttaaaacaaatttgaaaaagtcacaaaccttttgaagagttacatcttttgatttattcagaaacaatcactggtaatcgattaccaaattagtgtaatcgattacacaaggcttttatgcgaaaggatgtgactcttcacatttgaatttgaatttcaacgttcaagggcactagtaatcgattacgaaaacattgtaatcgattacaactttttgaaattaattggaatgttgtaaattcagtttgaaaactttttgaaatccattttgctactggtaatcaattacaataatctggtaatcgattaccaaagagtaaaaactatttggtaaacatgttttgagaaaaatccatgtgctactcagtttttt

SEQ ID NO: 1852 - DNA, 507 bp, Glycine max
agcttgggctcttgcctcactcatcgcctttttggtttcatttctagctatcttatacttatcccaagtttcagaatttctacacctagaccactccttgaaacactccttttttactctaactttgctctgaacattttcattccaccaccacgattctttacccctaggtccaaaacctctagattcacccaacgtctctttagccactttaataatctcttgggacatcttgttccacatatcatttgcacttccttgtgattgtccacaccaaccctcccatatcttttgttggaagattccttgtttctcacccttcaagtgccaccatttgatccttggtgctaccataagacttcttctctttgccctatctctaattcttacatccataaccaacactctatgttgggtagtcaagctctctcccgggataactttacagttcaagcaatacttcctatcagacttcctgataaggaagaaatctatctgagaacatgt

SEQ ID NO: 1853 - DNA, 509 bp, Glycine max
taaagtatgcccgactcattcatccctatgagatgttgtctaagtattggcgatcagaattgccattccttggattatagggttgaaccaagctcatgcttttacaaaaaggttcatcaagtcaagttgaaatatggaagtaaccgtcttgcaaaattggggcaaaagatgaattgagtcacatcactgcttcttctactgccaaacatatttaagattattgatgtccttgctacttccagttacaccttgacaaagaagttatggaccatgttgaaaatctaaattgattcaaccccatatcctgtgtaaaaattcgcaatacttcaactgtacatcattcgcatacatccatgcttttcattggttgcattgctcattgcattctttcgttgagaaataagatacaataaaataaaatgaacttactcattgttatcaaacagaaaaagacacgctttactgcacccttaccgaactcgtgctatagctagagtaatgggtgaagc

SEQ ID NO: 1854 - DNA, 217 bp, Glycine max
agcttgtacaatagctgaactattttattaataagctggccttgacgattattaataatatgcgagcgtttcacacttgtcataccgagaccgaatctcttaaccaatggtttgaggtaatatcacgctgggagcatcatcgtactgcactacgattgagtgatgccctgaccggaaacagtgaatctttccttcctatcgtgtgccaccttgtata

SEQ ID NO: 1855 - DNA, 475 bp, Glycine max
tagacgaatgcagatcgatttgatcttatcatacgagatccttgttctgcttaacagaatggatcatccttagatgctaagggtgggcgctaattgcttgagactcatggcttagcgcatgaccagagatgctcttagcacatggcttgcgtttagcgaaaggactgtatttattgattcacaaaagtgttttctaagatattattcattcctttttccaaaaaattgcaacccttgtgttaaacattcaaagataagctgatatactcctatgtacaaattatcctgcaagttccacatgatatagtgcatgaaaaaacagagataccaaagatctaaaactgggttgcctcccaagaaacgctagtttaatgtcatgagcttgatgcttctatctcactgggtgatcaaatgaacagagccctgtgtacttgtgaagtcttaatcatgatagcactttaaactctggtgatat

SEQ ID NO: 1856 - DNA, 427 bp, Glycine max
agcttggttatctccttcttcactacgtcaagaatcaccgggttgagtcttcgctgtggctgtcttactggtttagctccatcctctaaatttattcgatgcatacatgtggatgggctaataccaggaatgtccgccaagctccattcttatgtttcttaagaactgacaacaacttctcctcttgctcatcagcaagggaggcagatatgatcactggaaaactcttgctatcatccaagtaagcgtattttaaatttgatggcaaaggcttcaactctggtgtggtcggctggacagtggtagaaagagatagtttctcagcctttacctcataaagaaagtcagatgtatgtgtacttcctgaaacatggtgtcataccctaattttcgccggggacctttgctcgatgacgtgcgaccattc

SEQ ID NO: 1857 - DNA, 507 bp, Glycine max
ttaacatttattttacaggtattcataatgttgatatttttattcaagaatttgatctacttttaaccccagttgatgagatataagatgaatctaactgtagttcttttatcactgtttttcaataaactttgcctcaaaaaataaaatacaaggatcacctaattacaagctttctaaattctaattactgatttttaggtttatttacctttttttaatctaaattaaaaatgttaatctctattttttataattaaaaaaactttgagatccctttcactgatgttatctatgactctatgtgttgatgctatcacttggcaaaggaagaaattaagagtaatcgaatacacagaagagtttatgaggtgctatctaaggctgctagctcaaatccaaaacacgctggcttgaatgaacgcgagctctattttgtcttcttttgtaagccaaatagttttcaagagatgaaaagagcttggcatgtgtctgatgtgcactttg

SEQ ID NO: 1858 - DNA, 442 bp, Glycine max
tcgtctgggtccctagccaactttcatgtgagcgagttctgcatggaacttacgccagactttaggtaattatcccagaaaaaggcgcatttggagtcgattttagcgttactttcactttgtaaaaaaataattccctccactacaatttttaaaaaagtgcggatgacctttattaatgtgcctgtcccggaaatttgaatattactttttcaaaaataattggcgatcaattaacacctggccttcttgggtaaaccaaggtacaatgtgaacaagcggtataaaatattttagcccgcgcctacatagattcccaagcgttaaaacctttttgcctttttttttatgttctatatacggtttttacacccctgcatccacgggttatggcaatttttcaagcgtattaatacgaaaccctttcaagaatcaaataatt

SEQ ID NO: 1859 - DNA, 469 bp, Glycine max
  unsure (1)..(469): unsure at all n locations
agcttggttcgaggtacttacccgttgaagatcgaagaacgatgaagaacgaatgaagaacgtcgaagaacggttgaaacctttgcgagattcctcacggaaaacgttacggaaacgtttcggaagcgcctcggcttagattttcttcacggaaacgatttttccaagcaaattcgaaagagagagaagtgccaaaggggctgaacccttttcttcttcacttcctcccctatttatagcaaaataagggaggtggttgccgcccagctcgcccaggcgagctcagctcgcccaggcgagccaggttgcttcctccaaaagcaacagccttctggaggaatattctggagggcccaagtgggcctgggtgctattngcacccccatttttactaagtacacccccctctgttttttttggggattctttttcgtaaaggtacggaaacttacgaatttcgcaacgatac

SEQ ID NO: 1860 - DNA, 564 bp, Glycine max
tagctacacacacccctctaataactatgctcacctccttgagaagagaagctagatcttagctgcacacccctataatagctaagcgccccctgacaaaatacatgaaaatacaaaaacaaagtccctactacaaagactactcaaaatcccctaaaatacaaggctaaaaccctatactactagaatgaccaaaatacaaggccaaaaagaaggaacaaacctattctgatatttacaaagaagagtggatccaaccttgacccatgggctcaaaaagctaacctaaggttcatgagaaccctagggccttctttagtagctctagcctaagcctcctggagtcttctatccaatacccttggggggtaggattgcatcatcctctccaccttggaaaggatttgacctcaaatcccgaggttcttcacactctgggctcctttcctggacacttgaggctcttgtgctctgataccacttgatggaagcttgattgtagggcttctatggaggttggatctttgagcttcaatgggggcctttaatggtgattttacacca

SEQ ID NO: 1861 - DNA, 489 bp, Glycine max
agctttaacaacaattcccttctttttcttatcattttcttcgtgttgatttaatctcaacagttccatttcgtgttcctgtaactttccaaatagtgtagcaagagacatgttagttaaatctcgtgactcagtaatggctgttaccttaggtgtccattctctgcttaaacatctcaatactttatttatgagatcttcatttggaaaatttttccctaaagatgcaagatgatttattatatgtgtaaacctttttttgcatgtcttgtatactttcatttgaattcattctaaataattcatactcatgagttaatgtatttattctagatcttttcacatctgttgcgccctcatgtgttacttgtagggtatcccacattttttttgcacttttacaatttgataccctaaagtactcatccattcctaaggcagatgtaattatatttttgacttttaagtttgattgcactaatctctttt

SEQ ID NO: 1862 - DNA, 230 bp, Glycine max
  unsure (1)..(230): unsure at all n locations
tcctcggggcgcnttcctgcgaaggctaacatttggaaggttttttttaccagtgggacattactcttaaagcaaaaatggcatatgacctcctcccataaatgcaaacatcaatgtaaatttagagcaagcttatgcgcatattttcttacaaacgttcatctgcacaagacattctattaaccgaaaaaatgcacccatatgcaattaatgcagcttgcgtacctaca

SEQ ID NO: 1863 - DNA, 447 bp, Glycine max
acctgcatgcatgcatgcttcataggatgagaagaatcaattcatttttattttccaatgggcagaactactactacagctaatccttatctctctatgccggcagctacatgaatcattatcaaatactatacttttggaaagccagattcaaacagttaaatggcctatatagtcgacatggactaacaagtcaaaaagaaaaaatgctgagcacgatttatatatttactgaactgatcttcttcccaaaaaatttgttagctagaattattgtcctagcatctacgaatcgacaccaatagtctagtccttgccctttaattacagcgatatagaaccttccaccattcctcaatctagaaaagagacagtatataatcgaatgcgagtgattacatctcactgagtgaaagagtgccacatcatttaggatatcacatgtta

SEQ ID NO: 1864 - DNA, 433 bp, Glycine max
gacacttaaaactcagcttatacgaaccttatgtctcgctaaggtcctcgaccggtttattaatcttattggaccaatctcatgatcgatcactgtctaactctaaacacatgtttcagatcttttttaacgctgataaatggcaaaagtttttaactgatttagatacataagttatgcggatgaaaaacaggctcccaaaattttagctgtacccattgatacttacttcgtatcggaggcactgatccaccgcaacatcagtattgctgaaatcaattattttgcctgcgatagaaatgtaacgtaaggagtattttgttttttttatgggaaaatttcagattgttacacatgtctatttattaacagtattgaacacaccagctatgttgcggtttccctttctcttaaccagttaccataccttata

SEQ ID NO: 1865 - DNA, 588 bp, Glycine max
agcttatgctgcaaatatttacaatagacctcctcaacctcagcagcaaaatcaaccacagcagaacaattatgacctctccagcaacagatacaaccctggatggaggaatcaccctaatctcagatggtctagccctcagcaacaacaatagcagcctgctcctttcttccaaaatgttgttggcccaagcagaccgtacattcctccaccaatccaacaacagcaacagccccagaaacagccaacagttgaggcccctccacaaccttccctcgaagaacttgtgaggcaaatgactatgcagaacatgcagtttcaacaagagaccagagcttccatttagagcttgactaatcagataggacaattagctacacaattgaatcaacaaaagtcccagaattctgacaagctaccttctcaagctgtccaaaatcccaaaaatgtcagtgccatttcattgacgtcgggaaagcagtgtcaaggacctcaacccgtagcaccttcctcatctgcaaatgaacctgccaaacttcactctacttcaaaaaaggtgaagacaaaatttacctacaatttctgaca

SEQ ID NO: 1866 - DNA, 601 bp, Glycine max
tgcccatggccatcttagcgagccaatcacctttagatgcttgggtttgagcgcttagcgcaggctagcctcgcttagcgaaagaaggagatgcactcagcgcatgatatgcgcttagcgagtggactgttttcatgaaaatgcttttaatctattttcagtccactttctcaaaacatttaaaacaaccccccactatctatgactcattataagcttatatccccctttttcaatgattataaagcaaattccaacttatgcaatgcatgaaaaacaaaatgaaaggaatcagaactgggttgcctcccaggaagcgctcttttaacgtcattagcttgatgcatatacctcaataggtgatattaaatttggccctcactttcaggacctcccttacctgtaagcaaacattatgttctggcacaggcttgtcttctacaaataaatcagaatcaatttcttgatcttcaaaacccatttctagtttctttcttcccaagattatgggaatgtcattatcttcacagatatccattacaacaaagtttgttgagaagataaaatgttttactctgacctaaacatcttcattactccg

SEQ ID NO: 1867 - DNA, 526 bp, Glycine max
agcttgtaagctatgatggctaggtgctactgttccctacacatgcgtaaatcatggtttacatggaccaattggggttagcagcccttgctatgtgcgtggtatcatgtcacaaacaatggcttggtgaatgagttttttgagaggtagcaccaggaggcatcttccttccagttgtccgttggagaaatgatcatcactctagatgatttgtcttgtctactgcacttgcctatgacacgtaggccccttgatcatatgccatcattctttgtcagagaggcagtgaagaccttgctaatgactcatctgggcattccaacagagacggaggcttttatggtggcaaacgcaagtgccatggtgaggttggcatggctagaagacctttatcaccgctacattgagtcaggcttttaggctacaatgacttatctcatgcacttgatcaacaatatgatatttgccataagttctcgacttgcattcatgtcgcctattgccagaacctcaacaacctggatgc

SEQ ID NO: 1868 - DNA, 533 bp, Glycine max
  unsure (1)..(533): unsure at all n locations
ttgtcatctcacgctcactgagatgacccaaatgcagatgctacaatctagtagcatcatcatcagactcaacagatgcaacccgacctacaatattgctccccaatagcctgtaaatatttcctacagtctgttatgctttcgtcataatcaatgccccccttgcacactctgaaggtatccctatctccatctgaaaccattggcttgcaaggtaccaagtgagatcaaattcatagcaatctacatctgtcccattggcttcgcataatgttcttactccatcttcatccatagaaatatgcatttgtcccattccaacaacatatgctttgttgttacccacatagacactatcaaaattacatgacatgtatatggtgaaccactccctgttaggagtcatatggtaaaaacatccagaatccatgcatctgtcaactgactgcatgaaccagagggaacatcntcctcgctataatagacatcttctaattgtagtagtctgaatcattgttctttgccacattttt

SEQ ID NO: 1869 - DNA, 497 bp, Glycine max
agcttccttttagtgcgtcacgtttaaaaccgatctcgatggtggtgcgagcctttgatggtactcggcgggaagtaatgggggaaatcgacattcccattcagataggcccccacacttgcaatgtggtgtttcaagtaatggatataaatcccgcctatagctgcctcttgggaagaccgtggattcatgccctggaagtggtcccttcaacgcttcaccagaaattgaagttcacagtgggtggacttttagtgatagtgtcgggtgaagaggatatgttagtgagctgcccctcctccgcaccgtacgtagaagcggcggaagaatcattggaaacggctttccaatcctttgaggtggtgagctgcgcctcggtggaaccaagttcgtcgctaccttctctctccaacgcggccataatggtggcgcgtggtatgctcaatgatgcaagctccattggagcttgtaggcctaggatcttcttcatcaatgga

SEQ ID NO: 1870 - DNA, 500 bp, Glycine max
  unsure (1)..(500): unsure at all n locations
ttggtcttgccaagtagaggaatttgtggcaaacctctctttggtcttgccaattttatgtgatgatgtgccttgaatggaacttgaggagtttccttcccttttcttttatatgttgtctctttgtttgcatttcattacatgatcacattgaggatcatatgcatttcaagtgtggggggagggtttagaaaaatctgtttttgttttctattttcactatttttgttatgtctgtttctatttagtagtattctattttgtctatttttctatatttgtatattgtttctattttgctgttcttttctgttttttgatttgttgttttactatttttattgtttttatatacagaaaatatagtacaaattttatagntgctgttttctaatgtttttgttgaatttatgcactttctcatgtttttcatacgatttctaacttgtataatttgtgagagatgtatcacttgtagttgagaggtttatgcttgatgt

SEQ ID NO: 1871 - DNA, 520 bp, Glycine max
agcttgacaagctagcttgtttaactaatattaataataatgatgataataataactttattttatcaaatcttatcttatccagattttattctatctagattttatttcatctcatctcatcttatcttatctaaattttattttatttcatttatgggttgggacttaaaatagatttgtaagctttggggctgaggacttatatatcaacacaaaggttttagtttagggagcttttttcagagaggagaataattctaggatgttagaatttcagtttttattactgttcatgcacattgttcacgtagaataaaattcattttttgcaaatcatctttgatccatacatttgttcatattatgctgtttttattttctttggatatactttgcgctttaacgacttggaatcaatatgattttggttatcaattatttttggatttgtcattacttatacgaaattttataagtttcttttttaggtaggatttcactaggtgttaaaataatg

SEQ ID NO: 1872 - DNA, 451 bp, Glycine max
taacccttgaccttgtgtgccttttactatttatattcaaacctagttggttaccctttttctcctcccattaatactatagggggagtatttgggatcttcctattttagtgtgaagattataattcatgtatgcggagatatttttgttctaaagacctaaaagagaaattaaaagatgttaaaattcttacttaattgtgattaactgcgtaggaatagtaccttatgcggtccagcgtgggggcggaagtacttatacaattaaagactaataaatttcacatcttaaagattaaaaggtgttggaaaatttttctcttgggtagaagacgtgtacgcagttttatttttttttttggaaaaaaaatcctgtagacgttagcaaatttatctccaaaaaattttgatcaaccatatataattttgttcttggattaaaatgatagca

SEQ ID NO: 1873 - DNA, 431 bp, Glycine max
agcttgtaatcgattacacaaatactgttattgattaccagagcaaattttcagactatattctcaacagtcacatctttttatgaggttcttgaatggctatcaaaggcctatatatatgtgactagagacacgaatttgctaagagtttttcagaacaaaaaggtcttatcctcttaaaaagaaaaatcggggcatcctattacaaattcctcggccaagacacttgtgattcaatcaggaattattagagtgctcaaatcgatcaatctatatctttcaagagagataccgtcctctctccttgtttactctgaaaagggattatgagactgagggtctctttgagcgaaagaattcttcacagaaaggaaggattgtccttgtgtgtttacaacttgcaaaaagaattacaagataatgtaactctc

SEQ ID NO: 1874 - DNA, 458 bp, Glycine max
tgagaggattgatggggacccggtgttgagagaaacgaggatatgggctacgtgggagtacgtgagctcaattggaggtgggcaacaggggatggtgggtttatgcgcgcattgtggatgtggaaaacttgttgtgcaccatcgcccgaccgccacctagtaccacatgtgatgggtaccccataatcctacaagcttgagatgaggaaatgttgaagggtgaaacttcctgcttttattgttgaccacagagtggtacctggagatatgtcgcgggggtcaggagaccttggggacgtcaggtggggtgctattgcccaaaaccaagcttgaccaatcccgacccaacccgggcatagtcggtcagtgagaacctgtgatgtacctaagcaggcgagctcctggcaatcaacatgatataggaacaaagaccacaaagcaaggacgcttgtggtggc

SEQ ID NO: 1875 - DNA, 478 bp, Glycine max
agctttgcttggagcttcaatggagaatgatgaagagaatggcaacgtgagggagagagagggctgtctgaaattttgtggggctgagtgaagagagagagagttgctttttggttttaaatgaaagggttttctcttttttctattattttattcaagctatgccacatgtcttcatttgagtggagcaagaagggcccactttccctttttaattgtgactcatactcaaccacaaaaagtgagaaaaacctgacctttgaaacgctaaaatcctgccttggtttgcgtgccgtttctctggttccagttcctcacgtttctctgcgtccgtcggggccagttttccaaagcaagcaatatatatatcaaaatgctcagaataaaaccccgagcgtggttcagaggttggtttttgttaattctaagccgcacgcaaaacgatgatttttagactaattacttaagaaataacccc

SEQ ID NO: 1876 - DNA, 508 bp, Glycine max
tatagaatatataataaaagaacaatgacaattgaagagtctatacatgtttcctttgatgagtctaatgccattcttccaaggaaggattttttagatgatatttcagattccttagaagatacacatattcatggaaataactctaaagaaaaagatgaaggaagcaatgaagattctcaagataatggggctagaggaaataatgaacttccaagagaatggaaagcctcaagagatcatcccctcgacaacattattggtgatatatcaaaaggggtaacaactagacattctcttaaagatttatgcaataatatggcttttgtatctatgattgaacctaaaaatataaaagaagccatattagatgataactggataattaccatgcaagaagaactgaatcaatttgaaagacataatgtgtgaaaactagtacaaaaacctgaaaattatcctgtcataggaacaaaaagggtttttagaaataaattagatgaacatg

SEQ ID NO: 1877 - DNA, 549 bp, Glycine max
  unsure (1)..(549): unsure at all n locations
agcttgtaggattatggggtacccatctcatgtggtactaggtggcggtcgggcgatggtgcacaactagtttttccacatccacaatgcgcgcataaacccaccatcccctgttgcccacctccaactgagctcacgtattcccacgtagcccatatcctcgtttctctcaacaccgggtccccatcaatccttccaagcttacacaacatccaagcaaaacaacattcacacagcacaagctatcacagccaagcaaaacaaagcaaaggcagaaaactctgccaaaacaccaaccaaaaatcacagcttttcccactcaaagaccccagtgacaatttcttcgatctaattcgttaaccggtggatcgactccaaaattttactggaagtctacagtgcataagcctacattttgaccgttgggatctactagcanacatccagaactcattctacattactctttccacaaccagcaaatacatggatttttctgcacttgtgcagaattctgctgcacaattttacagcaaaatctgcaccaag

SEQ ID NO: 1878 - DNA, 368 bp, Glycine max
taagccctgacggctctgcgtgatgatggactgccccctgtgtaagctgcggaccttggaataaagcatctgtggtgcaaatgaaccatcagtaagtcttgtctgtaaccgagctggaagtggtacatgcggttatgctggaggaataattggagcctgaatggcaggtgctgcatctatggaagaataaggatgagctgactctcctggtgctgacgtagtgacaacctctgatctcttaccactggccttccttggccctctaaatgtcgctattgcatcatctagatccctacaagtctgcatattatatgccccggcaacgtgggctatgccgtctcccagatgcagactatacaacatcgatg

SEQ ID NO: 1879 - DNA, 451 bp, Glycine max
agctttaagatcaaacttttttctctcaactattattcattcttcttcctcttttcacttctattcttcctttttcttgcacaaattttgtttctattccactagtgataatcatggaaggttgaacactcaatgaatccaaggatccactccaagcaaggttgaatttgagttctggtttaatatttcaatttcatgtgaatgttcatctttttcttcaatcctattttcggctatgatgattatgaatgtgcctaggattgaaaatgaattaggttattgattcatttcttgattttgaaatttaatcttagattgtttggatgatattccaatctaatttgcgatctcaatgagtttagggattaattcaattgaactaactctcatgacattgatttaactttcacaacatgatcattcattgcagaactatgattaatccaattga

SEQ ID NO: 1880 - DNA, 433 bp, Glycine max
ttagactagccttgataggaatttggtgactcactcttgttgtcattgctcagggcttgttgtcatcatctttgaatgtatcaaaactgcttgaatcaaccttgattcatcatcatgaagcttgcttctacaatagatagcatggctcattggtgtagccatgtgcttagcattttccatgccgaatctatgaataaactgtttgcggtacttatattgattgacaaaaattctagtcttggtatgtttaatttgtctatcaagacaaaaattatatactcgcataatggacatatcaaactgactttgcatgtcatgagagaagtccttgcacaataattcatgagtaaatctacaaataatatcatcacacatatatatgaaccaagaaaacatcatgtaatgttctctttatgaaaagagtaatatctac

SEQ ID NO: 1881 - DNA, 277 bp, Glycine max
agcttgcttgtggggcttctatttatgttttatcttcgagcttcaatggggtgcttttttggcgacttttcaccatggagatgctcctgaacactgccgaaccgaggctataggacgcgctatccattaaggaatcatccctggtacaaggagcttgacctccaagatgagccttggataatacgcttggtgacgatgctacattgtaggaaaacaatgacggagagaatgagggagggggtgctcgaattgtaaggacgaaaaagggagagaagta

SEQ ID NO: 1882 - DNA, 505 bp, Glycine max
tgcttgtggggcttctatgaaggctggatctttgagcttctatgaggtcctttaatggtgattttccaccatggagatgcagcggaagacaaaggagaatatgtgagaggaggcgccatccactagggaataagccttggaagaaggagcatcaccaccaagatgagccttggataaaaagcttggagaggatgcttcaatggaggaaaagatagagggagagaaagagagagggggaagcacgatattgaaggaagaaaaagggagagaagttgaactttgagttgtgtctcacaagactctcatttatcaaagttacaacaagtgttacacatgtttctatttatagactaggtagctctcttgagaagttttcttgagaaaactttcttgagaagcttctttgaaaaacttccttgagaaactagagcttacctacacatacccctttaattactaagctcacctccttgagaagctttctcgaaaagatttcctaaaaagc

SEQ ID NO: 1883 - DNA, 438 bp, Glycine max
agcttgtaatgtatggcatgcaattttctatatggcatttgatgttagcgtttggatttttgtttctacacaattagtaatagcaatgtaaggcaagcaaatagcaatatcaataacattatgttgatggctccaaatttggtcaacatataaacatgaatgaaacaatttcaactttgaccaggcaattatttcttccaaatgacactaaattcttcttatgttttgcagagtccagatgggttaacggtggtgtcagttggggcagataaaactcttcgcttttccgatgtatttgggccacctgtcaataatacttttgagatctcaaaccttgataaacttttgtctttctaggtgtccccaataagatgatggaaacaagacaattttgtccactcatgatatattcttctgtgaaacaaaacaattctgtca

SEQ ID NO: 1884 - DNA, 544 bp, Glycine max
tattaccttataaatgtttgatggatatttcagatatccactttggtaatgatactcattgccgacattggaggttttggcttaaccatgttaatcaccacctttgctgtgaagggcattaaccgtgtccatgctgtgggatggatttgtgccatttttaacattgcagtgtttgctgctcccttaagcataatggtacattctatattcaattattcacataatatagatcttgcatagtttgatatgcaatctgaaatatgtaaaatctgtacattaattgcagaggagggtcataaaaaccaaaagtgtagagttcatgccattttcattgtccttatttcttacgctctgcgccaccatgtggtttttctatggtttcttcgacaaggatgacttcattatggtgaggaataacacttctatatctattactcattctactcattttctcttgaaagcaaactgattagtgttttgttttgtggattatcagtttcccatgtgttaagatttatttttggcatctctcaaatgattttat

SEQ ID NO: 1885 - DNA, 645 bp, Glycine max
agcttgtcagcaaaactatacaagtatccatccactttatatctaccaatggaatggaatgcaacttcctacacaaataaggtcccaactaatcctcaacaatgccaaacctaagctatggaacaaagtaaagaaaaagagaacatcaccaatacagttaaaggatcataaaaaagttaatgagttcactacatagcatgacataagagattttaaaaatttaaattcattttcatttaatcttttgtttcatgatattgtttgttcaagattaataatagagattctttatatgtcaaaaaataggaagcttagcaagacgacaacattcatccaacacacaatcaagagattccaccgaggccaaatgccaaaatctgaaccaaggggaaatttgctattgatgttacatgtacttgtgtgttatcaaatgagtcattctaagtatatgctttatacaaaaaatgaaatattagcttactatatttgtgtgaagctttgaaagacattcattaggtggtgtatcattgatgcaaatagagtatttgaatgttggacaaaaaacccgagtctaaacaacatatacatccctgggaatttctttctaagagccaaaatctatggattgaagagcctatgaaaaca

SEQ ID NO: 1886 - DNA, 639 bp, Glycine max
tagaagaaatctcaaacgatagatttcacaaaatcttttctaaatcttttaaaatattattctactttttcacgtgagataaggttttttataacatcagtttgataatttttaatgattttaaaaaattgatctgtatttttatagtttgaaaattatttttaatcctgtattttgtaattaaaataattttaaaaaatcaaaatcaaaattcatacaaaatatgaaataagcaatgatttacgaaatatctaacgtatgctggaaaacatcggcgacagaaaaaatctgaaaaataaataacaaggataacattttttccccgcaaaaaagcactttatagtcagatgtagtttcaatattttaaataataacattctcacatttaaaaataaaataaaaattagagaatctcgtatcttttcgtagttatttatccaaatagttttactttagaatatataaaataatcttatagctatttttatactaccctcctatcatatatacatgcatatctaagtatatttattaattttaataataatcttaaaaatcacttatcaataattttataaattaattagtacagggatgtttacattagtaatttttaatattagattaaaattttaaaaa

SEQ ID NO: 1887 - DNA, 356 bp, Glycine max
agctttcaataaaattctaaggccatggcttttgatgtctgattccgaataacgctcctacaataaccaaaggcgagcattcaaccagcctcatgcccggcggcctaaccttgatgaaacgacaacctcgctggatgaaactttggcccaattcatgcaagtttctatgtccgatcacaacagcacaaagcctaacatatagatgctggagattcaagtgggacaactacctaagcagctcgcttagaattcttatgcaagaattggggccattactggcaaagctcccacagacgaatgtaacgttggcatgactatgaagcaataaggccaccattgtggaagaggaatggaag

SEQ ID NO: 1888 - DNA, 113 bp, Glycine max
attgataacgaaccatgggctgtggtggccgactgtctcgatgaggctagcttagctaccccaggcgagcgacgccgctacctgcagagccatacgacatctggaggagtctt

SEQ ID NO: 1889 - DNA, 510 bp, Glycine max
agctttcaattaagtccaagcttagaacatcacatgacacatgttcaatatgacaaggacacaaataagaaatttttttataaaacatatgacgggacatgactatcatataatatataatatcaatattgaattaacaaaagacaaatccaaaaccaaaagagagaatcactactacaaaaaacagatttaacatcggcatattaacatcgatttttgacaaaactgatgttaacaaaaacgtggtggcattgttgtaaataaaataagtttattaacatcggtttttaaaaaatcgatgttaacatgcactcgttaacatcggtttttttttctttcaaaaaaccgatgttaggtgacttaatttaaaaaccaaaactggactgcccatgcactctcgcacaccctacttcgaatcttgcactctcgcaacaccatactgaccaccgtcgcaagtgtgccaagacactcaccgtgcaacaccacgctgaccacccttacaagtgtgct

SEQ ID NO: 1890 - DNA, 574 bp, Glycine max
tgttcttgattttttctaagttctttaacaagctttgaactatatacttgcccttcatttaactgtctctgcgcttggcggccacgctcaacaaagtactttcgacacctactgtacgttgatttgaccaatgctgttatgggaatgttgcgacaatccttcaaaaccttgttgatacattctgagaggttggttgtcatgtggccatatcgacgtccttctctatcataagccatcgtccatttttcctttgaaatgcgatcaatccatgttgctatggctggactcagttcacgaaatttttctaaattttgatcaaaaatgtgcttgcaaggagtgtaggctgcataaaattagttatgaataacatggataagtatatatgaaaggtaaataaacgggaccatcaaatatgaaatcttacccaatttcttcacatttcttttgttttgattattgaattttcaatgaagttgcttgctatgtgacgcacgccctagacatgataactatggggaggttgccaacccaatgcttcgttaacgaccgcggactttatactcacgtggcgata

SEQ ID NO: 1891 - DNA, 459 bp, Glycine max
agctttgataaggggggggtgcgtgggcgtgtttataacattggggtggctcctttggctgcaggagtgaataaatatatgccttaggcgtacatgtaaaaacgtactatacgcatataaggaggtgtgacacacgagcataagagtgagtatgggaaacccgcgaaggagaaagggatgagagagcattgctcaacattaaatgggctaactctaaaaaaataggccgcagtggagtcaccatctgtcgcaagctagcgtgtccattggagtcgacaactgatgcaacctaccctttggcgggagggcgacgcgtgactcacggtggcgtgttccaagaaaggaatacgcgcggagtcggcactgatgtttatttgatgaaaacgctagaagaaccggataagacttgatctacaagatttaactgaaaggttcgggagtcggatttacacatgggga

SEQ ID NO: 1892 - DNA, 330 bp, Glycine max
tttggcagatcactcatcgaaccctctcacttggttacgcatgagctgtcgttgctaagcacagtctcttacacccttcactgagactaacgaatctcaatgccggggggccctcattatctaatagcctgcctatatgcactaaacacgcataattctacctaagacaaccagaggctggcctaccgatgagtcgcatggttaacagatgtgcaaacctcggtctcccgtccgaggctcacgctaagccatgtctcgagatcaaagcctaattgtgaatataagccgtcaactaagcgcgcgtctcctgtaaacgagcctcgtggacat

SEQ ID NO: 1893 - DNA, 396 bp, Glycine max
agctttgaatcgctggccacccccatcaacatcatctaatacccagtggtcccacatccagcaaagtgttccacaatctgggaattttcaggtagcagccaagggtggtgcactggctgccacacaaagtagatcccatgctaggaatgttccgacagctggagctactactcataggggtatggttcctaaccaacctgtccgatggacgcaatctgtttcggttcaaaatctaagtactgtatcaggcacacctttccaggggttaacaggagagccaagaggaaatacagctcagacagtttctatgcctgatgaattatacaccccgcaatcagaacagaattggacttccactggacgaatgcgtggaagttctgatttaagtcaacttta

SEQ ID NO: 1894 - DNA, 425 bp, Glycine max
ttttcttctgcctcgtcgacttcactgatttgcggggaagccttgttttatcgttagggaattaatagggacagaatctatcttggctagctgagcacgctcgcttgtgatgttttgtcgctttcctttgctccgctggaatgcgaagaccattgaggcccctctctcttatgcttgttagcagccccatctgagctctttataccttgttcgtacttcaccacatcttaataataaaaaacacggtcatattgaccaacaagcataactgcactatcattggacgagcatggaccatcttcatataactcttattttcagctggaaaaaatagaactcagactcattgttttgtcattatctatcgacacactttcttttccgcacaggattaacattgctctcattaatattgcataactagt

SEQ ID NO: 1895 - DNA, 402 bp, Glycine max
atcctattagtccacctgcatgcctgccagcttgacgagagttacacgccgagcatttttttcatccttgccggtgatggttttcacaacttgatggtaaatttttattttattggtttgggtttgattgggatgattatgcttgccggtgatgcttaattattttattggtttgggtttgattgggatgattatttgggaacatttttaggatatttagaccgtggaacttgtgaagccaactgggtaggtatatctatccttgtctggagctgagcctatgtaagtacagagttctttctgtatccagtttttgttggtttaagtttgtatccagtttttgttgctacgaggcgcggatttttgttgctatgatacgacgtgaacgacaatcattgtgag

SEQ ID NO: 1896 - DNA, 475 bp, Glycine max
tcatgatgaatcaagactaattcaaagaagttttgatgatgacaaaaagctcaaagatcaagactgagttcaagattgaatcgagaacacttccaggttcaagaggaaatttgattgctagaatcaagaatcaaggttcaagattcaagcttccaagaattaagatcaagattcaagactcaagattcaagaatcaagagaagacttaatcaagataactatgaattttttttttcaagaactgaatagcacatagattttgctcaaaacttgtttaccacaagagtctttactctctggtaatcgattaccaaattgttgtaatcgattaccagcagcaaaatgtttttgaaaaagttttcaactgaatttacaacgttccaactgatttcaaaaggctgtaatcgataacaatggtatggtaatcgattaccagagcgcttgagcgttgaaattcaaattctaatgtgaagag

SEQ ID NO: 1897 - DNA, 477 bp, Glycine max
agctttacagcagatgcccctttactccatgttcttgaaggatatgttaacaaggaaacataagtatattcaccaggaaaaaattgtagtggaaggaaattgtaatgttgtgattcaaaagatccttccacccaagcataaagaccttgggagtgtaactattccttgttcaattagagaagtcactgtgggaaaagctctgattgacttgggagccagcattaatttaatgtcattctccatgtgcagaaggttgggagagttggagaccatgcccactaagatgactttacaactgggtgaccgctccattaccagaccatatggagtaattaaagatgtgctggtcagagtgaaacattttatcttcccgacagactgtgtggcaatggatatctgtgaagatactgacattcctgtcatattgggaaggccattcatgttaactgcaaactgcatatttgatatgggtagaaa

SEQ ID NO: 1898 - DNA, 480 bp, Glycine max
tctccgaagggcatggctatttccagtttcctgaaaatatctaaaaatctcgccaaatggtggtccttctccttcttggaaggaaccacaggatatggtactttcatactttcattcacagctttatcacttctactattctcttccttttcatttttttcatctttttcaaatttatcatgatctttatcttggtctactcctttttctttttcttggtcattaaattctttttcttgaccattatgtggttctctttttcctgattgctttcacctctcacatcatttttcctgccatcggtacctttcttttcagcagctttcttcttgagcacaacactcttctcatcctcagcctgcacaaacatcttactccttgtcatcacagctttgcattcctccttgggattcttttttgtatttgccacaaaactgttggatgacttatcagctatctgcttggccagttgtcccacct

SEQ ID NO: 1899 - DNA, 493 bp, Glycine max
agcttgtaggattatggggtacccatctcatgtggtactaggtggcggtcgggcgatggtgcacaacaagttttccacatccacaatgcgcgcataaacccaccatcccctgttgcccacctccaactgagctcacgtactcccacgtagcccatatcctcgtttctctcaacaccgggtccccatcaatcctctcaagcttccacaacatccaagcagaacaacattcaaacagcacaagctatcacagccaagcaaaacagagcaaaggcagaaaactctgctcaaacaccaaccaaaatcacagctttttctcgcttaaagaccccagtaacaattccttcgatccaattcgttaaccgttggatcgactcgaaaattttactggaagtctctagtacataagcctacattgtgaccgttgggatctactagcaaacatccagaactcattctgtactacttttttcacagccaaccacacacaagcatt

SEQ ID NO: 1900 - DNA, 384 bp, Glycine max
  unsure (1)..(384): unsure at all n locations
tgagaggattgatggggacccggtgttgagagaaacgacgatatgggctacctgggagtacctgagcttacgctggggggggcaacatgggatggtgggtttatgcgcgcattgtggatgtggaaaacttggtgtgcaccataatgcgaccaccatctattacaacatgtgatgggcaccctatgatgctacttgctatagatgacgaattgacgaacggtgaaacttactgcttctatcgttgaccactatagagggccatggagatatgtcgcgggggtcangagaccttggggacgtcatgtggggtgctattgcccaaaaccaagcttgagcaattccgactccatcccgggcatagtcagtcactgagatcctgttatg

SEQ ID NO: 1901 - DNA, 411 bp, Glycine max
agcttgtaggattagaagaatattgctacattttgtaagtgcactgactgctagttaatccttctggtcttgttaggattggcaatcacaagatttaaacttcctttatgggaagagtttgtgagaattgttttgaagaactccatatgaaagcgcactgcgccagatttgttcttgtgattcaatatttcaaccaagtctgataaaagttgttggaaataaaagttttatgatgtatcaacacagacaacgtgaagggtgacttattgtatattgggatgcaaacaaaaaatgagtttctaattttgcacaatgatgatgtgcattctgaaaagttctgttatgaagggttggtcaccgttgtctatgttgacctaatctagttaggcctattaataattatcaacactt

SEQ ID NO: 1902 - DNA, 423 bp, Glycine max
ccttaaatctcagcttttgatgaagcctattgagaagcttctatagaaagctatatgatgctggctcggaacaaatgctgcccagcctttattaaccgatggatgttctcgaaacttggtgtgccccttcaaatgacactcttgccatgatcggaccgatgggagctttgataagaagtccggagtgttctagagacctcttaatgaagctgctcaaggaatcctcttactgaggcttctagagaaaaccttatgcaactgcctgcgtagaaacgctttcccaccttgtttaaccgttggatcttctcgaaatttggtttgctacttcacaagacaggctacactgatttcacctgtgggatcttgaggaaagatctgcagtgcgctagaagcttccgatctcgagagcatttcttatttaaa

SEQ ID NO: 1903 - DNA, 489 bp, Glycine max
  unsure (1)..(489): unsure at all n locations
cagcttgtatagaaggtgcgttcctaatttctctacaattgcatcacctctcaatgagctggtgaaaaataatgtggcatttacctagggtgaaaaacaagagcaagcctttgctttgctcaaagaaaagcttactaaggcacctgttctaactcttcctgacttttctaaaacttttgagctagaatgtgatgcctctggagtgggagttggagctgtattgttacaaggtgggcaccctattgcttattttagtgaaaaacttcatagtgccaccctcaactaccccacctatgataaagagctctatgccttaataagagccctccaaacttgggaacattaccttgtttccaaggaatttgtcattcatagtgatcatcaatcacttaagtacattagagggcaaagcaagttaaacaaaaggcatgcaacatgggtagagtacctanagcaatttccctatgttattaaatacaaaaagggaaa

SEQ ID NO: 1904 - DNA, 434 bp, Glycine max
tatcaacatcaaacttggagaaagagttcttggggtcaagacatgagaagcaatcaagtataatgttacttccttcactaaagcggcgatccatctccacacatattttatcaatagcaacataaaaaatctctgcacggtaatgatgaagattagtgatagtcctcccttctgctcttgaacgaccccgaactggtatttcgtcatccatatttggtactagaatacttttagcaacacaaaatccttggacatcggcaaaaaaattattccagccactctctctcattgtgcccaaccgagctttgacaacatcaactaattccatggcattcacaatattaagatcttttctttgcaatatatttgaaagctcgtttgtgataccaaacaactttaacattaacctcaaaataaaagcaaatttaaagctc

SEQ ID NO: 1905 - DNA, 325 bp, Glycine max
tcttccatcgactgatgccaattatttactagaaaagatgatctgtattgcacccctaacgggggcgacctctaaaaaagagacttacagatgtgtttgcttatgccagttctctcggggcttttacgaatctcgtcattactatcatgcatctcacacagaaggagaatctgctttgtggacatagcacaactaaacattgacggagcccttgccttgcaaagcccaccaaggatcaaatgtattcgtatagggtgaactctgtgagaatactaacacatatatatcaacatgggggagcaatctgaccacatgcacaacacat

SEQ ID NO: 1906 - DNA, 546 bp, Glycine max
caggaccttaaaactcagcttcctgggaatatgtctaagaagttgagcttagctctcacacctctctaatagctaagctcacctccttgagataagaagctagagcttagctacacaccccctataatagttaagctcactcttatgcccaaaaacatgaaaatacaaaaaagtccctactacaaagactactaaaaatgccccgaaatacaagactaaaaccctatactactagaatggccaaaatacaaggcccaaacaaaggaaaaaactattctaatatttacaaagataagcgagctcatacttagcccatgagcttgaaatctaccctaaggctcatgagaaccctaagaccttcccttggatctctggcccaatctacttggagtcttctatccaatgcccttgcggtgtaagattgcatcatgataaaccaacttcttaaagcatttatgtgagtcaagtggagttttaaaatgtttcacaaagaaatgcccaagttatattggacaaagaatatatagagtatctctcaacagaaca

SEQ ID NO: 1907 - DNA, 532 bp, Glycine max
  unsure (1)..(532): unsure at all n locations
agcttgtagcctttatatccttgagagtagccaaggaacacaatagccctaggtgagaatttgtgtttgctggatatcanagtggaggcataacataatgttccaaaagtcctgaaatcagcatagttaggaagtttagcatgtaaaatcacaaatggtgacttggctttcagaatggggctatgggtcctgttcatcaagaaaactgcagttttgacacattcaccccaaaattttaatggtaaataagattgaaacagcaaggcacgaacaacatttaaaatatgaagtgtttcctttctacaacattgnttttctgtgggcgctccacacaggaaaattggtgtaggacacatttcttcaaaaagaaatctgaaaaggcaagctcttttgcattgtcagatctgaatcttttgatggtggttttaaattgagtttccacatatgaaaaaatttgtggtacaataaggagacaatcagattatttataaaaaagtatatccaatgaacctacttttatcatctactaaag

SEQ ID NO: 1908 - DNA, 564 bp, Glycine max
tgtagaattcaccccaattccaatatcgtatgctgacttactcctgtatctgcttgataatgcaatggtagtcgtgagcccatcaaagattcttcaacctccatttcccagaggatataactccaatatgacgtgcttatcatggaggagttctagggaattccattcagcattgtatgaccctaaaacataaggtgcaaagtctaatcaatgcaggctggctgagatttgaggaggagaatcgcttgtgaattctgatgttgtcaagcaatactatgcatgatgcttggggcaatttgaaggttgttgttagatatttccaatgactcattaggatttttaggcttatgctattatggtaaacaacaatcacaatgttaataatatggatgaatttgatgttgttggctctcattctctcacaattacatctttgcttatttaactttcactagaatgtgaatgtacgttgtttgtttgtttgctcaagtgacttgcgtttctgagttgatctccaagtcccgctaatcagaaattgcacattctacacgtttggtgggggtg

SEQ ID NO: 1909 - DNA, 608 bp, Glycine max
agcttttacatgcatgttcacatcatatttactatacttcgatcaactgatgcaatctatttgattgaaaagataatttatattactcttctaatgtagtcgacaactaaaaaaaaatataacagaaagtaatgcttaggccaatctaatcaagtcattttgaatctcgtcattactatcatgcatctcaaagagaaggagaatcaggcatcgtaatacatagcacaacaaaacattaaaagaaaacatgccttccaaagccaaccaaggttaaaatgtattcatatttggtgaactttttcaaaataataacacatatatataaacatggtggaacaatctgaccacatgcacaacacattccacacattatttctgaaaatgagtggcaagggaatataataaagcattgttattaaaactgtacatgcactaagataacaagggtgtcatgacaaaaggaacacattgtgattttgaaaattagaaaacccaaagttttttagggcatttcaccaaacatacaacttgcaaccaatctggcaaaagaaatagtgagtagaaaatggaacttgcagacaaaaaaaccaataaaagagagatgattt

SEQ ID NO: 1910 - DNA, 469 bp, Glycine max
ttgagaaatatactaccccatgaagttcatcaattagttcatcaacagtgggaataggaaagttatctttgattgtgatggcattcaaggccctgtaatctgtgcaaaatctccaagtgccatccttcttcttgacaagaatgattggaggtgaaaaatggcttctgctaggggcaataatcccttccttgagcatgtcagctatcattaattacttcaatctgatccttccggctgtgaggatacctatatggcttgacttttactggtccagcaccttcaaccaatgggattgaatgattgtgagttcttctagggggtaatcctgatggcacatcaaagactgttctataagtgtaaagtaaacagttccgcaatggcatgcgtatgctgcattcttctcaggtgattaaattgagcctgttgtcatagagagggtatctcaccatgcaaggtgataaattgatta

SEQ ID NO: 1911 - DNA, 503 bp, Glycine max
  unsure (1)..(503): unsure at all n locations
agcttgtaattttcagaaaaacaaatacctattcaaccatatcaacatactaagacaattcaaggtgaaatcaagagacatagagagcaatttaaaataggttacgtgcactacacaacatcattcaatgctagatccatctaagatgcctagatcattccttataaagaagaacctatctctagcaagtggtttagtgaatatatttgctagttgatgctcactatcaatgaaatcaatgcaacaatcaccttttgaaacatgatctctaagaaaatgatgtcttatctcaatatgtttggttttagaatgcatgacaagatttttggttaaattgatcgcacttgtgttgtcacattgtaagggaatgtgatcaaggattacattcccttagaatgcatgacaagaggcctttatgagttctccattctctagggacatccataggaggtatggttgagatctttntggttagttcatgttctttcactttggtttttatc

SEQ ID NO: 1912 - DNA, 459 bp, Glycine max
tgcttgtacatcatcattgatcaataggactttttaagatcggacttgtaggaaattttggcttcggttgctctggtcttttttttttttggtgtgagtaggagagcaggcataaagattcagttagcaacttaaatgagcgatcacttcctatcccctcacgccttgaccaagttactatcgtttcccttcctttttacactttacctcaactctgtacatggatcagacattgtttgttcctaagaacttatttttcttttccatttcctcttgctcttctccattttgattgatggtggtcctctttttttttcttttttttggagccggtacttttttctttctttgatgaacatttaacttccttcaaaaatccatgactaaccgaaagatgatagaaatctcccttggaagataccccttctgtctcaccctagggtgaggtaggaaactatc

SEQ ID NO: 1913 - DNA, 446 bp, Glycine max
agcttctatcaggtgtgtgtgtgtgtgtgtgtgtatcatgagggtgtgtcaatctgtgatgagggtgtgtatcatcagcgtgtgtgtgtgtctatgatgagtgtctgtgtgtgttatgagggtgtgtgcgtgatgagtgtaagtgtgtgtatcatcaccatgtgtgtgtatgatgagtgtatgtgtgtgtatcatcatcgtgtgtgtgtgtctgtgtgatgagggtgtgtgtgtgtctttgtgttaggtcagggtgtgtgtgtgtttgtcatgatggtgtctgcgtgtgagtgtgccaagtagattcttgatttcttatcacttaaaagactctactacatatttgtttagttcgccaagactatatatggacatctaatactctctgactgtgctattaagaagaatgtttagcttttctattgagagcttcttgtacttgttac

SEQ ID NO: 1914 - DNA, 514 bp, Glycine max
ttttggagtagaaacatgggaccaactcattttatttcaaaatggaagtcatatctagtcaaggtctgagagaccatacaagtttcctaacgatttctaattatgtgggccattaagtctatcatatgctgacaatagccgagaagcccgtgaatctcttcgggggcggagtaggtgtctgccatcgctttggccttggctaacaattggggaagttcttgactcccgttcaaggtaagagcaaaccgatccatccacatggttgcctcttggtgtaaagagtcgatcacccttcctctagcctctttttccgcgtatacttgggcatattcgtccgcaatcctatgctcgtgggccgcagctagacctaactcttcttggtacttagcgatgatagctagcatgttggtctccatctcgcataaacgctgaaacaagctacttttggtccttgaacagggaactaactcctcttttaaaacccatgctatgtgctcgcgactggtcccttttt

SEQ ID NO: 1915 - DNA, 439 bp, Glycine max
agctttccaaaggaggctgtgcctctggaagtttattacagggaattggcagtcgattaccagacagtaaaatctaaggtatctgagagtatctcgataacttctcttctcacacactaacttgcgctacgcacgcactttgaaaatatttctcaatgcccacctagtgaagtcttagcgatttcttacctagaatctacacctcatacattgttgactcttgcatacaaactgcccttgattctcgcatctctctgcatcctttccatgaaactagatatttaactagatctctaacttgaagactacatcctgtaatcatcctattgggacacttagcctcgccttaactacatgatagcagctggagtgcttgtcttgaaccttgcttcttcacaatgaagatatcactctgtacaaacaatagatgaagcctgat

SEQ ID NO: 1916 - DNA, 1269 bp, Glycine max
  unsure (1)..(1269): unsure at all n locations
actctctcggctcaaacgagctatactctggngtctgtcttcaagcacactccgcgctccttgaagtcgctatgcgggcngcgcatgttactngcntcgatcatcactctcccctaacctcagctaacgacgtacatttcgatgacccatagctaatctacgccgacaactntnaganatnacctgcatagcctnagctggtagtantgcaaatactaactatggcgcgcactcgtgccttaagtaaccaaggcgcncatgtgatactcttcccgatacacggtgacatctcagctctancgatcgtctctacaaggcatagtgtagcagtggacgtgtggactccctaaatgngaagctattcaacatgagcgagcacgnatctcgtcgatatatgagtgaatcgtagcatatacacacgcatcacgcgacggactatcgttagtctactagtacctgagcacatatgatctttcttaactagcacccgactcgaggtgtatatgtaactaagtacgagtgtgatagtgagctgtctgcaatcacgagtgaccgcgagacaatactccgctgatgatgctttccatgaggggtcacatcgcaagacggcccgatcaaccgtgggaacaatcgcacagcgcgggtcctctgaagctgtggacaccaacgctgtacgagtatacctgcagccacagagttagtacggtgctgcgctctccggcgcgaacgcgtcctccgcgccatccacattggcgagtgcaaagaccaactgctccacatctcgggaacttgtccagagtaggagaattcgcgccctgacaatgacgcctaggaacgatgcccgcaatgctacactcatgagggggctccgaacaatcattcaagaacaatttcttcccgcaacagattcggtgcgagaccggaggacaatatccactgtcaaatgccagtaagactcagagtgcaaccaccctgtgcgaacacttccggggaacttcatagggcggggtcagcgcgccaaacctgtacgagatactccccgagacaataccaggctaactcccgacctgggacaatacttcgcctcacatatcgccgagcacgtacctctggaacatcattgctgcggcatacttaaattccgtcccgacgcttcgaccctcgatgatatttctatcgccgagacacttccgcacgcactctatctcgtcgcgtacatcccatacataactccgatcgcgcaaataagcacttcgtgaaataaacacg

SEQ ID NO: 1917 - DNA, 494 bp, Glycine max
agcttgagaaagatctaacagacccaacctaatgttcatgagaatgaatgttgtagacaatattaagacagctctctctaagaccgataatgctaaagagtttatggaattagtgagagagtgctcccaaaccgctgataagtttctcggtgggacattaatgagtacactgatcaccaagaagtttgatggttcacgtactatgaatgagcatgtcattgagatgacaaacactatagcaagacttaagaccttgtgaatggttgtaaatgagaatttccttgtttagtttattttgaattcattactgtctgagtatggtccattccaaatgagcaataatgctacgaaagataaatggaatgtgcatgaattgtacaatatgttagtttagaaagaaacgaggcttaagaatcaatgaagtcacttagtccattatgtaagtcaccaagggaattaaggagctgaaaagaaattattgaagaagcatgata

SEQ ID NO: 1918 - DNA, 438 bp, Glycine max
tccatttgtatactgcaaccataataagaaaaaagctttttgtttcccctcctgtggatgtagccttgatcaaggtgaaccacgtaattctgtgtgtgttctttctctattttcttctctttcaccttgctgcaaaactctgtgtgtatgacatagctttctgctgtttttgttgttgttgttcttgcttgttcttcatcacttccataatagataactttctacctgtttcatttgtcgatgaggagttggataaactgttttcaactgatttatcatcacgtgcacaaaacaagaaaactgagatatacaccagaattctttccatccttaataatggtgtagttattggtgataagaagtttgaatttctagcattctcatcaagtcagttgcgggaaaactctctctgaattgttgctcctacaacaactggat

SEQ ID NO: 1919 - DNA, 546 bp, Glycine max
agcttttacatgcatgttcacatgatatttattatacttccatcaactgatgcaatctatgtgagtgaaaagataactcatattactcttgtaatgtagacgacaactaaaagaaaaatatggcagaaagatatgcttacgccagtctaatcaagtcatttagaatctcgtcattactatcttgcatctcaaagagaaggagaatcatgcatcgtaatacatagcacaacagtaacattaaaagaaaacatgccttccaaagccaaccaaggttaaaatgtattcatattcggtgaactttttcaaactaataacacatatatattaacgtggtggaacaatctgaccacatgctcaacacattccacacattatttctgaaaatgagtggcatgggaatataataaaacattgttattaaaactcgacatgccctaatataacaagggtgtcatgacaaaaggaacacattgtgatttgaaaattagaaaacccaaagttttttagggcattttaccaaacatacacttgcaacccatttggcaa

SEQ ID NO: 1920 - DNA, 330 bp, Glycine max
tgttaaagcgttcgctagtccttctaacactaaaatattacctagaagcatatatcttgcatgtgagacatgaatggagcagaccgtaaaagatctttgggtgctggcctctaaaattccaaaaacgagcatatgagttctttacaagaacgtataactaaacccaaccatggggaggatacctaaatagattgaatttaccagaaacagacccattcaccagtgggaggctagaactataatgatgactttggctttgacagaaacgcacaaataagatagaatggtgtacttgaaacgcgcgatttggaagtgtccatcaaatgaaac

SEQ ID NO: 1921 - DNA, 536 bp, Glycine max
agcttgtcacccagctcgcccaggcgagctaggttgcttcctccagaaggcaccgccttctggagaacttcctagaaggcccaaatgggcctgtttgctatttgcaccccctatttttttactaaatacaccccttgcctttttgttgattctttttccgtaatgttacggaaacttacaaattacgtaacaatacttgttttccttccgtgatgttacggaaccttacggattatgtaatcatccatttcttcttgtacggaatgaccataatttgtctctgcccacctctcgacttactgtccctgaatgacaaagggcgcaaaatgaccataatttgtctctgcgcgtttatcactcgactcgctgctcctgaatgacaaagggcgcagaatttgactctgcgtgtttatcactcatcttactgctcctgaatgacaaagggggccagaatttgtctttgcacggttatcactcatcttgctacttctgaatgacacagggcacagaatttgtctctgcgcctttatcactca

SEQ ID NO: 1922 - DNA, 393 bp, Glycine max
ttattctttttataaaacgagaagttgtgaactcatcacattatcttaaaaaccttgaggtggatccaagtgctctgatcattcatttgcatattcatgttttggtggcgtactcacggtcgtttgtttctttagggaattcaccataactaataaagcgcaaaggcacccctataacactcgatccacaaaaatggatcatgaagagggcgtgcaagaatagatgaaggccgacctatcagccttaaaagatcaaatggcttctatcacggaggccatgctaaaactccaaaaaactatagaggataatgccacggcgaccgcctccaatgcagttagggaagcgaaaccggtgctacagcctgcaataaacatgggccgagatagaaacac

SEQ ID NO: 1923 - DNA, 630 bp, Glycine max
agcttaacaaaaggcatgcgaagtggttggaattcctagagcaatttccttatgttatcaaacataaaaagggaaaaggtaatattgtagccgatgctctttctcggcgtcatgcattactttctatgcttgaaacaaaattgattggtcttgaatgtttgaaaagcatgtatgaaaatgatgaaacttttggagaaatttttaaaaattgtgaaaaattttcagaaaatggtttctttagacatgaaggctttcttttcaaagaaaacaaattgtgtgtgcctaaatgttctactagaaatttgcttgtttgtgaagcacatgaaggaggtttaatggggcattttggggtccaaaagactctagaaacattacaagaacatttttattggcctcatatgaaaaaggatgtgcagaaattttgtgaacattgcattgtatgtaaaaaggcaaagtctaaggtaaaacctcatggattgtatactccattgccaattccggagtattcttggatgaattattcaatgaattttgtttggggctgccaaaaacaaccaagggtaaaaattccatttttgtggtgctgaaaaggttttctaaaaagcttaatttatttcatgtaaaaaaaat

SEQ ID NO: 1924 - DNA, 438 bp, Glycine max
ttttggagtagatccatgctaccatctcaccttgtcaccagatgggaatctttatcggcaccctggggagagaacatacaaagaaaactaacgttccctatctaagatcggcagaaaacatatcatatgctagctctcgatcaaagatccgaaggaaacataagaaggcaaaagttgccagtcgaatatctgaagaacaacgaatgaaaaaagaagatccccgatcctagatcggaagaaaatgacagaattatacataacggtctttggaccatacaaatatccaaacaatccccattactctcacctctttttggaaagatacgaaaccatgacttgaagtggtcctctccctttgattgccaaccaaaatcttgtgcgctgatgactttctcgccccgcactaaacagaaacagaaaatggaaaggtcaaaacac

SEQ ID NO: 1925 - DNA, 522 bp, Glycine max
agcttgagatgaggaagtgtagaagggtgatacttcctgcttttattcgttgaccacaaagtggtacctggagatatgtcgcgggggtcacgagaccttggggacgtcaggtggggtgctattgcccaaaaccaagcttgaccaatcccaacccaacccgggcatagtcagtcagtgagaacctgtgatgtacctaagtaggcgagctcctggcagtcaacagataaaaggaacaaagaccacaaagcaaggaggcttgtgtggtggctggccagctatgaacttgattgatatgtgagatatggactctggtaatcgattaccaagggtgggtaatcgattaccaagcttaaaaatgaagacatgaggctaagatggtccctggttatcgattaccaagggggtgtaatcgattaccatgcttataaacgaatgcagcaagttgtggaggccctctggaatcgattaccagtctgtgtaatcgattacacagaggaatggggcacttgtaattcgcttacc

SEQ ID NO: 1926 - DNA, 475 bp, Glycine max
tggtagaagccaggtggttgacttttcaagaggacagacccaacataaaaacaaacttgcttgccaatcatggagaggggtgggttaatgccatcgaggtgagtaggttacacgggcccaaacatttgaaggacataacgacctccagaaggtttatctacaaagccttgcaaaaggtgggcatgattccccacggcgggcgcagaaaagattcttgcttaatgcatctgggtgaactgcatgacatggaaacatgtttggcggtaagagatctattacaatagatgatagaccaaggccggcttgaggtcggcagtgaaggggaggaggaacaacatgtatacatgcagtcggtagatgaaaaaggtcctaaaaagcctaaacttttggtaatagacttcaccagggacacggctctccaaagacctcaacacccctcggcagtatcgggtagtagacctatttcattttctta

SEQ ID NO: 1927 - DNA, 589 bp, Glycine max
agctttgggtatatcatttagcttgagatctcctctaacatcaacccataatggcttttcttagtctcactctcctcatttttacaggactaataatcatgaaatctattcttctgaggtacatctcttgcgttcatcaaaaagaagaaaaaagacttgcaccacttgcggccttgtttgtacatgtttaaactaggggggtgcaaaaaaattgggtcagacctaatcagactataactaacccgacccaacctagtttcgtactcaaaatgggtctagagaaaaaactgccatgttttataactagtttggtgcaatctaactagtttcggcacaaggaactcactgacccgaactaaactctcttgatttcccttgcgtctcgactcttgactctcttggttctcactttcttgaactgtgtgcccactctctcgaactcaaactgcaatgctcattctctcgatcttgaactgcgacactcacccttttgatcttgaactgcaacactcaatctcttattgttcaatgaaggaaccctaattgcgattactttatttcgattctaccccagcttgaaaaccttttt

SEQ ID NO: 1928 - DNA, 498 bp, Glycine max
tgcatcaagtggtggtctaagcacaagagcttcaagtggtgctccttaaacctccattaattgttttgctttaccttttcttgcattgtatggttcttcatttttctccatgtatctcctcacctgtcttgtgataaattttgttgacatgactctttacattttccacccattaaacttgctataaaacctcgatttgattctctatggctcaaacatcttgttcttgttcttgaaccatgaaccgtgttgagtttatggtccttttagcattgtattgttatttattgtggctgaaacctaaaccgcaaaattcttacaaagatatttaagtcgaagaaaaactcacaactctatagtgactcgttcacctattgtagttttgtcatacaagtcatgtctagccatgcaacttgtggcataagatctcttatgctgtgctgagatgtatatatcttgtttcctcggccaactcatttgttcatgactgtatgaaac

SEQ ID NO: 1929 - DNA, 225 bp, Glycine max
agctttcaacttgttcaagagggctatgttcttttctcacaaagccaggccctgttctaaaagtgttctggaagactatagagagagcggtctgatctttgtgtgctacataactagtatactacacactctgacaattgatacacatgtatttattaatggcctaggcacctattggagaaatacctttccatatattgctaatgtaatactaacgttctatag

SEQ ID NO: 1930 - DNA, 889 bp, Glycine max
  unsure (1)..(889): unsure at all n locations
cctcaccaatttgttctaggaaatattcctnctgcacgaaatttctggttaactcattaatccgtgttatatatannccctccnacaacccagtgcnattggacctttatatcagcgcacttaaaatctccgctcattatatactcagagaatctctgcgaagcgtggctgttattattgtgaaacaaaagaaataactccaatcgtttaaaagcatcacaattaaactaacggaaataatggaaaacgataccatcgctaaaaatttgaataagttgccaatggaataaacattattgaacgaactccctaagacgaatttctcagtataaaaaaaaaatcaattggatagttaaacacttcatattaacccgtaaaatcataattgggacatgtataaaactcataagatttatgccgacccctcgagaaaaataaattggggattgaaaaaaagataaaaatgggcttaaagaagtttgtaaaaatgcaaaaaacggaaattactggggtctttcacaattcaggcctttttgcggcgtggacaccaaaaaatgaaacaattgaaagcgtttttttttataagacaacatgtgggtgctccgttcttatttataaaacacgggattctccactagttttggttttacagccatcccgtgtttgtaatggattttagggagaaaatcttgttgtgaagccttgttgttttttgaaagaatacatactaagggaaccttcttctctattttttgagagggaccaaattctaaagcccccccaatggaaagggttaaaaaaaaactctgcccgagtgtaaattagttattatgaaagcttcaatatgggggggggcttttaacttttaaaaaagcgctaaaaaaaatcn

SEQ ID NO: 1931 - DNA, 614 bp, Glycine max
agcttgatttgagagttgatgttatccctattttcactttaggtattggcccattcaattcacaaagaaaagttccaaggaaaaacggccgattgattgttcgattattttgctaaaagatatttgttattattatatgattattctgcctctctttttttggttgtaaatgtgggtaccggatgaccgaacggtcggatttcctttttgcagaaactaaaagatggtacaattccaatgatcggtggaagtttattttattttttgattaggcgagacaatgactttattatatgactcaagcgcgttaaaatggggtacgagtagttatatgagatgaaaatactagcacgcgaaaccatgtgggaccacttgcggtacgtagaatgaattgaagagtgcgattgcgggaacctaccggttgaagaccgtataacgaataacgacgactaacgatcggtaatctttgttagattacccacggaaatgtttcggacgcctttcggaaacgccactaaaacaattttttttccccaaaacagctaaaatgcattgccaggggggacaagggccccttaaacaaccccctttttcctttttatgggaaaaagggg

SEQ ID NO: 1932 - DNA, 733 bp, Glycine max
gaagatagtcatacctcacaaaatatatgtatgtgtgtttaagtagcgaaaataccttggatatgcatgtatatagcaaaaatacttcacaaaaaaaaaaaaaaaaatatatatatatatatatatatatatatatatatgtctgtatatgtatatgtatgtttaggtagcatgataccttggatacgcatgtatatagcaaaaatacctcacaaaaatatacacatgtttaggtagcaaaatacctaaaaaaaaaaacaaaaaaaaacaacaaaaacaaattcccaagaacacaaaatatatcttttggctgaaaagccagcatgcttttgaaaagaattaacttccagcttctctttgaaagagattcactgatcatgaccaatttttgaaaaaaatgtgtatgcatctgaaaggtgattgctgtgaaaatttttccgaacgcccaaaatagacttggatgaatgcctgaattgataaaagaacatgttttgaaaacctgggttgactaaataggaaaaatgaatcctgaacctaatatcaccggacattaaaacatggggcttgatgtcccatgggtgcatgatgaccagtttgcataaaattccttataatatttgtgcatgtgggcatgggaataattgggacatccctttttctttgaacattgccaaacaaaaccctggcaatattattggcattttgttaaaaaccttgaccaaaacccaacccg

SEQ ID NO: 1933 - DNA, 523 bp, Glycine max
agcttagagaggaagcttcaatggaggaagagaatgagggagagagagagagagaaagtggcatggaaaattgaaggaagaaaaagagagaagttgaactttgaagtgtgtctcacaaaactcttattcaacaaagttctgacaagtgttacacatgtttctatttatagcctaggtcactatttgtgaatttcatttccatttcatgtgaatctaagagaaatattctaaggatatgccaaaggcatcttagcatattccaagaatatgctaaaggcatattagcatattccctttagatgccactagaatggaaggtgtgactctagcacatgggaaaggcatatgccacaagaatatgccaaaggaacattccaagaatatgccaaaggaatattccaagaatatgccaaagacatcttaacatattccttgagaagctagagaggggggtggaaactacacacacccctccaatagctaagctcacccccatgccaaatacatgaaaatacaaaaaagt

SEQ ID NO: 1934 - DNA, 440 bp, Glycine max
  unsure (1)..(440): unsure at all n locations
tatcatttttttccttaaattttctttctcattttttctgtcaaatttgttaatttaatcaagttctccaattatttaaaaacattacaattaaactaacggaaataatggaaaatgataccatcgtaatagttttaaataattgacgattcaattaaatatttttaaacaaactttttaattgaatttttaattataattaaaaaatcaattgtatagttaaacttttttctatcaccttagatatcatatttgtcactcttataatatttataatatttatgcagatgcttgagtaattatgatgttggttttcaattaaaattaaaatttgactaanatatgtttgtgataactgatgaaatctaaatttgtgggtattccttaatattttttctttgttttgctctatgaggatatcactaataatttttatttta

SEQ ID NO: 1935 - DNA, 473 bp, Glycine max
agcttgacagttttgatttctcaaagagactttggtttgtgaccatccacaactggtttaagattgagaagtaagatggagcttacaaattggcccactgtcccagcgtggtgaaatctccaaagcatttctgcaagaatgttggtggatgagaaagggaacaagcgtctagctctcactgatcgatatttgaattactgtatttcctttttaataaggatgttctttcattggttatgatcaggatcctcacgtttggtttccatggtaaatgcaaaatatatatgattaacaaatgatatatttcttctagtatcacattttaaatcctaggtattcatttaaatctacatcaactatcaattatcagtctttaacacagatttttaaattcgagatttcgggttaagatgaaagaatcacacatatgtttaatgatgcattagtgacctttcctatatatatatagatat

SEQ ID NO: 1936 - DNA, 484 bp, Glycine max
tgactacgaccacgccctagctcactgatgttcaacacataatagatcatggtgcttctagacatatgaagagggtaatcttttccttgcacaaaatagttctctttttttttccccctcttttggtactaattgaactcaagagtcttggacgacaatgaaacatatatatattgcggatttggtaagaaaaaattataaacaggatgcattgaagacttactaataaaacactccataatttcatattactcatcccattcttagggaagctcagagtatatgccaacattgctaaagaccaagaatgtataagactaagaagaagaatgctaaggtatatatatctaatccctacttgataatgaaagcttcgttatttgagtcaaacttctgatgccttcattttgtttgagtggaaacatatgttctgagagatggtgactgagtgagaacatcaagtgcgatagctgcgttctgagct

SEQ ID NO: 1937 - DNA, 544 bp, Glycine max
agcttgttaaagaatttagaaaaaatcaagaataagcttgttcacacatcgttcgcgtgtatgatatccactccacaaggtttgaagttgaggagaccttcaatcctattacgcaacgtggcggacaaaagtgggcagttaacttgaatggtcatgattgtcaatgcggaaggtattctacacttcactatccatgttcacacattattgcagattgtggttacgtgagcatgaactactattaatatatagatgttgtttacacaaatgaacacatcttaaaagcttactccgcacaatagtggcctcttgggaatgaagcggctattcctccttctaatgacacatggacacttatccctgacccaactacgatttgtgcgaaaggtcggccaaaatcaacaaggataacgaatgagatggattgggtcgaaccatctgagcaccgacaaaaatatattagatgtggagccgaaaagcttaacacgcgtcactgtccaattgcaatctgagcatgggaattgttccaaacattaatttatgt

SEQ ID NO: 1938 - DNA, 548 bp, Glycine max
tcctaggcacaataacatcagtgtatctttcctaagcctcttgggaaatgaatctagatctgtcaaatttggcttgggtaggtgtagagggtgcctttcttttcctagaagccatctacaaaatataagacaaaacacattagattagcacatgtttattctaaaaaaatagaaaaattaaactgaaaatagagctgggcacttagcacaacaagctggcacttagcgcaccttatgaaattaacataagcgctaagcgcagcaagctagcgcttaacttgaagacacaaaaaacatttttttatgcagaataggcttagcgcacaggagcgcttagcctaagtctacaatttttagaaacagtagaggactggggcttagcaccacattctggcacttagctcagtctcaacagagagacactgaggcttagcgcacaagcccgcctagccttattacaaagggtaaagaaaacaaacctaagtgcgcttatctcatcaagctggacttagcgcctgactacactggatatctaatataccattgac

SEQ ID NO: 1939 - DNA, 566 bp, Glycine max
agcttggttacacttgcacacacgaaaaaatacctaacaagtttttagcattattgccagggactagtgtctcatatttaggcaatttagaattaaattctagggctttttctttgtgcattttatttcattttcccatttctttgccgtctaatcattgccaacctttcctttctagttttcttgactattttgcatgccaagttgtactagcacgaggagtaccactaatttcaaagacttaattccaaagaatcttgaaatagaagcaacgcttcatcacttaagcagataagtcaaccgagtaaaatagttggctaaggagcaagaacagagctaaggttcatcatcttgcattgaactttaaacccttctcctcgaaagattggagttcgacaaatcaaaaagtgaagaatcaacgatggcagcctcacaaaagcatactacgggtgaactaactactgaacagggtgttgaagttcgtcaaccaatcagaccaccaaaaatagcccaaagatattcgatcaacttttcttcaagggtgcacaacaacctgcatcacaatc

SEQ ID NO: 1940 - DNA, 504 bp, Glycine max
  unsure (1)..(504): unsure at all n locations
taagctattaggtaatatgtcactaatggcttatatctactacgaagtctttttgtaaactttgctctgtattaactatctctgtttatatatgatttaattgagtatgtattcaacactcaaaatttaaatactcaaacccattgtgccttattccttgcttattttaatttttctagcttttgctttgcttaggttttgttctctagagagagagagagagagagagaaagtttcagaatttagagagagaattttattttgtttttcggttatctttattggtttctcttacatcatttttgtaggcactgaggaagaagtgttggacaagtggccttaataacttaagaggggggtgaattaagttttaaaattttcccactaacaaantttaacccccttttaaatgatatatgatagactcaaaatgcagaagaagaagcaatcatttaataatgttcttttaaatgagaaaataaagtaaactgaataaaataactc

SEQ ID NO: 1941 - DNA, 563 bp, Glycine max
agcttgcttgaatcaacatttttcaattgatccaaattaacttcaggtagtcttttgtcaactatgcacatgataatatctttctcaaactcttcttaagccaaaactgagaactctttgttattggtctcttctgagatttcaaagttcctccttgcacacactatctctagcaaaacaaccataactgtaaacatcagattttgaagttactgaaagatttgggagccattctggagctacataccctttggttcctctcatatttaacacggtttggtacctgtcatccttgggagttatgagctttacaaggttgaaatacgagagtttggcctcgaaatcctagtccaagagaacattttcaggttttatgttgacatatgcagttatgacactcttcatgaatatacatgatagttgacacccccttgcgacgtggtgagggggcgtggtcgagtcccacatcgaataaaaatagtgccgagatacactatattagtggggagtaattctcaccttacaagttgggtttgtaggattaagctaaactcatgaaaaat

SEQ ID NO: 1942 - DNA, 568 bp, Glycine max
tgcagctcattgttgcctattaaaaactgttgattgagagatactcaccaagtatttgatgtcaccatataccatatttccctcctcaatatgttgaagaaccctgccaggggtaccaactaccacatcaatggggttattaagtgaatcctcctgaggcctaagccggccaccaccacttaccatggtacacctgaatcgtgcatgatggcttatcgattttgcaactcgaaaaacctataaagcccacttcatattattgtgtgtcatccaacataatagaagtgatctctataccatgagtaaaatgcattttacctgctcggataactccctcgtaggacacagcacaacagctcgtggacgcctgggcttcaacagtattccattcaattgttcgtcccgtcttaacaactacaggtacagcaacaaattaacagtcaatagatggctagacaagttttcctcagccaaagtaaatattaaataacatatgaaacaaaagtaatgaagggaacaagttccccaaaaacaagtttgtccaatctgtaaaacaacatttcaaaca

SEQ ID NO: 1943 - DNA, 479 bp, Glycine max
tgcttatagaggaagcttcaatggaggaagataatgatggagagagagagagagaccgtggcatggaacattgaaggatgaaaaagagagaatttgaactttgaagtgtgtctcacaaaactcttattcaacaaagttctgacaagtgttacacatgtttctatttatagcctaggtcactatttgtgaatttcatttccatttgatgtgaatctaagagaaatattctaaggatatgccaaaggcatcttagcgtattccaagaatacgctacaggcatattatcatattccctttagatgccactacaatggaaggtgtgactctagcacatgggaaaggcatatgcgctaagaatatgccaaaggaacatttcatgattatgccaaatgaatattccaagaatttgccaaagacatcttaacatattcctctgacaaagctagagagggggggtggaaaactacacacctcccctt

SEQ ID NO: 1944 - DNA, 434 bp, Glycine max
tgtactttgcggcgatagatttgggcaatgatttgagcggtttatggcgggaataaaatcagggggctaaggtatttaagagaaatacaggttgcctatctggaaatatggaaaatgataccatgacactacttataaataatcgccgatatggttaattatttctaaacgagcatctttgatcgaatataactgcttgatatcgattatcactattatggtaaaacattaccattgctcttttatcccaatatcgacactctaatgctatctatgagataaaaacttatgctactatattataaagtactgtattcgataaaacttaatgactgactatcatatgtgtgagatacctgtcgagatctgcataatgaggttataacatgataataatctctttgattctgatctatgacgacaccactattaat

SEQ ID NO: 1945 - DNA, 488 bp, Glycine max
agcttcacgggttgattgccttaaggttaggtgggaccaacaggggaaaaaatagcgtatgataatggggaagtagggaatggagacatagaggcaaacaaataatttgatacattgtgggccaaaaaaatttaaggtttgaggacttttctttgtggggtaatgcccgtattttgcaaccgtttctctttgagaaagttctcaattttgtgccaccatttttcataaataagagatgaggtacaaacaaacgagtgtgtcatgtgtgtgtttatatatgactccaaagcaaggagtaattcctaaattggttgcttaatcgcatctatggatagacaatgcttggaagaatcatagttcatgatcaaccaaaagagggaaagattacatgtatcaacaaattgaaaagcaagcggattggaatatttaaacagtgcaatttagaaaagggacttgcaaatatggcaaatcattttaacaccatcttt

SEQ ID NO: 1946 - DNA, 485 bp, Glycine max
tggccacctaaaggagtttgtccacacgccacagtcgtatatgcccgagagaaggacaagactagagtctatccaagggagggactgagaacatgtaggtcaatcaaaaaggtagaggaatcgaagcacctcgagggagaaaaaagaaagacccattgaccaaccgagacaggtcataaacaccatcgctagaggtttcattggggttggggccactgcctccgcatgaaaaagacacattcaacaagttcgatccatcaacatggtctcccggcatcgagtacccaacatgtcacccataaccttcacagaagatgactttaaggcaatcgacctatgcaggatgaccccatggttatcagtgttgagataactagcatagtcaagaagatccttgtagaccaaggaagctcgaccaacatgttattttggaacaccttcgagcatatggatatacccgaatccgaaatcctcccaaatgatga

SEQ ID NO: 1947 - DNA, 515 bp, Glycine max
agcttcaattggagtcttgtctcttacagacttagttggacatatgttgagtatgtaaacagcagtgtacactgcttcagtccagaatgtgttaggtagtcccttctccttgagcatcgatctagctatttccataactgtgcgattctttctctcggacactccattttgttgaggagaatatgcgactataagttgtcgctctatgccttcatcctcacaaaatatttcaaactcgcgagaggtgtactctttgccgcgatcacttcttagtacttttatctattttccactttgattttcagcaacggccttcaactttttgaatactccaaagacttctgatttttcttttagaaaatatacccatgttattctaaagaagtcattattgaagagtatgaagtaccagttgttctcatgtgatggcagccttattggtccacagacgttcgtatgtatcagctgccatagatctttcgctctccatgctccgcttgttgaaaaaggaaatc

SEQ ID NO: 1948 - DNA, 241 bp, Glycine max
tgagttatccttccatcttgttttaaaacaacgaaggacggttgaaaattgttgattcatatgtctcaaatggattgagaaaagctaaatgatgtacttgacaagagatgctcattatgttgaatttcaaaattgattcataaaaccaccactggtctcaacaacctaagttatacttgacaatagatgctgagaaatatcataatgttcgcgatttcagtaaaccctaatgtttcaaaaa

SEQ ID NO: 1949 - DNA, 462 bp, Glycine max
agcttccacaacatccaagcaattcaacattcaaacatcatgcactatcaaaaacaagaaaacagggcagaggcagaaaactctgcccaaaacacaaaccaataccacagctttccttactcaaataccccagtaacattctcttcgttctaattcgtccaccgctggatcgactctaaaattttactggaggtccctactacataagcctacattttgaccgctgggatctgctataaaacgtccagaaccaaatgtgtacacccctttccacaaccagccatacacaacatttgctgcacaaacacaattttctgctgcacaaaatcagacagctttttgctgcacaaattgggcagatttcgaaatcccccttaccatagtacaaatgtgcccaaaatggatcctacaagacctaaatcatgtataaatcatatctaaaccgaagacaagccttcatac

SEQ ID NO: 1950 - DNA, 432 bp, Glycine max
ttgatgatatggtcttcaccgacgaaaggatcaaagtgagtttaaaaagaggcaaatctgatcatcatactttgataaatgccgaaaaaactagggcaaatgaagagggtgagaatgagggataagcccatgctgtgactgccattcctatacagccaagtttcccaccaacccaacattgtcattactcacccaataacaaaccttttccttacccaccgcccagttatccacagaggcaatccctaaatcaaccacaaagtttgtctaccgcacttccaatgacgaacaccacctttagcacaaaccagaaacaccaaccaagagatgaattttgcagcgagaaagcctgtagaattcaccccaattgcaatgacctatgctgacttgctcccatatctatttgataattcaatggtagccctaacccca

SEQ ID NO: 1951 - DNA, 485 bp, Glycine max
cagctttgacatgttggatattggcaacaatttctatatgggcaagctcgacattgaagcagataggacaaaggtaatggaggaaggcccctagatgatctttgatcactacctaacaattcatacttgggcccaggattttatctccgcggcgacaaagattgatgaaaccctagtgtgggttcgatttcctggccttgaccttttactatgatgaaagcattctcttggctctggcaacgaccattggcaatccaattagtgttaattcaaataccctacacataagacatggaagggttgcgagagtttgtgtgcaaattgatttggacaaacctgttgtggggaaaaattggctaaagggtcactggcatagagtagaatatgaaagtttataccacagctgtgcctcatgtggtcggaatggtcatttggctcgaaactgccctacttcattacatgtagacacccatcattcttcttcg

SEQ ID NO: 1952 - DNA, 338 bp, Glycine max
tgcttgaggcgcttctatggaggctggatctttgaacttttgtgaggtccttcaatggtgatttttcaccgtggggatgcatcggagggctaaggaaacaaatgaactgcatgctgcatgccctgtggagaatgccgcggatgatggagctccacctccccgatgatccttgcatcagagcttccgatggatgcttttttgcccgaccatacagcgtgagacaaacagacaggccggtgcccgacattgtaggtctaggagagggggagaaatgtaactttgaacggtgtctcatcagactttcattcgtctgcgttaccacatgggttacacatgct

SEQ ID NO: 1953 - DNA, 433 bp, Glycine max
agctttgctgatttagttttcgccgatgaaaggatcgaagtgggtctaaaaagacgcaaatctgatcatcatgctttgataaatacaaaaaaactagggcaaatgaagatggtgagaataagggagaaacccatgttgtgactgccattcctatacagccaagtttcccaccaacccaacaatgtcattactcagccaataacaaaccttctccttacccaccacccagttatccataaaggccatccctaaatcaaccacaaagcctgtgtaccgcacttccaatgacgaacaccacctttagcacagaccataacaccaaccaagagatgaattttgcagcgaaaaagcctgtttaattcaccgcaattccggtgacctatgctgactagctcccatatctacttgataaattaatggtagccataacccc

SEQ ID NO: 1954 - DNA, 416 bp, Glycine max
tgcctcaaagagatccaggaaagacaaggcggttgaatgaaccagttccactcccaaatatgacagccatcattttaggagcgctgagcaccaacagcgcttcgaggccatcaaaggatggtcattcctccgggagagacgtgtccagctcatggacgacgagtatactgacttccacgaagagatagttcggcggcggtgggcatcgctggttacccccatggccaagttcgacctacacgtagtcctcgagttttatgccaatgcttggcctacggaggagggtgtgcgacatatgccatcttgggtgaggggtcagtggatccctttctatgcggaggccctcacccagtttttgggataccctttactgctggaggagggccaggagtgccagtatggccataggaggaacc

SEQ ID NO: 1955 - DNA, 429 bp, Glycine max
agcttgagatgaggaagtgtaaaagggtgaaacttcccgcttttattcgctgaccacagagtggtacctggagatatgtcgcgggggtcaagagaccttggggacgtcaggtggggtgcttttgcccaaaaccaagcttgaccaatcccgacccaacccgggcatagtcagtcagtgagaacctgtgatgtacctaagcaggcgagcttctagccgtctacagataaaaggaacaaagaccacaaagcaaggaggcttgtgtggtggctggccagctgtgaattatgattgatatatgggatatggcctctggtaatcgattaccaagggtgggtaatcgattacaaggcttaaaaatgaagacaggagactaagatggtctctggtaatcgattaccaaggggtggaatctattaccaggcttgaaaa

SEQ ID NO: 1956 - DNA, 499 bp, Glycine max
taaagtacgcccgagtcattcatccgtatgagatgttgttgaagtattggcgatcagaattgacattccttggattatagggttgaaccaaactcatgcttttacaaaaaggttcatcaagtcaagttgaaatatggaagtaaccgtcctgcaaaattggggcaaaagatgaattgagtcacatcactgcttcgtctactgccaaacatatttaggattgttgatgtccttgttacttccagtttcaccttgacaaagatgtcatggaccatgttaagaatctaaattgattcaaccccatatcctgcgtaaaaattcgcaatacttcgactgtacgtcattcgcatgcatccatgctttttattggttgcattgctcattgcattctttccttgaaaaataaaataaaataaaataaaatgaacttatcaaaaagaaaaggacacgctttacggcgcccttaccgaactcgtgctagagctaaagtaatgggtgaagc

SEQ ID NO: 1957 - DNA, 635 bp, Glycine max
agcttctctgaagttgtggatgtggaaataacttataaattttttcagtcatccactcgctcagtgccctctgtgcgctaagcgaatcagtcttcatgcgctgagcaagtaaccactcacgctaagcgtgccaacctctacccactggctgaaggggtctcgctaagcgagacagttgcgctgagagcaaaatcttctttggaattgcatttattggaattgggctaagcgagtcagctcgctaagcgtaacccagagtctcgctaagcgcttctgtgcgctaagcaccaatagctctctgcgtggactccatgtcaattgggccaagcggatcatacccgctaagcccaaatctctctctagaatggcattgcactgagcgagaccatctcactaagcgcgaccccactactgcatcttgaggcatttaattcactaaatcggccacgtcccgcttagcggaagttgcagaccaatcagagctgcaaaactcgctaagcgcgcatctgtgcgctaagccccaaaaccttttcgggttttttaagttttgaattggactaagcgagtctaatccacctaacacgtgaatttaaaaatctgaaaatttcaaacgtcactggattgcttggtaaacg

SEQ ID NO: 1958 - DNA, 626 bp, Glycine max
taagcttacgttggccttttaacaaaattaacatcatatctccctttaaatcagtatatacgatacctcttaccatgtaccaaaatcagcaccccttttaaatattcgcacagaggaagaaaactatgaatttaagaccaagaaattaataatattttcttcttgtgcacaactcaagaaattaacaaaatgaaaataatgtaaattgttaattaccaattttgcacaatgctacaattgttattgctaattcccctttctattttagaaaacaatttaaagagggtaaataatcccttacaaaagcctaaagaatagataaatatcattccacagttttttttttggcaaaatccacatttttttaaataaattgtttccttaacctaggttctagatccaccactagttcaatttggtgtattaggctaagcaattgttccaagtgtgaccagcttacaaactgtctcatacctctgataaatccctccatatcatcttcccctcatatatgttatatgcttaaaatgtatcaactccaaccaacaccaatcatactattatgcagacactgcttcaacagaaaaagcttatgattttatcaataatggaaatcaatgaatttg

SEQ ID NO: 1959 - DNA, 593 bp, Glycine max
  unsure (1)..(593): unsure at all n locations
agctttgaaggggagaggcttcgagctacaagcatttctaaatattaatgtttactatgaataatctcgcgtgcgagttcaaaaccgctcttagtcttcagctgcaacattagaacaaattaaacatattagctatggtaaatgcaataaccacgctaatataattttgaagtgcattagaattccaagccctctcgagtatttaatttaatcaaacagttggtgtgcaaaacaaccacgcaacctcaggctcgcactacaaattcaaccgcaaccatttttcatgtgcaaacaaatttctaacgctatagcgattcccaaatcatttgaatatcccaattttgaaaatacgtaatagtgcactttcttttttattttatcgttcacagaagagatgatagaaagtagaaacaaagaaagagcaacattgaactaaacagtgtatatatataactacagtaaaggagagggacaacacaagggaagggcgtaccttaacaaacctcngagtggagtcggaagaagacgctcgctgcaatgaactttaagacagcgataagtacaaacaaggaataaaacgtaaatatcaaaat

SEQ ID NO: 1960 - DNA, 580 bp, Glycine max
  unsure (1)..(580): unsure at all n locations
tgatagctaaattatctaatgatgaggagagagagagagagagataaaacatattcgtaaaagaactaatcagagttttcatgatagaaacattaataaaaaaaagagtcacaacatgagtggttaagaatactatcatttatcaagaattgacacaaacagagagaacagttaaaagaaacataacacagttaaaaatttaacgtaataaaaatgatatacacgaagattcacaaaaaagagtaaaatcctcagtatcatgtggattgtttgctattttatacattattcatatactgaatcacaattacaacttttgggtgaaaaaaggtttattaccttgtacaggtccagtaagtttgcctataaccattgctcccagaatccttcctttgatatgacagttaataaatagtagaggtcatcgctgaagataaacataaactgcaatgacttgtatgtattagaaacagaatcatacaatacttcanaattataaaaagaactagaaagaaatggtattggtatataatgtcagagaaagtcaaattatgcataatttttattatcaggaatgact

SEQ ID NO: 1961 - DNA, 559 bp, Glycine max
  unsure (1)..(559): unsure at all n locations
agcttgcctcaaagaggtccaggaaggacatggcagcagaaggaactagttccgctccggagtatgatagtcaccgctttaggagcgcggtacaccagcagcgcttcgaagccatcaaggggtggtcgtttctccgggagcgactcgtccagctcagggacgaggagtctactgatttccaggaggaaatacggcgccggcggggggcaccactggttactcccatggccaagtttgatccagaaatagtccttgagttttatgccaatgcttggccaacagaggagggcgtgcgtgacatgagatcctgggttaggggtcaatggatcccgttcgatgccgacgctatcggccagctcctgagatatccgttggtgttagaagagggccaggagtgcgagtatggccagaggaggaaccggtctgatgggttcgatgaggaggccatcgcccagctgctatgtataccggggcaggatttcgcccggactgctgcanggaggcgagtgcgaatcatgcgcaccaacatgaccaccctgacccagatatggatgacgtt

SEQ ID NO: 1962 - DNA, 488 bp, Glycine max
tggctcctcctttcactgaactcgcaacgttgcccctctttcaggaccaacggatgctccaagaactgattaatggcatcttcatcaaaggggacccattggccctgcaccctggagcgcttatccctaacttcttcatctgtgggccatgcattagcatagaattccatgactattttcgggttatatttagccatgggccctatgagttgagtccattgccttttgaaacttcctcctggaacttggtgtattcttcctctcttagttggacccgcctctccttgaggaaagactaactcttgatcacctcaaagcggcgttggtgttcctcactttgtaactggtgtccgtcaaattctatgtccgcttgtggagccacactggatccttctctcgtggtgtccttccttgccctcttagagagaagcttctttggagccattgcctacaaagacacatccataaaaagttagtttgcacaaaat

SEQ ID NO: 1963 - DNA, 527 bp, Glycine max
agctttttggtggggagcaataaggtgcctgttgatgttctccaatatgctgatgatacgatatttttcggagaagcatctatggcaaatgtcaaaactgtgaaggttattctcaggagttttgagctggtttctggattgagaattaattttgctaaaagcaaatttggagttgttggtcaatctgaggagtggtgtcttcatgctgcaaactatcttaactgtgctttggttcaatttcctttatgttatttaggaattctgattgttgtcaatcccaaaagaagggtggtgtgggatcctgtaattaggaaatttgaagataggctgaataggtggaataagagaaacatatccatggctggcagactcactcttattaaggctgtcttaacagcactacctttgttttacttaacttttttcagggcccctaaaacagtcattaataaggttatcttccattcaaagacaatttttgtggggaggttaaccagaagagaagaagattgcctgggtatcttgga

SEQ ID NO: 1964 - DNA, 777 bp, Glycine max
catcctcagagggaaacaacactagaaagggagcctttcatatgaccaacggaggccgaaaccgcaagaggaatgtagatgcaacacccgggacggaatctaaaggcataaatgcaaaataacctaaaggcagaaatggaaatgaagcgacaggcaaaaaactaaaatgaaactaagggctgaagaaggaacagaaacgaaattgcaattagatgcagacaaacgactatcgcaactacctaaacaaaaatacagacctccgaaacgcaaaacccgaccagtccggactaaaggaaaaaagaagagacgggccgaactccaaggcggcggtgtaagagggtcagtcactgcgcgtggtccaagtgaaaagcccgcaggccgagccccacatgaacctcctatcgcggagtgaccccggccctctaagagaggaacatttgaaaaaaaccgggctactcgagtcaacctcatagcgggatcagcccgaataataaaggccactcgtgaaacgcaacttacaagaacaaagaaacgcggcacggagccccaaagtggaggacgggaaaatttgacccagggaattagagcccacggccaccgtaaaatgcgacgcacacagccggcacataaacaaaacaacgattgcagaacaggtacccatcaacaacaacacctcggcccttagaattctaaccacgcacgaaccatcagttccagcgacgaggcccacggcgcactcttaaacaacttgcataatccggggccaccgtgcagacc

SEQ ID NO: 1965 - DNA, 515 bp, Glycine max
  unsure (1)..(515): unsure at all n locations
agctttggattgttaattgcaccatgtttcaagaagagtagagggtgccacttttgttgagtggttttattagcattttgttagttgaaataaaggcccaaacttgtgttaaagtggttgtcaattctcttgggattttcaccacctatgggcttgttttaatttaaagaaattaaggtttaataaggtgaaaactctaggattatggatgcctcttggctgactaaggatttgcacaattttccatatgtttatgtgtcttaattctaattttaattaggtacaatgacaccatcaattgttggtatcaattctagttttaattaggtttaatgacaccatcaattgttgttattggtgatcatttcacttgtgtaaccaacttgatgtcattcctatttataggctgcacattntctaataaaaaatagaccttgaatttgagtttttaatcaccttctaaagtgtgagagtgaatctccttaattacttgagtgattcaagaaattggttta

SEQ ID NO: 1966 - DNA, 577 bp, Glycine max
ttacggacctataatctcagctttacacacccctatcaaacccattccaaaactagaatcatggctgagatagaggacgtgcaagagcaaatgaaggccgatatggaggccataaaggatcaaatgacctccatgatggaggccatgttaagaatgaagcggatgatgaagagcaatgtcgccgtagttgccgccaccagtgctgccgctgaggcgaatttgacccacccatccgccataaaccaagcaaaccaaccaatcccaaacatagtaggtcagggaggggaggtgttaggtagcatgggcggtccacacacggggcaaaataggaatgctttcccctatggcttaccccccaattatacgccacccaccatgcacatgcccaacgagaacgctaactacgccgttcccattcactttgaaggccaacaaccccagcctgtatggggcacctatgaagagcctcgagattatgcttaggttgactttgaaccacaccctacgttcaccactaatggaccagcgtgtagtggtatgcttcagccccacaccgcgggggcttctcaacattgcc

SEQ ID NO: 1967 - DNA, 345 bp, Glycine max
gctgcatgctgccatcttatgctgcgaacatgtacaatttactttctcaacctctgcagcataatctacctcagtgcaactattatgactctctccagcaacagatactgccctggatggaggaatcatcctaccctgcgagggaccctctatccactgcatcaacgggtgtctgttacttacatacaaaatgctggaggcccaagcttaccatacattccttcaccgaaacagcgctacaacaaccccataaacaaccaacagttgaagcctctccacacccttctatggaataacttgcgaggccaatgactatgcacaacatgtaattttagcacagagacc

SEQ ID NO: 1968 - DNA, 417 bp, Glycine max
  unsure (1)..(417): unsure at all n locations
tttcacaaagattcaagttttatgattatgaaagaaatgatgttaatgaaggatcatgtttaaggaatgatggattaagtatttgattaagttcaattcatatttattttgtgataccatccttttataaaagctttttgtaattgtttttttaaaagtatatcttgttttgaaaagcacttcacctccctcttggtttatggagatccatcatctttttcaatggtgctcaaagctaagtattgaaagatactcaagatcacaatttttctaacgngatgggttcataacatatcactttctaagagggtgcatctttgaatcaacctctgttgtttgagggtgaacattattctttttggaaaaagagaatggaaatctatgttcaataaacagaccccggtgtatggaatgcca

SEQ ID NO: 1969 - DNA, 105 bp, Glycine max
cttgctggtcgtaaacatggacatctacggtagctgggtgatattgacctccgctgacacatgcacacagcttactagccgcaaacatgtaacgtaaaatgctgc

SEQ ID NO: 1970 - DNA, 245 bp, Glycine max
atggatgtgcggcttctcactaccaactgctcgtgtgaccacatgcttattaccttgtagaggcccgccaagatcggctataaccatcgctcccagaacgcttcctttgtatgacagacaataaatagtagacgtcatcgctgaccataccttaaactgctatgactcgtgtgtatgacaaacagactcatacaatacttcactagtatccacagacctagatagacatggtattgggatataat

SEQ ID NO: 1971 - DNA, 484 bp, Glycine max
  unsure (1)..(484): unsure at all n locations
agcttcaaacagcttgttgtaatcgattactataaacttgtaatcgcttaaaacagagtttttgcctcttgaagaaacttttcttacttagaaacttttttcttcacactaactatgatgatgaatgatgcaagatagatatcatatgtactaagatgaaacatacaagataacaaccaatacaaatgccactcaagggagttaggcatgtaaaagtcaaaacatcttcaagcttttccttaaccttcaagctttggcctttatgttgttcaccgtgttgctcatgttgtgaaaaagatgatggaactcaataaaccaagaggggggggggggggtgccnacnctatctctcancttctgggatatccgctggtgttataagagggccacgagtgctagtatgggccaaagaagaacccggctgatgggttccatgaggaggccattccccagcttgtttgtctacccgggcatgatttccccc

SEQ ID NO: 1972 - DNA, 414 bp, Glycine max
tggctttggtttacacatgtttgatacatgatttgggacttgtaagattcgatttgagcaagattggatgaggggaagtgtgattttcgaaatctgcacttatgcacaattttgctgtctaaataggtgcagcaggattttagcttggtgcataaaatgcttgtgtgtggatggctgtggaaagagtattacacaatgagttctggatgttagctaatagatcccaacggccaaaatgtaggcttatgcactatagacttccagtaaaattttggagtctatccaacggataacagaattgtatcgaacgaattgttactgtggtcttgtaacgaaataagctgctattgtgcgtgatgtgctgagcacagttctctagctttgctctgttctgctcggctgtgataccttgtg

SEQ ID NO: 1973 - DNA, 568 bp, Glycine max
agcttattcttgtattgagatcgaatttgcttcattgcatattctttcaccttgtcgggtaaactaaaagcatccttatatcatacgtttttattagaaaaagtaaaaattaaatactatcaagatacattatcaaaccaatttaaagacataactaatattcaaatatataaataaatttaatataattgacctaattacatactaacctttatatgtcaccacattccatctacatcatccttactaatttcactccaaccattaacttgtaaatgagctttctggcaaatacacacttgtgcctcagacttgaaatattttgcatgttttccacaaatcttataaaatggtggaggaaattggatgtcgatactttttccctttgccatatgattttcctttttcttttgaaattttgcattgagtgcccacgtcccttcttttgacatgcttgcctaaaataaataagaatagttataacattttcaatgataatttttttattaaagattattctataaaagtatctacatttgattcaacttgttctacattggtcaattct

SEQ ID NO: 1974 - DNA, 487 bp, Glycine max
tgaagtagaggagaccttcaatcctagaacgtaacgtggcatacaaaagtgggcagttaacttgaatgaccattattttcaatgcggaaagtattatgttcttcactatccatgttcacacattattgctgcttgtggttacgtgaacatgaattacttccaatatgtagatgttgtttacacaaatgagcacatcctaaaagcttattccgcgcaatggtggcctcttgggaatgaagcggttattcctccttctgatgagcaatggacacttatccctgatccaagtacaattcgtgcgaaaggtcggccaaaatcaacaaggataaggaatgagatggattggctggaaccatctgagcaccgacaaaaatgtagtagatgtggaagagaaggacacaacagacgtcgatgtccaatgcaatctgaatgtggaagttgtaaaataattgaattatgtattttggttgcctacttgaatgaaatg

SEQ ID NO: 1975 - DNA, 535 bp, Glycine max
agcttttggtaaaagaagaagaaaaagttcatagagattcaaggcttgtaaaggattgattggaaaagtaaaagtgtgaaagaattaattgattgaaaatgcaaaacaaagccttgcttttatagactcttcatgtctggtcaagaagaccatttagaagaggtataacttttagaaaaactttaaaaccaatttgaaaaagtcaaaaaccttttgaagagttacatcttttgatttattcagaaacagtcgctggtaatcaattaccaaataagtgtaatcgattacacaaagcttttatgtgataagatgtgactcttcacatttgaatttgaatttcaacgttcaaaggtactggtaatcgattaccaaaacattgtaatcgattacaactttttgaaaataattggaacgttgtaaattcaatttgaaaactttttcaaaacaattttgctactggtaatcgattacaacaatctggtaatcgattactagagagtaaaaactctttggtaaaggtttttgttagacaagt

SEQ ID NO: 1976 - DNA, 302 bp, Glycine max
tctacttatgtggcagggcgggcttccttcactttcttgtctccaacgcgagctctgaccactgttcttccttcccgcgaggcttcttttcatgtccgcctgagtgggcttatagcctaaaccatacttcccacgatttccttgggttttatcaggctagttatgccgccattgtctttgcctaaacccatcccgggttcatacccgttccccaacataactcgggccatcattaccggcgcatcggacagacaaggttgcccacagagggagtccaccgaggaaatgctgaccacctcaaa

SEQ ID NO: 1977 - DNA, 415 bp, Glycine max
agcttgcctaggcgagctgatgcttatccctgaaggaatgagctcacccatgcgagcttgttgcttatgcattaagctatctcttggcccatgcgagcttgatgctatcctgtgcgagctatggactagaaaatttcagtaaaaaaaccctttggaccccttgcttgctatctttttgttgtcttgatcaaaacactgagtgatccgttgcttcgcactataactggtgtcacacaccataattcgactagcaagaatcaaaatattatcgaacgatagtctttggacgaaattaaggtttgacagtagtgaaagggccatattgatgttgaccctacacagaacaggattcacttccctcctctatttctatgcttgggtgtgtgcacgatggtgaattctattaattagggac

SEQ ID NO: 1978 - DNA, 264 bp, Glycine max
  unsure (1)..(264): unsure at all n locations
tgcacttgaggngtccaggaacgacaaggcaggcaaattaactagaatcgctcctgaggttgacagtcaccgctttatgagcgcggtctccaatcacgcttgaatgccataacgagatgcgaacacttcctggagcgacgcgtcgccaccgggcgacgagtatactgatttgcaacatgagatacgacacctgtggcgtgcctcactagttacccccatggacacgtacgacccagtaatagtccttgaatcatgtgccactgc

SEQ ID NO: 1979 - DNA, 404 bp, Glycine max
agcttgcctaggcgagctgatgcttatccctgaaggaatgagctcgcccaggcgagctggttgcttacgcatgaagcaatttcgtggcccaggcgagctagatgctagcctgggcgagctatggtctataaaaatccaataaaaaaacccttttgcccccatccttgctatcctttagatttcttgatcaaaacactgagtgatccgttgcttcgcactataactggtgtcaaacaccataattcgactagcaagaatcaaaatattatcgaacgatagtctttggacgaaattatggtctgacagtattgaaagggccatattgatgttgaccctataaggaaaaggagtaagttccctcctctatttctatgcttgcgtgtgcgcacgaaggtgaattctat

SEQ ID NO: 1980 - DNA, 313 bp, Glycine max
gccttgtttgaaagaggtatgcctatgttgctgcggaagattttattatatttacctgggtcaactttatcagagagaaatcagacacctttgaagtattcaaagagttgagtctaagacttcaaagagaaaaagactgtcgtcccaagagaaccacgagtgaccatggcagatagttcgaaaaccgcaagtttactgaactctgcacatctgaaggcatcactcatgagttctttgcagccattacaccacaacaaaatggcataggtgaaaggaaaaacaggactttgcaggaagctgctagggtcatgct

SEQ ID NO: 1981 - DNA, 545 bp, Glycine max
  unsure (1)..(545): unsure at all n locations
agcttcaagaataatggcctcagcaaacttcttattcccagaaggaaactctataaataggcctcctatttttaatggggagggttaccactactggaaaactcgaatgcaaattttcattgaggcaatagacttaaacatttgagaagccatagaagttggaccttatgtacccaccatggtggctggtaatacaacaatagagaaacatagagaagagtggtctgaagaagaaagaagattagtacaatacaatttaaaggctaaaaacatcattacttctgccttaggaatggatgaatattttagggtgtcaaattgtaagagtgctaaggatatgtgggacactctacaagttacacatgagggaacaactgatgtcaaaagatctaggataaatactctaactcatgagtatgaattatttaggatgaagacaaatganagtttacaagatatacaaaaaagattcacacatatagttaaccatcttgattcattangaagaacttttcaaaatgaagatcttataaataaagtatttt

SEQ ID NO: 1982 - DNA, 537 bp, Glycine max
  unsure (1)..(537): unsure at all n locations
tatgatcgttgtgtttgttcttgtcctttttctttggttctttggtagaagaaggaaaaatgtatgtcgagggatccattaagggatggtttcagatcaatggttgagtcgggatggagttaccgacactagctggtgtctagttcttgcgagcaaggtggtaggcagtaatgttagtatcagtttgggccatgattcttgaaacaaacaaacacacaagtcaggaaaacctaattcgatataaaaaaaacataaagaagataaacaattcacattcaagacccctaataggatttggagactttaaaaagttaactatgggcatggcaggaaggcatccagggagtaactcaagaaaagccaagtttccaagctcctcttcgatcaaatactctacagggtactcattataccaatgtgacacttgttgccagtagaaagtaaataagggacctttcatagtcatagaaatagttccttcacgtattcgactntattacctctttaaaataactcgtcttaaaaattttataggat

SEQ ID NO: 1983 - DNA, 499 bp, Glycine max
agctttaacagatatagaccatcgcttagcctatttttctgagaaactggtgaacttgcatgtgctttatgtttatctattgggcgaggaaagtgatcttgaagcaatggattcaacgaataactgcatcctggaaaacttatttgagaaggcagtgacatttgatctactgtctggcattttagattctgaggtaagagagctggacagtttcatggacactctccaagaagaaattgttgatgctcgtcataaaatattttcatgcaaacatttaactgaggttttctttatgatggacaaaaaattgcatggctctaaagagtctgtgaagcagtttcaacagcagttattggagttgaaaattcagtcatcccagctacagaaaaccattgaagcttttcgacatgagaattgttagtcgaaattgttactcagaatatttttgctcaacataattatgctgaggatgcaatcctgttccaagttttggatgact

SEQ ID NO: 1984 - DNA, 547 bp, Glycine max
  unsure (1)..(547): unsure at all n locations
tgtacgatgatggggtacccatcacatgtggtactaagtggcggtcgggcgatggtgcacaacaagttttccacatccacaatgcgcgcataaacccaccatcccctgttgcccacctccaactgagctcacgtactcccacgtagcccatatcctcgtttctctcaacaccgggtccccatcaatcctcctaagcttccacaacatccaagcaaaacaacattcaaacagcacaagctatcacagccaagcaaaacagagcaaaggcagaaaactctgctcaacacatcaaccaaaatcacagcttttctcacgtaaagaccacagtaacaattccttcgatccaattcgttaaccgttggatcgactccaaaattttactggaagtctatagtgcataagcctacattntgaccgttgggatctactagcaaacatccagaacacattctgcactagactntccacagccaaccacacacaagcatttttctgcacttgtgcaaaaatctgctgcacaatttcacagcaaaaattctgcataagt

SEQ ID NO: 1985 - DNA, 593 bp, Glycine max
agctttgtgtaatcgattacactaagttggtaatcgattaccaataattgtttctaagtaaatcaaaagatgtaactcttcaaatggtttttgactttttcaaattggttttaagtttttctaaaagtcataactcttctaaatggttctcttgactagacatgaagagtctataaaagcaagaatttgttttgcattttaaatgaatctttctaacaatccaatcaattcattacaatcctttacaagccttgaatctctttgaatttcttcttcttctttgtgccaaaatctttccaaagttttctggttttctaaaccttgaaaacttgtgttattcattcttttcatctcttctccctttgccaaaaagaattcgccaaggactaaccgcctgaattctttttgtgtctctcttctcccttttccaaaagaacaaaggactaaccacctgaattcttttgtgtctcccttctcccttgtcaaagaattcaaaatgacacagtctgagaattcttttgattctttccttttccttatacaaaagtgttcaaaagactaaccgcctgagaattcttttgattcccattcac

SEQ ID NO: 1986 - DNA, 559 bp, Glycine max
  unsure (1)..(559): unsure at all n locations
tcaacatcagaccacttccagggtgctggaactacttcacatggacttgatggggcccatgcaagttgaaagccttggaggaaagaggtatgcctatgttgctgtggatgatttctccagatttacctgngtcaactttatcagagagaaatcagacacctttgaagtattcaaagagttgagtctaagacttcaaagagaaaaagactgtgtcatcaagagaattaggagtgaccatggcagagagtttgaaaacagcaagtttactgaattctgcacatctgaaggcatcactcatgagttctttgcagccattacaccacaacaaaatggcatagttgaaaggaaaaacaggactttgcaggaagctgctatggtcatgcttcatgccaaagaacttccctataatctctgggctgaagccatgaacacaacatgctatatccacaacagagtcacacttataagagggactccgaccacactgtatgaaatctggaaagggaggaagccaactgtcaagcacttccacatcttttgaagtccatgttacattttg

SEQ ID NO: 1987 - DNA, 515 bp, Glycine max
agcttcctatcctatatggattaagttttgtgtcgtggcatgtgtttttgaggtgcaagagaagttgtatccgtgaattgcatgcactatataggttatagctttctcactttgtagaggggttgaggttcaaaatgtataaggagcaatcaaaattatgagacctagatgttttaatgcttaaaagtcaggattgtagttgagctatttatttattttttcattttttgatttggaacttttttgcttaagaatatatataaaagtaaataattgatttgcttaaaaaaaaaagaagtaaataagtgacaaaagataggaggacattgttaagatttgcactatccattaaaaagacatttaaaactataatagtttatatatatttagtgattttaataaaaataagaatatattctttgaaaacgaaaattcagtttgtaaagttaccactcatcaattaattcaatctattttctttgaataagaaaatatcgtaatgattttcatttctg

SEQ ID NO: 1988 - DNA, 554 bp, Glycine max
  unsure (1)..(554): unsure at all n locations
tgaaggcgtgtaacccaccatttcccataatagaacactagtgatatgcctactatcattgttattatttctttcttcgtcattgagggaaacacttgggctgccagatccctccacctttgggcatattctttgaaagatccgtgcccccctttttgcacatgtcctgtagttgcatcctatctgaagccattatactgacactgcctaacgaaggcaaccattaggtccttccaagaatggactcgggaaggttccaagctagtgtaccaggtaatagctaccccagtaagactttcttggaaggaatgtatcagcaatttatcatcttttgcgtatgcccccatcttccgacaatacgtctttagatggttcttgggacaagtagttcccatgtacttttcanagtccaacaccttgatcttgggaggggtgatgatattgggtactangaacaactcttctaagttagcaaaggtataatcttcgcctccttcaatggccctgagcctttcctctagatgatccaactntctcaattctgccatagcatg

SEQ ID NO: 1989 - DNA, 548 bp, Glycine max
agcttgttgaaattgccatgtttggatgagttatacatacccattctgttttagggtttttgtgatgatgtttgtgatgtttatatgctgagatttcttatggaaaactgttagaggtgaagggtagagttaacttagggttagaaagtgagaatgtgatgttatgagtggaaaaagagtgaggctttgagagttggaaggttaagtctgaattttgtggtaaatggaggttaaagtgagttaatcctagcttgaaatgtcatttaggacttatgagaaaggttaggctgtgctagagagaaaaacaaatgaccaaagtgaacaaagagccatttctaggacaaatttgggtgttgaagagtcaaactttgattcggtgagattttaggtgtaaatccagttcgaacaagtctaaattgatgttatagacttgtgtgaggtgagagtttgcttcaaatttaccttattcttaatttcacttctcaaacctagaaaacccattgaatggaggggtgttggacaccttaatatctgtgtggctgtgtttt

SEQ ID NO: 1990 - DNA, 504 bp, Glycine max
  unsure (1)..(504): unsure at all n locations
tctacttatgtggcagggcgggtttccttcactttcttgtttccaacgcgagctctgaccactgttcttccttcccgcgaggcttcttttcatatccgcctgagtgggcttatagcctaaaccatacttcccacgatttccttgggtttttatcaggctagttatgccgccattgtctttgcctaaacccatcccgggttcatacccgttccccaacataactcgggccatcattaccgccgcatcggacagacaaggttgcccaaagagggagtccaccgaggaaatgctgaccacctcaaaagactggaaagcggtttctaacgattcttctgcggcttccacataaggcatggaggatgggcagcttactaagatatcttcctcgcctgacacgatgaccaagtgcccctccactacgaatttcagcttttggtggagggtaaaaggcacaanctccactgagtggatccaagggcgccccaacaggcaactgtagggggg

SEQ ID NO: 1991 - DNA, 376 bp, Glycine max
atggacgcgacctgcgtcttattcccagaaagaaacactgtagagagggcccctattcctaccgtgtatggcttcgctttctgcacttcctaaatgcttctattcattgaggcagttaacttagacattggagacaccatatattgtggaccatatcgtcccaccatgctggcgggtaattctccagtctatatccataaagaataacgcttatgctaacataggaaattattacgattctatttaatggctatttacgaccctacttcagacttatgaaaggatgaagacttgagggcgtatgaatagtatagtgctacggagctgcgggacactctcctaggggatcgtgacgcaacaactgatggatgcatag

SEQ ID NO: 1992 - DNA, 384 bp, Glycine max
tgtgagtcgatagagaaggcccatacctttctctctgcatcttccacgaaccatggatcccagtctgtacccttattcattcctgaacattgaatgctatcatgcctagttttccttcttttgccgacgcatatctcctttttttatcgacggtcggggaaataaacatgggacctttaaacggtgcgttctcttttctttgcttttttcggattcgcttttgatatacatggcatggtggtgtggtttgctgatggggctgtctttgatttttctcaaaccccttaaaagaatttgaagactgaactgataatactaaggctttgctggattacttctttaggggtgcatgctagtttgatcaattcctggcgggtctcttat

SEQ ID NO: 1993 - DNA, 448 bp, Glycine max
agcttggttcgaggtacttacccgttgaatatcgaagagcgaatgaagaacgttgaagaacggtcgaaaccttctcgaaattcctcacggaaacgttaccgaaacgtttcggaagcgcctcggcttgaattttcttcacggaaacaatttttcctagctaattccaaagagagagaagcgcctagggggctgaaccctttttcacttcacttctccccctatttatagaaaattgggggagaagctggccacccagctcgcccaggcgagcacggttgcttcctccagatgcaacagccttctggaggaatcttctatagggcccaagtgggcctgtgtgctatttgcaccccgatttttactaagcacaccccttgcccttttttggcgattcttgcttcgtaaagttacggaatcttacgaatttcgtaacgatacttgttttctt

SEQ ID NO: 1994 - DNA, 410 bp, Glycine max
tgtcgatgatcgcaagctttaaccttggggtgctcaccatgttgctccccctatctctaacaattaccattcgattcacaatgcgacgatggcacatatgaagatgtgggcgtacttcaattgacttcttcaaagttaagaaaacacatcaaaattgagtgactatccttcttggatgttttttgtaggatgttgaataaatataatggataaggcggattatgttagggaaatggatgttttttgcggtctaaaacccattatgaattatgcaacaaagtgtgttcttttgaaagacatttatgaactcattttgtactgctggctagttttgtgttgtatttattggatgtcttcacatacatctaatgtattacactatgtgataattataccatcaatttttcaac

SEQ ID NO: 1995 - DNA, 466 bp, Glycine max
atcctctatagaccacctggcagcctgccagcctacattatgtggtaatcagagcacaatagctttaagtaggtgctccttaaacctccattaatttttggctttaccttctcctccataggtgtttcttcatttttctccatgcatctcctcacatgtcttctgctaaatgtcgctaacatgattctttagaaattccaccaattaaacttgctatagaagctagatttgattttttacagctcaaacttattgttcttgctcttgaaccatgaattatgttgagtttatgttcctttgagttctgtcttgctattttttgtggctgaaaactgaatcataaaatccttacaaaaacattaaagtagaagaaaatctcaaaaatctttagtgacttgtacacctattaggagttctccatagaagacatgtctagtcatgatacttgctccataaaattaactat

SEQ ID NO: 1996 - DNA, 385 bp, Glycine max
tgagcgttataccagctgcggtgggctgcagctacgtcacatggacgtggcggagcccgcgcatgtgctcatccttggaggagagatgtctgcctatgttgctctggatgatttctgattagtgacctgactcgactatctcttagataagctttacgcctttgtcatatgcttcgagttgcatatctaactcaaattagaaatatactgtgtcatcgctagaattacagagtgaccatggcagacagctcgaacacacttaggacactgaatcctgcacatgtagtgcatcactcatgagctcgctgcctccttggcagatcaagagcctgtttttggctatctgcataacactactgtgccagactgtgcttcggtggtacgg

SEQ ID NO: 1997 - DNA, 507 bp, Glycine max
agcttcaagatgctcaattgctccaggttgctgcatggaagggcaaaggtctgtatggtggtcagcagaggagcacaaaccacaaacccttgctacaagtacaaatttctgattcaaggccagctgggttaccaagttaaccaatgcatccagtttgccttcaagcttcttagtttcatatgatgcagatgggtttgtagctacctcatgcactcctctaatgactatggcatcatttctggcgctaaactgctgggagttggaagccatcttctcaattaaatttctggctttagcaggagtcatgtctccaagggctccaccactggcagcatctatcatacttctctccatattactgagtccttcataaaaatattggagaagaagctgttctgaaatctgatggtgggggcaactggcacatagtttcttaaatctctcccaatactcatacaggctctctccactgagttgtctaatacctgagatatccttcctgatggc

SEQ ID NO: 1998 - DNA, 568 bp, Glycine max
tgaccgaggataggaattcctacccttaccctaggaagaaagatcagaagaatctccacagaagaaaaggaaagaaaagagaaagagagaatcacacaatctaagattggaggaaagcatacgaaaaatagaaaaagaaataacgaacaatatgaaaagattctttggatcagacactgtctgaacaatgtgcagaattgtcaaaatgaataagaaaagcggggcttacaaaaatttgtttgaaacctgagggatgcctgaagtattcacctccatgcttgttccatgctgaaccaaagagaaaagagagatagaccgacaagggaaaggccagaacacccaaaagcccaaatttcccaccaaagttcaacttgctaaaaagtcccattgatccatgttttcacatgttatctttgatttgataggaaatgatttgcaaagtcaagtcatgacatatttgtggttcggaattatgatgaaacactttcttgtgtgagatttatacactctgagtggttctcctctatttcagttggacccagagtttcttctaaatgctcattttgaa

SEQ ID NO: 1999 - DNA, 422 bp, Glycine max
agcttgtaggattatggggtacccatcacatgtggtactaggtggcggtcgggcgatggtgcacaacaagttttccatgtggcgcccctaaattaatgactggtttaatagtaataatttaaataacaaaaaccatggtaatttttttttctcttcgctttctttttcatttatttctcttttcaccataactaggtttacaagggaaatcctcactataaagtcctgaatggccagttcacaactttactcggaggcatttctttcttaccgctcataattctctaaattattttgctgtttcaaaaggaagaatataccagccattactttaggtcgtcacgtgaaaataaaaggataaagtacagccggtaaattcttttacaaataaagttgctaatgctctcttttcaaataacaag

SEQ ID NO: 2000 - DNA, 547 bp, Glycine max
ttaatgaggtcctttaatggtgattttccaccatggagatgcagcggaagacaaaggagaagaggtgagaggaggcgccatccactagggaataagccatggaagaaggagcttcaccaccaagaggagccttggataagaagcttggagagggtgcttcaatggaggaaaagaaagagggagagaaagagagaggggggagcatgaaattgaactttgagttgtgtctcacaagactcccattcatcaaagttacaacaagtgttacacatgcttctatttatagactaggtagcttccttgagaagctttcttgagaaaacttccttgagaagctttcttgagaaaacttccttgagaagcttctttgagaaaacaacacacactcatctaaaaactaagctcacctccttgagaagctagagcttagctacacatacccctctaataactaagctcacctccgtgagaagagaaactagagcttagctacacacccctataatagctaagctcaccccatgacaaaatacatggaaatacaaaa

SEQ ID NO: 2001 - DNA, 637 bp, Glycine max
  unsure (1)..(637): unsure at all n locations
agctttatttcttcttctctttcctcgatgggagaaattagtctctcctcaagctcttcttgaaatctcttacttttatccatgttgatcccacctaaatcaaactcttcctctttggatagtcctaataagttagatcaaacattttcttgttagtaacttagaatccttagcaataaaacatattcaaagaacacatggtcattgctaaataggtgcatgtttagattaaaatttagtagtacttttgttcttccaaactttaattcaaatatagactatgtctatagcgataagtaagagttgagttattcgtcaatatttgaacttgacttgatcaattaaacttgtttgtttaattaaattaataaaatttaagtttaacttgagtttgattatttcaacaagtctaaatctaagttttacaaaatttgacattgtctggtaaagagaggtttataattgatcttaatctcaagtgtctattattnttaatatcaatctaatgcntggataatttggtattatcttctcacattaacaagtgctttcactagaattgctggaagagtaactttaaaacattttctggccttatgcctcatttttttagaagtattctaactaactcatcttt

SEQ ID NO: 2002 - DNA, 601 bp, Glycine max
tgacgcagtcttgggttctaatcataccaatgtcctatgaaagactgactgaatggttgatcctttggaaatctaaatcagtagaagaggtcacttgggaagaggagaccagcatcagaggtcaattccccaaactctgccctgaggataagacatcttttgaactgaagatccaaaagctaaggccctatattttatactgtaggtgaaaaccaaattagaaagagttctgaaattgtgagtttgggggtgaatttgatagttagtttagaggaaagaggaaggctatgaggtttctccataggtggaagctcttgctcttattttttatatttgcttttcctgtttcttgctgaatatactagtctgcctttgaaagataggatttgttcctataagaattgctaacagaatgtttttaggtacaatgacattgccagatatgggtatgctgcaatgggaagatctaagtttactgtagagaaaagctcaagccaaaacaactcaccaactgtgcaaaatgctcatcatgtaaaaagaccatctggcttgggaagggaaagttctattaataggtacttcattttttttctcatttcta

SEQ ID NO: 2003 - DNA, 475 bp, Glycine max
agcttctggtaggacatcttgacttgctttccaatctgacattcaccacagattctgccttcttctattttcagattgggaatgcctctaacagcacctttgtcaatgattttcttcatgcctcttaagtgcagatgtccaaatctttgatgccatatttcgacttcatcttctttggaggatagacatgtggaggagtaactggtttcttgaggtgtccataggtaacagttgtcctttgatctgctgcccttcattagaacttcactcttctcatttgtcaccaagcattctgactttgtgaagcttacattgaatccttcatcacacaactgactgatgctgatcaagtttgcagtccgtcccttcaccagcagtactttgttcagactaagaagtccatcatggactagctttcccattccagagatcttttctttagagccatctccaaatgtcacataactagtggagc

SEQ ID NO: 2004 - DNA, 606 bp, Glycine max
ttaacctcatcgtccctcacagtctttagatttgggagccaatccaatccttgtgttcggactctcagccacttatgatagccgccgatgatcccattactgcttcccctaagctctctgtcctttcttcacgccgcatcccatgccttgcgaactccttggagtacctttgcattggggtcactgaaaccccgtgtaatgaaaggcgtgatgctttcgtctaatggcgctcctctcatggggtagccaagctgtcttatggcgaggacgggattataattaatacaaccccatgttctcatctagggaacatttggacatccttcgcatgaagatacaatcctgattcttccttccttctagcgagggaaccaattaacagacgcccctccatgctagccaagagttggtcccaattcgcctttcctttttcaacgcacgagcggtgaccttgtagcggatagacgggcctaccttcttggagaaaaaggtgtgaaactaaccacacatagagagccagtgcacaacaaacaattcttgcgctgctcttttcacatccccggtcgaacgtgtcatataggtcggctagcatagcgacaaccgggc

SEQ ID NO: 2005 - DNA, 540 bp, Glycine max
agcttgcttgtggagcttctatggaggctggatctttgagcttcaatgaggtcctttaatggtggttttctaccatggagatgcagtggaagacaaaggagaagaggtgaaaggaggcgccatccactagggaataagccatggaagaaggagcttcaccaccaagataagccttggataagaagcttggaaggatgcttcaatggaggaaaagaaagagggagagaaagagaggggggagcacgaaattgaaggaataaaagagagagagaagtggaactttgaagtatgtctcacaagactctcattcatcaaagttacaacaagtgttacacatgcttctatttatagactaggtagcttccttgagaagctttcttaagaaaacttccttgagaagcttctttgagaaaacttccttgagaagctaaagcttagctacacacacccatctaaaaactaagctcacctccttgacaaaatacatgaaaatacaaaaaaaagtccctactaccaagactactcaaaatgccctgaaat

SEQ ID NO: 2006 - DNA, 348 bp, Glycine max
tggttaaagaatctaagcatttctgagggtatgcttaggtgctttaattggtccatggtctttgtcacttgctttgggccacgttcatacgtcgtatgtagtgtatgttcatgggggtggagtgcactgaccttgtcggatggcccattcgtgggggacaagcgtggttagagaatctaagcatttctgaggggatgcttaggcactttacgtggttagagaatctaagcatttctgatacaggaaatagaataattgtggtagagtgtactttgtattgagggggcttgtcacctggtatgcaactcctttgggcctcaggcagatcacctatgggggggggggcat

SEQ ID NO: 2007 - DNA, 498 bp, Glycine max
agcttgaatcggacatccgtgtgaaaagttatgatcatttgaatttctcaagagcttccattgttcaatttcgagcatctcgatatattataagcctaaatcggacattcgtgtgaaaagttatgaccatttgaatttctcaagagcttccgttgttcaatttcgagcctctcgacatcttatatgcccgaatcgaacatccgtgtgaaaagttatgaccatttgaatttctcgagagcttccgatgtttaatttcgagcgtatcgatatattataagccttaatcgaacctcaatgtaaaaagttatgaccattttaatttcccgggagcctccgttgttcattttcgagcgtctgtatatatgatgcgccttaatctaacatccgtgtgaaaagttatgaccatttgaatattctcaagagcttccattgttcaattgcaagcctctttacatattatgcgccggaatcgggacctccgagtgaaaaattatgacc

SEQ ID NO: 2008 - DNA, 518 bp, Glycine max
tgttgacacgcggagatttacgtcaacttttgtgctcacattatttgtcatactgacatttgagtcacgttgacgggcggagataccctagtggttatccgtataaacattcttttttgctgtctgtaaaacgaaaagcctgatagcatgcagagactaacgtcgtcttctgcgcccttcgtcaatcgcggccgacaagcccgttgacacgcggagatttacgtcattttccgcgctcacaagatctgtcatactgacatttgagtcatgctgacggtcggaaatacccaagtggatatccgtataaacattcttttttgctgtctgtaagacgaaatgcctgatagcacgcagagactaacatcgtcttctgagcccttcgtgaatcgatgccgacaagcccgatgacacgccgaaatttacgtcatcttccacgcttacaagatcttgtttacttaaattttaatcacgctgacgggcggaaatacccgagtgcttttccgaaaaacatttttttt

SEQ ID NO: 2009 - DNA, 498 bp, Glycine max
agcttgcatttggaattgcgaaagccccacttcatcattaggattagtacctgacatctcaaacaaacaaatcaaacgtaacaagacaattatagttgttgtttgaatacctcacccactcaagtgtatcacacaattatggcttttctctaatgaaacactcttgccttttaccactctaattccccttgagttcttaggcaattcaagagattatggccacaacaaagaacaattcaccaatatgtgtaaggtaaggctagagagacaaggaaaaggttaaccaagaaaaaggctaacaatgtttttaggcacaaatgaaggaaataaaattcagaatttaggaattcaagtaacaatccttcatgcaaccaatatattaccttaaagagattttttttttttaaaagttcttcaagcatgaaccattcagcccaatttttttttttttttttttaaatttgcttatatgaaattctgcttctttttttttttttt

SEQ ID NO: 2010 - DNA, 564 bp, Glycine max
ttgttctttttataaaatgagaagttctgaactcatcatgttatctaaaaaaccttggggtggatccaagtgctccgatcattcatttgcatattcatgttttggtggcatactcaccattgtttatttctttgggaatttcatcataactaagaaaacaccaaggcacccctataacactcgatccagaaaaatggataatgaagagggcattcaggaacagatgaaggccgatctatcggccttaaaagatcaaatggcttccatctcggaggtcatgttaaaactccagaaaactatagaggataaagccacgacaaccgcctccactacagttagggaagccgagccggggctgcagcccaccttatatccgggccgagacagaaacacggccgtgtttggtcgaaggtatagtccacaagcttatccttatggcttgcctccggacttcaccccccgtgccaccccggaagatttaagccaagcccctactttcgaggggcaactcccaccttatgacgactatcccgggcaagacgatgaggaaggagatacccatct

SEQ ID NO: 2011 - DNA, 480 bp, Glycine max
agcttcgtgccataggaatggcttagtttccggagtagctggtagaatggctttgccttctctgcgagccttaaaaagaacctagacagaggcattagtctaccattcaacttctgaacttctctgacgttagtaagactatgcatttctagtatcgttgcgcacttggcagggttagcttctatttcgcgatgggtaatgatgaagcccaaaaaattttcgtggccaaccctaaaggtgcattttttgaggttaagggtcttgacatacttgttaatctctatgaacacctcttccaagtctgccacatgttgtgctacactgtgagacttaacgaccatgtcatccacatatacctcgacattttgtcctaagggcatgaccctataacagacgtgagtgagttgagaatgaatacttaccgagatttggagtacactgatgtagtgaagatggactccacaatcttcccccttggat

SEQ ID NO: 2012 - DNA, 565 bp, Glycine max
tgtaatatttataaatcactttttttataaaccttgattaattcaagttaaatcaattaggtagaaccaattaacttgggttatgggtgtaattttgattgcattgaccgtatgttttagtgtaacaatttattccataccatgggacttaatattatgtattgggtacgtagtaaaaattatatatatatgcaaattgttgtattacatcttattaatagttactatgttagtgataattaacactaacaagtatttatctttaaaaaaaaagtctaattaaatcacgcacagacagtacatgtacagtcaagtcaaggtgcttttcaaattaacctgccaacttgaattatttatttatgatctagttaaaagtaatatatttatttatgctgagaataaaagattatttaaaaaatgagtagccgctactagtctagtcaaaattttcaagttattgccacctgaatgcagtcaaacatcatgatgttacactcgactaattaataagaaagagagtgataatgtcaattagtaaaacaattaacaaggttgttttaaattc

SEQ ID NO: 2013 - DNA, 475 bp, Glycine max
tagcttgtattaatacatattatcttatatataaatgaagatgaacattgactattcttttttatggagagcaattcaatattgcggagatactttgattttctcattctattgttagggctgccaggttgtttgaagaaattaaaaagtgatgcaggtatgaccgaataagccatgaggtactccacgcttggatggatacttaaacagagattccgggaatggttaaagaatttgacgtaaaagattgattgttacactcaaaatagcaaatagggtgaaatcaagtaatcaacacgggctttaattcaacttgaaagataaagacgaaaaacagaagtcgttttgaagggtttcattttatgaacaaaaaatatcatttgaattttgacatttaaggtctattacatgaatgatgtggggagcaaatgttattctcatctggccaacttgcgtgtattgcaacaaagtcatg

SEQ ID NO: 2014 - DNA, 525 bp, Glycine max
tcgccggcccgggacatcctccaggggaaagttacactggggtcaccacctcgagctgtgctctctctcttctgtcaaatcaaacatggggttctagaaacccagcaccaagtcttgggttgaataacatggtaaatttccacgggacgcccatgacacagcctgctgcatcatctcatggtgcatcaatccatcaacttccaaataccccgtggtgtttcaagggcattgattctggtaactgttcgcccgagggggtccctgatctaggtctcggtcagatttcgcagcctctcagtagccaacttcacggtgagctggacctgtcccaacaaggcaggagacattatatggatctagaacagtccagggcatatgaatctgctcattggtcactttaatgcacttgtttttgtttttgtttttttgtcaggtttgtaataaaatgtagcacaaacctgtgcctacttggttactgaccagattgatgataactatttcttgttttggtttgttcaaactgat

SEQ ID NO: 2015 - DNA, 331 bp, Glycine max
ggttgaacttccatgccatgggcttaggaagacagtcgaaccattctttaagggtgcgccgtccactaatgactaagccgttgtcacacgagttacttcttcaaaatcaacttgggattacacactatcagacatgttattttgagtgagaagagtgaaggttgacaagtagttgcgggagcgcgagatgatgtcgttacccaacttcatattgtaggactttccaatatgagtagattgctactatccatcaacaattgaaccagagtctcgcatgcgaatataagtgtactatggtacgcatatgggaagatttgttaacatatgtatc

SEQ ID NO: 2016 - DNA, 450 bp, Glycine max
tgttttggaccttgaacaagcaatcaagctcctctttcagaaccatgctatgtgctcgcgactggtccctttcttcccttcgcaacttgagttcattattgctaccccatagagctccgcgaaatttgttccggccatactcttccttgcgagccctcttggtctcttgttcaagggctcttgtggtaattgcattctcttcccgtaacccggcacactccttccgaacgtgtgtagcagccaacttgaacttctccttggcgagctttgcctttcctaactcgcttttgagagcttggacttcttcgtcctcttccggtgcttcaaaattctcttcgctgacgacttttaacttggcgagccaatctaaacctcgtatgcgaactttcagccattcgtggtacccacccatgataccattacgaatgcctctaagctcttgatcttttc

SEQ ID NO: 2017 - DNA, 539 bp, Glycine max
agctttagcataggatccaatggagtaagagctagcttaaagtgtgtcatctcaacattttcaagtaagtcaagaatctaatttcgtctattaagaaagagacctttattagaaactgccatttcaattcccataaagtagtttaagcggccaaggtccttgataggaaaacagatagcaaagcgtgtttgagttgagaaataacatgattactatttccaacaataataaggtcatcatcgtaaacgagaactaccacttgtttcatttaagacatcacaaacaaataaagaagaatctgcattacttcttaagaaatcacctcttgaagaataatacttaatttcacatgccaagcacattaagattgtttcaaaccataaattgatttgtatagttggcaaacgcaggaagaatttgaactttttggatgtcctgggggtcattccatatagacttcttcttcaagatccccgtgtaagaaagcatttttacatccatttggctcattgaccatccataattaacaacaatatatg

SEQ ID NO: 2018 - DNA, 517 bp, Glycine max
tgtaggattatggggtacccatcacatgtggtactaagtgtcagtcgggcgatggctcacaacaagtttttcacacatccacaatgcgcgcataaacccaccatcccctgttgcccacctccaactgagctcacgtactcccacgtagcccatatcctcgtttctctcaacaccgggtccccatcaatcctcccaagcttccacaacatccaagcaaaacaacattcaaacagcacaagctatcacagccaagcaaaatagagcaaaggcagaaaactctgctcaacacatcaaccaaaatcacagcttttctcacttaaagaccacagtaacaattccttcgatccaattcgtgtaccgctggatcgactccaaaattttactggaagtctatagtgcataagcctacattttgaccgttgggatctactagcaaacattcagaactcgttctgcactagaacttccacagccaaccacacacaagcatttttctgcacttgtgcaaaattctggt

SEQ ID NO: 2019 - DNA, 502 bp, Glycine max
agcttgtagcaaattcaaaccgcaataactttttactcggatgtctgattgtgtcccgtagtatatagagacgctcgtatttgaaaacagaaactcgtagcaaatacaaacgacaataactttttactcggatgtccgattgtgtcttgtagtatatcgagacgctcgtaattgaaaacagatgctcgtagcaaattcaaatgacaataactatttactcggatgtctgattgtgtcccgtattatatcgagacgctcgtaattgaaaacagaaggttgttgcaaattcaagcgacaataactttttactccaatgttcgattgtgtcccgtagtgtatcgggacgctcgtacttgaaaacagaggctcgtagcaaatctctacgacaataactttttactcagatgtccgattgagtgctctaatatatcgagacactcgaaattgaaaacagaagctctgagcaaaatccaacggacattacttttatctctgatggccg

SEQ ID NO: 2020 - DNA, 495 bp, Glycine max
tccattttcaattacaagtgtctagatatattacgggacacaatcggacatccgagaaaatagatattgtcgcttgaatttactacgagcatactgttgtcaataacgagcgtctcgatatactacgagacacaatcggacattcaagtaaaaagttattcctgtgtgaatttgctacaagcttccattttcaatttcaagcgtctagttatattacgggacacaatcggacatccgagtagaaagttattgacgattgagtttgcttatagcatgtgttgtcaattctgagcgtctctatatatgacgggactcgatccgacgtccgagataaaagttattgtcgctagaatttgctccagagcttctattttcaatttctagcgtctcgaaatattagagcactcaatcggacatcttagttaaaagatattgacggtttaatttgctacgagctactattttccagtatgagcgatttgatatattacggga

SEQ ID NO: 2021 - DNA, 462 bp, Glycine max
agctttttccgcaaaaatcactaaagaccgttttaaggtccaacgccttaaacggtcctctttgcttttatcgattaacatggaccgttcaaaagcataaaatcaacatgtaactttactgcttttgcaagaactacgtaggtctgattttcttatcgcaattgaggatacgtaggagcaaaagccccgcttttgtcgaccaccccaagagatcattaatggtccaacgccttaacgtttctctactttcaaaaagcaagagatcgttaatggttcaacgccttaacgtttctctcctttcaaaatcaaaagatcgtttaatggtccaatgccttaaatgaccttttgtttggttaaaatatatcttgcgaaaaaagataaaaacaacttaaccaacgtttagttctcaaagaactacgtacggtcttatttcctcattgcaattgaggatacataggagcg

SEQ ID NO: 2022 - DNA, 444 bp, Glycine max
tgcattgtgctaagcctaaagaactccctgttttgaaatattttgtatttgggctaagcgcgcaagggcagctggctaagcttgcatgtcgcgttaaacctaaaaacatctttgttttgtaatatctcaaattgggctaagcgtgcaggcacaggctaagcgagtcatgcattcccggtaagcctgtggtgctcgctaagcggattttgcaggaaatttcctcctgcaaaactctctaagccctatgtggcatgctaagcccaataatatctctgaagttgcaatttcatttttgggcttagcgcacaagtttgggcttagtgcgcaaaaaaaaaaatcaaaacttcttgtacttctattttggcatgtctcctacgcagcaagcttagtgcgcacttacacgctaagccttagtgttcctcaatgcttgtatttttgtgttgg

SEQ ID NO: 2023 - DNA, 459 bp, Glycine max
agctttggccagcagccggctatgagtgtggaggagttccttgcactggtggcttggccaggaggccaccctcctccttctggaatgggtaaggcctccgcagcccaagagcctatgccagtagaggagcctttgcctgatgtagaggatgagcctgttcctcctgagccatttatctttgagactaatccatccgctcaggaggaagcagcagcttaggagcctacttctgcagttcatatctctccagcacctattcttgaggattcccagccattaacactagccatggagccatagcagcctattcttcaagatgtaccagctgctccagtgctggatttaaatgaagatcagccgcaggatgagcaagatgtttaaggtctggtttgttctaatttctgccaaatgtgaacaatttaggtattagttatttagttgattaaatttcaatcattt

SEQ ID NO: 2024 - DNA, 525 bp, Glycine max
tgaggttattccttaagtaaaggagttgttggatgagggtttggttcataagagcttaaatccttgtgctttgttagtgcctaaaatatgtattatgaggcaccaaatccctatgataggtggtatgatgaatgtgttgagtggtggaacccttttttgtaaaatcacctatgcatccaacatcttcatgatccacatacatagggactcattaggtaggtttgttcttatttttagtttcaatacaaacttaggtgctcatatgggacaccttaggtttgtcgtactttttggtaggaataatcaacatgaaaatacaaaaaaaggtattttttattacattactttccttaattttttaaataaagatcaaggggttctcacagaccctaagagaataaaggtcattcctgagtggcccacttcatgggaagatgcccacgaaaggggttttcagaccttaccctactctaacataccaaacaccactaatatatatgtttttattatttttacaggtgttga

SEQ ID NO: 2025 - DNA, 342 bp, Glycine max
agcttgtggattttagggattgagggctgttttggtttgtgtttacgtttgagtttgtgtttgaggtttgtgttttggaagaaaaactcgaaaaaaaagttttgggtttagtggcatgtctctcttcatagagtttggccaacgaaattggtctgaggagtcatgtcagtgattgtgccatgacatcccttctgatttccaggtttactcctcccaccaagcaatccaatagagcttcttgcgtaattccttgtactcgattagctaaagccgggaaccgcacgtaatatgactgaactgacccaatttgagcgagtctaaacaactgagatcttagacatt

SEQ ID NO: 2026 - DNA, 483 bp, Glycine max
  unsure (1)..(483): unsure at all n locations
tgcatttggaattgcgaaagccccactccatcattaggattattacctgacatctcaaacaaacaaatcaaacgtaacaagacaattatagttgttgtttgaatacctcacccactcaagtgtatcacacaattatggcttttctctaatgaaacactttngccttttaccactctaattccccttgagttcttatgcaattcaagagattatggccacaacaaagaacaattcaccaatatgtgtaaggtaaggctagagagacaaggaaaaggttaaccaagaaaaaggctaacaatgtttttatgcacatatgaaggaaataaaattcagaatttaggaattcaagtgacaatccttcatgcaaccaatatattaccttaaagagattttttttaaagttcttcaagcatgaaccattcagcccaatttttttttttaattttgcttatacgaaattttgcctcttttttttttatataa

SEQ ID NO: 2027 - DNA, 423 bp, Glycine max
agcttttagcttcaatgcaaggaaacatacttatggctaagaatctaaattttggttttgaaagtggaaaggcatgaaaattaggacatgcttgtgagggttttactcgaatttggctgccccatgaggggcactttgcacctaggtagcatggaaaatacctttcaatggaatgtatatatgtgtgtgaatataggtagcatggaaaacacctttcaatatatgtgaatatatggcattaaatgtcttgcaaagtgtgaatgagtagcaaaaatgccttttaacatgtgcgtatttgaggataggtagcattaggagccttttagaaaatgtacccatgtcaaaaagggcctgaggacgcttcctaaatgaatatatgatggcatggaatttccttttcaaatgcaagtatgtgcatgacgt

SEQ ID NO: 2028 - DNA, 608 bp, Glycine max
  unsure (1)..(608): unsure at all n locations
tttgatctcgtgccttccgccatgcgtcaaaacttgtgctcaatgaaagcaccaatgatacctagcgttcgagggctagggaacctccacactgcgcgtgacccgcgagagagctcgaagctcgcaggaaagaagaaaacgcgagttcagagagaaagagaaggagctcaagagagaaaggaaacttctggattatccatatcctcttcaagttggttacaacttttataacgtgaggacccacgcttaacagtaaatggttagctgctgttgctaagctctaactatatgaacaacacgtaactaccttccctgcctacgatctacccacagcttttaccccattccccaagcccttctatcctaattggtagatatcacaatgcttgggtagctgcttcgtcctagctgaatgcctctggtgcatagcttcatcttcaacgtgcgtctcagatgcaatatccaccatctagaaactgcttaatagtttagatactacacaaggatggattgaatcaaatgaaattgatctcaaaatctacgaattgacctgcaaccctacctatcccttattantttatttnttttgcattttatttcttacactc

SEQ ID NO: 2029 - DNA, 270 bp, Glycine max
  unsure (1)..(270): unsure at all n locations
agcttctagctaaatggacttaccttgacttatttcctttgatagcccttttgagccttgtttccctttccttgttntgaagctcactacaagccttaagtgaaaaaccatgatatcaccatatccttaaaggaatttggagctttggaattgttttgggaataagtgtgggggtttttgttntattggataaccatgtttgttgacacggcttatgatatattctgagccatactcgaatacattgcatattggttaaatgttgacatg

SEQ ID NO: 2030 - DNA, 411 bp, Glycine max
  unsure (1)..(411): unsure at all n locations
aagtaatagccatgggcaactacccnccattgaataccctcaaagtggactaaaccctgggtgctttccacaaaaaggccctcaaaacaacatcatattgaaactatatatgcatgattatctatatcttaatatgcataaaggcattagtgtatcctaaccccaaaaccttaaggactgaaaatcatgagaaatacattaccttaagcaacttgctcagaaaattaaagcaatagactagtcaaatacaatgaaaaaaaaaatataccttaactttgagtaccttgcagcaagtccattggtgttacatgatgatttacctacttaccaatgaaatatttaaattataggcactatntatctagttgtttgcatcgtgatcacgacattcatttctggacactatactga

SEQ ID NO: 2031 - DNA, 276 bp, Glycine max
agcttatagaaaacagcggtgagtgctccttgttatataatatagatggggatttttctgcttcatgatcacctgtaaacaagaaagtttgctttattattctatgtaactcatcttatctaaaccattgcctttcttggtttgatgattgtcatagactcataagttttgcctttgatataatattctgcaatcatatacgttttaatagtatgagttttcaataatggatatgcacaatattttcaaataagttgtgtaacacgatacaattta

SEQ ID NO: 2032 - DNA, 439 bp, Glycine max
agcttatatagtactagtatctgatatagctgtacatagtgatgactgcttaagaagaatcaaatcaacatattttttaatcagtgtagtaaagaaattaaagtgaaaaaaagtcatggacatggtttgtagcaacaaatcaattcttcaattgcaaatatccctcattttgtttgccaactgtatatattgatcaaatatttctccactttctgaatttattttcctttaattatatttctttatttgttgtgtgtgaatatagtaacctttttcattttatatatgataccttttctgctcgattgttctgcagagggcttggaatcccttggattgaacagttgcactgatattcctatgcataatctctgcgggtaagatcatactcaaaacagttgcaatttcatcatacatatggaagaatatcagaatgtgt

SEQ ID NO: 2033 - DNA, 461 bp, Glycine max
tgctatgaggatattgaacagacatattgcgtttaagttacaaatttgtacctaacttttcatttaattttttgttctagcttcattatagttggtagaattctatatttttcaataaacttaattgtaaattatggcatttttcttgtaggtgggttaggataaaagtcactagaaaaaaatataaaatcatttgaaaatggaaaggttaagagacgtttagtttgaaaaaaatatattttctatttttatttttcatttcaatttctttcttatttttaaaatttaatataaaaacatatatatatatatatatatatatatatatatatatatatatatatatatatatatatatatatatatatatatatatatatatatatatatatatttgacacgtaaatatctccaaacaaatattgtgcccgatgcccagaataattttaatactagtctct

SEQ ID NO: 2034 - DNA, 458 bp, Glycine max
  unsure (1)..(458): unsure at all n locations
ttaagtcacctgcggcatgcaagcttcaccttcacttcgcacgctgggttctatccctttattacagctttctaatagacccttaaacccatccaatggcttccaaattgccctaatcctctaattacatcaatcttcaccatgaattaaccagaaaaaaaaatcttgaatgcggtggcacgacaatcttccccaaattaaatnttctcanattccaagtgcagaagcagaaaactcaccggaaatgggatccaagtgtggtggcagccagcaagtcactgacttggtgcgatggtgcaacgagcttgcagtgggtgatgtgaggacgagcgtgaagatgaatagaaaggaagagcgcgaccatgaagatgaagagaagggtagtgaagataagccatgagcgtgaagaagagaattgactgagaattaatttcttttatggttgattcaaaacaacg

SEQ ID NO: 2035 - DNA, 227 bp, Glycine max
  unsure (1)..(227): unsure at all n locations
aattaagttagtatcatatacgatatgttagtatctnatatatatatatatatatatatatatatatagtgggactctaatagcctaaaaagaaagaactaaataaccacttatgtttgggagcaagtgtgctagatatccaagctgaaatagctagcatcaatgcccaacggattcagtatccaaggaagtcgcattcccattgttggcgtttagataaaaaagag

SEQ ID NO: 2036 - DNA, 425 bp, Glycine max
  unsure (1)..(425): unsure at all n locations
agctntaagcctcatctcttctagttccaacatttgcaatttctacttctcccctgataaggactcatcaaagttaaggaacatgagagctcaataagccttatctcttccactatcacctatgttgtccttcatcatggcagcaccagatctgtaaccactccattgtcgccaccacgatgcatcaaaaccctcgtcactaacaccctgtgtcgaaactctcaccattgtgtgccacactgtgtcaaaacgtctctaagtattgttagtataattattatggtaacaaaatctttgagggtgaggctctacttcgcaggatattatggcctcctcgatgagaccttctcattgtcgagaactttcttgagcgtctntaaatctgggatggccaattccattcactactttntaggttcttatca

SEQ ID NO: 2037 - DNA, 465 bp, Glycine max
gggaagcgtaattgaattacttgacttaagcacacaacacattgaatagtttgcactagaatcagaaggtatggtcaaaagagtattctttatgaaatatttttttttatgagtcattgaactatagagtatcaccatcgctaagaacaagaatctcaaacaaccatactctttatgcaattaaggtaaaacaccatactacaagtatacatagaattataaggttcttataataagtatacaacttacatataagaagtaagaattaaatagttaatgaggatgtattaaggaatcataaacttcaactactacattcacgactacgcacaaaataaagggagttaagtagtcatgtgtttacacatcaagaaagacacactcatccaagaaatatatacgggtcaaaaggttttcacaacactaatccacacatcatgatagaaataagttattaacaacata

SEQ ID NO: 2038 - DNA, 412 bp, Glycine max
agcttgacttcaactttaccaaagttaagactattgaaaaccgcgtgaaagatgtgcaccccgaatataatggcatgttggaatcacattctattgtatcatacagaggtgcatgcggttgctcaaaagtctcttgtccaagatcacatatcatttcctctatacgctctccgttgtcttcgtgtaccgcttgagattgagaaacagttggaatgtcggccaattccctatgccatatccattttgtgtaattcggaatgatgccgtaacatatgagatgtgatcagatttcatcaactaactgtcgtctaccattaagacatttaacacatgggcataaataattgccccttaaactttcagcattaaagtgagtaaattgtagaaattgttccaccccgttctcatactc

SEQ ID NO: 2039 - DNA, 310 bp, Glycine max
ctaagctaggagaggatgcttaatggaggaaatttaagggagagatatagagatggtggagcacgagattgaatgaagaaataagggagagaagtttaactttgagttgtgtctgacaagactctcatttgtgtatgttacttcaagtgttactcatgctgctatttattgactatgtatctgtcttgacaagctctcttgaaagagactccttgataagcttatttgagaaaactaccgtgaaagctagagcttatctacacacacctatctaaaaactcagctcacctgctggagaagctttcttgag

SEQ ID NO: 2040 - DNA, 396 bp, Glycine max
aatatgtacaaattctaaggcagagagcacttacatccaagtccaacaaattttatgtaagctacagttcactataattgcgccatactgcacgaaattcttcacggaatgtgtttagacgagctttcaagttaggtgttctaaagcttgcatgcaggatggtagctgaaaatagcaagaaaaattaactcaaaagcaaattcatagttgctaaaaatatttaaaagattaaaatttctcagtatgcaacgtaccaagaagaccaatagcaagagcccataaaactgtcaggagaccagcagaaacaaaccaaagaaagaaacttgctgcagaaaaatggggaaagaatcactggaatcaaaaaatattggactgggtagcagggatgacagaaca

SEQ ID NO: 2041 - DNA, 338 bp, Glycine max
  unsure (1)..(338): unsure at all n locations
gaatactcaagcttactaaatgttgtggaaaagggtttatgtagcaaggttttgtgcagcattgatgctgttcaataaaaaggcaacatttacagaaaaataaggaatttttatgttcagattgagttggtttctctttcttgtgattaggagcaatgcagaactggacaagtgagttggtttctctttcttgtgatgtttttttagatcaaaactggaaaaaagaaaaaggacacaatttagactcttggtgaaacaccctttggatttggccatgtttgtttgatntgnnntagatgaatatgtgtgcttttgattcataaagaaaaggtgggttt

SEQ ID NO: 2042 - DNA, 407 bp, Glycine max
  unsure (1)..(407): unsure at all n locations
agctngtaggccacctcttcgacttatgatttatattgaaacggcccaaaatagcgggatgagagtttgggattaatacgtcgggccaccgtgagctgtctatgagggtgcaacttaatgaacacccaatccccctccgcaaaagacacagcacgacgatgtttgtctactgccttcttcatggattgttgggcacggtgcagatgagctttcaattggcgaatagcctcgtctctatcgaacaataccaaggctactaaatccacggatgtctcacctgtcaaaaaacgacgcacagatggaggagctcgtccataaacgaccttgaagggagtcttttcagtagccaaatagaaagacgtattgtaccattattcaacccatgaaagccaaagatgccatttatt

SEQ ID NO: 2043 - DNA, 419 bp, Glycine max
  unsure (1)..(419): unsure at all n locations
tcgacaataattcatatacttatttttgtatgactaaaaattatgcaagtggatggtcttacatcacaatgtttntttttatatttttttgtgtaatgaatacaatgcacttacagttttcccatgtggaactataactgtttaaatgaaaacaacttaagacaccaagtgagtgcatcgtttgacctttattcatttatgagtntatcaaacgaggagaaaaagattaggctgattttttttgtctattgttacagcttcaaacgatgtagattaatggtagtgcaatgtgcatgtctggtaaacaaaaatggttgataatgaattggtttttagtttgagacagagacaaatttgataataaatgaggcgacatgaacacatgagcctggagctagcattaaatgcagttagtctag

SEQ ID NO: 2044 - DNA, 447 bp, Glycine max
  unsure (1)..(447): unsure at all n locations
ggatagatatatattctntattttntgtccccaaatccacatctcggaaaaagttcacaattgtcaaactgtaacaccccatttttcttaaataaattaaaaaatgattttttatttacaaataaatagttttaaaaaatgatgatgtttttataattaaataaataaggagaaataactntattgattaaaataatggtttgaaagaaaataaaaatgatattttatttattcatttgatagaaaataaaatagagtatttgtttataaaataataaataaagaaaaatagagtaaataataggctgggaataccctagctataaatagagatatgttaggtcagttntcatactaacaatagtctctacgcttcctcttcctctcaattntgttttcccttccccttttcccgaaaccctctctttttcctgcatacactcaaac

SEQ ID NO: 2045 - DNA, 351 bp, Glycine max
agctctgcgtctacaaacggcatgtcctccttttggcctttcaccatgtgggggatagatgtcataagtgccatcgaacccaaggctttgaacgatcatcgcttcattctcgtggcaatagattatttcaccaaatgggttgaagcggcttcctacaccaatgtcatgaggagtgtagtggtcagattcataaagagggagctgatttgtcggtatggactccctatgaagatcattactaacaatggcaccaatctgaataacaagatgacgtaggaaatgtgtgcggatttcaaaatccaacatcacaattccacgccctaccgaccaaagatgaacggagccatggag

SEQ ID NO: 2046 - DNA, 212 bp, Glycine max
  unsure (1)..(212): unsure at all n locations
ngccccgagaaggaatccacggaagatatgcttaccaccttatttgactggaaagcggtttctaatgaatgctctgctgcctccacatacggcataaaggatgggcagctcaccaagatgtcttcctcgcctgatatgatgaccagatgcccatccactaccaatttcaacatttggtggagtgtataggaaacaactcccactgagtggat

SEQ ID NO: 2047 - DNA, 304 bp, Glycine max
  unsure (1)..(304): unsure at all n locations
agctngaagatgcaatagtgctaatgtttctgtgttgtagttactccatattggtgacaattaacttgggtttctacctttgtgatcatttagtttaatgtgctaagttgtttcaagtttggtctttggcaagtgtgtacaaagttagtacctatcactatctatattttttgttggtcagacctcactatgaagactaagagtttcaagtctataatatgttagtttttaaatatttttggaggtagatgttgaacgtacttacgtctggccttgtgggagagctcattttcatgaatgctat

SEQ ID NO: 2048 - DNA, 406 bp, Glycine max
agcttgaccatacaaaaccgattacattatatataaccaagtttccattgtcatgaagggaggcgaatgagacacccaagttagaatttctatagtcccacatggtggaacccaacccattaatgaggacgaggttgtccatatggaggaactggagggatacaatggagtccatgacaacactatttatgatggactacatggcaattcgtggtggctagggtacatggtggtggcgctacttggtggaaggattcctctttccactcatatatagatatggatctggaggacgaggataagggtgagaggcagaggtttaagaaatgaaattggcatgaaatcatataaatttatggcgagaggttcttacctattgtataaatggagatgaagggttactaat

SEQ ID NO: 2049 - DNA, 552 bp, Glycine max
  unsure (1)..(552): unsure at all n locations
agatatacgaatgtggcnnatttgannntccctgtgatttagcccaccccntngngaannancnnatttgagacccctagcaataaccgcgacacnatagaatactcaaacctgngcttcaactaagtcggatttaaaaatagtcgtcagatttatttattgggaggctacgatggtggcagaagtctttatgaattagactaaggttcatatgcatcatataaaagtgtaaatgctatctttaccacaacaagcccgaatcaattgatattttcccaacttaatcacattgaaagagcatcttggctgttacttacttgactagtaactcatgaaacaaaacagtaatacagcgttcaataaatacatctgaatcgaaaaaacaaacttcgctctcatcttcttctaaccctacccctaccacttaatccagaattgctccgccatctgtcaaacccacactggtttgaacgttcaccaccacattctcactttttaacctctatcttactctgcacgccatacttattactgttcacacaagcgattcct

SEQ ID NO: 2050 - DNA, 71 bp, Glycine max
gctcagctctcagccaaactcccttcacttattttgattttaggctaaaataggtggcctggttcgtgctc

SEQ ID NO: 2051 - DNA, 160 bp, Glycine max
cacattttcaaaggatatattatctcatacctatttactactccatgatttgcctttgtggtgtcccatatgaacgtgtctcttttcttggggaaagattgtaaattggatgcatctcccgctatgctcggaacatacctatcgagtaccactctgatgg

SEQ ID NO: 2052 - DNA, 436 bp, Glycine max
agcttcatgacatgcctaagttgattgtcaatgattgttatcgtgtatttaacaaccgcttttggtgagatctctttcatttacaaggcataacactcgcttttagtagcacctatcatccttattccaatggagagactggggtgaccaatcatatcctacaaagttaaaagctttctacgaaactccttcaactactccaccttcattaacgacccacgtcactgaaactattatgcctttggtgccttctgccatcctagagagccacatgcttcgtcttggccgtggctacattgatcaagtgttgattcaatgggaagggctttcacctacgacagctacttgagaggacaagaaggctttttgcgacaactatccttactttaaccttgaggacaaggttgttgaaaaaggagggggtattgatatgggt

SEQ ID NO: 2053 - DNA, 444 bp, Glycine max
  unsure (1)..(444): unsure at all n locations
aagcaactcanaatctagctatctaaaaccccttattttagtggattttcaaggtttgagaagtgaaaatgagaatggggtaaacttggagcaaactctcatctcaaacaagtctatatcatcaatctaaactcgctcaaactggttttacgacaaaaactctaccgaatcaaaatttgactcctcaacacccaattttaccctagaaatggctcttgttttcactttggtcactcatattcctcatttgcacagtctaagctttctcataagtcctaaatgacatttcaaactatgattaactccctttaacctccaaataccactaaatccagatttggccttccaactctcaaagcctcactctgtttccactcataacaccacattctcactntctaaccctatgttaactctaccctacatctctagcagttttccata

SEQ ID NO: 2054 - DNA, 250 bp, Glycine max
ttatatacctcccacagtagctagagtttcaatagatggtagttcatcaagtgaaagcataaccatagaaaaacctagagatagatggtctgaagaggatagaaaacgagtacaatacaacctaaaagccaaaaacataataacatctgccctaggaatggatgaatatttcagagtttcaaattgcaagagtgctaaggaaatgtgggacactcttcgataacacatgaaggaactacagatgtaaaag

SEQ ID NO: 2055 - DNA, 381 bp, Glycine max
  unsure (1)..(381): unsure at all n locations
actaccctntgagttaattcaaacaaatgtattaagtgtcactgttaacaacatgttataattgtaacaaaggagacaacctaatggtactaacgtaaattaaaacttaaactaccagatctcacaagctatcttaaggtaaatctaagattataagtagaaaaaaagaaaaaacaccactcattcacttgtcacttgatgatgaactggctttcacttttgagtcaatagtcaacagagtaatggcactgagccatatattatactattatttcttcagaaacaatctttattgcattttattgacttctccctttattttttctttgttcacgtcaccagtattgtaacaaccacattccgcttactctcttcctttgt

SEQ ID NO: 2056 - DNA, 404 bp, Glycine max
agcttataatatattattacactcgaaattttcatcatattctctcgagaaattcaaatggtcataacttttcacccggatgtccgattatggcgaatcacatatcgagacgctcaaaattgaacaacggaagctcttgagaaattctaatggtcataactttcaactcggatgtccgattcaagcgcatcacatatagaggcgctcgaaaagtgacaacggaagctcttgagaaattcaaatggtcataactttccacactgatgtccgattaaggattataatatatcaagacgctcgacattaaacatcgtaagctctcgagaaattcaattggacattacttttcacacggatgtccgattcgggcgcttaatttgacgacacgctcgatattgaacaac

SEQ ID NO: 2057 - DNA, 457 bp, Glycine max
ttttggagtagacacatgggaccaactcatgtgatttcaaatatgaagtcgtatctagtcaaggtctgagagaccatacaagtttcctaacgatttctaattatgtgggccattaagtctatcatatgctgacaatagccgagaagcccatgaatctcttcgggggcggagtaggtgtctgccatcgacttggccttggctaacaatcggggaagttcttgactcccgttcaaggtaagagcaaaccgattgatgaggacatgaccaagagcaagggcaaggatccacttgaaggactaggaggacctattgatgaggacatgaccaagagcaagggcaaggatccacttgaatgacttggaggacctatgacaagggctagagcaaggaaagccaatgacgctcttctacaagtgctgtccatactatttgaatcaagcccaagttcaaggagaaa

SEQ ID NO: 2058 - DNA, 422 bp, Glycine max
  unsure (1)..(422): unsure at all n locations
gcttcaatggattatatttattaggagagaaagagagaggggggagcactaatatgaaggaataaaagagggggagaagtagaactttgaagtgtgtctcataagactttcattcatcaaagttacaacaagtgttacacatgcttctatttatagactaggtagcttccttgagaagctttcttgagaaaacttccttgagaagcttctttgagaaaacttccttgagaagctagagcttagctacacacacccctctcataactaagctcacctccttgagaagcttccttaagaagattcctaaagaagctaaagcttagctacacatacctctctaatagctaagctcacctccttgagatgagaagctagagcttagctacacacccnctataatagctaagctcacccgcatgaga

SEQ ID NO: 2059 - DNA, 410 bp, Glycine max
  unsure (1)..(410): unsure at all n locations
gataaagtccttagtgatctantttatgtgtgtgcaatttatttgattagatgatgcacaaatttgagatttgtgatttcaattagtttgaatgatagacacagcggaaacgctcgtgtgctgagtgaaacactanccttgtgaggagtgaagcatggttaatcttcttgaatacttgttgtcataccctaatttcgtctggggaccattatttgttggtatgcgaccttcgcttgaccatctcaaaatgtttatcacccatcgttgtgtaatccataaagtctcgcaacattccggaagtcaaaacaagcattgttgcgcaatccgtaaagtttcgcaacattccggaagtcaaaaagagcattgttgcataatctgtaaagtcccgaacattcaaggggcaaaaagag

SEQ ID NO: 2060 - DNA, 101 bp, Glycine max
agcttctggtgatggaagcacgtattcttttgtttccagatcggttccttcgccaagtatgtgtatatgtgtatatatgtattatattcgttgccccggtt

SEQ ID NO: 2061 - DNA, 380 bp, Glycine max
tgccacccagctcgcccaggcgagcatggttgcttcctccatatatcaacagccttctggaggaatcttctagagggcccaagtgggcctggttgctatttgcacccccatttttactaagtacaccccctgccttttttggtgattcttttttcgtaaagttacggaaacttacgaattttgtaacgatacttgttttctttccgtaatgttacggaaccttgcggattacataatcatccccttttttgacttacggaatgttacggaacctcactaattgtgcaacgatgcttccatttgatttccggtgtgtcacggaaccttactgattgtgcatcaatatatttttttgttttcctgcatgtcccggaattcac

SEQ ID NO: 2062 - DNA, 309 bp, Glycine max
agctttgacagagagagcgcgcacttggactttgtttcatggaaatggaatattatcattaaacctttcttgatgaatgaaaataattactcggtacaaagaacacagaatggggagattcctattggggagagagaacgatatcatggtggaataccaaataggggagagagaaccctaccacatgccatagagtaatgcatcattgtccgcaatattaaaaatacataaatgtaaaagaaccgtttactgtattggtaacataaagaaataagaaaaatgtaatacaaacgttgatgttgacatttt

SEQ ID NO: 2063 - DNA, 411 bp, Glycine max
  unsure (1)..(411): unsure at all n locations
acactatgaatctaagctacagaatttgttacctanttggagtagtgcaagcaggttatatatatatgttaagggacatggcagtgtggagaaacttccatgcatgcagtgggggagtgagtttgacagaaggtagatagggatatgacataagcggtgtgtagagaatgggtagtttcaaatcgtatctctttaagtttcattttcagattacatttattaatccattgtattatttacctgatacattactggaacgagaatgtagtataattatgactaaaattgttaatgaaatatatatataccaaaagaaggtattccttttatatatagttgcggatttaattgaaccttattgtgattggttcagcatgatgaataagttgttgtaagcttcatagtacatgt

SEQ ID NO: 2064 - DNA, 270 bp, Glycine max
tatcaatagaccttcaatctttaatggagagggttaccactactggaaacccaatgccattttatcgggcaaaaaattaaatatttgggaagacattgaaatatggccttatatacccaccacagtagcaagagtttcaatagatggtagttcatcaagtgaaagcataaccatagaaaaacctatagatagatggtctgaaaaggatataaaacgagtacaatacaacctaaaagcccaaaacataataacatctgccctatgaatgga

SEQ ID NO: 2065 - DNA, 452 bp, Glycine max
  unsure (1)..(452): unsure at all n locations
gacactatgaatctcagcttggaaaccagccatcanatgctatacgaaattagattggaatagagtacaatggcngcatgacggaccgtgcagaaccgggttgtggagtaaactcaatgtcctcccttcaaggtagaagtgatccagatgcctacctggactgggaaatgaagactgagcacgtatttgcctgcaatgactacactgatgcgcagaaagtcaagctagcagcagctgaattctccgactatgcccttgtttggtggcataaataccaaagagaaatgttgagagaggaacggcgagaggtagatacatggactgagatgaaaagggtgatgagaaacaagtatgtgcccactagctataacagaaccatgcgacagaaactcctatggctgtcccaagggaatttaaccgtggaagaatattataaagagatggaaatggcg

SEQ ID NO: 2066 - DNA, 285 bp, Glycine max
agcttgagatgaggaagtgtagattggtgattcttcctgcttttattcgttgaccacagagtggtacctggagatatgtcgcgggggtcaggagaccttggggacgtcaggtggggtgctattgcccaaaaccaagcttgaccaatcctgacccaacccgggcatagtcagtcagtgagaacctgtgatgtacctaagcaggcgagctcctggcaatcaacagataaaaggaacaaagaccacaaagcaaggaggcttgtgtggtggttggccatctgtgaatct

SEQ ID NO: 2067 - DNA, 307 bp, Glycine max
tcggaagaaagtgatgaggtacaagccttaaaggcagagcttttaagagcctgtgtagtcgaagagaagttcaagttcatagccatcaaagtctgaaaaaagtatgatgaactaagggatgtcaatatggccaccgacgaagccttggaatgagaaaccaagaatgcccgaaaggaagaacacgtgccagcaaagttttgaggggctttataaggcaacaataggtagctcaagctccgaagaggtgaaaggaatcatcacgggtgaaaggcatgatcttgaaagacgagctataggcttaccttat

SEQ ID NO: 2068 - DNA, 320 bp, Glycine max
  unsure (1)..(320): unsure at all n locations
agcttgccacccagctcgccctttctagtattgttgcttcctccagaagcaacagccttctggagggcccaagtgggcctggttgctatttgcacccccatttttactaaacacaccccctgcccactttttttggtgattcttttttcgtaaagttacggaaacttacgaatttcgtaacgatacttgttttctttccgtaatgttacggaaccttgcggattacataatcatcccttttttgacttacggaatgttacggaacctcactatatgtgcaacgatgcttccttttgattttcggngtgtcacggaaccct

SEQ ID NO: 2069 - DNA, 394 bp, Glycine max
  unsure (1)..(394): unsure at all n locations
ncaccttctgtaagcaaggcttagaagccactgaaggcattactaaaatggtgggttagagcaatcctctcactttgttcactgagaaattggaaaagaaaaaataaaaacaaacatgttcattccataagttcaattgattttgattgcaatggtggatatggttatagataaaaaaaagtgaataatgtgaagttatagtgaactagataatgaaccttggaataattgatgacaataaatgcagatgtgatgattctagtatttggccctctactccaatgttatttggtgatgaatntcccatataaacaacataaggctgcaaagaacaagataagctttggtattaaatctggcataacaaaattgaacataataagcttaaggggaa

SEQ ID NO: 2070 - DNA, 208 bp, Glycine max
agcttgtaggccttggatcttcttcatcaatggagtcatttgattcttgaagatcaatggcaacagaatggagaaggaggaaaggtgattggaaacgccacttcaaggagaagatgagtcaagaacaagctcaccatcataggaagtcatggataagagtttgaaggtaggagaaaatgagtggatggaaagagagaggcggggggtt

SEQ ID NO: 2071 - DNA, 346 bp, Glycine max
  unsure (1)..(346): unsure at all n locations
tctctgctgganaattccttccctgttggatgtttggtttgtgttaaggtggtgtttggtaatggatgtgcggctggcgggccttgtggctgatttatgggtggcctttgtggttgattacgtattcttagctgatagggtgatgagtaatgagaagcgttcatattggcttaataatgacattgttgagctggtggggaatttggccacgtaagaacgacaatcacaacactggttgctccctacttctcatcttttttaatagccacaggctttccattcattgagcacgatgatcaaattttctcttttcaaacccacttcaatccttttgccggcgaaaact

SEQ ID NO: 2072 - DNA, 378 bp, Glycine max
  unsure (1)..(378): unsure at all n locations
acgcagtgcaggctctctgtgttgttgagtntgtttcacttatgattattgaatgaagttgcaagaaaaacgaaaaggaaagcgagtgcacaacagagctcttcacaggaagagctctgataccatgttgaaggtatgcgcgaacatgagaggaaataaacgagcaatgaaaatgctaaatgatcaaaatcagtaactcaactttattgaataacaacaatagtatttatatacaagtgagaagaaagcttggtagggaagcttgttagttacaacaganagctaactaatctaacaaactcactctcactaactatacttgctaactgatttgttattggtgagaggatgaactaaagacttattatgttcttgtct

SEQ ID NO: 2073 - DNA, 292 bp, Glycine max
aagaggctccctcgagaagcttactcgtgaggcttctttgagaagtcaactctttaactaccaacacccttctaatgacgaaacttacctccttgaaaataaaacacgaataatataacacatcaaaataatcaaacatcaaatctaattactaataatatatcagggtgtgacaatctacaatgaacgggtaaaatattattgcgaacaaaggagaccgaaccataggtactacattcaatgaagtcgatagaatgcgacgaatatgtttactgatctagatgggtggaca

SEQ ID NO: 2074 - DNA, 428 bp, Glycine max
agctaaatgttgacatcctgcccctcattatttgtaacatatgaaaatgacttttggcatgagtatattgtttctctaaaatatggtgctctcgtgaatgatttatttttccttgctaaagcatgttcgcctttttaggtgaaaaaaccaggtggaccattcggtcctgccaacaaatcttatccggagtcccatgaattgattgtcattcatgcgacctccaccatcaagtctggagccccacgaattgattgcctagcgctgttcgtctatcctccaccctcaaatcttattcggagacccatgaattgattgtcattcatgcaccctccaccatcgagtctggagccccatgaattgattgcctagcgatgttcgtctatcctccaccctcaaatcttattcggagccccatgacatgattgtca

SEQ ID NO: 2075 - DNA, 454 bp, Glycine max
  unsure (1)..(454): unsure at all n locations
gaacaatgatgacattgcaggcctttaagaactatgggttgtaggcatacattccatactttgctagaataagtgaccctaaagaagggacaaataagagcaatcacaccttccactgtaaagtctagtaatagtttcatgccaatagaaaaccaaaaagttttttcaagcattgtgtttttacaaattacaaataaattattagggatgagaggggtattctataatacctgtaaccacttaattttagacactggaagaaaaagatatcacaatcttttccagtgaaagcaaatcattcaattaatatgaacatcactatatttntatagaaaaaaatgaagaanagtatactaattcattttcagtctatgctagaaatctaccaaaacatgcagacaaaatttggttcaaaacaaaaatccaggcctccaaacaagaaaaactagataca

SEQ ID NO: 2076 - DNA, 393 bp, Glycine max
tcttgaaggtggcagtacatgaggaatcttcttggaaaagacatctttaaattcctgcaataagggttgaacactaggagaaacataaatagttaactgattagaatcatcactctctctcttttgtgtatcactcttttcctcgggtgtatcactcttctttttcatattcctttgtggagcctcactatttactttctcttgttctctcttttctctcattctgatttggtcatcacatgcttctctaggggatagaggtttaagagtaaacgaggaagatttgactattcgtctgtagggctcttctttgttacgggtcaacaaacgttgcatttgtatagtccacgcgtccagaaataagcgctgagattcgccagatgatgatataca

SEQ ID NO: 2077 - DNA, 415 bp, Glycine max
  unsure (1)..(415): unsure at all n locations
tactcaagctnttcaattcattctatgtacccgtagtggtccacattgtgtttcgtgcatttngattctcattttgtttactttttataccccctgttgacgtgcttaagccattttacttaagtcgtttctcgcttaacttaaaaataaaataaattttcaccgaacgcttgaattgtattatccattagcttcggttaaaataaactccgaccgttcggtcatgccgtaaccacgttggaaatcaaaaagaggtaaaaaataatataataatcaaaaagacatctcttagttaaataaagcggaaaatcaatcggacgttttctcttagggagttctcattcttaatcgaattgattaataaactaaagtgaaactaaggctaaaatcaactcgcctagtcaagctctgccac

SEQ ID NO: 2078 - DNA, 433 bp, Glycine max
agcttgatgtgagatagcgtggaagagtcagtcttcctacttttgtttgttgaccacagagtggtacttggagatatgtcgcgggggtcaggagaccttgggaacatcaggtggggtgatatttcccaaaaccaagcttgacccatcccgacccaacccgggcatagtcagtcagtgagaacctgtgatgtacctaaacaggcgagctcctggcaatcaactaataaaagaacaaagaccacaaagcaaggaggcttgtgtggtggctggccagctatgaatcttgagtggtatctggaaaatggcctctggtaatcgattaccaagggtgtgtgatcgattacagggcttagaaatggagacaggaagttaaaatgacctctggtaatcgattaccaagggtgtgtaatcgattacatggctaaaaaatgga

SEQ ID NO: 2079 - DNA, 398 bp, Glycine max
  unsure (1)..(398): unsure at all n locations
aagcttcatacttggaagatacgattagattcataaggagattcagaaaatgaagtcgtgaatctgagtctgatgtgccatcattttcttctattttctaaaccctttgtgcaccattttaattactgattggtcttaattgtcaattaattacgcagttttattatttgggcttatatagctaatatgatgttcttaatctaatttcaggaattaatgaaacattgggcttaatctggatcttggatgaggacttgaatacggcaaataaagcagcgcttaccttagttaatttctaattaggaaatgtcgaaattttattttatgtggttcactgtatatttcgcttngggccagagtatggtaatagggcccagtgactttgagtgactcttttt

SEQ ID NO: 2080 - DNA, 369 bp, Glycine max
cccgagtgtaacttcttaattaaataagtcagttcagaccagactttatgtaggccaagtcgtacgtccttgtaagccgacctggcctattctcaccctatctatgaatagtgatttatatcataaatataaataattgttaacttgtatcatttggataaatattttttttattattggtgttaaaaagtctactaatctcctcatttgttttatctatgtttttaaaattaaatctatcattgaatggttcaagatttaatagtttaattatacttgaatcttattgtagttgaatcctgattgaataaataataattaaataatatatatttttaagtaacatatgtaaaataatataatatttat

SEQ ID NO: 2081 - DNA, 369 bp, Glycine max
tcaagcttccaacataaattatacaacatttttcagcacaaacttcacagccaagaagacagagcataggcagaaaactctgccaaaacaccaaccaaaatcacagcttttctcacttaaagaccccagtaacaattccttcgttccaattcgttaaccgttggatcgactccaaatttttactggaagtctctagtacaaaagcctacattttgaccggtgggatctactagcaaacatccagaactcattctgcactgctctttccacaaccagcaaatgcctagtatttttctgcacttgtgcaaaatcctgctgcacaatttcacagcaaaaatctgcacaaaatgcagatttcgaaaaccacac

SEQ ID NO: 2082 - DNA, 273 bp, Glycine max
  unsure (1)..(273): unsure at all n locations
agcttatatagttntttaataagcctaagcttgttctatttaatttaatagactcttaaaaaagcccgagtctaactctttaattaaataagtcagttcagaccagactttatgtaggccaagtcgtaggtccttgtaagccgacctggcctattctcaccctatctatgaatagtgatttatatcataaatataaataattgttaacttgtatcatttggataaatatattttttattattggtgttaaaaagactactaatctcctcattt

SEQ ID NO: 2083 - DNA, 430 bp, Glycine max
  unsure (1)..(430): unsure at all n locations
tccncaacatcaaattaatacaacattcaaacagcacaaacttcacagccaagaaaacagtagcaaaggcagaaaactctgccaaaacaccaaccaaaatcacagcttttctcacttaaagaccccagtaacaattccttcgttccaattcgttaaccgttggatcgactccaaatttttactggaagtctctagtacaaaagcctacattttgaccgttgggatctactagcaaacatccagaactcattctgcactgctctntccacaaccagcaaatgcctagtatttttctgcacttgtgcaaaatcctgctgcacaatttcacagcaaaaatctgcacaaaatgcagatntcgaaaaccacacttcccctcattcaatcttgcccaaatcanattctacaagtcccaaatcatgtatcaatcatg

SEQ ID NO: 2084 - DNA, 379 bp, Glycine max
  unsure (1)..(379): unsure at all n locations
agcttgatgtgaagaagtgtagaatagtcagtcttcctactttggtttgttgaccacagagtggtacctggagatatgtctccggngtcaggagaccttggggacgtcaggtgggatgctattgcccaaaaccaagcttgaccaatcccgacccaacccgggcataatcagtcagtgagaacctgtgatgtacctaaacaggcgagctcctggcagtcaaccaataaaagaacaaagaccacaaagcatggaggcttgtgtggtggctggccagctatggatcttgagtgatatctggaatatggcctctggtaatcgattaccaagggtgtgtaattgagtacaacactaaccaatggagacatgaagttaacatggc

SEQ ID NO: 2085 - DNA, 438 bp, Glycine max
  unsure (1)..(438): unsure at all n locations
gnttggagtagaaacatgggaccaactcattgtatttcaaatagaagtcgtatccagtcaaggtctgagagaccatacaagtttcctaacgatttctaattatgtgggccattaagtctatcatatgctgacaatagccgagaagcccatgaatctcttcgggggtggagtaggtgtctgccattgccttggccttggctaacaatcggggaagttcttgactcccgttcaaggtaagagcaaaccgatccatccatatggttgcctcttggtgtaaagagtcgatcacccttcctctagcctctttttccgcatacacttggacatactcatccgcgattctatgctcgtgggccggggctagacctaactcttcttggacttggcgatgatagctaacatgttggtctccgtctcgcataaacgctgagacaagct

SEQ ID NO: 2086 - DNA, 427 bp, Glycine max
  unsure (1)..(427): unsure at all n locations
cttgcatgtctagtgattctagagagagaaaggtccaagtttttgagagttttgagagatnttgctgtgtgaagatctgcaaagaccagagcttgaagaggaagctgttctgagaactcgagatgagtttatgagtggctgtgagatcccagaggtgaaggagacatcctcaccacttgtatntttgcaatctttcatcttgttcttctcttagttgtaaaggaggcttcctgggtatgtaaagctaaaatcttctgttgaatcttccctgtaggtacttgatgcaaatatcttttgatctatntaatgatggttcgtgtgttctctgtgctatcagctattcattctagtatgcctttacgcttgatcacgtagatgcatgctttgttagggtcattcaacagtggaaactgatctgttctgatga

SEQ ID NO: 2087 - DNA, 414 bp, Glycine max
tgcggcatgcaagcttcctaaaaatataaaactcttcatatgtctatcctacagaggaaatcttcctactatctccttccgctttatacgaaatatctctttcgattcttcttgttgcaggtgtggaacagctcatgagacttggattcatactcttcatgattgttcgtttgcccgacaaacttggatttttatgcatcttgattctgatcttcttttctaccttatggatgaagctctctagctacgtcaaaatattcaaggaagacatcaactagcgtttgattgccctcctaaaatatttaaatcagtttgtacctacatgtgaatatataatcgcccctctcttttcgttcccatagtaatttgagattaaaacccacatttccctacccctttattaatagcatatat

SEQ ID NO: 2088 - DNA, 402 bp, Glycine max
  unsure (1)..(402): unsure at all n locations
acacttagatactcaagctgctctacaactccctcaagcatccattacatactcccattctttttttgaccaattagggatttacattttgccttgacattcttgtcaatgtgaaacctacacaacaagttagtacactcaaagaatacagttttcactgtattcatcaatgttaggtctctatcggtcacaataactccagggagggcatcacgtcttagaaaaagaccttgaaatcattcttaagcccagaccatattatttagacgtttntcctccaaatatgcaaaaccaacagagaatgtcattcccgttggtgtcgcaccaacaaagtcaagtaacgggagtatgtacctatctgttttggacgtactatctatcaaaaacacccaatttcatgca

SEQ ID NO: 2089 - DNA, 428 bp, Glycine max
agcttgtagggttaaagtctcattattgttatgtgctcatgcaacaattgttagccgtggctatacgagacatcttgccaaacaaagtcaggttaacgataactcacctatgctttttcttccattctatatgtagcaaagtcattgatccagtcatatttgatgagttggaaaatgaggccgcaattatactgtgccagttggagatgtatttcccccttgctttctttgacatcatgattcacttgattgttcatctggtcagagaagcagaagaagccattgaattttgttcagaatacttagagaaggctaaacctgttgggcttcctgagtctcggcatgatgacagagtgggtggtaagggttcaagaggactgcaggtgatcactccaagtgtagaagaattgtacaagctcacttgtatg

SEQ ID NO: 2090 - DNA, 363 bp, Glycine max
tatcagcagttatctagaatttagtctctagagtggccaagtctgaaaattgtgacccaagcatgaagggcaaatatgtgtttagcctttgaattcttcgaaaagaagcttgcctttatctgatctcctatctgaaggtagaaagtttcattctaagctcaaggccatagtctgataacactgaatctgcgaaatttagtctatcttcaggtgtctccaaaagaatctcctctatctgaaaagtctctccaaacttggtgcgatcccaaggaaggacaacattgagggcacagatgatgcctatcaaggattgatgctactgttctgtcgtgcaatttttttctctctgcgttgtttcttcta

SEQ ID NO: 2091 - DNA, 333 bp, Glycine max
  unsure (1)..(333): unsure at all n locations
agcttgggtgatgttgcgcgttctgatgttttccatgaggngattgctggggtttgacccatgcggttgttgaagagaccgcatgggcatctccttccttccttattgcccctgtagccccgattatcttggcgtgcacgtttgtggcggaaacgcaatcaaactttactctcttcagtcccacctcaattctttcccacgcaaacaccagatccgcatagcgggacggaatgtatcccgctaacttctcatactagaacactggcataggggataccatcatggcgatcatctttctctcaaccatcgtaagagatacttgtgctgcctaat

SEQ ID NO: 2092 - DNA, 441 bp, Glycine max
  unsure (1)..(441): unsure at all n locations
tcttcattagacctcagggatcagtcatctntcctggccgttgtcgactgtcattnttttcgatcaatatcggtgaataatatttttctgccgtggtgggctaatgttttcctagccgaataaatgggaacttgctagtttcggccgaaacaataacgtcgggttgagcctcgcaccgaataaatacctaaccggcctacannttgtaaattttntatgcaacaccaaaacaagaaaacttcatctgccgtaaaaaataaccatcatcgtccagcgagcgtttaaaaaaaaatctcgcgtagctatttcacgaccgatgtcnggctattgagtttctattcaatccctgaatgagatttgcaggatgtcgattaggaaatgttcgatcggcgtcatccggtgatgcttgccttttagacctcgatcggtcatctctgcacg

SEQ ID NO: 2093 - DNA, 243 bp, Glycine max
agcttggttcgaggtacttacccgacgaagatctaataactatgaagaacgaatgaagaacgtcgaagaacggttgaaacctatgcgaaattcttcacggaaaacgttacggaaacgtttcggaagcgcctcggcttagattttcttcacggaaacgatttttccaagcaaattcgaaagagagagaagtggcaaaggggctggacccttttctacttcacttcctcctctgattatagcaaa

SEQ ID NO: 2094 - DNA, 418 bp, Glycine max
  unsure (1)..(418): unsure at all n locations
agcttgaattccttaattnnttagtttggttttattattntgtgatgcctaatatgtttagtagatgaggcatntttattgaatgttttagactaggcatgtgtgtgatatagtcttagtctttctcatgcttagtgattgatcaaatatgaagtggatgaagtattcttgttctctaagtttcttaagaacttacttctannttaaattggcttgcaacatcaaattaattaattgactcatttgataattgaatgtccaagctagtttcataagaataaaaggtttgcagcttaagaaaatcgattatcccatttgataattggttacccaactcctgtaaacaaagagaagctctctgtgtgattctataatcgattaccgcacatgataattaattatccagtcagcacagaag

SEQ ID NO: 2095 - DNA, 504 bp, Glycine max
  unsure (1)..(504): unsure at all n locations
agcataggnnttttgagcatgaatgctgacattgaagtacgcagctctggtgatnacacagggtttggatgtacatgaaattgtcttggatctttattatattggtggtgaatgtaagtgatgaacttgtagcccttgtcatgtctgacttcccagctggaatagcacggttcctcatgtgtgtttaatagtcctaagtgatggcctaggctcttttaatgtttcatccataattgtttccacctatgagggccacctgaaacaaattatgtcctttctgtgtgaggtcctgtatgattggctactcctgtcacctattttacatgtagtacaagcgtgtggtttgccttctatactactctgattaatggactccgtctcgaaatactataaatcactcttggtttgatgtcctctcacttgaggacttcctatgtataacacaggatagactcggttgattatagaaagattaatgtgcctgtattcttatcactcactccg

SEQ ID NO: 2096 - DNA, 439 bp, Glycine max
agcttagcatgaagaaggcccatgaaaaagctcaaatgtgcgctaagcgcaaaatcccgcgctaagcgcatgaactcctcgctcaacccagacattgtcacgctcagcacgttatcgccctgctaagcctgctaagcccataaggggcaggcttagcacgaggtcgcgtggattttaagctaccttgggcctataaaaggagttgaaagcaaaggagaaggacacatcgaggctcagagttctctattgaatacacccaagcctaagcatctctcttaggggaaatccctctctctctagccattctcccctcttcctttatccatccttttccttcttccatccacattatcccataatgtgtaaagtctatcatggcaataagaggctaaaccgcttcggttgggagcctagcagccaacacccttgtaacgtaact

SEQ ID NO: 2097 - DNA, 402 bp, Glycine max
  unsure (1)..(402): unsure at all n locations
aagtctcacgattgtcacgtgttgatgcaacatattgttagccatgtgttttgcgagacatcttgccaaacaaagtcaggttagccataactcacctgtgctttntcttccatgccatatgtagcaaagtcgttgatcctgtcaagtttgatgagctggaaaataaggccacaattatactgtgccagttggagatatatattccccctgctttctttgacatcatgactcacttgattgtgcatctggtcaaagaaatcgaatgttgtggtcttgtttatctgcggtggatgtacccggttgagtgatacatgaagatcttaaaagggtatacaaagaatctatatcgtctagaagcatctattgttgagaggtacattgcagaaaagccattgaattttg

SEQ ID NO: 2098 - DNA, 414 bp, Glycine max
tacccatcacatgtggtattatgtggcggtcgggcgatggtgcacaacaagttttccacattcacaatgcgcgcataaacccaccatcccctgttgcccacctccaactgagctcacgtactcccacgtagcccatatcctggtttctctcagcaccgggtgcccatcaatacttccaagcttccacaacatccaagcataacaacattcgcacaggacatgctatcacagccaagcaaaacaaagcaaaggcagaagactctgccgaaacaccaaccaagaatcacagcttttcccactcaaagaccccagtaacaattccttcgatccaattcggtaaccgttggatcgactccaaaattgttctggaagtctatagtgcataagcctacattatgaccgttgggatctact

SEQ ID NO: 2099 - DNA, 427 bp, Glycine max
ggcgaccattagacgaaaaagaacatgtgattagaagtatgtctgaaaatgtagttttttgtcagattgattgcgaagaaatgcattgatcgtatcctggtgagagtgtgatccttaaatcttgagagaaacgactatcatttagtactaatttttgcatgaatctctgaagtatggactgaatgcatgaattgaggatgatgaaggccatgctctgattgtgatagctacttagccaaaaagctgaccttgcgcttgaatgatttatcccttgcacccagtttgagttgaatgaattattgattgattgaaccttgagcctatacagttgtatcttctgcttccttgcgtgaggttggttgagagcattatccacagatagctttgatcaaagtaaatttgtcccgaatttgggggagctattgtc

SEQ ID NO: 2100 - DNA, 335 bp, Glycine max
  unsure (1)..(335): unsure at all n locations
agctnttctccctctctctctcacgttgctattctcttcttcttcttcaccattgaagatccatcaaagctccaacctttgctcaacatttctgctccaaatcgcgaaaggaggccattttcggagtcgtgaagcgcacctctacgttgtgggacttcaaatttcaggtttgggtagacttcttctcacattaatttcgtgggtattgggtgtttgggagatatgatgggtagttttactangtttgcgccttatgatagttatttgtgaagaaatttgtgaaagaatgctaaacttgtcatgttgggtgtgagtctaacttacccatttctgtt

SEQ ID NO: 2101 - DNA, 328 bp, Glycine max
  unsure (1)..(328): unsure at all n locations
cttaagagagaagtagaaattcttggtctatattagttcactcaaatagagctatgtccaactctcctttacacaactataaagggatccactaatcaaaactttcattacaaccacgtattctatcctaccactcttggctataaaagtattctctatgtcactcttgacacacccttagactccncctgaatctaatagcactcaagtatggtttaaccctgagccacttntgattttctcaaacaaaagtgtgaatgaatacaatgattcaacaacactcaaagagtggataaatagttaaactcatatgcaaataaacttgctt

SEQ ID NO: 2102 - DNA, 432 bp, Glycine max
  unsure (1)..(432): unsure at all n locations
agctnnttggagtagaaacatgggtttaacttattgtatttcaaaaaggaagtcgtatctagtcaaggtcttagagaccatacaagtttcctaacgatttctaattatgtgggccattaagtctatcatatgctgacaatagccgagaagcccatgaatctcttcgggggcggagtaggtgtctgccatcgccttggccttggctaacaatcggggaagttcttgactcccgttcaaggtaagggcaaaccgatccatccacatggttgcctcttggtgtaaagagtcgatcacccttcctctagcctctttttccgcgtatacttgggcatattcgtcggcaatcctatgctcgtgggccgcggctagacctaactcttcttggtacttggcgatgatagctagcatgttggtctccgtctcgcataaacg

SEQ ID NO: 2103 - DNA, 312 bp, Glycine max
  unsure (1)..(312): unsure at all n locations
tctcagcttctacttcttgtacaacaactntacatctctttgggattcttctcagtantttccctaaatctgtttgatgacttctcaactaatngcttggccaattgacccacctgaatctcaaggttttttaaggctgactcagtactcttatgaatggacatggtcactttcatgaattgagccagagtttcttccagtttggtagtcctctggaaaatattatgccctttgtgaggcggccctgttgaaagtccaccctggtccttattgaattgattaccagcgtgtgatctccattgtccttgctga

SEQ ID NO: 2104 - DNA, 448 bp, Glycine max
tatgctgcattcggctctgtaattaactgagcggcgcagcaactttgtcatacactaaaggttttattattatgtgcaacgccatgtaatgggcatatgcaggcatattggttgaacgtggtatactaagcctgagagtgacacagaactatgtcacctcatgcaaaaagatcagaaaaacatgaatgggcagaggcataatggtttctttacttccaaaaaagactacaagaacgtataatggggaaggccttaaaagacctattattcactcaaaagatatatgttgaaaaaacgagttaacaacataacccggcgtgatttttgaaaactaccacgtctgtgacttaccaaatcgaggatgcgtagaacaagggaacacctttgtcgccacaaaagattatatattaaagcatttaacactatgctcgaagagacatagctaatg

SEQ ID NO: 2105 - DNA, 125 bp, Glycine max
  unsure (1)..(125): unsure at all n locations
gctccggagtatacagtcaccgctttatgagcgctgtacaccagcagcgcttctaggccatcaagggatggtcgtntctccnggagcgacgcgtccagctcatggacgacgagtatactgatttt

SEQ ID NO: 2106 - DNA, 397 bp, Glycine max
agcttgaatatcttcatttgagtattgcaattctatccaaagcatttcattggctacacactctccaatctcttccttctttgacccgcctatatttgtcaaactgcacactccctcactataatgaaccatccttgctcaacttctcatctctgcaaactctccatctttccgttactagttattcccctgccatttcttttgtccccaagtggatattcaaattgaagaaacttgtttctcttcaattaccgggtaatgaaatccaaggtccgattcctggtggtattcgaaacctcacacttcttcaaaatcttgacttgtctgaaaattcattctcatcttctatacctgattgcttatacggtcttcatcgtctcaagtctttggacctaag

SEQ ID NO: 2107 - DNA, 462 bp, Glycine max
  unsure (1)..(462): unsure at all n locations
gacactatgaatctcaagctgaagatntgcaagacatcttccttgacaactccttgattttatgccatcaatacgcagagatgacaatttagagagtgatccaatactttcaaatggatttccactgaatgtattaatagacagatagagatatcttaatgatgaaagttatccaaatgatcttggaagagcaccaccaattaagttgttggaaaaatctagcatgtcaatatatttaaaagccccaatttgatctgtcagattgcctgaaagtagtgaactctgatctgcatgtgttgtgagtccatgggatatacaacgagcaagaatttctaaaagttcattaacctagtggttgagtttgagatatgataaacctatctaccttaagttgcagagattatccaaagaatgttgaatgtgttcttcaagtagattatatgacaaatcaagttcaacaac

SEQ ID NO: 2108 - DNA, 354 bp, Glycine max
  unsure (1)..(354): unsure at all n locations
tgagatgaggaagtgttgaagggtgaatcttcctgcntttatttgtgaccacagagtggttctctggagatatgtcgcgggggtcaagagaccttggggacgtcaagtggggtgctattgcccaaaaccaagcttgaccaatcccgacccaacccgggcatagtcggtcagtgagaacctgtgatgtacctaaacaggcgagctcctggcagtcaacagataaaaggaacaaagaccacaaagcaaggaggcttgtggtggctggccagctgtgaattttgtgtgatatgtggattatggcctctggtaatcgattaccaagggtgggtaatcgattacaaggcttaaaattga

SEQ ID NO: 2109 - DNA, 178 bp, Glycine max
  unsure (1)..(178): unsure at all n locations
agcttggttcgaggtacttacccgttgaagatctatgaacgangaagaacgaatgaagaacgtctaataacggttcaaacctttgctagattcctcaccgaagactatacggaaacattctttaagcgcttaggctaacattttgaacacgcaatcaacttttattactgaattctaa

SEQ ID NO: 2110 - DNA, 197 bp, Glycine max
  unsure (1)..(197): unsure at all n locations
aagctntgagctaattcgaacgacaataatgtttggctcggatgtcttattgagtctcgcaagactatctagacactcgtaattgaatgttgaagctctcagcaaattcaaacgatcataactttttactcggatgtcagattgagtcccgtaatacatcgagacgcacgaaattgaattctgaaactgctgagctt

SEQ ID NO: 2111 - DNA, 426 bp, Glycine max
agcttgtagcaaattcaaatattaataactttttactcggatgtccgattgtgtctcgtagtatatcgagacgctcgttattgaaaacagatgctcttagacaattcatacgacaataaatttttactcaaatgttcgattgtgtcttgtaatatatcgagacgctcaaaattgaaaacgaaagctcgtagcaaaatgcaaccacattaacttttaactcggatttccgattaagtcccgtaatatatcgtgacgctcgaaattgaaaacataagctcttagaaaattttaacgacgataactttttactcggatgtccgattggaacccgtaatatatcgagactcttcaaattgaaaacagaagctcctatcaaattcaaactacaataactttttactccgatgtccgattgtgttccgaagt

SEQ ID NO: 2112 - DNA, 332 bp, Glycine max
ggacctatagaatctaagcttcgttttaattacgagcatttatatataggggggttattgacatccgagtaaaaagttattgtcgttagaatttgctcagaccttccgctttcaatttcaagcgtctcgatactttacggaattcattcggacatccgagttaaaagatattgtggtttgcatttgctttgagcttccattttcaatttcaagtgtctcgatttattacaggactcaatcagacatttgagtttaaagttaatgtcgctgaattttttacgagttttccgtttaattacatgcattctgatatataactggactcattggga

SEQ ID NO: 2113 - DNA, 419 bp, Glycine max
  unsure (1)..(419): unsure at all n locations
agctaccattgatcaatttcgagcgtcttgttatgttatgcgcctgaatcagaactccgagtgaaaagttatgaccatttgaattgctcaagagcttacagtggtcaattactagcgagtagatatattatgcgccagaatcggacctcctagtgaaaagttatgaccatttgaatttcttgagagctttcgttgttcaatttcgagcgtttcgatatattatgcgcctgaatcggatctccgagtgaaaagctatgaccatttgaatttctcgagagcttctgttgttcaatttcgagcgtctggatataatatgcgaatgaatcggatctctgagtgaaaagatatgaccatntgaatttctcgagaagcttcgttgctgaattttaagcgtcttgatataatatgcgcctgaatca

SEQ ID NO: 2114 - DNA, 180 bp, Glycine max
  unsure (1)..(180): unsure at all n locations
agctnntaatgggaccatgtcaggtcatgctatttgtgtactgtgtgtggacgtgagcccagatggtgcagccattgctacaggttcaagtgatagatctgtaaggctatgggatcttaacatgagggcatctgtgcagacaaatgagcaatcattcagaccaggtatggtgagtcgcat

SEQ ID NO: 2115 - DNA, 461 bp, Glycine max
tctgagtcacctgcggcatgcaagcttcaagaaaaagatggcctcagcaaatttcttatttccagaagggaattctatcaatagacctccaatctttaatggagagggttaccactactggaaaacccaaatgtaaatttttattgaggcaatagatctaaatatctgggaagccatagaaatagggccttatatacccaccacagtaaaaagagttacaatagatggtagatcatcaagtgaaagcataactatagaaaaacctagagacagatggtctgaagaggatagaaaacgagtacaatacaacttaaaagccaaaaacataataacatctgccctgtgaatggatgaatatttcagggtttcaaattgtaagagtgctaaggaaatgtgggacactcttcgattaacacatgaaggaactacagatgttaaaagatctaggataaatgcactaa

SEQ ID NO: 2116 - DNA, 103 bp, Glycine max
cagtgtacctgaagatgctattaagcttagtctgactttatttgcttcatctgttgaggccaagagagggttgtgttcaatcaagggcaacaatttaaagacc

SEQ ID NO: 2117 - DNA, 434 bp, Glycine max
agcttattccgaggacagtttattatcatgcacagccttttacaattggctcaccacaggccaattataactatggagcatttccttgagcgagtagcctggcctgaagctcaacctccattggtgagacccaacgaggctactccacctgagcccacacctgcacgggttgaaccagtgccaactgatccacaatctccagtggtgaatccaccttcttctcctaagcttgaagtagttcccccatctccacctttgattatcatctccgattccccatctggagaagctgctgctccccctgaatccccatctggagaagctgctaatcttttttattccttatctggagaagctgttgctctctttgattcccctatttttccatctgatagatgaggaggatgttaagactcaggatacccaggacctgt

SEQ ID NO: 2118 - DNA, 461 bp, Glycine max
acactatgaaactcagcttacgctgttcaatcgctccaggttgctgcatggaagggcatatgtctgtatggtgtgtcagcagaggagcacaattcacaaatccttgcgacaggtacagatttctgattcaaggccagctgggttaccaagttgaccaacgcatccagtttgccttcaagcttcttagtttcagatgatgcagatgggtttgtagctacctcatgcactcctctaatgactatggcatcatttctggcactaaactgctgggagttggaggccatcttctcaattaaatttctggcttcagcatgagtcatgtttccaatggctccaccactggcagcatctatcatacttctctccatattactgagtccttcataaaagtattggagaagaagctgttctgaaatctgatggtgggggcaactggcacatagtttcttaaatctctctca

SEQ ID NO: 2119 - DNA, 410 bp, Glycine max
gcttctccctctattccctataaatagggtgaggagttgagagcaaaaactgattgctcatactggaacaacatctcatatggatgaatgagtcgggcatactttaatcgtaagcactgaaaatggaagtgttaaagtgacatgcccgagaaaacaccatatgctaattcaccatgcattatgtaccatgttcaattattttgtttttaagtgaaacgggtttatgatcccaacatggttggctcatggtgcctaacacatgaaactaagaatgtagtgtgaaatttcacgcttccccctttttttgtttttggtttgtagaggaaaacgcatggatgagcaaacatgaaaacaaatggtatgcaattttgcagaataaaaagtttgtgaacgcatatgcatgatgatgc

SEQ ID NO: 2120 - DNA, 466 bp, Glycine max
  unsure (1)..(466): unsure at all n locations
nttaccagtgcatctagcaaatctacacctatcccaagaagactcccgcctctcttgtgaaacctccaggcacaaatgtatgtgagagataaagccattagctacccttttagactgcacatctcaagggtcaccagtgtcaagataattgttgataaggtatgtccatgactacctatttgggatgctgccaaaaagaaagggttcaaggtgtactacactgaagaaatgctctcaaggcagatgaaggtggaagtagtcaactacccccgcaattggagttccttgtttagtgggaagaagcttattcatgctcttgatgattacgatgccaagaccctctggaatcaaattgtgtcgacagacactctgaaggcctccacttctggttatgatagaagttacaacacttagaactacgacttcattgaagtgctacgtncaattcggaactattacttcgttg

SEQ ID NO: 2121 - DNA, 413 bp, Glycine max
ctgctcattaacctattttctggtcaaggcttccagctgagcaatataactgacggtcaacatatgaattttggcacttccaacctgtatacataactagcctatagacattgatattatctacctcaatcgcgtataactgcctcttttaaatggctcatagacttcaatcatcgatgtgaagcttaggaaacaatgtctgcagcactgaagatagaattagatgctgcagctgcatttatgtccacatcttcgcgcgaggaaattcgtgctcattatcttgtaagtacaaaacgtgctgtgtacgatcggagttccgagagaatatacaagtacgaatgaacaaatatattagtaatgaatgcgctagacaaatctctcggcattcggctcgagtggaagttgatcatgtt

SEQ ID NO: 2122 - DNA, 453 bp, Glycine max
gctttacatcccatatcgtgataaaatcttttgtataaatagttatgttgaggttattataatgatgattcaaactatgagtatgtgataaattgaacatgtgacggatgatgaaatacatgtgtattgagatgagatgtgtgtattgagttgtgaactatgaactgtgcaatcacacaattgtaagaccctttaaggacgacgagtattgtgatgggatccactgtgggaacccgacgagttaaaatgattttgaaagcaattgagtaaatgtgtgtattgcatagttcatagataaagtgtatatgattcatgaggtgtgataacatgttaaatcgagattataccattgtgattgggattaagtgtatgtgataaattgagtatgtatatgactgatatatatatatatgtgcattgaagtgttgtgtgcatcgagttgtgaactatgaa

SEQ ID NO: 2123 - DNA, 382 bp, Glycine max
accaaccatatggatacaaggtcaatcatgtcaccgaatatggagtttgttacctctttctggccatgcgcctaagtttgtacaactttacatttatgatatagaaaatgagatacataatcggattcaatcaatcgagtatgtataaaccttctgataacaataattaaaattttaatgtagtttattctattatcttagtgttagatactatactagcaatgccttaatggtactttaattaatgtaggaaccaaaagaacatcgatgctaaaattgtgtctaagttatcagccatgctagatgaatacaatgtacatggaaagttctttagaatggcgaaggatagtctaataagtgaacatgttcatgatctaaaact

SEQ ID NO: 2124 - DNA, 155 bp, Glycine max
  unsure (1)..(155): unsure at all n locations
gctatgtttaaatcttaacagtacaatcatacacttcaaacaggatgtgcttcctcaaactgttatattccacataacactaactatgttttggtatttctgtaagcttcttcaccacnatagtcctgtttttgccgcaactgataaatgaatat

SEQ ID NO: 2125 - DNA, 373 bp, Glycine max
agcttgccttgccccttgatatacttgtggttacttatggccactatgaatgacaaaatccttgggataaaggtagtgttgtcatgttttcaaagaccgtactaaggcatacaaatccttatcataagatgaatagataaaggcaggaccacttaacttttcactaatataaccaaattggatggccgttttgcaacaacacaaccctcatcccaacattggaagcatcacactcatatttcaaagatttgggaaagtttggcaacgcaacgtatgggggcattagttagcatttgcttaagaacattgaaagctccttcttggatctcttcccatgtgaaaccaacatttttcttgagcacttcattgagag

SEQ ID NO: 2126 - DNA, 429 bp, Glycine max
  unsure (1)..(429): unsure at all n locations
caaatattatggtgtgcgcttgttgtaacatgttatgnttgctactgattnttaattctttgaccctttgaatgaccaaattggctttcgatgtcttcatgagacttgtagagaattttatcctttacattcaagcactggtatcatgttatttggaccattacaacataatcaatccttaaagcattgcagttttgttatattgtgaggacaaactgacatctctatcttcatggtcagtttcttccaagatccaagccttatttgcccatgacttctccataaaagatatatatatctttctcttagctttctacaaccactgagatcatcccaaattcacttgtgtagctcaagtagttgtcaaattattgcacacatatgaaactgtcaaggcagaccagcgtctttaacttcaggctcagtttt

SEQ ID NO: 2127 - DNA, 433 bp, Glycine max
  unsure (1)..(433): unsure at all n locations
cacctgcggctgcagcttgaattatatcatataacctttaaaacaaatacatttcaatgtgcccctccgcatgaactttctatcactgcttggggaccacaaaattgttgatcaactactganatgatctcatcttctactctgggcctttggggtctttctatttattcttccttaaggtacttagtttgggtcactcttggatnggcattnggcactcatgaggtgctccacagtgcaccagagaaggtatcttactgaaggtacctacaagtggcaaggtccagcaccaagtcttaggaatatgtgaagagttagtttgccacttcaattgcaccacgaaaaccaaaaataacaacatcaaatggcattttagttgttgatctatttaccatctttttaagttcacgtcatagttctccatcatgaatat

SEQ ID NO: 2128 - DNA, 466 bp, Glycine max
  unsure (1)..(466): unsure at all n locations
gacactatgaatactaagctntcaaaaggcatccatatatttagttgtctcattagttatttattcgaattcaataatacaccagaccttttttctaattgaagctttatgcgcaagcttatcaatggtgtactgttaatacatttctaaacgctccttatattatgttacgtagcgtctggataaatattttaaaattttaaagtaattataatggatggaaatttaattactttagttatatcttatttattatatattatttaaataaaataatttaaatttctttgatgttaaatattattatgatatgtaaaataaaattaaatattttttatcaagctcaggttcattcatcaattcgtctctaaatgaagtgagtttagttttcaacctatctccaccctccttaaggtgggttgagaatacataaagatggattggtcactctaccacactagtatga

SEQ ID NO: 2129 - DNA, 452 bp, Glycine max
  unsure (1)..(452): unsure at all n locations
ttcttgtaagcaccattactatcaccatcgaactaacatcattaatcacaagcctttgtcataactggagaataccaacttgcaaccggaaaaattaaaaataaaacaaataacccgtgcaaagaaaaggagaaaaaggaaaaatcaaaaaagaaaaagagcaagttttctatcacaaataattatgtgtcgttgacggtggtgacgtttcaatttttttctttgtagtaccacagatctagaaacaaaaagaacaaaggccacatatctggaagcaaacatggcgcgactttgaagatagaaagatgcgaccatggactccgttgttggtggcggtgagcgggagcaagcgaaaaagatagagagcgttgtgacaagaaatagagagagcaacacggacttggttngtgtgatctaaaatggctttaccgtgacagtggtgacggtggtga

SEQ ID NO: 2130 - DNA, 429 bp, Glycine max
agcttctcacgcccttgacattcatgggatgtatgaagtttctcaatcacatcaatctttgccttgtccacctctatttcccttattgaaatcttatgccccaacactattccttcttgaaccatgaaatggcatttcacccaattgagaactagattggactcttcacatcactgtaatactctttcaagattggataagcacccttcaaaagatggcccaaaaatagggaaatcgtccatgaaaacttcaatgcatttttccaccatataaaaaaaaatagccatcatacatctctgaaatgtagctagggcattgcacagaccaaaaggcatgcgccgatatgcaaatacaccaaaaaggcaggtgaaagcagtcttctcttgatctttgggatctacaacaatctaattatagccagaatatcca

SEQ ID NO: 2131 - DNA, 448 bp, Glycine max
  unsure (1)..(448): unsure at all n locations
ngtcgtgccatcactgttccagcccattctctattccaggcttataatcatctttcagcataactcgagataccatcaaagaggcaccaaacaaatgtggttgtactgaaggagactcgacataagcattattcacaatttccaatgcttgaaaggatgtttctagcgactcctccgcaacttcaacataaggcataaaagacagataactcactagtatgtcctcttagcccgacactataactagctgacccccaccacaaacttcaatttttggtgcaatgtcaacagaatggatccaaatctgacctaacaagcaactataggcggngtttatgtccatcacttggaatattatctggcatgtgtgtggcccaatctgattcaggagatcgatctcttctctcacaacacaacgactaccatcaaaagcccttaccaccatgga

SEQ ID NO: 2132 - DNA, 426 bp, Glycine max
  unsure (1)..(426): unsure at all n locations
agcttgtctcagcgtttatgctatacggatactcaacatgctagctatcatcgccaagtaccaagaagagttaggtctagccacggcccacgagcatagaatcgcagatgagtatgctcaagtatatgcggaaaaagaggctagaggaagggtgatcgactctttacaccaagaggcaacaatgtggatggaccggttngctcttaccttgaacgggagtcaagaacttccctgcttgttagccaaggccaaggcgatggcagacacctactccacccccgaagagattcatgggcttctcggctattgtcagcatatgatagacttaatggcccacataattagaaatcgttaggaaacttgtatggtctctcagaccttgactggatacgacttcctttntgaaataaaatgagttggtcccat

SEQ ID NO: 2133 - DNA, 300 bp, Glycine max
  unsure (1)..(300): unsure at all n locations
taaaaccaacttgtgtaatcgattactgtaaggttataatctattaaaataaagttttaacaaatgaggaaattttctaactntagaaactntctccttactcctgcatgatgatgcataatggatatatgaaatgatagagactaagatgcaacacaccacacaacaatcaatacaaatgtcactcaagagagttaggcatgtaaaagataaaacttgttcaaggttcaaggctaagtcttcatgttactccccctatctctaacatgatgcagccgctgttgtcgccaatgacaaagc

SEQ ID NO: 2134 - DNA, 424 bp, Glycine max
agcttgttaagcctcccagcctggacaagtgttgtccgggctgcttctgttaagttgtcctggaggacatactttttgttttgcaggcgaggtttaatgtgtcaagtgaggaaagcctctgtatttgacaactctgttcttttttgacagttggagaacacattgaagacaaatgttatgttttctccattgatacaggcctgcgtggcgcacacacaacactcatgcatacgtgtcactcgtggagtgggcacgtactggagacgtgatgatgtaagctccattggagcttgttttcctaggatcttcttcatcaatggattcctttgtttcttggaagatgaatggtagcggaatggagaatgaagagagagaggagacgccacttctaggagaagatgagtctagaataaactcactacca

SEQ ID NO: 2135 - DNA, 422 bp, Glycine max
  unsure (1)..(422): unsure at all n locations
ggttctatatccatagaagttgggcgcaatagcttgctgctaacatgtatnttgcttcagtagtggataatacagttgatccctgcttcttgcatatccatgtgactaagtttccttctatcaaaaggcaacttccacttgtactttttctttctactttatcactaacatagtccgcatcacaatagcttatgagcctgaaactttcccttcttttgaacaaatgaccaagggtaggagttccaattaaatatctaaatatacatgtaactgcaattaaatgaacttcccttggttcctcttagaatatagcacataagcaaactntgaacgttatatcatgcctaaacgtagtaagatactgtagtgagccgatcattgctctgtactgggtcccgtccaccttcgttgattcctcgttc

SEQ ID NO: 2136 - DNA, 441 bp, Glycine max
gcgctcgagaaacattaatagaattatatttgtctatatttcaagtacacatttaacatttttttctctaaaattaaacttaatgggcttctagagcaaaagagagtttttcaacttcaaccaaataaagaaacttcaaagcattgttctttgtttgtggtaactttaattacaaagcatacacatatataattaattttcaattaagaaaaatcaaattacctcttcaaacaatgtaacataaaagataaaacaaaccacaaaaaataatcatgaaaggaagagataaatttatttccaaccacacatatcaaatattcatttaatgaatgtgaaattacaaaactacccctaatacaaaaactagtctaggtgccctaaaatacaagggctgaaaaatcctacatttctagggtaccttacctatattatggatcccta

SEQ ID NO: 2137 - DNA, 428 bp, Glycine max
  unsure (1)..(428): unsure at all n locations
agctngaaggtaaactagatgtcttggttaacttggcttattaactggccatgaatcaaaaatctgcacctgtcaccagactctgtggtttatgctcctctgccgaccaccacacagacctttgcccttctgtgcaacaatctgaagcaattgaacaacctgaagcttatgttgcaaacatctacaatagacctcttcaacctcagcagcagaatcaaccacaacagaacaattatgacctctccagcaacaggtacaatcccgggtggaggaatcatcccaaccttagatggtcgaatccttcacaacagcagcaacaacaaaaacagccttattttcagaatgctgctggcccaagcaaaccatacgttcctccaccaatccagcagcaacaacaacaacaacaatagccccggaaacatcaaaca

SEQ ID NO: 2138 - DNA, 380 bp, Glycine max
  unsure (1)..(380): unsure at all n locations
acactaaggcttagggtttatttccctattcagatcgaaccattgtttcaaggattgttattttatcaaatcatgcgaatatccgaatctattntggcatctgggaaattctttcattgtgctcaccctttagttgcacattcattctttttcaaaaacctttccgtgttttgatccgtgaatcttccaaagataactggcggtcattctttttcaaaagtctgttggcttattagattgctttctggtttttttcctctttagaaagaatttgtaatctgaggaacaaaatgcgtgtaaatgaaaactatacacaaggccctattttttttctacttacgtttatttattcggacacactataacaacgcaacagtatg

SEQ ID NO: 2139 - DNA, 317 bp, Glycine max
ttgttgttcagggatagagggagaataacaatgtccgactgctgcaatgtatgggccctactgataactaatatccgacctaggacacatttctttaccaacactggtcgggaggtgggttattaacagaaaggaggagccttcattcctaaccatccaagacaagagtgaatccacttcttatagtgagaaagctagaaagttagagagccgctttgagagagaatataaatagtttgggaagtctctatcctcaagcttgagtgaggcactgtagagtgagtcaattttgtaaacacattcttgtaaccctacta

SEQ ID NO: 2140 - DNA, 456 bp, Glycine max
  unsure (1)..(456): unsure at all n locations
gcttctatataagctgaaccattttatcaataaagacaagttgagttttattcagaatttttgagtttatctcttttatcttagtgagagtgattctcctaaattcttgagtgattcaagaacaccctggctgtatcaaaggactttcacaacctttgtgtgttgccctcgctggaaagagtgattcttttcttcctttcatcttcacccttgttctttcaaaccacaatgccagaaaattcacctctgcccagaattatctcgtggccataactcccattttacgcactcaaattaagtgattcttgagcctaaattgaatttcaaaacgagacctttcacctcgctttggaatcacctcatttggagtcctgtagcttcagttattgccatttctatanttctgttcagccatcacttaacctacgttttaccatcccattcatgcattttatg

SEQ ID NO: 2141 - DNA, 428 bp, Glycine max
gcttgtatgaatatcgaggatgggattcatatgcagtatacccaaaacatcgccgttttacatggggacttatagcagctgaggtaattgcattaatctgttcattcttttctaatcagattgccaaattttcaaatttgataaaatattcaggatttcttgatatgcatttgccatggaggtgaattatatagtgtgttttctcatagaatatactttgcttaaatgaactgttgagagagaaacaaaaaagaggcgtttaccgaactgtatgtagattgaataatcaccatatatatttgtctagtagttagggcattgatcataacataaggtatgctccgatatgcaaatacactcaaaaggcaggtgaaagcagtcttctcttgatctttgggatctacaacaatctaattatagccagaata

SEQ ID NO: 2142 - DNA, 351 bp, Glycine max
cagctgcacacaaattatatgaaatactaacacttaatgtcttagatacagttctactaaaacgataaggctaacagagacgtccctatatatctaacaaacttaaatatacgataacttaatatgcccttgtctgtgcttatatacaaatccgatagtaccttgggcatcattggaattcatcagaatccagattttattggttggaaagcagtttggctggcaatgcttgtatttatgcagacaaaaaaaagaatttgtttagtgacatttgaattagaatatggataaaaatagatcttcagttctagtttttgttttaaagaaaaatgagatctcaagtccaatgat

SEQ ID NO: 2143 - DNA, 434 bp, Glycine max
agcttgagctcggctggagttgaatacgtttagcttgagttgacatagggcttttttaaggctctgctcgacttacataaaagtctgacttacgagcctatttaaaagcttgcttaaagacgtcttttattaattaattattttaaaacctagtgaaatactaactaaaaaaagaaacttataaaatttcgtataaataatgtacaaatctaaaaataattgataaacaaaattatattgaattcaagtcgttaaagcacaaagtatataaaaaaaataaaaatagcataatattaaaaaatgtatggattagagatgatttacactaatatagccaaacaaaaattattattagttaaattaacaatttttaatccaatttttttaatatataactatattatatagttttaaaaaaaatatatccacaataa

SEQ ID NO: 2144 - DNA, 427 bp, Glycine max
  unsure (1)..(427): unsure at all n locations
tgtgaaagaatgtggaaacctctggaatattctagagatgtgtgaaaccttctggaacttatgaaanagtatggaagagagtagaaaagtgtagagactcctagaatgtgtggaacattctagagaattagtctccaccctaggatacaagtaatctccaccattcattgtggaggtggagtagtataaataagggtaggagccttcattcctaataaatccaagtagagagtctctctgagagagaagataaatagcttgggaagtctttatcttcaagcttgagtgagccaccgtagaatgaggcaatccaagtagagagcctctctgagagagaagataaatagcttgacaagtctctatcctcaagcttgagtgagccaccctatggtgactcaatccaagtagagagcctctctgagagaga

SEQ ID NO: 2145 - DNA, 341 bp, Glycine max
  unsure (1)..(341): unsure at all n locations
agctnggactcaaagagaaacctagaatggttctatagtagagtgaaaaaacaaagaaacaaaaaagactcaggaaacctctagttttggcacttgttttcacactacttttcaattgaaatttcaaaactaagattggtataaaattagcaccaattatagaacaaattttgagccaaaacaactagcacacttccctttcactttttttttcctgccaatgtgtgtgatttttcttattttttccttttatccaaatcacttggttcaagagcaagaataagaaatttgaaccatagaaaattaaatctatgctttatagcatgtttaaaaggtggaaa

SEQ ID NO: 2146 - DNA, 437 bp, Glycine max
cctttgtcactccatccatattggccttgacattaactagacttaacaccgccgacaatagcgtcaaggaattgttgcaccccggatacaaaggcttctttgagtcactctacaatctttcatacacaagggcatgtgcttgctggaaagactcttgtccaaggtcacgaatcatatcctccaagcgatctctcatttctagttcaaacggttcggattgctgcccatgctgcatgtctgtcatttcaccatgccatatccacgtcgtataatttctcttaattccatcacacaacagatgctcttgtatgtcatccagtatttgtcgtcttccattcaaataattgatgcaaggacaataatattttccatcttcatccggttgacctctttctgaagcaaattgttagaattgctcgacgccttcctcatattct

SEQ ID NO: 2147 - DNA, 312 bp, Glycine max
agcttgagaatacacagatgatatatcagcttataattgcatgctcttctcttactctcccttcattcatctacttcttcctccgagctcttatgcatggcctcatatggtggtgagcttcttctacactcatcttctccttgaagcggcgcatcctgtatgtgtagcttcttcaatctgcggccgttcacttttccagaagcaaacgagaccattgttgatccacatcctaggctctacaaacctcaatggagctaacgccgctatgagagataccatacctctatagggaagtccttatccacaaacttg

SEQ ID NO: 2148 - DNA, 451 bp, Glycine max
  unsure (1)..(451): unsure at all n locations
ctagcttcttaaggaagttttctcaaagtaagcttctcaaggtagttttcttaagaaagcttctcaaggaagttacctagtctataaataaaagcatgtgtaacacttgttataactttgatgaatgagagtcttgtaagacacaactcacagttcaacttctctccctttgtcttccttcaatttcgtgctccctcctctctttcttttagcaaatgctcacccccccctctaaaatttaattggattgggcttctcccaattcaattaaatttattttcaaccacacacatcaaatattcacttaatgcatgccaaattagaaaactacccctaatacaaaagactagtctatgtgccctaaaatacaagagatganaaatcttacatctctagggtaccttaactatattgtggagcccaaatacaatgcccaaaataatgaaacctt

SEQ ID NO: 2149 - DNA, 528 bp, Glycine max
  unsure (1)..(528): unsure at all n locations
aacccaccacaccctcacacnnccaccctctaaaactaaagaccaacaataatatgtgtatctgcgtccaanaccngaacacagcacgacccgcagcangcaaccngngagaaccacgagaagattttggttatgtgcggaaccccacggaagaggatgaaagggagtatacaaagagagagaccgccacaatgtgcggagcactccagaggaaaaatctccaccctaggagagccaggatatccaccatccagtggggaggggcgagagaaaaaaaaaagggaggagccctcattcctaaccctccaagacaagagtgaatccacctctcatagtgagaaagccagaaagttagagagcccgcttgagagagaataaaaaaagcatgggaagcccctatcctcaaacctgagcgaggcacacgacagtgagacaatttaggaaacacacccgcggaaccacaccaatcctttggagagaggaagaaaccccacacgggggaatataaccggcgcccccaaccacccc

SEQ ID NO: 2150 - DNA, 413 bp, Glycine max
  unsure (1)..(413): unsure at all n locations
cgttgaaattgccatgtttggatgagtttaacatacccatncttgttttagggtttntgtgatgatgtttgngatgtttatatgctgaaattgctgatggaaatctgttagagacgaagggtagaactaacctacggctagaaaatgagaatgtgatgttatgagtggaaaaagagtgagactttgagggttggaaggctaagtctgaatactgtggtaaatggaggttaaagtgagttaatactagcttgaaatgtcatttaagacttatgagatagcttggactgtgctagagagataaataaatgtaccaagtgaacaaagagccatctttagggcatatctatgtgttgaagagtcaaattttgatcttgtgagattttatgtgttaatccagctgtacaagtctaatt

SEQ ID NO: 2151 - DNA, 344 bp, Glycine max
  unsure (1)..(344): unsure at all n locations
aaacccctcaattcaatggctcttctaggtttgaaaggtgaaatttagaatgaggtaaatttgaagcaaactctcacctcacaccagtccataacatctatttagacttgttcaagctggatttacacctaaaatctcaccgaatcaaaatttgactcttcaacacccaaattntgccctagaaatggctcttggttcactctggtcatttgtttttctctctagctcagcctaacctttctcacatgtcctanatgacatttcaagctagtattaactcactttaaccttcatttaccacagaattcagacttagccttccaactctcaaagtctcactcttt

SEQ ID NO: 2152 - DNA, 444 bp, Glycine max
ctgatcaaagtgttgtgtgagtgtaaatgtttttatgggctacgtggcacagaagaagaaaaataaagtgaatgaagctaaacagaaaagtaagtggtggtagctagtagattaaaattcgacttacaaaatgaaggtggaagcaatttttattatgttaaccttattaagtgaaattttgcggatgctatcccggcctggtcccaataaaactcaattagtttttaatagccctttttgcttgtgttgagtttgaatgacctatgatatccaggcatattatccccttcagcttctatataatccaatagttaacaactcataaaagaaatccactagttaagaatatatatattattcgtctgatctaaggtacgtttgtttaagcttaaattaacagcttacattcagcatgcatgcacattttcactgtaaaatatatta

SEQ ID NO: 2153 - DNA, 261 bp, Glycine max
agcttgaagttgcaatagtgcttatgtttcttgttttagttactccatattgttgacaattaacttgggtttctacctttgtgatcatttagtttaatgtgctaagttgtttcaagattggtctttggcaaatgtgtacaaagttagcacctatcactttctatatttgttgctgaacagaccccactattaccccttactttttttatctttccaactttacgaatatcttattctttcctctcatcctaatcctctttt

SEQ ID NO: 2154 - DNA, 389 bp, Glycine max
  unsure (1)..(389): unsure at all n locations
ngtcatctgtgagacatcagatgctagtattttaataaatgttggtaagaaaaattcaccaaattgatagagaaaaatctaaaatcatacatcttatgcaaataaagcatgctagcccccaacattattgcattatgattccatctgtagacattcaaattgttgcttatttttcctgttatctattcctttgccttaggctaaatttcaaacttacaattcggatctctctcttctnttgtttctcctcatttcttaataattgggatttgcatcacttaagtacaaccaaagtccctctggatttaattgttgacttcaattcaatctntactacttgtgataaaattatgacactctgcaatctattaacaagttttttgcgttgt

SEQ ID NO: 2155 - DNA, 405 bp, Glycine max
agcttgcatcatgtttaaatagtaagtatattatattacaacccttagttttttttaggtcttataactgttagtctttaaaaagttgtattttcaggtagtattgagttcaatctttgacaaaaataattttttatcatactttgtttcatttcccttgataaatcggaggattaaaaaaaatctataactgctatcttttttaatagttatgatattttattcaaaaacaaggtctcaataaaagaaagaatactttcaaaagtacggtattttcatataaggggaaatactgctaattattattattatggcgaatgagaattttaattattatattaaaattaaccgttcacattgtgtatataattgagaatctcttgtcataaaagtagaataaaatca

SEQ ID NO: 2156 - DNA, 253 bp, Glycine max
  unsure (1)..(253): unsure at all n locations
cttgaacattatactcncttcatttaattgtctctgggcttgtttgtcacgctcaacaaagtacttgcgacacctactatacgtagatttgaccaatgttgtgatgggaatgatgcgacaatccatcaaaacactattgatacattctaagatgttggatgtcatgtggccatgtcgacgaccttctttatcattatccatcgaccattggtcctttgaaatgcgatctatcattgaagctatggctggactc

SEQ ID NO: 2157 - DNA, 117 bp, Glycine max
agcttagaagccattcttagggcgctacatttatgacaatctttatagcaccaccctcactctgaataatgatatgaataacctaaaagtatttctgaagtgctagaggaccagttg

SEQ ID NO: 2158 - DNA, 257 bp, Glycine max
  unsure (1)..(257): unsure at all n locations
agcttctgttatcaattgtgagcgtctntnatattattggactaaatcggacatccgagtaaaaagttattgccgttcgaatttgcaacgagtttgttttttcaatttggagcatctttttatattacgggactcaataggacatccgagtataaagttattgttgtttgaatttgctcagagctatggaacttactttccagtgtctccatatattaccgaatttaatcaaacattcnactataaaaccattgccc

SEQ ID NO: 2159 - DNA, 439 bp, Glycine max
agctttctcataagtcctaaatggcatttcatgctattattaactcactttaacctccatttaccacagaatccagatttaaccttccaactctcaaagcctcactctttttccattcacaacaccacattctcactttctaaccccaagttaactctacccttcatctctaacagtttccataagcaatttcagcacatgaacatcacaagcatcatcataaaaaccctaaaacagaatgggtatgtttaactcatccaaacatggcaatttcaacatgctttcaacaagtgtcttcacaaataatcatcacacagcagaaacctagcaagactacccatcatatctcccaaaaccccatacccacgaaatttaagagagaaagaagtccacccaaacctgaattttcgaagtcccactcgtagccacgcacttcacg

SEQ ID NO: 2160 - DNA, 459 bp, Glycine max
ccgctggagctgacccatcaactgccctaactctttagactggtgatccctattctcttgaccttgacttgatataacctctttttaagcgaaggcgtttgactcaatcccatgttttactaaagtgaaactaaatctagcgcgaatcaaaactccgacatgtatcatgggtggaatggatgaatgcatgaagaaatgcatatgacacaaatgcaatttatgaatactggagcccaggaaattgtctcctttttagatagaacgtctcggggttgcacagtgcccgacatatgtatttaagaaagtgacacagaccctccgttggtattgccatagagaggggatcaagacagaactcatgcatgatgcatatgctaaaggcacaacacggggatgtacataattttcacaaacaaatattatcataatggttcatgacacttatgactacattcatgg

SEQ ID NO: 2161 - DNA, 436 bp, Glycine max
agcttgaaggcatgtaacccaccatcttctcttagtatatcataggtaacgtgcccattatcattgttatcatttccctttccatcattgtgggtgctacttgagctgccagatccctctacctttgggcgtattctttgaaagattcatgtgccctcttacacatggtctgaaactgcattcttttcggagccatatctgaatagtgctgatattgcctaacaaaggcagccattaggtccttccacgaatggactcgggaaggttccagattactatactaggtgatggctgccccagctagactatcctggaagaaatgcatagaaaagtgttgatctttttcgtatgccttcattttcctgtagtacatcttcaagtgattcttggcgcaagtagtccctttgtacttattgaaatctggcaccttgaactt

SEQ ID NO: 2162 - DNA, 458 bp, Glycine max
  unsure (1)..(458): unsure at all n locations
cacgatcagcaccgacattttcgtgttgtttcttcgaatacgctcgcaaagattataaagaagaagcagtgcacgaactcacgagtttaagctttctctccttcgtttgtttgatttctgttctagtcgcaaggagtgaggagatttatgagcattcaaatttcggtgtaatgtaaaagaacagaaaaagaaaactcgatcaattttagggtcattctacttttaaattactttcttccctgtttaaaaaatattacatttctgcctaaaaaaaattaaaagtacaaaaagagcatggtacagttatttcggaaacaaaaaggagaaaaaaggggtcattctacttttaaattactttcttccctgtttaagagcttcacaaattttgttgagaggggacaaaataattagtgatatcatatattcaaaanttacatatacattgaatattttatact

SEQ ID NO: 2163 - DNA, 211 bp, Glycine max
gcctgcaagcattctagcctaatggacttaccttgaattatttccgtggatagcccttttgagccttgtttccctttccttgttttgaagctcactacaagccttaagtgaaaaaccatgatatcgccatatccttaaggaattttggagctttggaattgttttgggaataagtgtggggggttttttgattattagacaacttggtttt

SEQ ID NO: 2164 - DNA, 398 bp, Glycine max
tatcggatttgtaatctccatctgattcaacctatccatgttaggaaagcaggggtggaacttgattaataacccacatactacaatgtataaaattctcaaaaataaatattatccagatgtcggattctatgatgcaaaactagggcatgaaccaagctatacgtcgtatagcatttttgcttcacatatattggtcgaggaaagcatatagtgcaaaaaaagtgatggtagctctataaacgtttggactcaaccttgggttcgagcatcaacaagcccatatatcacgtgatcaaccctgctcgatcttgatgatctcatagtcagttcactcatcgacaaccaacaacgatgttggcgtcaagatgtgctacaacaatatttcaatgacaacg

SEQ ID NO: 2165 - DNA, 411 bp, Glycine max
agcttatcacccttaccggcgattgttataatcttttaatggaagtcaagggcatgatagtgcaccgatatcgttaactggtcaacaggttcttgagcgagttgagggcatcaatgttgtatttggaaagacccaaaaaggaaaaaagtaaaacttctatatagaagaaaaggtcgatattgtttgatcttccatattggtccgatctagatgtcagacattgtatttatgttatgcatgtcgagaaaaatgtttgtgatagtgtcatcgacacacttgttaacattcaaggaaagacaaaggatggtttgaatactcaccaagatctagttgagataggtatatgagaccaattacattcaaggtatgatggtaacaaaatatacttgcctccaacttgtcatactttgt

SEQ ID NO: 2166 - DNA, 420 bp, Glycine max
  unsure (1)..(420): unsure at all n locations
tctcagcttcgcagggcctgttacatcccttatctatatactctttctgaccttggtggcttttatctagaacttttccttaaccactcgcgttctttcaaattctgctttcaaggcttgcacttcttcgctctcctcagggacatcagcttcttccccacttgaaatctttagcgtctgtagaagcaaagactttgcctttgatgttttggtgatgccatatgatcgggatgttntgatgccttatgaaaatgcgcttctcaagttaattcaagacaaaaatccaagaatacaagatacaacatcaagaagatctctagtcttttatggagggaatttcaaattgatactgcaaaaagtttggcctgaaatttaagcaaaatgtcttttcaagagattactctctggaatctattacct

SEQ ID NO: 2167 - DNA, 430 bp, Glycine max
agcttacaaatatataataattaataggtctttttcatatatcacaaaatcgaagataacattcaatagttcatcataaaatgttgcatcacatacaaattttgaataggcaacacagctctcagtcaaaatgcattttcagaaattgtgtgttatatctaaaaaattaagattgtactactatcagactgagaaccacactcagccgcatgtcgaaagacctgtgaaagtaatgcaccataagaccaataccaaactggaagaaataacttgtcaattttaaaggtgaacattattataattggattttgctaacaaaataaaaactgaatatcatgtatggctgctcaatcttgaatttatcttaacttacaataagcagtaactatactaatgtgatcaaaggatattttttaatactattttcaat

SEQ ID NO: 2168 - DNA, 432 bp, Glycine max
  unsure (1)..(432): unsure at all n locations
nggactgtgctagagagaaaaacaaatgaccaaagtgaacctttagccatttctagggcaatattgggtgttgaggagtcaaattttgattcggtgagattttaggtgtaaatccagtttgaacaagtctaaatagatgttatggacttgtgtgaggtgagagtttgcttcaaatttacctcattctaaatttcaattntcaaacctagaaaacccatggaattgaggggtgttggacacctagattctgtgttgntgtgctntaaagcttgactttggtttagacatgattgatacatgatttgggacttataggaattgatttgggcaaaattggatgatggaaagtgtgattttcgaaatctgcacttatgcataattttgctgtcaaatatgtgcaacacgattttcggcttttgcatataaatgctt

SEQ ID NO: 2169 - DNA, 323 bp, Glycine max
  unsure (1)..(323): unsure at all n locations
agcttgctagttatctcatgaagatgtacctttatgttaagattctaggctgactgacttctctgctccttgttgaattgattcccgaatgattcctccagcttgagccttgtgtgaaattcctcccttgattgaatcccagcggtcctccttggttatagccttggaatccgtggtgattctgtactcccatgtaattcaagtgcttggaaggatcttcttggactatacattgtcctgngtcgtgcactcctccatatatgtggtatccccctatctgcataactgaaaagtgataacgactcaccactagtagttgttga

SEQ ID NO: 2170 - DNA, 448 bp, Glycine max
  unsure (1)..(448): unsure at all n locations
ctagtcttcgtgtntgtcatgttgctctccctatctctaattatctcccactatttggctttgatgatgtcaaacttaaaaatgacattgagtgcatttggagggtctgagtcttgagattagagtcttgctattcttagtcaatcctaaaaaatcttaacacttaagagaatatcaattcatatcatcatggtcatcatcatcatcatcattgatgcaatcctccctagaaaggtactagtcaccagagccatgagcaagaggcttcatgaggattgtgctagagttgttgaagaaggccttatggttctcatgaatctcacgatagatttttgagcccatggaccaaggttgggtctatttttctttgctaatattagaataggttttccttcttttgggacttgtattttggccaatttatgtttgtatggtaccctacaaatta

SEQ ID NO: 2171 - DNA, 440 bp, Glycine max
  unsure (1)..(440): unsure at all n locations
ctagctactntctctgtntgttggatgaaaggcactgctacttctaaactctggttaatctataatatttacatgtcttatgttaatattggataaccatgggttgttagaattgtgaactgactaatacgtggcatattatctgactttgggcatccatatctgtacttatataatacagatctctttgctcattaaaaaacaaaatactaatctattaaatttttctgcatattcgaataataaattcaattttttcatttttcacaaactaatttattagtgtctcatatttccaggaagtaaaataaagatttatcttatgagcaaatatttgattttagtaaaattagtaagatttaaattttaattctattgcatctgcacgttataattattactactcttctactaattttaccaccataagtttttgttta

SEQ ID NO: 2172 - DNA, 401 bp, Glycine max
agctttgagggtgcgtagccttccatcttttttagtagagtatcgataatgtgtctaccatcacgattatcgtctccctttccatcattgggggtaccacttgtgccgccagatccctccaccttttgggcgtgttctttgaaagatccgtccccctttttgcaaatgttctgtagttgcatcctatccagaaccatatcaaaattgtactaatactgcctaacaaaggcaaccattatgtccttccaagaatggactcgggaaggttccaagttagtgtaccaggtaacagctaccccagtaagactttcatggaaggaatgtatcaacaattcctcatcttttgcgtaatcccccatcttctgacaatacatctttagatggttcttgggacaagtagt

SEQ ID NO: 2173 - DNA, 202 bp, Glycine max
  unsure (1)..(202): unsure at all n locations
tctcatgtgaagtttctcaatatagcttctcaaggaagctactctagtctataaatagaagcatgtgtaacacttgttgtaactttgatgaatgagagtctcgtgagacacaactcaaagttcaacttctctccctttntcttccttcaatttcgtgctccccccctctctctttctctccctctttctttacctccattga

SEQ ID NO: 2174 - DNA, 314 bp, Glycine max
agcttctagccaaatggacttatcttgtttttattcctttgatagcccttttgagccttgtttccctttccttgtttagaagatcactacaagccttaagtgaaaaaccatgatattaccatatccttaaggaattttggagctttggaattgttttgggaataagtgtggggggtttttgtttcatcggacaactcgtttgttggcaatgcttcatgatgtattttgggccatacttgatgtacattgtatattgggtaaatgttggacatgctgaatgaaatgttgtttttcaaaggccaaagtgtggaccc

SEQ ID NO: 2175 - DNA, 392 bp, Glycine max
  unsure (1)..(392): unsure at all n locations
cttgtttgtcaacaatggtggatgggagaaaagaagaagaatgttgcgtgagagagagggagagagagctgtttgaaatttttgggctgagtgaggagagagaatacagctntctggttttaaataaagggttttctctttttctattattttatttaagctatgccacatgtccccatttgagtggagcaaaaagggcccactctctcttttgattgtgacctatactcagccacaaaagtgagaaatatatgacctctgaaacgctaaaatcctgcctcggtatgtgtgccccttctctgattccagttcctcgcgtttctctgcgtccgtcggggtcagttttcgaaagttaccaatatatatatcaaaacgctcagaattaaatccga

SEQ ID NO: 2176 - DNA, 272 bp, Glycine max
agcttcgaaggaaagagagagaccaatcacgtgcacatagcatggtattgaaagaggagttagctgcttgctcaaggtctaaaagaaacttgtctcagcgtttatgcgagacagagaccaacatgtttgccatcgtcagcaagtaccaagaagaattaaatctagccacggtccacgagcacagagtgtgggacgagtatgcccgagtgtacgcgcaaaaggaggctagaggaagggtgattgatccgtacatcaataggcaacaatgtgga

SEQ ID NO: 2177 - DNA, 169 bp, Glycine max
agctttctaaagttttctggttttctaagccttgaatacttgtgctattcatattttcattctcttctcctttggccaaaaaaaattcgccagggccaaccggctggaatttttttaaggctcttctcttccctttcccaaagaaccaaaggccaaccggccggatttt

SEQ ID NO: 2178 - DNA, 402 bp, Glycine max
agcttcaatggagcttgcatcaccaccatcttttcatattataataccgataatgtgtctaccatcacgattatcgtctccttttccatcattgggggtacaacttgggctgccagatctctccacctttgggcatattcttttgaaagatctgtgcccccctttttgcacatgttttgtgattgcatcctatccaaagccattatactggcactgcctaacgaaggcaaccattaggtccttccaagcatggactcgggaaggttccaagtcaggtaatagctaccccagtaagactttcttggaaggaatgtatcagcaattcctcatcttttacgtatgcccgccttttccaacaatacatctttagatgggtgttggggcaagtagttctcttgtact

SEQ ID NO: 2179 - DNA, 276 bp, Glycine max
  unsure (1)..(276): unsure at all n locations
agcatggcctccttgatagaagccatntgatcttttaatgttgataggtcggttttcatctgttcttgcactctctcttcgatatccatcctacttctggatcgagtgttataggggtgccttagcgctactttagttatggtgagttgcctaaataaacaaacagtggtgagtatgccaccaaaacatgaatatgcctatgaatgatcagagcacttggatccacctcaaggactattttagacaatgtgatgagtgtcagaactactcgtttta

SEQ ID NO: 2180 - DNA, 407 bp, Glycine max
tggatcacgcgatgcacctcacacatatcttgccatcattcgacgacacatgtggagaatgggcacatcaatggctttaatgcataggaccagacctgactaactataacgtggcgtgcttgcaacatatccatgacgaccgatgggtagaactaaatggcgaaatgtatgactctctgaacataataatacagatacaatttcgacatctaacgcaaacacatgcaatggacctgcactgaaacatatcgattgtttctgaatcaacgagcatgacacatgatcttctgccaatgctccaataaattataactaagagccagcatttgattctacaacctaattgcttacacgcggagcatgacgcacgtcatcacattcatcttctttctcagatagctacgatt

SEQ ID NO: 2181 - DNA, 313 bp, Glycine max
gagatcctagctgtgtccaatgacactacctgcttcattatgatgaaagaatttatgtctcatgtagcaggcatgtgacttatgtcctgactgatatatcaatcattaatgattgaggactatattttaatcgggttgaatataagaaatttctagacgtaacttttactaggagggggcagtggacatatatggcgtaaatgctcagtcacgtatagcacagatgcctgcccaactgatagatgaattctggaaatgctagccagcacgatcatccagagatatacagatcagtcctggacatgaaattttg

SEQ ID NO: 2182 - DNA, 370 bp, Glycine max
  unsure (1)..(370): unsure at all n locations
agcttgccacccagctcgcctatgcgatcattgttgcttcctccagaagcaacagccttctggagggcccaagtgggcctggttgctatttgcacccccatttttactaaatacaccccctgccttttttttggtgattcttttttccgtaaagttacggaaacttacgaatttcgtaatgatacttgttttctttccgtaatgttatggaaccttgcggattacataatcatccccttttttgacttacggaatgttacggaacctcactatntgtgcaacgatgcttcctttcgattttcggtgtttcatggaaccttacggattgtgcatcaatattttcgtgtgatttccggcacgtcacggaatt

SEQ ID NO: 2183 - DNA, 224 bp, Glycine max
  unsure (1)..(224): unsure at all n locations
ngttgtttatgcaagcggctatatcatcttactcggatgttttattgagtcacataatacatcgagacactcgaagatgagaatagatgctctcagcaaattcaaacgacattaagcttttactccgatgtccgaatgagtctcgttatatatcgacgacacttcgcatagtgaatagaagctttgagcaaattcgactcacaataacttttactccgatgtcc

SEQ ID NO: 2184 - DNA, 418 bp, Glycine max
  unsure (1)..(418): unsure at all n locations
acatatgggtatacaatcttattgtatcatacatgaganaatgatctatttagtgtgaaaaatcttgttcaatttcctctatgtgcattattccatttcacagcaatagatacacattgtgatcgggattaatctgtgacctagtggattgagagatatggtgagctttggcatatgagtaaatgaaaaataattaattgtccttaattgccttagttgcttaaaagttaaataaccacgttattcttaatttgggtccatataatttgttacaaatcatctttcttttattttgaagatntgtaaattgattatcattataaaataatttaacttgttttgaactatcaataggaatgacaattacatactgtaaaagatattttttaaaattattttaggtaataattaaaactta

SEQ ID NO: 2185 - DNA, 385 bp, Glycine max
  unsure (1)..(385): unsure at all n locations
aactcaagctgtgcttgattattaaattcctagtgtatatgagcaactatttgtgtcctactatgacttgataaataaaaggtgatcaaataacaagcaaaaanttaaaagttactaggttgcctcctagtagcgcttctttaacatcttgagctggacgccttatgacttgtcggtcacggacctaatactttgcttacctttggctttggatttggtcgcctattggtcggccgcgtgccgtatgcaatgctctaacctttttgtggatgagctgangtgaactctagaggtggtggcggtgcgtctattgcccgctgccagccctccccaggctgctgtggtgttttgcttgcgcctgtctaggggcgcagtacttcttgat

SEQ ID NO: 2186 - DNA, 291 bp, Glycine max
atgttagccatcatcaataagtcccatgatgaattaaatctagccacggtccacgagcacaaagtggcggacgagtatgctcgggtgtatgcggaaaaggaggctaaaggaagggtgatcgactctttacatcaagaggcaacattgtggatggaccgatttgctcttactttgaacgggagtcaaaaacttccttgattgctagccaaggccaaagcaatggcggacacctactccgcccccgaggagatccacggacttttcagctattgtcagcatatgataaactta

SEQ ID NO: 2187 - DNA, 438 bp, Glycine max
  unsure (1)..(438): unsure at all n locations
tcagctgaaggtaacagatgccttggtaactctgtaacccattggccttgaatcaaaaatctacacctgtcgccagactctgtggtttatgctcctctgccgaccaccacacagacctttgcccttctatgcaacaatctaaagcaattgaatagcctgaagcttatgctgcaaacatctacaatagaccttgtcataccctaatttcgtccggggattataatttgatgatatacaaccattgattgaccgcttcgagatgtttggcaccctntgttgcacaatatgtgaagtcccgagacgtgtcgaaaatcaaaaaggaagcaggcttacgcgatccgtgaaaattccgtgatgtgacggaaatcgaaaggaggtatttttcacaatccgtgagttttcgtaacttcttcaaaagctaaaaaagagtaaatacat

SEQ ID NO: 2188 - DNA, 430 bp, Glycine max
agcttctagcacactccagatatcttctcttatatctcaacggtcagatcatggacaactgtcttgtgaagttgcataccaaatttcgagaagatccaacagttaacgaaggctgggaagcatttttaccgaggcggcttcatgtagctttctcttgaagcttcattaagaggctttctccagaagcttcctcgtggcttctttgagaagctttctcaagaggcttctttgagaagccagatccttatctatccacacccctctattaactaaattaacctccttaaaaataattatggatgaaaataatgcaacaaataatcaaacattaaacataattactaataatatatagatatatatatcagggtgttacaaagtgtatttctctcatatcagacatgatttcaaaatgcacaatgatgagaat

SEQ ID NO: 2189 - DNA, 410 bp, Glycine max
  unsure (1)..(410): unsure at all n locations
cttgcaagctggaatcatttatcctatcttcacagccaattgtgagtcccatccaggtagtttcaaagaaaaccggcctcaccgtgataaaaatatgagaaggaggagctaattcctactcgagtgcagaacagttggagagtatgcatcgactataggaggctgaaccaggttaccaaaaatgaccattgtgcactgtcattcattgaccaaatgcttgaacacctggcagataaatctcactattgcntccatgatgggttttctggttatatgcaaatcactattgcttctgaggatcaggaaaagaccacattcaccggccccttcggcgctattgcctataagatgatgcctttcggcctgtgtaatgtccctggttccttccagcgatgcatgatgagtatttt

SEQ ID NO: 2190 - DNA, 377 bp, Glycine max
  unsure (1)..(377): unsure at all n locations
nggttcgaggtacttacccgttgaagatcgaagaacgatgtttatcgaatgaagaacgtcgttgaacggtcgaaaccttcgtgaaattccttacggaaacgttacggaaacatttcggaagcgcctcggcttagatttttttcacggaaacaattttcccaagcaaattcgaaagagaaagaagtgcctaaggggctcaacccttttccttctcacttcctccnctatttatagaanaataggggagatgcttgccgcccagctcgcccaggcgagcagggttgcttcctccagaagcaacagccttctggaggaatcttctggagggcccaagtgggcctggttgctatttgcacccncatatttactaagtacac

SEQ ID NO: 2191 - DNA, 183 bp, Glycine max
agcttgccgctggagctgccctattaactgtcttagctattttagactggtgatccctaggctcttgaccttgacttgatagaacctctttttaagcgaaggcatttaacttgatcccatgttttactaaagtgaaacaaaatcggcgcgaatcaaaactccgacatctatcatgggtggaat

SEQ ID NO: 2192 - DNA, 415 bp, Glycine max
  unsure (1)..(415): unsure at all n locations
ntgatatatacaattgcactattcataaaatatgagccatgttcagcaatctcaaccttggtgaatatttagcctcgtggaagataaataacaaatccacctcagtctcctgtgttaagggtcctgtcacatctatcatgagcaacattcaacaagtccaagcaaagtttgcacttgttagtttcgactatcatagtcaagatattaactgcatcttctgtagtgtgaaccttccatagcaaaacctggctagatgtgagtaactccctgatcttgtgaaacatcacatcaatatgattggttctcgaatgatacaactgagtctttgtagatcaatagtattctatctattgcaatgcaactgaacaacaactggctcaatgcccaactcattcactaaccctttctaaccaca

SEQ ID NO: 2193 - DNA, 248 bp, Glycine max
tctggcttcaattattcagtgggctctccttccgtgtccaccatgttgcgatgtacccagcctgtgaggaccgctttacaggttctgctatccagggattcgaggaatgccaccatactcgctttccaatattcacagatgcttccatcgagaagagcgggtctgctcactggaccgacttctatctccaggctcagcagagattgactccctatatatcactctgggaatccgagtggtggctctga

SEQ ID NO: 2194 - DNA, 415 bp, Glycine max
  unsure (1)..(415): unsure at all n locations
ntagccttaggttgttccatgttgctcatgtctttgctccttctatctctaacagcctacccctatacctttccttattaaaagaatgcacatgaaaaattaatcgagttgtttcccacttctttcttgtccaacatgtgctttaactctttaatcctctattgtttcagttgtccccttacctcaaaaaaaaaaaattacttgctttcaagccttttaaacacatgttcaaagagaatctaatgctagaaaattatatcttctctttggcttaatttacctctagtgttggtaattttttctcaatctttctcttctctatctcttataaaatctaagcatgtatctttattcctaaccatttctattttttttcgtggaaatggtttcttgttgaaatcatgatgattcattc

SEQ ID NO: 2195 - DNA, 428 bp, Glycine max
  unsure (1)..(428): unsure at all n locations
agctntacatatctagaaagattaacttaatttcatttatggaactatagatacaatgtctggaatgaactcattctattaatgaaatttcattctaagtatgttgcaacaatgcggtttcgtgtcatgtccattgtgcagatcttgatgtttgcaacatttttcttatcatttggtcgatgattacttcttatggctagaagttttaatcttcatccagtgaggatgttgacttattcattgcagtgcacaaccaatgacactttgagtcttcttttgagctttcaagcttatcatcctttctgagtgacttatgatagccttgaatttacttctattgtagttctttgcacaacttgtctgttctaaatacacttagcgaactcatcaataaacataaactcagaaggcttatgatttgtaataag

SEQ ID NO: 2196 - DNA, 341 bp, Glycine max
  unsure (1)..(341): unsure at all n locations
ntagctcgcctgngcgagctataagtccaccaaaatgacactttgcctataaataggcgtgctaggggggctaagaaggagttccagtattgagagcgaaggaagttgagagaaataagagagaagaagaagaaagaagaggaaacgagggtcaagcactggtgaatcgtgactatgatcaatctctacatcattccttgttcagtggtctttatacgactgtcgggtaggtttgttttaagattaaatgtgatctatgcaccttattgttccccttgttgctgtgctatcatctctcatctacatcggaatctcatttttttgaagttaacttactgaca

SEQ ID NO: 2197 - DNA, 443 bp, Glycine max
  unsure (1)..(443): unsure at all n locations
agcttcctgagaatgaaacctagatctgtcttatcttgcttgggtagaggaagaagcaaaagactttgtcttcttggaagccatctgaaaatataagatcaaataacaaaagattagcacaagtttacttcaacaaaaatagaaaaataaaactaaaaactgaactgggcacttagtgcagcaggctgggcttagcgtgccttataaaattttactcatgggctaagcgcagcaggctcgcgcttagcctaaagacacaaaaaatanttttctgcaaattaggattagcgcgacaagctgggctttgcccaagtctacaattttcagaatagaagagggtctgggcttagcgtancatgctgagcttagctcagcctcaccagaatgacactcaggcttagcgaacagaacgcgcttagctcaacctcctcaacacacaacaa

SEQ ID NO: 2198 - DNA, 226 bp, Glycine max
agtcgatataaagcctgaagatgtacttggtaagtgtgtaatttctagagaataatttgagacaaaatgaacaaggtgttgtaactgctgtcagactactggacgaaagaaacttgagcgaattgagtaaatcttatcccaactatgttaagaagtttcattgtgttcaagcgtactatattaacccttgttgagtgaatagaatacattcttcttcaaacatata

SEQ ID NO: 2199 - DNA, 460 bp, Glycine max
gagcttggagtttccaagtgccaattcgtcttcttctttagtccagtcttcttctggcttcaattcttcagtgggctttccttctgtgtccagcatcttgggatgttcccagcctttgatgacagctttccaggttctgctatccagtgatttgaggaaggccaccattcttgctttccaatattcatagttgcttccatcgagaattggtggtctgttcactggtccgccttctttctccatgttcatcagaatttatctccctagatctcactctgtgatttcgagtgttggctctgataccaattgaaattctgataccaggggacagatgtcgtacaggatgtcacgacatcacgcttcagaacatgcagattatatgtgtccgtatgaacagattaaacaagtaaataacacaagagaattgtttacccagttcggtgctacctcacctacatct

SEQ ID NO: 2200 - DNA, 299 bp, Glycine max
tccgttgttcaatttcgagcgtctcgatatatgatatcccttaatctgtcttctgtgtgaaaagtttgaaccattcgaatttctggacagcttccgttgttcaatttcgagcgtctcgatgtattatgtaccaaaatcggacatttgtgtgaaaagttatgaccattcaaatatgttgagagcttccattgttcaatttcgagcgtctagatgagttatgtccgcgaatcggacatcctatgaaaaggtatgaccattccaatttctcgagaaccttctttggtcaatttcgaacctct

SEQ ID NO: 2201 - DNA, 465 bp, Glycine max
  unsure (1)..(465): unsure at all n locations
agcttcttatccaaggcttatcttggtggtgtagctccttctttctatggcttattccctagtggatggcgcctcctttcacctcttctcctttgtcttccactgcatctccatggtagaaaaccaccattaaaggacctcattgaagctcaaagatccagcctccatagaagctccacaagcaagcttccatcaattcctcctcctcttctcagcatctcacactcactctctactcaataatctttctcaaacgacaaaacctaggcttcaatgcacaagctgctccccttttctgcttctagggctcttttccccaaataggcctgtggctgttctggaattctgtgccctggcctttctatacgagtgtgtagaagctatcatcaaaggtgtaccctaattcaacacaagacaggctntaaataggctctgaaattgtgacgctgcacttagcgccaccct

SEQ ID NO: 2202 - DNA, 461 bp, Glycine max
  unsure (1)..(461): unsure at all n locations
gagagaatgattattaaacatacaaaatgaaaatactaagtatttattacctatacttaacagaaaatacttataacattacaaaataaccataaattgggagagtttgatacaatttatacaagttttatacacaaaagttagtcgttttcaccgactaactactcccctaaatttacagttttgcttgtcctctagcaaaaagagaacagctcacttgtcctcaagtgacaatgacatgcagtgactatgtacaaaggtgtatgctacaaagtgactgatagcatgataagagaatggagtaaaatgccctcatcacttgtctttcacaaggtgtgcagttatccaaagagaagaataaaatgtaacctgaatagatagatngaagtaggcataagacaaatatcaaggaanatagcttaaaccacagtctcacggctactggttcactcaagcacaag

SEQ ID NO: 2203 - DNA, 444 bp, Glycine max
agcttgagatgaggaagtgttgatgggtgaaacttcctgctttattgttgaccacagagtggtacctggagatatgtcgcgggggtcaggagaccttggggacgtcaggtggggtgctattgcccaaaaccaagcttgaccaatcccgacccaaccggggcatagtcggtcagtgagaacctgtgatgtacctaagtaggcgagctcctggcagtcaacagataaaaggaacaaagaccacaaagcaaggaggcttgtggtggctggccagctatgaaacttgattgatatgtgagatatggtctctagtaatcgattaccaagggtgggtaatcgattacaaggcttaaaaatgaagacaggaagctagggaagcctctggtaatcgattaccaaggggtgtaatcgattaccaggcttaaaaagggaactgggagatggtgg

SEQ ID NO: 2204 - DNA, 446 bp, Glycine max
  unsure (1)..(446): unsure at all n locations
tctatggaaaatgtgaaagttctcaaagctatccttagaacttttgaagtggtttctggtttaaaaataaattttgccaaaagctcttttggtggctttggtagggatgaccagtggaggcaaatggcagctacctatcttaattgcagtcagttagctctccctttttttttatcttggtatacccattggggccaacccgaggcaagctcatgtgtgggaacctattatccaaaaatatgagaggagataagctaggtggaagaagagatatatctcttttggggggagtgtggttcctatccaatcagtccttacttctcttcctatntattatttntctttnttcagggttccccgtatggtggctaacaaattaatcagaattcagagaagctntctttggggaggaggtcatgacaacaacaagaatgcttggatatcat

SEQ ID NO: 2205 - DNA, 460 bp, Glycine max
  unsure (1)..(460): unsure at all n locations
agctntgaaggtgcgtagcccaccattttctatagtagaatactggtaatgtgtctactatcattgtcatcattttttcgtcattgaggtgccacttgagctgccaggttctccacctttgggcgtattctttgaaagatccgtgcccccttttctgcacatattttgtagttgcatcctatccgaagccattatactgacactgcctaccgaaggcaaccattaggtcctcccaggaatggactcgagaaggttccaagttagtgtaccaggtaacaactaccccagtaagactttcttggaaagaatgtatcaacaattcctcatcttttgcgtatgcccccatcttccgacaatacatctttagatggttcttggggcaagtaatccccttgtacttgtcaaagtccagcaccttgaacttgagaggggtgatgatattgggtattgggaacaactc

SEQ ID NO: 2206 - DNA, 433 bp, Glycine max
  unsure (1)..(433): unsure at all n locations
tgcacttcaggacgtgcaatgctagtaaagaatggcggtactgagctgcttgaataatcctcaagggtgatcctcaggtgttgctcgtctgccatgatagtggtttcaggcaattgagtagcggattcccttgatgatggtgaatcaggtgataatgaatcagaaaaatgagtttcttcctcaagaatggatgcaactgttctgtcttgcagaagtttccttctcctctcgaccctgatccttctcaatgtagcttcaatttctaagtccaaaggaactaaattgcatgtgagagatctatgcatataaaatactaacagaaacatcggttatccaattcaataagagaagataaatgtgaattgagaataaatattcatagataatcaaagaataacgaataaagaatatgcacctaanaatgaactaactt

SEQ ID NO: 2207 - DNA, 473 bp, Glycine max
  unsure (1)..(473): unsure at all n locations
cgtggcatgcaagcttgcatgaccaattatgcgcatattatatgatcgactntgattgagaccagganagttacattatgatctatcaacttacccaacttaatcttataaagatttcctttcctttttgtagtgaaaagtaaagatccatcaaagtttttcaatatacactcacccttattgaaagggacatcatatccactatctcacaattgacttatgctcaacaaattctgttcaaaccttcaacaaaaagaacattatcattagagggataaggtggtatacctatcttacccactccattaattgtgcctttctgattccctctgaaatttacaataccacttgctngggagtcagggcttgcaacatagacctttcttcttatatgtgtcgtgagcatccatagtccaagtaccacatatagaatggttttcttgttgcatgcatgtatgcaacaataattatat

SEQ ID NO: 2208 - DNA, 238 bp, Glycine max
atatactgagacatgatgaacaattgctgtgacgctgacagactactggacgacagaaacttgaacgagtagatgaatcttatctcacactatgttcaagagatatcattgtattcaagcttactatttaaacacatcccgagtgatgagaatacatgcactatcaaacatatattgctcgagaaagccaggagtgaggaagtgacagagaatagttatgtcttaatcttccggggag

SEQ ID NO: 2209 - DNA, 453 bp, Glycine max
  unsure (1)..(453): unsure at all n locations
agcttgtaagaccacagtaagagtagtgttgtatcagtggagaacatccaaccccttattgtagccccactgtatgaattattgcatgaataagaacgaaacttatagtgagatttaaggctttcaaaatatgaattactatatatgaaaagaagttaaaatatctttgtattcaataacaatttgattgtttgaaaattgatgactgcaataccatgcatgactacggaataatttctccaaaataagaaataaaataactaaaaaaaaggctgaaaaggtcttcattaaaggctntgcacaatgcacattaattaatgaaataataatagaatacggtaagagtgaggactctacctggaggattgttaaggtatttagagtaccacttgatacaggacttctactttggcacanatactttatcccgctcaagagaaaccagtgtggagt

SEQ ID NO: 2210 - DNA, 443 bp, Glycine max
  unsure (1)..(443): unsure at all n locations
nttacaaccattaatcaacaatntaacacatatatgagatcataatttccttttcagaactgtacttactaaaatctagagttgtcccttgtctaggtggacatggccaaggtaggctctaagatctcacacgtcgaattgagagtagcctttgtgaagaggacaagaggggggacctgcaaaataaaggacttcgaccctgaagtaagtacaagagttaggtaagaataaattattaaaaaggtgagatagaacctggtacttatagagtggagtggaagttgcgggtccttatttgttgggactgttacggtgttgtaacaacccttgcagataatgactagcttgtagagaattgtagcttacagataacgtgtatcttatagatagtggaataccagccacgagataaagagggtactacatattcaaataatgggtac

SEQ ID NO: 2211 - DNA, 463 bp, Glycine max
  unsure (1)..(463): unsure at all n locations
agcttgagcttagctacacatacctctctaatagctaagctcacctccttgagatgagaagctagagcttagctacacaccccctataatagctaagctcacccccatgacaaaaaacatgaaaatacaaaaaaaagtccttactacaaagactactcaaaatgccccgaaatacaaggctaaaaccctatactactagaatggccaaaatacaaggcccagacgaaggaaatacctattctaatatttacaaagataagtgggctcatacttagcccatgggcttgaaatctaccctaaggctcatgagaaccctagggtcttcccttggatctctagccaatctacttggagtcttctacccaatgcccttgcggggtaggatngcatcaganagggcacccttcaaagacggtcctccaaccgatgtcggtattcaacgacactggtgtaccaccacacg

SEQ ID NO: 2212 - DNA, 450 bp, Glycine max
  unsure (1)..(450): unsure at all n locations
taaagatgttcgtgataaagttaccgaatcagataagaatcatttaagtcaaaatgaactacgtgttgtaacgctgtcaatttaattggacgaaagaaactccaatgaattgaatgagccttagctctgctaagttagcatgttntattgtattcaagcttattgtgtaaaaactctgagtaattacaatacattttctatcaacatctactgtttgtgaaagtctagagtggcttcatgacaaaaaatacttgggtcttaatctctgggggagattaagggtatctagatgaggcataaagaatacttgattntaataaaaaatttgattagtggaacccttcaactnttaaaggagaattggacctagcccaaggattgggggtggactagtataaaccttngtgttttctttactacttctatataactagttcccttctacaattt

SEQ ID NO: 2213 - DNA, 465 bp, Glycine max
  unsure (1)..(465): unsure at all n locations
agcttgtacccactacagggcagtagattatgtttgcttcacttgatttgtaatgctgttgtacggccagtttatgttttaactattaacagcattaacagcttcacttgatatttaacagtttcacttgataaaatttaaatatttaatttttaactaatgttttgctactcgtgtaaaccttgcagtgatcctaacttgcactttgtggagtctcctgcatcggctccaccagaagtttaaattgattttgctgcacaacaacagtaagctatcttccttgacctaaattaattctttctatagtaggataaaaacatagattgtagaaattcatagttgcatttgaagataaaaagtaaacataaatccttcttcacaaacataaacccttctttagtatattcataaatcatnatataacaaatttgatttctcattttttaaaaagaaattatttctaca

SEQ ID NO: 2214 - DNA, 348 bp, Glycine max
tcatctcgacaggaactgcatgactctactgttaagcaacaatcttcatgaaatgaatgatgatgagaagacactccctgtggataacgttttatttttttatttattgtataaaagaataaattcttatatgttgttctatgtcaataagtctttattatcaatttttcattaacttattatcttggcattgtcactatcatcgctgattttctatacatttttatacatgtggattttttatgctttccccttgaatgtttaacattagtaactatagtgtgtttatgttcaatgttgaagttgatttagctctcttagcacatgccaatgctcgaaggtggtatg

SEQ ID NO: 2215 - DNA, 463 bp, Glycine max
  unsure (1)..(463): unsure at all n locations
agcttctggtgggacatcttgacttgctttccaatctgacattcaccacaaattctgccttcttctattttcagattgggaatgcctctaacagcacctttgtcaatgattttcttcatgcctcttaagtgcagatgtccaaatctttgatgccatattctgacttcatcttctttggaggatagacatgtggaggagtaactggtttcttgaggtgtccataggtaacagttgtcctttgatctgctgcccttcattagaacttcactcttctcatttgtcaccaagcattctgactttgtgaagtttacattgaatccttcatcacacagctgactgatgctgatcaagtttgcagtcagtcccttcaccagcagtactttgtccagtctaggaagtccatcatgaactagctttcccattccagtgatctttcctttagaaccatctncanatgtcacat

SEQ ID NO: 2216 - DNA, 411 bp, Glycine max
  unsure (1)..(411): unsure at all n locations
tgaaatgaggaagtgtggaagggtgagacttccttcttttattgttgaccatagagtggtacctggagatatgtcgcgggggtcaggagaccttggggacgtcaggtggggtgctattgcccaaaaccaagcttgaccaatcccgacccaacccgggcatagtcagtcagtgagaacctgtgatgtacctaagcaggcgagctcctggcagtcaacagataaaaggaactaagaccacaaagcanggaggcttgtgtggtggctggccagctgtgaactttgattgatatatgggatatggcctctggtaatcgattaccaaggggtgtaatcgattacaaggcttaaaaatgaagacaggagactaagatggtctctggtaatcgattaccaaggggtgtaatcgattac

SEQ ID NO: 2217 - DNA, 459 bp, Glycine max
  unsure (1)..(459): unsure at all n locations
agctctntggagtagaatcatgtgtatcaactcattntatttcaaaaagaaagtcgtatctagtcaaggtctgagagaccatacaagtttcctagcgatttctaattatgtgggccattaagtctatcatatgctggcaatagccgagaagcccatgaatttcttcgggggcggagtaggtgtccgccattgccttggccttggctaacaagcggggaagttcttgactcccgttcaaagtaagagcaaaccgatccatccacatggttgcctcttggtgtaaagagtcgatcacccttcctctagcctctntttccgcgtatacttgggcatactcgtccgcgatcctatgctcgtgagccgtggctagacctaactcttcttggtacttggcgatgatagctagcatgttggtctccgtctcgcacaaacgctgagacaagctccttttggaccttg

SEQ ID NO: 2218 - DNA, 436 bp, Glycine max
  unsure (1)..(436): unsure at all n locations
ggatattaatgatataaggggacaattgtttgatattggatctaacaagaagggtaaaattaagaagtgcaaaaaagattattagttataaattctacaaaattttatacgtcatttggatgttattatttagatttagtcttatatgcctaatttatctcctggagctatttcttttttttttttagagttctacaacacatttattctctatttacttcatacactaaacaatggaaatttttgcaagataatgtatgaaaattttctattaaatcattatctcanacttgatgggagagtagaattgaaagtgtcaaaccaatataactttaagcaccatagataagagatgtttgcttcattatcaaatatagtgaagatcctaatanaaagtgaagcctatgttaacaactatagaataaaatttgaattt

SEQ ID NO: 2219 - DNA, 271 bp, Glycine max
ctaacatatcaccttgtggtgatcaggaggctattgtcgaatcaagtgacaatgttattcactctgtcaaactccatcctacctatgggtttatatgggagagggaagaacattatgctgttccctctgaagatggagtcattccaccaactgggtggaatatgtatgaagataatatgactgaggccactgcattggccataattactggctatatggccgaaaatagactgaatacggcctttgaggctgaactttaacaaaatatggc

SEQ ID NO: 2220 - DNA, 363 bp, Glycine max
tataataagaaagtgaagtcaaaatcttttaatgttggagttttagttcggaaggctatcctgcccattgatagttaggatcgagccttgggcaaatggtccccaaattgggaaagaccgtttaaaataattcagatctattcgaatggtgcttatgagttagaggagctaacccctcagaaacttacttcgagcataaatggtaagtatatgaaataatataaaccaacactgctcggaattaagattagcatagaataagagaaatacggtaaacataaaaatggcgatgacagtaaattgtcacgaaagggcatgtgtcaatattacatcgagaagtgaatcgaaatacagaattcgaat

SEQ ID NO: 2221 - DNA, 417 bp, Glycine max
  unsure (1)..(417): unsure at all n locations
agctnganatctaattatggggtctcgttctttcttcttccaccttccccagtaagaatgaatgaatgattgacctaataatcactgttaaccctaaccctttttgtgatcttgtgaatgatttatgagatgaacagaattcgatatgtgttagggtttcactgagctgatgacttttcttttgagaaagagagtcggggtaggctttggtgttcttggaacttcttctgccactagacttgacctacccccctaattacggttatctatttcttccattttttcccttagaanaacatgtttcttcttctcttgttaccaacaagttatattcctctttgattctttctggctactacttctgaagcacttcatatntcaatnntttcattttcatttttgctaatggaaaactat

SEQ ID NO: 2222 - DNA, 413 bp, Glycine max
tcctacaattggacaatagtggtgagcctttcaacatcacttcccaagtagtgtttgattctgctgccattcacagtctctgtcctctttgtggctggatccttcaataccacaactccatgtggaatgacttcatttaagatgaatgatctggaccacttagattttagcttccctggaaacaatctcaatctagaattaaataacaaaacctgttgtccaagcagaaattttttatcaaaagctttttatcatgacaaactttaactctttgcatataaagcttggaattctcataatcttgaaaccttaattcctccaattcatgaagttggagcttcctatgttcaccagctctgtttagataaaaattcaaaaacttcgatgccgagtaggttgtgtgctccaacaca

SEQ ID NO: 2223 - DNA, 464 bp, Glycine max
  unsure (1)..(464): unsure at all n locations
agcttgccacccagctcgcccaggcgagcttgttgtttcctccagaagcaacagccttctggaggaatcttctggagggcccaagtgggcctggttgctatttgcacccccatttttactaaacacaccccctaccctttttttggtggttcttttttcgtaaagttacggaaacttacgactttcgtaacgatacttgttttctttccgtaatgttatggaaccttgcggattacataatcatcccctttntgacttacggaatgttacggaaccttactatttgtgcaacgatgcttccttttgatttccggtgtgtcacggaaccttacggattgtgcatcaatattttcttttgattttcggcacgtcacggaattttcacaaatcgcctaatgatgggtgccaagcacctcanaatgaccaaacacaagttgcatgccaccaagcataggtccccgaac

SEQ ID NO: 2224 - DNA, 484 bp, Glycine max
acactataaaactaagcttaggctattcaattgcttcagattgttgcacagaagggcttatgtttgtgtggtggtcggcagaggagcataaaccacagggtctggcgataggtgcagattttttattcaaggctagctgggttaccaggttaaccaaggcatctagtttaccttcaagcttcttagtctcagctgatgaagatgaattcgtggctacttcatgcactcctctaatgacaatagcatcatttctggcactaaattgctgggagttggaagccatcttctcaattaaatttttggctttagcaggggtcatgtctccaagggctccaccactggcagcatctatcatacttctctccatgttactgagtccttcataaaaatattggaggagaagctgctcagaaatctggtggtgaaagcaactggcacatagtttttaaatctctcccaatattcatattggctctctccactg

SEQ ID NO: 2225 - DNA, 465 bp, Glycine max
  unsure (1)..(465): unsure at all n locations
agcttagaccgctgaaggaactttcttatttattgggaaaacagtaaacttaatcaactccgtatacgaatagaaacaaaagagagacaaaacagtcaatgttgagttgagccatcgacaactctcgtgcaagcacaaggaggagtagcccgatgcttgtgagtgacacggataagtgcacttattatttataaaataatagagaaaaataaaaagttcggcgaatagaccgatttgaatcgaacactcaacaccggcgtggcgtttccgtatgtttttgatcaatagaacaggaagaggaggaaaaaaaagcttatgatgagcatctatttgagtcgatcatttccaagatctaattccagtttattcttatgtagtggaaaggccttacaatctgaagttntacgcttaggggaagaaatgttcttggtggatgcaggacctgngacccccagaatttgtatg

SEQ ID NO: 2226 - DNA, 448 bp, Glycine max
  unsure (1)..(448): unsure at all n locations
tcaagctgtaactccttcgcccaccgtcttatctagaaagccaatatcaagactctagcaagcccacctctaatccagcaagcatgtgaaggtgggaatagattcaagcgatcgggcggcggcgaatgctcggcttggtgctgagttctgaccggtgcctgctcggctgcatggcattgaccctgntgggggccttactatactccttaattaaggggagaagtcaaaggaagatagatcatctgatctttcagcggtccccggccgtcagtatcatgtccccgcgtctcagcatctagaagaatagctaggcatcagtttgagttcgagatcgagacccagaagtatagatagatgcaaaggttgcagcagaagattggactggaacccgagaatgacaaaaacaagatctcttaggtggaagtacttgctatcgggcttaagcagc

SEQ ID NO: 2227 - DNA, 432 bp, Glycine max
agcttgctctaaatttacattgatgtttgtttttattttaggaggttatatgccatttttgctttaagagtaatgtcccactaaaactaactttccaaatgtttgccttcgcaggaatggccccgaggaagattgcctcaaagaggtccaggaaggacaaggcggccgaaggaactagttccgccccggagtacgacagtcaccgctttaggagcgttgtacaccagcagcgctttgaagccatcaagggatggtcgtttctccaggagcgacgcgtccagctcagggacgacgagtatactgatttccaggaggaaatagggcgccggcggtgggcaccactggttactcccatggccaagtttgatccagaaatagtccttgagttttacgccaatgcttggccaacagaggagggcgtgcgtgacatga

SEQ ID NO: 2228 - DNA, 473 bp, Glycine max
  unsure (1)..(473): unsure at all n locations
ctcagcttacatgcaagcttccatcacaagtcccacgaattgaccaatccaaacttatattgattgggtcaagcaganttttntatggtgtttttgggtcaaatcgatccattttcacccctaatatatttcaagtaagaatttgctatcaatttctctaaatggtactccatagtcaatttcattgagtattagttaaggagtatttaaaatactttattattatttaatatattttttttgaaaaatattaaattcttttgataattttttcaataaaataaaaatattaataaaggaatctaaaattttaataaaataaatgctctgagtaaaaaactattatttaggaatatctattatatctaatcaattatntaaaataatttaaaaagtattaattgattaatattntaatgtaaaaatatctttaaataattatcgctaattttttatttcataaactcatattt

SEQ ID NO: 2229 - DNA, 461 bp, Glycine max
agctttgtatccctgggaggggaattgagcttaacgctgacgatcttcctttgaagattctgaggaagaacatgactactctagctcagacatggagtgttctttccttctctaaccagattcctatctcccacacatctgatgtcactcttgacagagccaaactcatttatggcatcatcatgaagatggatatgaatgtggggtacctcatctcccaccagatctccctcatagcacaacatgacacatccagactaggattccctgccttgatcacaacattatgtaaggctagaggagttcagttagattcgaggtccctggagagcttgagtcctgccattaatttggcttacattaagaagaactgttggaatcttgatgatccaacaataacttttataggacccaggaaggctaggggtgagagatctgaggccccttccacttcagcatca

SEQ ID NO: 2230 - DNA, 475 bp, Glycine max
  unsure (1)..(475): unsure at all n locations
tatgctaccgaattataattcaaactgcctacttgtaaagcttgtgagcatgtatcttatggcattggtcactcgagacaatgttgcacaagaattaatcattgctttagggttattcacagtttgaaattttttgtcaacaagacactgaattgcattaaataaatcaggcgaaaacgtacacatgtaatacaatgcaagcaaatatgcagtgcatatatatgcagcaattcatatttccccgtatgcaaatatgacacatgtagtccatctcccccttttggcattaacaagaccaaaatgtttgaacttatgcaaaaaaaaaaaaaaacatacaaatggaagggaaataaaaccatatcataaaaaacttaactatcatcattagacaaaaacaaacagaacgagacataacanaacaaatcaacggatagcagaaccaggcacaagaacataactacgcttcatcctcatc

SEQ ID NO: 2231 - DNA, 447 bp, Glycine max
  unsure (1)..(447): unsure at all n locations
agcttgttactaaggaagaagtttatatgttgtttcctctatgaaatcgtataaggcacctgaacctgatgggtattagaaaatattttttaagatattttgggaaaaggttggagatgatgtttggagatttgttagagaagcgattcagaaggtatgtttgatgtgtaggctgctaagactattattgtcctaattcctaaaggtgattctcaaaaaacatttagagtgtgtttggatagagaattttaacaaaggaaagtaatttatcagagaatctaaatttttctaatctagaattcattgtttggatgttttttttatgaagaatttaaattnttggaattttaaaacggaatttcaaacaactaanaatgtgaaatttcaattctcttctaaaaagtgagaaattaagattatcttcttatagaagaatcttctaaaatg

SEQ ID NO: 2232 - DNA, 432 bp, Glycine max
ctttcttagacatatttagatggctgcaaacaatttattatgtctcaacatatgctaaattcatgaaggatttgcttacaaacaatagaataattatggatgatgaaacattggagctagaggcaggttgtagtgcaattattcataaatccattctatagaaatctcgagatcctagtagtttcacaattcctgtgactattagaagattattaataggaaaggcagttctttatttaggtgcaagtatcaacctaatgcccttgtccatgatcaagcggataggagaagtagacattataccaacaaggatgactctgcagtttgctaacagaactatcaagcattcttatggcattattgaagatgtattggtaaaagttgaccaaattctctttctagtcaactctatggtgatggatatgaagacaa

SEQ ID NO: 2233 - DNA, 465 bp, Glycine max
  unsure (1)..(465): unsure at all n locations
agcttaccacccagcttttgaggttatgctttgtctcatgctgcatatctgatcaactgcatacccactccctttttgcataacatatcgccttatgagaaacttcatggacacccacgtgacatatctaatcttcgcgtgtttggctgcttgtgttatatcaacactcttaaagcacattgtcaaaagctcgatcccagagcgcatccatgcatcttcattggttttaaaacgcatactaagggatatttagtctacgattttcattcgcatagcatcaattgttcacgaaacgtcgtattttatgagaatcatttcccacatttccctgaaacatcatctttgaaatccacttttactattccaactccggagtcattctccagcgaccaatatgaaccaccagttgatattatcattactatacgcagaacccanaacggtcctactcaagatgagccttct

SEQ ID NO: 2234 - DNA, 415 bp, Glycine max
  unsure (1)..(415): unsure at all n locations
ngtaattgaaaacttgtgcttgtattcgtttttattttgattntacatgcgcaacaccattttggtttggcatattgtattggttgtttagattaggttatgtatggttagcatagtatagccaagtaaatgtacaataaacatgacattttaagttgggcttttagcccttattaagcataaaaaaataacattttaagaggatctaagtcaatntaatcaaaataacatgttattgttataattgattattaattagttgcaatcgattacactaagtaaaactgagtttgggaagaagtaatgttattgattcaattgataacttatcaagataatcaattacataatgaacaaaagcacnatttatacaaacatgtgccttcactgttttgattgattacaccttgagtta

SEQ ID NO: 2235 - DNA, 462 bp, Glycine max
ctgcagctgccagacaacgcacacgtttcttttttaggtcctttgacttttgaatatatatcatttgtccaattagtagaatcttgggtgctttgtaaatattgcgaactctctgcttcaaccattttcttttttagttcatcctacataaatacaccttataaattattatcatacatcaatatcttgaatacttcaatatcactaaacaaaactcatctccacattagttactccccctcaccccataaccttctattagaaaattgagcaaaacaaagaaaaagtattgaaataaaagttaaaattcttataattacaatagcatccttttcagtaacaatgcttccatcttttcgagttcgagtgtcaatataaatttctgccctagaagggtgcactcccttagcctttgttgtcaaacattagttaagagaatcaatcatcctatttgtattaagc

SEQ ID NO: 2236 - DNA, 386 bp, Glycine max
  unsure (1)..(386): unsure at all n locations
gtttactcattattatgctaagtaatgagtatcatagtactttctaatatgtgaaacaactaatataaagcatgcatgaaatacaaaagttacaaacccttcgtcttacttcactgacatgaataagaagagaatntttttaaaaaaaaatatagcaagtcttacacctttattatattattttaattcaaatacttcattatttcatttcactctaccaaattatacattaacataacacttataatatgatgatgatgataatgatgcaaggtagaaagaaaaaagtaagctggtctggttgaacaggccatgatgcagacagctttgctgataaggtgcaaaaagtgcagcaaacactgtagaaaatagtggtctgaaaaagt

SEQ ID NO: 2237 - DNA, 380 bp, Glycine max
  unsure (1)..(380): unsure at all n locations
agcttcanatttcaggtatgggtggtctncttctcacatgaaattcgngggtgttgggtttttgggagatatgatgggtagttctactaggttattgccttagggtagtcatttgtgaaggaatttgttgaaatcatgctaaacttgacatgtttgatgtgagtaaagctacccattctgttttagggttttatgatgatgctttgtgatatttgtatgctgaaattgttgatataaaattggtagagatgatggggagagttaacttagggttaaatgtgagaatgataatgttgtgagtggaaaagtgtgagattctgagggttagaaaagccaatattggtgttagtagaaattggagtctaaagtgagttgattct

SEQ ID NO: 2238 - DNA, 385 bp, Glycine max
tgtctcagcgtttatgcgagacggagaccaacatgctagctatcatcgccaaggaccaacaagagttatgtctagccgcggcccacgagcataggattgcggacgaatatgcccaagtatacgcggaaaaagaggctagaggaagggtgatcgactctatacaccaagaggcaaccatgtggatggagcggtttgctcttaccttgaacgggagtcaagaacttccccgatagatatccaaggccaatgcgatggcagacacctactccgcccccgaagagattcatgggctactcggctattgtcagcatatgattgacttaatggcccacatagttagaaatcgttaggaaacttgtatggtctctaagaccttgactagata

SEQ ID NO: 2239 - DNA, 466 bp, Glycine max
  unsure (1)..(466): unsure at all n locations
agcttaagggaagagaggaatgcattcttgatttatactatttcggtcacttcctgtgcctacgtccagtccttaagcaacccacttgagattttccactctctttgtaaaactccttttacaaagtctgaaccacacagggacaacccttcccttgtgttcaggaatcctctacaacaagagacccatggtctcttaatcccttttcagaaataagaagaagagaagaagaaatctctcttaaaagagatagattgtacaatgaagatcaatcaaaaattccttattgaatatgcaagtggttgaccaaggaatctttttgagaggataagacattttagttcagaanaactcttaatctttggagaggataaaactttttgggcaataaaaactctctttaaattcgagtttccgagtcacatataaatagacccttgatggccattcataaaccatttgaata

SEQ ID NO: 2240 - DNA, 490 bp, Glycine max
  unsure (1)..(490): unsure at all n locations
gacccgggatcctctgagtcacctgcggcagcaagctggtaagcttttttttttcttttgctacaacctttntctccccctttggcaacatcaaaaagccaaagaactcggaaatcaacacagttataacaatggagtagcaagatataagtatcagagtattaaatccaataagccaaactcataatcaaggaaataatcaaaccagaattcaaataacataaaatgtcaacaaccacaaaatatccaagactgaaacacaagaaaaataagcaaagtacttagcataataatgtaaattctaagaaactaaaagccaaaatacacggcttataaaagataaataagcagaatctaaaatctaagaagacgaaggaggtggtggaagatcaaaactctgacgaatgtatccgacatcctcttcaagctgtgtaagacgaatgtccataccggcanagcgtgaatctaacgagtcatagcggtcaccaac

SEQ ID NO: 2241 - DNA, 331 bp, Glycine max
  unsure (1)..(331): unsure at all n locations
ngttgaggtcttgtttaacactgtttgcatntattagntttgtagaatgcataaaagaatatttgtcttcagatggctactttagagcaaatgaaagttgataaaaatgttatgaaactgacagaagatcaaaaggtgtgtttcgccatcctcatcgagcttcatgacctgatcattttgtcatcatcttttgaggcctcccaggtgtgcttttcgttcgagttttgttaatttcttgttctgtgcctttgttagtgcaaaattatcgaaagtctgttatgttgaatactgattaagtgttctttggtgcgttagtttactctgttttatg

SEQ ID NO: 2242 - DNA, 338 bp, Glycine max
  unsure (1)..(338): unsure at all n locations
agctngagctggggactgtttattgtttntttattnctctnatatgtacactgtcaaccaatcagaaaccatagttgatatgacttttaatgtggctattgagtcaaacacacttactatacatgatagttaacgattagatgacaatgtaaaaaccctttacacgggtagtggatagactattcactcttattgattaccttaatttgatttcatggctgatgtttggatgtggcttctttattgtcatgctactaggtaagtattttaatggtgttggttggcttgattctgtttttggtgatgatgatgaggatagtgattggttgaccaaattg

SEQ ID NO: 2243 - DNA, 389 bp, Glycine max
cttgtgcattctatttgaatggttattattcccaaagttctgttttcttatagacattcccctgttatctgaatctaagaagaaagcattgagttgctgagctctctcgatgcttcatcaagacaccacaggttgaaaaactcagtgcagaagtttatatggccactgcttagagagctgtatcttcagtctaatactgctggcaactatttgcttcttattgcccactttaataaacactcataatgactgactgcatgtgatgttatatgtggccatacaagttgggttagataaaagtacaaaactcttcatagattctatgattctgctgcattttaattcttattataccttgacctgctacattaatactatatataggatca

SEQ ID NO: 2244 - DNA, 423 bp, Glycine max
  unsure (1)..(423): unsure at all n locations
agcttgtacgtggtcgtgttaacaagaattcatggtttttcttagattcaaacacttaggttctaggagagcattcacccattccttgtctacttaaagaaccactttttctttgacctcccaacctttattgacatgccacaattaacagcgcacataggtttttttttttacgatgataggtattacaaaagaatgtagttctgattctctgtgtgtctgctactcatattcctggaacataatttacccaaaacactctcccaaatttggaaaaaatttgtcttgatccataataatgttctcctatagcctaagatagggtgcaaaaagatagcatttgcatctagctcagggttcaatgacacattcattcacatttaggctcanaagggtgcaagggattcaatcattcattagcat

SEQ ID NO: 2245 - DNA, 484 bp, Glycine max
  unsure (1)..(484): unsure at all n locations
gacactataaatctaagcttaacaagttagtaagttttctacttataattctagatatattatgtttatatatatgatgttataattgtgcatgatctgtcaaagaaaatatgatgtttctacttgcatgatgtgttataatatatgatgtttatatatatttcgaattttgttgttaataaaactgtttaattagaaactgtataatttttttgtttaataaaactgtttaattttgcatgatctgtttaataaaactgtttataaaactgtttatatataatatatgatgttaacattnttaaaactgtttataaaacagtttagttagaaaaaatgttaaaactagagaaaaaaaatgtataataaaactgttatatttaaaactgtttcattagagtaaaacattttttctttgtttttatttcgaaatttaatacatatgttatatagaatgatatatgttgatgatgatgttggatgt

SEQ ID NO: 2246 - DNA, 470 bp, Glycine max
  unsure (1)..(470): unsure at all n locations
agcttataacatatttaagacacactaagatgaatgttaagaatatatttgaggtcaaattagtcaattgcttaggcatgagtattttattgcccagaaaatttagagaagattaattagtaatatatagtcaggaatataaattaaaatgttacaactatcttcactaccttaacttcaagagcaccagctaggccttactatattcaaaagaaaaggttaaaactgtgaaaggcaatctaatcacaaactaacctgtctgatgacatcattaagaccagggcagagccctccacaagtaacaattgctgcctttacttcttctggcttaaagtatatcttttcacgaggcccagctcgatgaaccctaaaaggatttcagaactacttagcatatatgttaatattaggaaacagcattctatacaacacaaagatgtactanaaatattgaaaccataaactagaag

SEQ ID NO: 2247 - DNA, 376 bp, Glycine max
actggtaatcgattacaggattctggatgtcgatttccagagagtaaaactctggtaacttagaaaattttgagaaaaactcttttgaaaaacaaaactgtgctatgtttgttttttgaaaaatcttttcaatacttcccatgtgaggtcttcttgatttcttctctttaatcttgaaatcaaacttctcttgattcttgaatcttcttgattcttctcttgaaatttatcttgatcttgaacttgttgactcaatcttgaaatcattcttttgagctttttgtcatcatctttgttatcatcaaaactacttgaatcaacttgattcatcatcatgaagcttgcttctacagtctctgcgtgtcaacgggctcac

SEQ ID NO: 2248 - DNA, 469 bp, Glycine max
  unsure (1)..(469): unsure at all n locations
agcttgtattctaatatattagacatcattttgtggtatcttctcatattttgcttgcttgtattttatggcgaaggaaatgactcattttcaatatgtttttatgaaaaatttatctccaatatcttctattatattttcttgggcacaaccaaggacattctaaagtatctatacatagtgaacttgttgccctgcatttttaattcattcaactttgtcttttatttctttttgtgtttgtgggatttaaggaagagagaaattggaaaatcgatttttatggcctcaggaattatacatggagttacatgctttggatagatttgcacaagattatcagcataagcgtgaagaggatgataattcaggtgcagctcanagtggtaattgaagagtactacctatgacataatctgcaatttntgtttgtgacaagcatatcaatttattttctctgatggaaagg

SEQ ID NO: 2249 - DNA, 478 bp, Glycine max
  unsure (1)..(478): unsure at all n locations
cttgatgtgttctanaagttggttatggaattcagagaatgttggtaaaattctgaatgcttatgtgatactttatgattgcttatatttttaaaacttataacttgttatttattattttataattattatttataggctctagattaattgaagaatcaacttttactgatgagattgaatccgatgatgaaggtatattcacttttagttgttctaaaaaaattttgatatcattatacatagctaatttttcaaaatttttaaaatataagtggatctttggtcagtagcatcactcaatgcttgcaagattagtagacattattgttgatcggtaaagtaataactatacttatntactaatgcaatgtatgaatttaagaattgaaacatctaaaatatgatgtttgattttataaataccangctgagcgttgaagaagaaatgtgatgacatctttggtgaagtagtggt

SEQ ID NO: 2250 - DNA, 383 bp, Glycine max
  unsure (1)..(383): unsure at all n locations
agcttctaaactntatacaagaatgaagctctgataccacttgttggacaagtggcctcagatatcttaagaagggggagggggggttgaattaaaatattacaaattatttccccaattaaaaattctatttaactttctattcaagttacaaattcccttaataatgaatttcttaaataatgattcaaatagaacaatttgaatatgaatataaaacaataataaataaatgagtttaagggaagagaaaatgcaaactcatatttatactggttcggccacacccttgagcctacgtccagtccacaagcaacccgcttgtgagtgccactatctagtaaatntcctttacaagttctaaacacacaaggacaatcctt

SEQ ID NO: 2251 - DNA, 420 bp, Glycine max
  unsure (1)..(420): unsure at all n locations
tataagaacaaaatggcctaaatcatttccaaatatgcatgttaattatgaagcatgaacaagaattaagccaaggctattgtgcaagcaatcaatggggcaaaacacaccaaaagattatgatgatggatggctcaaattctcacaaaggtaagcttatcactttcaaattgagctttcaaaactatcatgacatgtagaggaaaaacaaggatttcaaatcacacaatgtcaagagacttttattttcagaacaattaccaaagcttgatttgtgagttgatnttagccttggtttcactttgattattagtcaattaattcaaggaaactttcaaagaaaaacgtctgattgatttttcttgattaatttattaaatttttcaagatattttgaatatttattattatttcgttttt

SEQ ID NO: 2252 - DNA, 439 bp, Glycine max
agcttgtcgtagcggttatgcgagatcgagattatcttgttaaccatcgtcagcaagtaccaagaagaattaaatctagccaggcccacaagcacaaagtggcagatgaatatgcccgagtgtacgcggaaaaggaggctagaggaagggtgattgactcgttacatcaagaggcaacgatgtggatggaccgattttctcttactttgaacgggagtcaacaacttccccgattgctggccaaggccaaagcaatggcggatgcctactccgctcccgaggagatccacgaactcctcaactattgtaagcatatgatagacttaatggcccatataattaggaaccactagggagtttgtattgtcactcagatcttgactagttataactttcttaataaaatgagtttgtctcgcgtttttactccaaaatcagt

SEQ ID NO: 2253 - DNA, 459 bp, Glycine max
  unsure (1)..(459): unsure at all n locations
agcttctccccaattttctataattagtgtagaagtgaagngaaaaagggttcagccccttaggcacttctctctctttcgaatttgcttagaaaaattgtttccgtgaagaaaatccaagccaaggcgcttccgtaacgtttccgtgaggaatttcgcgaaggttttcgaccgtttttcaacgtccttcattcgttcttcatcgttcttcagtcttcaacgggtaagtacctcaaaccaagcttttcaattcattctatgtacccgtggtggtccacacttggtttcatggtattttattctcatttcattcactttttatacccccttttgacgtgcttaagccattttatttaagtcatttctcgcttaacctaaaaataaaataaagttccaccgatcgtttgaattgtattatccgttaacttcggttaanatgaattccgaccgttcggtcgt

SEQ ID NO: 2254 - DNA, 416 bp, Glycine max
ggacacttgaaactcagcttgcggattggtcttcgccaggaaagatctatttgttctgataagaggcaaatttaatcatcctgcttagacgaatgagaaaactggcgaaataaagagggtgaggatgagggagaaacccatgctgtgactgccattcctatacggccaagtttcccaccaaacccaacaatgtcattactcagtcaataacaaaccacctccttacccaccacccagttatccacaaaggccatccctaaatcaaccacaaagcatgtctaccgcacttccaatgacgaagaccacctttagcacaaaccaaaaaaaacaccaaccaagaaatgaattttgcagcgaaaagcctgtaggattcaccccaaattccggtgtcatatgctaacttgctcccatatcta

SEQ ID NO: 2255 - DNA, 413 bp, Glycine max
  unsure (1)..(413): unsure at all n locations
agcttgatccttgtgccttaagatgtgtgtttgntgggtatcttcctcataagaagggttacaagttctatcatccacctactaagcagttttatgtgactatggatgttactttatctgaaacagaaatgtttttctcatcaccctcatccacttctactcttcagggggagacatactctaaagagatgaatttgatggttgtccttcccgacgttgtcatgactagtaaaaatccttccaatatgggcacaggttctgcccaagagttatctgctcatataggttctgcacctcaatgtgataccaccagctcattggcacctcagagtcccacaagatccccttctacttctattgtacccaccaatgattccattgttgctgatgtccctgaggtatgtatagaatct

SEQ ID NO: 2256 - DNA, 449 bp, Glycine max
  unsure (1)..(449): unsure at all n locations
tcttctattacttttgttgctatccgaccaaaatcctattgcagccttgatctccgtattcccatgcaaattntaaactagtcatgagtcatatgacccaaaagacatgcatgtttctgtgaacccttcttgtgttaataatcttattattatttcttttttaatgacagtgagaaagacagagaaaagggaccagggacagggtacatttgtatttggattttgtattggaatgcttagggctaagatgcttcatgtattccaagaatggttttttgcctagcatgagtcatgtcttgctgaanaagaaataaagtgcttaactaccagagaaaggaatagcatggcaaaaaaaaggtagagtggtatttttatttatcaaaatatctcaaaattcagttgtactttctattaagaaattaatcaaatttggtgagatgaaaagagga

SEQ ID NO: 2257 - DNA, 441 bp, Glycine max
  unsure (1)..(441): unsure at all n locations
agctttggcaaattcaaacgaccattacttttgactcgaatgtatgatcgatgccgattatatatcgagacactcaaaattgaaaaacagaagctcacgagaaattcaaatgggtataacttttcactcggatgtctgattcacgcgcataatatatcgagaccctcgaaattgaacagggaagctctcggcaaatccaaacgaccataacatttgactcgaatgtatcatcgacgcccacgatatttcgagacgctcaaaattgaaaaacggaagctcttgagaaattcaaatggctataacttttcactcgaatgtccgattcacacgcataagatatcgagacccttgaaattgagcatggaagctcttggcaaattcaaacgaatataacttntgactcgaatgtatgatcgatgccgattatatatcgngacgctc

SEQ ID NO: 2258 - DNA, 417 bp, Glycine max
  unsure (1)..(417): unsure at all n locations
tagaagaaggaaacgtcctccanaaggaagcatggtgaatgctcccaagctgccatcaatcgcttagatacatggttcacagatgaaggaaagaagagtgactacaagctgatttatgctgtaaaaaatgtgagagtccccaagtatctagacttggagtggttttctcaacaagagttcaactttcccaatttgttggaagttcacaagctgacaaagctggtgcaaatgaaagggacattntatccaaaactagtcaaagtgttctacacttatgcacatgttgaccttaaaggtaacctcttctctactgttaatggagtagatatgatcattaatgctactgtgtggaaggaagttactggtctggacatgggtggagtccgtaagtttgatgaaactatatgatggtacaac

SEQ ID NO: 2259 - DNA, 440 bp, Glycine max
  unsure (1)..(440): unsure at all n locations
agctntgagccaattcaaacaacaataactttttactctgatgtctgattgagtcccgtcatatatcgagacgctcgaaattgaatgttgaagatctgagccaattcaggcgacaatatctttttactcggatgtctgattgagtcctttaatataacgagacgctcgaaattgaatgttgaacctctgagcaaattcaaacgacaataactttttactcggatgtctgattgagtcccgtaatatatcgagacgctcgaaattgaatgttgaatctctgagccaatccaaacgacaataaatttttactcggatgtctgattgagtcccgcaatattacgagacgctcaaaattgaatgttgaagctctgagccaattcatacgacaatatacttttactcggatgtctgattgagtcccgtcatatatcgagacgctc

SEQ ID NO: 2260 - DNA, 429 bp, Glycine max
  unsure (1)..(429): unsure at all n locations
cttcaacattcaatttgagcgtctcgtaatattactggactctttcagacatccgagtaaaaatttattgtcgtttggattggctcaaagattcaacattcaatttcgagcgtctcaatatattacgggactcattcagacatccgagtaaaaagttattgtcgtgtgaattagcttagagcttcaacaatcaatttcgagcgtctcgttatatcacgggactcaatcagacatccgagtaaaaagttattgtcgtttgaattggctcagagcttccacattcaatttcgagcgtctcaatatattacgggcctcaatcagacatccgagtaaaaagatattgtcgtttgaattggcttagagcttcaacattcaatttcgagcgtctcgatttgtgacnagagtcaatcagacatccgagtaaaaagt

SEQ ID NO: 2261 - DNA, 460 bp, Glycine max
  unsure (1)..(460): unsure at all n locations
agcttccatcacattattcttgagttatttttatatattggtaataacactttaatcgattaaaaagataatataattgattacttcattgaattaatcaattactttgtagatttaatcgattatagatggttataattgttttatctataaataaccatcttgtgttcccctccatatacattaagataatactcaatatcttgaaaataacccatgggcctctaaatgagctaaagatctcgagctgtcattagtgaaaagagaagagaagaaaagagctttatagtgactcacaacttcttaatcgtttaattatgaagactttttcttagaagtgagtngtgtatcttgaattgaagaagaacgcctccttagtctagcaaggttctttgcggaaaagattgatcaggttgtatctctctctacttatttttttgtgtatgaatttacatgtctt

SEQ ID NO: 2262 - DNA, 439 bp, Glycine max
  unsure (1)..(439): unsure at all n locations
gctataactctgggcaattcctttaaaactaatcatcttaaaagatatgactntngaaagaatcttcagaaacaagtcacttgaagaaatgtgactcttggaaatgaatttttcgaaaacagtcactggtaatcgattaccagaaaggtgtgatcgattacacatcaacagatgtgactcttcattttgaattttgaaaatcttaatgttttaaaaccactggtaatcgattactataatctggtaatcgattaccagagagtaaaactctctggtaatgaatttgtgaaaacttcttgtgctactcaatgttttgaaaaactctttaatacttatctngattgagggctctcttgattcttgaatcttgagtcttgaatcttgatctttganacttgaatcttgaatctttgaatcttgaacttgattcttgaatctt

SEQ ID NO: 2263 - DNA, 304 bp, Glycine max
  unsure (1)..(304): unsure at all n locations
agctngacaagagngactcgccttgctaagtttccatccgngccggnganggttttcacaacttgaaggtaaatctttattctattggtttgggttcgattgggatgattatgcttaattatttggtgttcactttgggaacatttttaggagattaagaccgtggaactcgtgaagccaactgggtgggtttatctatccttgtctggagctgatcctaggtaagtacagcgttctttctgtatccagcttttgtcggtttaagattgtatctagtttttgttgtctggaggcctgcattttt

SEQ ID NO: 2264 - DNA, 433 bp, Glycine max
  unsure (1)..(433): unsure at all n locations
ngtgtgaaggacagattctcattattctagcttgcaggatctagttcagcataggccaattatgagtgtagagtagttcattgagaaggtggcctggcctggagcccgaccttcttttgtgggagataatgaaagttttacagcccatgcaccttaacagcatgaaccagaaccataaaatgatcactcatctaaggccaccatcctatagcctattgatatatgagaagaggcagaggagacatacgtgagacaggtagctgctaccactcctgagtgatcccttgaggctacttcagagccttttgcaccaatggtaaacctaccctcacctcagcctgcagcaaacccctccactcctcttctacagatgctagaggacccaactacaccatgtctagttgtggacacttctctctccactactcctgtg

SEQ ID NO: 2265 - DNA, 343 bp, Glycine max
agctttccaccttcttgtatatatgtatgtttgctaccattcaataaagcttgagatgctgatttgatcatcttgaacatactacattgcacgttatctgctacatggctatatgcatttctaatatacggtgctctaaaattctgcaatggagcattgtggctagatttcacatggatgacatgaggagaaagcatgtcaatggtgatcggttgggtggagttgcatcatttgcaatatatgagctcaaaggaacaccgttatttcttttatgtcaagctttagatgcggagaaactatagaacaaaattttattcacgatgtggtcatggctgaagacata

SEQ ID NO: 2266 - DNA, 462 bp, Glycine max
  unsure (1)..(462): unsure at all n locations
angctaaattaaggtgaactttttttagctacttgagctgtgtctagncctacatgagggatgttcggacaaatctcagcataagttagtctaaacctaacaggctgactaaatcgagtgcattctacataaaggatttgcggaagaatcttggatatatcagcctgactagggaccgacggtttactcctttaggctacatgatagaacacaagcacacaattgattatagaaacatatttctttgcatccgcttgttggttgaaagacacaacatacctacctattgttgacgaatatttgccttgcattctatagatcttactacgatccacgttcttatgaaatgatgtgtgcaaagttctattacacatgagtctgtcacgataccctgactctatagcttgatgcacgctaacctctgatagcattgcttcgaactccgattcatccgtggtatat

SEQ ID NO: 2267 - DNA, 409 bp, Glycine max
  unsure (1)..(409): unsure at all n locations
agctntttcgatgcaaaattcatttcttggtttatgttttgggtttgtgctaaaggtggtgttcatcattggaagtgcggtagacaagctttgtgtttgacttagggatggcctttgtggataattgggtggtaggtaaggacaagggttgttattggctgagtaatgacattgttgggttggtgggaaacttagccgtataggaatggcagtcgtagcatgggtttctccctcattctcaccctcttcattntgccccaattttgcatttatcanagcatgatgatcagatttgcctcttttcagacccacttcgatcatttcgccagcgaagaccaaatccgcaaagcttgaaagtgtgtaacccaccatttttcataatagaacactggtaatgtgtctactatca

SEQ ID NO: 2268 - DNA, 415 bp, Glycine max
tgccacccagcttgctcaggcgagctaggttgcttcctctataatgctgtagaacttcctggaaggcccaaatgggcttggttgctatttgcaccccctttttactaaatacaccccattgccttttttttgctgattcttttttcataacgttacgaaaacttacgaattacgtaatgatacttgttttccttccgtaatgttacggtaccttatggattacgtaatcatcccttttttgccttccggaatgttacgaaactttacggattgcgcactaacacttccttttaattttcggcatttcaggaaacttcacggattgtgctacaatgctttcttttgactttcgacatgtctcagaacttcacgaattgcctaacgatgggtgccaagtacctcgaagtggtcaaac

SEQ ID NO: 2269 - DNA, 463 bp, Glycine max
  unsure (1)..(463): unsure at all n locations
agcttttcaatttctatccaaacaataccatattgtaattaaaaaaaaacataagaaattagttacatgatattctcaattcccaactacttccgttgatatgatttttttttttaatatgatatatctaattgaagcctaacatttcaaaattaaaatatatcaccacagttaacaaatttgttattaattntaatttcatgtcattaaattaagatatgatctcatattngatcataaacccagttagattgatatttttttccagtatgatgtaccggattgcaagttataaaattaaagtaacattccgttaaatatattgattttatatgtattattatttggagggatttcatatttatntaataattcaaggttataacaataataaattttatccancatcattcaactgattgaggtaactcttgttaaaaaattgatttatatatttattatt

SEQ ID NO: 2270 - DNA, 331 bp, Glycine max
ggtgatcgattacacagtaagggaattttcaaaataactcttatgagttacaactgttcaggaagtttttgaatggccatcataggcctttaaagactttggatacgaaattccttagaggttttctgaataacattttcttatcctctcaaaaccaaattgtcttatcattctcaaaatattccttggtcaaaacacttgcaaattcaataaggaatcttgatcgatcttcaattgcaatatccttctcttaaagagagaaaattcttcttcttcttattcaaacagatctgtttaagagaccgagagtctcctcatatgtaacgatatt

SEQ ID NO: 2271 - DNA, 467 bp, Glycine max
  unsure (1)..(467): unsure at all n locations
agcttgttaaaacaaaataagttaggtctcatgatgcacatttatgtgacactagaagaactattataattgaaaactagacttgtattgttgcaaatctaattatgtatgcatgtacctataatatcatagatgtagctttggaatggaaaaacattttggaggttgatatgatgttcattttcttggtgtaagttgcccctattataagaaaaagcagtacaaccactaaacagagaagcgtcacttccaaacaacatatggcagaaatcacaactcaaacaatgcaagttgcacagcttgaggtgaagtgacccaaccatgagtaagaaattcacttgggcttcagccatagaacgttgtgaatgaagaaaggttaaacttgtagccaaaaaagaagttgcattactggacaatgacttttgtagaaatcatagttttatttgaagactnttaaatagaattct

SEQ ID NO: 2272 - DNA, 412 bp, Glycine max
  unsure (1)..(412): unsure at all n locations
nggcattttctatcgaagaanaaaaaattaaatatgcaatgtttaaataatgaaaacaaactaagcaaaatcatgttcggctgcaaaaagtaaaaacaaaaagaagttcaatccacatgtgttgaagtaaaggaactacatcagattcatagaatatgttcagaaattcaagtgttgtttgtgatatttctgcacacaggtataacgcaacaaagagttgttaaattccatgcttcaatatttgattagatacaaaatagtatacaaccagtagagtttatgtttgaaatattctcacaatacgatttcaaagaaatggaatgagagaaaaacaaaacatagaacaaaatacaacgtccaaatgaaaggaaatgaagaaagtgagagaacaaaggagtgaggaaggagaaac

SEQ ID NO: 2273 - DNA, 466 bp, Glycine max
agcttcctcaatttttatggattgatgctcttaagactgctgcgtatatattaaatcaagttccaaccaagactgtctcaaagacaccttttgagttattcaagggttggaaaccaagtttgcaacatatacgcgtttggggatgcccgtctgaagtaagaatttataatccacaagagaagaaactagaccctaagactattactgggtatttcattggatatgctaaaaggtctaaagggtataggttctattgtccatcccacaacactaggattgtggaatcaaggaatgcaaagtttcttgaaaatgacttgatcagtgggagtgatcaatttcagaacatttcttctgaaagggatcactatgaagctgaaccttctgggacaagtaataggttggtagtcattcccacccctcaagttaaaatgggtggtagacaaccagtgattgaagttcacaagct

SEQ ID NO: 2274 - DNA, 315 bp, Glycine max
tgtagaaactcttagaagctgtcctgtaatctgtcaccatatgctatgttgtagctttcagtatgaattatttcttgtactatctatcaattctcatatatatatatgcatctctcagcaaactaaggctgaggatcctttttgtgtgcttatttttgcactcaaacatttcaagtaatctaaattgattctttgcaatccttgtttatattcttaatctaaactcaatcaccttttttcataatttcaaagagactcgtagtttatccttttgcaatttactcaattttgaatatctttcttattcttaaatac

SEQ ID NO: 2275 - DNA, 465 bp, Glycine max
  unsure (1)..(465): unsure at all n locations
gtcacctgcggcatgcaagcttcttccccaattttctataaatagggtgagaagtgaagtgaataagggttcagccccttaggcacttctctctctttcgaatttgcttagaaaaattgtttccgtgaagaaaatccaagccaaggcgcttccgtaacgtttccgtgaggaatttcgcgaaggttttcgaccgtttttcaacgtccttcattcgttcttcatcgttcttcagtcttcaacgggtaagtacctcaaaccaagcttttcaattcattctatgtacccgtggtggtccacacttggtttcatgtatttttattctcatttcattcactttttataccccctttngacgtgcttaagccattttatttaagtcatttctcgcttaacctaaaaataaaataaatttccaccgatcgtgtgaattgtattatccgttaacttcggntaaaatgaattccg

SEQ ID NO: 2276 - DNA, 428 bp, Glycine max
tgcggatttggtcttcgccagtgaaaggatcgaagtggatctgataagaggcaaatttaatcatcctgcttagacgaatgagaaaactggggaaataaagagggtgaggatgagggagaaacccatgctgtgactgccattcctatacggccaagtttcccaccaaacccaacaatgtcattactcagtcaataacaaaccacctccttacccaccacccagttatccacaaaggccatccctaaatcaaccacaaagcatgtctaccgcactttcaatgacgaagaccacctttagcacaaaccaaaaaaaacaccaaccaagaaatgaattttcagcgaaaagcctgtaggattcaccccaaattccggtgtcatatgctaacttgctcccatatctacttgataacgcaatggtagccataaccc

SEQ ID NO: 2277 - DNA, 304 bp, Glycine max
agccttgcctactccccagagactttgtgttagtagttgtgaaacagagcctggagggtgctctcatgagcgactttgcgctaaacaaaccccctggcttactgaacgataagcgttcatgaccccatgatgaaagagatgttcatacacattgcgctaggcgtgtggctagtttacctgccaaatctagggtgaggccggatgggctgtacacactgtatcccgttccatctgcacctcgcgtagacatgagactggactgtgaacttgggcgacctacatcccatagaggtgtaaactctat

SEQ ID NO: 2278 - DNA, 274 bp, Glycine max
  unsure (1)..(274): unsure at all n locations
ntgttctaagaagactcgtgctggactngactttgacctatcaataatggtgtaacgacatatatcagaccagacctcaatccccacatccctaattgaagactacgatccaatcttgatacattcacctactgtggccacagtacattatacaatgctcaagcctcctcactatgcacacaaatggatgatcatacctagagcatacatatttctgactctgatgtaaccattgaacacaagagacacaaactatcctatatttacgtaaata

SEQ ID NO: 2279 - DNA, 455 bp, Glycine max
  unsure (1)..(455): unsure at all n locations
agctntaggctgttcaattgcttaatattgttacacaataaggcaaaggtctgtgtgatggtcggcaaaggagcataaaccacagagtctagcgataggtgcaaattttttattcatggccagttgggttaccaagttaaccaaggcatctagtttaccttcaagcttcttagtttcagatgatgcagatgattttatggctacttcatgcactcctctaatgactatagcatcatttctggcgctaaactgtttggagttggaagccatcttctcaattaaatttctgactttagcaggggtcatgtctccaagggctccaccactggcagcatctatcatatttctctccatgttactgagtccttcataaaaatattggagaagaagctgctcanaaatctggtagtgaaggcaactgacacatagtttttaaatctctccaatattcatat

SEQ ID NO: 2280 - DNA, 448 bp, Glycine max
  unsure (1)..(448): unsure at all n locations
cctcgagcaacatttattattttagcatttatagttatctntattttataaatatgatgagagnttttnttttcatttcttttcaactggacttctttctctctttttcaaatttaatttattcactcaacttttagtgaaatatacccatcgccatctctcgtccccttggaatgaaattaagttcttaaatattaaataatatgttcaacaattgaagggacgcatttcggaagaggaaaggttaccactctgggggttgtgtagcctccaattntacttttattcctctcctcaacttttttactaacaaaatattatgaggacaataatttataatttataaaatacaataacatggaggattcaaacaaagaatagtttctgtgatagttgaaacttaccagtcaagctttgtagagattgttcagctccaacaagccataac

SEQ ID NO: 2281 - DNA, 418 bp, Glycine max
agcttgtaggattatggggtacccttcacatgtggtactaggtggcgatcgggcgatggtacaagtcgactctccacgtccacaaatcacacataaatccaccatccccagttgcccaccttcaactgagctcacgtactcccacatagcccttatcctcgttcctctcaacaccgggtccccatcaatccctccaagctttcacaacatccaagcaattaaaaatccaaacatcatgaactatcaaaaccaagaaaacagggcagaggcaaaaaactctgcccaaaacacaaacaaataccacaactttccttactcaaatacctcagtaacattctcttcgttcctattcgttcaccgttggatcgactcgaacatcttactggagggccctagtacataaatctacactatgacc

SEQ ID NO: 2282 - DNA, 421 bp, Glycine max
taagtgtttaggcttattccatcataaacaactaacacattgttggaccttgtggcctcaataacttacgaaggggtgaattaattttccactaacaaaattttaacacccttttaaaagagataggctcaaaatgtagaagaagcaacaatgaatttaataatgttctttaaacatgaaagacacaattgattgcaacaaaataaataagataagggaagagagaatgcaaacacagttttatactggtttggcaaaatctgtgcctacgtctagtactcaagcaactcacttgagattttcctttctctttgtaaattcctttacaactgttgaaccacacacgaacaacccatcccttgtgttcaggaatgcttacaacttaagagaccctctgtcccttaatgaatctctttgtata

SEQ ID NO: 2283 - DNA, 451 bp, Glycine max
  unsure (1)..(451): unsure at all n locations
agctngtaacattcctaagcaaaaattcttgtaacattatttntcattcataaaatactttctagatttcctcttaattcaaacaatgaaacaaaataacagtctcataaataaaataaaaaaggttgtttttagacctttcgaattattgtaactcgatttttacttcaaagaaatcatactttttatcacttcaaccaatgtataaatataaaaacattatcattttttcaattaaaaacaagaaaaaaattcgtcaatgtatctttattaatgccaagtgtatgggtatcagttgattacgtaaaaaaatatcatttattatcaaattcatttttctaaactaattagtataacttatataaattctaatatatgcatatattaattttaattccattatttttatattagttattactgttacgacaataaatgtattactgttata

SEQ ID NO: 2284 - DNA, 345 bp, Glycine max
ctgacttgagtcatcaagagattataaatatgtgaccatgatatgagtctcatcaattattatcatcatcaatcatctttgaatcatctatctttcaatcttctctcaacatctttcaacaatatatctttcaactctttctacataatttttttattcatttctcttcatctttctaaaagtttttttatcaacactgtctcttccaagaaaagttctttgttcaaaaacttgtgctattcatcttttccattctcttctccctttgccaaaagaacgaaggactaaccgcctgaattcctttgtggctctcttctcccttacaaaagattcaaaggactaacc

SEQ ID NO: 2285 - DNA, 461 bp, Glycine max
  unsure (1)..(461): unsure at all n locations
agctntccaccttcttggatatatgtatntttgctacctatcaataaagcttgagatgctgttttgatcatcttgaacatttacattgcacgttttctgctacatggctagatgcatttctaatatacggtgcttcaaaattctgcaatggagcattttggctagatttcacatggatgacatgaggtgaaagcatgtcaatggtgatcggttgggtggagttgcatcatttgcaatatatgagttcaaaggaacaccattattttttttaggtcaagctttagatgtggagaaactcttgaacaaaattttattcacgatgtggtcatggctgaagacatatcagcctgactttgatcactttctctttccatcagtggcatccaaatccgggaatatgtttgtcttagtgattnttgtatatgtgggtgctgaatttgtatctacccatatgctcacca

SEQ ID NO: 2286 - DNA, 479 bp, Glycine max
  unsure (1)..(479): unsure at all n locations
ctcagctaggctaaataaggtaaactttagtaagctacttgagctgtgtcttgtcttacatgagggatttacggacgaaactcagtttaagttagtctaaacctaagagggctgtctaaatcgggtgtagtcttacataagggatttgcggaagaagcttggatattcagcctgacgagggatcgagggtttagtaatttaggctacagcatagaacacaagagcacaattgattagagaaatatatttctatgcatcagcttgtttgttagaaagacccaacatatctacctatngttgtcgntttatttacctttgcatttatagttctttttagcatacaacgttttntaaaattttgtttgaaagtatctcttacacatgttctctcaacaatgcttcgattctgaacttatattaggctaacattagntccctgtgttcgatactcggattcatcccgtttaatatttatatac

SEQ ID NO: 2287 - DNA, 434 bp, Glycine max
  unsure (1)..(434): unsure at all n locations
agctttacccacaacatctctcgccaatggaacactgtatagtgacacttccaggatctttgtgctttgggggaaggattcattgaatgactgcactacaatttccttccacaactatcgtatcattgtggatataccggttcttctttgtcagcatgtcttttaaaaatttggcatagagtggcatctgttgaagagcttctccaaaaggcaaagtgatctctagcttcttgaagatgtcaagaaatctggctaagtgtcgctctttatccttcttggaagttaccattggatatggtacttcctttctttcagctaaattaatctctctctntgtgtctctcgaaacctcactctggctcttctttttctgctcatcaaccttctctntntcttntcaattttctgaattttttctttttctacttcttctt

SEQ ID NO: 2288 - DNA, 382 bp, Glycine max
gtaacctcatcgtctctcacagtctttagatatgggagccaatccaatccttgtgttcggactctcagccacttatgatagctgccgatgatcccattactgcttcccctaagctctctgtcctttcttcacaccgcatcacatgccttgtgaactccttagagtaccctcgcattggggttactgaaaccccgtgcgatgaaaggcgtgatgcttttgtctgatggcactcctctcatggggtagccaagctgtcttatggcgaggacgggattataattaatacaaccccttgttccatcaagggaacatttggacatcctttgcatgaagatagaatcctgattcttccttccttctagcgaggggaaaaaataacaga

SEQ ID NO: 2289 - DNA, 378 bp, Glycine max
  unsure (1)..(378): unsure at all n locations
ctactatgacttgagaaacaaaggtgatcaaataacaagcagagatttaaaagttactaggttgcctcctattagcgcttctttaacgtcttgagctggacgcttgatggcttgtcggtcacggacctagtaccttgcttacctatggctctggacttggtcgcctattgctcggccatgggtcgtaagcaacgctctaaccttnttgtggagagctgaggtgaactctagaggtgatggcggtgcgtttgttgcccgctgctggccatccccaggctgctgtggtgttttgccctgtgcttgcctgggggtgcagtacttcttgatgaaagctcgattagtatggggcctgatgtccttgttggatgtgacagacac

SEQ ID NO: 2290 - DNA, 553 bp, Glycine max
  unsure (1)..(553): unsure at all n locations
aaagcgaggcaaccaacgcaacacgngtgcgaggtagacgacctcacggacnaaannnnnaaggggtgaacatgaactgagacntcgganaccagcnnggggaanagggggccacaccaaggggaccaggggtcggccggcganagtgcacagcaaggnngccacattcagaatgcgcgcacaaacccaccaacccctggtgcccactccaacggagcacacggacgcccacgaagcccagagccagagggcgcacacaaccgcggccccatcaaacacgccaagcgagcacaacatcgcagcgaaacaacacacaaacagcacaagccatcacagccgagccgaacagagcaaggcggaaaactctgcccaacacaccaaccaaaaacacagcttgctcacgtaaagaccccaggacaaagactccgaccaagcacgaaccgggggaagacgccagaagagaccgaagccgaacgggcaaagccacagaggaacgacggaacacaacaaacagcagaacaacgcggcgggcggggcaccgcagagaacaacn

SEQ ID NO: 2291 - DNA, 452 bp, Glycine max
agcttccaaattagtgtaccacactaccgcttctccggccagtctatcctgaaagaagtgtatcaacagcttttcatctttagaatgggcgcccatcttacggcagtacattttgaggtggtttttgggacaagtcgtccctttatacttgtcgaagtccggcactttgaacttcgggggaataacaacatcgggtactaagcaaagatccgtcatgtctgcaaacggatagtccccgaatccttccacagccctcaatctttcctcaaggagatcgagcttcctcctttcttcagttgccgggggcggcctttccatagacaaaactattggcgatgctgctaggttgggttgaggcaacgtgcctggtgccggcccttcggagatcggaggataaaactcgacatcccttcgagcataatcttgagggtctatatggacttcgtcgggct

SEQ ID NO: 2292 - DNA, 422 bp, Glycine max
tcttctgcagacctcagggatcggtcatctgtcctggccgttgtcgactgtcattttcttctatcaatatcggtgaataatatatacttgccggggtgggctgatgttttcttggtctgataaatgggaacatgttaagttcgcctgaaacaaaacgtctgttgagctctcacgaagcaactctaccggcctacatctgaaattctttatgcgacaccaaaaacaagaacacttcctgtgccgcacaaaataaacgtcacacgccagcgagcgtgttaaaaaataaatctgatggggctatttcacgaccgatgtctgctattgtgttatctattcaatccctgaatgagatttgcatgaagcctattaagaaatgttctatcagcgtcatgcggtgatgcttacttattagacctcgatcg

SEQ ID NO: 2293 - DNA, 464 bp, Glycine max
  unsure (1)..(464): unsure at all n locations
agcttngggatgctatgatccgtccgatgtttgtctattgaagtttcttctctcataaactcgaatcatgagaatgaatagttttgttgtctaatgttgttaattcatatttgattcattagtagtttattatgtcataaatcttagtgcatcaattgtattttgccctactgaattgcttgatgccttaattttatccttgttttattgtacttactttctttccataataatatttcttatataaaatagtccttatattttgattgcaggtgatttctttgagggggttttgtatttaccccaattgtcatgatatgctttttttttcttccttccttttgcaagttaataattctttacanttatttttatgaggcaactgtagcacattgaagctttaccctctaccatgctttcacatgttcatgtttcttaagctgttttgcattttcgtcctatcg

SEQ ID NO: 2294 - DNA, 480 bp, Glycine max
  unsure (1)..(480): unsure at all n locations
tgatgttaatagtttcttttagganaacgactccagttgttacgtggcaacatgttattatcaatttgagtttaatttaaggcttctcctctctttgggatgttntagtgcgttttgggcaaacaatttgagccattggagacattctggtccagatgcacctgattgagggcgatggtgccaaagtcaaatgtagaatatgtaaccaaaaatctgcctaattttccaaattacatgaagatcgtttcttccttacgaatcaaattatgaaggtattcaatattcatgttttggtgagttcctgaccaaaacaattatcaaggtattagtgagtagtacgaaaattgaatttcacatgagagaaaatatagcattgaaatatattcgtttggtgatttataaaaatataataaatagacattggtaggttaaaaagtatattaacaacgggtggacaatagttagtgcccttaataagta

SEQ ID NO: 2295 - DNA, 485 bp, Glycine max
ttaagtcacctgcggcatgcaagcttgtgcttgttttatttaaattcctatgttcattatcaactaggtgtgtcctactatgacttgagaaacaaaggtgatcaaataacaagcagagatttaaaagttactaggttgcctcctagtagcgcttctttaacgtcttgagctggacgcttgatggcttgtcggtcacggacctagtaccttgcttacctttggctctggacttggtcgcctattgctcggccatgggtcgtaagcaacgctctaacctttttgtggagagctgaggtgaactctagaggtgatggcggtgcgtctgttgcccgctgctggccatccccaggctgctgtggtgtttcgccctgtgcttgcctgtgggtgcagtacttcttgatgaaagctcgattagtagggggcctgatgcccttgctggaggtgacagacactccgtagaactagcagagacccgtaattagagt

SEQ ID NO: 2296 - DNA, 486 bp, Glycine max
  unsure (1)..(486): unsure at all n locations
acactatgaaactcagcttgaggattatggngtacccatcacatgtggtactaggtgtttgtcggtcgatggtgcacagcaagttttccacatccagaatgcgcgcataaacccaccatcccctgttgcccacctccaactgagctcacgtactcccacgtagcccatatcctcgtttctctcaataccgggtccccatcaatcctcccaagcttccacaacatccaagcaaaacaacatacaaacagcacaagctatcacagccaagcaaaacagagcaaggcagagaactctgctcaacacaccaactaaaatcacagcttttctcacttaaagaccccagtaacaattccttcgatccaattcactaaccgttggatcgactcncaaaatttactggaagtctatagtgcataagcctacattntgaccggtgggatctacaagcaaacatccagaactcactctgcactgctctttccacac

SEQ ID NO: 2297 - DNA, 452 bp, Glycine max
  unsure (1)..(452): unsure at all n locations
agcttcatttcattccaaaagaattatatttatagtcttaatttagatacagttccattggagctgttggtgctattcttctatcagaattagagttttacttcagtaatccatattgacctttaatgcaaacaattattacgcaaattaccgagatgaaactccaattccagctgaagaacggtaccaaaaacatacaaaactgcatctaagttttttttttttttttttctctatatataaaccgtgagaaatgtaagcaagcagggcataccacaaacattttaactccaataacatgctcaaagcacatgttgccacgtgaatctccgtactctataatcaatcacaagactcacagtagcaacaggacgaaactcttcagattgaataacgcattgattttaattgcaaacttaccnttggctcggtcatcgacttctaaagctatg

SEQ ID NO: 2298 - DNA, 370 bp, Glycine max
aactaagctgtagggctgttggtttgagttggagattgagcttttagttttctttcaatattctcagatcctacagaatctcagcttccctgactcttggctagtaattcttaacccggttttcttacctcttatcattaaggaacatgagttatatatacaaaaaatatgcgtgtaaacattcaatccgatgcccacatgttggtctcaacatcaaggaaattttcttctgagatgaataaatttaattgggcatcactaaactctaattgtctggtgcacgtcttaatcaatactcgatcatcttctactggtttcaaccctatctttgatgacaaggaaacattttctagtcaattgttctttcgct

SEQ ID NO: 2299 - DNA, 467 bp, Glycine max
agcttccacttgtgtattgcatcagtaatattatatgttctctgttttccctcccgtggatgtagccttgatcaaaggtgaaccacgtaattctgtgcgttctttctcatctctctctctctcattcattttgctgcaacatctgtgtgtatgacatttctgttctactgcatctcgtactactggtcttgcttgttcttcatcacttccataacaaactagtatcaagagctcaagttgtgatcaagggaattcaagattctcgtatgaatatgaagatcaagttgtggggagtctcgtttctggtcctttcgctgcttctttgtgatcaagaacactcaagaaatcatgtcaaacacaatcaggattgagaaattcaatgaacagaacagcttcaatctgtggcgcatcaagatgcatgctctgttgaaagaacaacgtgtttgggctcttgttgctttgcatct

SEQ ID NO: 2300 - DNA, 440 bp, Glycine max
tgttttacaatcggtgcagtaaaaataagtttgaccatattttcatggtgaagctaaccaatctgttggataaacagggagctgtaggatcagcaaaacctgcagataggcccgatcatgaggtagatgatcccctatatctgatgacattaaccatcccacaactttttctgaagccattgcaggttatgtgggatgctaccgtgtttggggtgtttaatgaacacttccccttgtacataaagaatgaagatctgtctgaaatagcacacgatggtcaatgtcttagcatatctattatacagttgtagattctgtaagtcaatttagattattgttaattacctaaattattggtttaaattcatacataaattactttgcgttaacaacaatatgcatatgactgagacaagtatgcgagcaggaaatgccgatgt

SEQ ID NO: 2301 - DNA, 439 bp, Glycine max
agcttgcatgtctagtgattctagtgagagaaaggtctaagttccagagagttttgagagattttgctgtgtgaagatctgcagagaccagagcttgaagaggaagccatctgagagcttaagatgagtttgtgagtggttatgagatcctagaggtgaaggagacatcctccccacttgtatttttgcaatctttcatcttattcttctctttgttgtaaaggaggcttcctggttatggaaagctaaaatcctctgttggatcttccttgtaggtacttgatgtaaatatcttcctatttatttaatgatgctttatgtgttctatgtgctatcagcttttcattctagtatgcctttaccttgatcacgtagatgcatgctttgttaggatcattcaacagtggaaactagtttgattctgatgaccttgatagga

SEQ ID NO: 2302 - DNA, 476 bp, Glycine max
  unsure (1)..(476): unsure at all n locations
ccatcacttgatctctctaaagcttggcccattcattagttggatgttaaaaatgcctttttacatggtgaactaaaagaaatagtgtacatgcatcaacccttaggttttaaggatcctgatcatcctaatcatgtgtgtctttttcaaaaatcgttgtatgggctcaaacaagctctaagagcctggtaaaaactatttgccgactatgtttcttctattgggttctctcagagcaagtctgacaactctctcttcatctacaagaaaggtttggagatggcctatattctcctttacgtggatgatatcattctcactgcttcttttgttgctcttcgcaagtctatcatgttacttcttaactccaaatttgctatgatagacttgggaccactcgagttatttttgggaatngtagtcactcaacatgctggagatctatntntgtcccagaaaagtatgtatatgaatcg

SEQ ID NO: 2303 - DNA, 409 bp, Glycine max
agctttgagcaattcaaatggtcattgcttttcactcggatgtccgattcaggcgcataatatatcgagacgttcgaaattgaacaatggaagctcttgagcaattcaaatgatcataacttttcactaggatgttcgattcaggcacataatatatcgagacgctcgaaattgaacaacggaagctctcgagaaattcaaatggtcataacttttcacacggaggtcagattcaggcgcacaatatatcgagacgttcgaaattgaacaatggaagctcttcagcaatttaaatggtcataacttttcactcggatgtccgattcaggcgcataatatatcgagacgctcgaaattgaacaacggaagctctcgagaaattcaaatggtcataacttttcactcggat

SEQ ID NO: 2304 - DNA, 356 bp, Glycine max
tccattgttcaatttcgagcgtctcgatatcttatgcgcctgaatctgacctccgtgtgaaaagttatgaccatctgaatttctcgagagcttccgttgttcaattttgagcgtcttgatatattatacgcctgaatcggacctccgagtgaaacattatgaccatttgaattgctcaagagcttccattgttcaatatcgagcgactcgatttattatgcgccggaatcggaccttctagtgaaaagttatgaccatgtgaatttctcgagagcttccgttgttcaatttcgagtgtctcgatatattatgcgcctgaatctgacttccgcgtgaaaacgtttgaccatatgaat

SEQ ID NO: 2305 - DNA, 482 bp, Glycine max
  unsure (1)..(482): unsure at all n locations
gatccttaagcacctgcagctgcagctttaggatgaaaatttattgttatgagagaaccattgggaattgacatcgcctaaaatccaaaatggttacttctcagcaactgactggagctatggtaaatttaccatagaacgtcgtctaccatagaatgtcaccaacatcagaaccatttatccttggttttcatcaaaaaagatttataaatatggccataaacttagatctattgttgatgtaataactaatggtatgattgtgaaacctttttagcatatgaattattttttctttgtttataatagaacaactttaagtcacgggaaaaaaatacaaagagaacgaaggataagatatcataattagcatatgtaaaaagcagaaaacaacaaaaacaaagaggaaatcaacaaanagatgttcacttcctcgacatatatactagtgagattccattcaaaaggaaatgtgatgtata

SEQ ID NO: 2306 - DNA, 433 bp, Glycine max
  unsure (1)..(433): unsure at all n locations
tctatagatggttcgttcctaatttctctactattgcattttctctcaatgagctagtgaagaagaatgttgcatttacctgnggtgaaaaacaatagcaagcctttgctttgctcaaagaaaagcttactaaggcacatgttctagctcttcctgacttttctaaaacttttgagctagaatgtgatgcctctggagtgggagttggagctatattgttaaaaggtgggcaccctattgcttattttagtgaaaaacttcatagtgccaccctcaactaccccacctatgataaagagctttatgccttaataagagccctccaaacttgggaacattaccttgnttccaaggaatttgtcatttatagtgatcatcaatcacttaagtacattaggtggaaaaacaagttaaacaagtggcatgcaaaatg

SEQ ID NO: 2307 - DNA, 437 bp, Glycine max
  unsure (1)..(437): unsure at all n locations
agcttcaatacagtgacaccagtgtttcattttangagctgacaaagtcttttggatgggatacatatgattctttcatgcagcatgatgttcaagaactaaatcgggttctttgtgaaaaacttgaagacaaaatgaaggtatggcaagagttttggaatatttgttcatgattattcttgatgggtgaccatatcaaatggttgttttgtgttatttgtcttcagggaactgttgttgagggaaccatacaaaaattatttgaagggcaccatatgaattacatagaatgcatcaatgtagactacaaatcaactagaaaggagtcattttatggtacttccttatgcattttgaattcaattatatgttttgttcttccttgttatgtatttctaatttagttttgcatatgcatgttagaccttcagcttgat

SEQ ID NO: 2308 - DNA, 437 bp, Glycine max
  unsure (1)..(437): unsure at all n locations
tctacggagggttggatcttgagcttcaatgatgtccttcaatggtgattntccaccatggagatgcagtggaaggcaaaggagaagatgagaagggaggcaccatccactaggaaataatccatggaagaaggagcttcaccaccaagaatgtgccttggataagaagcttgaagaggatgctttaatggtggaaaagaaagagagaaagagggagcacgaaattaaaggaataaaagagggagagaagtggaactttgaagtgtgtctcataagactttcattcatcatagttgcaacaagtgttacacatgcttctatttatagactangtaagctccttgagaagctntcttaagacaatatccttgagaagcttctttgagaaaacttcattgagatgctagagcttagctacacacatgcctctaataact

SEQ ID NO: 2309 - DNA, 459 bp, Glycine max
agcttatcaccacactccttcaaaccactggccacaccaccaacaacttcagcttcgtgaatctcacttgcgactcccaatttggcgtcatctcgatcctcttccccgcaccgtactctccctctaatgccaccatcctcttcttcataaagaagcgtgatggcactagaaaaccactgagcgccactacgctgaactttctcctcatcggtagggacacatcgttggtggcgctaagctggttcttctgactcttcatgaaccaccccatcgtggaagaaaagatcctcgcagagctaacgttggtgcttacttccactcatggcggcgaccgacgacactggatggaggaggcaatggacttcgaagaagcagagaaacttgtttagttaaaagcagtgttagccgaaacgctacgtgataataagttttatgttaaataataaaataattttaaaa

SEQ ID NO: 2310 - DNA, 365 bp, Glycine max
ctttgcaactgctaaatatatccaaatatccaatacaaaacctttagaatcacaaagtttacgataatataagaaccaataaaagcttttgtagtcaacatacacacatatctagaataacattgattcttcaaagttcaaaaacttcaatcctagctttcaaaaatgctcatatggaaaaaaatcattaaattaagttattaaactaggcggtataaactttgaaacgaaatattggagattttgagatctttacctgcaaagaacaacaaacaaacaatttctatgccagacaaacaatgatgctacaatgcacctcaggccttcaccttggcgaaagtcacactggaatgtgtcatgaagag

SEQ ID NO: 2311 - DNA, 400 bp, Glycine max
agcttgcatccaatgcgtatatatggattcttccagtacttcataacagcttatgcatccaaagcgctacacaattgacctggccgaaaatcttttataaaaatattcatcagcgtccaacacatctttttgtccaactcgctaacaaaacttgtggaaatattttatactttcatttaagatttcttcatccaaaaatgaacacttgatatagttcttttctctatgttgttcgaatgctaaggtttatttgtgcttacattcttcattgtatgaaccttagtctgatattcctttttgtttttttcaaatatgctctaatgtttaaatttcaaacatgaaaataaaaaaattgtaaatataagcacaacctcttgatcaaaataaagctacacaacga

SEQ ID NO: 2312 - DNA, 442 bp, Glycine max
  unsure (1)..(442): unsure at all n locations
gcttgtacagcttacttcagaatgaattaaggttttattacctataatcaacgaactaacctccatacccgaaatggaagtaattgccttaagttgcatgatataccatagtcgtacaagactctgtaatcccctttgattctgagattgatttgtagcctcttcctctgctttgtaactggattcatcagagagagctgctgcaacttcattttggattgaccaatctatagtatccacaaagacacctgatgtagggtttgcatgcaaattttcatcaatgtgattcttgtggccatgaaaaacttctagaccatctttctcaacagcattctcttgctttaatagtttgaattggcacggaaaaagagaggtggaaggaatacttntttccaaaataatatcgcatgccgtcaaataaacccctatgcaatcacaaaag

SEQ ID NO: 2313 - DNA, 369 bp, Glycine max
agcttctccttcttgattaatgagagataatatgcagagatgagaaagcaaaagacgggtgagaaaaataatatgcatttttttctttattacatatgcattttgttgtgcgtgtttatattaagaatgggccagacaattaccttggtggcatcaatgataaattgtacagctagttgggtagggtagaataattaaagagtggggatgggaaaccacttaaccactcattgtacaattttagattatagttgggagaagttaaaaatattattattttctttcttttattcatagtttcaagaatctaattgttgatcatcccgaccagctaaaatattgagttaccatacggttaatgatcaaact

SEQ ID NO: 2314 - DNA, 418 bp, Glycine max
  unsure (1)..(418): unsure at all n locations
ntcctacaagtcctaattgacattctatactagaatcaacccactttaaactccaatttccactaacccccaaattggctttttcaacccctcaaagtcttacacttnttcactcacatcactaacatttttaccttttaaccttaggtaactcttcccattaattttaacaagtttctataacatttttagccgttcatatatcacaaagcatcatcataaaaccctaaatcagaatgggtaatttggctcacatcaaacatgtcaagtttagcatgatttcaacaaattccttcacaaataattattctaaggcaataacctagtataactacccatcataactcccaaaaacccaacacccacgaatttcatgtgagaagaagtccacccatacctgaatntgaagccccacaat

SEQ ID NO: 2315 - DNA, 467 bp, Glycine max
agcttgaccatacaaaaccgatgacattagttataaccaagtttccattgtcatgaagggtggcgaaggagacacccaagttagaatttctagagtcccacatggtggaacccaacccattaatgaggacgaggttgtcgatagggaggaactggagggatacaatggagtcgatgacaacactatttatgatggactagatggcaattcgtggtggctagggttcatggtggtggcgctacttggtggaaggattcctctttccactcatatatagatatggatctggaggacgaggataagggtgagaggcagaagtttaggaaatgaaattggcatgagttcatataagtttagggcgagaggttcgtacctttgtcataaatggagatgaaggttcactaatggtggcaatgaataagcttcacaaacaacgccaatgacgaagcttcatagagtaagaagag

SEQ ID NO: 2316 - DNA, 385 bp, Glycine max
  unsure (1)..(385): unsure at all n locations
tgtgctgcaattaatctggaacagacatatgtngttaatatatatttattgngaggctatgatggtggcagaagtctttatgtttttgaattagggttttatatgcattaatatatatgttataattgttatctttaccataaaacgcgtaaatcaattgatattgtttcagcttaatcagatttaagtatctctttgtgttagatacttgagagtaactagttaacaaaaattatttttgataaaaaatacatgtgatcgataaaaaaaattcactctatattttatataatcaatttatgatataatgaattatttcttctctatttgtggactctattttgttaagaattgttcacattaaatatgtgtgtntattcttcta

SEQ ID NO: 2317 - DNA, 431 bp, Glycine max
  unsure (1)..(431): unsure at all n locations
agctttaacaagtttcttcacaaataaccatcatgttgcagaaaactagcaagactacccatcatatctcccaaaaccccatacccacgaaatttaagagagaaagaagtccacccaaacctgaaatttggaagtcccactcgtagccacgcacttcacgactccgaaaatgccctccttttgcgatttggggcagaaatgatggccaaaggttgaagctttgcttggagcttcaatggagaatgaagaagaagaaaatggcaacgtgagggagagagagagctgtctgaaaagtgcggnggctgagtgaagagagagaaaagctttttggtttaaataaaagggttttctctttttctattattttatttaagctatgccacatgtctncgtttgagtggagcanaaagggcccactttcccttttgact

SEQ ID NO: 2318 - DNA, 461 bp, Glycine max
  unsure (1)..(461): unsure at all n locations
nttcgattcattctatgtacccgtagtggtccacattgtgtttcgtgcatttntattctcgctntgtttactttttataccccctcttgacgtgcttaagccattttacttaagtcatttctcgcttaacttaaaaataaaataaatttccaccgaacgtttgaattatattatccgttaacttcggttaaaatcaattccgaccattcggtcgtgccgtaaccacgttggaaatcaaaaaaagaggtaaaaataatataataataaaaaaaaacatcttttagtaaaataaagcggaaaatcaatcggacattttctctntgggatttctcattcttaatcgaattgattaataactaaagtgaaactaaggctaatatcaactcgcctagtcaagctcgtgcacaaaaataggcttttgaagtttgtcatttcaatttctcactaagtaaaatggatca

SEQ ID NO: 2319 - DNA, 462 bp, Glycine max
  unsure (1)..(462): unsure at all n locations
agcttccatggcacttaaataggaaatctgtttntctttattgatagggttttagtgagcatatttgttgtatatcagcctatcaggatttagtattatagcagtctggtggtatcaaccacaagcaagcacacaagttatggttgtataaactatattattgacatttgatagtcagcagagcacaatcatcatcaccaccatcattttgaaacaaaggagagtttacaatgatttaaatgagattcgtgttctatttccattagtttaattcaagtgtctttttatgtttacatgtatcactagataatgatgagaagagtattcaagtgtgtgtaattcccacttatatgaccgctggaaccaataatagtttggcaaacattgcttgatgaagctcaaaaaactgtgattngattatttatcangaattangctaactgaatgtaaacatgtgtacgt

SEQ ID NO: 2320 - DNA, 181 bp, Glycine max
  unsure (1)..(181): unsure at all n locations
tgtatctaccttcgctcaccattggnctatcgctntgggatccaatcaataagaaaggtgtccttancagagatgttgtattcttcanagaccaaacgatcgaagacattaaaaattcagagaagctaagattgagaagcagcangaacactgaactaactccagttcgatgtgagattat

SEQ ID NO: 2321 - DNA, 465 bp, Glycine max
  unsure (1)..(465): unsure at all n locations
agcttcttgtcacgcatgtcctccaacagtttcccgtactctcttgctgcttctgcccacgcctccgtctccgattctatctgcctcctcttcagcaacttgtacttgtagctgctgctgtccactttgtgttctgccttcgccatttcctccaacaatttctgaacctcatcgtagtcatcttcggtgtccgtcgactcaatagcctccgcaacgctagcatgacctctgcccagcaccatccaagaccacgaccaagaagaagaacaagaaaaaccctcgtgaaacacaaacttggactgactcaccccgacttcagggaaaccctgaaatgttntacatgtttggggcttacaaaatctcggagataaagaagaaacacggaagttattccttagggttgaggaagctcgcttggccaagttcgtccacattatggaccttagagacagaggcaaatgttat

SEQ ID NO: 2322 - DNA, 468 bp, Glycine max
  unsure (1)..(468): unsure at all n locations
actaagctgtggatatggtgacncatcacatgggactaggtggcggtcggtctatggcgcacaacaaacatttccacatccacaatgcgcgcataaacccaccatcccctgttggccacctccatctgagctcacgtactctcacgtagcccatatcctcgattctgtcaacaccgggtcctcatcaatcctgccaagcttgcacaacatccaagcaaaacaacattcatatagcacaagctatcacagccaagcaaaacagagcaaaggcataaaactgtgccagaacaccaaccaaaatcacagcttttctcacttaaagaccccagcaacaaatgcttcgttccaattcgttaacccgtggatcgactcaaagaatgtactggaagtctctagtacttaagcctacatgttgaccgttggatctactaaaaacattcagaattcatcctacattacgtctttcac

SEQ ID NO: 2323 - DNA, 460 bp, Glycine max
agcttcaaatcatatgcatggagcttgactctcatactcatcaacaagtcaacacagtgtgaaagcaatgacttccaagattattttgatgatgccaaagaatcaacagttaagcaagttccatagaatcaggagtcaaatagcttcaagaatcaagttacaaagaatcaagattcaagaataatcaagtttcaaaaatcaagattcaagaataatcaagatcaagattcaagactcaagattcaagaatcaagagaagactcaatcaagataaatactaaaaaagtttttcacaacattgagtagcacaagaatgtttcacataatcttgtaccagagagttttactctctgctaatcgattaccagatgggagtgatcgattaccagtagccaacattgttctcaaaactgatttacaaagctgtaatcgattaccataatcatgtaatccattacca

SEQ ID NO: 2324 - DNA, 375 bp, Glycine max
  unsure (1)..(375): unsure at all n locations
tctganatttctgaaggaagagagagaagagttgggcctttttaaaaaatgattctgggttcttcttttcactttcttttctaaaagcaattgccacatgttccattttaagtggagcaaaaggacccacctttttcctttgatttgacatcatactcagctataaggaaaaaaaattgaacctttctagatgctgaaatcctgcctcgatttgcgtgccgcctctcgggttccaattcctcgcgtttctctgcacccgtcggggcctgttttcaaagtaggcgatatatatatcaaaatgctcagaatgagaccctgagagtgggttcagaggttggttttgtaaatttaagttgcatgcaaacgataatttta

SEQ ID NO: 2325 - DNA, 465 bp, Glycine max
  unsure (1)..(465): unsure at all n locations
agcttagattaatatatgcttaatcttatttatgcttaaacctagattcacccactcttaagcctgaaatccaacaatcacattttcttggtagacacttttacttaatcacaattcacccttggctaaatcgtaaacatttgtagaacttcaaatttattgagtaaaacctcaaaatggattctaaatcaaactcatttcaaattagacatcataaaccatacataccaatcatttcacaccccagaacaatattttcaagcatcaaccacctaaataagcattcaatcaaagtaaagtttttcttacctatcaaactcgatgagttagctntgagatgaagaagagaaataaaggaggagactttggattcaatatgaaagcttccctcaattctacaacagttctacatcacccacgccacccaatccctaataaaccaacataaaacacattaaaacctta

SEQ ID NO: 2326 - DNA, 273 bp, Glycine max
atcgggtagatggattattggactagttcgctcaagcatgtgaagctcgtgacactcctggagataaaaagtccaagttgtgctttgagatatagacgcttgcccacgagggggtggcgcttcttaacaactgtatggtgttggagaacataccggatgatcttcaaaagggtctcaaggaacttcatgaactacgcatgcatcataatgaagactgagatgatcttcggagagaatgtgcacttgctcacagcgattatgtgttgcaccatg

SEQ ID NO: 2327 - DNA, 240 bp, Glycine max
  unsure (1)..(240): unsure at all n locations
gatccttaagtcgacctgcggctgcagcttatcaaggagtaaatatttatgttgtttcttttataaattatatatttaaataaatttattttgaaattatttagtttgtggatctgtttttttactacaatgtacctccccgagaaacacgtttcctgtaaagatgacacgtgacatgacttangacgcgttctattaaggcgtgattagtaacactgctgccacaagcgcgttgtgtca

SEQ ID NO: 2328 - DNA, 457 bp, Glycine max
tctagctgaatatgcttggactaaaggaagtattgttatttataatatattggcaccaatcaagcatacgtggtgcatggatgctaaaacctgttctggtcatgtaaaagaacatctttgacaaaggaaattactctaatagccaattaaactacaatttcaaaatgtcagaatagagcaatcaactagtgaagcgggaagagaaggatgcaacttatactatatattttatttaatgtctcacttaaattatatctaatagctagtaacgaatatattaaaaagaaatggtacaaaattcatcttaaccttttcagacttgcaatacaaaaaggttctcgacagcctcagagaaccttctgtgtcatgcatatcagtatatatataccaccaccactcctaaagtcctctccgatccaatccttgcgaatctcaacccaggccacagtactgcaac

SEQ ID NO: 2329 - DNA, 436 bp, Glycine max
agctttgagccaactcaaacgacatttatcgttttctcggatggtctgatgagtcccgtaacatatcgagacgctcgacattgaacgttgaagctctgagccaatagaaacgaccataacttttttctcagatgttcgattgagtcccgtaacatatcgagacgctcgaaattgaatgttgaatctttgagaaaattcaaacgacattaaatttttactcggatgtcagattgagccccgttacatatcgagacactcgaaattgaatgttgaacctctgtgcatatcaaacgacaataacttttttctcggatgtctaattgagtcccgtaacatatcgagacgctcgagattgaacgttgaagctatgagccaatacaaacgaccataatcttttacttggatgtctgattgaggctccgaacatatctagacg

SEQ ID NO: 2330 - DNA, 422 bp, Glycine max
  unsure (1)..(422): unsure at all n locations
tcaacattcaatntcgagcgtctcgatatattacgagactctatcagacatcagagaaaaacgttattgtcgtctgaatttgctcagagcttcaacattcaatttcgagcatctcgatatgttacgggactcaatcagacatccgagaaaaaagttattgtcgattgaattagctcagaagttcaacattcaatttcgagcgtctcgatatgttacgggactcaatcatacattcgagaaaaaattattgccgttgaatttgacacaggttaacattcaatttccagcgctcgatatgtacggggctcaatagacatccgagtaaaagtattgtcgttgattgctcaagattcacattaatacgagcgttcgatatgtacggactcatcgacatcgagaaaaagtatgcgttgaatggctca

SEQ ID NO: 2331 - DNA, 434 bp, Glycine max
  unsure (1)..(434): unsure at all n locations
agcttccattntcaattacaagcgtttcgatatattactggactcaatcggacattcgagtaaaaagttattgttatttgaatttgttcacagcttctgtattcaattttgagcgtcttgatatattttgggactcaatcggacatccgtgttaaaagttattgtcgtttgcatttgctacgagcttccgttttcaattacgagcgtctcgatatattacgaaactcaatccaacctccgagttaaaagttattgtcgttagcatttgctacgagcttccgttttcaattacgagcgtctctatatattacgggacttaatccaacctccgagataaaagttattgtcattagaatttgctacgagctttcgttttcaggttctagtgtcttgatatattacgggacttaatcgaacattcgagttaaaagata

SEQ ID NO: 2332 - DNA, 400 bp, Glycine max
tcattgcctaacaagccaacttacaacagcaagccccaatatactcagcataaggatgcacagaccacagttgcgtatgtaaaataattgtatgaccaagtgaaggtgcaaattgcatagaagaatgaaagctatgcctagcaagcccaaaagataatgaaggaagtggttcttgaacccggtgatgatcttggacatttgaggacacatgttttccaagaatgagggaatgatgagaatcatgaaacaggccaaatacagtctaaaggcccaagtggagaaggacgaatgcccaagtggagaatgacataacccccgagtggagaaggattaatgcccaagtggagaatgatgaatgcccacaggcatagacacttataatactattaattgatgctga

SEQ ID NO: 2333 - DNA, 424 bp, Glycine max
  unsure (1)..(424): unsure at all n locations
agctntataagcgcgggtctgggagacgaatgtcaagtgttcgcaatatacgaagatgatgttccgagtacattggatttggtacgaccttgccctcctgatttccagctggggaattggcgagtggaggaacgccccgacattaacgcagcgagcataatgtaaacctttacggttttaaaagctctatagttgggcctaggctttagagtttttcttttgggtaaggctttgtgtattttgtttttttaatttataatacaaggatctttcttcatctgttcctacgtctctacccattctcatccatttgcatgtttacttcttttctgaaacggcagatccgatgacaagtcccccgaaggtactaatacttgggacctgcctatcaacttcgagcaagaaacgaatcaaacggaagatg

SEQ ID NO: 2334 - DNA, 398 bp, Glycine max
  unsure (1)..(398): unsure at all n locations
aacaganacacttagtaagttgccaactcaattgcattctagtcaacattgactatctgctgttttgcaggttgcaggttgtaatatatgtggtggagctcatgattcangcttgtgtgttcctaatgaagaaacaactcatgaaattaactacatgggaaaccagcctaggaaaattttaatgcacgtggtgttggatcgagtggcctcaaaataattaagaagaggggttgaattaattattcataaacctttactaattaaaaatttactctnttaaggctgttacttatgttgttaagagaataaggagtagaagagaaacttaacagaaagtaaaagcggaaattaaatgcatagcggaaatcaaaagagtcgggaagaaggagacaaacaca

SEQ ID NO: 2335 - DNA, 228 bp, Glycine max
agcgtgctatggactagtatagttcgcctttccggcgagttggggcccattagatcgcgacaactgtatacctccggaactattcttctacctcatggaatatgtcactactaaatatcggtgtacataagactttttttatacatattaaggttctttccactcctattcctcggttgatttcctcgaggttgacgtagacgggtaactgagtaagacctgaatagc

SEQ ID NO: 2336 - DNA, 403 bp, Glycine max
  unsure (1)..(403): unsure at all n locations
nganacagggcttgataaagagctattggtattccaatatgataagccagatatgcaaggcaatctctttaactccacaaagctatntctgaaatatgctgaagatgaaattgtacggatgaaagcagatgagagataagccttgtaccttcgaaaagaagttactgaatactttcatgggaatgccacaaaggaagaagcccaccctctcataattttcatgattagaacagactttttgaatatctcggatctagtgtgcaaagaagtggaaaagatgcatgatagaattgttggtggttctggcagatccttccaaatacctcctaatgcatcattacctgttgctaacatgtacaatcatcgacagcaagatagaagctcatatgacgaaagctcatct

SEQ ID NO: 2337 - DNA, 369 bp, Glycine max
  unsure (1)..(369): unsure at all n locations
agcttgttgaaggaaaatgttgtgcgaacgatgccgagattgggcagatgaagagcaggcataggaagcgaagccgacaatggtggaaggaatggttgcacgggtgcaagacatggaggcacagtcggcatgggaagcagagctggtgatggtacgagacttggttgcatgggtgtggagcatgggcacagtcgacatggatggcggaggtggcatggacgacagaagtggcatgggcgacagagtcggcatgggtgattggcgttgttgcatatgtagcggagtagacatgagcggagtcgatatgatggcgactggtatcggtgcctgcgcanggatggaagatgaaaaatgtggagtgagattgtg

SEQ ID NO: 2338 - DNA, 431 bp, Glycine max
  unsure (1)..(431): unsure at all n locations
tattacacaccatatatgtttcaccttgatgggagagtgtgttaaatagcatattattcacaaggttatattntttaaaataaagggcatgcagaagcttattgacactctgaatgtaacaaccagtctagtagctaattgacacttttcaattctcttcttaccacccagtaaaagggaaggtcgatcgcacgttcatcctaaggaatggaaatactgatttggattagttgccaactactgactcctcatctaatcctagaaataagcagtctaaactctcaagtttcaagacaaccaattcaatgaacttgntaatttatctggaaataaaaaataaaataacaaagtccagacataattaaaaatgaccaaagtcccatcgaaagaaccgtgaaggatttgttcataaacaaccaaaatacttcact

SEQ ID NO: 2339 - DNA, 465 bp, Glycine max
agctttaagtaagaaggacattaagatgattattgataatggaaagtgtaaaggcaaatatcataagaaggggggttgaattgtgattttagagtttttaaagcctttttgtaatcaacaaagttttatgtctgaaacaaaacctttgtaaaaacatataatagattttcaaaaccatagtcaaacgttgaaaattacaatctacacttagtcttttctctcaatatgttcaaattgtttctagagcttttgaattttacaagaataaacataaatctttttatagaaagaataaagaatgtttgtgtgcaaggttcgtgtccttgttcttcaaagcttctagtatttataacctttatcttcaagtgtgttgtctcacaacgagtagatttctttacttgttcttcatctgaatgcacatcctttcttcatgcaaagagtccacttctggtggctttcatgttg

SEQ ID NO: 2340 - DNA, 471 bp, Glycine max
  unsure (1)..(471): unsure at all n locations
ctgaagttcttgaaacacactataagggggttgaatagtgtgaaggataaaaatttagtcttttgaaaactattaaaagcttttctcanatagatatcaatgaatgaagggtttcgtccaaggggttcaaaatcacaattgtgcttagaaaatccagttcacaaaacttggatatagagtgtatagaagtagtaaagaaaatacaaagattttatactggttcaccctaactcttgggctatgtcaagttcatcttcaaactttgaagggttccactaatcaaatccttgattacaaccaagtattctctataccacttccagctacaacaagtactctttaggccattcctagcactacacttaatctccctatgagattaagatccaagaattctntgtcactaagccactcctagctttcacaaacaacatatgtntgatagaaaaagtattctaatcactcaatgag

SEQ ID NO: 2341 - DNA, 472 bp, Glycine max
  unsure (1)..(472): unsure at all n locations
ttaagcacctgcggcatgcaagcttctggtggtttgatttgtgagtccatttatatgtttggtttagccttganaaaactggaatcggcaacaggctttgcattgttatgttgagttaatccagccattgcctgaattcatgtgattatcaatgtttactcctgctgcactcacttcctgaccttctggtttgtgattcttgacatcaagaaaaattaaatgcttgattacaatcagcatccctgtaatttaagtgtgaaagaactactcctgttgcactcacttcctgtctccttgtctgcctatcataacatacaagaaaaaaggtaaaattttgtttggagttatgatggatttgaagatgcaataagctcttgaggacaaatgcaacaagtggtcaagtcaagtcaaccagcacccaacactcacatgaagtgtgatcatttgaacttgacacagcaactgatatgga

SEQ ID NO: 2342 - DNA, 358 bp, Glycine max
  unsure (1)..(358): unsure at all n locations
cgtggactattaccttcgaccaaacacggccgtgtttctatctcggccctgatttaaagtgggttgcagtactggctccgcttccctaatcgtactggaggcggttgtcgtggctttatcctctatggttttctggagttttaacatgacctccgagatggaagccatttgatcttttaaggccgatagatcggccttcatctgttcctgcacaccctcttcattatccatttttctggatcgagtgttataggggtgcctgngtgttttcttagctatgatgaatttcctaaagaaataaacaaaggtgagtatgccacccacacatgaatatgcatatgaatgatcagagcactta

SEQ ID NO: 2343 - DNA, 487 bp, Glycine max
ttaagtcacctgcggcatgcaagcttctcctctctataataataataataattattatattaataataataataataataagtgcctatgaatagagaattcttaatgcgtttccattaattttaacatttgaacacaaatttatacggtcaaaatcagatttcacatgataagtttcacctctctatctctataatatagtcaattatactaattattctttaagttttatgaatctatacaaacaccctcttgcttttatccattcttgccctgactttcctttatttatttttaaaaatatacactaacaccatttatgtaattttacaaaatctcaagaagtgtaatttactttaatacgtaatacaaaattaatgtgtgttttaactttaacaaggaattcccaaataatttgtgctttcatttaagattcggcctatatagagtcgcgaatgtattatcaacgcggtggacgatgaaaaaa

SEQ ID NO: 2344 - DNA, 318 bp, Glycine max
  unsure (1)..(318): unsure at all n locations
ngaacagttatctgtcgagcttcataatgagcacttgtaatgatngacatangntttctntctgtcttttgactagtggacaaacattcacatatattaccactgttttgcactgcttatggtagctggatgaatttaactacccagtttcttaacctaggaaaattagctgaaggaattcacgttagagctgtcatagtggttttctgaattttacatcccttttgcctgggattagaattcagatttctactaccactagtgaaacgctgatgctagaaactttgaattattatttgttctaaaagttcttatctc

SEQ ID NO: 2345 - DNA, 434 bp, Glycine max
agcttaaacattcaatttcgagcgtctcgattatttttggactcaatcaaacatccgagaaaaaagttattgtcgtttgaatttgcacagaggttaaacattcaatttcgagcgtctcgttatataacgggaatcaatcagatatccgagtaaaaagttattgtcgtttgaattggctgagagcttcaacattcactttcgagcgtctcgatatgttacgggactcaatcagacatccgagtaaaaacttattgtcgtttgaattggctcagagattccacattcaatttcgagcgtctcgatatgttacgggactcaattagacatccgagtaaaaagttattgtcgtttgaattggctcaaagcttctacattcaatttcgagcgtctcgatatgttacgggactcaatgagacatcccagtaaaaagttat

SEQ ID NO: 2346 - DNA, 305 bp, Glycine max
  unsure (1)..(305): unsure at all n locations
tactcgaatgtctgattgagtccccgaacatatcgagacgctcgaaattgaatgttgaacttttgagctaattcaatcgacaataaaatttttctcggatgtctggttgagtcccgtagcatatctagacgctcgaaattgaatgttgaacctcttagctaattcaaacgacaataactcttttcacggatgtctgattgagtcccgtaacatatcgagacgctcgaaattgaatgtngaagctctgagccaattcaaacaaccataacttttntctcggatgtctgattgagttccgtaatata

SEQ ID NO: 2347 - DNA, 464 bp, Glycine max
  unsure (1)..(464): unsure at all n locations
agctnntaattntactttacagaanataacataccttatttccatgacggtccacaagtcacaacttgcccatcacctaagtacactgcatttttttcttcattacccgtcagtcacatccctagcccctgtcttctctactcacatacaagacactaacttcacatgcaaaagattccaaaacacaccacatagataaaatcctaacctctctctatctagccaatttacaatttacatcaacctagatacgtcacacaacattaatgctctaacattttccctcatattttactgtagagtcacttgaaattaaaactcacaaacacgtcccagtaacaattaaatacaataataaaattaaaaattgattacataaaaatgagctctctatgattgcatcctagatttcaaatggctccataacgacaactacaactataatatcatagaatttaattgac

SEQ ID NO: 2348 - DNA, 327 bp, Glycine max
cttaagcttgttaggagggcagcagtgagttgtgactgccactacccttctctctctcttgtatgggctatatatatgttctttattgaactacaaagataatatatatatatatatatatatatatgtatatatatatattaagcaataaatagtaccagaggtactacaggatagcacacgagagaagatctcctaatatagagaacaaaaaacagaaatacatttgccctacaagaaaccaccagaagcctgaccttacagagcacactctaattaaaagccatagacatagctgaggaccattgatgaaaaggaacattaaag

SEQ ID NO: 2349 - DNA, 411 bp, Glycine max
agcttgtagccattagaagataatgtgcttgtgattggaagcatgactaaaaatgttagtcaatttgtcagattgattgtgaaggaatgcattaaccgtatcccggtgaaagtgtgatccttaaattttgagagaaataactatcatttagtactgatttttgcgtgaatgtctgaagtatggactgaatgcatggaattgaggatgatgaaggccatgtttgattctgatagccacttagccaaaaagccgaccatgtgcttcaatgaattaccccttgtacccagtttgagctgaatgaattattgattgattaaaccctgagcctatacagtgttatctcctgctaccttgacttaggttgtaggagagcatcatctacaggaagtgtagttgcttgagttcgataca

SEQ ID NO: 2350 - DNA, 429 bp, Glycine max
  unsure (1)..(429): unsure at all n locations
tgcttctacanaaaacaaaatcatagaactatgatacaaactcttaaagcttcactgacaggaaccaagccttcatttacaagcttaatgcaaaaacttggaaaaaacaatccaaaaaataaaatttaaaagccacaaagtcaaagctccaatcttgttttgaaaatagagagagcaacaacagcaaaaactacaatcgaagaaaataaatcaaaatcgaagagcaaaaaaaatatcagaaacaaggttctaacgtttctctcacacaagcctttttatttcctctcctaatccatttttcttttcttttgttattccaccaaagacaatttttttctaatggaaaaaacacttgactggcagagaaatagtgaagtgaaaagagagaatgagagaaaagatattattctggtgacgctgatgtgtaca

SEQ ID NO: 2351 - DNA, 419 bp, Glycine max
  unsure (1)..(419): unsure at all n locations
agctttcaaccaaaataaaaactattagctgaaatttataagttgaaacataaacataaatctaaattataaaatgtactaaaaacatgataataataaaactgttcaaaacacagggaaataaaaatcctgatcctgtcaatgatcctgtgcggagtctatggcatgctcattcaggtccagttcaggagtgcctgatgatgaatcctgnggaaagggtcggtctggcactggtgcagatgactcaggctgagaagaagacatgtctcgcactgcagtggaaggctttggtgtcacttgtggggtagccgctactggatcagtctcaaaaatgaaaggctcatgtggagtgggctctgcagcctctaaaatgttatcctcctggtccgactgaggctcttgggctgcagaggccttac

SEQ ID NO: 2352 - DNA, 492 bp, Glycine max
  unsure (1)..(492): unsure at all n locations
ctattacggacctataaaactcaagctgaaaatatatgaattccatgaatntaaaatgacacanaatgaggccaaagtatgaacaatctataaaatatgaattccattaatttaaaatcacacaaaaatatgaattccatcaattccatgaatttaaaatccagaggtatagaagaaggaactgagtttcttcttgtcgactatgaatagaagaagccatccaaaccttgttttgtctaagctctagtctcagattttctatatcaattctacctttntccttgactcctaaatcttctattactaaatgaaaagcagtgatgagacaagattagcacagaggttgttttaatcatttatcagtactgagtgtggcaaaggtgttacctgtggcttgagttccaaaaagctttgcttgctagcagttgttttcatttctagcatcactntggttgaggttttatgctangcacaagtgcttctggatagata

SEQ ID NO: 2353 - DNA, 446 bp, Glycine max
  unsure (1)..(446): unsure at all n locations
agcttctatataagctgaaccatnttatcttttaacacaagttgagttttattcagaaaattagagtttatctctnttatcttagtgagagtgattctcctaaattcttgagtgattcaagaacaccttggctgtatcaaaggactttcacaacctttgtgtgttgccctcgctggaaagagtgattctttccttcctttcatcatcacccttgttctttcaaaccacaattccagaaaatccacctctgcccagaattatctcgtggccataactcccattttaggcactcaaattaagtgattcttgagcctaaattgaatttcaaaacgagacctttcacctcgttttggaatcacctcattnggagccctgtagcttcagntattgccatttctatatntctgtccagccaccactttaacctacgtttaccatcccattca

SEQ ID NO: 2354 - DNA, 431 bp, Glycine max
ctggccaccacggagtttccgactatggtcttgtgtggtggaacaagctacaaaaggagagagcaagaaatgaagagccaatggttgatacatggacggagatgaataagatcatgaggaagcggtatgtgccggctagttactcaattgacttgaaattcaagctccaaaaactaacccaaggcaacaagggggttgaggagtatttcaaggaaatggatgtgctcatgattcaagcaaatattgaagaagatgaggaggtaactatggctcgatttcttaatggtttgactaatgatatccgtgatattgttgagctgcaggagtttgttgaaatggatgatttgcttcacaaagcaatccaagtggagcaacaattaaaaaggaagggagtggtaaaaggagtttaccaactttggtcttctagtgga

SEQ ID NO: 2355 - DNA, 460 bp, Glycine max
  unsure (1)..(460): unsure at all n locations
agcttgacaagccggctggtttaattattatatataatattaataataataataataataataataataataactttattttatcaaatcttatcttatccagattttattctatctagattttattttattcagattttatttcatcccatcttatcttatcttgtccagattttattttatttcgtttatgggtttagacttaaaatagatttgtaagctttggggctgaggacctatataacagcaccaaggttttagtttagggagttttttttcggagaggagaataattctaggattttagaatttcagttnttattactgttcatgcacactgttcacgtagaataaaattcattntttgcaaatcatctctaatccatacattntttaatattatgctctntttattttcttttgatatactttgtgctttaacgacttgaattcaatatga

SEQ ID NO: 2356 - DNA, 474 bp, Glycine max
  unsure (1)..(474): unsure at all n locations
anagaaaattagtaattaatgtaagtaaagttagaaattaagtggaaataattaaggttgattaatggtgatctagattccatagaataagaaaaagggtaattaagtcataagagtttaaagtggagggtattttcataaatgactatataactagtttaaaaatagaattttagtttaactagttgctgactaattaaagtgtctaattatataatgtagaataattaaaataagttagagttataacacctagaaaaattacatctcacattgacaaaggaaactntgtgttgtatcatccgttcatgtatgaatntaatttcagtagttatatgtttntaatcatagaatttcatgctacatatatatatatatatatatatatatatatatatatatatatatatatatatatatatatatatatatgtgtgtgagtgatctantaaagctctgtacagacataaaccg

SEQ ID NO: 2357 - DNA, 455 bp, Glycine max
  unsure (1)..(455): unsure at all n locations
agcttctcattgatcttggatttccttntttattaggacatcttcaacaatgccataaagtcaagtgaacaggaaactttgtctgattgaagtttctttagttgattgtatatttaactaatactaaacaagtttccagggttgtccattaaatgagtttcctggcttgttcattntatatgtacccgaaatttatgcacactaatatgatgttggaagcttcactctgttttgcgtgcccttctaaacatgtctcactattctcagcatgatgctcagcttgtccatattttgtagagggttggcttgttttgtagctaaggtgtccctgtaacatctgtcaagaagggtagatgttgatccttaatccatgtaaccctgagtgtctagcaatagtagcatattctgaacgattgtaatgtgctgcattaacacctggagatatggtcttatct

SEQ ID NO: 2358 - DNA, 416 bp, Glycine max
  unsure (1)..(416): unsure at all n locations
tgttaattaaggagaaaaccaaatttaaaaaaataggatttttgacatagttaaaaaaattcatagcaacaaactaaatcaattagtgggtcaattttcgttgataaagaaaagaacaaatatggaagttagagtgattgatactttcattttccaggacttgtgcatccgatgcatnttgcaagccatggaaaaattgcaacttttctagaacaagcgataattgtgacacccttcatctcgatatacatatttatataataaaatacataaaaataccaaattacataaaatgattttattcaataaacataaaggagttcacatgggtaaaaggttcacatccatgttaatcaccacaaataataaattatcaatcaaagatatgaagacattttcagctcaaaacaagaccg

SEQ ID NO: 2359 - DNA, 383 bp, Glycine max
agcttctagattcattcttctaaccctaatagaagctaaacaactaactgaagggtatcttagccttctaaccccttgatcatgctcacggctcactcgataagcttcacacgttccattctgcatggcttctgtcggaaccttctggatacgctggggtggacctttaccttcgtggactcgcactccttgcttcctgcacctgctttgctattgacaccccttcccttacatttgccgtaacagaatccaagatattaacatgcttggatactcatggaaaacccgctaaacgggaagaaaaatataattttctagacatgaacgtataagtgtaagagtgttcttttgaaaaaaacgtgttacactgacaaacatttttc

SEQ ID NO: 2360 - DNA, 421 bp, Glycine max
  unsure (1)..(421): unsure at all n locations
ngaaggtgcgtaccctaccatttntcatagtaaaacattggtaatgtgtctactattattgtgatcatctctttctccatcattggaagtgccacttgagctgccacctttgggcgtattctttgaaagattcgtgcccttttttgcacatgttctgtagctgcatcctatccggagccatatcagaattgtactgatactgcccaacgaaggcaaccattaggtctttccaagaatggactcgggaaggttccaagttagtgtaccangtaacagctaccccaataagactttcttggaataaatgtatcagcagttcctcatcttttgcgtatgcccccatcttccaacaatacatctttagatggttcttggggcaagtagtccccttgtacttgtcaaagtccggcaccttgaactt

SEQ ID NO: 2361 - DNA, 308 bp, Glycine max
agcttatccggcctccctttatctttgccttcatagaaaaatattgcatgtcaaggcaggcacagcagcagggtcaggcacagcagtagcaaaccgcagatgcatcgccgccacctctacggcagccaccatctctggagtgcatctctactcacctgcagaggatggagctccagatgcacgcataatgtatgatgtgatcgaccagaaagcggctaatcataggggtcaggtgcagctaccagtgcaccctacatgagcagagccaagatcccagccctttcccatgacctacccccaagcagttc

SEQ ID NO: 2362 - DNA, 210 bp, Glycine max
atcctgactcaccatatacctttacccagtgtgagaatgccaatccttaccctcggaagcaaaaaaagaatagaggggaaattttcaatcttaaaaggaaagaatgaaaattttctatcatagagaaagctaaaataaaagataggaatatcccaatcaaagagtgggagaaagcaaaaagaatagaaaggaaattcccaatcaaaaagt

SEQ ID NO: 2363 - DNA, 420 bp, Glycine max
agcttctatggataatgttagtgttatcattgctattcttagaagctttgaaatagcttctggcctgagaatcaattctgccaagagccaactgggagcaattggtcaatctgatcagtggatcagatgtgctgctgatctcttgaattgtggtccactgcagcttcctttctgctacctagggctgcctataggtgtcaatccgagaaggaaggtggtgtgggaacctattatcaacaaatttgaggctaaactgaacaaatggaggcagagaagtatatccatggctggtagaatcaccctaactaatgctgtcttaacagctctgccattgttttacatgtcttttttcagggctccttcagcagtgattaacaagctcatttccatccaaagaaagtttctttggggtggtaacca

SEQ ID NO: 2364 - DNA, 465 bp, Glycine max
agcttgagctctcccttctctctatattctttgtttttattacctcctttctttctttcacccccagttgtaaagccctcaatggccatgcgtggctaatcccctagctagggcctgacaggcctaaaaagccaacgatgtatggtgtacttcaagagttatcaatgcaaagaggattcattccaggtttcatgttctaattcttttctttttatcttgcatttatgtcttaaattgcttttgggttttattcgctcgggagagggtatttccaagtaaggatttaagaattaatgcatgcatcagttttaggggttatacgcttgggaaagggtaacacctaatagaacatcttaagaaaaggatcatcgggttagcattgctaggcatagaatgataactcaatgcccacgcattgagcaacatctagaatttaaccttaatgcattttatatatcgaatctt

SEQ ID NO: 2365 - DNA, 225 bp, Glycine max
aaaaataactacatcaaatatcatgaatgtttataacaagatcatgaattatttctataaggtcgaattacctctcttaagtatcctaaagtgtttattctatgcttatcgagaatatctgactgtatatgtgtacgttgtatctcttctatctcaatttagcctaaacaagcataagtaactggaatgaaagtactataaatacacgaaatgaagtccagaata

SEQ ID NO: 2366 - DNA, 466 bp, Glycine max
  unsure (1)..(466): unsure at all n locations
agcttagaaagttatttaattgaataattctttgtttgaaatagtaattggtcaattttataagtattgaaccactattgaaatatatagtagttatttgtcagttttcaaatcattgaatcactatcgaaatagcaattaattactcaactttgaaattatcgaataactgttgaaatagttattagtcaattctcaaaattgacattaaaaccaggagatgccgtccctgtaatattttttagctaaccaaattgacaactacctgttctggtagaggctaaaaactgagtcaccatgtatgaagtcataagttcgagggtaagtggacatggcttcacacctgaggacacaagaagtagttagtaacaaattcaactaccatgtgctgaanagtgtattgattngattnttaaatccttgataattactagattgaaaagtgtattgacaaagatttgatttc

SEQ ID NO: 2367 - DNA, 389 bp, Glycine max
  unsure (1)..(389): unsure at all n locations
tgcagagtatggctntacccatgggtgctccaaccctatcgactccaactcttttagtttgtttaactctaattgattcaatcgcgcaagtattccgtgatgaacttggagcttttgagagggaaatatctccttgagaccatagcatctttgcactcgaagacattctacactgggtaccttgtgaaggaaatcaaaaggcaaagtatctttcttattctcataatcatcaaaggacagatcaagaatatttaatttgcaaaggaagtcttgcggcaaatgtgcatccctcaacaagatgatgttttcttcattgagtgtcaattccttcagtttgggatcaacctttcaattattcaaaagaaaatgcatggtggcagttagaactc

SEQ ID NO: 2368 - DNA, 308 bp, Glycine max
gcttatggtgattagaaaccttatgaagatttatgtgggaagaggggttattctttacttgggtgatctaaagtggttgtttgagttataggctaatttttgtgagccaaaaacaaactactactattctatagagcacagaagcttatggtaattagaaactattggatcgagtggcctcggaataattaagaaggggggttgaattaattatgaacgtgtcttgactaattaaaaatttatccttcttaatggtactagattcaattaggatttactactaagttttgagaaagtaaagaatagaa

SEQ ID NO: 2369 - DNA, 451 bp, Glycine max
  unsure (1)..(451): unsure at all n locations
atctcagtagtatatattaacttggtattgcgatataaacctggtaatttattaaaacaaatagggaaaatntcctgtgaatacctgttaaataaataggggatggcttcagattcgggtatttagtcccctgtcccccgcccgcatatgccgtgttatacatatacatatatttatgatcattagtttaattggttagttaaaatttgcatataatattattattatatatattatatataaatattaaaatttgattatgtaattatgttcatactttattattataattattcaaaatataaatggattatttttaatagttaaataaataatttttaataataataaaaaatttaaaattatacatttaacttaaattataattcaattcttaaatattttctaagttctttattttttattaaattatatatacttaatttatata

SEQ ID NO: 2370 - DNA, 407 bp, Glycine max
agcttcgtcctcagatccctcttgttggactatgcttaatttagacaaccatcctaggtttagactaacttaaactaagcttcatcctcagatccctcttgttgtactagactcagcttaaatagctttcgaaagtttagactaatttagcctaagctttgtcctcagatccgtcttgttggactagacttagaccaaacagcattattgtaatagcatatttaaaaccaaaacttaatccgcagatccctcatttaagactcagtttcaattctgcttcattcaagttctaaggcaatagtacatttcccaatgctaaagccacctaacagaaggttcaggctaggatataagcctacatatgccaacgtgaggggaagtgcccaagaaaggaggggtagaagcat

SEQ ID NO: 2371 - DNA, 445 bp, Glycine max
  unsure (1)..(445): unsure at all n locations
ggcctgtccggtgcagcagtaatgatggctcgagttatgttggggagcggttacgaacccggaatgggtttaggcaaagacaacgacggcataactagcctgataaatgccaaaggaaatcgtgggaagcatgggttacgctataagcccactcacgcggatataaagaggagcgttgccggaaggaagagcggaagtcaaggctcgcggttgagacaagaacgtgaaggaaacccaccctgccacataagtaagagctttataagcgcgagccttggggacgaaggtcaagtcgtcgctatatacgaagatgacgttccgaatacgctggatttggtacgaccatgccctcctgatttccaactggggaaatggcgagtggaggaacgccccgacatttacgcgacgagcataatgtanacctttacgggtttaaaagctctat

SEQ ID NO: 2372 - DNA, 395 bp, Glycine max
agcttgaaattgaacaacggaagctctcgatatattcaaatggtcttaacttttcactcggatgtccgattcaggctatatcgagacgctcgaaattcaacaatggaagctctcgagaaattcaaatggtcttaacttatcactcggatgtccgattcaggtgcataatatatcgagacgctcgaaattgagcaacggaagctcttgagtaattcaaatggtcataacttttaacccggatgaccgatttaggacatcacatatagagaatctcgaaattgaacaacggaagctctcgagagtttcaaatggtcataacttttcactcggaggtcagattcaggcgcattatatatctagacgctcgaaattgaacaacggaagctctcgtgaaa

SEQ ID NO: 2373 - DNA, 453 bp, Glycine max
  unsure (1)..(453): unsure at all n locations
gggttcgaggtacttacccgttgaagatcgaataacgatgaagaacgaatgaagaacgtcgaagaacggttgaaaccttcgcgaaattcctcacggaaacgttacggaaatgtttcggaagcgcctcggcttggattttcttcacggaaacaattnttccaagcaaattcgaaagagagagaagtgcctaaggggctgaacccttttccacttcacttcctcccctatttatagcaaaataggggagatgcttgccgcccagctcgcccaggcgagcagggttgcttcctccagaagcaacatccttctggaggaatcttctatagggcccaagtgggcctggttgctatttgcacctcccattttactaagtacacccccctggccttttttggtgagttctttttcgtaaagttacgganacttacggatttcgtaacgatacttggtttc

SEQ ID NO: 2374 - DNA, 463 bp, Glycine max
  unsure (1)..(463): unsure at all n locations
agcttctatggaggctggatctttgagcctcaatgaggtccttcaatagtgattttccaccatggagatgcagcggaaggcaaaggagaagaggagaggggaggcaccatccacaagggaataagccatggaagaaggagcttcaccaccaagaatatgccttggataagaagcttgaagaggatgctttaatggaggaaaagaaagagagaaggggggagcacgaaattaaaggaataaaagagggagagaagtggaactttgaagtgtgtctcataagactttcattcatcaaangtacaacaagtgttacacatgcatctatttatagactaggtagcttccttgagaagctttcttgagaaaacttccttgagaagattctttgagaaaacttccatagaagcttcacaagcaagcttccatcactttgtgtgtaacaccctgaaatatactagttata

SEQ ID NO: 2375 - DNA, 461 bp, Glycine max
  unsure (1)..(461): unsure at all n locations
tgcttgtggggattctatggaggctggatctttgagcttattgaggtcctttaatggtgattctccaccatggagattcagcggaagacaaagaagaagaggtgagaggaggcgccatccactatggaataagccatggaagaaggagcttcaccaccaagatgagccttggataagaagcttgaaaggatgcttcaatggaggaaaagaaagagggagagaaagagagaggggggagcacgaaattgaacgaataatagagggagagaagtggaactttgaagtatgtctcacaagactctcattcatcacatgtacaacaagtgttacacatgcttatatttatagactangtagcttccttgagaagctttcttgagaaaactttcttgagaagctttttgagaaaacttcttgagagctaagcttacttccacactcctctataactaactcacctc

SEQ ID NO: 2376 - DNA, 394 bp, Glycine max
  unsure (1)..(394): unsure at all n locations
agctttcttttctcatagaaagccatcttattctcctcagcttcctcaataatcttcagtctcatttctttttcccttttctccttctcctcaagctgaatgtgcatttgactgcataatgaattcatttttgtagacaactgagttcagcaaacgttgaatagatcttaaatcttaattggccaaagatcaaattgcaagcaaaacacttctgttagtgctaccaataccatcaggttcaagaataaaccaaacaaatgggatttgtattaatggtcacctaacatttttntcttaactatattaatattaatagcataaattatattctaaacttcattctcttttatgcatcantctatattctatctttataggatgcaccattttgcat

SEQ ID NO: 2377 - DNA, 449 bp, Glycine max
  unsure (1)..(449): unsure at all n locations
tttgttctatctgttgttgggcgcagatgcacatcacaagtaatttccggttgtgttgtttgatattcatgagcaccggggagagcagtgcaaaatttacttaattattcattattcttatttgttgtacatcatttttaattagttttttatcttatnttttgatgtgtttgtctaaattattttttaaaagtattttttttatactttttctaagaagcaaatcctatntatttatttattaaaaaaatattttaaaaaagtacctttttaaaaactatttttcttaaaaaaaattaaacaaactagcccatttactttataaattgttattttatgtagagaattatnggtttacttattgctatttacaacttaactccaacattcaaaagggcctttattatattcctatttttacttcatcttctatcataaagatgtctact

SEQ ID NO: 2378 - DNA, 438 bp, Glycine max
  unsure (1)..(438): unsure at all n locations
cttaagcaccgcagctgcagctctataaaccacacttttttatatggcttgancagngcgaacttacgtttgaatactctatacatgcagacacatgcaacacattatgttttcactgataataaaaagagaaatgtttagaaacacggtgactcgctctatcgaatatatcccctttcatttggtcgaaaatttttaaaatgaaaaaagtttgcgaatcctactcaataattaacgacgttttccttctaactttatgcacaaaaaacttgtttaatagagcgtgttcttatggcttatcaaataaaaaaataaaacatacatgcacgtcaataagtcactactcggtctatgctgacaggttagaaagtaatctacattgggaagtgtgatgctaacattctattttgttcgattgaaaaaactgcgtactttctt

SEQ ID NO: 2379 - DNA, 596 bp, Glycine max
  unsure (1)..(596): unsure at all n locations
gctctcgccttccacgtngttatggatcatantaatatataacatattagtgcatataaacaanaacacacgangtgangctgagaccatcggaccacgngacactacacatactcaagcttgagccttgatcaacttacagcagagactatcttacactatatcacgatgcatcacaacggcatccacagtgtcaagctccntggagcccgcgaggtatacccgaaatgataagggcttgcgtccagatgtcatatcactaggtgccgaacccgtgtctactggccacaatgtatcatgagataacaccatccacggcaatgacttgccccaagttcccggtcggcgatgcacataagcgcgcaagtactgttcactcaccctgagcatgacttcatgctgactctgaagatggtagacagagctcattcgaaccgagcttgcctaacgcttgctatagatacaatattatgtgttaacagaatgtagaaatatcttattacaggagcttacttcacgtacctgaaaactaccaaaaggctgctgtctcaatcgcagaaagagcctatttcccactgcaactcttaatgagcacg

SEQ ID NO: 2380 - DNA, 448 bp, Glycine max
  unsure (1)..(448): unsure at all n locations
agcttggcaacatagctattganttggntgttctcatatgtttaatgtagcaatttcttgattcttccagcttatgtgttacatatactaataatactataggacattccaattccaatggctatccctttttctctcttggatgttatgtcaaggtttacgagtttggtttcgtatatgacgaaggccctctatcattctatcatgtccttgtctatttcctttcatgaaatcagaatatttttggactatttccatgtttttttctgtacattaatgtactgagattgagtatattaatgctgaagttttagctaaaagagcatcttaattgtttgtcttcgagtttgattatttcaccctcatggagattgaatgcttattgtgcctttgtgtttacagtgaccctcgaactcacttgcactatgcacttgtgtcttcaatctct

SEQ ID NO: 2381 - DNA, 397 bp, Glycine max
  unsure (1)..(397): unsure at all n locations
ggccgccacggagttntccgactatgctcttgtgtggtggtacaagctacaaaaggagagagcaagaaatgaagagccaatggttgatacatggacggagatgaaaaagatcatgaggaagcggtatgtgccggctagttactcaagggactngaaattcaagctccaaaaactaacccaaggcaacaagggggttgaggagtatttcaaggaaatggatgtgctcatgattcaagcaaagattgaagaagatgaggaggtgactatggctcgatttcttaatggtttggctaatgatatccgtgatattgttgagctgcacgagtttgttgaaatggatgatttgcttcacaaagcaatccaagtagagcaacaattataaaggaagggagtgact

SEQ ID NO: 2382 - DNA, 449 bp, Glycine max
agctttttctctctatctcttgttcaccattgaaagtatgaaatcttgctcatttgaggctaagaagtaattttttagatgtattgagtattctctaatgatctcatgatgtgtagatttgaacataagctggttatttatagagaaaaaagttataaccgcctataattgattaaatctataaggtaatcgattatttcaatgaagtaattgatgcaatcctccctaggaagggaccagtcactagagccatgagcaagaggctccaagaggattgggctagagctgctgaagaaggccctagggttctcatgaaccttagggtagatttctgagcccatgggccaaggttgggtccaattatctctgtacatattagattaggatgtcattatatttggtccttcgtattagggtaggtagggtaccctagaaatataggaattttt

SEQ ID NO: 2383 - DNA, 192 bp, Glycine max
  unsure (1)..(192): unsure at all n locations
cttgatgatagaggatgcatgaacatatcttggcaatcaattcgtggngctccggactcaatggtggaggatggatgaacgacaatcaattcgtggggctccgaattagatggtggaggatgcacaaacaacattatgcaatcaatatctgggtctctggactcaatggtggaggatgcatacacggcaatc

SEQ ID NO: 2384 - DNA, 76 bp, Glycine max
attggatgtggttcgaccttgccctcctgatattttgctggggaattggcgagtggaggaacgctccgactttacg

SEQ ID NO: 2385 - DNA, 618 bp, Glycine max
  unsure (1)..(618): unsure at all n locations
gtgcaaaagcctagtagtcgtctgtagtatctcattanagaactatgtacgctncaattaatanntctatacacagannaaacaagggagttgagnactttgcactttgatgacanctgctatgtacgcgacactatagcaaacgccatcctcagcagaaacactaaataaggtgctaactcaattgcattctagctcacaggggctacctgcaggtttgcaagctgcacgatgtaatatatgcggtggagctcatgatccatgctcgtgagtacctactgaacaaacaacccatgaaattaactacaagggaaaccctcctgagagaaagctaatgcaccgtggtgtaggaaccagtgcgctcccaacaactaagaggaagcgccgaataaataatcataaacctccactaaaacaaaaatgactcttttaaagctattacttatgtcgctcagacaataacgggttcaagagaaccttaccagaaagataaagctggatttaaatgccaagctgcaaataaacgaagtcgggaaaatgagacatacgcacactaaatatgaatcttggttcacaacaaaacatgcctcctccagtcccaacaaactgtggcctgcn

SEQ ID NO: 2386 - DNA, 181 bp, Glycine max
  unsure (1)..(181): unsure at all n locations
actctaagcgcataatcaccgccatacttgttaagcccaaaaggtccgcttagcacgaggtcgcatggattttaagctaccttaaacctataaggagtaggaagaaaaggagaaagacacaccgagacttaaagctctctaatgaatatattcaaagcccgagnatcccaaaaatgggaaa

SEQ ID NO: 2387 - DNA, 392 bp, Glycine max
  unsure (1)..(392): unsure at all n locations
catgcaagcttcaagcacttatgtaatcaatttcgatctttctgtaatngagnaaaacacagagtttgaactactgaagaaattttcaacattttgaaactttctccttactcctacatgatgatgcatgatgcacatatggaatgatagacactaagatggaacacaaaatacaacaatcaatacacatgccactcaagaaagttgggcatgtaaaagacaaaacttcttcatgctcttcttcaagctttaaggctaagtcttcatgttgctcccgctatctctaacagagatgcgaccgtgggtgtacttgtcttaaagacataataaaattatgaaaatgaagggatgtaaaattttattcaatgtatttgattgagtacaaattacct

SEQ ID NO: 2388 - DNA, 409 bp, Glycine max
ttaagtcacctgcaggctgcagctattacatgttccgcaatttataacttccttattcaaacagaaattctcaaaatcttgcttcatttttccctacttgtcaccaccaccaccaatgaattttatgaaaaataatgaaatcccttccatcgaaaattctcaaaatcctcctccgtttttttcctacttgccaccaccaccaccaatgatttttatacaaaataatcaaatccctcccactgaaaattctcaaatgtagaagcaagcttcatgatgatgaatcacgtggctttgatgatgacaaaaatcccaaaagaatgatttcaagattaagtcaacaagttcacgatcaagattaatttcaagattcattagaagaaatcaagaagaatcaagattcaagagaaga

SEQ ID NO: 2389 - DNA, 391 bp, Glycine max
  unsure (1)..(391): unsure at all n locations
agctttggaaaatgatttctatacattagttagtcatatatagtgactaacaaactcccccaaatttatagttttgctggtcctcaagcaaagaaagaacaattcacttgtcctcaagtgacaaagatagtggccaatcaaaacaaaatggtgtttgattcatcaaggacattgtcgcaacctacccttcagcgggagggcgacgcagggctcatgggtgtgtcttccaagggaggaaggcgcgcgaagtcgccaccaacgtttatttgaggcaaacatcggaaaaatcggaaaggtgtggtctacaaactttaatcgtgaaaggttcgagagttgtttttacacatggngaaggtattagcacctcacgcgtccatcacattggatgaca

SEQ ID NO: 2390 - DNA, 352 bp, Glycine max
caagcatgcaagcctagcacaaagaatgtccacgtttaatcccaaaggtgggcttagcacatattcacgctaagcgcataatcaccgccatacttgttaagcccaaaaggtccgcttagcacgaggtcgcatggattttaagctaccttaaacctataaggagtaggaagaaaaggagaaagacacaccgcgacttagagctctctaatgaatatatccaaagcctgagtatctcagatatgggaaaccctctttctatatccattatccctttctcctcctctatccattcctcttcttcttctatccccatcaacccctaacctaaaatgtaaaacctctcgtgactatg

SEQ ID NO: 2391 - DNA, 52 bp, Glycine max
  unsure (1)..(52): unsure at all n locations
agcttgatcttgaatatttctaagttctnttttctccttaaaacaagatact

SEQ ID NO: 2392 - DNA, 344 bp, Glycine max
aaacccctcaatttagtggattttcaaggtttgagaagtgaaaatgagaatggggtaattttggagaaaactctcatctcacacaagtctataacattaatctaaacttgctcaaactggttttacaactaaaactcccccgaatcaacatttgacccctcaacaccaaatttaccctagaaatggctcttgttttcactttggtcactcattttcctcatttgctcagccccagctttcccataactcctaaatgatattttaaattaggattaactcactttaacctccaattaccactaaatccagatttagcttttcaaaccctcaaagcctcacatttt

SEQ ID NO: 2393 - DNA, 387 bp, Glycine max
  unsure (1)..(387): unsure at all n locations
agcttaaataggtgggtttgtccgttctcgctagcttagngcaaatttgaatcgcttagcacacataagtggattttggtttagcgtgcttctctcgcttagtggatgagctgaagcggttcgcttgatgacctggagcagtgcgctcagtgaacctgacaactcatcttcttctagattcttcctcacgcttaaatagcaagttctcatctacctccatggcttcctatggtggtgagcttgttcttgactcatcttctccttgaagtggcatctacaatcagctttcttccttctccattcaactaccattgatcttcaagaagcaaaagactccattgatgaagaagattcaaggcccacgagctctacatggagcttcattag

SEQ ID NO: 2394 - DNA, 379 bp, Glycine max
agcttatttcatttacattggtaattggttccccatcactccataagagagcaattgtctattgtcttgagattcagtatttggcgatacattcatgtcacataagaaggcagacgataaatgctgatttgcttcgcgagcgagtatcacgctcatctacgagtgccttggcaatctatacaagctgcgtgcggagatgaactgccccatggtcaacactgcgtgctcactttgcagcagcttctcttttatcaaggaaaattttggctcccccctaattggtcttttattcccctgctactagaggaatttcattctacccctctatgaggccacgtgggtatcgcaaaggcactacgtcatgtcccagagaactttg

SEQ ID NO: 2395 - DNA, 271 bp, Glycine max
  unsure (1)..(271): unsure at all n locations
agcttacaccagtatcggatgtatattacttttggagacatattggtacaacttctaactggaagaccccttttggggctagttagagatatgaaatgtgcattggaaaaggaaaaccttaaagcagtcttggactcttcagctggtgaatggccgttttttcaaactgaacagctggcatatttagcattgaggtgttgtgaaaagacttggttgaaccggccagaccttgtgtctgaaatctggagtgttcttgaaccattcanagcaa

SEQ ID NO: 2396 - DNA, 404 bp, Glycine max
cgggatcttaagtcacctgcagctgcagcttgagccatatcctgactctttataaaccttgacccagggtgagaatgtcaatccttaccctcggaagcaaaacaggaatagaggggaaatttccaatcaaagaaaaagagaaggaaaatttccaatgacagcaaaaaagaaaagaacgaaaattccccaatcaaagagggggagaaagccacaaaggaaaagagggaaaattccccaatcaaagagtgggagcaagcaaaaagaaaagaaaggaaaattcccaatcaaagaatgggagaaagttaaaaaggaagaagaagaaagaaagctcctgatcaatgatcgaaagaaaacagaagaaatgtgcagagaggtctttggacccgacaatatctgaacaatac

SEQ ID NO: 2397 - DNA, 303 bp, Glycine max
  unsure (1)..(303): unsure at all n locations
agcttccttgagaagcttctatggtttttggatctttgagcttcaataagggccttcaatgatgatttttgtcatggagttgcaacagaagataaaggaaaagaggtgagaggaggcgccatccactagggaataagtcatggaaggagaagcttcaccaccaagagagtgtcatggataagaagcttagagaggaagcttcaatgaaggaagagaatgagagagagggagagagagagaggtgtggaaattgaaggagaatagggaaagaagttgagctttgatgtgtntaacacaattttc

SEQ ID NO: 2398 - DNA, 390 bp, Glycine max
agctttaacctcatcgtctctcacattctttatatttgtgtagccaatccagtccttgtgttcggactctcagccacttatgatagccgccgatgatcccattactgcttcccctaagctctctgtcctttcttcacgccgcatcccatgccttgcgaactccttggagtaccctcgcgttgaggtcactgaaacctcgtgcggtgaaaggcgtgatgctttcgtctgatggcactcctctcatgggacatccttcgcatgaagatagaatcctgattcttccttccttctagcgagggaaccatttaacagacgcccctccatgctagccaagagttggtgcacaacaaacaattcttgcgccgctcttttcacatccctggtcgaacg

SEQ ID NO: 2399 - DNA, 395 bp, Glycine max
  unsure (1)..(395): unsure at all n locations
agctttgagccgaaatcctgacccatcataattcttgacccagggngagaagggcaatccttaccctcggaagcaaaaaagaaaagaaggaaaatttccaatcaaagagaaagccaaaagagaagaaaggaaattcccaatcaaagagtgggagaaaaaaaagagagaagaaaggaaattcccaatcaaagaatgggagaaagtaaaaaaaaagaagaagaaagggaagaaagttcccgatcaaagaaaacaaaagaaatatgcagaaagatctttggaccggacaatatctgaacaatacagaattgtcaccaaatgaacaaaagatagaaaaggaaaccatgacctataagtggtcttctccctttgattaccaaccaaaatcttgtgtgcta

SEQ ID NO: 2400 - DNA, 402 bp, Glycine max
  unsure (1)..(402): unsure at all n locations
agcttgtgggtagttctggaaaacattgtatattttcagttctacnctccnnnggcaggaatgacattatctccaaattgcataattatgtatttgaacatcattatgtttgatatgacatgcctatattcttaatagccttgtcttgatatcactatttcactgtttcataaaaccattactactgtttgactcaaaaatatctcgctacaagactgctccaccacttctacaagttttaaatcttctgagcttctccattttgtttccgattacttctacaaagtaacttatcatagatctaactccctcttattattcttttttaattntcagaaacccaaagcttaagatgattccaaacttgcttgatgatctccacatgatatacaagttgaaccg

SEQ ID NO: 2401 - DNA, 308 bp, Glycine max
  unsure (1)..(308): unsure at all n locations
acatgcagctnncaagataaaacataatgctccggttctaaagcacgaaccttactatttaaaagtgggtggctagttatacctgtcttagttgttggtatgcatcaccaagctgccaaaaccttcatgattctcacttgctcgcaagatgcaaaggttgaaccactaattaatagagtttttggcctttagaatccactaatttcagtaaattaatgcaaccgtcatttgtttcacatttttgttagtgatatattagccacatttcctttaggttcactcttgcaagagatacaagtgtcaccctt

SEQ ID NO: 2402 - DNA, 392 bp, Glycine max
  unsure (1)..(392): unsure at all n locations
agctaaagaaagannccctaacagcttcctattgctngccacagggccgtataactaactccgatgcgctaagcggactattttatcaaccgaaaaattcttacttcctatttaatgcaccaacgctctacaaaacacaactaaaactaatggattcactaaagttaacttgattagactaaaaatttagagaacactaaattctaacttattgtgatcaaactaagcaataatcgagaaagattaagatattattgtaaaattaagtacaaaaattaatttgcacaaccattatcacatatgttaatataaattataggacataaattttcatagacaaaagacgtaaaaaaaaacagtaatataatggtaataaaatagtaggtattata

SEQ ID NO: 2403 - DNA, 355 bp, Glycine max
agcttctttgggacctataacagtttataactcctctttcaaaagcatgctatgtgctcgcgactggtccctttcttcccttcgcaacttgagttcattattgctaccccatagagctccgcgaaatttgttccggccatactcttccttgcgagccctactggtctctcgttcaagggcccttacggtaattgcattctcttcccgtaacccggcacactccttccgaacgtgtgtagcagccaacttgaacttctccttggcgaggtttgcctttcctaactcgcttttgagagcttggacttcctcgtccttttccggtgcttcaaaattctctttgctgacgacttttaac

SEQ ID NO: 2404 - DNA, 402 bp, Glycine max
  unsure (1)..(402): unsure at all n locations
gatccttaagcacctgcggctgcagcttgatttgaagtttaatgttggttttgagagcatgtgggngaggactccccttttggccagtgctttattgggctgcaccataatgttttctttgcacctagatgtttgaaaatgatgttcatcatgtacatatagatgtagaataggtagcaagaggtaataccttccaaatgaagtgtacgcatgttgaatatgtagccaaggttttgcaaaatgtgtatctatgttgagtgtagcacgaaactgcatctcaaatatgaacatatgacatgaaacggccttgcatagtgtgaatgagtagtcaattttctacctttcccatgaatgtgtgatgtgaaattgcttttcaaatacatgtaaatatgtgtatagcat

SEQ ID NO: 2405 - DNA, 346 bp, Glycine max
  unsure (1)..(346): unsure at all n locations
agcttgagatgaggaagattatattgtgtgaaacacccgcncnaggcgaggaccacagagtgggacctagctatatgcttccgctatagcctataaatgaatacacctttggtcggttctctattagggtcttaaccctctcatgcaacttctttacaaattctgacctagactcctcttctgtatgaataaaacaagcgtctagagggatgggaatgaaggtcaacggtgataagggatggaacccataaacaacctcacaaggggactgcttggtgagcttaaacacccccccgtgcatgcaaatatcacatgagggaaataccaccccaagtctaagggagcc

SEQ ID NO: 2406 - DNA, 270 bp, Glycine max
  unsure (1)..(270): unsure at all n locations
agcttgcctatttatgttctgaatgacaaggcagccgaaggaactagttccgctccggagtatgatagtcaccgctttaggagtgctgtacaccaacagcgcttcgaggccatcaagggatggtcgtttctccgggagcgacgcgtccagctcanggacgacgagtatactgatttccaggaggaaatagggcgccggcggtgggcatcactggttactcccatggccaagtttgatccagaaatagtccttgagttntatgccaatgct

SEQ ID NO: 2407 - DNA, 365 bp, Glycine max
  unsure (1)..(365): unsure at all n locations
ctgcagctgttactttttgttacctttataaacaaaaataaagatggttccactcgtgtggttgtgccgaaaaacctcggctgcagccaacgaaggctcgtagtggggacaggtattgttcacccatgaataaagcacgccctgaggcanaaggatgtggttccaatgtaacgctcgctagagatgcatcacgtatcatgtgcgtgaacttctctcgccagaaaagggacctatgtggggttgctacgacagtgtgttagttggctatacacgtggacgacgggacattcttaagaggtcactgatgccaaaccgacagagggtggtgcactagttgccaaataggcccaacagtgaccacacac

SEQ ID NO: 2408 - DNA, 215 bp, Glycine max
ccacccccccccccacaagaaggacaaaacactagggagagaggaggggggcaacgagaacaggcaaaagggcacgagcaggaataaaaaaaaaggggacgagacggccaagaaaaacaggggaaaagcccagaagcaaaaaaaagcgaaggagcaaaagaaggggggggagaaaacaggagggaaaaacagcaaaacaaacaacacaagaaaac

SEQ ID NO: 2409 - DNA, 389 bp, Glycine max
  unsure (1)..(389): unsure at all n locations
tgcaagctttgagattggtcttcgcatgtaaattcattgtgggnccgaaaagaggcatatttgatcatcctactaggacgactgagaaaactggggcaaataaagagggtgaggatgagggagaaacccatgctgtgactgccattcctgtacggccaaatttcccaccaacccaacaatatctttactcagccaataacaaactttctccttacccaccacccagttatccacaaaggccatccctaaatctaccacaaagtctgtctaccgcacttccaatgacgaacaccacctttagcacaaaccaaaaacaccaaccaagaagtgaattttgcagcgagaaagcctgtagaattcaccccaattccagtgtcctatgctgactt

SEQ ID NO: 2410 - DNA, 370 bp, Glycine max
  unsure (1)..(370): unsure at all n locations
agcttcggaaaggtctggagggagttatagatgtatgattcttagacngcacgggacaaggcgatgatgctattccggtacttgcgagaaaaagacatgtttgagaagtattacaatctgcatatggcaaagcggcttttgtcgggaaaaacagtttctgatgatgcagaaagaagtctcatagtcaggctcaagaccgaatgcggttatcaattcacctctaaattagagggcatgcttaccgacatgaaaacctctctagaaacaatgcagggcttttatgccagccaccctgagttaagtgacagtcctacacttaccgtgcaggatttgacctcagggttttggcctactcaatctactgctatat

SEQ ID NO: 2411 - DNA, 384 bp, Glycine max
agcttgtgaaggaataccttgaagattattccttaccagtagtaattgaccgtaactttgtgattgatgcgctaccttcgggaaaaatcaatgaccttcgcaaaaatataaagctggtaatgggcgttgggtttgcaaaggagtgctacgaggtgtactgtaactggaggagggaaagcttaaaggagtgcttaataaatttattaggcttgccagagattaatgtggaggagaaaagtagattgttggaatttgaaaattacattcttagaagacgtattgaggctatccaggtcgctcttggaacactaattcccagtgagcgacgactctgtgatagcgtcttccaggggttctcttatgtggctgatctttgtttcactg

SEQ ID NO: 2412 - DNA, 410 bp, Glycine max
tgaggcatgcaagcttgtgcatccaataccctgatgtggatgttttatattttcttaaaactggactgatgcatttgcttccaaagtttcatggccttgcacgtgaagacccgcacaaacatctgaaagaattccatattgtctgctccaccatgaaacccccagatgtccagaaggatcacatatttctgaaggcctttcctcattctttagagggagtgacaaaggactggctttattaccttgctccacagtccatcacgagttgggatgacgtcaaaagagtattcttagaaaaaattttccctgcttcgagaaccacgaccatcaaaaaggatatttcaggcattagacaactcagtggagagagcttatatgaatattgggagagatttaagaaactatgtgcc

SEQ ID NO: 2413 - DNA, 275 bp, Glycine max
  unsure (1)..(275): unsure at all n locations
catgcaagcttgaccaatcccgattatacctgtcatagncggncagagagaacctgtgatgtacctaaacaggcgagctcctggcagtcaacagataaaaggaacaaagaccacaaagcaaggaggcttgtggtggctggccagctgtgaatcttgtgtgatatatgggttatggcctctggtaatcgattaccaagggtgggtaatcgattacaaggcttaaaaatgaagacaggaggctaagatggtctctggtaatcgaataccacggggag

SEQ ID NO: 2414 - DNA, 387 bp, Glycine max
  unsure (1)..(387): unsure at all n locations
agctttgaaaaaggaaggtggtgtatantctttataacaagctcgggaatattttgagagcgtgtgcgcaaaatattaattaataccatgtgtcagaatggtatattttgttttaccgcatgttaaagtgacatatttaatcatttttcatatattttactaagttttatcaacctaacaattgaataatgttatttaaacttgttattcagaagaaaaaaacatgttatttaaatttgatgattatgcatattaaattntaaataacccagggattcataaatcataaatatgtaatttaatagtattgcttattggaaatagcatattatacattaaaataaaacaatttatttagaattaaatagatctttaattaagactatg

SEQ ID NO: 2415 - DNA, 377 bp, Glycine max
  unsure (1)..(377): unsure at all n locations
agcttcaagaataanggttctagcttatttcttattcccagaaggaaattcaataaataggcctcctatttttaatggagagggttaccactactggaaaacccgaatgcaaattttcattgaggcaatagacttaaacatttgggatgccatataagttggaccttatgtacccaccatggtggctggaaatacaatagagaaacctagagaagagtggtctgaagatgaaagaagattagtgcagtataatttaaaggctaaaaatattattacttctgccctaggaatggatgaatattctatggtttcaaattgtaagagtgctaacgatatgtgggacactctacaagttacacatgagggaacaactgatg

SEQ ID NO: 2416 - DNA, 199 bp, Glycine max
  unsure (1)..(199): unsure at all n locations
agcttcttagttgcagatgatgcatatgagtttgnggctacctcgtgcacttctctaatgactatagcatcatttctggcgctaaactgcttgggccaacaacattttgaaaataaggctgtttgtgttgccgctggtgtggaagactccatcatctaagggtgggatgattccttcacccgagattggtcctgttgct

SEQ ID NO: 2417 - DNA, 388 bp, Glycine max
  unsure (1)..(388): unsure at all n locations
agcttttcaagcccnatttacngcgtttactaccttngccggcnggggaattgcgaactttgatcaaacatttgaggttactaccgacgcgtcaaattctgttgttggagcagttttatctcagcaatcccatcccattgcttttttcagtcgcaagatatgtcccaaaatgcgggctgcatctgcttatgagagggaaatgtttgctgttacggctgcagtcaaaaagtggcgacattatctcttgggaaggcattttttcatttatacggatcatcgcagtttaaaggaattgataacgcagacgattcagacgccgacacaacatatgtggttaactaagctattgggtttaactatgagattgatacaccccggaaagaccaac

SEQ ID NO: 2418 - DNA, 394 bp, Glycine max
  unsure (1)..(394): unsure at all n locations
tnttncncnncnngnngagnntgtttgagagtatatttctctaacaccaccaccagacacanatgngnnaataagtggtatattatatgtttcatccgcgatgtgtaaaagtgtacataatataattcattcgttgactatataattacttgagtaattaatcaactctagtacaatcgtagtattggtcactccaaaatttggtaattctgtaagaaaaaaatcatgttatttatatttcgaggaaaaatgcaaatgaaatatatttattccacatatctatagtatatatatgtgctaattcatacaataatttctggtaatatcgtagttatcatataaataataccaattatttttaatatgacgatatttaaatatttaacatttaacg

SEQ ID NO: 2419 - DNA, 395 bp, Glycine max
  unsure (1)..(395): unsure at all n locations
agcttgccaccacgaagttttccgattatgcttttgtgtggnggaacaagctacaaaaagagagagcaagaaatgaagagccaattgttgatacatgggcggagatgaaaaggatcatgaggaagcggtatgtgccggctagttactcaagggatttgaaattcaagctccaaaaactaacccaaggcaacaagggggttgaggagtatttcaaggaaatggatgtgctcatgattcaagcaaagattgaaaaagatgaggaggtaactatggctcaatttcttaatgttttgactaatgatattcgtgatattgttgagctgcacgagtttgttgaaatggatgatttgcttcacaaagcaatccaagtagagcaacaattaaaaaggaaagga

SEQ ID NO: 2420 - DNA, 343 bp, Glycine max
agctttcttgagaagcttccttgaatagcttttttgagaaactcccttgagaagctaaagcttagctacacacacccttctaataactaagctcacctccttgagaagcttccttgagaaacttgtttgagaaactaccttgagaagattcctagagaaattagaacatagctacacacccctctaatagctaagctcacctccttgagatgagaagctagagcttaactacgcacaacccctataatagctaaactcaccccatgccaaaatacatgaaaatacaaaaaagtccctactacaaagactactcaaaatgctttgaaatataagggttgaaccc

SEQ ID NO: 2421 - DNA, 410 bp, Glycine max
  unsure (1)..(410): unsure at all n locations
ggcatgcaagcttagtttaagttagtctaaacctatgagggctgtctatatttatcccaggctaacaggagggatctgaggacgaagcttggattgattcagtccaactagggatcgaggtttagtaatttaggctacaacatagaatacaaaagcatgattgattagagaaacatccttatatgcatcagctggtctgttagaaagacccaacacttctacctattactgtcaattttacttgcatttttactgtttttatcctagacctagtttaattttgttttaaaccatcaatcatcaatgtttctttcaataatgccttatttctgaatttaacccggtcttagactagtttccctgagttcgatactcgaattcatctattntaatttttcaatacttgatga

SEQ ID NO: 2422 - DNA, 167 bp, Glycine max
  unsure (1)..(167): unsure at all n locations
agcttccattggtcaattttcttctgtctcganagaggancgcgccggcganctgtctttcgagttaaaagatctgaccattggaattactcgagagcttacgatgtggaatatggagcggctcgatatatcatgtgcctgaatcaggcattcgaaataaaagctat

SEQ ID NO: 2423 - DNA, 347 bp, Glycine max
agcttatccgacctccctttaacagttctttcattgagaagaactgcatgccaaggtaggcacaacagtcggggcaagaccagcagtagcagccggccacaaatgcaccaccgccacctctatagcagccacaatctctagagtccatctcagttcacatgcagaggatggagctctacatgcagcatttggttgaccaacaggcagccaaccataggggccaggtgcagttgaacgacaacttctactggtatatattgcaccagcagcgccaggaccccaacccttacccgtggcctactctcgagcagttcagagccaccattgcatggcttggggataggcct

SEQ ID NO: 2424 - DNA, 332 bp, Glycine max
  unsure (1)..(332): unsure at all n locations
agcttcttagttgcagattattctttttattttgnggctacctcatgcactgctctaatgactatagcatcatttctggcgctaaactgcttgggccaacaacattttgaaaataatgctgttgatgttgccgctgttgtggaggactccatcatctaaggttgggatgattcctccacccgagatggttcctgttgctggagaggtcataattgctctgccgtggctgattttgctgttgaggttgaggaagtctattgtatatgacggcagcatatgcttcaagctgtccaattgctgcacagaaaggcgaaggtctgtatggtggtcaa

SEQ ID NO: 2425 - DNA, 383 bp, Glycine max
  unsure (1)..(383): unsure at all n locations
agcttgagatgaggaagtttatatttgtgatactncctgcnnntattcgttgaccacaaagtggtacctggagatatgtcgcggggggttaggagaccttggggacgtcaggtggggtgctattgcccaaaaccaagcttgaccaatcccgacccaaccccggcatagtcagtcagtgagaacctgtgatgtacctaaacaggcaagctcctggcagtcaacagataaaaggaacaaagaccacaaagcaaggaggcttgtgtggtggctggccagctgtgaatctgtgtgatatatgggatatgggctctggtaatcgattaccaagggtgggtaatcgattacaaggcttaaaaatgaagacaggagactaagatggtctc

SEQ ID NO: 2426 - DNA, 343 bp, Glycine max
agcttcctcggggccattcttgcgttggcattcattaggaaagcgagtttttgtgggacattaatcttaaagcaaaaatggcatataacctactgccatagatacaaacatcaatgttaatatagagcatgcttatgcgcatgtgtccttacgaacgaacacttgcggaagatatcctacaaccgaaaaaatgcacccatatacaatcaaggcagctttgttaactaaattattcacacgcacttccaaggtgaaggtgaaacttacatcacacacatctgcttggctaaattcacatacatgcatacttcaagcattaggggtaccagagatcgcacatgtg

SEQ ID NO: 2427 - DNA, 365 bp, Glycine max
agcttcttggtttctccgttgaatgtgaagaaaaaatgtggatttatgagggcatgcccaaccaaagcttgaactactgtgtttttggttggaccccttacaatttattctaaacatcagctgaaatcttctttaaagaattgtggagacagaaactgctattcctaatatgtgtgtatttgactagctgaaaccaaaaggaagttgcattgcgaggggacttctttatcttcaccaagacttcaggctgaggattattcacagggatctaaaaactagccatattttgctggatgcaaatttggatccaaaaatatcagactttcgcttggctcgatcattttgggagaccaagtgagggaaac

SEQ ID NO: 2428 - DNA, 281 bp, Glycine max
  unsure (1)..(281): unsure at all n locations
agctactgcgcttcaatgctctcgttatgactcangctcaccctgacgctacttcttcccctgctgctgctgatcttctcgaacgaacctccaatctggagacccttagtcctagctttttcgttatgcttgaacaaactatggtttctgaggatggatatacacactctcaaatgggtttggggcaaaaaggaaatcttttccactcaaatcaactcatctgaggtggacacatttggatctatgagctgcgagagtcaaatgtggatgctctatattaa

SEQ ID NO: 2429 - DNA, 269 bp, Glycine max
  unsure (1)..(269): unsure at all n locations
agcttgctgtgttagaggcataggatactgtgttgagtactagtaacaaggggaatgtatcgatgacttgtgattcgaccaaaactatacgttgtatgacagactgatgcgaatgacataaaacactacagtgggtcaccatagaatgatctatgttcctatccggccatagggtgtggagtgctatatgttcctattnggtatagctttggcgctggaatgttcaatttggagtccacaaaaggaggaactctatatggtgctggagt

SEQ ID NO: 2430 - DNA, 397 bp, Glycine max
agctttgaaccatacaaggacaacctttttctttgtgttcagattgctttacaacaagagacccttggtctcttaatcccttttcagaaataagatgaagagaagaagaaatctctcttgaaagagatagattgaacaatggagcactcaaataattccttattgaattgcaagtgtattggccaaggaatttttaagaggataagacaattttggttttgagaggataagacctttttgttctaaaaaactctaagcaaatttgtgttccaagtcacatataaatagacccttgatggccattcaaaaaccatttgaacagatgtgactcttggaaattattttttgaaaatctcctctggtaatcgattacaagatttgggtaatcgactatagg

SEQ ID NO: 2431 - DNA, 232 bp, Glycine max
agctttaaggcagggctaaggcatttgttgaatttctctaagagttgggagcgaaggaactgacgggtccaaattccattcttaaacgataaagtgttcacagggtgcgtaagccttctaatcctactttgtcatttaaaattaacccaaaagaacgggaaaatgatcaattggcacattttgatgcccggttaaggctaaaatgaactctcgtcccaaaagaacgagaaaa

SEQ ID NO: 2432 - DNA, 391 bp, Glycine max
agcttcaacattcaattttgagcggttcgtattattacgggactcaatcagacatccgagtaaaaatttattgtcgtttggattggctcagagattcaacattcaatttcgagcgtctccatatattacgggactcattcagacatccgagtaaaaagttattgtagtttgaattagcttagagcttcaacaatcaatttcgagtgtctcgttatatcacgagactcaatcagacatccgagtaaaaagttattgtcgtttgaattggctcagagcttccacattcaatttcgagcgtctcaatatattacgggcctcaatcagacatccgagtaaaaagttattgtcgtttgaattggctcagagcttcaacattcaatttcgagcgtct

SEQ ID NO: 2433 - DNA, 395 bp, Glycine max
  unsure (1)..(395): unsure at all n locations
agcttatttgtcaaaattagtcgggtatgattattatcattcaataccgcgcaagttcaagaaatattgcgacggatgctttgtctcgcttaccacaacagggataatgccttttactcaccattccaaattttgtcttcctcaacaacttgagccactcccttaaccattcccctgcctttctagacaagttgcgtaatgtcaggatctaccccagggacaaccttgaatactcaattcaacaagagcttctcttttatcagggtaaattttggctcccccctaattgttcttttattcccctgttactagaggaatttcattctacccctctaggaggccacgtgggtatcgcanaggcactacgtcatgtccaagagaactttgtatgggac

SEQ ID NO: 2434 - DNA, 355 bp, Glycine max
agcttatccgtagaggtgttggactttttcaggtcttggagaggagcaataacaatgtctataggttggacctcccataagagtatgcagttagaactttataggtggagctaatactgaggagcatgaaccaacagatttgaggtcaaatcctcttcaaaggggagtgggtgatgcaatcctccctaggaagggactagtcaccaaagccatgaacaagaggctccaagaggattgggctagagctgttgtagaaggccctaggattctcatgaaccttacggtagatttctgagcccatgggccatgttgtgtccacttatctgtgtacatattagattaggatttcattatt

SEQ ID NO: 2435 - DNA, 244 bp, Glycine max
  unsure (1)..(244): unsure at all n locations
agcttaagagacacctttttttttgtttatagnggcccacagaaacgcagggatatccgaataggatgttctacgccttaatgggacgaggctgaagagatggttcttactcggaaaaaatggcaacgacccttcggagattctctcttccatgatcaattatacgcctgtgctcaacgggttgatcaggatcacacaaaggaggtattcagcaggataatattcttgtgctctaaagaactct

SEQ ID NO: 2436 - DNA, 331 bp, Glycine max
agctgtgaatcagagagtgggactttatcacaaagctccaagctcggatctagctctcccttgattcaacacgttcttccttcaagctgttatacatgggctgatacggaggagagcatcttctagactgaggtgctgcttgagggggcgaacacatcgtcactgcgcttcgcatactgctggcattccggttacaagaagcgacggaccacattgatgaaggagacgctcagcccgcaagcttgaatggagcctacatcactatcgatgattgcaagccctaaaatatagtcccatagccagttagcttgaatagagtctcaaaacatgg

SEQ ID NO: 2437 - DNA, 390 bp, Glycine max
agcttgaactctaaaggtatacttttataaactaagagttttcatttaagtaagagtaagacagaataaaagttaaattgggagaagatgtcatatcacaggttttctaagtttggatatctaggattcatcatataaaaggatggagaaattaatgaggatgtataggatacatgtgggatggcttaaatggtgaaaagcatcgagggttatttgtgattgccaagtgtctaccaagctcaaaggcaaattttattggacaactatacgtccaactatactatatgatagtgaatgttgggttttaaagggacaacatgagagaaaagtgagatttgcagaaatgacgatgttaagatggatgtgtggtgatataagacaagataaaaa

SEQ ID NO: 2438 - DNA, 155 bp, Glycine max
  unsure (1)..(155): unsure at all n locations
ctctagcggtcgaccanctcataaagggaatgttatttgggtctatgaacctccatattgtggcataaattcctgaggaaaatatttcaggcatatcttctcggtcgttttcggaagaaatctttagttggttgaaaaataccccctcgccctcg

SEQ ID NO: 2439 - DNA, 369 bp, Glycine max
  unsure (1)..(369): unsure at all n locations
agcttctccgaatgtttgtttatttccagnnncctaaaaagatctaaaaatctcgccaaatggtggttcttctccttcttggaaggtaccacaagatatggtacttccgcaccttcattcacaactttttctctcttcttctctctagcttggtcacttctactcctctcttcattcttatttttttcatctttttcaattntttattttctttttctttttctgcttctttttctttttcttggncatttactttctttttcttgaccattatttgtttttctttttcctgattgctttcacctctcacatcatctttctcatcatcaatacctttcttttcaacagctttctttttggcatgacact

SEQ ID NO: 2440 - DNA, 358 bp, Glycine max
  unsure (1)..(358): unsure at all n locations
agcttaacgcctattgtcgtgagtttcgtgatgtttcggaaagaaaacaacgaaaaacacaaaaagcgaaaaaaagggggtgaagttagtaaaaagggggggtgcataaggaatcttcctgagtaagcaaccagtttgctcatctcgcccaggcgagctgggcagcaagcacctcctcccattttgttgaaaatggctttggaggcctccgtaatgcttcagtaacatttccaaaaccttgagtaagcatatttcaatcaagattggtgaaagggaagagaaaaatagaagaaaatcaagtttgatatgcttccgtaaactttcataactnttctgtaaagtacaaaaaggggggggg

SEQ ID NO: 2441 - DNA, 392 bp, Glycine max
agctttgctaatgtcgattttcaaattctttttattgtctttcctttttgtgggcatcccatatggtgaatatatttagtggcacacattctctctgctctccctaaatatttttttaaaaaaatttaagaatgagtgggagagagaaataaatgagttttaaaatataaacattaaattaccttattatccgtaaataaatttattatcataaaataagtagttaagttttttgtccaaataatttggtatgttaacatacccctttatatttatatcttttttatttcttaaaacataattttgaactatactttctaaaacaacatatatcaattccataaagtaatttttaggactatgttttaataaaatacacataattatggaat

SEQ ID NO: 2442 - DNA, 389 bp, Glycine max
  unsure (1)..(389): unsure at all n locations
agcttataagaacaaaattgcctaatatatttctcaaatatgcatgngaangaggaagcatcaacaagaatcaagccaaggctattgcgcaagcaatcaatggggcaaaacacaccacaagattatgatgatggatggctcacattctcacaaaggtaaacttatcactctcaaattgagctttcaaaactatcatgacatgtagagggaaaaacaaggatttcaaatcgcaaaatgtcaagagactttattttcagaacaataaccattttttgaacatatcctataattcaaattaaaatattccaaagttgtacatgcaaccagaattgacctaaaatattaaactagaaacccaacaaagctaacaaatttaccaaacctaccaa

SEQ ID NO: 2443 - DNA, 141 bp, Glycine max
tgcccccggtctgacgtgaccttatatgtttgaaacatactctcgtgattgtgtctagacgcgagatgaaataatattcagtccttctaactatccaagaaagcccctaataggacctctttaaagttcttggcgcacttt

SEQ ID NO: 2444 - DNA, 398 bp, Glycine max
  unsure (1)..(398): unsure at all n locations
agcttggatttcctttntggagggattctatctttcctaagatggagccaaacccagtcaccctcattaagaactagctcttttcttcctctattgcctatagttgaatacacctttgtttggttctctatttggttcttaaccctctcatgcaacttctttacaaattctgacctagattccccttctttatgtataaaagaagtgtctagtgggatgggaatgaggtctaacggtgttaggggattgaacccatagacaacctcaaaaggggactgcttggtggttctatgaacccccctgttgtaggcaaattctacatgaggaagatactcatcccaagtcttatggttgcctttcagaagagcccttaaaagggtggataaagacctattcac

SEQ ID NO: 2445 - DNA, 65 bp, Glycine max
ggttgtggaacacacgcccttatacttatatctttgttattcgctaaaacataaatttgaactat

SEQ ID NO: 2446 - DNA, 272 bp, Glycine max
agagataggctatgaatatgatttcgcacaatctttcttcttctcgctgaggaagaaattaaactatatacgcgttgcatggataaaagaaacagaagcttgaggacatgagttctcctatcacaccgatcccatttagactatgactaccatgtggagtgtaaaatgatcatagattcatgtctaaaagtctgtttggccccccctgatcatttcccttcatattggagccaacaacatagccttgacctctaatgttactaataacggat

SEQ ID NO: 2447 - DNA, 357 bp, Glycine max
agcttattaataatagagttatcatttcttataacagatgcaacagtagctaaaacaaagggacattaaagatagaacccaaagacatgaaaacaaaacccaaaaaaaagtgacattgaagacaattaataattccaacaaggaaagaaacaatcaattaagtaaaaaatctaagaagaacccattaccgaatgaattttgtcatgattcttaataattaatgattaaaacaagaaaaaagtaaaaacccattcaagaaattgataagatagaaagaaaatataaccattggatgtatcttttaaatgaagggttgagataattttttcttttttctttcttttccaatttaaccct

SEQ ID NO: 2448 - DNA, 79 bp, Glycine max
agcttacagaggaagcttattgatttaagataatgagagagatagagtgatgcaatcctaccccctaagggcattggat

SEQ ID NO: 2449 - DNA, 390 bp, Glycine max
  unsure (1)..(390): unsure at all n locations
agctttgnataaagagattttgncctataaattttctttgaaanngggcatctgaagtctgaaagctctatgcagataagtctgcaaaagctggaagtggggctgaagtaaaagatgcaaggatgccagctattggtgcaaaggaagagggagcatcagctgctctgatcttggtcttccttgcctctagaaaattaactgtttggtcattcgcattccaacagttccttatgatataagctaagtcaatggctggccttaggttttcataagaggtaagggcatcagatcccactcccctcgatctgcacaaggttgtgattaaagatgggaagcctaagcgagaagagttagattgagccaccatggtcatttgtccagagatcaaac

SEQ ID NO: 2450 - DNA, 380 bp, Glycine max
  unsure (1)..(380): unsure at all n locations
agcttattggatttaaacaagtcatttctctgnngnacttgctcggagcttaaaccttcttttgtgcatttgagattatcaaaaacctcctcaataggaatgttctcctacatagcacaaattccatgttaatcagatgcctaatactgatagtgtttttcatcccctatgtgactaaaccatcatagaagtaaattagaaaatttcatcctacttttctttttcttttgtatttcttcatattttgggtttggactcgaaaaatacatataaaggacacataatacaatcacaaaagtcttattccaccatgtgaggtcacgtacatagatcacatagtaccattggacttggtaaaactcctnggagatattatcatc

SEQ ID NO: 2451 - DNA, 324 bp, Glycine max
  unsure (1)..(324): unsure at all n locations
agcttgtccactttaatatgttntttatagttngncatttcaatttctcactaagtaaaatggatcattttcaaggtccaacgccttaaaatgatcacttcttaagtaaaaaagaatcacttgataagaaagaactacgtaggtctgattttctcatcccaattgaggaatacgtaggagcaaagggaaacacccttgtcgccacaaaagagaaaaaatataaaagggtataaggatataagacataaaagggacataaaaatcaagtcacgttgcacattcattaaaggtgccgtccttgggacgacgtgtgggtgctaatac

SEQ ID NO: 2452 - DNA, 405 bp, Glycine max
gacctgcagcatgcaagctggattgaagaaatggaagtactatataattcgaaataggatcaatgaagatcaacaaagtatggactttagttgaagtttcaaaggatataaaaccaattggttggaaatgagtttacaagaaaaggattggagcagattggaagattgaaacctacaaaacgcatcttgttgccaagggatattgtcaaaaggaaggtatagattatgatgaaacttctctcgtggaaatgctcaaattaattcggattatttttgctatagtagcatactatgatcatgaaatatgaaatggatgtgggaaatgtctttccttaacggtgagctaaaaaaaggtgtgtatatgacacaactcaagggattcacatccttgtttgatcataataa

SEQ ID NO: 2453 - DNA, 384 bp, Glycine max
  unsure (1)..(384): unsure at all n locations
agcttctatataagctgaaccatnttatcaatttagacaagtngagnnnnatggagaaaattagagtttatctcttttatcttagtgagagtgattctcctaaattcttgagtgattcaagaacaccttggctgtatcaaaggactttcacaacctttgtgtgttgccctcgctggaaagagtgattctttccttcctttcatcatcacccttgttctttcaaaccacaattccagaaaatccacctctgcccagaattatctcgtggccataactcccattttacgcactcaaattaagtgattcttgagcctaaattgaatttcaaaacgagacctttcacctcgttttggaatcacctcatttggagccctgtaacttcag

SEQ ID NO: 2454 - DNA, 396 bp, Glycine max
agcttgagtccttttgagaccaatgtaggacattttgtttaaaaagtcggcaggatggaagctcaaacacttatagtttgggggaggatttgtttgatacaatcggtcctctcttccataccattatacttcctattagtgtatagggctctatcaaagatcatcacaaagctagtgtgtctccaacataacttgcttaatttggggagcacacgaagatgagagaaaaacgagtaaaataaagtgggaaaaggtatgctcaccagaagcttgtgggggacttggtattggagagatggataattttaataaagctctcttatctattagctaagtgagtgtgaagataacaaaaaagaagctctttgggtcaaagtggttatagctaagtctaaa

SEQ ID NO: 2455 - DNA, 388 bp, Glycine max
agctttgcttctacacactcattctatgaaatatcttgcggacatgggaagaggtggtgtagaagttcttgaataaatattttccagtgtccaagaccactgaggggaaggtggaaatctcatcattccatcaattccctaatgaatcaatgagtaaagctcttgaccacttccatggtttactctagaagacctctactcatggatttagtgagcctattcaactaaatatattcattgatggcctgtgaccccatttgaagcagcttcttgatgcatctgctagtggaaagatcaaattgaaaacacatgatgaaactatggagttgattgaaaacatggcagacagtgaccatgccatcctttgtgaccgagcttacacatcgac

SEQ ID NO: 2456 - DNA, 382 bp, Glycine max
  unsure (1)..(382): unsure at all n locations
gcagcttagcttctgtgcccngacttttggttattatctataacggacagagaaggatacttctttctggctccattcactaccccagaagcacccctgaggtattacactcaaatgtatttcaggtttctttccattttggcctttttttttttttatcaaatgggcaccttaaagtatcttccttttttcagatgaggccagatcttattcaaaaggcaaacgaaggaggtttggatgtcattcaaacttatgttttctggaatggacatgaaccttcacctggcaaagtaatgaataatgtttgcttgcagtgnttgaaaaaaatgcatttttttgtcgctattatctattntaacaagtttagctgtttttgttggta

SEQ ID NO: 2457 - DNA, 361 bp, Glycine max
  unsure (1)..(361): unsure at all n locations
ttataaaaanccnnnaannggaagggaagggcatgatagtgcacccatatcgctaaacttggacaacaggttcttgagcgatgtggagggcttaaatgtcgattttggaaggaccacacaaggaaaaaagttaacctctcttctaaaataaagggccgaatggtttgaccttccaaatcggcccgattaaatgacaaaccttgttttaaaatacgcatgccaaaaaaaatgtttgtgaaggggtatccacaccttggttacattcaaagaaagaacaggggagtgttttattcctcccaaaaactacttgagaggggttttgaaaccaattatcttgggaggttgtgggaacaaatatccg

SEQ ID NO: 2458 - DNA, 147 bp, Glycine max
ctttgccgaatattgtgccggccataaatcccattgtacgacattaaattagatgatttttgaccctaatttgatttttaaaacaaaacctgctccgctatctggaatcccacgatttgagtcctggaatttaagatattgctccct

SEQ ID NO: 2459 - DNA, 383 bp, Glycine max
agcttcctctgtccttttacaatttttaaaagccatataaactgtgtcagtctttattattctctaaaacttcaaggttttatggacttggatcttctttagacactcatgtttctgtcatattgcttagacaagactaaagataactaagttgttgttaactaaaacacatgaaatttgcatgtgcctgtgtttgcaatcacacttaatgggccattttagcgggataatatggtcttcttagattgaagcttttgaaaacataactagcttcagttatccaacagattaaggtgggaactcgctggccatgaattctatttcatcattggtggactactaatactcctactactcataaatatttcctaattacttaacta

SEQ ID NO: 2460 - DNA, 354 bp, Glycine max
agctttgagcaaaatcattcgatattttctttttactcggatctctgaatgagtcgcgtaatatatcgagatcctcgtaattgctaacggaggctctgagaaatttctaacgacattaactttgtactcggatgttcgattgtgtcccgtaatatatcgagacgctcgaaattcaaaatagaagctttgagcaaaatcgaacgacaattacttttgactcggatgtccgatggagtcctgtaatatatcgagacactaaaaattgaaaaccgaggcgctgagaaaattcaaacgacaataactttttacacaatcatgatgcttaaaattcacaacagaagctctgacataaat

SEQ ID NO: 2461 - DNA, 383 bp, Glycine max
  unsure (1)..(383): unsure at all n locations
caagctgaaatattttttattaatattctaannnnaanggtaatttctttataattttaattttattcatgtcctctcaatatattgatatattataaagttgaaaattatattcatccaatatgactttatgacttaacatgttaggaaagctaactagtaatattttttaatcacatatcacattttaatttgaataaaaaagagacataaaataaactaacaaactttaatttatttataaaaataatatagaataatataaaaaatattatgaaatcataacttttttttaaacgaaaattagactctttttagttgtaggtccaatatcattgcacctttaaacgacgtttaagacctgaataganacatataataca

SEQ ID NO: 2462 - DNA, 335 bp, Glycine max
  unsure (1)..(335): unsure at all n locations
agctngtacactttattttattncataattnnganngcagaactcgagcacagtttatctggtccaaataccgctaaggaacagngggagcaggaacaatttgcaattttctgcgaacatcttccaagtcttcatgaaaatgttgctcataatatacacacataagatcagtcgattgcatgccagcacgaatggcccaagggaagtagtgctgataaaacaattttctctgcttttcattgaatctagccgtgccccctataacggacagcagacacataggaaggcccatctgctcaaattcaatgagcttcagtgcttgctccccaatcaag

SEQ ID NO: 2463 - DNA, 381 bp, Glycine max
  unsure (1)..(381): unsure at all n locations
agctntgagccttaatccttactatcataaaccttgacccagggtgagaatgtcaatccttaccctcggaagcaaagaaaaaaggagagaaggaaaatttccaatcaaaggaaaaaaggagaggaaaggaaattcccaatcaaagagtgggagaaagcaaaaagaaaagaaagaaaattcccaatcaaagaatgggagaaagaaaaagagaaggagaagaaggaaggaaagctcctgatcaaggatcgaaagaaaacagaagaaatgtgcagaggggatctctggaccagacaatatctaaacaaatacagaattgtcaccaaatgaacaaaagaaagaaaagganaccataacctaaaagtggtcttctccctttgatta

SEQ ID NO: 2464 - DNA, 207 bp, Glycine max
  unsure (1)..(207): unsure at all n locations
gggggggggggggaaaacccccccccccccacgcggggggaaaaaaaaaagaggaggcgcgcaggacaacaggggaaagaaacacaccagggggacgccccccncccccaaagcagcacacaaagggcaaggaagcggggggacaaacaagaacagaggaccacggcgcggggcgcgggaggggagaacaaggggggaaaaaaaaaa

SEQ ID NO: 2465 - DNA, 395 bp, Glycine max
agcttcaagtagagggaatatgatgtataagattaatatgactatggctatgatcactacaaacaatacccaagtttcaggagaatcctgcagtccatatgccctattgagggaagggacaataaatttgcacccttggattttcaaaccccaaaaagatttgacaatcactacttcataaacattcttgaagggaaaggcttgttagattctaacaatgttcttatcaaccatgacttagatggaaagattacagagcagatgtgggcttatgcctctaatgaaaaacttttgtttgcttcatttgctaaatctatgattaagatgggaaacatcaatgttcttacaggaaatgagggggaaattaggaggaattataggtttgtcaatgctta

SEQ ID NO: 2466 - DNA, 144 bp, Glycine max
ttaatctatgaaaatgaaagaccagtttaattcgtgaccttttaaattcttttttagatcttgactatgaaaaaaacaaaaatctaatattctttcatgtcatattcccggaacactaaaaaatacagtgaatgactttttttg

SEQ ID NO: 2467 - DNA, 335 bp, Glycine max
  unsure (1)..(335): unsure at all n locations
gttcacacancaggggcgtgtgtgacatgcactcccaacgcttgaagtcgaggagaccttcaatcctattacacaacggggcggacaaaagcgggcagttaacttgaacggacattattgacaatgcggaaggtattctgcgctccactatccatgttcacatattatcgcagctcgtggttacatgagcctgaactactaccaatatattgatgttgtttatacaaatgagaacatcttaaaagcttactccgcacaatggtggcctcacgggaatgaagcagctatttctccttctaatgacgcatggacacttatccctgacccaattacaa

SEQ ID NO: 2468 - DNA, 343 bp, Glycine max
  unsure (1)..(343): unsure at all n locations
agctagattggctgattttatattttattgcaaccagacctgacattgngtttgtagtaagtatactttcaaggttcatgtattgtgctagtgaagttcatcttcaagctgccaaacgagttattagatatgttaaaggcactttagactatggtataatgtactctcattctcataattttaagctccatgaatattctgatagtgactgggcatgttgtattgatgacatgagaagcacctctggatattgattttcctttgggtctggagtcttttcttggtgttctaaaaagcaagaaagtgtatctcaatcaactgcaaaagcaaagtatgtaactgc

SEQ ID NO: 2469 - DNA, 171 bp, Glycine max
agcttgccgcccagctcttccaggctatctttgctcgcccagacgagcaagattgcttcctccaaaagcaatagccttctggaggaatcttatggagggcccaagtgggcctagttgctatttgcacccccatatttactaaatacacccctgcctttttttgagactctt

SEQ ID NO: 2470 - DNA, 385 bp, Glycine max
  unsure (1)..(385): unsure at all n locations
agctggttgntatgggtgtatatctttatttttnnangncgaagggaggagcctactaagtaacaactaatgatcaataccttttcaagtaaattcgtttattaatctatgaaattgtaagaccagtttaattcttgacattttaaattcttttttagttcttgactaagtaaaaaacaaaaatttaatattctttcatatcattttcccgtaacactaaaaattcaagtgaatgactttttatgaaattacatattaaacgagaattttaagaagttaaaggctaaagtaatcgacttacaatcttagaaattaatgtaatgttttactccatattttacaacttataaatactgctacttgtgaagtaaaacactgatagtac

SEQ ID NO: 2471 - DNA, 393 bp, Glycine max
agcttctcaagaaagccttattccttcgtgtattttggcatgagggagcttagctattggaggggtgtaacactagcttcccaaggaagcttctcaaggaagctacctaggctataaatagaagcatgtgtaacacttgtggtaacttcgatgaatgagagagtcttgtgagacacacttcaaaattcaacttctctccctctctttccttcattcccacaccgctttctctctttctctctctatctctatctcattctcttcctccattgaagcttcatttttaagcttcttatccaagacactctcttagtggtgaagcttcttgatgcaagctccattggagcttgtaggcctaggatcttcttcatcaatggaattccttgcttcttg

SEQ ID NO: 2472 - DNA, 142 bp, Glycine max
ccaacacgaggggggaagacgccaaaaaaagacccggagaaaaaaaccaccccgcgcccgaaaccaagaccagcaaaaagggagccacaggcatcagaaaaccacatggagaaagctagagaacaacgggagagaaaaaaaa

SEQ ID NO: 2473 - DNA, 319 bp, Glycine max
agcttctacttatgtggcagtgcgttcttccttcactttcttgtctccaacgcgagctctgaccactgtccttccttcccgcggtgcttcttttcatgtccgcctgagtgggcttatagcctaaaccatacttcccacgatttccttgggtttttatcaggctagttatgccgccattgtctttgcctaaacccatcccgggttcataaccgttccccaacataactcgggccatcattaccgccgcatcggacagacaaggttgcccaaagagggagtccacggaggaaatgctgaccacctcaaaagactggaaagc

SEQ ID NO: 2474 - DNA, 284 bp, Glycine max
  unsure (1)..(284): unsure at all n locations
agctncagcgcttattcctttacattgctcgacgacaccgcggatcaggtcattcgaaacgacgtgcgttctccagaaaacgacgcccacttcgaattccccgcggttaccaaggtcgccgacggtgtttttgtggacaacaacgccacttcggcgattccgatcttagaccgcgacctcgccaccggggaggaagaggacaacggagaaggaacacggcgagcttccggcaggaggatgacgtggcggcgattcagatcacgctcgggaagctgctgatggac

SEQ ID NO: 2475 - DNA, 191 bp, Glycine max
tgttctgggaatgtatcgctcacaatcaccactacagccgagctaaggtaaccgggggctataggactactacattatggtggctactgccgcttcatcggaaaccgcggcactgatatgatggcacgcaacttgggcgccggcgcaccatttagtgacgctatataatttgctcatcctatatactatag

SEQ ID NO: 2476 - DNA, 369 bp, Glycine max
agcttaaagttcattcacattgtttcagaaaaaagtgctttagagtcattgcacatataatttgcacaggagataaataaatggaaatatttttacctacattaaattatcttttagtttttactcgtttttttgggagattttctacctttttttttttctgtatgtgtgcagtactcttaggttttattttataaccacatttgatatttggtgtatatatgcaatctactatgatactaatgtgcagatttgctccaaaatttgaatgatggatacaatagcctcttgttttccttcatcactgttcacgtctctttcatactttgtatacatctgaaacatttgcaaatttgaccagcaaacata

SEQ ID NO: 2477 - DNA, 315 bp, Glycine max
tgtcctcggtgacgaagacaattgaattagccccttctagctttgcacaggcgtcaacgattctcaaaatgaagggtctgtgtttggaagtggcgatgaggtggagaacaacctctgtgtatgaggtggtgttgaagatggacccgctgtactcaatgtttgttcacagggtacagtaaattataaagttgccgttgtgggccacgccgacggagccgaagctgtatccggcgactaaaggtagcacgtttattagcatggattggccggcggtggagtatctgtcttggccgatggcgaggctgcctgggagct

SEQ ID NO: 2478 - DNA, 361 bp, Glycine max
agctttgatctaacaccgccacttctaccatcatcttagatttctattatgttaatattattagtactttaatctccagccgtgtatttggctatattatgatgatatttgaacaatttaatatttctttatttgcatggtatgtttgaacaaatattaattacgttatttgactatgtggattttatatttgatctattcatggttcttgcttcatggttcttgctttatgatttggtttatatttttcatgaatgttgtgtgaatgcttagttgatatttgtatgttacgcactttggctttttgttgatgccaaagggggagagaaatagggatgaaatcaacaagaaataaggatta

SEQ ID NO: 2479 - DNA, 319 bp, Glycine max
tgcaatagtcttctcgtttatgatgttgaatgcaacgttcttggctaatgtaaatctgatcacaccaagagcttgtcgatctagcaagttccattcttcttgcttcatgtcgtctggcttaacccctgataagggttgatacaacttcttctgatatagataatcctctatctgcatcttccaaaagctgaaatctctgccgtcgaacttctcgatcttcatcttcccctgttctaatgccattgttcccactgcctcctctaaactgagaagactcccactaattcctctaaattaaggaaatcccgtggagtaaaca

SEQ ID NO: 2480 - DNA, 365 bp, Glycine max
agcttctttgtatgtagatatgtttatttaatacacaaataccaaagcttgagctcatgtttcgtccgagtaaaaatatatagttagtaccaagcgaggactgaatatagtaatagtctaattgatggggaattcacaatggtagatcccgtgtggctaatatatactctaaacctttataataaaaaaataatgcaggaaaaaataattaataaaatactctttttaatgcacttttttattaattgatttcttttgaaattcgcttaattgtgtagattttccccctatttaacgagttttacaaataattttatatatttgtaatacaaaagagaatatattaaaatattataaaaaagaat

SEQ ID NO: 2481 - DNA, 316 bp, Glycine max
ttttattgttgtttagatggatattttggctatttgcaaattccaattgctaggagggaccaagaaaaaactacttttacatgtccctatggaacttttgcatatagacggatgtcatttgaactttgtaatactcctgctacttttcaaagatgcatgatgtctattttatttatttatttaattgagtcttgcattgaaatactcatggatgatgtttctatttttggaacttgttttgacacatggttgcataacttgaatgtggtcttgaaaaggtgtagggatacaaggttagtcttgaacttggaaaact

SEQ ID NO: 2482 - DNA, 369 bp, Glycine max
  unsure (1)..(369): unsure at all n locations
agcttggactcaaagagaaacctttaatggctctagagtagagtagaaaaactaaaaaaaaaaaactcaagaaacctctagttttggcacttgttttcacaataattttcaattgaaatttaagaactaggattggtataaaataggcaccaattatagaaaaaattttgagccaaaacaacaagcacatttccctttcacttttttttttcttggacactgatttttctgccaaattgtgtgatttttattattttttcctttaatccaaatcncctggntcttttttcataattttggtccagatgtctagcaaattcagtaaacatttcagctcaaaacacgtagttaccaaatcccagtaattta

SEQ ID NO: 2483 - DNA, 327 bp, Glycine max
tccttgtgaggcttgatcctccaaggaatcctttagtcaatagatgaaacaatattggtttactcatccaacaattgttataaaaatgaccactgataaatgaaagtgacttacaatcctgtctgcaatttcctttgcaacctcagacgtcatttgactagttttcttcatgcgggtcatcttccacttcacgtgttgtctgttggtacatgggggatcaacgactgtgccagtgctcccagattacgtttcttcctccagtcgtttcttttgcttctcctccacaactttttttctataaaatcataacccccacgagacaacatg

SEQ ID NO: 2484 - DNA, 359 bp, Glycine max
  unsure (1)..(359): unsure at all n locations
agctnctnggnnncttctgctgtttatganattcgggctacggtatgcactcctctaatgactatggcatcatttctggcactaaaatgttgggagttggaagccatcttctcaattaaatttctggcttcagcagggttcatgtctccaagggctccaccactggctgcatctatcatacttttgtccatgttactgagtccttcataaaaatattggagaagaagctgctccgaaatctgatggtgagggctactggcacatagttttttaaatctctcccagtattcatataggctctctccaatgagttgtctaatacctgaaatatcctttctaatggctgtggtcctggaagc

SEQ ID NO: 2485 - DNA, 317 bp, Glycine max
tttccagccaaaaggatttagtttaaaattgaaatgtgcataaagaacaataaagatgtcatagatacaaaattatctttttacaaggaactttattttgtcttttctagagatttggtgcaaaaacaatattgaaggggaagaccaatcatatttggacagcagataataaattataaatgaaaaatagaaataagatatgcacacttacccactgtctctgatgcctttaaaccaatttcgaatatctgattcattgggttcagtgtatccttctttattcatgtcaatcttagatccatctgtgacaccttttg

SEQ ID NO: 2486 - DNA, 363 bp, Glycine max
agcttgtgttgtgtctcattacattgacattgtatttttaattagaaaaggcgcagaaacagaaacagaaagaatggctggtcccggcaaatgcttcctcgtgacgggtcctccggtgagtaaaacccaacgttctctctctctctctctctcacacacacacacactctcttcattctgtgtttattgattttgatttcactgatatgttcagggtgtgggaaaaaccactcttattatgaaagtattcgagtccctcaaagtcaatccatccctcaagcttcagggcttctacactcgtaaccatctcttcatcttcctcttccttccttcaccatctcacatatataatgtaatattcat

SEQ ID NO: 2487 - DNA, 318 bp, Glycine max
tgaaggatcttatgtcgcaggttatttagaccctagagcagcaaacttatctatctaaacttcttggttatgactatacaatcaaatataagtcaggaccatgcaatgatgttgttgctgatgtcctgtctcggatactgaccacggaggtcagccaactcttcgtgttatccttgccccatttcattttcatggaccggcttcaccactcattaactgctaatgacgcttatgtcggcttgtgccgacaaatcctgcaaaatccagaagctcatcctgacttcaacatccatcgcgatttcattctttatcagggta

SEQ ID NO: 2488 - DNA, 357 bp, Glycine max
agcttactcctcattttatcagttcttaccaaatcgtaaaaagagtcaacggagttgcctattaaattgccttgtcaccatccctctcaaatctcaatagtgtcttccatgtctcccaactcagaaaatatatctatgatccattaccaatgaggattgaggaaaaaatggtgaaacaactaagagagaaggatattcctttgatcaagtttgtgagcggaggagctactaaagatagtgctacatgggagttggaaagccacatgggagaatcatatcttggtttgttcttttcagctaaatttcaaggacaaaatttcttttaaggaggggggaattgtaacatccttctatttt

SEQ ID NO: 2489 - DNA, 313 bp, Glycine max
ttattgaaatctgcattttgttggatcaagtggcctcggaataattaagaagggggggttgaattaattatgaacgtgttttgactaattaaaaatctatccttcttaatgttactagattcaattaggcttttactactaagttaagaaagtaaagaaaagaaatagaaatttaaccaaaagtaaaagcaataattaaaagtacacggcggaaattaaagagtgtagggaagaagaagacaaacacaagatttatactgattcggccacaaactgtgcctacatccagtccccaagaaacctgtggttcttg

SEQ ID NO: 2490 - DNA, 279 bp, Glycine max
caaaatatatagacaaggcccagcgaggacttgaatttagcaaaaatctgactgatggggaatttcacaaaggtttatcccgcgtggcttatttactctctatacctttattagaaataactaattgacctacaaaataagtaatgaaatacacttttaaatgcacttttttatttatcgatttctttggaaacatccctaattgcgaatatttttccctaattaacaagtttacaactaaagtcatctattaggggtacacaatacaatatctcaaac

SEQ ID NO: 2491 - DNA, 363 bp, Glycine max
agctttgtccgcatattcctcatttaagactaggctcagctgaaacatcttacgtaagtttagactaatttaacctaagcttcgtccgcagatccctcatttaagactaggcttagattaaacagcattatcatcatagtatattaagaaaactaaaacttaatccgtagatccctcatttaagactaagttccaatcctgcttctatcaagttctaaggaaatagtacatttcccaatgctaaagtcacctaactaaacatacaaatgggtgatcagaccaagagcatgtagaaattaagcattgaaagaagcattgaacacagaaaacacaatcaaataaatattaaagtaattacatcag

SEQ ID NO: 2492 - DNA, 320 bp, Glycine max
taatcaaagaaaaagacatgcatgcttaccttggagaacacttgcaggccgcgacaactaaaaggcacgaggctgagctcacggtgctcagaaagtcagccacatgccacgcagagctagggggtgcgacttcctttgcggaggtgacggtgctgcgagagaaggaattttgagaagaagaattttgagagagagggagttcgaggaagacctagcgcgcgataggaaaatgattatacatcattttataaaataacgttaacgacggtgaatatgtaaacccgtctttgtatgtgatgatttcaacgatggtgtttcat

SEQ ID NO: 2493 - DNA, 317 bp, Glycine max
agctttactatgcagagaatattcaaggaaaataccttcatctgacttagcatcaaattttcctaagttatcttttccattattcaatacaaaacatttacaaccaaagatatgaagatgagagatgtttggttttctgccattgaccaattcatatggagttttctttaaaatgggtcttattaaagccctatttaaactgtagcatgcagtgttaacggcttcagcccaaaagtattttggaagaggagtatcatttaataaagttctagcaatctcttccaaagatctatttttcctttcaacaacaccatttt

SEQ ID NO: 2494 - DNA, 314 bp, Glycine max
tatgcgcatatttccttacaaacgttctcttgcacaagacattctattaaccgaaaaaaatgcacccatatacaatcaaggcagcttcgttacctagattatttacacgtacttccaaggtgtatttgttacttacatcacacacctccttggctaaattcacatacatgcatactcaaagcattttggggtaccaaaaattgcacatgtgcacatcttggtatttctaacacctatacatacacaaacttcatgatgaatcttgactatctacacaataaggtgctacatttcatgctcttttcaagtttttg

SEQ ID NO: 2495 - DNA, 348 bp, Glycine max
agcttgtactcttgttggaggaacccttactcaagctatcctaaaatgaatacaacaaaccataaaaatttcatcacactcatagcaaatcagaaataaatggcgtgaatggtttatcattacagttacaacaaatcaaacacaagtggtgcacaaatcaaacatgaatggtgcgaatggtttttctttgcaactactatccacaaagtgagatagaggttagggattaaacaaatcaaagcacaaaagtaataatgttatttgtagtgtgagaaaataacaattgaagattgctaaggcgcggaaaaaattcaattacacttctccaaaaattgagataaagcttca

SEQ ID NO: 2496 - DNA, 305 bp, Glycine max
tttacctttcattttaacccttaaaacttccctgccaaaattgtcatagataaagcaatgttgatgttcaaaggacactttaaatccctttttaatcaactgacctacacttagcaagttttggtcaatgttaggtacataaagaacatctgatattaatttggtacctgaacacgttgaaattgcaacagttccttttccttttactggaatatagccaccattcccaattctgacctttgagacattagttggcttcaaatccttgaatagagtcttatcatttgtcatgtggttcgtacaac

SEQ ID NO: 2497 - DNA, 371 bp, Glycine max
  unsure (1)..(371): unsure at all n locations
agcttgtgcaaatcaaatcactcttacatttcatctctagcatgcatttggtttctttacccactcctcacgtttggttttttagggaaaaacaccataactaaacgcgccgcaagggatccctatcgcaccagatccaaatctataacgatgggtgatcaagaggagacgcangaacagatgaaagccgacatgtcggctctgaaagaacaaatggcctccatgatggaggccatgttaagtatgaagcagctcatagagaagaacgcggccaccgccgccgctgtcagttcggctgccgaagcagacccgactctcttggcaactacgcaccatcctccctcaaacatagtaggacggggaagggacac

SEQ ID NO: 2498 - DNA, 313 bp, Glycine max
gcttccactacaaaacttaattacaaaacaagctttttgactttgtttcttttggccgaacaagttttttaagtaccactgctggaactttcttacacgccccctggattcaaaaaacacaagcatgtgcttaacaacgtgtatctaaaggttagcacacatgcgagtttggatgagttccccatctcgactgcttcaacagtggagggtaccgagtctgcagatgtgcacatactgggctttccaacacctatatatacgcaaacttcgtgatgaaccttgaatatttagtcgaaaacgagcttcatgttat

SEQ ID NO: 2499 - DNA, 368 bp, Glycine max
agctttctagcttttcattggtgtattttgatctccttttggtgctctaaattgtgggagtatgctcaaatatatagggcaattttggtttgttttcttgcttgattaggttgaattaggggtgtgtatgggatggccctaggcctataatgcattttggaacaatgggacatgccacattgtccccgttctcttgctattgacgcctaaacgcgcgcccaccaagtgttcggtgaaatgcctcaatggcattagcgcgtgacttttgtaaggaaacaacccatggggcattttggtttgtacacattttcttttttggaatatgtattcattcctgaaaaaggctagagtaattgccccgcatatat

SEQ ID NO: 2500 - DNA, 267 bp, Glycine max
  unsure (1)..(267): unsure at all n locations
gggtgaaatcatttgtggtaggatcatctagccttgatcctgatatnaaaaaaaaaattaactcacatcgttaatttacattatatgtttgggcttctttcattgtcatgttaggtattttataattcacattttcaaatgaatctaagaccctatgtcaggaaggaaatctattttaaaaaataaaaattaataattatcatcatacatatacatatcaaaacaaaaacaaagttaaaatcataaaatttcaatatataaaatcaa

SEQ ID NO: 2501 - DNA, 431 bp, Glycine max
  unsure (1)..(431): unsure at all n locations
nnagcttccactttttcaatttcgagtcttctcgatattttatggtgtcctgaatgcggactctcgcgagttaagatgtctatgaccactcttgaatactctcgagagcatctcgtttgttcacatttccgaagcgtcttctattatgtggatatgcgcctgtaatcgaaacctcccgagttgaaaaatttaatgacccatttgaaatttcctcacagagcattccgcttgtttcatattcttgaagcagtcttagaatactttgaatacntctctgcaatcgcgaccctctcgaagtggaaacattacatgaaccattttgaatattctcaaagagcctctccgttgttcaaatttccgggccgncttcgatataattatagcgcccagaaatccggaccctcccgtgttaacaagttattgaccatttt

SEQ ID NO: 2502 - DNA, 316 bp, Glycine max
taaagtatgcccgagtcattcatccctatgagatgttgttgaagtattggcgatcagaattgccattccttggattatagggttgaaccaagctcatgcttttacaaaaaggttcatcaagtcaagttgaaatatggaagtaaccgtcttgcaaaattggggcaaaagatgaatcgagtcacatcactgcttcatctactgccaaacatatttaggattgttgatgtccttgttacttccagtttcactttgacaaagatgtcatggaccatgttgaaaatctaaactgattcaaccccatatcctgtgtaaaaat

SEQ ID NO: 2503 - DNA, 371 bp, Glycine max
agcttgctactgagtactttgctttctatgacacccaaatgtcttcttctggtgaaaccaagaaacactgttcctgttacatactccactgtctgaaggaaccttgtaagtcaaaaggaaaagataggagtgagatttcgaaacgtcctctaggaagcaattctgaagagaatccagaaggaccaaaacatttcactgatctgataaggtggcaattttaccttcccaccgagtgtgaagccggtcatgctcatcaggttctaagaactgcaacaaagttacaaggctcagggataagctttgagaaaggtgatgtgaacaagcggttactggaaatagccttcaagaagaccccaattctgagttcattt

SEQ ID NO: 2504 - DNA, 348 bp, Glycine max
taggacctatagaaactcagctttacgtattcactcagccgagctcaagcctttaaggcttggcttattttcacccctacttggagatatgaaaatgatagattaaaagagaaaaaagatccaaaaaatatcaaaaaggaagatttgtttatcacttatcttttttataataaaaatatattgaaatatctttaaaaatatttatttaacaattatttttggcttaaatgataagaattgatatttttattatttatgacttgtagatatgaaaatgatagattaaaagagaaaaagatcaaaaaaatatcaaaaagaaatttttttattatttatcacttatctttt

SEQ ID NO: 2505 - DNA, 325 bp, Glycine max
  unsure (1)..(325): unsure at all n locations
agctttagtgngtagtgtcaagttttagggtttactgtgtagggtctaatccttatggtttaggatttagggtgtaggggttatggtttaaaatttaaaggtaatggtttagggtcaagtcttagcgtttagggtttaggttttacggtttagggttgaaataaaattactccaaactcatatgcatctaatgaaataaaattacatttagaagttgaaataaatggagtggatcaagccaggttgagtgactttagttatccataagtaaaccttaataaactgaataccatacattacgtgtgaaattcaaatgagaaattta

SEQ ID NO: 2506 - DNA, 272 bp, Glycine max
tgtcatatatagctttgcttaatttaactacttctccatcaattatcaagccatttatgaggtaatccttttggtaggaggcaaattagaatttctgatgaacactgacagcgatatttctcttttctgttcctaaatttgagcctgcttctgattttgtctatgttccccatataaatgtataaaatagaaaaatactacagtgtttcctgatgttcagcttataagcttgccgttccagttttttggtattgttagttgataagctaact

SEQ ID NO: 2507 - DNA, 360 bp, Glycine max
agcttcaaagactaattcaaggatataagagtgtggacgagtattacaaagggattgagatttccttgattagggctcaaattgaagagtatcaagaggctaccatggcaaggtttttgcatggtctcaataaggtaatccaagacattatagagttacgccactatgcctctttttggaggatctcattcatgaaactatcaaggtggagcaacaattaaaagggaaacaaatatacaagaagtccccctatgtgtcttcaacataggaggataaggagacattcaagaagaagggaggatcttcattcaaatctcatgagaaagatgctgcacttagtaaaaataatttaaaccctac

SEQ ID NO: 2508 - DNA, 318 bp, Glycine max
tcttgaatgggatcagtatattctttgacatatattaaaggatgaagatgttgtacatgacatattttggagtcatcctaatgcagtcaaattaaccaatgcctataatttggtatttttgatagataatacctacaaaacaaacaggtacaagctgttgttacttgatattgttggtgtgacaccaacagggatgacattttcaactgcttttgcctatttggaggaagaacgtctgaataatgttatttgggctctacagcggttttgaggtcttttcctcagacatgatgcactccccagagttattgttaccga

SEQ ID NO: 2509 - DNA, 356 bp, Glycine max
agcttttgaaaagggtgcatgcttatccagtaatgttaggcactctcctaggtcaggtggcaactggcctagatctatgtaagcacatgacctttcatccacgcacctcccttgagcatctgaagggtagtgggggaaattgacattatataagtaccagatgaaacacgaagctaattgcaaccatattaaaaagtttaaaagaaaaagagggaagaagcaacaagacttaatccaaaatatattagatcaaaagaatgaatcctgaacaaatgatgtttttaattcaatattagtttcaatacactattattcaggcctccgtctccattaatctactgaaaccacatcctacc

SEQ ID NO: 2510 - DNA, 313 bp, Glycine max
tttatataacaaagtgaagatattaaaatcacacagaagtaggcttgaaaaaatgacataaagttttttattatgaaaaacaattgattaaatatttgttgtatataaaatattatcaaatcaatcataagagttgatattatcaaaaccaataacttaaaacataatattaacattaattttcaattacttcaaattatcaataattaaaaacaaataatttaaaacaatatttcaaaatgcatggtataagagacatatctagtggaggactgtttctatatgagaatgggaggtgaaatattgtgaactt

SEQ ID NO: 2511 - DNA, 356 bp, Glycine max
agcttgacataacttttgagctttttctattattaagttgcatctctataagaactcagggtacgcaaggtctacccttgacgatcttttctattcctaattcttatctttgcaagaatacaagtctatcaaaaacccaaggtccactcttggtaaaaaaaacccaaggtccacccttcgtatgcacttctacaaaacccaaagcacccccttagtccactcacttgcagcaactacgatgaccaccatcaaaggtccaagctcaataaaacgaactaccactagactgtttggaaagatcttcaattaggtgaaagtcatacgcattcctcataaccatcagaggagaagcttta

SEQ ID NO: 2512 - DNA, 304 bp, Glycine max
  unsure (1)..(304): unsure at all n locations
tggcatgcttgaaatacatgctttattctatatgtggntcttagcaccctagctattgaaaacctagatatatccttccccctccctctacaattatatattcttttaagaatataaatctaccttattgtcacattatattaatgaataagatgatattgtaaagtggtcaaatcttataggatgtctgtataaaatttctaaattaacagtgtatataaattgaactacgtctctcaattaatgaaacattcttacacttaattttataacaatatatacaaagtcattttgtgtaggatat

SEQ ID NO: 2513 - DNA, 362 bp, Glycine max
  unsure (1)..(362): unsure at all n locations
agcttagccctagatatgatggtttttttcaagttttggagaggatcagtaacaattcctataggttggacctcccagaagagtatagagtcagcaccacttttaacatttttgatttaactccttttgcaggtggagctgatattgaggaggaggaactaacagatttgaggtcaaatcctcttcaaggggaaggggatgatgcaatcctccctaggaagggaccaatcactacaaccatgagcaagaggctncaanaaaaaagggctanagctgctgaaaaaggccctaaggttctcatgaaccttatggtaaatttctgagcccatgggccaaggttgggtccaattatctttgtacat

SEQ ID NO: 2514 - DNA, 320 bp, Glycine max
ttcacttgaaattagtgaggagtttaagaaagtaaggagaaaatccaagccgcgatgcttccataacgcttccgagacgttttcgtgatcgattccttggacgttcttcaccgatcttcattcgatcttcattgttattcattcttcaaccggtaagtgatctaatccgagactttcaattcatttcttgttttgcttgctttcatattaatctcgatcactttcgattatgttttcttacgcttttaacgagctttttaccatttatttaaggcgttttctcgcctagtcatagattaaatgaatttcaatccatcatt

SEQ ID NO: 2515 - DNA, 340 bp, Glycine max
agctttagtaaggcacccctttgttttgaagacgcgttcttgttgagaggcatccacataaagttctccacagaaaatgctttatcttgggaggtatacgaagattccatatagtggaccagcttccttgaactttgagagcttctttgttcaccatagtctccattaaaatatgataatctgatcaaaccgagtatgtccccatggtactaactttcaaaatcaaaatatcagaatcatgaagattgaagagtggcatcatctttatttcttgggaatcttctttattgaaaaattgatcagtaacctcaatgttccaactattgctttcaacatcaat

SEQ ID NO: 2516 - DNA, 306 bp, Glycine max
tcgtccgcaaaagttactcaaaatcgttttagtgtccaacgccttacacggacatctttgcttttatcggttaacatggaccgttcaaaagcgtaaaatcaacacataattttaccgcttttgcaagaactacataggtctgagttcctcatcgcaattgaggatacgtaggagcaaaagtcccgcttttatcggccaccccaagagatcgataatggtgcaacgccttaacgtttctctactttcaaaatcaaaagatcgtttaatggtccaacgccttaaatgacctttgttcggataaaatgg

SEQ ID NO: 2517 - DNA, 345 bp, Glycine max
agcttgctcaatgttgattgttggtgttaagatcatgagtgtttggagggagcagtttgtgtcctatatggatgttagttcaaggtggtgaattgttgggttgtgacctaaatccatatggaagattattctgttattttttttttgttttgtcctcagcctatataaggcaaggatgttctgtattttaaaaaggaataagcttccacttgtatactgcaaccataataaaagctttctgtttttccctcccgtggatgtagcctttctcaaggtgaaccacgtaatcatgtgtgtgttctttctcattctctttctctttcaattatgctgcaattcggtgtg

SEQ ID NO: 2518 - DNA, 306 bp, Glycine max
ttgtgagacccaattgtgccattcatccagtttggtactatcatcaggtatgtgaatactagttattagttaagtagcagagtcagagaatttaatgctttatcagctttagttcttttattcaaagcaacctaaatattcattggtcctcaaacgaaacatgaagacttcatcagcttcttgtgctctttgccaaacatggacacagatgcaataattgcagctactggaaactattattcattggtctggctgtaactattatttttcacatgtttattatctataaaacattaacctactata

SEQ ID NO: 2519 - DNA, 385 bp, Glycine max
ttaagtcacctgcggcatgcaagctttatgaagttgataaattttgacaattgtcaagttcaaagtcattttgcaaaatcctgcacttttcaacttaaattctagatgtaatttttttaggtattgttaatattaggtttcaatttttttaaatgatattagttttctaattaaaattagaattttatttcaatgtgatctgcattaaaagttggcattaattatttaggaaaaattctaattttgagtagagaacaatattttttttatgagttgtagagaacaatattaaaaatagataaagaactactcgtaaattttgtcattttcagtcaacggattttttttttccgaatattcaatcaacacttgttgatttaagtga

SEQ ID NO: 2520 - DNA, 283 bp, Glycine max
tctggtcggtgctgattcttggtataccccttttacaccttcatgtacctttcaattggatacgtccagcgtaaaaatataggaccacacaactggatctccctgactagatgaacaattatgtgaaccattatgtcgaaaaatgatggaggaaagtacatctccatttgacaaaggaaaatggcgacctcgttctccaattcatccaatcttgcagggtcaataactttgctacatatagcattaaaaacaaagccttgaccagttatggcttccccaaaat

SEQ ID NO: 2521 - DNA, 367 bp, Glycine max
agcttctaacttatgaccctgatttgtaaattatacataccacttgacttaatttagtaaatagtaatttgtttcagtgtttattaagaatatgatctgttatcattaatatacacagcggatcacagctgaagaagctctaaaccatgagtggtttcgtgaagttccccttccgaagtctaaagaatttatgcctacattccctgctcaaaatgctcaagacaggtgaccaaataagattttgcctatggtaaatttttttttaattttacttgttcatttgactcatatatatgctctataattatgtaaataggcgaatgaggagaatattaaagagtccagatccattagctgagcagcattg

SEQ ID NO: 2522 - DNA, 326 bp, Glycine max
tgtccagagtatgacaaagcagcaaaacaggttcaagtaaatccaatagtacccccggctagataaaccaaaacagaacatgtccagatattaatgagattaaaagtaatacaacaatttatttaagtagaaaactacaactagtgaatcaagtaaaacagcaatgtgtggtgtcaaactaatgcagattcgttgacagtttgtaaatgactaactaacctgtaaaggggtcaaactaatgcagattcgttgacagtttcccttacgcttgaagcaaacacaggtgagtcctttaccaatccatgctgatgcgggggagccacacg

SEQ ID NO: 2523 - DNA, 328 bp, Glycine max
  unsure (1)..(328): unsure at all n locations
agctngactntaagaacctncatttatcctataccaacggttaatgttgaccctgctactgggagaggaccaatcccgattaaagaaaagttccacagctatctggggatcatagctcgagaaaagattcctattgtacatatctacaggaaagatgtaccgcaatctataaaggacctcagttgggatgacattttgggaagtctagtcacaaaagggggtattaagttttctggcatggttatttgaatttaaaatgttaacattgacggattgtcacacacctttttgttatgcgcgccaaattttatttctcaaaaaccccaag

SEQ ID NO: 2524 - DNA, 310 bp, Glycine max
tgggtatttatcttgtaggcttaaatcacccttcctccacttatctttttttaacttgattcttaacccatcacccaccttccatctcaaattattaatgatgttgttgctgtgatgctggtggaaaacagaccttaaatccttccaccaatgagagaaatgtgcactgtccctaccagaacatagggcattccaccctccatatttggataacaagactctagcccagagctgattttggttgtttgccaattcccatccccacttaccaagcaaggcttcattaaacttggacaggtctttaatcccg

SEQ ID NO: 2525 - DNA, 253 bp, Glycine max
agcttaaaacaatttccagaaatttaatgatgtttgccttcatggagaggagtgcagggatgcatatttactctattagaactaacaagggattatgttgttctacaccccaaaagcgtgttacatccctgagtcatataaatatgaccgaaaggttgacagaaaattgtgtgctccagtagcgtgactgtctataggatcccccatcgtgcctctagaaatgctatttaaaatgtagcccaccactttctta

SEQ ID NO: 2526 - DNA, 274 bp, Glycine max
tgtcagcatatttgttgacttgacattttttatgtggccgttttgttggtgccaagttgtaagtgcataaaaataattacagtattaaacttgataggtgcggtcgactgcaaggatgtgttacagaatgtttgcaaagacttggccagaacgttcccgtcgcctgttttcatcatttgaccctgctattcaaagggtatgtgtctatttgccctttttttatttaagttttgcttaaattggtttaaagtgaacattacttctgcagtttata

SEQ ID NO: 2527 - DNA, 351 bp, Glycine max
  unsure (1)..(351): unsure at all n locations
ggagaggggatgaaatttttccaactctcctaatgtctatcgaggagtccgaggtttcggtgatcttcttgtccataaactacatatgccacttctaagtggtgcttggaagagctcgtgaaaattatggaatgcaaaaaaacaaagggtcaaatcgtgatacccattttttatcatgtagatccggcagatgtgcggaaccagaccggaagttatgcagatgcttttgtgaaacatgaacaacnnctnanaaacaacnnncaaaangnnnaaccccngaaagacacnncgagagaagcagccaacctctctggattggattgcttggtcaacangtttttttccaattaa

SEQ ID NO: 2528 - DNA, 328 bp, Glycine max
gcttccactgcacaatctaataccaccagaaatgtttaatagtatttctattttactctcctctctctctccatcccaatctaatacgaaccaatccaacaaagaaaaagcactctacttgccttatcaaatgagacaattatcactaggttatcaataaacacagttcaccacaacaaagaagagccctaaaaaatatcattagggttttgggggggataacatacccgcaacaagatttgatttggactgataggcagtgtttgcttttgagttataagatttccagtaaaggtatacaatgaattgtttggttggtcacatccaa

SEQ ID NO: 2529 - DNA, 311 bp, Glycine max
acttgcatcaagagctgataacagctttataccatttcatgagggcgcccggcactcataacacctttatctggacactatcctctggctattcataagatgagctttgttcaatgctcattttggcactgaatatatgcccaatgctacagtgcaaaatgtcatgaacaagatactttagagctattaccggaaaaacgtgctatacaagctagatgacatactcaatggcacaaaaaactggttatcgtatttacaccatgaatagacatgactttaagtgcctcaagcaacataagttgtatgccata

SEQ ID NO: 2530 - DNA, 357 bp, Glycine max
agcttagactatattgtagaatcttgagcctttgttctcaatgattaagttggtcttatcacagaggtggtctttatgctttcttcaaatattgagaatccattttgtaagtacaatgtttttcctaaagatatgatcgaggcttcacaccaaggaaaaattaccaccatattcatcttgtgtaacacccaatttttgcgtaatataaattaaaaaagactctattaaaaaataaatagagttttaggaaaataatgagattttcgtaattaaataaataagaaaaaataatcttattaattaaaataatgattttaaggtaaataaaataattatatgctcttataaaataaaatg

SEQ ID NO: 2531 - DNA, 316 bp, Glycine max
atttgagacctggttatcaccaaatactatttaatgaggaggacaggcataaaacagctttcaggacacatcaatggcattatgaatggcttgtcatgccatttgggctcactaatgcccctgctacatttcagtctctcatgaatgaggtatttaagtgctattgaaggaaatttgtactagtcttttttgatgacatacttatatacagtccaaactggtcagctcatttacaacatttggaaacagtgctgaaagtgttacaacaacataagttgtatgccatattacccaaatgttcatctgggttacaaga

SEQ ID NO: 2532 - DNA, 328 bp, Glycine max
agcttgtaggattattgggtacctatcacatgtggtactaggtggcggtcgggcgatggtgcacaacaagttttccacatccacaaatcacgtataaacccatcatcccctgttgcccaccttcaactgagctcacgtactcccacgtagcccatatcctcgtttttctcaacaccgggtccccatcaatcctcccaagctttcccaacattcaggtaatttaacatccaaatcattacaaactaagaaacccagcaaaacagggcaaaggcggaaaactctacccaaaactcaaacgaatatcacagctttttcttacttaaagacc

SEQ ID NO: 2533 - DNA, 297 bp, Glycine max
agcttgaacagggctttcgtggtatcctcatactgagagggtgcaaaacgcatttggagggcttggatgaaggacgatcatgacgtgaattggccgttgctggtcatccactggaaccatgccagagcacgaccattcatgtagatagaagcgatggtcaggtgttcttgctccaaagtcgagtggtactaaaaaaattgctgaatcttgaaaatccaaccaatggggtccgcgcctacaaattgaagaacgttcagttattagctgtgtaccgcgtaatgtgactccctatgggga

SEQ ID NO: 2534 - DNA, 308 bp, Glycine max
tctcttggaccttgaacaggcaactaactcctctttcaaaaccatgctatgtgctcgcgactggtccctctcttcccttcgcagcttgagttcattgttgctaccccacagagctccgcgaaatttgttacggccatactcttccttgcgagccctcttggtctcttgttcaagggctcttgcggtagttgcattctcttcccgtaatccggcacactccttccggatgtgtgtagcagccaacttaaacttctccttggcaagtttcgcctttcctaactcgcttttgagagcttggacttcttcgt

SEQ ID NO: 2535 - DNA, 351 bp, Glycine max
agcttgcttaagattctcattgttatcaacctgaactgcagttggttgattttgaaagttggaagacaatccttgaaagatcagaaaagaattctggttccattggcagccaaggtggtgtctgtattcttccaaattcccttgaagcacgccatcttgataccaaaggaaacacatttgcttttggggtacttctgctagagataatcagcgggagacctccatactgtaaggacaaagggtacttggtggactgggtaagaaactttccaaaatttgatgtttaaaaagagtgaactctttttactaagctgtaacgtatatatatgtgctgcaggccaaggactacct

SEQ ID NO: 2536 - DNA, 324 bp, Glycine max
tgccttctattatccccatcgttttttgcttcaaatgttcagatgaaagacgtgcattaaagaaagtttagtcatgtgatgattcatatatacatacatcgcatcaagtaagaataatatttataaaaaaaaatatcgtttgttttgttatccaagaacaaagaagtttccagtcaaaaaaaaaaaaagaacaacgaaatttgtgttatttttttcattcgataattgaagattaattttctttgagatttaaaaattgctgaaataaacttcacttctcccattcataacaactcatttataaatttttattttcttttaaaa

SEQ ID NO: 2537 - DNA, 271 bp, Glycine max
acccccggatccttaagtcacctgcagcatgcagcttttaatttgatagattttacacggagcgctgggctttggaagtcaaaggaggggatctccatacggactagtggaaagacatcacccctatctatctgcgttatgttttcccggcccgatgatcaacactataactagtatattcatcaagtaccatgccttctgataacgaaactagacatttgagtgtgcactagccattgaagagtacaacgaactcacaagtcggcaatct

SEQ ID NO: 2538 - DNA, 283 bp, Glycine max
agccatgttgcgcttattggcctttttacattttctacggcatcttcctatgttttcaagtcactgctttcactatgtacaccctatagttatcgccctctgttttgagcattttgacattcattcttttacactcaccaaaagaggttttttccagtttctgataaggaaggattctctggtcgttcctcggaaactctttgctttatagggaaatcttataaaccggggaagagtattaattgttttcgtactcaaccgtctcccttctcctttctgacga

SEQ ID NO: 2539 - DNA, 329 bp, Glycine max
ctattactagaggaaaatcttttaggttgtttcataaaaacctcctcctctaaatcaccattaaaaaaggatcttttcacatccatttgttgcaactcaaggtcaaaatgaacaattaataccaagataatacgaagagaatatttcttagatacaggagaaaaattctctgtgtagtctattccttctttttgagtaaatcccttagcaacgagtcttgccttgtatctctcaatgttgcctaatgaatccctttggtcttaaagacccatttacaaccaatgacctttaccctattaagcaactctacaagggttgaaactttgtta

SEQ ID NO: 2540 - DNA, 305 bp, Glycine max
tccatcatgtggtatcaagagcatcttcatctaggtgatgttcttttgcttcctctatctttttgttcggtgaattctctttaattccttgttcttcatcttattccccatgtatatcctccattatcttgtggtttggtgctgtttaaagtagattcaaaaaaataaaccgattaaatcttagatctacacttgttcttgcatttctatggttcaaattttgtagatccactcttgaatcttgtttttgtgttgattttaagttctatcaattttcattcataatattcttgttctgaaccttt

SEQ ID NO: 2541 - DNA, 364 bp, Glycine max
agcttatgcatggaaaatgtaattatgaaattgagatgcccgaagaaacaccatttcctagttaaccatgcattaggtaccatgttcaattattttgtttttaagtgaaacgggtttatgatcccaacatggttggctcgtggtgcctaacacatggaactaagaatgtagtgtgaagtttcacgcttccccctttttgtttttgttttgtagaggaaaacgcaaggatgagcaaacatgaaaacaaatggtatgcaattttgcagatcaaaaagtttgttgaacgcatatgcatgatgatgccatgactcatgcaaaatgtgaggccggaatatgataacggacaaatgcaggatatgtccat

SEQ ID NO: 2542 - DNA, 325 bp, Glycine max
tcttcttgactcatctactccttgaagtggtgtctccaatcatctttcttctccattccgctaccatgatcttcaagaagcaaaggactccattgatgaagaagatccaaggactacaagctccacatggaagctcgacaatggacacaaaagccataacatttgactcaaatgtttgatttacgaaagctcagagaaaattcagactgtcataacttttgacttgaatgtctgattgcgtactataatatatcgagatagtcgaagttgaacacggaagctcctagcaaactcaaactaccataactttttattcaaatgtctg

SEQ ID NO: 2543 - DNA, 367 bp, Glycine max
  unsure (1)..(367): unsure at all n locations
agcttttgnaannnattnnnnnttatatttttttattaatnnttttcatatgggttcatggtacacgtatctcttatgcacaagattttttgtcttcattttgtaatttatttttttcatattttttcattaatttttttcatatttgttcatggtacacgtatctcttatgcacaagattttttgtcttcaaaatgtttattttttttaaatctttgtgcttccaagtcgtttatgcggaagattttttcacttcaaaatgtctatcattgactttatttttgttggattatttgtgtttcccaaccatttatgctgaagtattgttgatgttgtgtattgttatggttagtttagggtgttgatg

SEQ ID NO: 2544 - DNA, 318 bp, Glycine max
tgacaattattatttattacatttaactttctctcccaaaaatgctgtgtttagggaacattaccaaatggacaagaggtcgctgttaagaggctttcacaaacatctagacaaggattaaaagaatttaagaatgaggttatgttatgtgccgaactccaacatcgaaatcttgttaaagttcttggatgttgcatacaagatgatgagaaattgctcatatacgaatatatggctaacaaaagcttagacgtctttctttttggttagtgtctctaaatttaattgttaattgaatgttggatctattatttcctt

SEQ ID NO: 2545 - DNA, 365 bp, Glycine max
agcttataagaacaaaattgccttattcatttccaaatatgcatgtgaattaggacgcatcaacaagaatcaagccaaggctattgtcataccctaatttcgtccgggaacctttgctcgatgacatgcgaccattctttggtccttgtgaggtgcttggcacccatcattaggcaatttatgaaattccaggacatgccgaaaaaccaaaaaaatattgatgcacaatccgtaagtttccgtgacacaccggaaatcaaaaggaagcatcgttgcataattaagtgaggttccgtaacattccgtaagtcaaaaaggggatgattatgtaatccgcaaggttccgtaacattacggaaagaaaa

SEQ ID NO: 2546 - DNA, 320 bp, Glycine max
tcaacatcagaccacttccagggtgctggaactacttcacatggacttgatggggcctatgcaagttgaaagccttggaggaaagaggtatgcctatgttgttgtggatgatttctccagatttacctgggtcaactttatcagagagaaatcagaaacctttgaagtattcaaagagttgagtctaagacttcaaagagaaaaagactgtgtcatcaagagaatcaggagtgaccatggcagagaatttgaaaacagcaggttcactgaattctgcacatctgaaggcatcactcatgagttctctgcagccattacac

SEQ ID NO: 2547 - DNA, 362 bp, Glycine max
agcttgcttgtggagcttctattgatgctggatctttgagcttcaatggggtcctttaatggtgattttccaccatggagatgcaatggaagacaaaggagaagaggtgagaggaggcgccatacactatggaataagccatggaagaaggagcttcaccaccaagatgagccttggataagaagcttagaaggatgcttcaatggaggaaaagaaagagggagagaaagagagaggggggagcaagaaattgaaggaagaaaaatggaaagaagttgaactttgagttgtgtctcacaagactctcattcatcaaagttacaacaagtgttgcacatgtttctatttatagactaggcagc

SEQ ID NO: 2548 - DNA, 319 bp, Glycine max
tgaaccttgaatcttgattcttgattcttgatgtcaaatttcttcttgaaccttgaagtgttcttgattcaatcttgattatcttgtacatcttgatcatcttaaacatcttgaactaattctttgattatcatgaagtgacctttgagctttttgtcatcacctttgttatcatcaaaacatctttgaatcaatcttgattcatcatgaagctttgcttctacaaaaagataaaaaaatacaaaaaaaacataaaaagcataaaaacacaaaaagacataaaaaagggaaaataaaacattttgaagtcatatttgca

SEQ ID NO: 2549 - DNA, 369 bp, Glycine max
agcttgtcaaatacaacctgaattttagcagaaagaagagctccaccaactaatgtttctgccatgctaagaaaaggagtggaatggatgaatggaaatgactaataatttcaagtgcagcagcttatgccattcactccttcctgataaatcaacttttatatatttttttaatattttgtttttatttattattagacctttgaaaaagattcctaaatgaaacaaatttatgaagaaacaaatataaaattcataaatttatcgatggctaaaaaaataatcaaagacaaaaaataaaattattattgtattagaaactaaatgtaaataatttttttatggaaaaacaaacccaaaatttgagta

SEQ ID NO: 2550 - DNA, 328 bp, Glycine max
ttaatatcaaatgtaccatctatccttgagtcattgtatacaagttgggcaagtgtggtcttacccaacccgcccatgctcactatagaaagtattgatagcttcttatcagtgtcagaagtgagccattcaaaaatcctttctttgtcatcatctctgtcacaaatatcactttcaaccaccgaagatgttgattgtggcactttactacccgatcctgatccaactccatcatcactagcctttttcaaaggtagactattcatcttgttttctgtctttattttattattttaagagacttggtaccattttctgcacgtttcca

SEQ ID NO: 2551 - DNA, 378 bp, Glycine max
atccctaagcgaccgcagctgcagcttgcataccctttgatcttttatgaaattacttgtgaaagatagccatgagggtgggctcatgggccactttgggatagacaaaacccttgtcttactcaaagaaaagttttattggccccatatgaagaaagatgtccataagcattgcactaggtgtgtggcttgtttacaagccaagtctagggtgatgcctcatgggctatacacacccttacccatcccatctgcaccttgggtagacattagtatggactttgtccttgggcttcctagaacccaaagaggtgtagactctatctttgtggtggtggataggtttagcaagatggcacactttataccattccacaa

SEQ ID NO: 2552 - DNA, 317 bp, Glycine max
ttatcctcagatccctcttgttggactagacttagaccaaacaacattattgtaacaacatatttcaaaccaaaacttaatccgcagatcccttatttaagactaagttgcaattctgcttcattcaagtgctggggcaacagtacatttcccaatgctaaagtcacctaactaggcacacaaatggttgatcataccgggagcatacaaaatttaagaactgaattaagcattgaacacaagaaacacaatcaattagatattaaagtaattacattagattttctttagaaatccccaacaagggtgtttagcca

SEQ ID NO: 2553 - DNA, 356 bp, Glycine max
agcttgaaattgaacttcggatgttcttcagattctcaaaaggacatagctgatcacacggaggtccaattgaggcgcataatatatcgagacgctcgaaattaaacaacgaatactctcgagaaattcaaatggtcgtaacttatcacacggaagtccgattcaggtgcataatacatggagacgctcaaaattgaaccacgaatgctctcgagaaattccaatggtcataacttttcaaacggaagtccgatttaggcgcataatacatcgagaatcttgaaattgaacaacggaagctatccagaaattcaaatgggcgttacttgtcacacggaagtccgattcaagcgcat

SEQ ID NO: 2554 - DNA, 313 bp, Glycine max
ttgatgcaacatttggagaggttaatgaaactacgagatgatgcactccatgagaggttggatcaaatggagaatagagatcataatgaagaagaaaggaggagaagagggaatgatggtgttcctagacaaaaccgaattgatggtattaaactcaacattcctccatttaaaggaaagaatgatccggaggcctacttggagtgggagacgaaaatagagcatgttttctcatgcaacaactatgaggaggaccagaaggtgaagcttgccgccacggagttttccgactatgctcttgtgtggtggaaca

SEQ ID NO: 2555 - DNA, 354 bp, Glycine max
agcttcgaaatccatctgcggcttgtggcctccggcggacgcgcgtaagggctatgaagcggctttctcggcggcagattgcggagtttgcctccggcgcctctctccgggggcgccaacgcggtgatttgatcggtggccatgagagtggccgagtgggcaacggctgaaaagttaaaaataaaaaccaaaaaacgaggtaaaggcaaaaatactgtaagacgtaagtccaaacattgcgctctctcactcaggtacagtacgagtagccgcggatgtacatatactgtagttttgaagactagtcaacgtgtgtcttttgtggtccacctctcattctctcagaacgtcaat

SEQ ID NO: 2556 - DNA, 313 bp, Glycine max
tggttcgaggtacttacccgttgaagatcgaagaacgatgaagaacgaatgaagaacgtcgaagaacggttgaaacctttgcgaaattcctcacggaaaacgttacggaaacgtttcggaagcgcctcggcttagattttcttcacggaaatgatttttccaagcaaattcgaaagagagagaagtgcctaaggggctggaccccttccttcttcatttcctcccctatttatagcaaaataggggaggtggttgccgcccagctcgcccaggcgagctcagctcgcccaggcgagcagggttgcttcctcca

SEQ ID NO: 2557 - DNA, 351 bp, Glycine max
agcttgcctcaaagatgtccaggattgacaaggcttccgaaggaactagttccgctccggagtatgatagtcaccgctttaggagtgctgtacaccaacagcgcttcgaggccatcaagggatggtcgtttctccgggagcgacgcgtccagctcagggacgacgagtatactgatttccaggaggaaatatggcgccggcggtgggcatcactggttactcccatggccaagtttgatccagaaatagtccttgagttttatgccaatgcttggccaacagaggagggcgtgcgtgacatgagatcctaggtaaggggtcagtggatcccgtttgatgccgacgctatcg

SEQ ID NO: 2558 - DNA, 307 bp, Glycine max
tctacttatgcggcagggcgggctttcttcaccttattgtatccaacgcgaactttgaccatagttcttccttcccacgatgctccttttcatgtttgcctgagcgggcttataacctaaaccatacttgccacgactaccttgggtattcatcagcctacgtatgccactgtcgatttttcctaaacccaatccgggctcataaccgttccccaacataactcgggccattattaccgctgcaacagacagactaggctgcccaaagagggagtccactgaggaaatgctgaccacctcataagac

SEQ ID NO: 2559 - DNA, 360 bp, Glycine max
agctttccaaagttttttggttttctaaaccttgaaaacttgtgctattcattcttttcatctcttctccctttgccaaaaagaattcgccaaggactaaccgcctgaattctttttgtgcctctcttctcccttttccaaaagaacaaaagactaaccgcctgaattcttttttctctcccttctctcttgtcaaagaattcaaaacgacacagtctaagaattcttttgattcttccctttcccatatacaaaagatttcaaaggactaaccacctgagaattctttggtatacccattcacaaagtttcaaaggtttaactgcctgagaactttgtcttaacacattggagggtaca

SEQ ID NO: 2560 - DNA, 319 bp, Glycine max
ttatgatgagatatatcttaaattaataaaaataatttattaaaagttatctttgaaaattttttagatacaaaactacaggttatattattataatcaatttcatttttacatttattcttcaatcctaaaccaaaaggtccaaactctttatatgtcgtttatctttttatgtttcaataaaatattctatttttttagtaatattttttgtagagatgattgcgtgcttttataaaatatttgagtattatttatttcttatttcaaatagacttccttttataatatattattattattattttaaaagttaaaa

SEQ ID NO: 2561 - DNA, 341 bp, Glycine max
agcttaccattaattgtacatcttttgtggagaatattttccctttgggtgtcattcagtggctgcatttgactttccaagagccttctcaccattagtatatcaccctgcatagcttcctcttcaagctcatcctttgcttcttcttcttcactaatttcagattcactagtgatttctccatctgccttcatgatcatggttttcttggttggacagtcagaagcaatatgtcctctgcctaagcatttgaagcattttatgtttctggtactggtgttggatgatgaagcaaaattatgcttggttttagcactgaaaactgttgactttccatgggg

SEQ ID NO: 2562 - DNA, 309 bp, Glycine max
tgaaggcaaactggatgcgttggtcaacttggtaacccagttggccttgaatcagaaatttttacctgtcgcaagggtttgtggtttgtgctcctctgctgaccaccatacagacctttgcccttccatgcagcaacctggagcaattgagcagcctgaagcttatgctgcaaatatttacaatagacctcctcaacctcagcagcaaaatcaaccacaaaagagcaattatgacctttccagcaacagatacaaccctggatggaggaatcaccctaacctcagatggtccagccctcagcaacaaca

SEQ ID NO: 2563 - DNA, 344 bp, Glycine max
agcttgccacccatctcgcccattcgagctaggttgcttcctctaaaaggcaccgccttctggaggaatttcctggaaggcccaagtgagcctggttgctatttgcaccctcccccccttgtttactaaatacaccccctgcctttttttgctgattctttttccgtaacattacggaactttatgaattttgcaacgatactcgttttctttccgtaatgttacggaaccttatggattacgtaatcatccatttttttggcttccggaatgttacgaaatttcacgaattgtgcattaacacttccttttgactttcggcatgtcacagaacttcacggatt

SEQ ID NO: 2564 - DNA, 307 bp, Glycine max
ttaaagacattaattcaaacttacgtgctcttttttaaattctttttgtaaaagctttatgtatacttctgtatagttctaagaagctctcaaaacaccttgaacaccttgagagaaaatattaaagtgctgagattgtatatttgtctgtaagatgattacgagttagtcattatgcaaactatcaacaaatttgtttgatttgtataaagccaacaatggcttggtaagacaaagaatactgggttgtaacaagcttggtgtagagcttgtgttgcagagccagaaatggtcgtgactaatactt

SEQ ID NO: 2565 - DNA, 366 bp, Glycine max
agcttcttttggaccttgaacattcaattaactcctctttcataaccatgctatgtgctcgcgactggtctctttcttcccttcgcaacttgagttcactattgctaccccatagagctccgcgaaatttgttccggccatactcttccttgcgagccctcttggtctcctgttcaagggctcttgcagtaattgcattctcttcccgtaacccggcacactccttccaaacgtgtgtagcggccaacttgaacttctccttggcaagttttgcctttcctaactcgcttttgagagtttggacttcttcgtcctcttccggtgcttcaaaactctcttcgctgacgacttttaacttggcgagcc

SEQ ID NO: 2566 - DNA, 324 bp, Glycine max
ttgcttgaagcttcaatggagaatgaagaagatgaaagcttcgtgagagagggagagaaaaggcttctgaatttctgctttggctgagtgaggagagagaaaagctttttggttttaaataaaaagggttttccctttttccattattttattcaagctctgccacatgtccctatttgattggagcaaaaagggcccactttctctttttgactgtgacccatactcagtcacaaaagtgagaaaaatctgacctttgaaacgctacaatcctgcctcggtttgcgtgccgtttctctgattccagtttctcgcgtttctctg

SEQ ID NO: 2567 - DNA, 371 bp, Glycine max
  unsure (1)..(371): unsure at all n locations
agcttttcgtcttacaagacagctatttataattgttttatacggataaccacggcgggtttggtncgcttcatcagcgtgacctcaaaatgtgaagtatgaacagatcttggtgagcgccgggaagatgaccgtanaatctctcgcgttgtcaaccgggctttgtcgggccggcgactggacgaaagggcgcaaaaagacgacgtttagtcttctgcgtgctatcagggcttttcgtcttacagacagcaaaaaagaatgtttatacggataaccactcgcgtatttccgcccgtcagcgtgactcaaatgttagtatgacagatcttgtgggcgcggaagatgacgtaaatctccgcgagtcaacgggc

SEQ ID NO: 2568 - DNA, 312 bp, Glycine max
ttcagtttggagttcaaaaaaaagttatcactcagtaacattacactaacttgcatttcttagttttgttcatcatgtgcaaccttattaacgatcatctcgtttggaggaccacttactcactgtctagggaggtggcaaggctgcaatgaggaaatgttgagggctcttcaaccctaagtaaagccttctctacccctctcttttactttttttgttaattttgctttattagtttagttatttagtatatgtgtggtagtttaggaatatgtttactattaggaagataagaaaacacaggtgattaag

SEQ ID NO: 2569 - DNA, 365 bp, Glycine max
agcttgcctcaaagagatccaagattgataaagcagctgaaggaaccagttccgctcctgaatatgacagccatcgttttaggagtgctgagcaccagcagcgcttcgaggccattaagggatggtcatttctccgggagcgacgcgtccagatcagggacgacgagtataccgacttccaggaggagatagttcgccggcggtgggcatcgctggttacccccatggccaagttcgacccagacatagtccttgagttttatgccaatgcttggcctacagtggagggtgtatgagatatgcgatcctgggtgagggggttagtggatcccattcgatgcggatgctctcagccagttcttggg

SEQ ID NO: 2570 - DNA, 322 bp, Glycine max
tccaaattagtgtaccacactactgcagctcttgccaagctatcctgaaagaagtgtatcaacagcttttcatctttagagtgggcgcccatcttacggcagtacattttgagatggtttttgggacaagtcgtccctttatacttgtcgaagtccggcactttgaacttcgagggaataacaacatcgggtactaagcaaagatccgtcatgtctgcgaacggatagtccccaaatccttctacggccctcaatctttcctcaaggagatcgagcttcctcctttcttcagttgctgggggcggcccttccgtggacagaa

SEQ ID NO: 2571 - DNA, 356 bp, Glycine max
  unsure (1)..(356): unsure at all n locations
agcttaaaaaaacaagaaaagaattgaaagtttctgattcgaaaacttacccgttgagagaatgaagaacggatgaagaacgatgaagaacggacgaaaaccttcacggatttgcttacggaaacatctcggaagcgttacggaagcacctcggcttggattttcttcacggaaacaatttttttcacccaaaacagctgaaatacatagccagggggctgagggatccttagaacagtccccttcagcctttttataggaaaaangaggaggagggtgccgcccanctcgcccanccgacnnnagctcgcccaagcgagctgggcggaggcatnnctattgggggaaaaaaaact

SEQ ID NO: 2572 - DNA, 321 bp, Glycine max
ttgttagtttccaccaaagaactaagctagcctagtttagtgtagtctctcttttcaatcatgttcttgtatatgcaaaactcgaatctgagatgctggttaatggatctaaactccgtttcacttgaaccaacataatgttggttgagattcattgtttgaatttatttctagaatgaaaaatttaaaaagaattatagatataaaattaaaacatctattaattaagatattaaattttattgaaaaaattaaacaagtttaggtatacatgaataatatatagaatattaataattgtttctattaatgtacctttat

SEQ ID NO: 2573 - DNA, 361 bp, Glycine max
agcttctgttagtagggtattcttttgggtatggtgttgtatctcctgacttttcaggacccctttttgtactaagtagtacctctggtacttgttattctataatataaattatctttgccttccaaaaaaaaaaattattattaaatattaatgccctttgcttgatatgctgttctcctaaaccaaagcatctcttagagaatttttctaactaaaaattggtttcagttgcagatattgaattgtcaatatcgatttttaggcttaacattatcctgatatttgactgttgccatgtgccatttctcttgcccagaatgtgcaccctgccattctccttaggttcctgcgggagcat

SEQ ID NO: 2574 - DNA, 326 bp, Glycine max
tgggaaacaaggctcaataattgattatacgttctctatacagaatcctctaaattataatttgcaagaataccatatatcaccaagtgtaaaagatcaaagaacttgtatatcactcaagccacaccctttggatattttttttatcatattaggttaaattattcatttattctttattctttatgattgtccctaagttttaggttctacatgaaaaaaaatataattctcatgcggtttttatttattctttatttttttataacagtttattactgcaaaaatgtttttatagcagtcgttcttgataaattatgctgtga

SEQ ID NO: 2575 - DNA, 357 bp, Glycine max
  unsure (1)..(357): unsure at all n locations
agcttatggagactttctcntntttacaacaaggcctgcttgaccttctgactgctgagagctagagacttttctttcttaggtgcttcgtcttgttaaagttcatgttcatgaacttaagagtaccaattaattctttaaaggaaattgagtcaagattctttaaaacccttagtgttgttacttgttaatgtggctccttgtagagcttgtaggccttggatcttcttcatcaatgaagtccttcgcttcttgaagatcaatggcagcggaatggagaaaaaggaaaggttattggagatgccactttaaggagaagatgagtcaagaacaagctcaccaccataggaagccatg

SEQ ID NO: 2576 - DNA, 311 bp, Glycine max
tctcccttattttgctataaatatggggaggtattgaataacgaaggggttcagccttcttggcacttcgtattgtctgaaaattgctgaggaaaattattttcgcgaagaaaatccaagccgaggcgcttccgtaacgtttccgaaacgtttccgtgggtaattacgcgaagattgtagaccgttcttcgacattcatcgatcgttcttcgttttcttcggtcttcaaccggtaagtaccccaaaccgagcttttcaattcattctatgtacctgtggtggtccccatttgtttcatgcacttttattct

SEQ ID NO: 2577 - DNA, 354 bp, Glycine max
  unsure (1)..(354): unsure at all n locations
agcttgcccaaggtcttctaacttttcatcaatggtaggcatgggaaatgtgtccttcatcgtgatggagttcaaagccctataatccatgcaacaacgccatgaaccatttttttttcttaacgaggaggatgggtgaagaaaatgggctatggctgggttggatcaggccggccgcaagcatggaggagatttgggattcaatctcggctttttggaagtggggataatggtagggtcggacattcacaggantgaaattgggaaaaaggggaatatggggctgaatattgcggggcggaggtagggtggttgggtcaaggaagatggcggagtaacggtcaaggagggtgg

SEQ ID NO: 2578 - DNA, 313 bp, Glycine max
ttatgtccaaggcatagaatgattgcacttcttgctctatcaatcatctctgatttctcctttgagcttagagattaggacatcctttcttctcctttaagagcttctgcacaaccatgttgaatcaagattgcttccatcttgattctccataacctgaagtcattttcccctgaaaacttctcaatatcgtactttgttgttcccatctttcttgatcttgattcttgttcccacagacggcgccacttgttggttctttgtatgagttctgcaactcttaaacctgcataagatcaaaaaagaaaacaga

SEQ ID NO: 2579 - DNA, 353 bp, Glycine max
agctattaagatttctccaactttatacatattttgatgcagcttcaagaaattccttttaagtgtaatgttcagtagctgtttacaggggaatgctgttttttactgctatgctggtaattacaatacacgatcattgatgttactggttgcaaatgttgaataggaatatagaaacatattgctacagtttgtctatgacgattagatgaatggaaattctaggaccttgaatttgagagttaatagctaatcttagtctgtagttgtctatacaagaagttgcacggcaaaggctggttatgaatgcaagttagaaatgatatgctattgtgggaaaaaaaaacttcggc

SEQ ID NO: 2580 - DNA, 316 bp, Glycine max
ttgcaaagaaaaatgcagaaaccaaaaaatacccctggttttcatacagccgttgtccatcgaggtactgaacaaaaccatcaatgagatatggaccaacataagaagccaaagtgtttaacaatacaagaaaagctgtgataagaatctccttccatgctgaaattattaacgacttcaccaacttcagtgtggtgacactattaattccaccacaatcagcctcaactttctctctgaaagttggaaaagtaccaattacactatctctgctgtctagttgaggaacatcctcaaggtccagggtcttctgatt

SEQ ID NO: 2581 - DNA, 363 bp, Glycine max
agcttttttggtattttaaattacacaaatactttgatccaaaatttcaaagatcacccttgactctagctgacccaaaagtccatgacctaaatgtggataccatcccacatattttcttacattgcaaaagaagtgaccacacttttataaatgaagtgtgccgtgagttggactattctcacttcttttccatatataggcataaacttcaacattctttctctttcatatttgtttactttctttgtctccaaatatctccttccaaccccataagcatgaactcaagtagcataaaaaaaatcaaacaattatttcttctttttggcttaatttccaccttttccattagattttggg

SEQ ID NO: 2582 - DNA, 319 bp, Glycine max
tatggtaaaatctgggacttagccatggtagaagtctccacagaggccattgcctcccttgcccagtattatgatcaaccgttgaggtgcttcacctttggggacttctagctatcaccaatggtagaagaatatgaagagatcctaggatgccctctagggggaaggaaaccatacctcctctcagggttctatccctcattagctagaatttccaagatagtccaaatctcggcgcaggaattagaccacagaaagcaagtcgacaatggggtggttggaataccgagaaaatatttggaggcaaaagcaagaatct

SEQ ID NO: 2583 - DNA, 347 bp, Glycine max
agcttatcaacatcaaacttggttaaagagggcttggggtcaagacatgagaagcaatcaagtataatgttacttccttcactaaagcggtgatctatctccacacatattttatcaatagcaacataaaaaatctttgcacggtaatgatgaagattagtgatagtcatcccttctgctcttgaacgaccccgaaccggtatttcgtcatccatatttggtaccggaatacttttagctacacaaaatccttggacatcggcaaaaaaattattccagccactctctctcattgtgcccaaccgagctttgacaacatcaactaattccatggcaatcacaatatt

SEQ ID NO: 2584 - DNA, 310 bp, Glycine max
taatgagataagattatatgcgtgatcacatcgtgcgcatgagggatatagtatctcagctaaaagccttgaaagttaccatgtcagattctttcctagtatagtacattttatgtactctacctgtgcaatatgcccctttaaaaatctcttataacacacataaggataagtggtcaattaataagctattgattatgtgtgttcaagaagagaaaaggttaataatggaacaggatgaaaaggtgtatttaactgctcaaggaaaaaagaaaggggatcaagccaagaataagggcaagattcctac

SEQ ID NO: 2585 - DNA, 366 bp, Glycine max
agcttgaggcacaaccctgcaatttacctatattatacactaaactaaagccctaacgacatactaactaaaaaagtaaacacgaagcaacaataaatcaaacccacagagaaattaaaatgtcttctaccctagggttaaaaaaaaatcaaaatgacaaaagattaaaaaacttacttggattgtagagaagttgaagtgaatgaaggcaagaagtagaaaagcaaatggaagcacagagcgaagatgcgaatgattgccaatgaagtgtgtggggagttatagttttgtgcaaaaggtaattgcctaaagcagttatgttttatttttggcagtttcgatctacttgctaagcgcgagtgactc

SEQ ID NO: 2586 - DNA, 321 bp, Glycine max
ttggagtttccaagtgccaattcgtcttctttttttgtccagtcttcttctggcttcaattcatcagtgggctttccttctgtgtcccgcatcttgggatgttcccagcctttgatgacagctttccaggttctgctatccagcgatttgaggaaggccaccatccttgctttccagtattcatagttggttccatccagaattggtggtctgttcactggtcctccttctttctccatgttcatcagaatttatctccctagatctcactcagtgatttcgagtgcctgctctgataccaattgaaattctgatatcaat

SEQ ID NO: 2587 - DNA, 360 bp, Glycine max
  unsure (1)..(360): unsure at all n locations
agcttggagaggatgcttcatgttgaaattatagagggagagaaagaggaagggggggagcacgaaattgaaggaagaaaaagggagagaagttgaactttgagttgtgtctcacaagactctcattcatcaaagttacaacaagtgttacacatgcttctatntatagactaggtagcttccttgagaagctttcttgagaaaacttccttgagaagcttctttgagaaaacttccttgagaagctagagcttagctacacacacccctctcataactaagctcacctccttgagaagcttccttaagaagattccttaagaagctagagcttagctacacatacctctataatagcta

SEQ ID NO: 2588 - DNA, 328 bp, Glycine max
cgacgctatatgttaccacctcgttacgagcacaccgattttttgtaatgaccttaaaaagaacgagagagcgagagagagagagagagagagagattgatgtgtcgactcacatctcattaccattttttcgaaaactatttttcaatcatggcaaaaattatgacgcacatttctcaataaaaactgaaatgtttttgtctttctgaacacgtccctccttctgtctatacactccaacaaacattagtcccaactgattaatgaaaataaagtaagatgatgctatcgtctaaaaagaaatctctttaatccgataaactagtca

SEQ ID NO: 2589 - DNA, 367 bp, Glycine max
agctttaggcataaaaagctgtttttagaaatataactacgcaaaagcagggatgtgcctatttataccagatttgctataaattgaagtgcatgaaatagctcaagtgctgaacaccaggcaagctacaaaatcctaatttataattcattaagctgtcaaaatgcaggacaatccaaatgtttaacattagtgtacctgtttaactccttagtcatcctgtcaaaggcaagctaagaggttttggtagacttcttttaacccatacctttagttgacaagattactttattctctcaatataacactctagtaaattccttgtttcttttcttatacttttttttttctatttgtgctttcctct

SEQ ID NO: 2590 - DNA, 324 bp, Glycine max
tgatgtgttacttaagtcatgaggcttttccttcctaatgaattagtcttttgggttgggctctcctcttgtgcttaagtcgtcataacagtaaattttggatgtataatgtggtagggaccatttacccatccaagagtcaacaaacatgcaaaatcattctgtaaaaaactcacacaaaagttctgcttatctaacattttcaaagtgtgctcgactcggttaaggttatagttctacatgcaaccaacaattccaataagcagtccaaactccaaagcatacaaaacaaatcagaagatcagctgacatacaagcaacgag

SEQ ID NO: 2591 - DNA, 355 bp, Glycine max
  unsure (1)..(355): unsure at all n locations
agcttcttttttagacctcgattattcatgttttctggccgatgtcgagtgtcatttttttcgatcagtattggtgaataatattttttttgccgagatgggctaatgttttcctggccgaataaatgggaacatgccagttttggcccaaacaaaaggtcggtcgagctcgcaaaaaaaaaaacctagccgacctacattgtaaattttttatgcaacaccaaaacaagaaaacttcctctgccgtaaaaaaaacattatcggccancnagcgnnnntaaaaaaaaaaagnncaaaggccgcngaaaaatatcanncngggctacttcacaaccgatgtcggctattgagtttt

SEQ ID NO: 2592 - DNA, 316 bp, Glycine max
tcaccggatgacgccgatcgaacatttcctattcgacgtcatgcaaatttcgttcagggattgaattgagaactcgttaggcgacatctgtcgtgaagtagcgaccgatatttttcagccgacatcgcacaattctttttagaaaagctcgctggtcgataatggtctttttacggcagagtaagttttcttgttttggtgttgcataaaaaagttacaatgtacttcggctaggtttttcgtgcgagttcaaccgacattttgtttcggccaggaaaacattatcccacctctgcaaaaaaaatatttgctaacc

SEQ ID NO: 2593 - DNA, 371 bp, Glycine max
  unsure (1)..(371): unsure at all n locations
agcttcctcggagccattcctgctaaggcaatcatttggaaagttagttgttaccaagaaatgctacccttaaaacaaaaatggcatacaaccccctccaataaatacaaacatcaatgtaaatttatagcaagcttatgcgcatacttcttcacgaacgttcacttgcacaagacattcttataactaagaaaaatgcacccatatacaatcaaggcaccttcgttacctagattatttacatgtacttccaaggggnannngnnaccnacannacacacannncctttgctaaattcacatacatgcatactctaagcactttgtctatcaaaaattgcatacgtgcacatcttggtatttctaatacc

SEQ ID NO: 2594 - DNA, 328 bp, Glycine max
tgtaatactgaatttgtaagggaaggggtgtgttatgctatgtttgattgtgcattcttgtatatagtaacttttcaccacaatttacaagtttccattcaactgtaccccattccaccatattcttgtggctatgattgtggattagatgatagtattctgagaaattaccgtacttttgaaataatacaccttaacaaaacaagaaaatgaaagaataaagcattttgtgccaaaagaaaatacagattttgcatgggccacacaatttatttacgtgattttttacaagaatgacatatggagctgctgtttcagcatatggcct

SEQ ID NO: 2595 - DNA, 357 bp, Glycine max
ctgcaagctttccccaattttatttataggggaagaagtgagggggaaaagggttgagccccttatgcacttctctctctttcgaatttgcttaggaaaattgtttccgtgaagaaaatccaagccgaggcgcttcagtaacgtttccgtgaatgatttcgcgaaggtttttgaccgttcttcgacgttcttcagtcttcaacgggtaagtacctcaaaccaagcttttcaattcattctatgtacccgtggtggtccacatttggtttcatgtatttttattctcgtttcatttactttttatacccccttttgacatgcttaagcccatttatttaaagtcatttctcgcttaac

SEQ ID NO: 2596 - DNA, 313 bp, Glycine max
tgctgctggagctgacccatcatttgccctagctcttttaaactggtgattcctaggctcttgaccttgacttgatacaacctctttttaagcgaaggcgtttgactcgatcccatgttttactaaagtgaacaaaaatcggtgcgaatcaaaactccgacatctatcatgggtggaatcgatgaatgcatgaagaaatgcatatgacacagatgcaatttatgaatacgggagctcgagaaatcgtctccttcttagatacaacatcttggggtagcaaagtgcccgacgtatgtatttaagaaggtgacac

SEQ ID NO: 2597 - DNA, 358 bp, Glycine max
agcttgagatgaggatttgtagtttggtgaaacttcctgcttttattcgttgaccacaaagtggtacctggagatatgtcgcggggggttaggagaccttggggacgtcaggtggggtgctattgcccaaaaccaagcttgaccaatcccgacccaaccccggcatagtcagtcagtgagaacctgtgatgtacctaaacaggcaagctcctggcagtcaacagataaaaggaacaaagaccacaaagcaaggaggcttgtgtggtggctggccagctgtgaatctgtgtgatatatgggatatgggctctggtaatcgattaccaagggtgggtaatcgattacaaggcttaaaaat

SEQ ID NO: 2598 - DNA, 315 bp, Glycine max
tatgatttgatgaatgcatacctaactatagtagtgataaattttgataaataccaagtaagggtaaatgtaagacattggatgatccatcattggatgacccatacatctcttacggtttggattaaaacaaagatataaatttatgttaaccattttgttacatgtaagtcaacaggtttaatgactggaaacaacactagaagaaacctatccattactagataactcgtttactagaagcatgaagcacttgtccaatgcatccaaacaacaagtggaataagcatttatttgaattatctatttactccc

SEQ ID NO: 2599 - DNA, 354 bp, Glycine max
  unsure (1)..(354): unsure at all n locations
agcttgaaatatgtttctggttattttggttaaatntgaagacatatatgtataaccattttgttgaagttttcattgaatcagaagtatgcacagttttacaatccaaaacaaccatgtctttattccttaaggtgggattttggtgtttcgagatccaactattcattttggaggcttgatgctctaggtctttccttttgttaagaagtttcttgtcacaggctctagcctttagtgactatttttcaactctggtaaanngntgatggttggttttccagtttggcctgtggtgaattttgagacttcttaaaagtttgtggagaagggtaatgaagatgaacattaccc

SEQ ID NO: 2600 - DNA, 308 bp, Glycine max
tcttcttcttgtgcagttttagtttgcccaactggaatattggacataacaatgatagttgacttagttacttgttagcataatttagaggcaagttaagcaacacgttgaattaaaaaaatgtatttttttattaaagtgagaattttttatttttttaaaagataaaaatgcttaaatataaatgtatttcactttagatttaattttataaaatcagagtgttgaaaattatatttataaaactcatcctattaaccatacactactaatattgggagaggatgtgagattaacttagatgtaaa

SEQ ID NO: 2601 - DNA, 354 bp, Glycine max
agcttcaatcggacattcgtgtgtttaagttatgaccatttgaatttctgaagagcttccgttgttcaattttgagcctctcgacatattatgcgcccgaatcggacatccgtgtgaaaagttatgaccatttgaatttctcaagagttttcgatgtttaatttcgagcgtatcgatatattataagcccggatcggaactcagtgtgaaaagttatgaccatttgaatttcacgagagcttccgttgtgcatttacgagcgtctctatatgtgatacgcctgaatcggacatccgagtgaaaagttatgaccatttgaatgtctcgagagctttcgttgtcaattttgagcgt

SEQ ID NO: 2602 - DNA, 311 bp, Glycine max
tataatatatcgatacgctcgaaattaaacatcgggaactctcgagaaattcaatttgtcatcatttttcacacggatgtccgattcgggcgcataatatgtcgagaggctcgaaattgaacaacggaagctcttgagaaattcaactggtataacttttcacacggatgttcgatttaggcaaatcacatatcgagacgctcaaaattgaacaacggaagctcctaagaaattcaaatggtcataacttttcactcgaatgtccaatacaggcgtatcacctatagtgacactcgaaattgaacaacgga

SEQ ID NO: 2603 - DNA, 364 bp, Glycine max
  unsure (1)..(364): unsure at all n locations
agcttatctctcagatttatcttcttctctttctcttctctttagcttaggaccgtatcagttggcgtgctggggttgttgaagtaaagggacgaatgagacaagtgggaaactttcaggatgctaaaagttcaaagagtgtgatataggtgatgatatgtgtacatttcaaaatggggccaattgcggtggaaatgagaaaaaatataagaaaaataataatgaatgttataggtgatgtaataaaaaaaatatanacaaaaaaaaaaagggaaccaaaatgggatggaagacaaagatgatagatgaatatacttttgttccatcacaacaaggtcatgacaattaattggcaactgactta

SEQ ID NO: 2604 - DNA, 322 bp, Glycine max
tgctagcaacttaactaatataaagtagtttgcactatcatgaataaccaaatataaatcaagctcaattaacaacttaatattgatccatatgtctacaaaacatgattcaagtatgatcatatttgcacaccaaaagaggagtaagaattttccacatttctcatagcataatcatcaaattacaaaacaaattcaaggaacattataaattcaagttcattcagttgtgatggtctttgtgagcttcctagatgatagctgagcagatgcgatttcttgtgacatgaattcatcaagttgtaattcattagacaatctc

SEQ ID NO: 2605 - DNA, 344 bp, Glycine max
agctttgcggattggtcttccttgtgaaaggatcgatgtgggtccgagaaagaggcaaatttagtcatcctgcttggacgaatgagaaaacttgggcaaatgaagagggtgaggatgaagtagaagcccatgctgtgactgccattcctatatggccaagtttcccaccaacccaacaatgtcattactcagccaataaaaaaccttctccttacccaccgcccagttatccacataggcaatccctaaatcaaccacaaagtctttctaccgcacttccaatgatgaacaccacctttagcacaaaccaaaaacaccaaccaagaattgaattttgcagcgag

SEQ ID NO: 2606 - DNA, 309 bp, Glycine max
ttgcggatttggtcttcgccggctaaatgatctaagtgggtctaaaaagaggcaaatctgatcatcttgtgtttgataaatgcaaaaaaaaaaaaaaactggggcatgtgaagaggatgagaaggagggagaaacctatgttgtgactgtcattcttatactaccaagtttcccaccaacccaacaatgtcattactcagccaataacaaccctttttattaccccccacccaatcatccaaaaaggcccttcctaaaatcaaccacaaagcctacctaccgcacttcccatgacaaaccaccaccttt

SEQ ID NO: 2607 - DNA, 414 bp, Glycine max
  unsure (1)..(414): unsure at all n locations
gatccaatttgaacgttatgccttcgtaaccatcganacncccatgancnaaagccgcgcgcggcatgcaactttttgttttttcactctttttatgggacaatggcttcatggggtggttaactcggtatggacttgctagcgacatccttatcctgactgggtctgatagggatggcatcaaccacatgattacactttacaacgacaatgcttggaatgaatattgcatcctccgtatttattaacatataggtatttgttattcaaagataatcggattcgacttttttttttttccaattcaataaaatcgattcatggtgcttcaaaacagtgatgaccatagtggttttatgtgttaaaaataaaccctccgtccatgtacctcaaccgctatggatgttgatatcc

SEQ ID NO: 2608 - DNA, 281 bp, Glycine max
tggcttagaactttctgcttttattaggaggtttttttgcatttgtattttggggtaatgcagacatggagtaacttctaaaatggctgccaaaggaaaataattgagagccaagtgatgctgaataattggacctctgagaagtgttaccgatacctgaattcaaagaaaattgaggaggagataaccggcgggttacatgggggagagcgttatctaatggaagtatccatttaataatgctccacatggatcctgatttgtgtgaaactgaatgttct

SEQ ID NO: 2609 - DNA, 363 bp, Glycine max
agcttctaaactttgtacaagaattaagctctgataccacttgttagacaagtggcctcagatatcttaagaaggggggggttgaattaagatattcgaaactttttcccctaattaaaaatctatcttactttttacttaagttatgaattcccttaatgacaatcttcttaaatattaattcaaatgaagcaacttgaatataaatataaagcaataataaataaaggagattaagggaagagaaaatgcaaactcagttttatactggttcggccacatccttgtgcctacgtccagtccccaagcaacccgcttgagagttccactaacttgtaaattccttttacaagttctaaacac

SEQ ID NO: 2610 - DNA, 313 bp, Glycine max
ttacagatttggtcttcgccagtgaaaggatttatgtgggttctaaaagaggcaaatttgatcatcctactaggacgactgagaaaactggggcaaataaagagggtgaggatgagggagaaacccatgctgtgactgccattcctgtacgggcaaatttcccaccaacccaacaatgtcattactcagccaataacaaacctcctccttacccaccacccagttatccacaaaggccatccctaaatctaccacaaagtctgtctaccgcactttcaatgacgaacaccaccttttagcccaaccaaaaaca

SEQ ID NO: 2611 - DNA, 361 bp, Glycine max
agcttgccacccagctcgcccatgtgggcctggttgctatttgcacccgcatttttactaaatacatcccccctgcctttttttggtgattcttttttcgtaaagttacggaaacttacgaatttcgtaacgatacttgttttctttccgtaatgttacggaaccttgcggattacataatcatcccctttttgacttacggaatgttacggaacctcactatttgtgcaacgatgcttccttttgatttccggtgtgtcacggaatttttacggattgtgcatcaatattttcttttgatttctggcacgtcacgaaactccacaaattgcctaatgatgggtgccaagcaccccaaaat

SEQ ID NO: 2612 - DNA, 320 bp, Glycine max
ttccgcaagatttacggaaagatcttagagttgaccatagcagagatatccatagaagccattgcatcactcacccaatactacgaccagcctttgagatgcttcacgttcggagacttccaattagtaccaaccattgaagaatttgaggaaattctaggatgtcctctcgggggaagaaaaccatatctttcctccgggtgtctcccctctttgagcagaattgcaactgtggtcaaggattcagcaagaggtttggaccgcataaaacagactcggaacggcatagcgggcctaccacggaggtacctagaagacaa

SEQ ID NO: 2613 - DNA, 178 bp, Glycine max
  unsure (1)..(178): unsure at all n locations
gttttgaagggggctttatagtggcgagcaataggtgagctcaaacctctgaagaaggggaaaaggaatcatcattgggtcaaagggcatgatctaaaanagacgaagctaaagcttaccttatgtcgaaaagaaatttgtcccatcagttaagcgagactgaagggaatatgtgggc

SEQ ID NO: 2614 - DNA, 316 bp, Glycine max
ttggaaaatgatttctatacaaaagttagtcgtataaagtgactaacacttatctatgaaagttttttagagagttttttagaatcttattgtcttattctctcaaaagcaaatcattggccaaacacttgcaagtcaattaacgattcttctaagaacttcaacttgtatcattcttctctaaaagagagaaaaacttttgtacttctaaaacaaaattgttgtgatcaagaggctgtgtgtctcttgaattgtgagtttcctgaacacaagggaatggatccctcagttgttcaaaagtttgaaatggatttta

SEQ ID NO: 2615 - DNA, 338 bp, Glycine max
tatatatatatatatatatatatatatatatatatatatatatatatatattcctttggcggatcaaaataagtaaaaaatattttgagccttgtggacgagattctagagggttatttgaagaaaaagatcattgtaaacagctgtagcatttgttgctagagaaatgattatttggactcaccacgttcactagagcagacttggctttaactttttcagacagcttcaaaataattccatttttcattatcaaattgatatgaagcacatgatcaaatctttcagttttattatagtacagagattagtttcacatgaatggatgttctttttag

SEQ ID NO: 2616 - DNA, 324 bp, Glycine max
tgtagggttaaagtctcacgattgtcacgtgctcatgcaacaattgttagccgtggctatacgagacatcttgccaaacaaagtcaggttaacgataactcgtctatgctttttcttccattctatatgtagcaaagtcattgatccagtcatgtttgatgagttggaaaatgaggccgcaattatactgggccagttggagatggattttccccctggcttcgttgacctcatgaatcacttgaatgggcctctggtccgagaaaataaatgatggggtcctgtttattaacggtggatgtacccagttgagcgatacatgaa

SEQ ID NO: 2617 - DNA, 369 bp, Glycine max
  unsure (1)..(369): unsure at all n locations
cttgaagccaaaaggaaaaattatcttgtttttgttcaatgtactctgcataatagagtgtgttcaatgcaaagttaccactccattccatcgaaccttgaggattgataaagccatcaagataagtcttcattaaaattgatcttgaatattgcttccatggtcttcgaagataaatcctaaccgggttttgaaacaacaatattccaaaaagttcctcgcatatcgcgatggatgcttcatagaatcaaaanccnctnnannnaanctcnccggaaaatcacttgaagagggcctaangacncngcatccatcgctttatattacagttgaatttccaatcaaaagtatgacccattgtgtcaaaca

SEQ ID NO: 2618 - DNA, 329 bp, Glycine max
ttcatgtttacgaacctgtactcatgaagtttttgagatattaatcacaactttaatgtgttcttccaccttctctgcatacaacatgccaaaaaatatattgaaccattacacaatcaaaaaaggacgaaaacacaaaaagctaagcatatgaagcaatgagcacattggagaatgctgtcgaacacaaaaaaatgtaaactgttatatcatgagaagtcagaaaacaaaataaaggcagaacacccaaaaaaaattaagcttttgtgtttacgaacctgtactcttggattatttgagataaaaatcgcagctttaatgtgttattc

SEQ ID NO: 2619 - DNA, 338 bp, Glycine max
agcttcaaaccaaagtctctcatattctaggtatctaaaacgcctcaatttagtggattttcaaggttcgagaagtgaaaatgagaatggggtaattttggagaaaactctcatctcacacaagtctataacattaatctaaacttgctcaaactggttttacaactaaaactcccccgaatcaacatttgacccctcaacaccaaatttaccctataaatggctcttgttttcactttggacactcattttcctcatttgctcagccccagctttcccataactcctaaatgatattttaaattaggattaactcactttaacctccaattaccact

SEQ ID NO: 2620 - DNA, 311 bp, Glycine max
tgagatgaggaagtattgaagggtgaaactttctgcttttattgttgaccacagagtggtacctggagatatgtcgcgggggtcaagagaccttggggacgtcaggtggggtgctattgcccaaaaccaagcttgaccaatcccgacccaacccgggcatagtcggtcagtgagaaactgtgatgtacctaaacaggcgagctcctggcagtcaacagataaaaggaacaaagaccacaaagcaaagaggcttgtggtggctggccagctgtgaaacttgattgatatgtgagatattgtctctggtaatc

SEQ ID NO: 2621 - DNA, 354 bp, Glycine max
agctttgcttctacactatgtagtgaatgatcacggtcgcgattcggtagcgcctcagcttcatttccacttctttcttcttcttctttcttaattctctcaattctctccacctttgaaccatggaacccttcctcggcctccctagcatgcctatttataggaaaataggcacttggggcaatagtagctcgcccaggcgagctaagccttagtcatgaagcaatgaactcgcccaagcaagctggagctcacccaggcgagctggtttattaacattgaagtcttttagtggcctaggtgagccaaaggctagcccgggtgagctaggatccaggaaaccatggaaaagac

SEQ ID NO: 2622 - DNA, 306 bp, Glycine max
tgaaagagcccgggtagtcgaagagaagttcttgtccatagccatcaaagtctgaaaagagtatgatgaactaagggacgtcaatatggccaccgctgaagccttggaacgagaaaccaagaaggcccgaaaggaagaacacgaccaaagcaaagttttgaggggctttatatggcagaaatagtgagctcaagctccgaagaggtgaaaggaatcatcatgggtcaaaggcatggtcttgaaggacgagctaaaggcttgccttaggtcgaaaagaaatttgtcccaacagttaaagcgagactg

SEQ ID NO: 2623 - DNA, 334 bp, Glycine max
  unsure (1)..(334): unsure at all n locations
agcttaagtgtccaatccaacatttaataattttttaattgatagaaatgtcacatgagttgagttggagagtatcaatgtctaaatgtatcccaccaccacttcaaaacaaaagaggtgttgatatttcatatttaacttaatcaaaggaccctaattaattcatacacttaagcctacagattttaatatattattaatgtatataatatttgtgaatcaccgttaataatagtattaatattaatttaactataatattgntaatattatatatatatatatatatatatatatatatatatatatatatatatatatatatatatatata

SEQ ID NO: 2624 - DNA, 316 bp, Glycine max
tgtaatcgattacacacatactgtaatcgattaccataggagattttcagaaaatattctcaacagtcacatctttttgtgtggttcttgaatggctatcaaaggcctatatatatgtgacttgagacacgaatttgacaagagtttttcagaacaaaaaggtcttatgctcttagaaagaaaaataattttatcctcttacaaattccttggccaaaactcttgtgattcaataaggaattatttgagtgctcaaattgttcaatctatctttttatagagagatttcttcttctcttcttcttcattctgaaaa

SEQ ID NO: 2625 - DNA, 359 bp, Glycine max
agctttttcattagatccccaatttggaggaggtatttgtggcggacctctctttgatcttgccaattttatttgatgatgtgccttgaatggcacttgagaactttccttcccttttcttttatatgttgtctctttgtttgcatttcattacctgctcacattgaggacaatgtgcatttcaagtatggggggagggtttagaaaaaaatctattttttttctgttttttgtttttattgtttctattgttatttttggttccatattttatttcaacttttggatctgtatttgatttttgtttttgtctagttgtattatgttctttttgtttttctattatctgtggatgtatg

SEQ ID NO: 2626 - DNA, 314 bp, Glycine max
tatagttattggagggagaataaaacaattcaaaatcaattgtacctttcaagtaacgaagaattctttttgcggcttttagatgaggagaggtaggagcctccgtaaagcgacacacaactcccaccgaatatagaatattgggccttgtattggttagataccttaaactccccacaagactcttgaagaccgtggagtctaccttctctccttcatcaaactttgataacttcaagccaccttccataggtgtgttcacgggattgcaatcaagcatattaaatttcttcaacacttcttttgtgtagctt

SEQ ID NO: 2627 - DNA, 353 bp, Glycine max
agctttatgatgaatcaagattgattcaaagaagttttgatgataacaaaggtgatgacaaaaagctcaaaagtcaaaaacacttcatgataacaaagatgatgatctcaagaatcaaagaatgagttcaagattgaatcaagaacacttcaaggttcaagagaaaatttgatttcaagaatcaagaatcaagtttcaagattcaagttccaagaaacaagatcaagattcaagaatcaagacaagacttaatcaagataagtatcaaaaagtttattcaaaaactgagtagcacatgaatttttctcaaaaccttttaccaaagagtttttactctctggtaatcgattacc

SEQ ID NO: 2628 - DNA, 312 bp, Glycine max
ttgatctacaacctttcaccgccaccatcatcttagttttctattatgattaatattattattactttgatttctagccgtgtatttggatatattattataacatttgaacaatttagtatttcttttatttgcataatatgactaaacaattatgaattatgttatatgactatgtggtttttatatatttgaactattcatgtttcttgcttcatgattggtttagatttttcaatgaatgtcttgtgaatgattagttatttatgtatgttttatatttattacgcactttggctttttgttgatgcc

SEQ ID NO: 2629 - DNA, 347 bp, Glycine max
agctttactattcacccttttcacttgacactgcttataattattggtttgcttatgtttacacataggattgttaatcattaattttagtttcatgtattatacttctgtatgccttgttaaattttataattttagttttttttaatgcaatttctttgaatttaagagtgcgatttttatctgttgtggccttaattgggtggtctcaatgaacgattattggttgcaaaagaggcatcttgtgtggcgggtacctttttctttaatttgtggttgtaaagggcatggtgtggcagttctagtgtttctatgacatgaaggatgacactcctttctaataatgg

SEQ ID NO: 2630 - DNA, 305 bp, Glycine max
tggacaatggcagtgcaatcttactaaaatcctggatgaatctcctataaaaacctacatgtccaagaaaagaacgcatttcctgcatagaagcgaggtaaggtagagaagtaataacatcaatcttggccttatcgacctcaatacctctaatagataccaaatgccctaagattatatgtaaccacatggtacaaaaactattgttaagagtaaagacccttcccgtggcctttggacgtctagtttggtcattcagacccccaccattctgcttcttcttgggatataggcaatctctttga

SEQ ID NO: 2631 - DNA, 347 bp, Glycine max
  unsure (1)..(347): unsure at all n locations
agcttatgaagatattgcgtcattatccttcgattnttgtagtgatgaagaagttgcaaatgtatgcttaatggctaattcaaaggatgactcctctaccattgaagaaactgaggtaaattctgaatttgaaaaagttttggaagcatttaatgaaatgcatgagggagcgtaaatgcttgttgttttgaacaataagctgagaagcgatctaaaatggcatatctctaaattggcttcaacacaaagagagcttcataatttaagcataaaatgaaaaacttgtttcgagttataaagacaatggttgtgtttatgcttctacttcttttaatatggatgattac

SEQ ID NO: 2632 - DNA, 309 bp, Glycine max
tatcaaaatttgagaaaggacttcaaaattctttcaaaatattataaataactttaagggaaacatgaagaaaagaagataatttttcagaaatttccactcaatcatgtgatgactttgaaagtctaaagttaaagacaacaaagcttcaccttgagaatgaggaaatttgtaaagaaagatctagtctattggaagaccttcagaagttgaaaaatcaactagaaggcttacaaaatgagtacaccacactcaataaagttcaagattacctaaatgaggaaatgtgtaatatattgaaagaatgtt

SEQ ID NO: 2633 - DNA, 363 bp, Glycine max
  unsure (1)..(363): unsure at all n locations
agctntaaggaaattcaaacgactataactttttactcggatgtctgatggagtctcgtaatatatcgagacgctcgaaattgaatgttgaagctctgagccaattcaaacgacaataactttttactcggatgtctgattgactctcgtcacacatcgagacgctcgaaattgaatgttgaagctctgagccaattcaaacgacaataactttttactcggacgtctgattgagtcctgtcatatatcgagacactcgaaattgaatgttgatgctgtgagcaaattcaaacgacaataactttttactcggatgtctgattgagtcctgtcatatatcgagacgctcgaaattgaatgttg

SEQ ID NO: 2634 - DNA, 312 bp, Glycine max
tcaacattcaatttcgagcgtctcgatatattatcaggactcaatcagacatccgagtaaaaagttattgccgtttgaattggctcagagcttcaacattcaatttcgagcgtctcgatatatgacaggactcaatcagacatccgagtaaaaagttattgtcgtttgaatttgctcagagcttcaacattcaatttcgagcgtgtcgatatattacgggcctcaatcagacatccgagtaaaaagatattgtcgtttgaattggctcagagcttccacattcaatttcgagcgtctcgatatattacgggc

SEQ ID NO: 2635 - DNA, 366 bp, Glycine max
  unsure (1)..(366): unsure at all n locations
agcttttaaacacactttncttttatattnttcattatataatatatatgtatacactaatataattttaacaataataagaagggacttaacagatttaaaagactggaaaataaataaggaaccctatcttttgatcaatggatacatatatctttcaaataggtatcatcacttagcataattacggaaaaaagaacagcaaagcaagttcatttaacatctcatctttaatttgcaccctctttttatatacatagatcacagacattacctagtgaaaataatcctatttgtgttacgtaagattattatggcaacaaaaatctccttctaatccatttgtgtaagataagatcattatat

SEQ ID NO: 2636 - DNA, 320 bp, Glycine max
ttgaacaatatacttgcccttcatttaactgtttttgggcttggcggccacgctcaacaaagtatttttgaaacctactgtacgttgatttgaccaacgctgttatgggaatgttgcgacaatccttcaaaaccttattgatacattctgagaggttggttgtcatgtggccatatcgacgtccttctctatcataagccatcgttcatttttcttttgaaatgcgatcaatccatgttgctatggctggactcaattcacgaaatttttctaaattttgataaaaaaatgtgcttgcaaggagtgtaggctgcataaaa

SEQ ID NO: 2637 - DNA, 119 bp, Glycine max
tgttcttttcatcttcaaacaggggaataactactctgtgtatactctggatcactgcaaaaacaaattttaatctgggtagattagtgatccacatttaccaatttaccattcctacc

SEQ ID NO: 2638 - DNA, 281 bp, Glycine max
cacttagaatctcagcttatccatttgcctactttttttaatggattttaaccatttctaatactcttgagggcacaacacatgttgagcttgtgaaaaaaaatctgaatttaatctcataaaatatattctaggaatagggtgaagagctttagtaggactatgctctcaatcaatgtgaatatgattattattaaataaaaaagaagtttcatccaatactaaatgtcttgatgcaccactatttccaaattaataaatggtgggagccttaacttggt

SEQ ID NO: 2639 - DNA, 365 bp, Glycine max
  unsure (1)..(365): unsure at all n locations
agctttagctgtgggaatattacctgagagatagaagcacaaacaagtatctacggtagttctttcccttggcatagtaggggggactcttggaggagtagcacttgttttgctaattttctttattgttagaagaggaaatgacagaagcaaaaccaagaatcctccaacaagattaatatcagaaaatgctgcttctggttacacatctaagttgctttctgatgcaagtaattctctctctctccctctctctctatctctctctctgtctctcaaacacacacagacacacacaggngtgtgcatgatcaaactaccttgtccaattttatacatttcttcatccacaacatgcagaacat

SEQ ID NO: 2640 - DNA, 324 bp, Glycine max
tctctgcatgatgaattgccaaaatggatggatccatgcttattgatttcttttctgtgtatgtgacagggggggaaaaggagtgatgggcgaacacctgacggaatacgtccaattaactcgagatgtggcctattacctagagcacatggaagtactctttttacaagaggcgagacacaggtctgagccaactttatttgttttccagtttatgcttttgatgatatctgttggtgtctatatatgcttatgcaagtcacattatctcttttctgtgtttgttagttttattagaagggagatagaatgatcaaacacaaa

SEQ ID NO: 2641 - DNA, 325 bp, Glycine max
  unsure (1)..(325): unsure at all n locations
agctttgagccataatcctgacttaccataaaccttgacccagggtgagaatgtcaatccttaccctcggaagcaaaaaaagaatagaggggaaatttccaatcaaagaaaaagagaaggaaaatttccaatgaaagcaaaaaaagaaaagaaggaaaattccccaatcaaagagtgggagaaagcaaaaagaaaagaaaggaaaattcccaatcaaagaatgggagaaagttaaaaaggaagaaaaaaaangaaagaaagctcctgatcaaggatcgaaagaaaacagaaaaaatgtgcagagaggtctttggaccggacaata

SEQ ID NO: 2642 - DNA, 314 bp, Glycine max
tagcacctggaattcggatgctccatcaacctacctatcgatgatgggtagagggtatgtgtctttggggcacgccctgtttagatcagtgtagttggtgcacattcgccatttttcgttggctagctaggtggaaaacctgacctctcttatgaaatttgcatggaggagcttgtcgacttcttctttgatgactttatgccgctcttcacccatcttcattttcttttgtgatataggtttgtctttagaaggttttcctatacaagatgtaaacaaaactgccttggttgatgaggaccctagacaccatg

SEQ ID NO: 2643 - DNA, 361 bp, Glycine max
agctttgagccaaaattctgactcaccataaaccttgacccagggtgagaatgtcaatccttaccctcggaagcaaaaaaagaatagaggggaaatttccaatcaaagaaaaagagaaggaaaatttccaatgaaagcaaaaaaagaaaagaaggaaaattccccaatcaaagagtgggagaaagcaaaaagaaaagaaaggaaaattcccaatcaaagaatgggagaaagtaaaaaaggaagaagaagaaggaaagaaagctcctgatcaaggatcgaaagaaaacagaagaaatgtgcagagaggtctttggaccggacaatatctgaacaatacagaattgccaccaaatgaacgaaa

SEQ ID NO: 2644 - DNA, 314 bp, Glycine max
tagcacctggaattcggatgcttcatcaaccttcctatcgatgatgggtagagggtatgtgtctttggggcacgccctgtttagatcagtgtagttggtgcacattcgccatttttcgttggctagctaggtggaaaacctgacctctcttatgaaatttgcatggaggagcttgtcgacttcttctttgatgactttatgccgctcttcacccatcttcattttcttttgtgatataggtttgtctttagaaggttttcctatacaagatgtaaacaaaactgccttggttgatgaggaccctagacaccatg

SEQ ID NO: 2645 - DNA, 326 bp, Glycine max
aacttgagggggaagattagagtatattttattcttctgtctattattagacagcaagtagggacttagtccctattacttattattagattgatcctttctaatcgatactaattctatttacttattataaataaagactaagtgtggttgtgaaggcaaaatatcacaagaagagtggttgaattgtgattttcacaaaataaaacctttttgtaaacaacaaagttatcatctgatgaagtaagacttaagaaaaaagatataagacttttgtaaagcaaattggacgatagtgttaaatcattataaaacaaacaaagttt

SEQ ID NO: 2646 - DNA, 314 bp, Glycine max
ttataagcgcgggtctgggagatgaaggtcatttggtcgcgatatacgaagatgatgttccgagtacattggatttggtacgaccatgccctcctgatttccagctgggaaattggcgagtggaggaacgccccggcatttacgcaacgagcataatgtaaacctttacggttttaaaagctctatagttgggcctaggatttagagtttttccttttgttaaggctttgtgtcttttgtttttgaatttataatacaaggatctttcttcatctattcttacgtctctacccattctcattcatttgcatgct

SEQ ID NO: 2647 - DNA, 354 bp, Glycine max
  unsure (1)..(354): unsure at all n locations
agctttacattaacatacatttgtttttctttcctaactcatattgttacttgagcgttgaagtcctttattttgcaagtccccgctcctatcaaagatacctctcctagccgacgtatgaagttcggaacctcactcagccacatccaccttgacgtgttacggttctaaattttggtaagaacatttggcgtccactgtggggccacggtaaaacataccccacgacctctcatcaatcccctcacactcatctatggttagcacttantctgccctctgatgtgagaccccccctaacgaactcccatctttgtccgacagttatgacagacacaaatactctacaacaac

SEQ ID NO: 2648 - DNA, 311 bp, Glycine max
tgtcagccgcgattgacgaaggatgcagaagacgacgttagtctctgcgtgctatcaggcttttcatcttacagacagcaaaagaaagtttatacggataaccactcgggtatttccacccgtcaacgtgactcaaatgtcagtatgacagatcttgtgaaggtggccgacaaaagcgaggctcttgctcctacgtatcctccaatgaggaactcagacctacgtagttcttgataacttgtgagacttgaaaaagtctccaccggaagatgctgacatctccggaaagggcgcagatgaccacattggcc

SEQ ID NO: 2649 - DNA, 348 bp, Glycine max
agcttatccaaagtgtcattcgttgtaccaccaaattcctaattcagccgcctttaaagtcctactgaattagtacaaagtaacttctagcaatttggtgagtaattcaacactgtatataataagtacctttgtctgtaaaaattttaaaaacatatacatatctaacatgaacttaatcttaatttcaggatgcactgagttctatgtactcatttatgaaagatgcaaaattcaccaatgttaatttggaagggactacaaaggcaacattgttgacaataattggaggaagtatgcaaattcacaaaatttggaagttggccaggaaattatatttgagttccc

SEQ ID NO: 2650 - DNA, 317 bp, Glycine max
tgtcaattcattctatgtacccgtggtggttcacattttgtttcatgtattttttattctcgttttcatttaatttttatacccccttttgacgtgcttaagccatttatttaagtcatttctcgcttaatctaaaaataaaataaatttccaccgatcgtttgaattgtatcatccattaatttcggttaaaatgaattccgaccgttcggtcgtgccgtaaccacgttggaaataaaaaagagaggtaaaataataatataataataaaaaataccttttagtaaaataaagcggaaaatcaatcggacgttttc

SEQ ID NO: 2651 - DNA, 352 bp, Glycine max
  unsure (1)..(352): unsure at all n locations
agcttgtaagagtgcatttgttttttcttgcaggccattgataggattgggtggttgctttctaaaaggagaatttggtgggcaattgttgactgctgtaggtaaagatggaaacaatcaaatgtttcctattgcctatggtatagtggaatctgaaaattattcatcttggaagtggtttattgatctattgatagctgacctagatggtattcaggagggatcttaggctttcatttctaaccancanaagggaaanacttattggaactaacatgaactatggctttcattcaattggtccactattttttgcagggtttggttgaagtaatcaaagagcatggtgaaa

SEQ ID NO: 2652 - DNA, 313 bp, Glycine max
tcaataatgtgtgaacatggatagtgaagcgcttaataccttccgcattgacaatgatgaccattcaagttaactgcccacttttgtctgccacgttgcgttatagggttgaaggtctcctctacttcaaaccttgtagagtgaatatcatacacgcgaatgatgtgcatacaagcttgttcttgatttttcctcaattctttaacaagctttgaacaatatacttgtccttcatttaactgtctttgggcttggcgaccacgctcaacaaagtactttcgacacctactatacgttgatttcaccaatgttg

SEQ ID NO: 2653 - DNA, 277 bp, Glycine max
  unsure (1)..(277): unsure at all n locations
taatcaccagccgcgacagtggctatatgaggatgacatttgaacgatcgaatattaatgtatctggatggaatgacngaacaaatattaattacgtaattcgactatgaggatgtaaatatgatctattgagggatcttgcgacaagggtcttgctttatgacttggtgtatatttttcatgaatgttgggggaatgctcacnagatattggtatgatacgcacggtaggcttttcgttgatgccatatggggagagaaatagggatgcaatcgac

SEQ ID NO: 2654 - DNA, 294 bp, Glycine max
tctacttggcctcatttttgtttttgttgcttttctgagtattcttactaatgaggggttacattatcatggtagtgattagacagtgtgtgaacatgtgcatacaatatgagtatttcttattatagcaaatggctcatttccaacacttttgctggattcattcagttgaaagtagaatattaattggatctgatcagttttataaaaatacattaaacaaatgcgtttctgctacactaagcaaatgttaagagctgattctgttggaaatccaatgttaagagctatttc

SEQ ID NO: 2655 - DNA, 347 bp, Glycine max
agctttagcaggtctcatcttatatgttggtgttgtgggattgagctaggcctaaagtccaaattctaagattgctgaacagagatgatgagccctataggattcaaaagtgcatttctctctttccaggtatttaagatacctggcttggcttctttttctcactccaaacatttaataccctcaatacaatgactaagtaaattgttactgctgttatcttttatttttactaatcaagatagttaaaattgtgattttacttaagattttgaaaggaaatcatggactgtaaaatcctacaattttataaattcatacagctaggcttttccttccctatacac

SEQ ID NO: 2656 - DNA, 309 bp, Glycine max
tggttcgaggtacttacccattgaagatcgattaacgatgaagaacgaatgaagaacgtcgaagaacggttgaaacctttgcgaaattcttcacggaaaacgttacggaaacgtttcggaagcgcctcggcttagattttcttcacggaaacaatttttccaagcaaatttgaaagagagaaaagtgcctaaggggctgaacccttttcttcttcacttcctcccctatttatagcaaaatacgggaggtggttgtcgcccagctcgcccaggcgagctcagctcgcccaggcgagccaggttgcttcc

SEQ ID NO: 2657 - DNA, 347 bp, Glycine max
  unsure (1)..(347): unsure at all n locations
catatgaataatactccaatggttgggtttagcaaaaatgattaatttttcatagataaaataaggtttgaatatttgtttcgaaagatgttaatattaatttagtgtgagaataagattatgtttgataaaactagttaaaaagataattagaaatagtaaaaactaattgatagttgaaaaatgaatntttttttattcgtgaaaagttatcttattgaatcatatacaaatgtttggtaaaattatatgttgaaatagctaacaaatataaaaatatataaatgaacatgtttatataatgtttttatacatatttntaattcgatttgttgataaaaaaatat

SEQ ID NO: 2658 - DNA, 70 bp, Glycine max
ggaggggaggaaaactccatgagggaccaggaccccaacaacagtgacgggggggaaacccgaaacgaag

SEQ ID NO: 2659 - DNA, 368 bp, Glycine max
acatagacacctagttagacttttgggttactgtgtggttttagacgaaatgatgctaccatatgaatatatgcctaatagaagcttggatgctttcatatttggtaagactatttcttgcatttgaaatattctgttggctaagcacttttttgtacactcaaaatcctattttgaagtagactaatgtaatgtgtcatgcccctaatgaactacaagaccggaagctgtgtgttctattagactgcgatgtgcgcttcaagaatattatggggattgctcgatggcttctttatctacatgaagaatctacgttgaggattattcattgggacttgaatacaagcaacattctaccttatgtatag

SEQ ID NO: 2660 - DNA, 416 bp, Glycine max
  unsure (1)..(416): unsure at all n locations
ctctatctggttatgccaagagatggatgcattcattcaagggcaacagtttaaagacctangatgacgttgttgagaagtttctaaaaaactatttcctagagtctaaaactgtagagggaaaagctgtaatttcttcattccatcagtttcccgatgaatctttgagtgaggcattataaagattctgtagcttgctgtggaaaactgccactcatggatttttagagcctatacagcagatcatatacatcgatgggttacggccgcacgcaaagtagttactctacgcttttgctgaggaaaaattaagttgagacacctgcagaagccatggcttaattgaaatatggctgcagtgacacacaatcttgctgattagatcatattctaccataagagttattggacttcat

SEQ ID NO: 2661 - DNA, 264 bp, Glycine max
  unsure (1)..(264): unsure at all n locations
ctaatgactcttctgctgtctacacataaggcatagaggatgggcagctcaccaagatgtctttctcgcctgatacgatgaccagatngcccttcactacgaagttcaacttttggtggagtgtagagggaataactcccactgagtggatccacggacgccccaacagacagctgtaggggggggttaatattcattatttggaaggtaacttgacaggtgtgagggcctatcttgactgggagatcgatctctcccctaacc

SEQ ID NO: 2662 - DNA, 451 bp, Glycine max
  unsure (1)..(451): unsure at all n locations
tatggaggctggatctttgagcctcatttatgtccttcaatggtgattntacaccatggagatgcagcggaagacaaacgagaagaggtgagaggaggcgccatcaactatggaataagccatggaagaaagagctttaccaccaagatgagccttggataagaagctgggagaagatgcttcaatggaggaaaagaaagagggagagaaagagagaggcgggagcacgaaattgagggagaaaaagggagagaagtttaactttgagttgtgtctcacaagactctcattcatcaaagttataacaagtgttacacatgcttctatttatagactaggtagcttccttaagaagctttctttagaaaacttccttgagaagcttctttgagaaaaacttcttgagaagctagatcttagctatacacactctctcataactaagctcacc

SEQ ID NO: 2663 - DNA, 358 bp, Glycine max
  unsure (1)..(358): unsure at all n locations
ctaagctgaatcgacctcagtgtgnaagnatgacttctgatattcgttagctcncgngatcaatntctagcgtctgtatatgtgatacgcctgaatcgaacatccgtgggaaaagttatgaccatttgaatntctcgaaagctttcttggtacaatttcgagcatctcgacatattgtgtgcccgaatctgaccatcggtgaaaagttatgaccatttgaatatctccagagcattcattgtgaagtttcgagcgactcgatatattataagcatgaatcggaccttagctgaaaacgttctgaccattagaatttctcagagctctcgttgtaaaatttgagcgcctctatatatta

SEQ ID NO: 2664 - DNA, 455 bp, Glycine max
  unsure (1)..(455): unsure at all n locations
cttntggagtagaaacatgggaccaactcatnttatttcaaaatggaagtcatatctagtcaaggtctgagagaccatacaagtttcctaacgatttctaattatgtgggccattaagtctatcatatgctgacaatagccgagaagcccatgaatctcttcgggggcggagtaagtgtctgccatcgccttggccttggctaacaatcggggaagttcttgactcccgttcaaggtaagagcaaaccgatccatccacatggttgcctcttggtgtaaagagtcgatcacccttcctctagcactcttttccgcgtatacttgggcatactcatccgcgattctatgctcgtgggccgtggctagacctaactcttcttggtactaggcgatgatagctaacatgttggtctctgtctcgcataaacactgagacaagctactattggaccttg

SEQ ID NO: 2665 - DNA, 268 bp, Glycine max
tggacaacttcctcttgaaagtttcattctggaaattttagtttccctaatcaatagtcttacttccctctccttgatgatgcctcaactaacattgttcttggacctctcttggttgggagagccaagaatctacccttctcgaaaccattggaaggatacttggtggcatttttggtggttttatgtgtttgtgtttatgactgaggggatggttgatgtgttggttatggtggtggtggaggaaactaccttattatatcattta

SEQ ID NO: 2666 - DNA, 300 bp, Glycine max
gatttgactgctcggctgaatgttatgttatggcctctgcttggatcattctaaaaaaagtcgacaataatggtctatttctttgcatagatacttggaaatatgttttttagaacttataatttgcaaagaaataagctcttactggattgaggcattgatatattactatgcagagcagtactacagctaccagatgtaagcttacgttgaatccccaggtataaatttgctatatgctaatgcatatatcagtgaattattcatcactacctattgaaaggattattgttgtgttga

SEQ ID NO: 2667 - DNA, 456 bp, Glycine max
  unsure (1)..(456): unsure at all n locations
attgaaaactgttcggaggatatactagcgtttagagagcttgctgcatcttctactgaagctgtggcaaaatccaaaaaggtactttctgaatcttgtgaggttcttcgtgtgaaattagaccataagtaacttaagataaatatttcattaaatccactattagatttttatctctcattacataaattatgtcaagaagtgtcatgtcaacttgattntaatcctttattagtacatcacttaattaacataaatatgatttccataatttataaaactgactactagattttggcttatcaataaccaatttatttgaaatttgatattcacgaacactatatttctcacaattcaatggtaagattgatgaagatcacataaaataagttactcaattgtcgaagtgtttcaattctttataatgtcgttcatgttttactaacatgggca

SEQ ID NO: 2668 - DNA, 469 bp, Glycine max
  unsure (1)..(469): unsure at all n locations
cttcaagatcatggatgttgcgcatntcattttcgggatatttgtgtgagtntaattattcacacatgggtttctcttatttttcttctcaatggttgcatgcattgaatgctgcgctgttcttgtttatggttcttgtgtatattctcaatcttctttttttgcggttcagggaatgtttctggtttgttcctcttcttggccccaatgtatgtatctcataactgcctccttctggtttctcgatgttgatatttgttcttctctctattctgtaaaatgcacataaagtcatatttttgtgttcgtagagtacccatttgagcaaaatttatgataaattggttttgtatagtgacattctggaggatcattaataacaaatccacatataaatttactggggttccttaccctatgacccttctcaactgtctcctttcttgctggtaagtatctcactctgttc

SEQ ID NO: 2669 - DNA, 469 bp, Glycine max
tgaggaagtgtggaagggtgagacttcctacttttattcattgaccacatagtggtacctggagatatgtcgcgggggtcaggagaccttggggacgtcaggtggggtgctattgcccaaaaccaagcttgaccaatcccgacccaacccgggcgtagtcagtcagtgagaacctgtgatgtacctaaacaggcaagctcctggcagtcaaccgataaaagaacaaagaccacaaagcaaggaggcttgtgtggtggctggccagctgtgaatcttgagtgatatatatgatatggcctctggtaatcgattaccaagggtgggtaatcgattacaaggcttaaaaacgagatcaggaagctaagagggcttctggtaaacgattacaaaggggcgtaatcaattaccacgcttagaaatgggactggaatgttgaatgggcctctggtaatctattacacagaggaac

SEQ ID NO: 2670 - DNA, 204 bp, Glycine max
tcacacatgtacccgcttagaggtaagagatgattatatcacaattggtgttagagtgaacatgtgtaaggatccctagaggacaaactttgggatttgtttatgaatttaaattttggtcttaatcttttattcgtgaattgattatgtttgatgaacgaatcgatgtcctgatgtgaaaatgttggtaaattgatatgttct

SEQ ID NO: 2671 - DNA, 515 bp, Glycine max
  unsure (1)..(515): unsure at all n locations
gacacgtgttttcccgtgaacccttagagtgcatggatgtacgcgacacatancatnctcaatcgtcggaagaaagtgatgaggtacacgcactcattgcacaacattgaacaccctcngtagtccgagagaagttcaagtgcatagccatcaatgtctcacacgagtatgatgaactaagggatgtgaatatggccaccgatgaagccctggaatgagaaaccgacaatgcccggaaggaataacacgaccaacgcaaagttttgaggggctttatagggcagcaatagtgagctcaagctccgaataggtgaaacgaatcatcactggtcaaacgcatgatcttgaatgacgagctataagttgccttacgtctaaaagaaattctgtccaacagttagcgagactgaaggaatatgtgtccatcatcattattgcgatagaagctaatcattctgtactcatatcaaggcttaggatattatccagatatcacctaagggaagctggaatct

SEQ ID NO: 2672 - DNA, 443 bp, Glycine max
  unsure (1)..(443): unsure at all n locations
cttnactgattccagtgataatgaatcgagctttatcaagattatctgagacaagttaaagagcaactgagactagtgtttgttgagctctatcaaaaactcctccatctcaaagattacaggtaataaacaaagatttcatggaccttataattactaataaagccaaatgttcttccatttctaaaagccattttgccatgtgcctttgtatttatacaaatggatgcgacagttttatgaacctctcagcatcttccaagatcatgaagaagtacgaaaaggttagaagtataccaagtactacagaaacttcagttttattcgttacattcttcacaatttaaattcaaatgatggcatntaagaaaaaacatcgttctgttcagaaacagaaatatgacagttntgttaacttcatttttttctcggaaagcatacat

SEQ ID NO: 2673 - DNA, 467 bp, Glycine max
  unsure (1)..(467): unsure at all n locations
tgtccctagttactactattagtatctctttgatggaaaatacgacaagacaagaacaatgtgatggataccaccactagagagtcatgagtcaaagtgtcaactaagatggtgtcattgttaaccattcaaatgcatatatagtcagacaatctacctgtattaccaattccctttgtcccttaacttagaggagaaagtactaaaaggaagataatcaatcaatttgttttgcgatatgactttcctcaatngcatggagttggtactcaaaaacgatcttgaanttcagtctacttgattaggcagttgccagcttagaggaggcgcaagatgacaagtgcctcaagcttgcgttccaacatgggaaatcaaatccaatccaatctcattcaaaagacaatgatagctcactgttttgttgctgccttgacttctacagttccaattcccaaatgctatgtacc

SEQ ID NO: 2674 - DNA, 462 bp, Glycine max
  unsure (1)..(462): unsure at all n locations
ntccgcaagacttacggaaagatcttagagtttaccatagcataggtatccatagaagccattgcatcacttacccaatactacgaccagcctttgaggtgcttcacattcggagacttccaattagtaccaaccattgaagaatttgaggaaattctaggatgtcctctcgggggaagaaaaccatatctttcctccgggtgtctcccctctttgagcagaattgcaactgtggtcaaggattcagcaagaggtttagaccgcataaaacagactcggaacggcatagcgggcctaccacggaagtacctataagacaaggcatggggtatggccaatcaaggagactgggtcccgtttatggatgtgttagctntgcataatttcggggttgtcctctatccaaatgtggatggtttggtagacctagcagcaatcgacgctttctctgcctatcaccat

SEQ ID NO: 2675 - DNA, 418 bp, Glycine max
  unsure (1)..(418): unsure at all n locations
cgcacggtagccttggcatgaatgcatcatcgtnacgacnatnaatctagcttcgagaagtgtgaatcaatttaaagcttacttttagacctggtggcgattgaagtcagttcattccatcaagctgaaaaagttgatgaactaaggatgtaattggccaccgatgaaccttgaatgaaaaccaaaagcccgaaggaaaacacaccaaacaagttttgagggtttattggcagcatagtagctcaactccaaagggaaagaatcatatggtcaatgctgacttgaagacactaatgtttcttagtnaaaaaaattgtcacatttatcagatgacggatttgggccatattattttcaagaaacttatctacggcactacagcaagctaagatgatccctaattctctaaggagcaggg

SEQ ID NO: 2676 - DNA, 470 bp, Glycine max
  unsure (1)..(470): unsure at all n locations
ggacactataaatctcagcttgatggctttcctcctgtcttatttgcctctttgctattcggcttaaaagggctcactgacctcttgagcgataagtgaagtttcgctcagtgccaaacttgcgctaagcctggaaggtgacaaatgactcgctgagcgagctgatgatgcacttagcgcatgcctgcgtgacaaattcccttccagattcctcctatctgctaagcacgttgatgcctcacttagcggatgacactcgctaagcacattgagctcgcttagcgagacatcaactntatcatttcttcaaaataactcctttttgcttgaaatcgaagagaaattgacattaattccatacacaaggcttctactgagcacagataaaaacaaagcaaaatttatttacaattctacataaagaaccataaattgtggaatatatatattttgtaaaagttttctataca

SEQ ID NO: 2677 - DNA, 166 bp, Glycine max
  unsure (1)..(166): unsure at all n locations
atggactacctgaataagaccttagataggtcctatgatctcttgttcccctttcttggtgtcgaagctcattacaagccttaagtgcaaaaccatgatatcaccttacccttaaggaattntggagctttggaattgtattgggaataagtgttggggggggggg

SEQ ID NO: 2678 - DNA, 241 bp, Glycine max
atatgacatagtgatgcttatcattcgtgaatcataacttactctaccttaatgagtcggctcttatgataaacattaaaacctgacacatcaatatggtgtactgctgcatccttgaaaaattcaatagtaacaacaacaaccatctgtcacaatatctatatgaaatcatatttctgcgcaagttattaatatcaaactcttattaatctaatacacattattacatttgaattctttt

SEQ ID NO: 2679 - DNA, 437 bp, Glycine max
aatcctgactcaccataaacgttgacccaaggttttattgcctattcttatcctcggaagcaagaaaagatgtgaagaaaattttcaatcaaaggaaaaaggagaagaaaatttccaatcaaagaacaagagaatgataattctcaatcaaaggaaaaaaaggaagcaaagaaattcccaatcaaagagtgggagaaagaataaatgaaaagaaaggaaattcccaaccaaataatgggagaaatgtaaaaagaagaatgctcctgatcgaaagataacagaagacatgtgcagagaggtctttggaccggacaatatctgaacaatacagaattgtcaccaaatgaacgaaaaatgaaggaaatgaaaccactacctaatatggtcttctccacttaattaccaaccaaaatcccgtgcgctagctaccctttttt

SEQ ID NO: 2680 - DNA, 296 bp, Glycine max
ccttatggtacagttgagatcaaaatcgactctacaaacaagagcttcaaggtcaatggacaccgacttaagccattcctcacaaacccttctttagtggacgtagtggtggaagagactttcttactacaccctactattcctctaccatgacttagggagtctttcttttcctatctcctcctgtacttttattacattcgaccgatgctatttgatggtgtaattacatttaatcttttaattgtgctacatcgaggacaatgcgtttattaagtatgggggagtgttctttg

SEQ ID NO: 2681 - DNA, 332 bp, Glycine max
ctggatatatgtcgcgggggtcacgagaccatggggacatcatgtgggcttgctattgcccaaaaccaagctggaccaatcccgacccaacccgggcatagtcagtcagtgagaacctgtgatgtacctaagcatgcgagctcctgtcagtcaacagataaaaggaacaaagaccacaaagcatggaggcttgtgtggtggctggctggctgtgaatcttgtgtgatatatgggatatggcctctggtaatcgattactaatgggtggttatcgattacaagcttaataatgaagacaggaggctaagatggtctctggtaatcgattacca

SEQ ID NO: 2682 - DNA, 401 bp, Glycine max
  unsure (1)..(401): unsure at all n locations
tcgcacttgataacggagaacacatgaacatgttgctggcattttcattcatggcgctccggacaaacgtggagtatggatgattgcctagagggaccgcacttatgctatcatgaagctcatctccaaacttgaaagtggacgacacatgaacaaccctaagcaataaactttcatgtggctccgaaagaagatgagaatggacgatngccttgagggtccactcttaggcaatcatgaaactcatctccaaactcgaaagtggaggacacatgaacagtcctaagcatatacattcatgttgctcctgaaaaggataaaatggacgattgtcttgagggtcctcttataggcaatcatgaaactcatctcccaacttcaaagtggaggacacatgaaca

SEQ ID NO: 2683 - DNA, 343 bp, Glycine max
cctatcacactaatttgtagtcctgagtctgtgcaatgttatcgcaactatctgaagtttgggaaagcttaattaactgagaaatcattggtcatggattcttgcctaattgcctgagatctggatctggaatggttgcctgaggtgaacatatctgtgtcttcgagttgctggtgaagaagtcagtgattctatttactctaatgccctacatgcattgttattcttttaatactatatgtgcttctcatttgagaggggatgattccattcacatagagatattttgaaagtgtcctataatgtatcagatcagatctctctatctcattgctattgctac

SEQ ID NO: 2684 - DNA, 456 bp, Glycine max
  unsure (1)..(456): unsure at all n locations
ggttagccatggtggtaagggtttgccttaacttacccagtttcttgtgaaggcatatgtggatgagtcaaggcttttgagcctgatgatgtacggtgcatgaccgcgaataaaggcataataaactatttttatttaaagatgacacagtgagacctcattcttccacctgccaattggagagatgaccatcatccttgatgatatgtcacgtctntcacattttcctatcataagctagctcctttgtcgcacacaaacaagctacaccacgaatgagattagagtattattaaggtctatgttaggtattatgaccgatgaggaggtagatgttgcgacaacaaatgatctaacatccttaattgtcgacttcttggtgactcacacatggtgacactntacatggtgacatttcacttaactcctcgttggttagaaccctccataggtagt

SEQ ID NO: 2685 - DNA, 446 bp, Glycine max
  unsure (1)..(446): unsure at all n locations
tcaagctggtatctccttcttcactacatctagtaataccgggttgtgtcttctctgtggctgtcttactggtttagctctgttagtgcttagctntactgagttttaaaagattggctaaaattttgttaaaacataagcacttagacaatgaaggaaagctggagttgctgcacatgatgtctaacattatgtcaaggaatcagatcgggctgcacaatgcacaaggcaagataaaatgtcaaatgaagaattgaagctgcaggatccacgatgtcggatacaatgtccaggacattctgcccgaaaatactggacacataaatctgttatacctttaacagcttaatgtgcagtcagcaacagattatgcgatctatctntaggaacgaattaaaagataattaaagttcgaattacaaacttgaatagttcgttcacggatt

SEQ ID NO: 2686 - DNA, 447 bp, Glycine max
  unsure (1)..(447): unsure at all n locations
tattattcaagaaactcatagatttcttgtgttcttcatattctcacccaaagattatgtggactcattgtgaggtcttcataatctctgtgtgctcgtgcacattctctccaaagatcatatctttcttctttntggtgattatgaagctcattcagctcatttagatccttttgttttccaactcctgagagttctaggaaaagtggctctttcattggcatttgtctcaatctaaagacataacttggactctattctgtaagagctaagcaagcttcacatgtcttaatggacttgtctagtgaaatatctacttgatgctaaagggttttctcacgttctaaatgatctttggataaattcttgaaatctcttcgtcggtttctgcaagactttaagagaatagatgagttagatagaagctcatgataagctattctaaca

SEQ ID NO: 2687 - DNA, 436 bp, Glycine max
  unsure (1)..(436): unsure at all n locations
agcacgatcaccttggcatgatagctgcattcggacagctcaacatcaagcagcgctcgaaatatgggactattatacattttgnaacagaccgcgggggattggctagacttaacatacattcgaggcgcgattatacgggactaatccaacatcgaaaaaaatattgtctcagaattgctcaaaggtcaacatcaattctagcgtatcgaaatattacgggactcatcagacatcctttaaaagctattgcccttgaattgctagagagataacattaatttcagggtcccatattacggactcaatcgacatccggtaaagtattgctggtcgactggctgaagttaacaacaattatagcgttcgtattttcggatcataaaattcagcaaagttattgctgtgaatgctcaagttcacactaatagcggcn

SEQ ID NO: 2688 - DNA, 463 bp, Glycine max
  unsure (1)..(463): unsure at all n locations
atgccttaatcatttccaaatatgcatgttatttangacgcatcaacaagaatcaagccaaggctattgtgcaagcaatcaatggggcaaaacacaccaaatgattataatgatggatggctcaaattctcacaaaggtaaaatcatcactttcaaattgagctttcaaaactatcatgacatgtagagaagaatcaaggatttcaagtcacaaaatgtcaagaacttttattttcaaaacaattacccatttcttgaacatatcctataattcaaagaaaaacatgcaaagtcgtacgtgcacacgaaattgacccataatattaaactgaaaatccgacgaaactaacaatattaacaaattaacacaactaacaaattaacaaaacctacaaaactagcaaaaccaaagaacactccccccccatacttaaacaacacattgtcctcaatgtagcacaat

SEQ ID NO: 2689 - DNA, 259 bp, Glycine max
aacatcgaggtggaaatgagcgatgtatcttaaggtcgagactacatatggaaatgtataatccaccactcgacaagctttgccacatgatatctgcaatcaacagtacccggttcatttgaatacctcatgacaaccgatatataatctgcagggcaacatcggggactcgagcacgattgctagatattggtgccagactatatgtgacaatgtgtaataacacttcgtctgttccgtattagaccaccaacaccca

SEQ ID NO: 2690 - DNA, 476 bp, Glycine max
tgcagtagatgccactctactctaaattcttgaaagatatgttaacaaggaagcataaatatattcatcaggaaaacatcatagtggaaggaaactacagtgctatgatccaaaagatccttccacccaagcataaagatcctgggagtgtaactattccttattcaattggagaagtcaatgtgggaaaagctcttattgacctgtgagccagtgtcaatttgatgccactctccatgtgcagaagattgtgggagttggaaataatgcccactcgaatgactttacaattagctgactgttccattaccaggccatatggagtaattgaagatgtgttggtcatagaaaaacattttatcttcctgacagactttgtggtaatggatatctttgaagatactgacatccctgtaatattgtgaaggccattcatgttgactgcaagctgcatagatgatatggggaagaggaag

SEQ ID NO: 2691 - DNA, 451 bp, Glycine max
  unsure (1)..(451): unsure at all n locations
gacgtcttctncatcttctgtnnctcattgatttatatctaataatgaaactgcacaggatacatagcctacagtgtcaatgctgccccttcgtccagtgaatcctgttcaagcaaatgtgatacatttgaacaatctctctcaagcacgacaggtgatgaactctgctgccttaagtggtggaacctctatgggacttccgtcaatgggtcagactcctgttgcatgcacatgtcaaacatgatatctagtgggatgacatcttctgtacctgcggctcanaatgtattttcatctggacagtcaggaataacatcaatgactaattctggacctcttactgttcctgcacagggtggacaaaattcaggtctcggttcattaacttcgaacacttctaatttgtcttcaagttcgaacattgtgattcacaaccattgtgtaatcttca

SEQ ID NO: 2692 - DNA, 400 bp, Glycine max
  unsure (1)..(400): unsure at all n locations
catatncctttatcataatttgcttgatatctattctaaaaataaattctaactcatagaggagaaagtagaacttgaacaacatgaaacaatgaagattaatgaaagagcgtgatagcgaaaaggttaatatgagaatctcatgtcattgaatacaaatttttttatacaaaggtgtctttataggaatgttgtctgctttacatccatgtgccatgctaatgttatcttgacaagactgcagaataagttattgatatgacatatgtcatgactttaactgactaatgctcttggtccaaagaatgaagaaaaacttatagtttatatgctgcttggctttctaattagttgctttttctcttttcgtctatatcttatcctcatctttaatcttttt

SEQ ID NO: 2693 - DNA, 298 bp, Glycine max
  unsure (1)..(298): unsure at all n locations
aaagcatttgagtgaagcaatatatcagctacacaacttcctatngcatttataggtaagcgttcctatatcatctctggtgtatgctgggatcttataggttatcattctactaagtagcacacttctaaacaaaaggctgattccaagtttcatggacacatatatgacgcatattaaacgacaaggacaaatatatgacgcatttattgaaggttacctgcaatggaactagactcttgaaatcatacctgatagtgtgattcaaactgatatctcttctgcacaacggggtgag

SEQ ID NO: 2694 - DNA, 422 bp, Glycine max
  unsure (1)..(422): unsure at all n locations
tgagccaaaatcctgactcaccataaaccttaccctcggaatctatatagaatagaagggaaatttccaatcaaagaaaagagaaggaaaatttccaatgaaagagaaaaaagaaaagaaaggaaattcccaatcaaagagtgtgagaaagaaaaaagaaaaggaagaaaattcccaaccaaagaatgggagaaagtaaaaaaggaaggaagctcctggtcgaagaaaccagatgaaatgtgcagagaggtctttggaccagacgatatctgaacagtacagaatcgtcactaaatgaacaaaaaggaaggaaaggaaaccacgacctanaatggtcttctccctttaattaccaaccaaaatcccgtgcgctagcgacctttttttctcgccccgcactatacaaaaanaaataaaaaaaa

SEQ ID NO: 2695 - DNA, 417 bp, Glycine max
  unsure (1)..(417): unsure at all n locations
atcggacatccgtgtgaaaagttatggccatttgaatnttacgatagttattgatgtataatttcgagcgtatcgatatattataagcctgaatcggacatccgtgtgaaaagttatgaccatttaaatttcacgagagcttccgttgttcaatttcgagcgtcactatatgtgatgcgcctaaattggacattcgagttaaatgttatgaccatatgaatttctcaagagctttcgttgttcaattctgagcgtctagatatgtgatgtgctcgaattggacactcgtgtgaaaagctatgaccattataatctctcaagagctttccgtgttcaatttcgagcctctcgacatattatgcgcccgaatctgacatacgtgttgaaagtttgaccatttgaatttcatgagagctt

SEQ ID NO: 2696 - DNA, 440 bp, Glycine max
  unsure (1)..(440): unsure at all n locations
tgcctgtgcgagctgcaaccgttctatgtggccttttgcctataaataggcatcctaggggtgttttaaagggttaggaggatcaaaagtggagggaattgagagaattaataaagaaaaagaagaagaaagaagaggaaacgaaaccgaggccttaccaaatcgcaactatgatcgtccctacgtcgtttctcgttcggtgttcttcgcaccaatcggttagttttatttttagggatngaatgtgatctatgtacccttatgggtcccctttgttattatgtgcccattcatcttctccatttattatgtgtcattattttctcctatttcttccccctctttgtcaccattttaattactaattagccttaattgtcaaattaattatgccagtttatcatttgggcctacatgacctaatttgtgttttaattaat

SEQ ID NO: 2697 - DNA, 466 bp, Glycine max
ctgagccaaaatcctaacacaccatatttcttgacctgtgatgtataattccatcctcgcccttggaagaaaacaaaataagaaaaagaaagttcctgatcaaagatcggaagaaaacaaaatagaaaaaagttcccgatcaaagatcggaagaaaacaaaagaaaaaaaagttcccggtcaaagttcagaagaaaacaaagtgaaaaagaaaatccctgatcaaagatcggaagaaaatgaaagaattatgtagaagggtcttctgaccacacaaatatccaaacaatacaaaatagccatagccagataaggaaataaaggaaaccacgacttgaagtagtcctctccctttggttaccaaccaaaatcctatgcgctaatgactgtcttgccccgcactaaacaaaaacagaaaagggaaaggccaaaacacttagagccaaatttcccaccaaaaacactat

SEQ ID NO: 2698 - DNA, 335 bp, Glycine max
gctcatggtaattgcttgatgacaagcaaatccaagagatgatatagaggtaaatgacaatggcatgccgatggctttatggatgtagataatcatatctatatagatggatctcatatatctatatatctcgggtgtaaaggttctattatagggattcaatcaatcaaattaatttgattctcacagtcgatcatcaattctaaccacatgttatgtcttcatcgtattatcatggtcaaaatcataatcaaaattaatgcagaatggtacccgaattagtcatgatggaattgtgtttatgacctttcaatgtcgagaattatatgctcctc

SEQ ID NO: 2699 - DNA, 458 bp, Glycine max
cacgtttcaaactcaaagtatattacatttacaaacttaaataagaaagatcttcacatctataaaaagacttaatgaacattaacagaaataaaacctaccagaacctgtaagtgaaagaaaatatacagacccatgtaaactatagaacatagatctaaccttttaagtggaaaataacataaacgtagaagtatgcaaatgaagatttaccaaatgaattcagtaatagcaactttacctgaaagtgtaaactgttaatgcagcacccaatccgccaaaacaatgggaccatgatcctctggaactctaccatgttaataacttccaaaatatcttccagttcacccagaaacatcacctctttctgactatttgttgctggccaatatttcaacaagccgcttatcacaatgctcgctaactttggctccttctctataaactgcataacacag

SEQ ID NO: 2700 - DNA, 232 bp, Glycine max
tttgagggtctcgatagattacgggactcttttatacatctttttaacaagttattgtcggttgaatgtgctcagatcatcaacattcaatttctagcgtgtcgatatatgactggactcagtcagacattcgagatataagttattgtcgtttgaatttgctccgacaatcaacattcaatttcgagcgtcctgatataatacgggactcaatcagacatcctagtcaaaa

SEQ ID NO: 2701 - DNA, 468 bp, Glycine max
  unsure (1)..(468): unsure at all n locations
tactcaagctcgagcacctncttccttacctcttncttcattgttgggtnctttcttctctggggttgtcggactggtctgtagtcttcttccatcattatcttgtgcatgcagtaggcagggctaatacctttaagatccgatatatgccacccaattgcttccttgtgtttcttcaaaatttctactacactcgtttcttcatcggatgtgagtgtattgctgatcaccatatgcttactctcattcttctttaagaacacatgcttcagatggttgggacatatcttcaattctaccttcttcttcttagatggagtcttgctctttagtttctcaaaactggccttctcctcatggatgttatcttgtcgatccaagtcttctaagcaagccttgagatcttcttctttctcattgggtaggcaatctatccgatcaccatggctctttcagctaagtctgtgc

SEQ ID NO: 2702 - DNA, 502 bp, Glycine max
  unsure (1)..(502): unsure at all n locations
tctatgccctgtanacgtcgcattcgtnaccatcatcacaactgcatcggattctccaaagcggaaacatatgcatccgttaatcacncacagcaaaccgggtggcttatgtgagagatcccatccacgataactgtggtctaataccatattgttagaatgctacgacgatataactgctaatattgtgatactcatgcgcacatagcaagaatgcttaatacaaatgtggtttagcatatgcgaatcatcaatgaatattatcgctgttcacggcaattgtaacccctacatccacacttgaacacggttctatcttcagtaccttactcacaaatgcacatcatacagctgcttgacttctatggaagttttcattccctcatctcacttgcactcagaaattatattcgatcacaatgatctaaggaattgtctacattaagacactgatgaaactatttcaccactctagtacaatttggtctacacaccaatggct

SEQ ID NO: 2703 - DNA, 256 bp, Glycine max
tgaacaacgataactctcgagagattaaatggtcatcataactagtcacactgaagtacgattcacgcgcatactatatcgagacgctcgaaatctaaccacggacgctctcgagaaatccaatggtcataacttttagcacgaaagtccgactcagttgcatgttatatcgagacactctaaatcaaacaccgagagctctcgagaaattcaaatgatcataacctataacacgtaggtcatattccgacctata

SEQ ID NO: 2704 - DNA, 93 bp, Glycine max
atactcaagcttgtagtttccaccaagaactaagctagccaagtttagtgtattctctcttttcaatcatattcttgtagagtgaataggcaa

SEQ ID NO: 2705 - DNA, 244 bp, Glycine max
ggagagaagtggactttgaaatattctcataagactctcattcatcaaaattcaacatgtgtgactcacgcttctttttatagactatgtagcaccctttgaaagcattcctgagaaaacttactcgagaagccaattttataaaacttcctggataaactattgcttagttacaacacaccctcttcataaataagctcacctccttgagaagcttactgaagaatattcctaaagatgctag

SEQ ID NO: 2706 - DNA, 414 bp, Glycine max
tgcagctgttgcggtagctactctaatttgcatcacattgctttgcatggcaaaagctcatatccaaagatccaatacttttatgacatactttaaaacggtgacgttttatgttacctctggagtattggcctcactacttacttatgaagctggagccctaatgaagaaacttgtataacagctcggatggtttgaaacaaaatcaaactttggcttgactcttcctgagatgatgagtataaagatatcacgatggggttcgtactaaaagtaaaggtgatggcgatgtttttgacaatcatcatgtatccattgagtaataatattgtcatgcttcaacatagattgtcaatttttaatgcggagttctgactacattttaatatatggttagttatgttggttggggac

SEQ ID NO: 2707 - DNA, 431 bp, Glycine max
  unsure (1)..(431): unsure at all n locations
gtaaggatcgattgaataagtgtaaaagtgtattgaaaagataatcaaagttcttgcttntatagactctgcatgtntggccaagaggaccatttagaagagttataacttttagaaaaacttaaaaccaatttgaaaaagtcaaaataccttttgatgagttacatcttttgatttattcagaaacaaacactggtaatcgattaccaaattagtgtaatcgattacacaaagctnttgtgtgaaaggatgtgactcttcacatttgaatatgaatttcaacgttcaaaggcactggtaatcgattaccaaaacattgtaatcgattacagctttgtgaaattaattggaacgttgtaaattcaatttaaaaactttttcaaatccattttgctactggtaatcgattacaacaatatggttatctatta

SEQ ID NO: 2708 - DNA, 445 bp, Glycine max
  unsure (1)..(445): unsure at all n locations
acacgtcctaacatgttatcaaaatctatcctagacttttngatgagtttgagaaagggagttggaaaagtcacttaaataatagtcagcataagaaagagagttgaaaaagtcacttaaataatagacactcctaaatagaagggtgtgttgaaaagtcatatacaatatataatcatggataaaagttgcacattgactaaatataatgtctagataaactcttaagttaggttcacaaacccactaagcctctgggagataaaccggagttatatatatcagctcgttcgcatagcatatgaaacaaaactagaaacaaacacatgatatctagtatccacctccattgcgtgctctgccaatccatcactaacttgtatggctcctttatcaatgaattcattcgatatatactttagtcattcacatggctccctattaa

SEQ ID NO: 2709 - DNA, 464 bp, Glycine max
acttcctgtgtttgggaacctctcctgcctcaggtgtttctaaacccaatcacctggttcaagcacgactttctttctgcttttgttggcttgccgtgcatagctcgcatttttcttttcaatttgaaccttcacttgctcatgcaacttcttcacatattcagctttagcctgtgcatccttatgcttaaacatagcaatgttaggcataggcaacaaatcaagaggagtcaaaggattaaatccatacactatctcaaatggtgaacaattagttgtgctatggacagcccgattataagcaaactcaacatgaggcaaacaggcttcccaagatttaagatttttctttaaaacagtcctaagcagtgtgcctaaagtcctattgactacctcagtttgaccatcagtttgtgggtgacaagtagtagataacatacaattagtaccaatcttaccccaca

SEQ ID NO: 2710 - DNA, 462 bp, Glycine max
  unsure (1)..(462): unsure at all n locations
gaatgaagctctgataccacttgttagacaagtggcctcagatatcttaagaaggggggttgaaaaatgcaagttacaagttcccttaaaaaatgaattcttaaataatgattcaaataaaacaatctgaatataaatccaaagcaataataaataaaagagtttaagggaagagaaagtgcaaactcaaatttatactggttcagccacacccttgtgcctacgtccagtccccaagcaacccgcttgagagtttcactatcttgtaaaatccctttacaagttctgaacacacaaggacaatccttcctttgtgttcagatatctttacaacaagagactctcggtctctcaatcccttttgagaatttagaaagaagagaagaataaatctttcttgaaatagatagattgtacaatctgagcactcacataatnccttattgaattgcaagtgtattg

SEQ ID NO: 2711 - DNA, 480 bp, Glycine max
  unsure (1)..(480): unsure at all n locations
cactgaaccttgctccaataatgcaattcaatccatttcaaattcctacataataatccatcaataagcatatgagatatagcaaagtgacaagttaaagagagcaaactataaattaaaagtttacataaaaagggcataaacaaagtcctaaataagaaaaagatgagataattgcctaaatccacatgtctcaattaagtatttttggaaataatcaactcccccaaacttgaacttttcttgtccttatgcaaaagtaaaaaactcacactttgacatatgttgagatccatcctatcctaacatatctaactcattcattttttagaaccaagatcataaaaaaggaatgggacaaggacttaaatgatgtcttccttatgagaccacaacaaagatccacaagcttataattcaaggaaaacaacaagtgagttagtgacaaatngaacctgtgatcaatggtgaaatatatgt

SEQ ID NO: 2712 - DNA, 435 bp, Glycine max
  unsure (1)..(435): unsure at all n locations
ngtggtggttactcaatgaatgtctaggctattctttcctattctcttagctcagctnagctacagatactgaattatggcttctacatgtggcccgcatatatataatatagcgctaccattgtgtctaagcacgcaagttattatgccatagacatgcttaagttttgaaaaagtggtccttcaacatatagatgggatgggattaatggccagtgcattaattaagagggactaagcttattgatcctctgacatacgctcgtgttttcccgtggcaaatgcatcgacttatttcacatttaagtgtcagcatatatctgcacaggttaatggcttttcgcagtttagaaggcgcaagttctgattatctgatcctatgagttggattgaagtaaaactaggattatcggtctatatatatagatatatata

SEQ ID NO: 2713 - DNA, 430 bp, Glycine max
  unsure (1)..(430): unsure at all n locations
cttaggatggatacctctaaaagggcacatgatgtttcataatttctttcatcttatatgactaagtaagtacttttcaatataaaaagcctaaaataacatnctttactatctaatgtttgtttagtcaaccgcacatgacaattttcaataactagtttctttnttgcaggaaagaccaatttttcaatgtttcataaatcaatagctcagggcagaaaatgtctattatagtggaagatgaagaacgatgtaagaagaattctgacaaacgggtctataatcttaaatggttttgaattctgacatttatcatgtgtttcaccttattccttcttggtgccactgttgtaaaggacaaactcctagatggggcgggttagaatgacaatgcatgttatagtgttgtatttggctactattgcatact

SEQ ID NO: 2714 - DNA, 236 bp, Glycine max
  unsure (1)..(236): unsure at all n locations
gctctctgaagctaaggatgggaaagacttagaaatattntcaagctctctaactcactcagcgcgacactcgcactaagcgagccatagcctatgcactgagcgaggaacactcttgctaagcacgccaacccctcatctagtggctgttggggtctttctaatctaaaccatcacgctaagcccataaccatctctgggtgtgcatttaatgaaaatgggctaagcgagacagc

SEQ ID NO: 2715 - DNA, 470 bp, Glycine max
  unsure (1)..(470): unsure at all n locations
ntacactggtcgcaatatatgaggctcttcaaatctcctntatcaccacatattagacatatatgttcctgtcaagttcattgaaacaattatggacacacattctaatattaggccatgaaacaagctataagtataaatgttcttaagataaaggaaaaacattgtctatcaatagtcatagataaattctaacttgactgaatatatacagtgaactgcacacaaagtcaacaaaacaatcacaagacccagtattcattattgcttacatatccactaaacatattaagaaaataagggcgacacaacaatcaacaaaatgtaaaatcaaatattccttagcatatctcctatcggaacacgttaacaaataagagcatnggcgttctcttgttcacctaaagcaactcaaatgtgtgttcattacaagttacaacaatgtttctatgaaattgcaacttatagct

SEQ ID NO: 2716 - DNA, 463 bp, Glycine max
  unsure (1)..(463): unsure at all n locations
ctcagctatccacaataatgttcaaatgttaattaatttcatttattttcaaatctttcacactgaaatgctatttttttctttctcagcaaaagtggtgaagctctctctaacttttagacaagggtacaacaaactatgaaattcttttttaactctcagtttttattttgcactttttatttaggtcataaatataacgatgagggatagtaaaaataaaagtgtactagtaggtaaaatatgccatgaaatgaaaatagataatttcacaaatatctatggtttgcagtaaaataaattatntttcctctacttgcttattaatgaagcatggataagtaacaatgtacacgaacctacgggtacagtaatntgaaattacttaatttgttctaatttaattaaaatataaataattcagaattatnntattntagtttaaatatatgttngaaaagta

SEQ ID NO: 2717 - DNA, 273 bp, Glycine max
agtgatttactaatctgatgatcaaacccaggttgttaaagacttcataccttgtggagccttgctggaagaggattgaattcttcatataccctgtttttcaacccattctgaatttaccttgccaatatctgggctaactcatgtacgcctaaataaggatctgacttaatgattaaacgagacttcacctgttggatattattggacatgactagtttgatttatattttcacacattactcattacatcatttcatttgcaaaaacttt

SEQ ID NO: 2718 - DNA, 412 bp, Glycine max
cgaaggtgcgtaacccaccatcttatcatactggtaatgtgtctactatcattgtcatcattgcttttctctgtcattgaggtgctacttgagctgccaagtctctccatctttgggcgtatcctttgaaagatccgtgccctctttttgcgcatgttctatagttgcatcctattcgaagccattatactgacactgcctaatgaaggcaaccattaggtccttccaagagtggactctagaaggttccaagttggtgtactatgtaacaactaccccagtaagactttcttgtgaggaatgtatcaacaattcctcatcttttgcgtatgccctcatcttccgacaatacatatttagatgggtttaggggcaagtgatccccttgtacttgtcatagtccagcaccttg

SEQ ID NO: 2719 - DNA, 81 bp, Glycine max
tctcttgtatcatagtgagagtgattctctaaattctcgagtgattcaagaacacctaggctgtatcagaggactttcaca

SEQ ID NO: 2720 - DNA, 110 bp, Glycine max
agatgaggaagtgttgaagggtgagacttcctgcttttattctttgaccattaagtggtacctggagatatgtctcgtgggtcatgagacctcttggacttcatgtgggg

SEQ ID NO: 2721 - DNA, 388 bp, Glycine max
  unsure (1)..(388): unsure at all n locations
acatgcctcatgacacctaagtatacttagtggagaatcttggacatgatattggattagtgggttgaaccatagctaaaattcactaatcataattagtgaaaatttggctccacaaattcaatttcaaattcaagtgaaatttggataaaaattcaaatttccctctaattatgtgtgacacttataaatagaggtcatgcgtgttgtatttttcaactctgatcatttgagaattacgctncaaagtttagacctcatttgaggcataaaattatgtgctccttctccctccactcatcttctcctaccttcaaactcttatccatggcttcctatggaggtgagattgttcttgactcatcttctccttgaagtgacgtctcca

SEQ ID NO: 2722 - DNA, 429 bp, Glycine max
tggcctcagcaaatacctgatttccagaatgtaattctatctatatacctccaatcttgaatggagagggttaccactactggaaaacccgaatgcatattttcatcgaggcaatagatctaaatatctgggaagccatagaaatagggccttatatacccaccacagtagaaagagtatcaatagatggtagttcatcgagtgaaagcataaccatagaaaaacctacagatagatggtctgtagaggatagaaaacgagtacaatacaacctattagccaaaaacataataacatctgtcctatgaatggatgaatatttcagagtttcaaattgttagagtgctaaagaaatgtgggacactcttcgattaacacatgaaggaactacagatgtctaaatatcttcgataaatgcacttactcatg

SEQ ID NO: 2723 - DNA, 426 bp, Glycine max
  unsure (1)..(426): unsure at all n locations
aaccgatgacattagagagaaccaagtntctattgtcatgaanggtggcgaaggagacacccaagttagaatntctagagtcccacatggtggaacccaacccattaatgaggacgaggttgtcgatagggaggaactggagggatacaatggagtcgatgacaacactatttatgatggactagatggcaattcgtgggggctagggttcatggtggtggcgctacttggtggaaggattcctctttccactcatatatagatatggatctggaagacgatgataatggtgagaggcagaagtttatgaaatgaaattggcatgagttcatataagtttagggcgagaggttcgtacctttgtcataaatggagatgaagggtcactaatggtggcaatgaataatcttacaaacaacgccaatg

SEQ ID NO: 2724 - DNA, 465 bp, Glycine max
gacacatcaatctaagctttcgattcatcatgcacccgagtggcctacatggtttctgcattaaattctcaggtgttactgttataccccctgttgagtgcttaagccgtttacttaagtcatgtctcgcttaacttaagaataaaataaatcttcaccgaacgtttgaattatattatccgttaacttctgttaaaagtaataccgaccgttcggtcgtgccgtaaccacgtttggaatcaaaaagaggtaagaaataatgtaataatcaataagacatgctttagtaaaataaagcggataatcaatcggacgttttctcttcgggatttctcattcttaatcgaattgagcgaattactaaagtgaaactaatgctaaaatcaactcgtctagtcaagctcgtgcacataaataggcttctgaagtttgtcattacaatttcttactaagtaaaatggatca

SEQ ID NO: 2725 - DNA, 372 bp, Glycine max
  unsure (1)..(372): unsure at all n locations
tgcatggcaactacaaacgggtagtccttctctctcttatgttatgcatgtanggggatgtcacatatgtggaggaacacatgagtcattgattatgcattgtccaacacgactcatacaatgaatttaactgcatatgcagtcataatcatcaaggattccatttaagatgaccactatgatactatcagagcggcgattttatgcaggaccacaattggagatattatccaagtaataactgctaccaacgcggtttaccctatcaacatcctaccccgtggccgagtcaagaagagaagcccactaatatataagaatcgctgatacatatcatgcaggaaacaatgtcacatattaataggactgatg

SEQ ID NO: 2726 - DNA, 478 bp, Glycine max
  unsure (1)..(478): unsure at all n locations
gacactataaatctaagctcaccttctggcctcctcatagttgttgcatgagaaaacatggtctatnttcatctcccactccaagtaggcctccggatcattctttcctttaaatggaggaatgttgagtttaataccatcaattcggttttgtctaggaacaccatcattccctcttctcctcctttcttcttcattatgatctctattctccatttgatccaacctctcatggagcgcatcatctcgttgtttcattaacctctccaaatgttgcatcaacgcttgcatttggaattgcgaaagccccactccatcattaggattagtacctgacatctcaaacaaacaaatcatacgtaacatgacaattatagttgctgtttgaatacctcacccactcaagtgtatcacacaattatggcttttctctaatgaaacactcttngcctttaccactctaattccccttgagttc

SEQ ID NO: 2727 - DNA, 468 bp, Glycine max
taagctccttcaactgcacaaggctcttatatattgatgagtatccttgtagaaccttcacccgacgaagacactgacaaaaacttatcttctccttcttggacaaagtatggcaggctgggggcaagtaaattatcttcccatcagaccttggatgcaactatgatctgatacccatatcagttagatcttgacgggtattcaagccatccttcgtcttgccttgaatgttaaggagcgtcccaatcacactgtcacaaacatttttctccacatgcataacatcaatacaatgtctaacgtcaagatcacaccagtacgaaagatcaaagaatatggacctcttcttccatatgcaactctgacttttatccttcttttgggtcttcccaaatacagtgttcatgtgttgaacccgctgatataccagctcaccagtcaacggtatcggcgcaatatcatgctctt

SEQ ID NO: 2728 - DNA, 459 bp, Glycine max
  unsure (1)..(459): unsure at all n locations
ntatccactatattctctntctttacataagaatctagcaaagtaaaatgaaatatgaatntatcgaagacctcaacacagatcgtgatgattggtttctaaaagtgtgtattgtttgattgtggaatgtttatacaaaacaagtgagcaacataatatgatttcaaaattcaataatattttacaaggagagaacatatacactatacataatttaaaaattgtctcagcaaatgatgcatacaaacttgtcaaaggaccattcaaaggattatttttacttactattgttgtcaagaaaatcaataacatatccattagcattcctctacactattttgagtntggttcaatggaaactttagctcanagggtggatgatagagttgtcttaacatgtaccaacattaatttttgcaaattcataactaatttatttcactctaacatatttcatat

SEQ ID NO: 2729 - DNA, 430 bp, Glycine max
  unsure (1)..(430): unsure at all n locations
tacggacactatgaatactaagcttctcatagtcctaaagactttaagctagttttacttatctttacctccatttcgcacagaattcagactagcctttcaaccctcaaagtctactcttttttttccctcataacatcacattctactttctaaccctacgtagttctacccttcgtccctaacagatatcatcagcaattcagcatataaacatcacaaacatcatcacaaaaaccctaaaacagaatggtatgttaactcatccaaacatggaattcaacaagcttcaacaaatgtttacaaataatcatacacagcgaaccctncaagatacccatcatatctccaaaccccataccccgaaattaagagagaagaagtccccaacctgatttcaagtccactctgcccgccttacgatcgggat

SEQ ID NO: 2730 - DNA, 108 bp, Glycine max
tctgttggtttgttctggagcgtgcagttttactacagagggagtgtttgttgacttgccccagaaattagacgaactaaatttagcaatcgagtgttacagacttgt

SEQ ID NO: 2731 - DNA, 485 bp, Glycine max
  unsure (1)..(485): unsure at all n locations
cgcgcgcgtatgaccatttgattggtgcattgcaaancnntcattcttagcgctgccttggacttactcgccggccattatgatgattttctttcttccactcactaggggcagctcccaccttatgactactatacccggcatgactattaggaaggatattcccatcttcgtcctctgcttcatctgtaagatcctgtcgcctctgaactaccccttcacacaatgtctgccatattccggttcgcccacacccgtagaataatttgtatcttcctggcagatataggaagtataacgctcttgacagaggttgatagcttctatggcccttgacgttcccattcttgatctagcagacaatgttagtacccgattttacatctcccagatcataagaccgtacttgattagacaatggactatagccccgagggttctttgatgattgttaaaatgtgagattatgcgtccacccttacgct

SEQ ID NO: 2732 - DNA, 473 bp, Glycine max
  unsure (1)..(473): unsure at all n locations
gtgcgagatctntaggttctatacaagaatccattctctacccttgatatctctaccacacctttattgcaagataaacacaagactagatcttaagctcaagatctgacattatagttgctcttacaatttatgaataaactactccctcttccatccccaagactttttttcaattttatttatccttttctattctttttaagttgttttttttaatgtaaattaattattnttatccaaatactcatgttaaggatagattcatttattacttcaagaataactaatcttcactattcattttattgggatataataattaatattagttatttattaccgctattagatcttaagaaattgaatggtgattcttgaatggtgaaaatgaaaagtaactctaaaaaagtttactctttgggtaaatacattatgtctcttataaggactgaataagaaaattaacacat

SEQ ID NO: 2733 - DNA, 465 bp, Glycine max
gctatccctattgaactgccatcatcaagcatgcttttattcgagtttcttcatcactcacagtataaaacacctccaacagtgaagggagtttttccttattcaatatttgaacccgaacccgaatatgatcgtactcatgattcaagcccgagagaaacttaaagattctctcttgctcaataaactgagccaatgcaacggagtcagcattgcatttgcatgtcatcttcaaattctgatattggtcgaactccatccacaagccactcaaggtttcataatattctgtcaccgagaggcttccttgcttagtcataaagatctggctttggatctcatgacagacaatgatatcattctttacatagtatatgctggcaaggttgtcacaaatttctcgagcaccggataaatattgaatgacaatataccatgtatatagtaaatacttcaaaaatgatg

SEQ ID NO: 2734 - DNA, 457 bp, Glycine max
  unsure (1)..(457): unsure at all n locations
taacaatattacaaatctcaatatacattgccaagtgtgagtatggatcttcatttggtaaaccatgtaacacattgctctgtattagctatatcaatgaaggtgggtaagttaagttttgtgcctgaacctctggccgcgcaacacttgagaaatattgcagcaccgaagtacttgagtaatcttcgaaggtcactcttcgaagttgctcttcagccatgacttcngcttcaaattctattgttttagattccctggatgtaggtgagctagaagatgatgactcacaaaagtgagcctgatgcaatccatcctcccaagggtattggatagaagactccaagaggattgggctaaagctgctaaagaaggccctgtggttctcatgaacctcacgatagatttctgagcccatgggccaaggttgggtccattctttcttgtaaatattagaata

SEQ ID NO: 2735 - DNA, 430 bp, Glycine max
  unsure (1)..(430): unsure at all n locations
agtattngacagtactaaggaaaagattcataatatcaaagatatggaagaaggattctccaccaaccaaccaccactgttcagaggcataaaatatgattactggaaggagcatataatagctcactttgaatccattcatatagatctatggggcgtggtggaaaatgaagattatattacatacgatgatcatctcaatgaaattcctagaggccaatggacggaggagcaaaaactcatattcctactcaactccaaggcttggatgtgatgttgtgtgccttatcagaagaggagtacactaaggtacacaatttcagaagtgccaaacatatatgggacactctagttgtacatacgaaggaacatcacaggtaaagaggaacaaactcagtctcctcactcgaaagtataaaantctctctat

SEQ ID NO: 2736 - DNA, 458 bp, Glycine max
  unsure (1)..(458): unsure at all n locations
tctgttctgaatntccgatgtctcgatatactactggccactttcagacatccgagtaaaatgttattgtctggatatactacgggacccaattggacatgcaagcacaaagttattgtcgtttgacttttcttagagcttttattctgaatttcgagcatctcgatatactacgggacacaatcggacatccgagtaaaaagttattgtcgtttgattaggcaaagagcttctgttctgaatttcaagcgtcttgatatactacgggacacaattgaacatctgagtaaatagttattgtggtttgattttgcacagagctttcgttctgaatttacagcgtcacgatatactacgggacacaatcggacatccgagtgaaaagttataggtgtatgtatttgctcgagcttcatttataatacgagcgttttgatttgtcgagacaaattagacat

SEQ ID NO: 2737 - DNA, 479 bp, Glycine max
  unsure (1)..(479): unsure at all n locations
tcaatctaagcttatcccttttcactcatgtgtccaagtctttgatgccacatggttgacttattgacaacctcagtaactgctaccatatcctcatctgcaatcatgtaaagagatcctcgcttctttccacgagccacaatgagattggcctttgttaccttccaagcttcatctccaaaagtggtgtgatgtccctcatcatccaactgccctttagatattaaatatctctttaaggcatgaatatgtctgacattgcgcaatgtccatagggatccactggaggtcttgatgttgatatcacctcttccgacaatgtcaagagaatttccatctgcaaggtaaactntcccaaaccttccagaaatatagttagacaataaatctttagagggagtagtgtggaacgacacacctgagtccatgatccatgaatcaacaggactatccannactgcaaataatgcatcatcaag

SEQ ID NO: 2738 - DNA, 464 bp, Glycine max
  unsure (1)..(464): unsure at all n locations
tctattgatttgtgctttagtcttaattnggtaaagaaaattatccatgtctccttcataaattacttgtcatatatatgtatgttggaatgctatgtgtaaccagtatccacttacacctagttaaatataggaggcaaagaaggataagatatgcaaggcttccatatatgggaagttacttagttgggacttgcaatttgtaagtgtatgctttaagtatctagattgaactttagtttaaatgctatgtgtaactagatagtatccacttacagaatttcataattgttggttggaaatagctagacaaattgtaattgcttttaaaaaaactattatttattaaaacagactctaacattgtacatggtatcataagtttaggagttagcttctcatatgttttctcttgaacctctatctgaacgcatccttatccaaatttggaacattgctctagt

SEQ ID NO: 2739 - DNA, 459 bp, Glycine max
  unsure (1)..(459): unsure at all n locations
ctcataggtgaaatcaggtgcagccatttcccttatagtcctctcacgaggtggaggttgtgccatgttctcagaatgtgcaaaatcagaatggtcagaatcagaatgctcaaaattataatgctcaagatcaggatgttcaaaatcaccaataacagaatgcacagattcaccagttatggaatgctcagaatgatcaaaaggtataaaatgatgcctaactaatctatgaaatgtcctatctatctcangatcaaagggttgtaagtcagatgaattgcctctagtcatacactacattcagcatgcacacaactagttgccttgtcatgtaaataaaggtgtaggtntgaactacagctaccctcaaatgatatccaaatgacttgaaattctgtgagcaaccttataaaatgatgagaagatagcacaaaaaatttcagacaaaaattcaaagtc

SEQ ID NO: 2740 - DNA, 463 bp, Glycine max
  unsure (1)..(463): unsure at all n locations
cataagtaagaagaaatattactaccaattaatagggttctattaacctccaaaaggtgtctattgtttctctcggctactccattttgctaaaggaaattaggacatgatgtttgatgaagaataccaacaaatttcataaanaatttcaactcatttttgtattatccccttcattattagacctgactatctttattggagtattaaattgtgtggttatcattttgtgaaaaacttgaaaaacattacacacatcatttttgcgtttaagaaggtataaccaagtcattcttgtacaatcacccacaaatgtcacaaatcatcgcatttcattatgtgtggaaagagggacaagtcctcanacatcatagtgaataatatagaagggagcataaactttattgttatttatagaaaaagtaacgcgatgacgttttgtcattacacaagantcacattt

SEQ ID NO: 2741 - DNA, 409 bp, Glycine max
  unsure (1)..(409): unsure at all n locations
agcttgtaataaaaaagataagaaaaagctatatatactcgtggattaaaaaagactttgtaaataaagtctaacagacgagacgagaaacattaattaaggatatatattaattataaacttttgtatagaggatattcattagtagtttatcattagactacattttacataaagtttgttnttcaactctgtaatgcatgccttatgacacttttaattagtatttttcttgttaatatcagtattcgaaattaatttttctttcaaaataaaacgtattcagaatcaattttaagtaacaagtaaaaaaaaattgaaaatatttatcgtattaaaaaaataaataatactatcataagtattttattttaaataaaaaattgtaactgtagttacctaaatacta

SEQ ID NO: 2742 - DNA, 452 bp, Glycine max
  unsure (1)..(452): unsure at all n locations
cttgaaaatctaagatttgtttggtgntccactgataaccttcataagaattttaaagatgtgattggataaatgttgatcttaataaaaattcaaataatattctttagtttatgagaaacgtactaactttttctattagatctaacttgatatatttttttttaaaaaattattcattcatgcatataaaaatatccctggaatacatgaaatacttgttaatttcataaaaaaaaaatacttactagttatttaaaaatgaatgcttaacgttgatttgagtagttacgtcgacaaatatctacttaagattgtcccaaataatttttattttcttcgggaagcattacgccatgcttatgtctaatacatgatgcatcccaaacgcaaattatctacggattaacagcgacataattacatgaaaaagaaaacaatagctaatcaat

SEQ ID NO: 2743 - DNA, 392 bp, Glycine max
  unsure (1)..(392): unsure at all n locations
agcttagactgagttcagcctaccatcctcttactgatgaccaaactgaacggaccattcagtcattgggggaccttttaagagcatgtgtcttagaacaaaaaggaagctgggagagttntcttcaattgatagagttcacttataacaatagttttcattctaccattggtatggctccctatgaagctttgtgtggttgaaggtatagaacacccctatgttggttagatctcggagaaggcctcacctcaggaccagaagtggtacaacaaaccactgagaaagttaagttaattcaggaaaggatgagaactgctcagagtaggcaaaaatgttatcatgataagaggaggaaagatctggaattcgaagttggtgatcatgtattc

SEQ ID NO: 2744 - DNA, 400 bp, Glycine max
  unsure (1)..(400): unsure at all n locations
gctagacagcccttgcgttcataatcagatttgtagattctacttgcgcatgcatatactatagntaaactattatacagatgatgggcataaacttattgaagcctaaagataaagagtatactgggtgcctgngtggtgatgtgctaagctaaaagcacggaatttggtacccttggccaagttgttttagttcacttaacctggttgtacagtgcatatacaagtctttactcatttaagaaattattacaatgtgtatatgctagttaatatcttgaggttttcgggcttcccaatacaagaataaagaatcagctgtaaaacttgattaagaatcagctgaagaccttggagctcactaagaatagtgtgattagaaaacttttcgcatattgat

SEQ ID NO: 2745 - DNA, 384 bp, Glycine max
cgcttctagccaaatggacttaccttgaattatttcctttgatatcccctttgagcctattttcccctttctttgttttgaagctcattacaagccttaagagaaaaaccatgatatcaccttacccttaaagaattttggagctttggaattgttctgggaataagtgtggggggcgggtatgtttcattggaagatatgattcttggccatgcttaatgttttattttggccatgcttgatgtatatatatattgcctagatctttctttaatcttcaatttcgtactgttcaataaaaaaattaaaatcaaaaatcaaaaatgaaaaaaaaatcaaaaaaattcagttgttgcaaattctgcaatttcgtactattcaaaa

SEQ ID NO: 2746 - DNA, 454 bp, Glycine max
  unsure (1)..(454): unsure at all n locations
gctcgggctagagctatcagatgtgcctatataggatatccatctggaatcaaggtgtacaagctcttgagaatggaaccgggtgaaccaaagtgtatcatcaacataagtgtaatctttgatgaaaccaaaatggctatgcaggttaaggatcaacaacaggctatcaatcaaggcaaaaacttagacattattgaagttgaagtggagctaccaacacaaagtgttcaagtcaagggcactgataatgatcaaaaacctgaacctgtagctaatgattacaacttagctagagacagagttagaagaaacattgtgccccttaggaggtatggaaaagttgatctaatctacttttccttgacagttactaaagagatntaagctactaaacctaccanacttagagaagtcttgaacaacanggaaagtgaagaatggatcacagacatgg

SEQ ID NO: 2747 - DNA, 361 bp, Glycine max
cactaaccaacataaccaagcgccattccacatacatagaccatacagcaaagaaccaaaccgtccttaatttattagtcttattttttttttcatttttcaatcaaaacaaacacatgcaattaatttcaaagactaggcctagcaggtctcctactagtctaaaaaaataaataattttaaatcctctaataatgttttcttaaaatttctctatattgttaaataaaatattttttttatgtttttaaaatgttaaatatatctattttataattgtagaaatatgatttggatataattatactctgaagaaattggtaagttaccaacgattctttccacatatatgtacaattaa

SEQ ID NO: 2748 - DNA, 393 bp, Glycine max
  unsure (1)..(393): unsure at all n locations
tgtgcattttaaaatggaattgcagaaagcaagtaaaagttgataccattaacagcaaaacattntatgcagctgccaacattttctaaatctacttatgaatactcaaatctgtaagacactnttgcatgatgcagtcataaactcttactacacaaataaatatataagtaaattaatcaagcagattattaaatgttttagacaaccaaatgatctactacttaaagaacatcaataaaatgaatgttattagtatgggtgtcagattctcagttaccttctgacgacagcatctcatgcacagaagcagcctaagtgactgttggctctgtcactcttcaagtcctcgaagaaaaatatgcactcatgcaagctcaaaggcatgataag

SEQ ID NO: 2749 - DNA, 395 bp, Glycine max
  unsure (1)..(395): unsure at all n locations
agctatgaccaggaattattggatgggttggtatgtgaattcaagttgttcctggtgcggagatgatggtacagcgggtgaaccagaagctgcagtttcttttggtgaggtagccatggaaaagcagagcgtttggaatgatttcgtaaatctcagaaaactattgngaaatgctggagataacacgaatgccaagcagatattaaattgaatgaagaatgtagaggggtgtgtgaagcaacggtcgaatttgctttgtagtgaacgtgctattaatgttaagtgattcgtttgggcacgttcagatagcagtagctgctataattcctctagcagacaaatgcccagcttgccctcagttttcaactgatttgcatcaagcctttggaaatatc

SEQ ID NO: 2750 - DNA, 384 bp, Glycine max
  unsure (1)..(384): unsure at all n locations
ntgatgcaacagttggagaggttaatggaagaaggagatgatgcgctccatgagaggttggatcaaatggagaatagagatcataatgaagaagaaaggaggagaagagggaatgatgatgttcctagacaaaaccgaattgatggtattaaactcaacattcctctctttaaaggaaagaatgatccagaggcctacttggaatgggagatgaaaatagagcatgttttctcatgcaaaaactatgaggaggaccaaaaggtcacgcttgccgccacggagttttccgactatgctcttgtgtggtggaacaagctacaaaaggagagaacaagaaatgaagagtcaatggttgatacatgggcggagatgaaaaggatcatg

SEQ ID NO: 2751 - DNA, 374 bp, Glycine max
agcttgcttgtggagcttttatatatgttggatctttgagcttcaatgaggtccttcaacggtgtttctccaccatggagatgcagcggaaggaaaaggagaataggagaaaggaggcaccatccactatggaataagccatggaagaaggagcttcgccaccaagaatgtgccttggataagaagcttggagaggatgattcaatggacgaaaagagggagagaaagagagagggggagcacaatattgaagaagaaaagggggagagacattgaactttgagttgcgtctcacaagactctcattcatcaaagttacaacaagtgtgacacaatgctttatttatagactaggtactttcctgaaaactttt

SEQ ID NO: 2752 - DNA, 397 bp, Glycine max
  unsure (1)..(397): unsure at all n locations
tgtggaaactaaataaacatatttaacatagaggacttaatttaccctanttgaagcatgaataaattgaagtcaggcggattgngcangacactcatgcatntactgtcaaagataatatntatgttangcattaaccaaggtgattctctttcacttttttctattgaaagattttcagattgcatgttggctaaggggaatacaggtaattggattccgatatctatgggctgaaatggaccanagatctcttttttattnttttgctgatgctaaaatattggtgccagaggctttgaccatcatgtgaatgtgattaaggatacgctntcaacatcnttgacaaaagtaatgatataaatccanctttatttctttttctgaaaatgtggat

SEQ ID NO: 2753 - DNA, 382 bp, Glycine max
  unsure (1)..(382): unsure at all n locations
agctttaaaatntatatatcannatatatacattttttaaaatttataatctttaaaaattgagcaaccatgggttacggtcagtccctacactccctatacttgtaagaattccactaacacaagcaccaatcatgggattcttttttttttttttctaaagcctccataagctcctacaccttagtattctctaagcctctataagctcccgctgagtattattntgaaaatggtctccaggcttcacttggtattctataagcctctccaagctatctgcccaaacattctttcaaaaagtcttgaatatagtcataagttttgctcctctttcacaaatgaatcttttgcaggatggtgttgatctctttatgaacgt

SEQ ID NO: 2754 - DNA, 326 bp, Glycine max
  unsure (1)..(326): unsure at all n locations
tgtcaaaaagggaagcaagttaaaaactcttttgaaagtaaattaaatgtttctacttcaaaaccccttgaactacttcacattgatctatttggtccctctagaacaatgagtttgggtggtaattactatggcttagttatagtagatgattactcaaggctcatatggactttgttttaaccaaaaatgaagcttttggtgctttttaaaaacttgccaaggtgattcaaaatgaaaaaggtctcaacattgtttcacttaaaagtgatcatagaggtgaatttcanaatgagtctttttgaaacttttgtggagaaaatgga

SEQ ID NO: 2755 - DNA, 408 bp, Glycine max
  unsure (1)..(408): unsure at all n locations
actggcaatggaacaaaacgcaattaatatatataattaattatgacctctctctgtacagtaaattaaaagagtgaactttcagtaacatcaattaacgttttcttaagacgagagctaaagatagatcatatgtagggaaggttctaattgcaacagctttgaattntgcaaacatttcgtgctttcaaaagccatacgcagtacgcaggcaacacttgcattgaagatagcaacaactgataactactaataaaaatgtttgatgacgagcataattgaattccttccttgttctgttaaatgattgaataaactccattaaaataagttctgatgtttatgtgaactgcgttctacgccagctaacgtataattgaataagtatcatatttttatacgcacttt

SEQ ID NO: 2756 - DNA, 424 bp, Glycine max
  unsure (1)..(424): unsure at all n locations
tcctctgtcgggtgagcctacgttggtttatggtacgtgatagagaagaaagcttcttagagttggtggcactcattgctgttgctaattgagaagaaggtcgtcatgtattgtgatatgtgagagttggtgtgccacggcaaagccagaagtgcccggcgaaggaaacacctacgctgcttctttgcctattcaaattgcctcttgggttgaacggcgaatattttcgctttcatggtcaacacttctgactttggattaaattaatcttgttaaaataagaaaggcctcttgacttgggctgtcaggtctaaactcaaacctaacctactacaactccacacaccattccgctccaaacttatctcattgggaccctatcaagtcccttgcttcacattttcattntttgcaatgtcatatg

SEQ ID NO: 2757 - DNA, 260 bp, Glycine max
  unsure (1)..(260): unsure at all n locations
taacatcggttttntaaataactgatgttaagaatagtgctgnggcattttcgtaaacaagttgacttcattaacatcggtattgaaaaaaccgatgttaactagttgatgtgtncctcgncnnnnccnnngtgctgggtgttcactcctcattcctctcttttaaggaaataatgatccagaggcctacttggaatgggagatgaaaatagagccatgtttntcatgccaaaactataatgaggaccataatgtcactc

SEQ ID NO: 2758 - DNA, 387 bp, Glycine max
agcttatgttgcaaacattttacaatatatccctctcaacctcagtagcaaaatcagccacaacatagtaattatgacctttccagcatcaggtacaatcccgagtggaggaatcatcccaaccttaaataggtgaatccttaacaacagcaacaacaacaaccttattgtaaaaatgttgttggcctaagcagaccatacgtgcctccaccaatctatcagcaacaacaacaacagccccagaaacaacaaacagttgaggcttcttcgcaaccttcccttgaagaacttgtgaggcaaatgactatgcaaaacatgcagtttcaacaagagaccaaagcctacattcagagcttaactaatcagatgggacaattggctacacag

SEQ ID NO: 2759 - DNA, 293 bp, Glycine max
  unsure (1)..(293): unsure at all n locations
tccacaatatccaagccattcttttccaactatcatgaactaccctaaaccaagaaaacagggcagaggcagaaaactctgcccaaaacacattcacatattatagcattccttactcaaataccccagtaacattctctttgttccaattcgttaaccgttggatcgacttgaaaattntactataggttcctagtacataaatctacagtntgaccgttgggatctactagaaaatgtctagaacccaatgtgtactacctttcccataaccagcaatgcacaagcatttt

SEQ ID NO: 2760 - DNA, 357 bp, Glycine max
  unsure (1)..(357): unsure at all n locations
agctttgctttcaagactagcacttcttcgctttcctcatggacttcagcttctttcccacttaggctntttagctttaagagccaagctatcccttgtgccctagacctcagccacttatgatagccgccaatgacactgttgttgcttcccctaagctccttatctttccttctcctccaagcgcttncttggtatccctaccaccccattcctattttgctttactcgacctaactcttgtgccgagatcctgaccacttttgctactcttgccatggaagggtagaatccagaataaagatatgtcttcctcccttctagcgggcatcccaagatcccttcgaactcttctat

SEQ ID NO: 2761 - DNA, 66 bp, Glycine max
  unsure (1)..(66): unsure at all n locations
agcaagcttgagaanttttgaacnaacaggcaatctctttcagtgtgtgtgggtggaggaggggga

SEQ ID NO: 2762 - DNA, 438 bp, Glycine max
  unsure (1)..(438): unsure at all n locations
gctttatgctctgaaacttatttttaaaatctagatttatgattcatggtaatatgtaaaatagattttattagttttaatatattttttttagaattaaagtttcatgtaaaataaaattttccctccattcggaaaagttgtactcctaatcccttccttgaaaatgcttttatggaaaagtgagttaaaattaattaggaatcataattttctgataatcttcttttattaattgcatgtcaaacataaaaattatagttntctactctaaaattcatagaaaaataaaaattgttcgtctagtgaacatctccctagtgtctttgtactaaaatcgtaatcgagtatcgtgaataaaaaaatttatagtatataatatanaaataagttggacatcaaacaatataatataataagcgaactttcatatacgat

SEQ ID NO: 2763 - DNA, 395 bp, Glycine max
  unsure (1)..(395): unsure at all n locations
agcttggagacaaaatcatgaaatttgggtgtcgccaattcnttggtgagaaaatctgccacttgatcacttgttgaaactggtagtagctttagagtgcccttcaaaagcttctctcgcacaagatggcaatcaatttccaagtgttttgtgcgttcgtgaaaaaccggatttgaggcaatgtggactgcgctttggttgtcacagtaaagagttggagttctggtaagctgaactctcaaatctgcaaaaagatacaacagccattgcaactcacaagcagctgaagacagagccctgtactctgcttctgaagatgatctggacacagttgcttgctttttagcacgccatgacactaaagatttgcctatgaagaaacaatatccagatat

SEQ ID NO: 2764 - DNA, 454 bp, Glycine max
  unsure (1)..(454): unsure at all n locations
ctaagctngaaaggattatgnacttgaccttgagtccaagacatttactaaaatttagctataaatcaactaatgaaagtgctcaaaagggtatatacaaccctccaaacttgagcctaaggataaatgaagtttaaagctaaataactcagaaagatatacatgtctccaaccttgagacttaaagtaaataaagcttaaaattgagctacaagtaagctaaagtacttaaaaagatatatagtaaaaaaaaatgtaagaaaattaaatgagctataatacaattaaaatgaataatcaaaccataatttaagtctagttatgcttttgttattaaaaagtantaattntagcanttttatatttattaaataaattatacgagtctcattaaaataattaaagcatatttcctagtctctattaacaagatcaaataaacttttacaatatt

SEQ ID NO: 2765 - DNA, 375 bp, Glycine max
  unsure (1)..(375): unsure at all n locations
agctnttagaaaggatacttataagttgcatttttaatgtacaatacatcccatttgcctactaaaataacgccctttttgcacatacctctgcgccacaaagagacaaaccaaaagcctcttctttttctttcctaccccttcttgcatatgtcatcttccactagaaaatcacatttcaactatccctattttatttccctttctcttttctaatcctaataattaccattgacataactgtattttccgtgcttcttgcttccaatgcaaatcccatccatccacaagtatgacagaaatacaagttgtcatgaaattgcactctatggcagaagtatctgcgaatgcgatatttttgctacctactataaa

SEQ ID NO: 2766 - DNA, 515 bp, Glycine max
  unsure (1)..(515): unsure at all n locations
cccctcctgaaaccttgattactgcnttgatgaacttctaagctcgctaagctaacacaactagcccctgctcgctagcaattctaaacaccatattngcaaatagggccattatatctggtgtggcatgaattttgggtttttaagccactttaaccttcattaaaacctaatgactttctcaacacataagctaggctcaataaaggatagatagccttgtattagctttttgcaacaactatgaatcgtcttcaatgaaattaagcattcaattaagtgatagcttgaagattctcttagttcttcactggaatcttcgattattatgaaagtgaagaagactcaaattggctgcagaaaaacataagaatgatattcttatttataatgagtatcaatgagggatacaatttataacttaatcgatgctaataataaatcgacaagtgtactcctctatgtctatganagtcanaacataactanacaagtttacaaagataatatctaan

SEQ ID NO: 2767 - DNA, 335 bp, Glycine max
ctctctcaccaacacccaatatatatcaataaagggactgtgccctacaatgctatcaaacaaacatcatccctttaacactgacactagacagtatagtaccacgcagggtgccctagcccaaagccttgcaaggcgttgtttgtttggccaccatatacattctagtcttttccttaccctaccatacatgtcactaacttcatgagcccatcaacaaatagtgagattgaacacatgaagcttacctcgacaccaacaactactatgtctacgacctgtcagcgagtgcgagtgaaaaagataaatcgtggcgtatagaggaacacctacat

SEQ ID NO: 2768 - DNA, 285 bp, Glycine max
  unsure (1)..(285): unsure at all n locations
ggatgagatccgaacaaccactntggtgttntacatgtatttctttaagtgttataaaccaatttgtagctgtaatgaccattatttgtgaataaaaatacatatttgtttatttcattttggtatgcacaaaaagatttggagaatgcattgtatttgcaatgggtatttgcatcgataggatatgtgttttttatgcaaccaagctgcccatttttgcaggtgcttggcaaggtacggattttgatactcctaatgataccaaaatatattcagtctaatatg

SEQ ID NO: 2769 - DNA, 388 bp, Glycine max
  unsure (1)..(388): unsure at all n locations
agcttctagaaagagatcaacttgatgttctatgcttcttgaaagnggcagtccatgaggaatctccttgganaagacatctttaaattcctgcaataatggttgaacactaggagaaacataaatagttaactgattagaattatcactctctctctattgagtatcactcttttcctcgggtgtatcactcttctttttcatattcctttgtggagcctcactattttctttctcttgttctctcttttctctcattctganttggtcatcacatgcttctctaggggatagaggtttaagagtaaacgaggaagatttgactattcgtctgtagggctcttctttgttacggttcaacanacgttgcatttgtatagtccacgcg

SEQ ID NO: 2770 - DNA, 193 bp, Glycine max
cacacctgaagactcagcttattaactcgggcctcaagaagaactttgtttcacaacttttaatattctagagaacgtttctgcctctgggacatcatacttctgcactcgggggctttgaccatcttcacttgggacttcagcaccgttttggcgagtatcatgaggctcatcacgtatttaaaaaaaaaat

SEQ ID NO: 2771 - DNA, 318 bp, Glycine max
  unsure (1)..(318): unsure at all n locations
agcttctatttgcagcatcagtgtattanattggtgngggagcacctaacaacacccagttgagacaacctcactcaagaaaataagataaagccaaaaggttcaatcatattaaatggagattaaatgggtcgaaattcttaatacgaggaaccaattagagaatagatggggagtattactcttagcaccaccaatttttctatttgcactactcatgggggtgcttttagttatattcctaaattatcccttgaaccgaaagacaatgaaaatgtatttccattacatgagtgggtgtgaaaaaaataataaata

SEQ ID NO: 2772 - DNA, 301 bp, Glycine max
  unsure (1)..(301): unsure at all n locations
cgacactctgaaactcagcgttgagtttcctataaactgagggagtggaattttccttgngttntggaaagaaagatgtttttgtataatatatatatatatatatatatacacatatacctatagatggaggtagatatatagggagatacatatatacaccagcctccttacaatgtggctatgtgaaaagggtcgcggacaccacacagccgctcgttgattacattcctttcagcgacagcgcttgtacaccactcttcacatgttcgctcacttggaatcagagagagagtatgtc

SEQ ID NO: 2773 - DNA, 373 bp, Glycine max
  unsure (1)..(373): unsure at all n locations
agcttccatcaagtgcggaccctcaaggatatccaccattctccccatttttcggagccccataaatgttattgcctagcgctattcatgtgtcctccaccttcgagtttggagctatgtntcatgattgcctaagtgcggaccctcaaggaaatcctccattctccccctttttcggagccccatgaatgttattgcctaacgctgttcatgtgtcctccaccttcgagtttggagctatgtttcatgattgcctaagtgcggaccctcaaggcaatcctccatcctccccctttttcggagccccatgaatgttattgcctagcgctgttcatgtgtcctccaccttcgagtttggagctatgtttcatga

SEQ ID NO: 2774 - DNA, 432 bp, Glycine max
  unsure (1)..(432): unsure at all n locations
ntcactaacttgtataacaggtattcttgtaattatgtgcttatagagactaatgctctctttatttctctctctcacacatagtatttgtgcttcctattttcaacttctgtggttgaatgatgctttctatattaaaaaaatcaattaaaatataatattttgttactaaacattaactaaaagaatttaaagaaattccttatgttgcctgcatgataagacnaagtgtgtagtatgatattggcatgtattattttaagaataagagtaacgactcattatcataatactagagtaaagaaagtaatggcacattccttttccttttcagcangtatgtacttaaagatatangatactcagaaacgtagaaatatagcattaaaagttcttagataatattttgattgattagtatggataactaac

SEQ ID NO: 2775 - DNA, 314 bp, Glycine max
  unsure (1)..(314): unsure at all n locations
agctttgtcttggacaaacacattataagcattttcccaatgtccaagacagcatttccttcatcatgcgcttggaaagacatttggtgtttggttccaatgatggcagtgctggaggatatcctctaacctgaatattaggtagcatcgaaatgtgattgttttctcaaatggaagaattgatgccaataagatgatggaggaggcgattntcttgtgctagacatggctaanaagtttgaatagggctttgatctacctttccatcaatggtctagtaaccttagagagacattttgaatcagggagggatg

SEQ ID NO: 2776 - DNA, 329 bp, Glycine max
  unsure (1)..(329): unsure at all n locations
ttgaataggagtggtgcgcggngtatatgttccatatacacatctttattgagatttccatgaaggaatacattataaatgtcaagttgttgcaaggaccattgatttgctgcagcaatggtcaaaagtaacttaattgtgtttacctttccaattggtgaaatagtggcaaaagtagttgataccttgggtttgagtgaatccacgaagcatagctttgagccaatacctttattntatgttagactatttattttaactattatgataattaacataataaaattataatgtctacttaaatatatgtttcttactttattttaaac

SEQ ID NO: 2777 - DNA, 267 bp, Glycine max
  unsure (1)..(267): unsure at all n locations
agcttgaaattgaacaacttatgctctctactatntcgaaagggcatagctttttactctgatgtcctattcggagacatgactcatttatacacttgaaattgacaacggaaactctctgaaaattctgatgtgcataacactttcctctcatgttctgatcgaggacataactttattaaacgctcgaatttgaacaactgaatctctcgagacatctgaatggcataacatttcactcagatgttcgattcggggatattattt

SEQ ID NO: 2778 - DNA, 431 bp, Glycine max
  unsure (1)..(431): unsure at all n locations
tggactcaaagagaaacttataatgactctagagtagagtttattaaccaaactaaaaagactcaagaaacctctagttttggaacttttttttcacacgaattttcaattgaaatttcagaactaggattggtataaaataggcaccaattatagaacaaattttgagccaaaacaacaagcacacttccctttcacttttttttcctgtacactgatttttctgccaacttgggtgatttttcttattttttcctttaatccaaatcgcttggttcttttttcataattttggtccagatgtctaganaaataagtaaaaatttcagcttaaaacacgtagtgaccaattcccagtctaaaatttaattggattgggcttctaccatttcattaaatttatttcccacacacacatcaaatattcactt

SEQ ID NO: 2779 - DNA, 79 bp, Glycine max
tatacaccctggagatgcctccgacagtacttgaaaataagacaggcgatgcaccatccactagggaacatgccaacat

SEQ ID NO: 2780 - DNA, 220 bp, Glycine max
atgaggatcaacatttttatgtcctacttacactatcatagtccgtgaatatgatatacctttactctgtgaaagtgaaatataccgtggcgatagctctaaacgcttgactgatgaactcaaagatgaacgtgtcgcgctttctatatctcttgctccttgagaataggaagatgtgccttcttccctcatattgagagtattgatcttatcaatgatg

SEQ ID NO: 2781 - DNA, 457 bp, Glycine max
  unsure (1)..(457): unsure at all n locations
cttctaattaattccgtcggngggactttcactccggcgacttcagctngaccgtcttattgattccacaaggncgattctgggacctgatggtaactcgtcattcattcttatgagaatatttcattcagcttacattcgatttgattgggtgagtcttgaatattggcctgcaatttttatttattttttacttttgatgaatttggtgtcctaaaatctgcccaattcatattaaaacaactactttgttctacattagccaaagacataaataattttttttgcagaaaataatagcatgtttttaaattacttcatgttctgcagattaattgcatttggaatatatgatggctaactaccacctttgcaggtgggataactatatttgtaatcttaaactcaaactcaacaatggttggcatgatttcacaccattgaagagcacccttca

SEQ ID NO: 2782 - DNA, 439 bp, Glycine max
  unsure (1)..(439): unsure at all n locations
agcttcccttacctatcaaactcaatgaacttgctatgagatgaagaaagnaaggaaatgaggagacttgnggtccaagatgcaagctttccctcactcctacaatagttctacatcatccacaccatccaaaccccaaaagccaacataaaaacatcaaaaccttggaagagaaatcttttatgaagctttgaaaagtgtccataaaggataacaaaaatgaggatgaaacgggaaagatgaaggtcttttacctatcagtccaaattcaaaaaacaaaactcagcaacaaggtcatttgtgttaagatttcgaggtctcacactctctaataatgagttgtcttagagagaagaagagagcgaaataaaagtgttncatgttgtagtttaagtttggatcaataaaattgagtatatgactcttcattttctttcta

SEQ ID NO: 2783 - DNA, 446 bp, Glycine max
  unsure (1)..(446): unsure at all n locations
ctgcaganatggagtccagagacagaaaagaagctatggtgttgggagagaggaaaactcatatgaatattctttcctacaacattagagggctgggcagtggcagtcacaacatatatatacagaagggcagtagataaaaatacaaaaacattcaacactaacaattaacaagttctgagagttaaaatcacagtaaatacttcaaagatatcagtccaatgaaagaaagatcatgtagagaggcatgaagatatcagtccaatgaaagaaaggtcatgtagagaggcatagcataagttacaaatataccagtaatgcatacaacaacaatttcaaattatantttgaatcaaagatataaatacctgagttcgaggcttcagcacaatggtctttctagcaatgatcgcaggaccagatngaatttcaaaacagcaatgacc

SEQ ID NO: 2784 - DNA, 425 bp, Glycine max
agcttataattcagagttcataaattaaaatatgggctttatcttccttaattaggtagcagtagtatttagtgcagctaaattagtaatggaggctataccaaaattatgaacctccatccctcgtgatgagagagatccaagtggtattctttaatgaggaaatgttaaatttaagaaagtgttaatattcaattgataacaataatgaagggggatgggtgatgttccctagcttgctcttactctctagtaaccttttagtcaactccaattttttttaggggatctgattccctccaaaattgacaaaatataggaattaaaggatgttatctaaattattttatacatattaataaaaataataatgaatagatgaaagataataattactttataaaattaatcttagatgatcgatt

SEQ ID NO: 2785 - DNA, 379 bp, Glycine max
  unsure (1)..(379): unsure at all n locations
gcttgttagcatactctntaattgtttcgaactccttcattttctgcatctcaaattctctaactaaattcagggcttgcattcccttaatcctttcatctccttcgtattcattcttaaggaaactccagatttcatatgcctgattgatggtcattattctagtgaaaatttcttttgagatagcagcaaataaagaagctcttgcctttgactntcttgttttcctctccttttaattntttatctgagtcattgttggattggttggtaaaggaagaacttcgtagtcttcctcaaccgcttcccagagatcatttgcctccaaatgtgcctccatttttgctgcccagatttcatgattatcaccatcaaacat

SEQ ID NO: 2786 - DNA, 356 bp, Glycine max
agcttacatgccatgatgaactactaacatatataaccattaaaacatcgactatgcaaataaaaggaactttttaaaaggaacgaagacatgaagatgaacactaagatagtggatagtctactacaaataaaaaggcagcaacacagaaaaaagacagaaactaaaaaagaaggttgtgcatagagcatgagcaaatatatacaaagaaccttaccaagtgaagtcagtttcttcaaccaacctaggtggacaacctttgtacaccagagaatgaaaatgtaggattttggttaggttgtggaacatgcaactggaatgtagaaatgagaaagaaaccttaccaagtaaagtag

SEQ ID NO: 2787 - DNA, 365 bp, Glycine max
  unsure (1)..(365): unsure at all n locations
accttgaaaactngngctattcatcttttcattctcttctccctttcccaaaaaaaattcgccaaggactaaccgcctgaattctttntgtgtctctcttctcccttttccaaaagaacaaaggactaaccgcctgaattcttttacaacctaaattcataagggccatagtaaactcatgagggttatggtcaaccaagatagccatagtcaatccataatggcctaaggctttaatgtcactttcgaccacaaacatggtggattcaccatggccatagtgcacctttntgtatagttatcttttggaagctatatatagagatctctgtctttgtaaaaatcattcttcagtnttattctta

SEQ ID NO: 2788 - DNA, 400 bp, Glycine max
  unsure (1)..(400): unsure at all n locations
agcttcttccccctttccctaatgtctaattttttcacatagnttatgagcttatgcaaatataataattgcatcctttaactataaacaggacaaaagtatccttttacatttgacaaggtattaaatcatgaggcatctcagcaagatgtttcactgagatatcacaattggtacaaagtgcgcttgatgggtacaaggcgattattaatttgtgtcttctttgttcaagttaccttttgcaggtcaaaaatctcttacattggatacaactattggtatgtgacaattattattttctgagaagcagtggctactggttgatcattggcgccaattcttgtatgtaatatactagagtattaatattaatatacacatctttaactttctcgattat

SEQ ID NO: 2789 - DNA, 372 bp, Glycine max
tactcaagcttctggtgggacatcttgacttgctttttatctgacattctttatagattctgccctcttctattttcagattgggaatgcctctaacagcacctttgtcaatgattatcttcatgcctcttaagtgcagatgtccaaatctttgatgccatattttgacttcatcttctttggagaatagacatgtggaggagtaactggtttcttgaggtgtccataggtaacagttgtcctttgatctgctgcccttcattaagacttcactcttctcatttgtcaccaagcattctgactttgtgaagtttacattgaatccttcatcacacaactgactgatgctgatcaagttcgcagtcagtccct

SEQ ID NO: 2790 - DNA, 412 bp, Glycine max
  unsure (1)..(412): unsure at all n locations
agcttagactgagttcagcctactatcctctaactgatggccaaactgaacggaccattcagtcgttggaggaccttttaagagcatgtgtcttagagcagaagggaagttgggagagttctcttccattgatagagttcacttataacaacaattttcattccaccattggcatggctccctatgaagctttgtatggtagaagatgtanaacacccctatgttggttagagctcggagaaggcctcaccttatgaccagaagtggtacaacaaaccactgagaaagttaagttaattcaggaaaggatgagaactgcttaaagttggcaggaaagttatcatgataagaggaggaaagatctggaattcgaagttggtgatcatgtattcttgagagtcacttcatggac

SEQ ID NO: 2791 - DNA, 399 bp, Glycine max
  unsure (1)..(399): unsure at all n locations
tcgaaagagacattccaagtggttggaattcatttagatgttttcttatatgatcaagtacaagaatggtaaggaaaacatagtggttgatgctttatctagaaggtatgtttttcttacttctttgcaaactaaattgcttggttttgagtttatgaaggacttgtatgctaatgattctgaatttggcaaagtatgggattcttgctctaaacatgtttttaggaactattatagatgttcatgtttcaaaaaaaaaagttgtgtgtgtctgtgttccttgcatgaaatgttagtttgagaaatcatggtggtggaatgatgggacattntggtgtgaaaaagactttataaattctggataagccattttattagcctagcatgaagcatgatgtg

SEQ ID NO: 2792 - DNA, 385 bp, Glycine max
  unsure (1)..(385): unsure at all n locations
cactctgaaactcagctattcagatgctactgacaaaggcagtggttttggttttttcagcggnccattctgctgccccaggataacaagggctaatagctacaacagtaggactaacatgcttaacagtaaacagaacacagccaggtgatgttggagcacaagagaaggccacaatctggtatgtcatctcacatcttggcagtttgatcagctcccgagtaaagggataaagaagaatactcggtgagttctgggccggtatagcaataaccaaccatcttttgtataacaaactctagatccattcaactctggcgactcgaaggtgagtgtcttatgctgcacagggtcatagaattcataacaggcaccgaattttgga

SEQ ID NO: 2793 - DNA, 375 bp, Glycine max
  unsure (1)..(375): unsure at all n locations
agcttaagctccttcaactgtacaaggctcttattatttgaagagtatccttgnggaaccttcacccgacaaagacactgacaaaaacttatcttctcctttttggacaaagtatgacaagctgggggcgaataaattttcttcccatctgaccttggatgcaactgtgatcatatgcccatctcagctagatcatgacgggtattcgagccatccttcgtcttgccttgaatgttaacgagcgtaccaatgacactgtcacatacatttttctccacatgcataacatcaatacaatgtctaacgtctagatgataccagtgcggaagatcaaagacaatggacttcttcttccatatgcaagtcgtactttta

SEQ ID NO: 2794 - DNA, 384 bp, Glycine max
  unsure (1)..(384): unsure at all n locations
taacaaaagttacaaaagtgaaaaatntattgttnatntgttttgcattttcattntctggttttatttcttgtttttattttcaaaagattagaattctgaaaacatatttggtttgacttcttgttttctgttttcaagaaataaaaacactgaaaatgcgttctaaaaaggaaatgtatttttagatttgcttaatattatattctttgtcaccgggtttttattttatccaaaatgaagtttttagttttaactgaaaacgagattttattgttttctatttttagttcgtttgggaaaatattttcactgaaaatgaaaacagaaatccaatcaaatatattttcatcatcattttcattatcattttctatttctagt

SEQ ID NO: 2795 - DNA, 123 bp, Glycine max
  unsure (1)..(123): unsure at all n locations
agcttttgagcaattcaaacggttttaacttttatttcggaggnccgattgaggcttatgatatatggagacgctcgaaaatgaacaatggaagctctcgatcaatgcaaatggtcataactt

SEQ ID NO: 2796 - DNA, 285 bp, Glycine max
  unsure (1)..(285): unsure at all n locations
attgttcaatttcgagcgtctcttatatnacgcgcctgaatcggacgtccgagngaaaagttatgaccatttgaattcctcaagagcttccattgttcaatttcgcgcgtctcgatatattatgcgcctgaatcggacctccgagtgaaaagttatgaccatttaaattgctcaagaggttccattgttcaatttcgagcgtctcgatatattatgcacctgaatcggacctccgagtggaaggttatgaccatttgaattgcttaagagcttacattgttcaat

SEQ ID NO: 2797 - DNA, 371 bp, Glycine max
  unsure (1)..(371): unsure at all n locations
agcttaagganataaaacttatgatatataactaagagtcacctgaggatcgaagcatcgcctgataaagctcatatcatctntaagcctagtgatacgagtatccatcctatcaaagcaagtatccatcgcatcaaaacgctcacccacaaatgctcgaagatcgtggagctttgtgagtacttcaattagaagagaagtggaatcatccatttatggtggaggagatggggtacgttcgtcaagagtaggcagtggcaagtcttggttgcgaacccactgaccatcatcatactttcggtaaccaaaggaggtaacaacaccggcaccaatggagaaagaccttttaaccttgacattctggtcatcat

SEQ ID NO: 2798 - DNA, 227 bp, Glycine max
  unsure (1)..(227): unsure at all n locations
ntacatcttattcatcacatactatacaaatttcatacatctantttcctctaaaagattatgtaaaaataaaattataatgaaaatgaaaattccaagatgaagttgcaatagctataattattgttccttcaaatacctataatacttcagaaatcatacagtgtccctgcaccagaaaatagagattatgaaaatatgtcacgagtattagatgttcaatatat

SEQ ID NO: 2799 - DNA, 381 bp, Glycine max
  unsure (1)..(381): unsure at all n locations
agcttatcattgataaaagtttatgatttactatttgatactattagggggttgntcgaagaacctgcccataatntaagattccagcagaagggttaatctctaagtttccatagggaaagatggatccttgtgaaaacttatctccctctgcacatttcatgacatacatgtaatctgttggaactagactaaatccaagctcatcccaattaatgtcagcatagntttccccagcagtactgattttcagacaaaagagggtaatcaaagttcagattcanaatcaccaataaaaccaagttcatacattattatctactagtacaataacattgtcgtactcatcaaaaattaaataccataacattttcgtattca

SEQ ID NO: 2800 - DNA, 387 bp, Glycine max
tctcctcattgtagcattatttactttcggctctttagcattctcaataaattggctccgatagcccatagaaactatacaacccaatgcaattgctctggcctctagcaattcgctatttgcactcctcctaattatatatatcccgtaatttctatcactattcattattttattttatatttaattacatgttttaatatatcaagagagagaatgataatttattaaattaaaaatatttttagtgatgttatgttaaatagactacataatattacattttttcatcataagagatgaaggataatataatatttgtatctttcacagataaaacaagtgtaatttattttgtttactataaaagaatatagtatgactact

SEQ ID NO: 2801 - DNA, 356 bp, Glycine max
agctagtagtctcctgactatggaaaacagttcattctgttcttctatcgaacatcttcgttgaggtgattagtcagatgctccattgttgctatgatcgctttagttcttattatagtcataaattctcaaggtcaaaatatatgttacctggcttcgcggtgggcaccaaattgttattgtcacatatgagatcgagtactcgtccttgtgccaaagggccttctactatgttgaaggatctctagagttgaagggtcatctgctagttgttccttgtcaaagattcaggtgcatgagcatctgacagagcataggtaagaatacctgcaaaatgctgcaatgctcaagtgagg

SEQ ID NO: 2802 - DNA, 459 bp, Glycine max
  unsure (1)..(459): unsure at all n locations
ngcattactctctctactatttttaaaaactttgggaatttttctgntcctctcaaagngcttccgctcaacaaattgttttagataaattaaaaaaatagcacattataattttatgagaatgaaaaatatattaaaattnttatgaattttatgataagaataaatatatttaagtatgaaatttataattatgtaacctttatttgttttttttatcagccatgtttgtttgttgttgtcttgttgaggcttgcagcttggagagagacagtggaagcagtttccttacgtaacgagatccactcaaaacgttatcgtatcctccctacccaaatgtgccaatataaaacttgaaatgattgcttatccttcttcttcttcttttcttttttgtttccttttcacgccgctgcagaattgggatagtttcagaaattaattcattatttatacaca

SEQ ID NO: 2803 - DNA, 437 bp, Glycine max
agcttgctgatacaattattaggggattgtttaagtactggcttataacaaatagtccaaaggaggttatgttcctgggtgagttggaagaagtcttggaagcaactcaacccccagaatttcagcgttgtatggagccattgtttcgtcgcattgcacgttgtttgaatagccctcattttcaggtttgaatttttcaatactttcctctggctccttttctgtttctcctcttatttcatgatgaaaatacacctgaatttcaaattaattctctctggcaacttccttcatactgattacctgaatcctatatctcaattcacttcctctagttgataagttggtttaattagcaagaaaaggactaacctttttgcatcatcctatagctaaatgcatattggcttatggctttgaagtgacataatatcaat

SEQ ID NO: 2804 - DNA, 392 bp, Glycine max
  unsure (1)..(392): unsure at all n locations
caagccacacccaacagaatacactgacctgtaatttntaaggaatgacaacatattgaacattcaaatattatcacagtaagaatgaagctagatataagaatcaataatgtttgaccactgtcatgaatcttgaggttgaggatccagacttctcgtgcacatacatgtaacaaatgaaaattaaaaaagagggaagatatgtttgtcagttaaagaatacatcataatgaaaagaaattgtcttttccctccagcaccttagtatgcttaaaaatgagcatgcaaaacttccctaatttgtataatataactaccaattagagttgctctttataaaaaaaaatagcaataggaagaaaaggagaatatagctggagctcacattccac

SEQ ID NO: 2805 - DNA, 411 bp, Glycine max
agcttgaaggtaaactagatgccttggttattctggttatcccaactggccatgaatcaaaaatctgcacctatcaccagactctgaggtttatgctcctttgccgaccaccacacagacctttgcccttttgggcaacaatctgaagcaattgaacagcctgaagcttatgttgcaaacatctacaacagacctcctcaacctcaacagcaaaatcagccacaacagaataactatgacctttccagcaacaggtacaatcccggatggaggaatcatcccaaccttatatggtcgaatccttcacaacagcagcagcaacaacaatagacttattctcaaaatgctgctggcccaagcagaccatacattccttcaccaatccagcatcaacaacaacaacaacaaccc

SEQ ID NO: 2806 - DNA, 444 bp, Glycine max
gattaagaggcatcttccttttgatagaatttatttcacatgttctagcctagcatgtcacatatcagaacattcaacatttgcaacaaaagaaaaaatgctagatattttattaatagaaagaggcataaggcttaacttaaataaaccatcagaaatgtagcctttacaaataaaaacaacatgtctattaataacaactctattcaactcaaaacaatcttgtacccacgttggattaacaaagaagtacttattaaattttccaaatatagaaaatgtgataaactccatctaaaacaagaaaattccctgaagatagttctagcttcacttggccttctcctaatacatgtgtcatactctcattcctcatgctcataatacgtgtgtttgattgttgatataaaaaaaataatttttttatcaacacacacatgaaca

SEQ ID NO: 2807 - DNA, 145 bp, Glycine max
agcgtgatcaaaagctctgtctgaattttctttgaactctgtcttgtgtatgcagctatgactattgaggatatggagcatctacagttaaggtatgtcactcacctgatttcctattctttcttgagcttttttgtttcataat

SEQ ID NO: 2808 - DNA, 462 bp, Glycine max
  unsure (1)..(462): unsure at all n locations
aggnnaattgaccccatgctattacngacactatgantactcaagcttgagaacttactntntaaacttatntataanaaatattattttttacttattaaatatatgttgaaagtatttgttatataatgttatattaaaggatgaaattaaaataaagagaaaaataaatagatatttgtacttgaaaatgatataatataatctttttaaaaatttattttattgaatatattttttctcttttatattattattattagntaaggggtaaatcattggatatatgtgagtgattcttgactaatcattcttaatcaatttattattttttctaatgatcnggaattaccaaaataataatatatatatatatatatatatatatataaaaatatatatatatatatatatatatatatatatatatatatatatatatatatatatatatatatatat

SEQ ID NO: 2809 - DNA, 200 bp, Glycine max
  unsure (1)..(200): unsure at all n locations
acaacgtcgggcattgccatgaatccacaacctaaaactttccttanactcaacaagaaagaaaagaagacaaagcatgtctattgctaagttactaacccggcatcgacgaaccccaatccaaacagtccaatggcccacgagcgattgttgacttggaaaccctcagagggaaagagggtgccttactcttttcttga

SEQ ID NO: 2810 - DNA, 406 bp, Glycine max
  unsure (1)..(406): unsure at all n locations
ntcaccttntcgctgcatcttcttcctcttcccaatatattgngatatcttcctcattaattcaaatttcctcgtttagcattcttattatggttggtccatgaccatgagtgaaagattttcctacatatattccattctgattttcgccaataagcgtgcgtgcccttcccatcccaggtacgtctctcgtggagttttaaggtttttcttttctttgctgtcgaaaacctgcaacttgngctgtgcaactttggagttttataggttttctcactttctaatgatcaaacaaacaaacgactatattttcactcaattatatatatatatatatatattntttggggaagatattttcactcaattatattatagtatcaaaacanacacaaagtttaatgta

SEQ ID NO: 2811 - DNA, 324 bp, Glycine max
  unsure (1)..(324): unsure at all n locations
agcttgtagatattttactatatatgagtgtttcttcgnnnatctctacctgtgtaaaaagttgataattcactcctcatgtgttggttatgtttggatcatgtgatgatcttaaaccttgtgttgtgagacaaatggctaagtgaattactttaagaaaccttatgatggaggactccgagacacaatattctgataggatgtaacattggaacaagagtttttattttaattgcatgatgtttcaaacatgtcattttactttatttgataaacttgaacaggcttgttttaagtcataaatattttaaaaaaattttattt

SEQ ID NO: 2812 - DNA, 358 bp, Glycine max
  unsure (1)..(358): unsure at all n locations
tgtaaatatttattggtataattcgcctgttccattangtttcttgatgtttttagagggtacttcctcgttgacatcttttgtcttgaatggaattgccatgacaggtttattgttactgtctttgatatttggtagatgatattgtgttgcgggaggtaattccgattggattaactcaccatccttaacttgccaatttgttatgacatttgttgttggatcacctatgatgtcttgtttccaagggtaatctatatcctttctgatggcataagcatgaaaccaatcaaagaaaaggacatgtaatttgactcgttcgacacattcgtagaacttgtcttggatttgtgttctg

SEQ ID NO: 2813 - DNA, 335 bp, Glycine max
agcttatatagtccattatggtattttgcctattaagttcgctaggactgacaagcatatgtgtatgtaatgtgacaccctctatcccgatatacataattatataataaaatatatgaaaatacgaaattacataaaatgatcctattcaataaacatataggaacccacgtggataaaatgtttacattcgggttaaataccaaattaataacttatcaattaaggatatgaaaacatttttgacttaaaacaaaaccgttcaagtttacataaaaaattcaggtaattaacataataaaataaagttgaatgaaatgtttggaacatcatgc

SEQ ID NO: 2814 - DNA, 94 bp, Glycine max
  unsure (1)..(94): unsure at all n locations
catttccagccttttgaatcttgataactnttgatcagctgcacatgatcaactatcaagtgcttcagtggaaacanatatatgtagctcaata

SEQ ID NO: 2815 - DNA, 374 bp, Glycine max
atctggagttcaaacctacactattacttgcataagaagacaactagttgtgcatgctgaatatagcgtatgactagagggaatccatttgacttacaatcctttgatcctgagatagataggacatttcatagactagttagacatcatttagtaccttttgagcatcctgagcattctgttattggtgaatttgagcattattggttggaacattctgagaacatggcacaacctccaccccgtgagaggactctaagggatatggctgcacctgatttcaccaacgaaagcctgtgcattcaataccctgatgaggatatcccatatgttcttaaactggactgttcatttgctccaaagttcatgggctt

SEQ ID NO: 2816 - DNA, 437 bp, Glycine max
  unsure (1)..(437): unsure at all n locations
tccgctagacataaacaagataacagtgtactttacaaatatcaagattcctganaatntacaatctgcttatagtctccaatggtcggcagcttgccatggaatgttccattccaattaacagaaaatacttcaacaataaagcagcaacacctaaaacaacatttatgtcacatcagttctgcaatcagtgtcagcattacgaaaaactaaataatgtcaaaaacaagaagttagaatgttgctatttccagaaatcaaatgcataatagaagacacaagatcacaattgtactccaaaaactgacactgctaaagtagtaagatatttttgacaaanagaagaacatgattccaaattaataaacggataaacctccaagtttctgtagcctgaacctggagaaatctaaaatctagccaaaagaaacatatac

SEQ ID NO: 2817 - DNA, 346 bp, Glycine max
gaccggatcttaagcacctgagctgcagcttgggtctcagcaagtgacttttgttgtgtgctcccaagtgacactgaatcatggaaatgcactcagacattggagttgaagagttcagctcaaccttctatggatgcattctttaatcaagttgcagcattgtctcatgcagcacgtctgcttttacttgcaaatgcccagaggaatgctatatatgctgtgcatttagaatatggttctaatccagaatcaacacgcatggattatatagccgagtttactgtgaccatgcccattctgaagtttactgggaccagtgatatattgcctcatggtgaacatattg

SEQ ID NO: 2818 - DNA, 220 bp, Glycine max
aacaccaagatgagtggcctccacttgatctccgcactggatctcttcctcctgttccgactactactactattaggcttcttagaaagatcaaagctagaccctttcatactcaactcctgagtgcaccttgtgacagccctaccatcattcctctctctttgcaagagcccccacaccttccaagacctgtgcactctcatctgcaaagggagatata

SEQ ID NO: 2819 - DNA, 374 bp, Glycine max
  unsure (1)..(374): unsure at all n locations
ttcaaggtttagaaaaccttataacttcagatttctntnngttacttagaagaagaagaagaacttcanagagatttcaaggctcgtaaaggattgattggaaaagcaaaagtattcaagattgttgttagaaagattgattagaaaatgcanaacaaagccttgcttttatagactcttcatgtctggtcaagaaggtcattcagaagagttataacttttagaaaaacttanaactcatttgaaaaagtcaaaacctttttgaagagttacatctttagatttttcagaaacaaacactggtaatcgattaccaaatatgtgtaatcgattacacaaagcttntgagtgagacaatgtgactcttcactttt

SEQ ID NO: 2820 - DNA, 360 bp, Glycine max
  unsure (1)..(360): unsure at all n locations
agctnntaattttgcttttccaggtatatgattggaaataggttaattaagctaggttttgcttaagtttatgttttataatttattgtcttaagcttttttattattctactaaaggccttaattttttttaccttgcttaaaatgaccttgatataagtttgttcctacttttttagattgtttaaggtttatatcatttacaatctattcatcaagcccaccaccttcttctcaacttatattatgaacctctttttataaagttttgtttatattaattaacaataatgcaaagtcattatttatgtttggacctgctctcaattctacccatattagttttgaatgtagcaatgc

SEQ ID NO: 2821 - DNA, 447 bp, Glycine max
agcttccatcaactgcagctgcccaaacttttctagtattcaattacaacatattataatcgattacagaggcttgttctatggtaatcgattacagggagtagtaatcgattaccagaccctaaaacatggatttttcattaaaactaactatttttcacccacaaaaacatacacatttagtataaataatgaaaatatacaataataaaaaaacaagtatcaaaagcaatcaataatcatcataactctcaaacacattcatcaaagacaatccaaatttcaagatcaaacaacaattaacaatcatcataactctcaaacacattcatcaaagcaatcaaaatttcaagaacaaacaacaatcaacaatcatcataactatcaaacataattatcaaagacaatcgaaactcaagcgaaaacaatcattaaacctcaatcaac

SEQ ID NO: 2822 - DNA, 412 bp, Glycine max
tcagaccaaagcaactcacaatctaggtatctaaaacccctcaatataggggtttttaaggtttgagaagcgaaaatgagaatggggtaaatttggagcaaactctcacctcacacaagtctataaacttaatctaaacttgctcaaactggtttttcacctaaaattccaccgaatcaaaatttgactcctcaacacccaatttaccctagaaatggctcttgccttcactttggtcattcatgtttctcctttgcacagccccaagctttcccacagtcctaaatgacatttcaaactaggattaactccctttaacctccaattaccaccaaatccagatttaacctttcaaactctcaaagcatcactctattgcactcatagcactacattctcacattctaaccct

SEQ ID NO: 2823 - DNA, 419 bp, Glycine max
  unsure (1)..(419): unsure at all n locations
agcttgtagctgaagttcttgagaggtgctttttttggttaggcaatagcaaaagacacattcccctactttcatttactagaagttcaaaggtacttcatctctctcttattttgattaaacattgtaatctttatttttatgtgtttacaacgtacattacattttcatgatagtatttttatgttacgacctctactagttagctaacaagtgtaatttattataattttttgtaattcatttttttgttggttccattggtttttattctaaatacctattcttattttataacatatatggtagtagctataacataaaaattggtattgaatcttaggttatgcttcttcccccaccaattattctttttagttagaataatggttagtagtnttcttcttaaattattatat

SEQ ID NO: 2824 - DNA, 411 bp, Glycine max
  unsure (1)..(411): unsure at all n locations
agaccacgatataaattatgggactccatttgctacatgttgaaggcaacccgcaatcttacatcctgtcagcttaagatcaggaaaccaaagtggtgtgtacatcactctacaacccctgcctgcatctccaacactctgttcgaaaccaccacttaccaacaagataagcgattagactcactttagccatgaattttttgaacagcaaagtgcggtagtggcaaacgacaaggctaggccattctaacgaatattcaatgaactttgtttccaaatatttgtcttgctcggnggaagcagaaggcaacaaatatctgccttctgtattcactcaagtaccattcactttcttctactgtaatagattccactgccagaaataatatgatgccgatgtcttgatccact

SEQ ID NO: 2825 - DNA, 399 bp, Glycine max
agcttggttatctccttcttcactacatcattattcaccgggttgagtcttctttgtggctgtcttactggtttagctccatcctctaaatttattcgatgcatacatgtggatgggctaataccaggaatgtccgccagggtccagcctatagccttcttatgcttcttgagaactgacaacaacttctcctcttgctcatcagcaagggaggcagatataatcactggaaaactcttgctatcatccaagtaagcatattttaaatttgatggcagaggcttcaattctggtgtggtcggctggacagtggttgaaggagatggtttctcagcctttacctcataaagaaagtcagaggtatgtgtacttcctgaaacattggtagtcctatctgac

SEQ ID NO: 2826 - DNA, 431 bp, Glycine max
  unsure (1)..(431): unsure at all n locations
tctccacttgtaacttgagcctaaattcaaatagcatggtttacacttgttgaatagcttccttggccttctttgttctagccgttgccataggtcctccaagtccttctaaaggttccttgcccttattccttgccttgtcctcattaacaagggagggtacatcctttgtggctctttgcttgtaaaggattttacaagtgtggaagcaatgacttccatgattattttgatgatgccaaagaatcaagagttaagcaagttccaaagaatcagaagtcaaaaagcttcaagaatcaagattcaagaacaatcaagaacaagattcaagactcaagattccagaatcaagagaagactcaatcaagataattactaanaagggtttntaaaacattgagtagcacaaaaaaatttcacaaaatctttta

SEQ ID NO: 2827 - DNA, 346 bp, Glycine max
  unsure (1)..(346): unsure at all n locations
agcttgccacccagctcgcccaggcaagctcatctcgcccaggcgagcagggttgcttcctccagaagcaacagccttctggaggaatcttctggagggcccaagtgggcctggttgctatttacacccccatttttactaagtacaccgcctgcctttntttgtgattctcttttcgtaaagttacggaaacttacgactttcgtaacgatacttattttctttccgtaatgttacggaaccttgtggattacataatcatcccctttttgacttacggaatgttacggaacctcactaattgtgcaacgatgcttccatttgatttccggtgtgtcacggaacc

SEQ ID NO: 2828 - DNA, 406 bp, Glycine max
tacaaaaaggttcatcaagtcaagttgaaatatggaagtttctcgtcctgcattattggggcaaaagatgaatcgagtcacatcactgcttcgtctactgccaaacatatttaggattgttgatgtccttgttacttccagtttcaccttgacaaagatgtcatggaccatgttgaaaatctaaattgattcaaccccatatcctgcgtaaaaattcgcaatacttcgactgtacatcattcgcatgcatccatgcttttcattggttgcattgctcattgcattctttccttgaaaaataaaataaaataaagtataaatgaacttcatcattgttatcaaaaaaaaaaaaaaaaaaacatgctttacggcgtcctcaccgaacttgtgctatagctagagtaat

SEQ ID NO: 2829 - DNA, 183 bp, Glycine max
  unsure (1)..(183): unsure at all n locations
cgggatcctnagagccgtccagcacgcctgcaagcttgcattcttggtaagagcggaatcttgtgtggtaatttgacatctaagccaggtcgtggctctcgataatgttgcataatgtgatggccttaccctcccgtaattatcactaagatgacgtatttcacttaccgtacgatgattgac

SEQ ID NO: 2830 - DNA, 301 bp, Glycine max
tgagtgaaccactgtagaatgagtcaatccaatgagagagctttctctgatagagaagaaacatagcttgggaagtctttatactcaagcttgagtgagccaccatagaaggaggcaattttgttaacacatccttggtaccctactatcactttgtgtaggggaagaatctccatattggagaattataatcgtttggccccactactacctttaattactaagtgggcatcttaaacttcacgaagcgggaaagaatgagttttcccaacacacataaaggcgtatgtcatactcatgt

SEQ ID NO: 2831 - DNA, 439 bp, Glycine max
  unsure (1)..(439): unsure at all n locations
agctnnttcttttaaccaanaagctattgtctctctcctcactcagccaaagaaaatttcagaaagctcttttctctctctcacgttgccattctcttcttcttcctccaccattgaagctccaacaaagctccaacctttggtcaccatttctgctccaaatcgcgaaaggagggcattttcgaagtcgtgaagcgcatctctacgtgtgggacctcgaaatttcaggtttgggtggacttctttctcacttgattttcgtgggtattgggttttgggagatatgatgggtagtcttgctaggtttctgcttcatgatggttatctgtgaagaaatttgtgaaaacatgttgaacttgccatgtntggatgatgtaagcttacccattctggtctaggggtnttatgatgatgcttgagatgtttatgtgctgaaatt

SEQ ID NO: 2832 - DNA, 388 bp, Glycine max
  unsure (1)..(388): unsure at all n locations
tgagcatactagctntcatctagggttggtccattcatgcctctacctattatcacgccaagtaggttataaaactaacacttaatagttaacactgacttgagtttcagaggaagtactaagcaaagtttaagtttcacctcacactatggcagtgaaggtttcagaaccaaaagatatgaactatgggccagtatgaaagcagttattggttcatagaaatgaagcatttaaggctgagcctctgaccaccatatatactcattcaacaagacatcaattaacttatcactcttctaaatagatcaaaagtccagttagaaagaaaatctgttagttntgattcttaatatcccaaatgtagatatattacttggcacagaccaca

SEQ ID NO: 2833 - DNA, 264 bp, Glycine max
tctcgctaagccaatatgttggcttagcgagcatccgcttatcctaacactcctgagctgagcacgaggaagaatccagaagaagatgagttggacaggttcactaagcgcaccgcttcacgtcatctgctaagtgagaaaagcgcgctaagccaaaaatcactaacgtgcgctaagcgcccgagcacgaacaaggcgccctatttaagcctgaattcagatggtgtgattagagtttggactgggatctagagctttgtatgt

SEQ ID NO: 2834 - DNA, 194 bp, Glycine max
  unsure (1)..(194): unsure at all n locations
tggtgagacgtttatgaaggtttcgctcttttattctattgtatactcgncaaagccagaatgattaaggctcacattcatttgtccaacgatccctccgactagaatattatcgatatatcgggtccaggcttcctctgattggaatcggccattatcatgctgatcctggggtctaaaagcactactcttat

SEQ ID NO: 2835 - DNA, 431 bp, Glycine max
  unsure (1)..(431): unsure at all n locations
attctcgttcctacatcatgcanatntacgttcacaggattgaattgaaacactcaatatactgacagtcggtcatgacaataacgcgccgaatgatcatttttccacgctgacctttgtgcaaattcttttaataatacgcttcgctggtcgattatagttagagtttaacggcacagggaagtattccatttttggcgtcgcataanaacagtataatattcgtcagctaggtgttttcgtgctaacacaatcgacgctttggttgtgccgaatctggcatgttcccacttattcggccaggagagcccttagcccatcttagccaacaaaaattagtcactcgttctcgtactgaaaaaatgacaggctagcttctgcctataaccatgaccgaacctagtgataaaagatacttacacgatgatgcg

SEQ ID NO: 2836 - DNA, 400 bp, Glycine max
  unsure (1)..(400): unsure at all n locations
tcaccggatgacgccgatcgaacattttctaaccgacgtcttgctaatttcgttcanggattgaattgaaaactcgttaggcgacatctgtcgtgaagtagcgaccgatatttttcagccgacattgcacaattctttttagaaaagctcgctggtcgataatggtctttttacggcagagtaagttttcttgttttggtgttgcataaaaaagttacaatgtacttcggctaggtttttcgtgcgagttcaaccgacattttgtttcggccaggaaaacattagcccacctctgcaaaaaaaatatttgctaaccgtcttcatgcatatttcattcaacgattgaatagaaaactcaatagccgacaacggtcgtgaaatagtcccgactgatattttt

SEQ ID NO: 2837 - DNA, 318 bp, Glycine max
  unsure (1)..(318): unsure at all n locations
agctntcaagacgttgtgtaagtgtaagctctctcctaagggggaaggcttttttgaatgttctttctcatgtctagaggatctcaagtgagttctcttggtaagggcttgggatatcaaccttggtgtacttcgtctgtattccattgtcaaaggtgtgtaagtgtctttattccattgtggattccttacccgctaccatggagccccacctcgccccctcttccgaattgtagtcccttttagggcttactcgaccacgacccaacaacaaaacccattcctccaaatcttcttctaacaaccaaaacaacactt

SEQ ID NO: 2838 - DNA, 452 bp, Glycine max
  unsure (1)..(452): unsure at all n locations
tatcctatatcatccanaacatgaaccttatgcaacctctattaatgccaatagtccagctagagaacaacatgttgagtgaacaagcaagcaacaatatagggatacaaaaaaaatatcacatattggttagatcctcaaattcgatttttctataaataaaggaactaacaaaaggacataattctagattaactttggtgtgaaaagttaagtgttaggtgcttactctataaataaaggaattaacaaaaggtcacaattattccgataaatacactagtgattgaataagtggcaggaaatcatggaaaacatatacaatgaataaatgatagcaagacaatacanagtgatagaaagagatcaaacaacatatttagatanatattatcagactcatggggaaatgaacactcacattcagaatatgactcgtaaatcaatcaata

SEQ ID NO: 2839 - DNA, 229 bp, Glycine max
gatccgctagagtgcaccgcgttgcatgcatgacttatctcgacacacatcttaggactctctcctaacacctcgacagacctaaacaacatttgttgctcttatttagcactcacatgaaccccatgggcgctccatgaaagaggtctgacatagatcttccattggaaaggcatgaggactcctactactgaaaacacacctctttcttcatgaaggactgggacag

SEQ ID NO: 2840 - DNA, 370 bp, Glycine max
  unsure (1)..(370): unsure at all n locations
ntgaggttcccataccttagtactctctagaactggcctctataacaaatatctatgggtgttagtgacttagcaagcatgcaactctctcattntcctctcaagctntcaccttcagacttagggaaggaggccaacattnttttttaataaaagagtggttttgtgtgttaagtgaactttcttaatcatgtagtataggtgggtgctttgtgcaatggttaatagggctcttgacacttaatgggtgtgattagagaagaaatgcgcgatgattntgagctgtccaagagctggtcgtgcagcaatatcaaatatttgcaagaattgatgtgccanaaatcttgatcaatggtggaggatcccattt

SEQ ID NO: 2841 - DNA, 309 bp, Glycine max
agcttcgaaattgaaaactattcggttgaagatcgatgaatgatgaagaacggacgaagaacggtgaagaatgttcacgaaattggtaacggaaacatcacggaagcggtacggaagcgccttaaccttgatcttcaccttgtttcttcttctcctcactaattttaagtgaaatatgaataccaagggtgatgaaccccttcccctcagccccccacacccttttatagccaaaataggggaagagctcgccacccagctcgcccaggtgagctggttgcttcgagttgaagcttcctgatgggccta

SEQ ID NO: 2842 - DNA, 384 bp, Glycine max
  unsure (1)..(384): unsure at all n locations
tgggtagagaagaagaaaatgaganaacaagataggagggttattctntagcatataagagatttggagtggctntgggcttttactagccatctaagtgattntcctatacataccccttcttacatgtgccaacgcccaaattcaagttcaataaccattaaagatcccccaaatacaaaacacatggaatttcatgcaattnttttattagtgagtttattaaataatttaaaatttattttcttttgtattttaatcaaacacttagccacgcaaataagaaacactatgacattacagtactcaccatcatattatgacttgccccaaggttttaatatatctccatatataatcatggtactaggtcttnaaattata

SEQ ID NO: 2843 - DNA, 396 bp, Glycine max
agctttcccatcgccacttagccaccacactttaggtcttcacccaaaacccatcaacaaaccgaaacaacattaaaaccccaaaatgagcactttcatgaaccccatgggtgttttatgaaagaaaacaaaaatataacttccaatggaaggggaagaggactcttaccactgcaaacaaccccaaacaacaaaaaggaataagatagatactttcttgaacaaggtaatgtagaagcaaagcttcatggtgaatcaaaaatgattcacagatgttttgatgataacaatgatgataacaaaagatgatgacaaaggtgatgacaaaaaactcaaaggtcaatcaaaggatgagttcaatatgttcaagaaagaatcacgatcaattcaagactc

SEQ ID NO: 2844 - DNA, 432 bp, Glycine max
  unsure (1)..(432): unsure at all n locations
aattgaattaaaacgttcaataactgctggtaatcgtttaccatatatttgtaatctattacacagtgcaaattttgaattcaaattttaatagctgttgtaaatcatttatggccaccggtgatcaattacatcctctgataatcgattaccagagaataaatctcttgaaaaagattttttaacttaaatttcttggccaaaccttttgctacttcaattaggaattcccttcctatttaatatacccttcctaagactctagagattgtcttgatcatccatcttgaatatctttaatttctttatcttgaataaagctttgagaagcatgtaatcctttggcatcatcaaaacattcagctggatcctttgtctacagaagggacatgaatggagaagtngtagagtggtatgcgacanataataatc

SEQ ID NO: 2845 - DNA, 336 bp, Glycine max
agctttgacaacttctagcgcgacacctcactcgactcttttcaactcgcattgcatcattccaccatatattcgcgtctacttgcacgtctcttacgcgtactattctcatagcaatagaattctaatcacaccgatactcatgtttgagtccttgtgaactatcacacaagtgacatgtctttcgagatatgcagcgcctactagaactaggttctagtcaacatcgagactcctactagagtccttgcaattatcagacaacaatatttaacacacagcgaatcaccgactatggttggaaaccatccgtgtaacaacaataaccacatgcat

SEQ ID NO: 2846 - DNA, 453 bp, Glycine max
  unsure (1)..(453): unsure at all n locations
tcttatccaaggctcatcttggtggtgaagctccttcttctatggcttattttctagtggatgacgcctcctctcacctcttctcctttgtcttctgctgcatctccatggtggaaaataaacattaaaggacctcattgaagctcaaagatccagcctccatagaatccccacaagcaagcttccaccacaagtagtataaaacggtaagaaccgagtatcgaactctcggggaacttgtgttatctggcaagctatttcgataaataggcgtctggtatggaaatataactgtggttatgaacaggtatttaaactatctaggcaaaaagaaagaaaatcacgtaagagaaatactatgtaaaaacaagtagagaaagcgtnggtcttcctcgtaggttcctgatgctaaanaggatgttctctatnntaacaatgctatgcgttcctatg

SEQ ID NO: 2847 - DNA, 394 bp, Glycine max
  unsure (1)..(394): unsure at all n locations
agctntgtgtaatcgattacactaattaggttatcgattactagtgactgtttctggaaaaaaaaaaatcaaaagatgtaactcttcaaaaaggttttgactttttcaaataggttttaagtttttttttttaaagttataactcttttgaatggtcctctcgaccagacatgaagagtctataaaagcaaggctntgttttgcatttcaataatcttgaacacttatttcatacaatcatttacaagccttgaataactttgaacttcttcttctttgtaccaaaaactttctgaagttttctggtttttccaaaccttgaaaacttgtgctattcatcttttcattctcttctccctttgccaaaaagaattcgccaaggactaaccgcctg

SEQ ID NO: 2848 - DNA, 405 bp, Glycine max
acttgtgtattgcatcagtaataataaaggctctctattttccctcccgtttatgtagtcttgatcaaaggtgaaccacgtaattctgtgcgttctttctcatctctctctcattcattttgctgcaacatctgtgtatatgacatttctgttctactgcatctcctgctactgttcttgcttgttcttcatcacttccataacaaactagtatcaagagctcaagttgtgatcaagggaattcaagattctcgtctgaatacgaagatcaagttgtggggagtcttgtttctggtcctttcgctgcttctttgtgatcaagaacactcaagaaatcatgtcaaacataatcaagattaagaaattcaatggaaagaacagcttcaatctgtggcacatcaagat

SEQ ID NO: 2849 - DNA, 381 bp, Glycine max
agcttccagaatggtataccatgctacaactttcccgaccaagctgtcttgaaagaaatggaccaataacttttcgtccgcagaatacgcccccatctttcggcaatacatccggagatgcccttttggacatgtcgtccctttgtacttatcaaagtctggtactttgaacttgggagggatgacgatgttgggcacgagacacaaatccgccaaatccgagaatgggtaattgccaaggccctcgactgctcttaacctctcttcaagtgcctcaatctttcccttatcttccgcgaagggaacagattcttttacgggtgtgggtaaggccgggatatggcggactatgttcggttggggtagttcatgtggggatga

SEQ ID NO: 2850 - DNA, 393 bp, Glycine max
  unsure (1)..(393): unsure at all n locations
ngccgccacggagttttcctactatgctcttgtgtggtggttcaagctacaatttgagagagcaagaaatgaagagccaatggttgatacatggacggagatgaaaaagatcatgaggaagcggtatgtgccggctagttactcaagggacttgaaattcaagctccaaaaactaacccaaggcaacaagggggttgaggagtatttcaaggaaatggatgtgctcatgattcaagcaaatattgaagaagatgaggaggtaactatggctcgatttcttaatggtttgactaatgatatccgtgatattgttgagctgcaggagtttgttgaaatggatgaattgcttcacaaagcaatccaagtggagcaacaattaaaaaggaagggagt

SEQ ID NO: 2851 - DNA, 353 bp, Glycine max
  unsure (1)..(353): unsure at all n locations
cgccagcttagtatgatagcagaagattccaatctttggaagtctgtaaccgatataccgacaacattttgctggaaccgatataccgacaacattgtggaccagaggatccttttggaaaggaatgttaagatttatcatactgagttcgacgagtttaaagcagagttggagaggcgaaactttcacaaacgcctcgccaaccttcaggaagggagcatagatgtggcggtggttaaagaatnttatgcanaattgtatagtccagatgaccaagctcccaagtgtgctagagtaagaggccatttaatcaagatagatgcaaatagcccgaatgaggctcttcatactct

SEQ ID NO: 2852 - DNA, 345 bp, Glycine max
  unsure (1)..(345): unsure at all n locations
atagaagactccaagaagaatgggtcagagatgcaagagaaggccctatggttctcatgagccttagggtagatttcgggcccatgggctaagtatgagcctgcttatctttgtacatattatattaaggtttcattattttttggccatgtatttagggctccataatatagataagataccctagaaatgtaggatttttcagcccttgtattntanggcacctcaactagattttgtattaagggtagttntttaatttcacatgcattaagtgattatttgatgtgntgtggtggaaaataaattaaatgaattgggagaagtccaatccaattaaatttt

SEQ ID NO: 2853 - DNA, 391 bp, Glycine max
agcttgaaggtaaactagatgccttggttattctggtaacccagctggccttgaatcagaaatttgtacctgtcgcaagagtctgtggtttatgctcccctaccgaccaccatacagacctttgcccttctatgtagcaacctggagcaattgagcagcctgaagcttatgctgcaaacatttacaatagacctcctcaacctcagcagcagaatcaggcacaacacaacaattatgacaactccagcaacaggtacaatcccaggtggaggaatcatcccaaccttatgtggtcgagtccttcacaacagcagcagtagcaacaacgacaaccttatgttcagagatgtgctggcccaagcagaccatgcgttcctccaccaatccagca

SEQ ID NO: 2854 - DNA, 347 bp, Glycine max
  unsure (1)..(347): unsure at all n locations
ntgcgagattcctcacggaaaacgttacttaaacgtttcttatgcgcctcggcttagattntcttcacggaaaccaaattttccaagcaagattccnaagagagagaagtgcctanaggggctcgatccttttcttcttcatattctccccctattatagcacaatangcgagatgctngccgcccagctcgcccaggcgagctcagctcgcccaggcgagcanggttgcttcctccagaagcaaccgccttctggaggaatcttctggagggcccaaatgggcctgggtgctatntgcaccctcatttttactaagtacacccnccctgctgttttttggtgattc

SEQ ID NO: 2855 - DNA, 395 bp, Glycine max
  unsure (1)..(395): unsure at all n locations
agctntgaacttgctatgaaggattaaattttgtgcactacacgcgctatggtgcattcaataacgggctaaaatatgttttcgttctttctgtagaatattcaaagtttatttntagtctctgcaaaaaaaaaattatccatttttcatcattgtaaaattaaaatatgcgactttttgattaagaactaagtttgaacgaatataaatctacatggcactttttaatttaatttttaaaatacaattttgggaattaaaaaccacaccaaattatagaaaagaataagaaaaatataatttgtggcagttaaaaagcgccacatgtttaatgaaaaaatacaagagtcaaccattgcatcttaactaaacaaccaccaccttcaatccctaaa

SEQ ID NO: 2856 - DNA, 446 bp, Glycine max
  unsure (1)..(446): unsure at all n locations
ntgttcaataatcaggcattntgttgacttaaaataataattgtgaattgtagtaaaaatatgatatatcctaattagaaaaacagtaaacgcaagcaattaaaagtgacaatagtggtttaaaagcgttgggtctttctaataaacgagttgatgcatataaaaatatttctctaattaagaatgttcttttgttctatgctgaagactaaagtactaaacctctatccctcgtaagtttagactaatttaaaccaagcttcatcctcagatccctcttgttggactaggcttaatttaaatagcatcataatcacagcataattataaactaaaaaaacatacaatctatccctagaaatggcagtatctagccctactctatcaagttcttaggaaacagtacacttctcagtgctaaagttcctaacagtacacaccaatgg

SEQ ID NO: 2857 - DNA, 124 bp, Glycine max
ctgcagctgcagctgaggccagcggcagttatacactatacggcctgcatcgtgtccgcattcatacatttcatgctaaacttcagagagtgtcgcgacagaccattactcggagctacccttt

SEQ ID NO: 2858 - DNA, 384 bp, Glycine max
  unsure (1)..(384): unsure at all n locations
ntgatgcaacattnggagaggttaatgtttcaacaagatgttgcgctccatgagaggttggatcaaatggagaatagagatcataatgaagaagaaaggaggagaagagggaatgatggtgttcctagacaaaaccgaattgatggtattaaactcaacattcctccatttaaaggaaagaatgatccggaggcctacttggagtgggagatganaatagagcatgttntctcatgcaacaactatgaggaggaccagaaggtgaagcttgccgccacggagttttccgactatgctcttgtgtggtggaacaagctacaaaaggagagagcaagaaatgaagagccaatggttgatacatggacagagatgaaaaagatcatg

SEQ ID NO: 2859 - DNA, 364 bp, Glycine max
  unsure (1)..(364): unsure at all n locations
agcttgttgacaatttattcaatttatgctctaaatatgcntngctacgctggttgccttatgagttgagttgtcactgaacacgtatgaccctccctctctttttatttgtcctatagttgacaaagataataacttaaaacggtttgacttggaagttcatacgatggtaataataccaaaacatggaacattaataaaatcgaaaagtgcataccatactatatagtatacctaataactagctcacagtttcatatgaagagtgggtagatacttcaacacaaatgtatatatatatatatatatatatatatatatatatgcctagatatatatagatatatttatatatatatatata

SEQ ID NO: 2860 - DNA, 349 bp, Glycine max
  unsure (1)..(349): unsure at all n locations
ctcagcttctcaagaagagatggtaaaatgatcttgatgaactattcatcatattcaacgaaggaganaatcataagttgaattagagcacgtcgaagactactgagcagcttgcttagccgcaccagctcgttaagcgcaattccaacaattgggcttaacgcgagtgtctagcttagcacaattgcaacccaagaagatattgagcttagcacgagatgtctagcttagcacaattccaactcgatgaggaattatgcttagcgcgaagtgtctgacttagtgcacaccttcagcgtgaatataaaaacactcttaatttttgtttgtttgtataatgagcttgagc

SEQ ID NO: 2861 - DNA, 329 bp, Glycine max
agcttagaagcagagctcgacattacaatattgtctaatgagaagctaaagacgacagtcactagggttactaaagagcgtgattagctgaaacacatcaacatgaccatgggtgtagtgtgagagcgggaagcagacaaggctctgaacgaacaatggagcatgaacaagttctgagtggacctatggggcagcagaaatgagctcaagcttaagagggccgataaggaacaatcaaagatggaaaacatggtgttagaggataagtcaaaggcttgtcagaggtcaaagagaagtttgacataacagtgttcgcactctgggatact

SEQ ID NO: 2862 - DNA, 519 bp, Glycine max
  unsure (1)..(519): unsure at all n locations
cattgaacgcatgattatcngcnttttatatccctaagcttgtcaacgtggagctgtacacttgacactagatactgacttctgtgngcgattttgcctattgtcgccaagggcgattcgttacagtcttaattgatgaccatgatgctacgccgccagtgtggcaacaaatcacttgaccatctgttatatacattggatgaaataaattacatcatttagagtgattgcgcttatgatccaaattgttttgtgtgaatgcacttaaacaaacggagctagctaaagtgcatcattacgaattagatgctcactcgttctgtgacatattgcttcacacaattcagaacgaagcttttgcacaccactgctacatttacacgttacaaattagcaatactttgacctatcacagactacactgcacccactcaaatttcaatgtgtatgccacatttgaccgttgcacacatcatatatcaatgtacacagtctgtcttgatcagccatgacacttgt

SEQ ID NO: 2863 - DNA, 415 bp, Glycine max
  unsure (1)..(415): unsure at all n locations
ttctttaactttgtaattgagctgcaatcagtgattgatacaccttgattctactttgaagggctataataatcacgcaaagatcatatctgatgatgacaacncacagataatgctgtccaattattggtggcacagaatgtgaacataacttcagctcaagtggccgaagatatatgactattagacatcaatcattatatgatccctggatcaatgatccatgcgacactaataaagagttcatgcgacctcactagtggctgaaatacaagtgcacatacttattgattgtatgactcgtaatcgctgagatcgacagaacggatcaggtgagtcaatatactctgaccaactctggatcatagccactgagagactttgtgcatactgtatacatcatactgnagtggcg

SEQ ID NO: 2864 - DNA, 398 bp, Glycine max
  unsure (1)..(398): unsure at all n locations
ntgtatcccagggaggggattcgagcttaatgctaatggttctcctttgaagattatgaggaagaacatgaccactctagctcagacatggagtgttatttccttttctaacctcattcctacctctgatgtcaccttggatagagccaaattgatttatggcatcattatgaagatggatatgaattangggtacctcatctcccaacagatccctctgatttcacagcatgacacatctagacttggattccatgccttgatcacagctctatgcaagtgtcgcaacctacccttttgcgggagggcgacgcgagggctcatgggtgcgtcttccaaaggaggaaaatgcgtggagtcgccaccaacgtttattgaaaggaaaacgttagaaaaac

SEQ ID NO: 2865 - DNA, 130 bp, Glycine max
  unsure (1)..(130): unsure at all n locations
agctggancangacacatttttctccttgaagtgacanctccaatcacctttcctccttctccattctgctgccattgatcttcaagaagcaaaggacatccttcttgcaaaagactctacatggagcta

SEQ ID NO: 2866 - DNA, 339 bp, Glycine max
  unsure (1)..(339): unsure at all n locations
tccattgtgatgtttggagtatagtcctcagttaanaatgtattagttatttattgagaatgcaaagcaatatttcttgaggatgaacttaacacaaatcttacacttgaatggaaaatcgccacctcaaacaaccttttgctatcatatgtaacagtaaacttggaaggttattatcacatgttctacatattgtaagtatgggtgagatgaagattctatcgtccattngttcgcagtttaggtatcatggatntattgtacaaagtgaaacatggcaattttttcttataaaagggcagcaaatcattcaccaaaatacttttagagaaatggaaa

SEQ ID NO: 2867 - DNA, 116 bp, Glycine max
  unsure (1)..(116): unsure at all n locations
agcttcanaaggagccataccaatactggcctggtagctattggttgaagnaaactcaatcaatggcaaacaatccatccagctaccttgttgctctataatacacgcccgaagta

SEQ ID NO: 2868 - DNA, 344 bp, Glycine max
cgagaatggagaattgcactaagcaatcactacgcatagctttcaactcgaatgtggaagatatcatgaacgataacgcaattcatggggctccgaaatgattgagaatggagaatggcactaagcaatcactacgcatagctccaaaatggaaggtggaggacacatgaacgaaaacgcaattcatggggctccgaaaaaggttgagaatggagaattgcactaagcaatcactacgcatagctccaaactcgaaggtggaggacacatgaatgaaaatgcaattcatggggctccgaaaagattcagaatggagaatgcaatcactacgcatggctccaaac

SEQ ID NO: 2869 - DNA, 349 bp, Glycine max
  unsure (1)..(349): unsure at all n locations
agcttgcaggtattttctgaaagacaaattctccaatgtatgttagaaaacctatgcatgccgaaatgaaaatagaagacatgaaaaatatatctcatactgtcaaaaggcactattataattataagctacacagtttcctacccaagttagattttttctttctttctggaatacagtttcctacaaaagactgtagataatatcttactcctgcacttcattagcctacgcctatgacacaggctagctcttgttcttaagagtcacaattcagacaattgttcatacacataaaggagacagcagaatttactggactaattnngtaatcagcttcatctttctt

SEQ ID NO: 2870 - DNA, 420 bp, Glycine max
  unsure (1)..(420): unsure at all n locations
gcttcagatggtttcacattgagttttcattggtcttcctctctttcaactattcttctactaggctattatcaatcaaatcaactctttctattggggtttctattggtcttcttctcacaatgaccaaattaggtgtgattttaccatcgtactcattggtgttactcctatattgtctctagtatatccattactcatctagttttgtaggtctattctaatattttcacctcagcaactgcaactaaggacagacacagacctacacactaggtcctagaggcatatgtccnctcagtcacactatgttntatatgttatatcctacatttgtattgtttttcctacagcttgcttaatataattataaatntaagataaaggtcaaattctttcgatgttatagtaacttatgac

SEQ ID NO: 2871 - DNA, 438 bp, Glycine max
  unsure (1)..(438): unsure at all n locations
agcttatcatagttttcatcaagatcaattttagaatcataagtgcttggtatgctttcaacatcaccatccgccataagatagagattttccttttcttcattgtttgaatcacttgaagtactagaagcattctcatcccatgctatctatgccttcttcttctttctatgaccttttgcctttttttctcctccttgttgcttctttaagaaaatgaagcattcagatttcatgtggctcgattttccacactcaaaacaagtaaaattagaagaggttgagtcattcttcttaaactttntcttgtgttgaaaggatcttcctttgggattcttgttcttcataaacttcttgaattttctaacaatcaacattatattctcgctctctgaaccttatgcactntcttcatcactctcatcactagatggtatg

SEQ ID NO: 2872 - DNA, 430 bp, Glycine max
  unsure (1)..(430): unsure at all n locations
gtacaaacaatcaacacttaaaataactagaattaaattactgaaatttatataactgatacataatgcaaactaaatngtccatgatttgtggaaattaaaacaaaacaaaatttaaacatcctactcatcctgtggctgatcttcattttaatgggctgctctggctccatggctggtactgatggcataatgtcctcagatataggagcaggggatggctctatcatggaatctggtgaagatacctcctcctgagccatagatgtatctgcaacaactgaagagggctcaagaggagtgagctcatcctctgaaccaaaacttaatccgcagatccctcttgtaagactaagcttcgatcctgcttcaatcaagttctaaggcaacagtacattttccaatgctaaagtcacctaactatgcacac

SEQ ID NO: 2873 - DNA, 414 bp, Glycine max
  unsure (1)..(414): unsure at all n locations
cctgcaagcttcatgatgttgaatcaagatcgattcatggagtttcgatgataacaaagatgatgacaaaaagcccaagagaatgggttcaagattgaatcaagaacacttcaagaatcaagaggaaatttgatttcaagattcaagaatcaagtttcatgatttaagtttcaagaatcaagaatcaagaataatcaagttgaggattcaagaatcaagaaaagtactaaaaagtttttcaaaacattgagtagaacatgaatttttcacaaaaccttttaccaaagagtttttactctctagtaatcaattaccagtttattgtaatcgattaccagtagcaaagattgcttcaaaaagctttcaactgaatntacaacattccaattgatttccaaatggtgtaatcgatta

SEQ ID NO: 2874 - DNA, 432 bp, Glycine max
  unsure (1)..(432): unsure at all n locations
agtagttgcaacacattcttcacttgtgagagaagcctcttcctgccattatgggagaaaatgtggcattcatgagtgcccaattggttgaactcaaggagatgcttaaacaacataaaacaatgtttgaagaacaccaaaaattgatagcgaatttgtgaacgaaaaatgacaatgctcataatgaaattccaaacatagtagaaattgaaggaaattcgttagcaaagataaaacaggcagaaaattaatttgagaaatcaaaatcacatattccaccaaaatcagagaagaaagagtctctgatcaccatcactactgaggtggataaagaangtaaatttgatgaagtcattcccttcaacatgtcgttntccaaacatttggtggaaattcaagtcctgaagtagctacaacagcttncaatgatgg

SEQ ID NO: 2875 - DNA, 237 bp, Glycine max
  unsure (1)..(237): unsure at all n locations
gcttacataataacattgaacacatgaaaattacctcttatntataataaaaatatttacatcaagtactcaatagaaactcccaacaaaggattttagccctccattacaaggtagcagctttcacaaataggagaagggtttcagagaaaataccagattacaaagcagtggggatgtctcctccacctctaagaaccgagaaaataactctaaaacctagaatctacctaaaag

SEQ ID NO: 2876 - DNA, 248 bp, Glycine max
ataatttgagaaactcatctttatggatattaacacacttcaagagtgaaagagaaagagggcagtcaaatcactactacaataatgccattttacgacatcacacttaccacggttaaatgtaacacgttgtaaaaataatagcggtggcattattgtaattttcacaaaattgacaacgacagttattgaaataaccgcctttaataaacaagcaagctgatacaaagacagttttattataatga

SEQ ID NO: 2877 - DNA, 343 bp, Glycine max
agcttgacaaggagccataccaatacaggcctggtagcttttgtccgaagcaaactcaagcaatggcgaacaatccatccagctaccttgttgctctataatacacgcccgaagtagatcctctagagtctgaatagttcgctcagtctgaccatctgtttgaggatgataagctgaactaagcttcagctttgtccccaaggcttcatgtagacttgtccaaaatcgcgaagtgaaccttggatccctgtcagatacaatactagaaggaattccatgcaaccttactacttccttgatatacaactccactaactgttccattctatacctcatattcact

SEQ ID NO: 2878 - DNA, 196 bp, Glycine max
caccattagagtgtcttggattttaatattacagacggatcttgcttggatgataaatatgacacataacatgattgacatacaaagatagataatggcttgtcacattgaacactgatacgcagatacattgacattatgaagtgtgatttacactaatctcattcatcactgttgtgacaagtgatacacatgt

SEQ ID NO: 2879 - DNA, 65 bp, Glycine max
agctttgagcaatcaaacgacttatctctttactcggatgcctagacgaggcctgatgtatatcg

SEQ ID NO: 2880 - DNA, 341 bp, Glycine max
  unsure (1)..(341): unsure at all n locations
tctacattcaatttcgagcttttcgattattacgggacttaatcggacatccgagtaaaaagttattgtagtttgaatttgctcanggcttcggtattccatttcgagcgtctcgatatattacgggactcaatcggacatccgagtaaaaagctattgtcgtgtgaatattctcagagcttctgaattccatttcgagcatctcgatatattacgggactcaatcagacatccgagtagaaagttattgtcgtttgaatttgctcacagcttcagtattccatttcgagcgtctcgatgtattacgggactcaatcagacatccgagtaaaaagttattg

SEQ ID NO: 2881 - DNA, 432 bp, Glycine max
agcttgcctgtccgatgcagcagttatgattcctctagttatgttggggaacggttacgaacccggaatgggtttaggcaaagacaacggcggcataactagcttgataaatgccaaaggaaatcgtgggaagtatggtttaggctataaacccactcaggcagatataaagagaagcatcgcgggaagaaagagtggtggtcaaagctcgcagttgagacaagaaagtgaaggaagtccgccctgccacataagtagaagctttataagcgcgggtctgggagacgaaggtcaagtggtcgcgatatacgaagatgatgttccgagtacattggatttagtacgaccatgccctcctgatttccagctaggaaattggctagtggaggaacgccctggcatttacgcaacgagcataatggtaacctttac

SEQ ID NO: 2882 - DNA, 313 bp, Glycine max
  unsure (1)..(313): unsure at all n locations
tcttatccaaggctcatcttggtggtgatgctccttctttctggcttattccttaatggatggcgcctgctctcacctnctttccttngtcttccgctgcatctncatggtggaaaatcaccattaaaggaccccattgaagctcaaagatccagcctccatagaagccccacaagcaagcttccatcagctacacacacccctctcataactaagctcacctctntgagaagcttccttaagaagattcctaaagaagctagagcttagctacacatacctctttaatagctaagctcacctncttgagatg

SEQ ID NO: 2883 - DNA, 389 bp, Glycine max
  unsure (1)..(389): unsure at all n locations
agctntcaaggagggagaaaccggactatcttcatgaatacattaaaaagagcagaagccacatttgcagattcgattgtagcatccatggtagatggaagcccatttgaggagacagaaacctgaaatctcaacgagtttagttggaatattgtagataaaaaaggtaaaaaggagggaacatagatagaaatgatgtcaatagtctaaagaaaaatctcaataaaaacatgaaagtaaacttacaagcaatccggaggggttcaaccatgtcaaaattatgatagctcctttcttaagagggcgatctataaagacaccacggaaagttgtcaaagcagtttcatcttgtggtgtgggttgctgaattcttggtgatatggcatcac

SEQ ID NO: 2884 - DNA, 373 bp, Glycine max
  unsure (1)..(373): unsure at all n locations
tatgcaaggtaagttacaacttcaagtttctagcacttcattatgtacgtgtgattggatgtcccaatataaggactntctgccatggaaatntagtcactccaagcctctcgaaagtgcgttatggatatgaccatcgagaactagactgttacgatggtgaccttaataccacactggaaatggaattaattaacattgcagccaaatgtcatgaatctcaattttcaggggttgatattaatgctctaattttgatgggtattcagactagcaaaaggaatttgagtttgtcatcaaaatctgaagaatagaagctattatttgctcacttgagatatctacgtaagggtatttatgtnttgattttata

SEQ ID NO: 2885 - DNA, 350 bp, Glycine max
  unsure (1)..(350): unsure at all n locations
tagctatatgcaagtcaatttcatgatgcttctcggagaggatcttcttcggacatatttgcgcaaaatctctagaactacgaagaagttgtccatcatctttttgctcttaatgaaagcagcttgactgtccctaattatcgtctcaagcactgtggctatgtggttagccagaatnttaaatacaatcctgtataacaaattaccgcctgatattggtctaaaatggttaacctgtgaggcctgatcatgcttaagaataagcccactaatagcatggttgaactgctttataatttatccagttgtaaacatttcattaaccgctgcatagatattaccaccaatga

SEQ ID NO: 2886 - DNA, 412 bp, Glycine max
  unsure (1)..(412): unsure at all n locations
gaccttagaatactaagctttataagtgaaatcaggttcagccatctcctcttgagttctctcacaagggggaggttgagccatgttctcagtatgaaaattagtagttgaatgctcaaaatcggaatattcagaatcaccagcaacaaaatactcagaatgctcaaaatgctcacaatgctcaaaatgcacagaatgatcagggtgcacactatgcctaactaatctatgaaaggttctatctatnttaggatcaaagggttttaaataacctagatttcccctagtcatgcactatatgcagcaaataatgtgtttctcaacaagcacctaacaagggggtaaaactacagctatagtcaaacgatatccaaatgagctgaaatnttttgagcaacactctaaaatcatg

SEQ ID NO: 2887 - DNA, 376 bp, Glycine max
agcttgttggagtatggtgcacccgttatatgtggtactatgtggcgatcgggagatggaacgaatcaactctgcgcacttcacaaatcagacataaaaacaccatgcgcagttgcccacctttcaactgagctacgcactcctgacgtacccttatactcgttcctttcagcatcggggcctcatcaacccctccaagcttacacaatatccaatcaggtcaattccaaatatcatgaactaccctaaaccaagaaaacagagtagaggcaggaaactctgtccaaaacccactctgataccacagctgtgcttactcatataccccaagaacattctcttcggtcgattcgtaaccgttgatcgcctgaaaatt

SEQ ID NO: 2888 - DNA, 315 bp, Glycine max
  unsure (1)..(315): unsure at all n locations
tctagtcgtccatagaccttctctttggtactgtctagcatttgttgcatctgngcattcatcgcatccagtaacagacgttgagcgccgtccaactgatgatactcgtcaccaccaccacctgctccagccatatattaacaggaaaaaaaaatgggcaatataaattattaaggtttaggacctcacaacactctactcacgtgtttaactcttagatggtagcacactcgtgtttaatgctctcaataagctnttgtgtaatgtattccctcttgccttataccactcgtgttttctcttaagttcctggat

SEQ ID NO: 2889 - DNA, 381 bp, Glycine max
  unsure (1)..(381): unsure at all n locations
agcttatccaanaatccttttgcaacttctttctttcccctgtgtcaacttccaatccatcacttaagcggaggtctatatcatccatcacaaaagtgcccgatgaggctccaagtttatgagtagtcctaacagggagatcctagcaggggttgtattgagttgttcaattaccttgaactcactctgctggatgatgcgtangaactcagttgcttcatcaacggatattccttttttgctaaagtcctattcttccttaaaaattggctcgccttgcttccctcttccacactcacctttgccttcccctttaggtctatagctcgcaccgggagctcgggtgccgcaaagaatcccccgctacgagttacgccgctc

SEQ ID NO: 2890 - DNA, 399 bp, Glycine max
  unsure (1)..(399): unsure at all n locations
tatccttatggcctaccnctcgtacttcacccttcgtgccaccccggaagagttaagccaagcccctacttttgaggggcaactcccaccttatgaagactatcccgggcaagacgatggggaaggagatacccatcttggccccctgctccacctcaaagatccgtccccgcatgaactaccccaaccgaacatagtccgtcataccccggcctcacccacacccgtaaaagaatctgttccctatgcagacgataagggaaagattgaggcgcttgaagagaggttgagagcagtcgagggcctcggcaattacccattctcggatttagtggatttatgtctcgtgcccaacatcgtcatccctcccaagttcaaagtactggactttgataagta

SEQ ID NO: 2891 - DNA, 368 bp, Glycine max
agctttcttgctctctttgttctccatctactttgaagctgtatgttctccatctgaccatcgttttgtctaaggtcaagcatcgagttcgtcgcactcgagcatcgtcagaagtttgtgcttcttctccttcgccacctcacgtaggtatgtttggtctaatcctgtataaatatttgattgcattcatgtatcgcacacttagtgaactaaacatggctagggtatctcatatttaacttgagcatcgagacaactttgtgcttcttctacttagggaagtttcccttacccttattgcgttctagatcaatttaattgcttcatggtaccggatgccgatcccggtatcttggaaaccttcggcc

SEQ ID NO: 2892 - DNA, 236 bp, Glycine max
agcttatttctattttttgcatcccacgttatatatagttatatgtactccccattattaatggcaggataagttcttaatattactatgttacgggatattttcattattcccataatcattgagttacatatcagtacggaataaataaaagatgagtcagattgttatggcccactgctccacaaataaaataagaaaagaagttcccttgatacttgattagaacttcatct

SEQ ID NO: 2893 - DNA, 378 bp, Glycine max
gcttctgttaaaacaattgagcatcagctattattcagcaaaatattagagatgtttgtttacagtgatctattaacttcttaaagttttatccatgtttggaagaatagaaatgctggacagggtaagctaattctatccaattttactatgaattcagtaacaaaaaaagatagcatctagatatccgcaaacagccttataacatgtaagctgatattgttgttttacaagggaggtaggatacagcaaaataataactagacaattaaataagctgttgtttattttacatgcccaaaataatttcaaaaaaggaatagaataagaaatccacagtgtcccctacctgcattttggctatggttcatgttcaaa

SEQ ID NO: 2894 - DNA, 371 bp, Glycine max
  unsure (1)..(371): unsure at all n locations
agcttagagctcatgccctnngnnnnnncncgcgctgcttccgngnnncgaaattcatcataattgtgatcaagtttctcatcaggaatctgttttagtttgtttttctcttgtggatgttgtagtttgcgcaccaaattactaccattgcctaaaacgtgccgaaaaaattgttgtaaactagttgtttcagaaattgagtaggagggttttgcaagtttctttatctgggtttgctgtggcgtttgttgtattttggtttttgtatatttatttttaatttcttctgccatttgtgggattataaaattgtattttaatatataagaataaaataaaatgtcacataactttgaatgggtacaaactta

SEQ ID NO: 2895 - DNA, 380 bp, Glycine max
  unsure (1)..(380): unsure at all n locations
tgttgctcgatatctntagctctttgagtccnctngagaattgngttnctcttcttcttcttcttcttatatgggatccctctagccttttgctgacacttcttgacctcacgcaggtacacccgaatggctcctcctccaaagggattagtctctggcgatccgccatgctcctcatangcagcgcgaaaccggcctatgagggcatcgaggctaccccatgcttgcctgagagggcangcacanggtgcangaggggtgggctggccaaagaagatgcaaccgtgcaagtggaccttggttttccaaattgatcgaggtaccgaaggaaatccaacacatggttgaagttgcactgagagagtggaactgggggactc

SEQ ID NO: 2896 - DNA, 413 bp, Glycine max
  unsure (1)..(413): unsure at all n locations
agtctaccagaggcatgcaagcttatacttcgtatccaatgcttgaccactttntattttttacttaaatcattcatccttaagctattcctttattagcttcaaaagcccatatatttccagttaaaatggtttgaccatgaaaattctcccatcacggatgttggcttacatattttaggcaccaaggaagtcctcaaaatgtcatgatattcatgcaatgaaataaagttcttggttactaaaccaatggcggagcatcaatcatgttaattatgggaaattttcataagttcttctataatattcatgcaagtggttcaacttagtacatgaatcagtactcactgatatgtttggcagcaagaaatcgactactttgtgtaattcctcagccatccaaattacatttg

SEQ ID NO: 2897 - DNA, 90 bp, Glycine max
aaaaactgatgttagaatgtgctgtggcattacgtaataagttgacttcattaacatcggtattgaaaaaaccgatgttaactagttgat

SEQ ID NO: 2898 - DNA, 147 bp, Glycine max
cttgttgtgttcactatgactttgagattggactctcattaggttgcctcacctgattcttttttcttggcttttgttataagatttattgacttgttggatatttttactgggagccttgattaacatgtttacactccgcttatt

SEQ ID NO: 2899 - DNA, 233 bp, Glycine max
  unsure (1)..(233): unsure at all n locations
gcttgcttgctctatacgcacgccatctaccttgaatcttatgnactccatctgaccatcgttttgtctaaggtcaagcatcgagttcgtcgcactcgagcatcgtcagaagtttgtgcttcttctccttcgccacctcacgtaagtatgtctggtctagtcctgcatcaatatttgattgcattcatgtatcgcacacttagtgaactaaacatggctagggtatggcatat

SEQ ID NO: 2900 - DNA, 429 bp, Glycine max
  unsure (1)..(429): unsure at all n locations
ntaagcaaattcaaatgacaataactnttgactcggatgttctattgagtcatttaataattcttgacgctaganattgaatacagaagctctcaccaaatttaaatgacaataactttttactcagaagtctgattgtgtcccgtaatatatctagatgctcaaaattgaaaacagaagctctgagcaaattcaaacgacaatagctnttgactcggatatccgattgagtcatttaataattcgagacgctcaaaattgaatacagaagctctaagcaaattcaaatgacaataacttttgactcgaatgtccgattgagtcantttataanttgagacgctcanaattgaatgcaggagctctcaccaaatttaaatgacaataaacttttactcagaagtctaattgtgtcctgtaatttatcta

SEQ ID NO: 2901 - DNA, 322 bp, Glycine max
agcttgctaattatcacaatacccaaattatttcatgttaataagaaaaatgtgataaatatattacaagaattagagattccaaaaaaacgaaaagattattatgatttacttgtggtcaaacgcgggaaaaaaatcatgccgatgttgccaaacaggattccttactgaagagaccgaaaaaaccctagccaaacattgttcaacaaattgcctacaagattcttatattattaagttggattaatcttgaaccaataagtagtgattaaaggatccatctgaatttaaaaattaatagaagtatcattaaccatccata

SEQ ID NO: 2902 - DNA, 318 bp, Glycine max
  unsure (1)..(318): unsure at all n locations
tacaatcaagtggacataaagtcgattcctcctgaggaggtttggtattgtctcaacacggatggagctttcaaagggcaaggaggtattactggttgtggtgggctttttaggaatataaatgggaagtggatttggggtttttccagaaacttanggaaagaaagtgtctttgttgcgagctgtggggttntttttttcaaaggcctcaagttgttcttcataaagggattgataaggttactattcaagtagattctaaagttgttgttaaagctataaatggcgacaaagtggggaattttngttggtggatat

SEQ ID NO: 2903 - DNA, 252 bp, Glycine max
  unsure (1)..(252): unsure at all n locations
agacgagacctaagcacctgcagctgcacttaaaatagatggtttttatttgtactaaactatggtcaacatggagttgtttagaccagacccnagcaagtaaacttgagttatcaatgagctgataacattctgaaagtataggaaaagagggtccattgtgccctagccatgggagatgaactgtcttaacacaaccacaaagtaataagaagaagatggaaccctggactttactatgacgcaatagtt

SEQ ID NO: 2904 - DNA, 245 bp, Glycine max
  unsure (1)..(245): unsure at all n locations
attcctcttttcaaacgtgtttatactttatactattacatacttttctcttattttcatatatatatatatagagagagagatttcctaatttactttcacttattttntagaccaatgctgaccaatattcttggaacattgattataaaaggaaaatcattttttttttcaattgggacgcataaaantatattatctattttttgtataatttcttataattcttacaataaattttattg

SEQ ID NO: 2905 - DNA, 341 bp, Glycine max
agcttgacgcggtgaaggaaactagtgatgttaatattataaggggaatacgcgttagggctagatgttctggttctggactgttaacgctgacttcttctcttctagaacttattatataatccatgttttggaaggaatctgtttgtttcatactcgtgtcgtgtttcctcgaaaatcacttgaactcgattcttcatctcttgcctcctaataaatcctctaacagctttgcttgatttcaaactccgacaaagaacaaccttgtcgacacagcaaagcagagtaccatattaagagaagaatatgtgtttggtgtttgtgtgcagagaagatgagat

SEQ ID NO: 2906 - DNA, 306 bp, Glycine max
ctaagcttagatcataggtatcaagggaaaactgactactttttgtcagtgattatacaataccacattgaacttcagtagcatcaaacttatctctcagaaattcagattagttaaaaacaccattgtgcaaaagaaattcgcatcaaaagttgtcagaaattatgttaaaatggaaagctttcatacttgggcacaaacatgaaactagggacaaacaacagcatctaagatccgaatgaaagcaacactcacacactactgcatgcagacgtatcgtaaccaggaggcacatttccacttgga

SEQ ID NO: 2907 - DNA, 351 bp, Glycine max
tagcttgtagaatggctagttatgatacatgtcacggcttggtttggttcaaggataaaagggatgccccacattatttccatgacacaaatgcaaaaatgacgatttggaaattttatgcaaaactggttatgcatgcacctatgcggacactcaagtgtcaaatttttatggtcatgtgatgctagggctcaagattcatttcctctatgttagtcaacccaacgatcacaaaatatggtcttttatcaatttgcgcattcatccgaggccattttgggcgtctgggaaaatcttcacagcattcacccttcatgtgtatacacatcttttcagaaactagttatgatc

SEQ ID NO: 2908 - DNA, 222 bp, Glycine max
  unsure (1)..(222): unsure at all n locations
cttcgctcccgagtatgacagtcaccgctttacgagtgctgtacactatcagcgcttctaggccatcaagggatggacatttgttctggaacgacgcgttcagcttacggacgacgagtataccgatttccaagaggaaatanggtgcctgcggtggacatcacttggtactcccatggccaagttcgatccagaaatagtccttgagttttatgccaatgc

SEQ ID NO: 2909 - DNA, 337 bp, Glycine max
  unsure (1)..(337): unsure at all n locations
agcttatacttcgtatccaatgctagatccacttttatcttttacttaaatcattcatccttaagctatntccttattagcttcaaaagcccatatatttccagttaaaatggtttgaccatgaaaattctcccatcacggatgttggcttacatattttaggcaccaaggaagtcctcataatgtcatgatattcatgcaatgaaataaagttcttggttactaaaccaatggcggagcatcaatcatgttaattatgggaaattttcataagctcttctataatattcatgcaagtggttcaacttagtacatgaatcantactcactgatatgt

SEQ ID NO: 2910 - DNA, 265 bp, Glycine max
ggaccttagatactcagcttaatggctatgacattttcccgagagtgtttgtgttgtcacatgagattatactgattatattgtgtaaatgcttcaacacaatgtcaaaatatatatcaagtgatttgccctagagaggagaatatgctctataacaatggatgcccaagctattccaaagagtgcttggtgcgattaattaaaaaatcaaatcgaaagagataaagggaaattgaatatgttgaagaaaaaataatgttgtaaa

SEQ ID NO: 2911 - DNA, 375 bp, Glycine max
agcttctatataagctgaactcattttattcattttacacaagttgagttttattcagaaaattagagtttatctctttatcttagcgagagtgaatctcctaaattcttgagtgaatcaagaacaccctggctgtatcaaaagacattcacaacctttgcgtggtgccctcgctggaaagagagaatctttccttcctttcatcttcacccttgttctttctaaccacaattccagaaaatccacctctgcccagaattatctcgtggccataactcccattgtacgcactcaaattaagtgattcttgagcctaaattgaatttcaaaacgagtcctttcacctcgttttggaatcaactcatttggagccct

SEQ ID NO: 2912 - DNA, 444 bp, Glycine max
  unsure (1)..(444): unsure at all n locations
tgannatgaacaacggattctctcgaganaatctagtggttataaattntcacacagatgtccgattcggggaaataatatatcgagacgcacgaaattgaacaacggaagctctcgagaaatttgaatggtcataacatttcactcggatgttcgatccggggacataatttatcgagacgctcgaaattgaacaaccgaagctctcgacaaattagaatggtcgtaacttttcacgcgaatgttcgattcggggacataactcatctagacgctcgaaattgaacaacggaagctctcgagaaatttgaatggtcataagttttcacacggatgtccgattcgggaacataatatatcaagacgatcganatngaacaacggaagctctcgagaaaatcgaatggtcataacgtttcacacagatgntccgatcggggacat

SEQ ID NO: 2913 - DNA, 363 bp, Glycine max
  unsure (1)..(363): unsure at all n locations
caatcacaatgtcttcaacctcagaaagatggatccagagaagttcgaagctcgtgtcaagcacttgccaaacaataaagagtagaccgggcttattatgaagatatttggaaagcaaggctgganattaatgcaaaacataaatctgatgccagagccatatgccaagccattgctacaagacaagccaaagtacaggctgtgaaaacaaaacccaactaggtggnttccaaacccattgttgctgcaacaatgcaggaggtggatgtatccattcctgcctcaactgctgagacactattggagaaggttgacgagactatgactgaaccctaacaatcaaaaacctcacatgatgccaca

SEQ ID NO: 2914 - DNA, 257 bp, Glycine max
acccggtgttgagagaaacgatgttatgggctactttggagtacgtgagctcagttggaggtgggcaacaagggatggtgggtttatgcgcgaattgtggatgtggaaaacttgttgtgcaccatcgtccgaccgccacctagtaccacatgtgatgggtaccccataatcctacaagcttgagatgaggaagtgttgaagggtgaaacttcttgcttttattgttgaccacacaatggtacctggagatatgttgc

SEQ ID NO: 2915 - DNA, 255 bp, Glycine max
tgctcagagcttaacattcaattcgagcgcgtcctttttaaggactaatcagacatcgagtaaaagtattggcgttgaatttgctcagagcttcaacattcatttcgagcgtcccatatttacgggactaatcaacatcccaataaagtattgcgtttgattgctcaagctcaaattcaattcagcgttcgtatatattgactgatcccactcccaaacaagtattgcgttgaattgctagacttaacattaatt

SEQ ID NO: 2916 - DNA, 460 bp, Glycine max
  unsure (1)..(460): unsure at all n locations
ctccgaccgaacaccgttgtgtttctatctcggcccaagtttattgcgggctatagcatcggttccgcttccctaactgcattggaggcggtcgccgtggcattatcctctatagttttctagagttttagcatggcctccgtgatagaagccatttgatcttttaaggccgataggtcggccttcatctgttcttgcacgccctcttcattggccatttttctggatcgagtgttataggggtgcctttgtgctttcttagttatggtgaattccctaaagaaacaaacaacggtgagtacgccaccaaaacatgaatatgccaatgaatgatcggagcacttggatccacctcaagggtntttagataatgtgatgagttcaaaacttctcgtttataaaaagaacatagtctcatctagccaagatttacnaaagtgttcaacagacctaatggttc

SEQ ID NO: 2917 - DNA, 275 bp, Glycine max
  unsure (1)..(275): unsure at all n locations
gaatgaagctctcanagggaaacctaaggatgttgttaaacttcatcaagagatcggctctttgaaagatactttatctaaatttgtttgaggcactcaaattctgaacaaattgttgagatatagtaaatgcccatttgatagatttggacatggatatctatgagaaccttatgttcatgatgaagaaataattgtatgctatgtctatgaaaagattgggcacatgacatccaagtgtagacatctagcaaaaattgggtagaccaatgctt

SEQ ID NO: 2918 - DNA, 492 bp, Glycine max
  unsure (1)..(492): unsure at all n locations
tagctggtggcacaaaccttggtgacgaaggacaaganattgtaaccgacacgctcgaagaggtaccaccatgcggtggcataaacgagcaccgcaaccgctccacgccaattcatccacaacaccacatcagcaactaagcctttgccgagaacacgatgaaaggaggagaaactaaggtaatgccaagattgtcagaagaatgatgaaggggttagaatcatcaatgacagccatgaccatgagagaaaaaaaaaagaaccaaccaggcatccgaaaggttcccttaaaaaacgattcataagggggtggcctacccanttatataaaaacttaatcatcaatgacatccatggccatgagagaaaaaaaagaaccaatcaggcatccgaaaggtccncttananaaatgattcataagggggtgacctacccagttatataaaaacttaatcatcaatgacatctatggccatgagagaaaaaaaaata

SEQ ID NO: 2919 - DNA, 359 bp, Glycine max
  unsure (1)..(359): unsure at all n locations
ctatgggccccgacaggtaccataaacattgcataatgtcttgaanaccatcatcacttcatatggatgttgtagaagcaagagtggtacgtccttcttcatctttacatatggaaatgtgaaagcatctttccttgcaaatgtagatgatccgttgcttacaagccaccacaatggttatcttcaagccttcgctatagccttttcatacacatttccactgaaaaacatgggtgcacctcactacttccttggcattgaattatacccaccaaatcacggatgtgtctttatcaacacaagtacactcgtgatgttctggaaaatcttgacatggaaagggcgaaccaacaccacac

SEQ ID NO: 2920 - DNA, 412 bp, Glycine max
  unsure (1)..(412): unsure at all n locations
ctataaactgttattaaaaagctgaaacataaacataaatctaaagactgaaacataaacataaatctaaattataaaatgtactaaagacatgataataataaaactgttcaaaaagcggagaaataaaaatcgtgatcctgtcaatgatcttgtgcagagtccatggcatgctcattcaggtccagtgcagtagtgcctgatggtgaatcctgagaaagacgcacatctggcattggtgcacatgactcangctgagaagaagacatgtccagcactgcagtggaagactctggtgtcacctatggggcttagcgcaagtaactcgcttagcgcgccttagtaaaaactattcaagcgctaagcgcgatagccacatgcttagtgagtgaacacagaaaanaaaattcta

SEQ ID NO: 2921 - DNA, 408 bp, Glycine max
taagttctcctacacacaaacaaagaaccacacaacagttacaaccttcacaaattcctactcagttactctagagagttgacaactcaagacattaacacccactttctatcattcgcattttctgatcgcttgccatatcattccattgcccttcacaaattatacacgtggccagtctaataattcgtgacccggcattgaaattcatggtatagcagacatcagacaaacaaattcaatatgactactaaaatcaaatctctatagctgattaaaacacaactagagagtaagtgctgttagaaaacaacaaacatcaaacatcagcaaacaaccaacaccaagcagttttcggaccaaccagagaatgcacagatgaacagttcagactcacaactcactggc

SEQ ID NO: 2922 - DNA, 455 bp, Glycine max
  unsure (1)..(455): unsure at all n locations
ttccttttcaggtccattgactaataaaccagtattagtaaacttgtttctggagggtttccacgtttaccagtggcccacacttcatctccaatagcatctactaatgcttcacctcccctggttgcttcacccaggataagtgagcttcatgaacttcctagacctcctggtaatcaatctagcaagccacgagcgggtcactctgctccattagtattaaaaaatccaaaagctgccatgactaataaatttccttcagttgtatttagtgcagcatctccactctcaactccacctgtctctcggagtttctctataccttctagtggtcagagagttgtggcattaaatgtctcttatactaacgtattggatactcnccaagattcaaaggttgaataagacgtgtcaacctcactaacacccatgtcgcagagagcatctaatatatc

SEQ ID NO: 2923 - DNA, 470 bp, Glycine max
  unsure (1)..(470): unsure at all n locations
ccttcattagttgttgtgttntactattattgtctcttatagaataacgatatgcatatcttgcattgtatacttgcttcattgttttataattgttgacattgtactccttcaaagtgagaagaatattatctggtttgaccattgactttgtcatatcaccaatagtaatattttcatccttagttagttgacaaacacatggatgtctaaagaatgacttagccaatgcatgattatgattcccacatattaatttcatcattcattcttcacctcctaacactagtttcgctcgcagcttaaagggacacccacattntctactatcagtcactgttcatactaaatctttcttgtatgtcttatatttttcacttttctcacaaccaattaaaacacatgagatccctcctatcntttcaatatctgtgtgtggcctcattattaccgccacanaaccaatatca

SEQ ID NO: 2924 - DNA, 304 bp, Glycine max
acctacacgctcgaagaggcaccaccatgcggaggcataaactagcaccgtaaccgttccacgcctattcatccacaacaccacatcagcaactaatcctttgccgagaacactatgaaacgaggagaaactaatgttatgcccagattgttagaataacgatgaatgcgtttgaatcatcaatgacagccatgaccatgatagaaaaaaaaaagaacgaacctaacatgcgaaaggtccccctaataaaccattcataatggggtgggctacccatatatataagaacttaatcatcactgac

SEQ ID NO: 2925 - DNA, 79 bp, Glycine max
gcattacgagacctaacatactaagctagggtgtcgtcgaggaagtgagatacgggttaagggtgtctggtgatatgat

SEQ ID NO: 2926 - DNA, 364 bp, Glycine max
  unsure (1)..(364): unsure at all n locations
gcttatgaactancatgtgaatgttccaattagatgaaattctctagtgttatcatggcgtagctatgatctttcttaagactaatttttctatcgttaattggtaattattagtatttaattagtcgagaaaatcaaatccattatattgtttttctttcttctttntatcatgcaaccaatcttataacttctaagaccgtggggtttgaactatnngnggnnngggnttttttttccataacacatgcagaatacgataccggtcataaggggatatcttgttcaccaaatcataggttatttaatttgagttgtcatcattaaaattaaagggatgattaatcttatcattaacaacatg

SEQ ID NO: 2927 - DNA, 369 bp, Glycine max
  unsure (1)..(369): unsure at all n locations
ntntaagatacaaagtcatttataaatgctttataatcaaatagttctaacattccactcaagttttgctgtgtcaccctattttaccaaatcagagtttatgcaaaaattgatttcagaaaggtatgtagttttatttgagcagttaatattctggttgtgacaaacacttcaatcaacaaatcaatgaaatcaaaacatgaacccacaatgcacataaatgaaaatggaaagacaaatcaacgaaatctgtctcataaaaacgacgatcacggacttgttcaccgttggatcgttgtgaaccttgagtaccacctttgcaacccaatttcaaacattctcaccgtntggaattgaaaataattactg

SEQ ID NO: 2928 - DNA, 422 bp, Glycine max
  unsure (1)..(422): unsure at all n locations
agcttcaagcttcgcttttctcttctccttcattntattgtttcaggaaagttctcctcacgcggcgaggctaaaatgtgtaatataatgaagtttcttaaaaataattattggaaaagaggagaagaaaataaatagatgaaataagagtcccatggaaacttctcccaaagctagtattttttttttttatcataccatacaccaaagctagtgttataataatagctagtattaaaatgtgattaagatgcaatttagagaaacttgtcaccaaatactttcgggagaaggaaataaatagataaaaataacaatcttttcataaattaaaatcaagttatttatctcattctctttgaacatttctcatctaaatnttctaaaaactaagatgcatgactngatttaatctatgaaaa

SEQ ID NO: 2929 - DNA, 338 bp, Glycine max
tcgagacaggtaagaagctaacgtaccttccacctcttcaccttaattgacgtacccgccaaaagatattctacttataaatacagcgtggatttttttattatattttacactgatataaggcacactcattcttaccttatgaattcacttaaaaaacacgtagctcgtgaataacattaatgtgatgattttagtttcttagttctttgaacattttattttattttaatcaaacacatcgatagtcctaagcatctaaggattttgcacaaagatagagatgtgctgcattgtgtagatcatatacatataggcactatatctcgtcaacatct

SEQ ID NO: 2930 - DNA, 333 bp, Glycine max
  unsure (1)..(333): unsure at all n locations
caaacgaagattgctggggtcaccacctctctttctagttgcaatcgaccggacacaaagctaaattctctttttgacggaatagaatctttcataaaaggggaggcaatgacgatttgtgccgttaaatggccatactttttggtcatgagcatgacatacggtcacgtaacttcacgtcatgagtatcaggttgcgatggtcacagtgctcatatgctactttcaaaacttgttatctatatatcctaacgtcatttgaaaatgcgaaatggatatgattaancttacttcanaggctacgcatgatctgtgcactgcttgatatcttaat

SEQ ID NO: 2931 - DNA, 178 bp, Glycine max
acttcatctgcctagaaattgtgaacacaatgtttctgttgaatagcttagataggtgccttctgacagaacaaacagtcttaacaattatgtgtgcgttattacaaatcattgacaattgggtcatttaaacaacgtctatcattctattcttgcaggtttcacccacaataaatga

SEQ ID NO: 2932 - DNA, 380 bp, Glycine max
accacagagtatatgcacagaatatgaagctggataagtagaatttggttaacaactacttaaacaatcaatcacaatgataaatcatattcgacaattatatattaagatgttagttctattacatcctctgggttctaacattctaatgtaactggatcagaaaagataaaaaagaacggagtatgttattgattataaaagcttaaattcccagaagataccaatgtgatattctactatgttagggaagaaagaatccggtgataatcaggtggttaaaaagcctaggctgtccaaatcctgcaatcagttctctctctctaagagaccacagactagattctctcatttgtatgttgctcctctctaactaacca

SEQ ID NO: 2933 - DNA, 208 bp, Glycine max
actgctagtcatggagaatgccgaacctgccatgaatgcccttgtttctccacctcggcgacctattatggacactgcttgggaaatggcaactacacagtggaactccatattgcagaataatgtttactgatgataaagcatatagcactcttggaaggcgtgtatttgacatctaccttcagcccatatttttatcattacccta

SEQ ID NO: 2934 - DNA, 488 bp, Glycine max
  unsure (1)..(488): unsure at all n locations
tcacctgcggcatgcaagctgaaatatntattggtgtaattngcctgttccattaggctcttaatatcnttggaggttacttcctcattgacatattttgtcttgaatggaattgccatgacaggtttattgttactgtctttgacatttggtagttgatattgtgttgtgggaagtaattccgattggaataactcaccatctttcatttgccagtttgttatgacatttgttgttggatcacctatgatgtcctgcttccatgggtaatctatatcctttctaatggtataagcatggaaccaatcaaagaaaaggacattaatttttactctttcgataaattcatagaacttgtcttggatttgttttctgtttgcacccttgtaatgttggaaaaaccatctcctttgaagttcattctccggagaatagaagtctttcttaagggtttccttatcaatgcttaaagtgtcagataacatcat

SEQ ID NO: 2935 - DNA, 480 bp, Glycine max
  unsure (1)..(480): unsure at all n locations
tgctggtccagtagtctcacccgtgtcatcatcatatgtcttctttccatcagttacaagatttccaccacagtttatatgcatagaatatgaagctggataagtagaatntggttaacaactacttaaacaattaatcacaattataaatcatattcgacaaatatacattaagattttacttttattacatcctcttgtttctaacattctaatgtaactggatcagaaaagataaaaaagaatggagtattttattgattataaaaccttaaattcccagaagataccaatgtgatattctactatgttagggaagaaagaatccggtgataatcaggtgtttaaaaagcctaggctctccaaatcctccaatcggttctctctctaagataccacattctagtttctctcatttntatgttgctcctctctaactaaccaaccattagtatattatatattacataaggcatatat

SEQ ID NO: 2936 - DNA, 449 bp, Glycine max
  unsure (1)..(449): unsure at all n locations
gttcttcctcaaaactgtcctaagcaaagttcccaaagtcctattaacaacttccgtttgcccatcggtttgtgggtgacaagtggttgaaaataacaatttattgcccaacttgctccacaaagtcctccaaaaatggcttaggaacttagagtccctatcactaacaatgctccttggcaaaccatggagtctcacaatctccttgaaaaacaaatcaaccacatgggaagcatcatcaactntcttacatggaataaaatgagccattttagaaaacctatcaacaaccacaaaaatggaatctctaccattgcttgtttttggcagccncacaacaaaatccatggataaatcaatccaaggatactccggaattggcaatggagtatacaatccatgaggctctaccttagacttttgccttttacatacaatgcaatgttcac

SEQ ID NO: 2937 - DNA, 417 bp, Glycine max
  unsure (1)..(417): unsure at all n locations
ntacagcagattntagtaatgacccactaacctagaattaatataacttattgccattaacctagggaattaaaacaaacttaatggctgagtgtgactgaaattgtggcaaccaaaagtcacccccaacagccaacaagtcagccaccatttggtctcccaaaaggctgatgcctaagttgccaattgggcccttattacaacttgaactaaagcccttttagttgattaacccaaaacatatttttggccagccaactttacaaggattgggccattatttagacaaactaaacactctaaaattgaaataaagtggtgtcatttagtcctcctccatttgggccatgatacaactcacaaccttggactnttctccttgaaacttgngcttgtattcaaatagtatggacaaca

SEQ ID NO: 2938 - DNA, 434 bp, Glycine max
  unsure (1)..(434): unsure at all n locations
tggagctgncgncgaataagctaccactggcttcgaaccactggtcagatgacaaaaccagtggtcatgttagcataatcggacctcagctcagcccgctggatattaaccaccttgacgacacatgcacagatggaccagaggacaaacccaatagctcgtatagccccaaaccagcaaaggccgatcatacaagcagaaaggatgaaaaggcacatgaaagctattgcacaaaaggggtaatttcaaacaaagaaaaagctgcttctcgggagcatgttcacgaccctgcaggaaaaatnttgaattgtgaagatagagaatcagaggctcagggtccttataaggaaaacttgngaaatataaagcatgcaccccttcccctaaattcacctncctcgcagaaccaaatttgtaatgggccaactggcacc

SEQ ID NO: 2939 - DNA, 375 bp, Glycine max
  unsure (1)..(375): unsure at all n locations
taagctcattactgctacccctacagagcccgccgcaacttgtttctactccattcctcctttcgggcccttnttgtttcccactctaacacttcgaccatggtcaagtggatatattttagcttatcacactctttcatgaccctagtgactgtcgtccttagcttctctttcactactcttgtcctttcgagctctgctttcaaagcttacacttcttcgatttcctcaagaattacaacctctttcccacttatactttttagctttgggagccacgtcatcccttgcattctagacttcaaccacttgtgatagttgccgatgatgccattgctacttcctctaagctccttatattttcttcccactcta

SEQ ID NO: 2940 - DNA, 448 bp, Glycine max
  unsure (1)..(448): unsure at all n locations
agctntntgaaatcaaattctatcactggtaatcgattacaggaaactggtaatcgattaccagagagtaaatactctggtaacttagaaaaatttgagaaaactcttttgtaaaacaaaattgtgctatgtttggtttttgaaaaatccttttcaatacttcctttgtgaagtcttgacttgttgcttcttgatttcttctcttgaatcttgaattcatcttctcttgaatcttgattcttcttgatgtcttttcttgaatcttgaaatcaatcttgatcttgaaccttgtgactcaatcttgaaatcattcttttgggctttttgtcatcatcaaaaatacttgattcatcatcatgaaatttgcttctacataaaggagcactcaaaccgggtgacccctaagtcctacactctgaagagtccgtcagggcctcttccccctgat

SEQ ID NO: 2941 - DNA, 200 bp, Glycine max
ctggagctgacccatcaactgccctaactctatgttgctggtgatacgtagcctattgaccatgactatgatagaacctgattctcacagaaggcactcgacttgattccatgttacactcaagtgaaacaaagatagagcgaatgcaaactccaacatatatcatgggtggaaaggatgaatgcatgacgagatgcgta

SEQ ID NO: 2942 - DNA, 441 bp, Glycine max
  unsure (1)..(441): unsure at all n locations
atatcagaaagccactgttagttgtagtgatactatttttntaagactcagacaaaggatgagatacactgcaaagatattctaacctgattcggccaaacaacctcttaactacatataatgcctacgttcacgcgccaatcactaagtataaatgcacagcgaaactagccgttggtgcaagcagatatgcacaacaacttacgctcgcgaatcattacttggatattattagcacaacaaacctacttgcaaggggttgctttacctaaatatttatgaaataggaataattattcttcctatcatcccaaaagaacgtaatgtaaaaagcactgcacactagacatctttataatcctaattatctacattatgaatgacaagacaacacctgagaatatatactcaggcgggtgccacagtataaatagagatgtt

SEQ ID NO: 2943 - DNA, 196 bp, Glycine max
  unsure (1)..(196): unsure at all n locations
cgatattggcaccgtaacacgtagaatctcggcgcaattctgcccatatgtctcttcatttaccacagtctagctcgctcaaacactcttattcgctatntatttccacccctctcttaacgattaaacaccagattcgtttgatcaatcatctgttagttccactttaacgccttcctataatggtcgcagtacn

SEQ ID NO: 2944 - DNA, 256 bp, Glycine max
  unsure (1)..(256): unsure at all n locations
acaaaatgacatgttgatagaatcgggcaagattcaatccctcatctgatgttaatttatgtatcatatgtactaaaaactgttgttgctaactaactttatgcatgcaacctacanctcttgcaagcatacagttgatcganaananaaaaaannnccgcaanngagttcagccatagcaacatggattgattgcatctcaaacgaaaaatggagcatggcttatgacgataaaggacatatatatggtcacatg

SEQ ID NO: 2945 - DNA, 465 bp, Glycine max
  unsure (1)..(465): unsure at all n locations
ntntacttactaatgaagcaaaagggtaattacttggttttctaattgngcctatattcaatcactttgcttgaaaattatataaggacaaagaaataattctttctataaaaaatattgaacataagataaggagggctgcattggatatatatatatatatatatatatatatatatatatatatatatatatatatatatatatatatatatatatatatatatatatatataaaatngacaacccgtgatcgcactgtcttaggattactgacaaaagagagggtcacatacacttatgtatttactcgtcgctcccccgctcaacaagaggtgtgttaagatataacagacacacgctctacatcgtataactcttaccttctccgagagtttatcaatatgtgagaaccgcgactatctaaccaccatcttttatattttatgtatatatcttcaacaa

SEQ ID NO: 2946 - DNA, 435 bp, Glycine max
  unsure (1)..(435): unsure at all n locations
agcttcacaaagagaatcatctagatataacatacttggaagatctcttacgaggctatgcttttcaagctttaagattaacctcaagctagcatgaccaagcttctcatgccatgcccaatgatgctctntgactgagagtaagcatgacacttttttactggatagatcaccaagtttaatcttatagagatttccttgtctcttagcagagaagagtgaagacctatccttgtgttggactatacacatatccttaataaaggtgacattatatccactatcacataattaacttatgcttagtagattatgcttcaatcctttaacaagcaacacattttcaatatgaggatagagagggatacaaatcttactgacactagttattcaaatcttttgattccctccaaaagtgatcgccccatcagacat

SEQ ID NO: 2947 - DNA, 409 bp, Glycine max
  unsure (1)..(409): unsure at all n locations
ngatcgacgaggggtggctaacattccaagaagacggccctaatctaaagacaaatatgcttgccaattatgggggaccggtagtaaacgcaatataggagtgcgaactgtagaggtcgaagaaaatgaaagacgtggtaacctccaggaggttcatattagaggcactgcatgaggcgggcatggtttcccttgatgggaacatgggggattcctgtttaatgcatccgagtgcattgcatgacatggaaacatgtttaacggtagaggagctgttacagcgaatgatggaccaaggctggtttgaaatttgtgttgtaagcaaggaagatcaacatgtgtgcatgcaatcggcagacaaaagcccaagcaaacccaaacctttggtgatacacttcaccagagatgc

SEQ ID NO: 2948 - DNA, 442 bp, Glycine max
  unsure (1)..(442): unsure at all n locations
ctatgccatatatccttacaacgtactcttgcacaagacatttaaccgaaaanaatgcacccatatacaatcaaggcagcttcgttacctagattatttacacgtacctccaaggtgtatttgttacttacatcacacacatctctttggctaaattcacatacatgcatactcaaagcattttggggtaccaaaaattgcacatgtgcacatcttggcatttctaatacctattcatacgcaaacttcatgatgaatcttgactacccacacaataaggggctacatttcatgctccttttttcaagtttttgctacctaaagccgcatgcaaattcaagcatattttcctttgctgactaagattgtattcaaattaaaaggtatatattcttttttgtaatatgtnttcttcacataacatgcaacacatntatataca

SEQ ID NO: 2949 - DNA, 346 bp, Glycine max
  unsure (1)..(346): unsure at all n locations
tgttggccacgatcgacaaatggtgcataagacgacgtttgtctctgcctgctatcatgctctgggtcgtacagatagcacaagaaagagcttacggattgcccactcggtatcttcgcatgtcacgtgactccagcgtcagcatgaccgaatctgtctgcgcggaagatgacgtaaatcttcgtgtgtcaacaggcttcgtggctgccattgactaatggtgcagaagacgacgttagtctctgcgtgctatcatgctctgagtcttacagagagcgcaagatatgttttacggataaccactcgggtatctncgcatgtcacgtgactccagtgtcaatatgac

SEQ ID NO: 2950 - DNA, 445 bp, Glycine max
agcttcctatgctcattggagagtctgagattcttggaccttatctcaagtgggttcatgggattaattcctcatcaactaggaaacctctcagacctgcagcaccttagtgctggatacaattatgctcttcagatagacaaccttaattggatgtcaaggctatcttccttagagtaccttgatttgagtggttcagaccttcataaacaatggaactggcttcaagtacagagtgcacttccatctctttcataactacacttggagagctgtctaatcgataacttaggaccaccaaaatgaaaagccaactctacacatctccaagtgcttgatctttcaattaacagtctcaatcaccaaaaccattcatggctatttaatctcagcacaactctctgtcaacttgatttacacagtatcctttctcagggacagtgat

SEQ ID NO: 2951 - DNA, 537 bp, Glycine max
  unsure (1)..(537): unsure at all n locations
tggggntntnnnnnagatgcnaatgattccttagantgcactagacacgttcgcatccctacgcattgctcaagctgcctcatcaatcttcggataacccattatgctggcgtactctagagcatagcccgaagcgatatcgagaaccttactaacataggagctttgacgtggtcccctactccactccagtggcacaaagatgggatgcctaatgcatcctacaacatatatctatctgtgggatccctgaaatcatgaatagactcctataccgtctacgccacacttgagaggccacacctcttatgcgtggtcttatgagcatccactggtggtggtagacaagaatctgactggtggatgaattaatgagcctccgacccacatcttgattaccagtgagatgttgtaaagcatagacacgtgcccttttcgtatgtgcattgcactnctcggagttgtctatatacactgcctgcctgacgggttctgtcacccatgccatgctatggtacctatcgtatgactgcgcgn

SEQ ID NO: 2952 - DNA, 457 bp, Glycine max
  unsure (1)..(457): unsure at all n locations
agcttatctgngaatcatcattattttctttcttatgtaaacttaatttttatctataatttattgttattgaaattactttcaaatnttttgggataagtattccctaaaaacctcggataacattttttttatgaaatttccttcttatacttattttaaatttcaaaattttttattcaaattttatatatacttactaagcatttcaccaccagcattagtatatttttgttggaattntttctctcctatctaggtttggctatgagctatgtaaggttatatattaaatttttctactttaatttggcacgaaaatttaccataatcgtgatctttcttgtactcatcaataagccatcaattgtaactttntcacaccaataatcagctgaacaatcatcaatctatgataaacaaataagaatttacaagcataagatcttcatattaa

SEQ ID NO: 2953 - DNA, 467 bp, Glycine max
  unsure (1)..(467): unsure at all n locations
tcatgatgaatcaagaatgattcaaagaagttttgatgataacaaaggtgatgacaaaaagctcaaaggtcaagaacacttcatgataacaaaggtgatgacaaaaagctcaaaggtcaatcaaagaatgagttcaagatgttcaagatagaatcaagaacacttcatgattcaagaggaaagttgatttcaagaatcaagaatcacgattcaaggatcaagcttccaagaatcaagatcaagattcaagactcaagattcaaaagtcaagagaagacttaatcaagataagtatgaaaaggtttttttcaaaaactgagtagcagatagatttttctcacaacatgtttaccaaagagtttttactctctggtaatcgattaccagattggttgtatcgattaccagtagcanaatgaatttgaaaagtttcatatgagttacaatgtctaattgatttcaaaaac

SEQ ID NO: 2954 - DNA, 296 bp, Glycine max
  unsure (1)..(296): unsure at all n locations
nnttgtgttggtgttngcctaaaaatatacaacgtatgtctgttaggtttttccgtgcgagctcaaccgagggttcgttccgaccgacactggcatgttgttcttctcatttacgaggataagaaaacgttcgcccaccccggcaaaaacaaaaaaaaaacattattcacggaaattaatcgataaaatgattgctgacgtcagcatctagagatgaccgatcgaggtctaaaaaagaagaatcaccggatgacaccgatcaaacatttcctaatcgacatctttcaaatttcatt

SEQ ID NO: 2955 - DNA, 441 bp, Glycine max
  unsure (1)..(441): unsure at all n locations
agctntgagccataatcctgactcaccatataccttgacccagggtgagaatgtcaatccttaccctcggaagcaaaaaagaatagaagggaaatttccaatctaagaaaaagagaaggaaaatttccaatgaaagcaaaaaagaaaagaaggaaaattccccaatcaaagagtgggagaaagcaaaaagaaaagaaaggaaattcccaatcaaagaatgggagaaagtaaaaaagggaaggaaagaaagttcttgaaggaaaaacagaaggaatatgcagagaggtctttggaccggacaatatctgaacaatacagaattgtcaccaaatgaacgaaaaaagaaggaaagggaaccacgacctanaatagtcttctccctttgattaccaaccaaaatcccgtgcgctagcgactatnttttctcgccccgcactaaac

SEQ ID NO: 2956 - DNA, 414 bp, Glycine max
cccatacatgttgactaggtggtcggcgggccatagtgctgaacgatgcttcgaattcagaaattacgtataacccaccatcccctggtgaccaccttcaactgagctcacatgctcacacgaagagcttatgctagttcctttcaacggcgggtccccattaatccttccaaggttccacaacatccaagtagatgcacatccaattatcatggactaacaaaatcaagcaaaacagggcaaaggcagaaaactctgtccaaaacacaactcaaaagcacagcttttcacattcaaatacccaagaaacatttccttcgttccaatacattaaccgttggatcgactcgaaaattatactggaagtctctagttcatacgtctacattttgaccggcgggatctgtagaaaat

SEQ ID NO: 2957 - DNA, 488 bp, Glycine max
  unsure (1)..(488): unsure at all n locations
agcttgtgcatncaataccctgatgaggatgttccatatgctcttaaaactggactgatctcattgctttcaaagtttcatggccttgcaggtgaagacccacacaagcatctgaaagaattccatattgtctgctccaccatgaaaccaccacatgtccaggaggatcacatatttctgaaggtctttcctcattctttagagggagtggcaaatgactggctatattaccttgctccaaggtccatcacgagctgngatgacctcaagagagtattcttagaaaaacaatctccctgcttccaagaccacagccatcagaanagatatttcaggcattagacaactcatgtgagagagcctatatgaatactgtgagagatataaaaaattatgtgttagttgccctcaccaccagatttcatagcaacttctcctccaatatttgtatgaatgactcaccaacatggagagaagtatgatagatg

SEQ ID NO: 2958 - DNA, 424 bp, Glycine max
  unsure (1)..(424): unsure at all n locations
ntacagcagatagtagtaatggcccactgacctagaatgaacataacttaatgtcattaacctagggaattaaaaaaaaaactcaatggctgagtctaactgaaatggtggcaaccaaaagtcacccccaacagccaacaagtcagccaccatttggtctcccaaaaggctgatgcctatgttgccaattgggcccttattacatcttgaactaaacctactaaagcccttttagttgattaacccaaaacatatttttggtcaaccaactttacaaggattgggccattatgtacaaaaactcaacactctaaaatagagacaaagtggtccatttagtcctcctccatatgggccatgatgcaactcacaaccttggactgttctcctcgatacttgggcttgtattcaaatagcatggaca

SEQ ID NO: 2959 - DNA, 482 bp, Glycine max
  unsure (1)..(482): unsure at all n locations
agctntgattcaattcattcaaaacacaatccagtaatcggaattaataaatttcaccagcattctattataaactcaagtcaatcagggaggcagccccaagcgcagtccatcagtattcgcacaatagaaaaattaagcaaaacagtcaatccccttaacccagacttcctttccccattttacccctttgttcaccattgaaatttcactaaattttgccaaaaattaactcttaaatggaatgaggatgagtcaatcttagaacttacaattgatgccccagatcatccaaaccctgaatcaattcttgatgtctcagtatacaaatatgatttgtcatccccagtaaagcattccaatgctcctcaagtcaatatttctatcttccaaataactaanataaaagaacttcttgctttcgactattagttcattgtncaaaatgattacagctntatatgcaaaaacacctacaagtg

SEQ ID NO: 2960 - DNA, 389 bp, Glycine max
  unsure (1)..(389): unsure at all n locations
aaactcaagcttcaagaatggtgacggctcatccctcttgtctgtagaggtattccaatttgagaatgctgagtccccaacccaccccttctgcacacaagcagggagagattctttatatagaaggggttcagatgtgagttcacacgattgtcttttgacaatagagttggcttctgatagggaaaaagtaaggccattcacgaattgcaatgagagtgatgccctctctgtatcgaattttaataatattggatatggaaatgagcaaagcccctatgttggtggcagttgcagtttcctacttactgatttgtctgcagcaaaattaggccatagtccttntggaagtaaagcctctcatatgactaagcatttgtatgggcata

SEQ ID NO: 2961 - DNA, 490 bp, Glycine max
  unsure (1)..(490): unsure at all n locations
tcacctgcggcatgcaagcttgaagtcgtataaattaaagttggtggctataattatgaagatgctgaaacatgatccaacgaggatgttcaacttgataaccatcaccatcattacctcaaacgccgagcttctactaacaatggagaccatatgaagtgtgtagttttttatactagtatggtgcacaaagggaagtcatgcagtttaagggaattgaaatctttacctggcaattccgtacgtaaaggtgatgtacatgctgatgatatagcatgtaataaagggaagaggcatatatagaaaacacaacacaggatagggaagctcgatgacatttcaccacgtaggacgcacactgctaacatatatagcaagaagagtagtancaatgctgacttgcaaaatgcttatcacaatagacatgctactggacaaatagaagtgaatgctatccctgctgatgcanacaagacgatggaataccatg

SEQ ID NO: 2962 - DNA, 442 bp, Glycine max
  unsure (1)..(442): unsure at all n locations
taaaggaagtggaagaattagtatgggcagaaatgtctcttcactgattggtaaatctgttccccaaatccctgaaaaatgtaaagatctaggtacattcagcataccttgtattatagggaacaataagtttgacaatgccatgctagatttaggagcttctgttagtgttatgcctctgtctatttttaattctctatctcttggtcccttgcagtcaactgatgtggtaattcatttagctaatagaagtgttgtatatcctgctggtttcatagaggatgtcttagttagagttcgtgaactgattttccctgttgatttttatattttgaatatggaggagggattctctaaaggctcagttcccatcattctatgcagaccttttatgaaaatngctagaactaagatagatgtatatgcacgcacactatctatg

SEQ ID NO: 2963 - DNA, 485 bp, Glycine max
  unsure (1)..(485): unsure at all n locations
agcttattgcatgagctatatcaggttgagtacatgccatagcatacattattgaacctataatgttagcatatgtgatactctccatataagtatactcttcagctctctttggggattgacttacacttagtttgaattgatcatatataggtgtcacaataggccaacttcgaatttgacattccaaacctttcaataaatttattgaggtatgtctcttgagatagatacaaaatcttcttctttctatcccttttgatttccattcccaatattctccttgttgtcccaagtccttcatttcaaattccctttntaactcanctttgaccttggtaatttcggccttaccgntacttggtattaacatgtcatcaacatatagcagtaggattacaaaggtacctttattccttttgaatagccattttcaattgactacccttgaaccaatgggctttttgataaactcccatgtattt

SEQ ID NO: 2964 - DNA, 365 bp, Glycine max
  unsure (1)..(365): unsure at all n locations
ggcctaattaacctgaaatggagaganaatgattattaatcacacaaaatggaagtactaagtatttattacctatacttaatagaaaatacttataacactacaaaatagtcataaattggaagagtttgatacaatttacacaagttttatacacaaaagttagtcgtattcaccgactaacaataagctgtttagccaaaactttttccctaagctatgctgcaaagaattttgagttcaactgagaggtaattttctgaattaaaggaatagtactgtcagtaattataacgtcatcaagatacccaaggagatatatagtgtgcgatttggtcttgtaaatgattaaagaacgattacac

SEQ ID NO: 2965 - DNA, 479 bp, Glycine max
  unsure (1)..(479): unsure at all n locations
agcttcatagccgcaaccttaattatatgataaaaaataggaattaattttatttctagctttggttctagaagcaataagcagtaggcatattctaccctaaaaaagaatatggtagggtcataatcataacttgtttattaggtatcatagtttattaatttcatgcgacgtcttggctgctgcatgacccattctattcttttgcataactaaatggagtcaacccttgcattatttttcagtctcaactatgaatgatggaaattaaagaatgttgattcgtaaaattgggggagtgtaactaacagcatctctgatagatgtgatgtgatagaccagacagtatagaattacaagctggttgaatntgatgagaaattccaagattaatttnttttttttttgaaaatggagtgctgatgcatcacaatgaggatatacatcccaactgatcttaacaaattcatgttagttta

SEQ ID NO: 2966 - DNA, 420 bp, Glycine max
  unsure (1)..(420): unsure at all n locations
tctcacaattgtgtgtacggggagggatctattttatagagattggggccaactatccccactagaatttttttttacacaatatatatttgtagttataaattatttctaaaagttaaaatatagttaaaaattaaaaaattaagttttaatatgagttttgtcccaagtaatttacatatgtgagtattaaactcacaattaaaaaattctaaatccgtgttactgtgttgccagtttatatgttggtttacaactctaatttcttagttcaaaattggaattccgttgaaattttaacacaaggaattcaaaagtgggaaggagaagaatgaagacnggatganangtctttaaaattgatgcatgtcttttctttaattttttggatagttttcgaaaagatctgatatggatatc

SEQ ID NO: 2967 - DNA, 360 bp, Glycine max
  unsure (1)..(360): unsure at all n locations
ttacttaaaagttatttgtaaggaaaaatgaaaaattatatcttaaaaaacaagaataatgtatttggtaaatatatttattntagtttaaaagtttcttttaagctaaaaattgttgagagaaaaataagtataagtctctcagggctacaccaattgagactttggtttacaaaatatgagcaatatgaaattgcacagaatcgaagggtgcatgtgcgcggaaaaagctccgcataagccaaccaaaagtagttctaagggcttgttctttttctctaagagatactctccttttttttatataaaatttacattataaaagaaagtcacttaaactttaagaacttcggtgtaata

SEQ ID NO: 2968 - DNA, 444 bp, Glycine max
taatgtgagttgagagatcaacacggcgtgttctacaccttacaaacgtgattcaacaatcccattgtatgagagtctttctcgatctttctatagctaactgggtgtaggtaggattatattattaaaatataattctatttttgtattatgtatagaaacttacactttaaaaacaagaacgagaatatcatatttatttgaccaatgattaaatattcattcaacttatttattatttttaaattaagtatacgattgcattaaataattagttagtttgttacttcgcgaaaataaaatacaaaaattcacaattaactataagtttcccctactatgtatcattgacacaatttcaaagttccaatttcaaatggatgaatcattaatcattatcaatgatgtattatatgggaagtagactacttcaagtcgttttaa

SEQ ID NO: 2969 - DNA, 461 bp, Glycine max
  unsure (1)..(461): unsure at all n locations
agcttgcaacccagctcgcccaggcaagctctgttgcttcctccagaaggcaccgctttctggagaacatcctggaaggcccaagtgggcctggttactatttgcaccccccttgtttactaaatacacccccttgcctttntttgctaattctttttccgtaacgttatgaaactttacgaatttcgtaacggtacttgttttccttccataatgttacggaaccttacagattatgtaatcatcccttttttgcctttcggaatgttacggaactttacggattgcgcactaacacttccttttaatttccagcatgtcacggaacttcacggattgtgctacaatgctttcttttgacttccggcatgtcttggaacttcacgaattgcctaacgatgggtgccaagtacctcgaagtggtcaaacgagggtcgcatcccaacaatggatagtccccg

SEQ ID NO: 2970 - DNA, 447 bp, Glycine max
  unsure (1)..(447): unsure at all n locations
tganaaggaggataaagctcntttgcttctgaactccttaccaaaatcctttgaacatttcaaggatgaaattctttttggcaaagatcaagacattaccctataagaaggaccaaggagatgcaaaaacagcaaaactccaaatctgaggataatggtgaaagcctgaatatttcaaggggaaggagtgaaaagaagggaacaagaggaaagaagtccagatcaaggtcaagggattcaaagaatgtccataaaacaaagttcaaatgctttaattgccacaaaacttgtcatttcaagaaagactgcccagacaagatcaagaaaggatctttggactctgttgacatagttgaagcttctgaatgttatgagagtgcangtgttttaatagcttctaataccaaaacacacacagaatggatttatggatttggatgctcatat

SEQ ID NO: 2971 - DNA, 361 bp, Glycine max
  unsure (1)..(361): unsure at all n locations
atgactctgcacggatgatttgtgtacaatctctctttttatatactcacaagtctggtttgtgttggcctcacatcatttaatctttccattgtcgattactgcaccacgtgtctgtgattatctgtttggtcattcgggattcaggctgatgttgatactgatgaagtgtacgcatagatgaccttgcaacctctgaatcctgcatgataagtgataacactgncttaactcttatgtgacaactactgctacagctattatagttatccagcttctatctattgccgtgtttgcactagagcaaaatgatgcataccttgcatcagagttgggcactgcgagcacacagccaacatac

SEQ ID NO: 2972 - DNA, 412 bp, Glycine max
gggagtacactattgtgcatttaaagcatattgagtctattacattacgtcaaaaaactcgccatgcagctgtgagcaagttgtcgtagacattctgcgtcggcgataattgtaatgcactactaccgtgtctgcagcccacactccaggtcaatataagcgagtaagcatcctctgcactttacagctaataggactatcactatttccttttctatacgggcaatatttatgacacggctgacagaagttaattcttattgatcaattaaaatgacaggtagactgctttgaaaattataatataaatgtattaataatagcttgtaataagaagattctgttcttgaatgactctttaacatatgtttatctgttctacatggagcaagtgacatatcttttattatta

SEQ ID NO: 2973 - DNA, 380 bp, Glycine max
  unsure (1)..(380): unsure at all n locations
agcttctactacacgcttaggagaggcgaatctcctcngttttgatatcggagagctgcgagggcgacaaggcgacgctgctggcgagaatctccgagttggacgagacattgacattgaatacgcgggagattgaggaggcggagactaagcggatctaggaggaagggaagctactccagcgcgtggaggcgctggcgtgtgagttaagggatgagaaggctaaaaggaaccgcgtgacggaagcgaacaagaggcttaagtctcagcacgtttaccttcgaagaaaggttggtcttggcgaggagaatgcggttcaagaaaagaaattggagagtggaactgaattggtggtgcatcatantccactcgtataacct

SEQ ID NO: 2974 - DNA, 201 bp, Glycine max
gaaacaggaatgtactcacacaaaacggcatgactcataataatcgacactgacttaaacgaatatacatatatctctgcagaatcgtcatgacttgggagagtttgttactataaacgctagatcattacactcatgtcactagtattcatcaaccatcatttagctgacaatatctaactttaccactatactatgcgg

SEQ ID NO: 2975 - DNA, 424 bp, Glycine max
  unsure (1)..(424): unsure at all n locations
agcttctgtnttcaattatgagcgtctagatatattacgggtatcaatcggacatccgagcaaaaagttattgtcatttgaattctgtgtattcattttttagcatcaagaattattaaatgactcaatcggacatccgagtaaaaagttattgtcgtttgaatttgctgacagcttttgtattcaatttcgagagtctcgaattattaaatgactcaatcggacatccgagtaaaaagttattgtcatttgaattttcttagagcttttgatttcaatttcgagcatctagaattattaaaggactcaatcggacatccgagtaaatagttatggtcattttgaattgcttagagttactgttctcaatttcgtgcgtctcgatatactataggactcaatcggactttacagtaaaaagtta

SEQ ID NO: 2976 - DNA, 298 bp, Glycine max
  unsure (1)..(298): unsure at all n locations
tcaaccttcggtgcccatttctgctccaaatcgcgaaaggagggcattntccgagtcgtgaagcgcgtctctacgtgtgggacttcgaaatttcatgtttgggtggacttctttgcctcttgattatcgtgggtatggggttttgggaaatatgatgggtagtcttgctacagtttctgcttcatgatagctatttgtgaaggaatttgttgaaagcatgttgaacttgccatgtttagatgagttaagcttacccattcagtnttagggcttgtatgatgatgctagtgatgctcat

SEQ ID NO: 2977 - DNA, 410 bp, Glycine max
tatcaacataacatgagggacatattatgaaacaagaactaacaaatttgtgaaatgtaggacaacaaaggatgaccacatcgcatttatttcctacaaaacaatgacctgcttgcatgatgcatatggccaaatgcatccagcatagaaagctgaattgctcacgcatgggaaagagaatagttctagagtcagagacacagatgtgataaacatcactgcatgaaaagtgcaatatgatgctccgtgcaagacatactgcagttaatgagcagcatcaaaacaaatccccaaatatcttggtccatactaaggaaaacatgagaaatggtggcttattaaacaagataaaaatgataaatggtgagaataagtgacaaagacttcttctgagtactgctacaattcct

SEQ ID NO: 2978 - DNA, 468 bp, Glycine max
agcttctatgctaaagtgtcgagcttctatagtttattaacttgtcactagtgaagttacttaatataggcattatgttaacttgcttgttatgaattttcacatattgttctcaactctttgagatctaagacctataaatcccatgaacaagtaaaaaagttaaaggcacttatctatcatgccattttatatcatggctttcgtatttacctgtgtctcacttttttttcagtgcttcataatgcatgataaaagatctaaagttgtgagataggtattagtttctttaatcagtatacaataactatttcttttatcttattgtgctttgcttacagaattatttctaaaactctcatccctttgtttaaagacttcatataccctttcattgtgaatccaggttggagcaatgtgaactcctttcaccaacccaaaaggtaactcctcttttataaaccaagg

SEQ ID NO: 2979 - DNA, 431 bp, Glycine max
  unsure (1)..(431): unsure at all n locations
tatcattcatggttccaaaattagttttcattcttagaagtttcagatatcaaagacctgagccccttgtccatctgaatcatttcatgtaacttagtcaaggcaagggggggtctttccacttgaaccctaaccttgttttctttggaagctacgtttcattacatgttattttgatgttcaagtattcatagccactaccatgactggaatngtataatatgtcgtttgtatggaaattttaagtttaagaaatgagatatttgggtgttaaaactagcaaaagttatgaataaaataaattttataacattttactggataaaatctgtcacgaaaataatctggcaatgagagctatatggactggttttattaaagtgttgacctcacaaatgagtttactangtgtgaaaatgtacggtaacata

SEQ ID NO: 2980 - DNA, 378 bp, Glycine max
  unsure (1)..(378): unsure at all n locations
tttctntcaggctgaaggtgttagtttatatgccaagcagatttttgaggctntaagagaagagcctcaacattctgaattgaaagaattttcccaaaacaagaggcgtccaagtaaaaagtcagaagatgggcaacgaagaacctcaccgagggtttctcctaaacctgctggtatggaaacctgttcctcactttataacctttttgtagtcttaaccatcttaaccattatgttatatgtgccttcatcttagaaaaaaatattgcttgccatcttgtagagctaatcctcattttgtaattctgtcatggcgataaataaaagttgtttttttatttagaatgaaaagctttttctttcactacattaaaaaaa

SEQ ID NO: 2981 - DNA, 447 bp, Glycine max
  unsure (1)..(447): unsure at all n locations
tcaatcacaatagggaatggttattcataataacatgatgtggaaggtgggagatggagagaaaattagattctggaaacacaagtggattaatcaacaggaatcactagcagaaaggtaccccaggctattaatcatatcctcacagcagaatcacaacattaggttttaggttttaagatgacatatagagttttaggtttatcaaagaaattcccataacaaatccagcactatatccccacaatgcaaatagtacaagagcaagcaatcaatatactttagcatctcacacccatactccatttcaagcattatatntttttcatatntatacataacttgacaacagagacataccttcgatggcttccctgggaggcttaaagccaaccacaatggatntncaaaattgcttctccccctttcctttcgtatgtttcttcg

SEQ ID NO: 2982 - DNA, 259 bp, Glycine max
  unsure (1)..(259): unsure at all n locations
gggagaggatgattcaatggaggaaaagagagaggggggatcacanaatttaagaataaaaaggggaagagaagttgaactntgagttgtgtctcacaagactctcattcatcaaagttacaacaagtgtaacacatgcttctatttatagactacgtagcttccttgagaagctttcttgagaaaacttccttgagaagcttctttgagaaagctttcttgataagctagagcttatctacacacacccctctaataa

SEQ ID NO: 2983 - DNA, 477 bp, Glycine max
  unsure (1)..(477): unsure at all n locations
agcttataagaacaaagatgccttaatcatttctaaatatgcatgtgaattatgacgcatcaacaagaatcaagccaaggctattgtgcaagcaatcaatggggcaaaacacaccaaatgattataatgatggatggctcaaattctcacaaaggtaaaatcatcactttcaaattgagctttcaaaactatcatgacatgtagagaagaatcaaggatttcaagtcacaaaatgtcaagaacttttattttcaaaacaattacccatttcttgaacatatcctataattcaaagaaaaacatgcaaagtcgtacgtgcacacaaaattgacccaaaatattatactaaaaatccgacgaaactaacaacattaacaaattaacacaactaacaaattaacaaaaccatcaaaactagcaaaaccaaagaacactcccncccatacttaaacaacacattgtcctcaatgtagcaca

SEQ ID NO: 2984 - DNA, 226 bp, Glycine max
  unsure (1)..(226): unsure at all n locations
ngccactgcagcaattaagtgaacgaatgaagtgtccacagtcattggatggttgcttggtacaggcacatgctaataactaataatatctcctgtgcagggtatcattgttcttgcatgagtgatggctaccttggggctggatattctggctgaatctgcctcacaagctatttcgaaggtaattgacataatcttttgttcttgtctggttattatataccta

SEQ ID NO: 2985 - DNA, 488 bp, Glycine max
  unsure (1)..(488): unsure at all n locations
catgcaagctngaaggcatgtaacccaccatcttgtcatagtagaacactagtaatgtgtccactatcattgttatcatttccctctccatcngtgggggtgctacttaagctgccagatccctccacctttggacgtattctttgaaagattcatgctcccttttgcacatgttctactactccattctatccggagccatatcagaattgtactaatactgcctaatgaaggcaaccattaggtctttccaagaacggacctgagaaggttccatattattataccaggggatggctaccccagtaagactttcctggaagaaatgcatcaacaatttttcgtctttcgcgtatgcccccattttcctacagtacatgttcaggtgattcttgnggtaagtagttcccttgtacttatcgaaatccagcaccttaaactntggagaaatgaccacgtcaggcactatgcacaactctgccatgtca

SEQ ID NO: 2986 - DNA, 243 bp, Glycine max
  unsure (1)..(243): unsure at all n locations
ngcctcanagaggtccaggaaggataaggcggccgaaggaactagttccactcctgagtatgacagccaccgctttatgagcgctatacaccaccagcgcttctaggccatcaaaagatggttgtttctccgggagcgacgcgttcagctcacggacgaccagtatacggatntccaggaggagatatgtcgccggctgtgggcatcactggttacccccatggccaagttcgatccagacat

SEQ ID NO: 2987 - DNA, 493 bp, Glycine max
  unsure (1)..(493): unsure at all n locations
cgaccggatcttaatgtcacctgcngcatgcaagctagattngtgagttngatttagccttagtttcactgtggttattagtcatattcattcaaggaaacttccaaagaaaaacgtccgatcgattttttttattattttatttaaagatatttattattattttgcctttttttgtttaaacgaggttacagcgtgaacgatcggttagattttgttttaacagtgattaaacgagattacaacgcaaataatcggttgaaattcatttcatcatttattaggcgagaaaacgacttanacgatcggttaaagctcgttaaaaacggaagaaaaagaaaccgaaattgaacgaaataaagatgaaagtcaaaaaacaagaaatgaattaaaagtctcagatttggaaacttacccgttaaagaacgaagaacggaggaaaaccttcacggatntgcttacggaaacctctcggaagcgttacggaagcacc

SEQ ID NO: 2988 - DNA, 443 bp, Glycine max
  unsure (1)..(443): unsure at all n locations
cttctcatttatgcataacatacaagttcgtattttaattntatgtttagtaacaagactaaacttcataataatatgaaagataaattttttatttaatacttgttagtatatattgaaaagaaaactgttgaaattagtaatttttgattatttttgcaacatataagaaaggtgttatgtgtgctttctttagtgatacgatgttacgtgttttaatagactaataatgtaatgtaacattgaaacatcaaattataaatattttgtataaaaattaatggtatatttttgttggatgtatttattcagcacaaaaatttattggatgtgttttaatttttgtgaatggccctccctgtcttctcagtctagggtgcccttgcaagacatcattatccaatggccgttttaacatgtcttaatttaattatttcttataa

SEQ ID NO: 2989 - DNA, 517 bp, Glycine max
  unsure (1)..(517): unsure at all n locations
agggatacgggcgnggtgaagcatgaanttgagtcattgacatcccccgccgtctgatttatccgacgccgcagcattgaaagtgtttatgcacactattgtttatctggacccatattcgataacgacttgtatatatatcgccaataccattatcattcagaaggccacgattctacagcatgagctgacacattactctcaccgtgtgcatgaccagttaacactcaatgctggaaattgtcaaatatgatcggccctcatagatatacacagattagcattgtgaaaacagaaatgatgggctggaacttgacaccaccatatgaatatactatatgaaacatccgaggaaatgttttattatcataatcatattatatgaagagactatcttccacctaatatacatacgattatactactattttatgaatatagaacgtatacagtgtgtatcctgcgcatttcaatccttcgcatgagagtataatttgaatactactattagagctgg

SEQ ID NO: 2990 - DNA, 345 bp, Glycine max
  unsure (1)..(345): unsure at all n locations
tctgccacgacgacagggctctgcagaaggtgcatttactattgagaataagntggctaagcggatctatggtcccttcaaagtcttggaacacataagctcattaacttatcggttacaacttccaccacattgctcgtatacatcctgtcttccactgctcaatgttgaaacgcttacatggatccccttcagagcaggatacttcagttccattgcccaccagnttccttccagatcaacctgttatctcaccattggctattctcgatcaaaggaggactgacccaacaggcccatggcaagtcctggtgcagtggcacggactgtcccctgatgacacct

SEQ ID NO: 2991 - DNA, 474 bp, Glycine max
  unsure (1)..(474): unsure at all n locations
agctngcctcanagaggtccaggaaggacaatgcagccgaaggaactagttccgctccggagtatgacagtcaccgctttaggagcgctgtacaccagcagcgcttcgaggccatcaagggatggtcgtttctccgggagcgacgcgtccagctaaagacgttaaagaagcgctactaggaggcaacctagtaccttttgaatctatgcttggttattgatcactttntatagtaggacgcacctagttgctcatgatcctgnggatttaaataaaacaagcgcaagctcggaaggtagtcatacctcacaaaatatatatatatgtatgtttaggtagtgaaaataccttaaatatgcatgtatgtaaacaaaaaanaacacttcacanaatatatatatgtatgtntaggtagaaagataccttagatatgcatgtatgtaaacaaaanaatacttcacanaatatatatat

SEQ ID NO: 2992 - DNA, 352 bp, Glycine max
  unsure (1)..(352): unsure at all n locations
ntcatccacganagtgttgactcccngctttgagagatcgtctataaggtgtgagaggacaccactacgaatgtctgttcctctaaagctcaagaacacgtcgtactgcatgatctgggaggatgaagacgacattgagtcccggaaacgaattcgaaacaatgcttagcttagaaatcacaatgcaaccatccatttgcttcaatcatttttcaatttgtatcaggttaattacgttaatatttttcaatttgtactaggttaagtcacatgttgacttgtattccatccaataaaaatgcaataaatatatttaattactaatttaccgggattaacgaaattagttaat

SEQ ID NO: 2993 - DNA, 374 bp, Glycine max
  unsure (1)..(374): unsure at all n locations
agcttgtgcattcaatatcctgttgagggtgttccatatgttcttaagactggactaatacatttgctgcccaagtttcatggtcttgcaggtgaagatcctcttaagcatcttaaggatttccatattgtttgttccaccatgaagcccccagatgtccaggaagatcatatctttctaaaggcttttcctcattctctggagggagtgtcaaaagattggctatactaccttgctcccaggtccatttttagctgggataaccttaagagggtgttcttggagaaattcttccctacatctaagaccactgccatcagaaaagacatttcaggcatctggcaacttantggagaaagcttgtatgagtaatg

SEQ ID NO: 2994 - DNA, 313 bp, Glycine max
tctttcggaccttgaacaagcaatcaactcctctttcagaaccatgctatgtgctcgcgactggtccctttcttcccttcgcaacttgagttcattattgctaccccatatcgctgcgcgaaatctggtgcggccatactcttgcttgcgagccctcttggtctcttgttcaagggctcttgcggtaattgcattctcttcccgtaacccggcacactccttccgaacgtgtgtagcggccaacttgaacttctccttggcaagtttagcctttcctaactcgcttttgagagcttggacttcttcgtcctct

SEQ ID NO: 2995 - DNA, 456 bp, Glycine max
  unsure (1)..(456): unsure at all n locations
agcttatggtgtgttgatggtgcaatattattgtgttcaacgaatcttagcttcatttaatataattagacaatgtttcatttaaataaaattttatttttattctattctactattgtgaatttatttttcattaatgttctcactcacggaaaatatattatgacaatttgatgtgaaagtgaaactagtttgtcaagtttagtcacagttaatattgtggagctttgtagaattatattaggtaaaccactagcatatatgatacatgatattgtggcatgtatattttatatattntgacaagtaaaaagtacacaattgcttcccctaatttctattcctcanattataccctccattttcatgaaattcaaacaaggtgtattatagtatagttntaccgtactatcttctgttattnttatactntgtacaacaatagttagtacgtta

SEQ ID NO: 2996 - DNA, 523 bp, Glycine max
  unsure (1)..(523): unsure at all n locations
atgtttnnnnnnncnnttttgaacgtgattcgcctagctattatgtgacactatagaatgcttcancnaggnacgaggaagagttggcggtcgaacgtactagttttattgctgaccatgacagggacccctgtaagatctctatacggcaacgacactttgaggacatcaagtgatgtgctattgtccagaagcaagctcgactaatcacggacgaccagtgtatagattgtcagtaagagacatgtatgcagctgaacacgtcagtctttacccgtctgcccatgttaggaccacacaaactcctagcattgaagcttcgtgctgctggcccactgtgaatcttgcgtgacatgagagacatggcctctggtaatcgagtaccaatgtgatgttatcgattacnacgcttaacagtgataacaggaggcgtagatagactgctggtatccttgcctggggatataggaacctcctgctgggatactagtcacgaactaccgaagctatgttatcatccaat

SEQ ID NO: 2997 - DNA, 474 bp, Glycine max
  unsure (1)..(474): unsure at all n locations
gcaagcttggtggattatggggtacccttcatatgtggcgatcgggcgatggcgcanatcaactctcccacttccacaagtcaaacattaacgtaccatccccagttgcccaccttcaactgagctcacgtactcctacgtagcccttatcctcgttcctctcagcatcaggttcccatcaacccctccaagcttccacaatatccaagcaattcaattccaaatatcatgaaactacctaaaccaagaaaacagggtagaggcagaaaactctgcccaaaacacattcaaataccatagctttccttactcaaataccccagtaacattctctttgttccgatttgttaaccattggatcgacttgaaaatttcactggaggttcctagtacataagtctacattntgaccggtgggatctgctagaanatgtccagaacccaatatgtactancctttccataaccagcaat

SEQ ID NO: 2998 - DNA, 326 bp, Glycine max
  unsure (1)..(326): unsure at all n locations
tccanattagtgtaccacactaccgcagctccggccaagctatcctgaaagaagtgtatcaacagcttttcatctttagagtgggcgcccatcttacggcagtacattttgagatggtttttgggacaagtcgtccctttatacttgtcgaagtccggcactttgaacttcgggggaataacaacatcgggtactaagcaaagatccgtcatgtctgcaaacggatagtccccaaatccttccacagccctcaatctttcctcgaggagatcgagtttccttctttcttcagttgccgggggcggcccttccatggacaaaactat

SEQ ID NO: 2999 - DNA, 296 bp, Glycine max
agcgatcaatgacatggcgtgcagatggaaagatatgatgcacaaagttctgaagacagtgggagagaacggttggagtggaatatataaggaatcgttggatacatgcttgcctcttaacaagattgtgatgaaccgcgccatacgcggtctctacgccgggaaacacattcaatctgtgatccttgtcagagaagacggcgggaacaagattgtgtggaactctacattcatattctggttctgggggtggttgcttctcttattatgagtatatggtggaatggtccatgctg

SEQ ID NO: 3000 - DNA, 235 bp, Glycine max
  unsure (1)..(235): unsure at all n locations
aatgaaatactaaccataaacatttgttgataaaaaaatcattgtttgaattataatagaacagggagtgtcacagactttggcgtggacttgaacatattcttcttgacttgtaagactcttttactgtccctacaataatgcttaccagaccaggttacactgttcctntctttccctgcatccagaaaccattatcacaaacacgtttaatggattcaaccttgatacacta

SEQ ID NO: 3001 - DNA, 463 bp, Glycine max
  unsure (1)..(463): unsure at all n locations
agctnggagaaaagctngaagatgttgtcttttacacgcccaactcccttgagtggcatttgtattggttgttatattgaatattccatcttagtccatatcatatcttttgtgcatcatgcctcatcatgagtaagtgagaagaaaattttataagttagaaaagtttcttcaaaaggaaaaactctattttaatcgattacaaccttgtcacaatcgattacacaagttatctgaagcttgcagagttatgtctcgtatcagtttaatcaaatacaaacttctcttaatcgattacatagttttttctgagacaatgattgaattattcaggagtctttgctttaatcgattaccatgtgatataattgattacttctctttcttaagtagttcagaagtgaagatgaactctntaatcgattactttgagtatantaattgatacattgttcttgagcta

SEQ ID NO: 3002 - DNA, 347 bp, Glycine max
  unsure (1)..(347): unsure at all n locations
taagctaccttgaaccttggcccatgaagagaatcctcatccttccccccgaagaagaggacagcagaatctcctcaagggagagcgaataacgaatgctaaaactcgaattcccaatcaaagataaaaaaaaagaggagagaaagaaatgaaaagaaagaaatagaaaggaagaaatgaancgaangaannnanaatgaaaaagaggattcccgatcgaagatcggaagaaagtaaaaaggaaaagatcggaggaaaacanaataattcctgatcaataaaggaaaccaggaaagagaacaaaagatcttctgaccacataaattttggccgacgtaaatgaccac

SEQ ID NO: 3003 - DNA, 469 bp, Glycine max
  unsure (1)..(469): unsure at all n locations
tatctcttcccattagtaataagattatttcttttcctttttctcttgttcatactgatgtatggcgtcctgctaatgtccttaatatctcatgtgctaaatggtttttaaccttcatagatgattgtactcgagcaacttatgttttcttattaaaataaaaatctgaagtcagctttgtttttattcagtttgtgtcaatgattanaaaccaatttggagtcaatattaaaagaattangtctgacaatgccagggactactttaatcttgtgctaaaatcttnttgtcaaaaggaaggaataatccatgagtctttaagtgttaacacaccccaacaaaatgggattgcagcaaggaaaaatgggcacttattaaaccaaactagagccttgctttctaaaantatatccctaanaaantatggngggaagccctcctttactgcacctacctaatcaatatatta

SEQ ID NO: 3004 - DNA, 299 bp, Glycine max
  unsure (1)..(299): unsure at all n locations
tatggaactgctagatgggttcctaaatgtattgttaaattaatggtgtatctattacatanagagaacttgtggtattgaaattgattgaatgtatacatgcatacatggcattgcatgtgaattagcacgttaattgagaatgctatgtgagatctcaacctactgtaagatgttttatggtggctaatggaaatgggcctataatagatgagtgggaaaattcctattgatgtaaggtcttgctaaccttacacatgtagccaacactcacacttatctatatttgatcaaaccac

SEQ ID NO: 3005 - DNA, 367 bp, Glycine max
  unsure (1)..(367): unsure at all n locations
agatataattaaacttgtgtctagtacagtaaaatcaactatattttactcacctgctttcccttatacaagtagaatttaaaacagttttcacattttcatatggactcaaactgagaaggtgggatgacaacattttgttaaaggaagaggcagcataattgtcgtgcataaaggaagaggcagnaaaatcaactatattttactcacctgctttccgtcaagtattttttttccttccatgattgaacaatgcttgaacccagcataattgtcgtgcatatgctaccgctgtctgcctatttgtgtttgccatgtagaacttanttatcagtttagttcaattgaaaatagtttgatgagcaaa

SEQ ID NO: 3006 - DNA, 331 bp, Glycine max
  unsure (1)..(331): unsure at all n locations
actaagctaagggtcgcgaagggccgaggctttggtgtaaaggtagtacccaaagtgtctcanaccttggttntaaaaactgaaattcatatggcacgcttagtgcacagctgcgcttagcgcgtcaatgcaacgtttgggttttgagcaaccctgtgcttagcctaacctagtgctaagcctaacttgaggtttcaaataccaaagaacatttggggcttatcgcacaaaggggtgcttancgctttctgcaacacaaaattatctgccatatgcgcttaacctgagatgtaacgcttatcgcgcaatcaagctttaacttacatagagt

SEQ ID NO: 3007 - DNA, 484 bp, Glycine max
  unsure (1)..(484): unsure at all n locations
aagccttattcgttccctcatgaatatccatcactactaaaataaaaaagaattttttaaaatggtccaaaacaatatttaacgacggttgttgaccgtcgtagtacatatattgtaaaaagtgttaattttcaacgacggataagaaaataccctcttaaaaaattgacaactttcaacgacggataagaagatattgacttagaaaactgacaactttctaagacgatgtttacttagaaagacaacttatttttaattattgatattttttttaacaatatcccatcataaaaaatatgaataattaaaaataatctttattaccataactttaattaatattatcataatattaattaaaatcatgacaataaattaattaataattaaaaatgtatgatcataagtcttttggaaggtagtcaagagtaatatgtatccaacatacattaattaaaanatgaacctccatctaatacag

SEQ ID NO: 3008 - DNA, 495 bp, Glycine max
  unsure (1)..(495): unsure at all n locations
acacttgaaactaagcttgataaatggtctatttattcatttatatataataaaatattaatattcatgtattatactttaatattgaatatcttaataagttaataatttatatcataaataaaataaatatttgagataaaaagcctttaagtagttaataggtcatatcacgtttttaaaaaggtcaaaccaaacttaaaaaaagtctttgataggataataggttaggtcaaaccttaattttttataatangtcaaacctatttacacagagtctaacatgccttgtatattctcacccctattcttaagtctcaatgtttgaacttaaaagaaaaaaacaatattcataatatttgcttccaatcatggaaacttagaaagtagatatccaacaacaaaacacttattgcaacaatagtctaaaattaattatttgaaggataaagagagacaatgcagatgcatatgcagagtcatggagacagagaa

SEQ ID NO: 3009 - DNA, 314 bp, Glycine max
ccgaaggaactatttccgctctggagtacgacagtcaccgcttcaggagcgttgtacaccaccatcgcttcgaagccatcaagggatggtcgtttctacgggagcgacgcgtccagctcaaggacgacgagtatactgatttccacgaggaaataaggcgccggcggtgggcaccactggttactcccatggccaagtttgatccaaaaatagtccttgagttttacaccaatgcttggccaacagaggacggcgtgcttgacatgagatgctgtgttaggggtcaatggaccccgttcgatgccgatgctatc

SEQ ID NO: 3010 - DNA, 408 bp, Glycine max
  unsure (1)..(408): unsure at all n locations
actcaagctngatcaacacaattatctaatcattccaatccactcaaatcatacaattgctcattcaaatcattctcaaacactcatttcatgcaaaacaatccactacatatcattttcaatcaattcattgttcaaacacgcttttggtacaaacaaacaactcaaagtgctgaaatttatataattgaaatttaaaaaaattgaaatataaaatctgaaattaaaatgactgaacataaatcataaaataattgaaaataaactaaaatgttctagatgcacaaatctaaatgtcctgctcctgtggttgctcctatgcatgctcattaaggtccaacacctgagcagctggtgcagatggtgtggcataatcaagtatgggtgctacggatggctatgggatct

SEQ ID NO: 3011 - DNA, 428 bp, Glycine max
  unsure (1)..(428): unsure at all n locations
agaatcaattcatgtttcctttgatgagtctaatgttatttatccaagataggatattttagatgatattatagaatctttagaacaaatgcacattcatggacaagattctaaaggaaaagaagaaggaagcaataaagatcctccagtagaagtcaaagcaaataatgatcttccaagagagtggaaagcttaagagatcatccccttgacaacatntttggtgacatctcaaaaggggtaacaactagacattctcttaaagatttatgcaataatatggcttttgtgtctatgggtgaacctaaaagtataaataaagccataatatattatcattggatagttgctatgcaagaaaaactaaatcagtttgagagaaacaatgtgtgggaactattataacaacctgaatactaccccatcat

SEQ ID NO: 3012 - DNA, 377 bp, Glycine max
ggacactatgaaactcaccttctcaggaagtttctaagaagcttctaaggaagctacctagtctataaatagaagcatgtgtaacacttgttgtaactctgatgaatggaagtcttatgagacacacttcaaagtttcacttctctccctcttttattccttcaatttcgtgctccccccttctctctttcttttccaccattaaaggatccttttcaagcttcttatccaaggcacattcttggtggtgaagctccttcttccatggcttattccctagtagatggtgtctcccttctcctcttctcctttgccttccgctgcatctccatggtggaaaatcaccatggaagaaccttattgaagctcaaagatct

SEQ ID NO: 3013 - DNA, 439 bp, Glycine max
  unsure (1)..(439): unsure at all n locations
catgcaagcttgacatgctattgaacaagcagntatatactctgcttcacaagtagagagtgcaacaacatcctgtttcttagagcaccaggagatgggagcacctccaaacaataaaacatgccccattatgctttttctgtcaagaacatctccaccacagtctgagtctgaataagccacaagttgtggctcaaccttctctttctaatgtggaaatagaacaccaaagtctagtgtgctctcaagtatctcagtatccttttagctaccatcatatgtgaatgtcttggatcactcataaacctactgataactcccacattgaaagtgatttctggtctggaatgacaaatgaatctgagactcccaacaatttgcctatacaaggtacaatccactacagggtcagcttcacatttacccaattngcaactca

SEQ ID NO: 3014 - DNA, 438 bp, Glycine max
  unsure (1)..(438): unsure at all n locations
tctagcgtacccgctattggtgctcagaanatcccacaatcaaatccctcttattactagctattntgaattctttagttcctgaatgtacaaccttcaaattgttgctcattcccgcatttgttttctgcaaaaaagaaaattaatctgaaacaattcaggctgaattgttatcggtattattactcgaaccataatgaataacagctaaacaagtgaattataatggaactcttaaattatgtggtatttctttaattacaattttacttcaatatctaacttttgtaatctacttacgtcgctttttaaatataaatatgaatctaaaggtgatctactgataatataaagtacttgctaatcacacattatgatacctatctctttaaatttaacttactttataatattataaattatatagacaattttaca

SEQ ID NO: 3015 - DNA, 444 bp, Glycine max
  unsure (1)..(444): unsure at all n locations
agctngtataatgatcttctatcaatgattattcaacattatatgtagtgttgcagctatttttgaagaataaatggtatatgtaccaacaataatntcttttatatgttgttatttaatcagacatgattatacataataaatctattaatatttataataattaaataacaagtgatattaatatcttttttattaatgctatatatgtaaatattgacactaataatacatgtatatnaaactcattttgaaatcttgaacgcnnacccgttctacttataatgtcacactgaatgtttggagtaacaagaggtgaaatccaagacaatagttttatgaaagggaggaaatttatgtatagagacctatatgtaagaattatgatcaatagtaattcctatattattggtattgaatatatcaagtctttttcaacgtaat

SEQ ID NO: 3016 - DNA, 361 bp, Glycine max
tcgtgattatactgaatgtatattttactatgtctaactttgatttccatgtctctttcctggttagtccattcccatgagaagacctcagatgtttttcttgcctaactcatactggaagaattaatgtgcaaagaaaagagcatcttccgaattcccatatgtagtgtttcactcataagtataatgaagaatgtatatagctctggagtgagattatgcatcaaatctcatgtttttcttggagctatatataatgacaagcctagtatattgtcactcctatgctccaaacgtatgtccccaccttaaggagggaaacatgatttctttaatttactttggctgatcgaacatgaca

SEQ ID NO: 3017 - DNA, 466 bp, Glycine max
  unsure (1)..(466): unsure at all n locations
agcttctggttagtattgattctcggcgtattcctttaacaccttcaagtaccgcttaactggatacatccaccgtaaaaagaagaacaggaccacatatccggatctccctgactagatgaacaattaagtgatccattatgtcccacaatgatggtggacaatacatctccaattgacaaaggacagtgacaacctcattctccaaatcatctaatagtcaaggggcaatgactgtgntacagatagcattaaaaagaaagcacataccagttatggcaagcctaactttgtcaggcaggataccccgcatcgctaccactcaatattattgcattaacacgtggctatcatgatatttcaagccaaccaacttcatatcattgagggctacaacgatcttgatattagaatagtatccttgtgggactctacactccatagacattgacaaaaactcatcttc

SEQ ID NO: 3018 - DNA, 166 bp, Glycine max
tatgctgcagatgacatattgatggaagaatgcattccgtatccggtgagagtgtgatacttaaagcctgagagaaacaactatgatatattacggatttatgactgactctccgaactttagactggatgcatgtaagagaagatgatgagtgccacgcttgatt

SEQ ID NO: 3019 - DNA, 386 bp, Glycine max
  unsure (1)..(386): unsure at all n locations
agcttgggtgatgggcggccaaatcaccttgctaggtgtgacggngacgccgaatgactggcagagtcctgtgatcaaggcgggaaatcccagggccctgttggacttatctgggtccagagggtgcctggtaggcgccatacctgcaaaaatatagatggcatcagcgattaactgagccacatggatgctcatccgcgttaggatggcgtacaccagctgacacttcggcagggggaggtcagaattatgatcggtgggcaggatgttgctgagcagcaaagtcatccatatctgagtcagggtggtcatgttggtgcgcatgatccgcacccgtctcccggcagcagtccaagaaaaatcttgccccggtatacatagcagct

SEQ ID NO: 3020 - DNA, 260 bp, Glycine max
  unsure (1)..(260): unsure at all n locations
cacaatgactcatctattccagagtctctgttttaatcaattaccaaatggattaatcaactcctggactgtcacttaagctcatcaaatgctaacagcaccactctaatctattacttagagcatctaataaattacatcggtcttgagttatttccagaggtggggaaaaacactntaatcgattacttatataatctaatcaattacttcaatgaattaatcaattatagacagttataactgttgtctctataaat

SEQ ID NO: 3021 - DNA, 465 bp, Glycine max
  unsure (1)..(465): unsure at all n locations
agctngatagacttatataaaggtcgaccttatacttaaaaataaactcgtgatgaataacaggtttagatttagactataaaaatataaaagattagacttaggtaggtctagtacagcccgaccattcccaccccttctctcatatatcttttatacttataaatagactatttttattggaaagaatacaaaataatattggtatctctaaattctcttatttactctctccctttactattctcctcttggttatattatatttaacactcatataattacttcctttttaattcatgatttaattagcttattcaaaatttaaatgtaatttaaaatgggtgagattaaatttacttttatttgggtaaaataataaataacaaataaaatataaaatgaaaatactaatgaattattaaaacactcaatatgtcatctatatatgaatcatcatataaa

SEQ ID NO: 3022 - DNA, 432 bp, Glycine max
accgaacccgaatgtgacaaatggatctacacgacccgaaccggttccgcaaccgcaaacaaaccctgtgctcgcgggaacgcttactcggcgtcccatcattcgacgcgccgccaatcgaaaactctttctccttcgccaccgacgacgacgtagtcgttggtgcaacaacgacgacctaatcgaagacgatgtcgttttctccaacaatgacgactccaccgaaccctcttcttcttctcaaatccctaatcgccaccacaaccacaataaccaccacaaagccttcgcgttcggtccctccgacactacgttcggcatcctcgccgcgctgccggagaacgaccacgcctcctcgaacggctcgcacttgttccaccacaaaccctcggtttccgtctgcgtctctgtctcgctctcctcgtgctcctc

SEQ ID NO: 3023 - DNA, 458 bp, Glycine max
  unsure (1)..(458): unsure at all n locations
agctngcaagtgtatggcgatgggaggcgctttgtgctacgcataaaagcatggatctcacacttttgctgcatattttcatatgtgttattctcaagcaatcgttattagtataagcgatgcttactacatgtggcagccacataaacatgtcactggagcactccaatgataaattgtatatataatggcactattcttttgtttaagaaaaatacccggtataagattattttcatattaaaatagatagacggataagataaaggtagcgaagtttgagatgatttagaaaaatatttttttctaattgcaaagaacatgaatgagatgcatcttttgaaaagagataatattaaaaaaaaaactgcgagaagtgagagttttactggctaanaagcaatcagtttgttgataaatgaatacaaataatacacaattttatatagaatctcatg

SEQ ID NO: 3024 - DNA, 353 bp, Glycine max
  unsure (1)..(353): unsure at all n locations
tgcacacaagatactccttacctaaatgcagttttaacatctaactgccccaagtgaagattctctgcagctaccatactcagaataactctgatggtagtaatctttaccactggagagaagatctctgtgaaatcaattccttgattctgttgaaaccctttcactacaagtctcaccttgtatgactttctacgcgtcagatgcttactttagcctatagacaccccctattttgtatcgctatcttttcttataccaatataattaaacaccacgtcttattcttcgtaagggatgtcatcacatctatcattgcttgctcccactcaatatacangttcccctgcatc

SEQ ID NO: 3025 - DNA, 469 bp, Glycine max
  unsure (1)..(469): unsure at all n locations
agcttgtctcagcatttatgcgagagagagaccaacatgttagccatcgttagcaagtaccaagaagaattaaatctagccacggcccacgagcacaaagtggcagacgagtatgcccgagtgtacacagaanaggaggctagaggaagggtgattgactcgttgcatcaagaggcaacaatgtggatggaccgatttgctcttatattgaatgggagtcaagaacttccccgattgctagtcaaggccaaagcaatggaggacacctactctgcccccgaggagatcaacaaacttcttagctaggaagtttgtattgtcactttggcgccggttccaacgcgataaggaactttcccccgaggccaactccaaaattcaccccgatcccaatgacatacgaagacctcttgccatccctcatcgccaaccagatggctgtgatatctcccgagaagatccaccaacc

SEQ ID NO: 3026 - DNA, 300 bp, Glycine max
acaatcgcgggtgcagccaagctatgttggaaaaatcgtgtcaacaactggacatccctagagtgcgcccacattctgcgacaatacatattgagataggatttaggacaagtcgtacctttgtacttgtcgaaatcaggcactttgaattttggggggatgactacatccgatactaagcagagatgcgccatgttcgggaacggatagtcaccaaagccttcaacagctctcaatctctcctcgaggagatcgaatttccttctatcttcagccgccggtggtagtccttctgtggac

SEQ ID NO: 3027 - DNA, 469 bp, Glycine max
  unsure (1)..(469): unsure at all n locations
gtcacctgcggcatgcaagcttcatgatgatgaatcaagatggattcatgttgttttgatgggttcaaagatgatgacaaanatcccaagagaatgatttcaagattgagtcaagaataattcccaagagaatgatttcaagattgagtcaagaacaattcaagaatcaagagaaatttgatttcaataatcaagaatcaaggataatcaagatcaagattcaagaatcaagagaagactcaatcaatataagtactaaaaagtttttcaaaacattgagtagcacatgaagttttcacaaaatcttttaccaaagagtttttactctctggtaatcgattacagtaaactggtaatcgattaccaatggcaaagtttgttttcaaaagctntcaactgaatttacaatgttccaattaatttcaaaatggtgtaataaattacaagatattggtaatcgattaccagt

SEQ ID NO: 3028 - DNA, 356 bp, Glycine max
ttatatgtatacctcatatttatgagtgtgtgaacccattacttcatctctatgtgttagattgatggactagataagctgccccactatgacctacatctgccactaattaagggttggggtaccccttgtcactactacaaaaaagactttcaacaactgttctatgaggctctcaatgactgatttcaaccattggtaaatataatgtcgtaaaaattctactactttcaatgatagctatcaaactatcatagaactcagttattacatcaattgctaactgaatcattgtagaagacgcttatatgacttgctatccacaacacttatcctatgaaccaatgttgaaaatg

SEQ ID NO: 3029 - DNA, 484 bp, Glycine max
  unsure (1)..(484): unsure at all n locations
agctngctaacccatggaagctcctaatatctcccacactntntggggtgggccattcttggatggccttgattttctcagggtccacttggaccccatttctaccaactacaaaacctaagaaaactatattatctacacaaaaggtacacttctctatttttgcatagagggtgtttttcctaaggactgaaagaacttgtctgagatgtcctaagtgatcatctaggctcctactatacactaaaatatcatcaaaataaacaactacaaatctacctatgaaatcccttaagacatgatgcataagcctcataaaggtgcttggtgcattaatgagcccaaaaggcatcactagccattcatacaaaccaaacttggtcttgaaagcagtattccactcatcaccctttttcatcctgatttggtgataaccacttctaagatcatattttgaaaagatattggcaccatgcaactcatc

SEQ ID NO: 3030 - DNA, 308 bp, Glycine max
tatcaagcgttcattatatgattcttcatccagagattgcaacaatagttcccaagcctccaggatatggtgccactttctaaaaacctagaacaattgtataaacaagtccatatccaaacacaaagcttcgcataacatatgcctctaaaaatcttgaaatatacctcatcaatcatgatataactagagaagtcaagacgacttggttccgaaggcttatccaggtcctcttcacacccaccttttcatcattattattgcccataccagtatcattatgctcaactgcatataaaaggaaagga

SEQ ID NO: 3031 - DNA, 473 bp, Glycine max
  unsure (1)..(473): unsure at all n locations
gtgtaacccaccatcttctcatagtagaataccgatatcgtgtctactatcattattatcatctctttttccatcattgggggcactacttgagctgcctgatccctccacctttggccgtattctttgaaagattcatgcctcattttacacatgttttgtagctgcattctatctggagccatatcacaattgtactaatactgcctaatgaaggcaaccattatgtctttcctagaatggactcaggaaggttccaaattagtataccangtgatagctgacccaataatactttcctggaagaaatgcatcaacaatntttcattttttgagtatgcccccattttcctgttgtacatcttcacgtgattcttggggtaagtagtccccttgtacttattgaaatccggcacctcgaacttcggagggatattgacgtcaggaactaggcacagttctaccatgttagc

SEQ ID NO: 3032 - DNA, 467 bp, Glycine max
  unsure (1)..(467): unsure at all n locations
tggagaggatgcttcaatggaggaaaagaaagagggagagaaagagagatgggggagcaccaaattgaaggaagaaaaagggagagaagttgaactttgagttgtgtctcacaagactctcattcatcaaagttacaacaagtgttacacatgcttctatttatagactaggtagcttccttgagaagctttcttgagaaaacttccttgagaagcttctatgagaaaacttccttgagaagcttctttgagaaaacttccttgagaagctagagcatagctacacacacctctctcataactaagctcacctccttgagaagctttcttatgaagattcctaaagaagctagagcttagctacacatacctctctaatagctaagctcacctccttgagatgagaaggtagaacttagctacacacccnctattatngctaagctcactcccatgacaaaaaacat

SEQ ID NO: 3033 - DNA, 487 bp, Glycine max
  unsure (1)..(487): unsure at all n locations
tgcaagctgtttggaactttggctcagaacttagctatgcaacaaattcggttcttccacagttgaaaaaatttacccgagatatagtatctagtgaaggagttccaagcagatctgtcatcagatccaattgatgaactacatttttcccaggaaaaagtggctttcctgttagtacttcagcaaagatgcaacctatactccatatatcaattgctggtgtatactgcatcaagatttaaaaaaagttagacctacagaaagtgaatatgaaaactggaaccattttaaagtgtcactttacaaccaaataaaattaaaaagttcagtatgaaactatgaactaattttagcagaagccaatacacacgcatgaatcgacatttatcacaacactacaacattntcccttgatgctccacaagaaatacagccccacatttacaacacttaatgagtgaattcaatcttaactaccctatagact

SEQ ID NO: 3034 - DNA, 407 bp, Glycine max
  unsure (1)..(407): unsure at all n locations
ggctacccattntagcaaaaggaagttctctagacttacataagcgctcatcatgggccagctaaagctacttatgcaaggttgatatttgatgattctcaaggatgcttaaatgagcccatgatggtcacttaagcgcatcattcctaaaggcacaattcaagcatacaagctagcttaagcttgcacagttagctgcttaagctagctttttaggaaatgcccacacctaaaaaagcctagttgatatgaaagaccactactacaaaaagtgtttattacgacaactcaactacgacggttggccaaagaccgtttttgaaaagtattcggtggcaatattgcaataaattatgagtttaaggacggttatctagaaaaccgccgtaatttaataatgtacaaag

SEQ ID NO: 3035 - DNA, 475 bp, Glycine max
agcttccacaacatccaagcataacaacattcatatagcacaagctatcacagccaagcaaaatagagcaaaggcagaatactctgccaaaacaccaaccaaatcacagcttttctcacttaaagaccccagtaacaattccttcgttccggttcattaaccgttggatcgactcgaaaagtttactggaagtctttagtacataagcctacattttgaccgttgggatctactagaaaacatccagaactcattctgcactactctttccacagccaatcacacaccaacatttttctgcacaagccaaaatcctgctgcacctattttgacagcaaaattctgcataagtgcagatttcgaaaatcacacttcctctcatccaatcttgcctaaatcaaatcctacaagtcccaaatcatgtatcaatcatgtctaaaccaaagccaagcttcaaaacacagcaacacataat

SEQ ID NO: 3036 - DNA, 294 bp, Glycine max
  unsure (1)..(294): unsure at all n locations
tcatccataaatcatactggagggcctatcttcttgaggttattntcgaggaatgagattcattttcattcaaaacgcattaacagaaaaacctacaagttacaattgtaagaatcaacggagagtaacatctgcgttttaaaatgaaattatcggatgaatggagttggaatttacaagttaatgctaaccttatttgtgatgagatgtcttaaaagattangaaggtttctagagcagtctctggagctttgggctaagatataagaaatcttggtggttgaatgaaagtat

SEQ ID NO: 3037 - DNA, 422 bp, Glycine max
  unsure (1)..(422): unsure at all n locations
agctntataatggactntctcttcattgctactagcatcagtaatagtaacagacttctgtttcaatataacaagatcaagatccaaaacactgaggtgtaattggacttactcattccagtcagagaagttaagcccattaaaattggcacaaatgatacataagaattcagtgaattgggaacatgtattgcataataacattcacataagtgttntgagacataaaatacatgtcatacatatgatttattcagataatgatcaatgtatattgatgctctcctttgggtgatacagttgtagaagcaagcttcatgatgaatcaagattgattcanagaagttttgacgataacaaangngatgacaaaaagcttcgtgatgatctcaagaatcanagaatgagttcaagatgttcaa

SEQ ID NO: 3038 - DNA, 409 bp, Glycine max
  unsure (1)..(409): unsure at all n locations
tcaagatagatagggaacaagcaagagtccttatattcaagcaatgagaatcatatccatataccatttacaacttccaagtaatctgaaaaaaaataaaaataatcactggcttccactggcttattgctcgaacactacccattctctcattgtgtatgtttatgctattaagatcaatataccatgaatataaattatatatttgtttcctttgtttttttattattagaatttaccttcttgagatttcatgtgtcattgactcattctgcacttgttatctgcagtgatgtttgattctaagtcccttagcaaggttgaagctacatatgttngattctacatcccttaaaaaggttcaggcaatgtctaacgggtcttaatcccctgctaagctcgtaatcat

SEQ ID NO: 3039 - DNA, 466 bp, Glycine max
  unsure (1)..(466): unsure at all n locations
agcttatatatatagagtcatcatatatatggtccatatatatataactgtagagtttgacaaaattagttttatttaactgctagagctatagttttatttaaacttaaaaaagtatataatcgctttagaatatgtctatctaatctctagatcatatgtgaagttgaggtaaggtaactttgtcggggttctagtcaaacaaacactgccttgtttccagcttattggtcctgcgattcactacaaccgttaaaaattgtttttctttttcctttggttttgncttgntcttcgcgttattatttatgcttactttngttgctgcgctgcttgatcctgcctctgtcctttatngcaatgccaattgcgggtagtactntgcttgtagctaccgtgccctgtcttgcttcctgttgtatcggcccacattcgcacgcagtaccatgggtacaactaattcaat

SEQ ID NO: 3040 - DNA, 326 bp, Glycine max
  unsure (1)..(326): unsure at all n locations
tganagaacatttcctaagaaagtagtttccaataggtgctagacatgcacaggagatggagtttctacgactaattcacgagaacatgactatgaacgagtactcatccaaattcgaatacttgtctagattttgcacctagactacttcaaaagaatggagatgttgaaattatgacagaagagaaagaattgagatacagaaaacagtcatcccggtgactattagagagttcccaaagctagttgaaaggatcaagacagttgagtgtcttgagtatggtaatagagttgctaggactcgtgaagcttgaccatgtggatta

SEQ ID NO: 3041 - DNA, 489 bp, Glycine max
  unsure (1)..(489): unsure at all n locations
agtcacctgcggcatgcaagcttcctccacgttttcctccatacctagatcttcataccttcgattcttactcaattcttcaccaaatcacgtgccgtaaagcccaatcttcctctttttcactcctctttcacttccaccgatcaaaatccagaaaaacttcatcaaatggcagagccatcaaagaagagaaagggatcattctccaccgctaccgctgctgcccatcgccgtcacggcccatccggagcacccacaacattgtttaagaataatcttagaccctaaatacctagacgtacagttctttaatgatgaaacgtttgattgctatcaagtgtttcaaaattctggtcttgttgatttcatgtcatttcaaatgccatattatcctgaacttgtaaaggtcttctactgcaatntaaaaattcacgatggtattattatgtctgacgtgcatgatacttctatgggcattgatcagtcact

SEQ ID NO: 3042 - DNA, 523 bp, Glycine max
  unsure (1)..(523): unsure at all n locations
tgggccnnnaatggggttganacctgattcgttagcattacgagacctatagaatgctcaagctgctagagaggctcgcagataggcagggagctgcgatatagacctggcgtcatcatataggaggatgaagaaaggtcagacttgctactctgagcatggtctcacaatactctcgatgatctttacctcgacaggagccacacatgctcctatatatgcaccaaggaacctccttgagaagctcgactgtgacaacttcgttgacaagcgccgatgcgaccacttccttgatattcttctacgaggcgactatgttgtgcagctagagcataatttctctccgcattctaataacgaatcttgcctccttgagacgcttacttaggagcacccctaatgaagctccagctgagctcacntccttctaatagccacctcaggtactgacatgagatggtcatctctctaccgccccctatatagtgagctagccactcgccatgaatgaaatacacaaaan

SEQ ID NO: 3043 - DNA, 427 bp, Glycine max
agcttctataggatcaatgagtctatcatgtgttcaacaagatggacgaggaatccaagcataccttaatagttaaaggttcagtagtcactaaacaacaaaattttagcaaaactaacctgaaggctatgaaggtggccttggaaaaaaccttgaaggagactctataagttgacgtggaagccatcgacaagtgaaaacaaaagagattggccaaatctattactaataaagaccttcgcctggacaacattatcattacaaggaaaatcaagaagataatggttgaaaaatagaagaagaaagccaggaaacaatcccaaaaggaagaaaaaaaagagatgttggctagggagcacttgaccaaaagaaggcatgagcttgccatgtctgctctggctcatccactcatattaaatgcaatcac

SEQ ID NO: 3044 - DNA, 444 bp, Glycine max
tagaggatactccagacatcttctcaaagatcccaacggtcagatcatggaaaagtgtcttttgaagctgcagaccaaattctgagaagatccaacgggtaacaaaggccgggaagcatttttaccgagaaaacttcatatagcttgctcaaaaagcttcattaagaggctccttcaagaagcttccccgtggcttctttgagaaactagatccttatctacccatacccttttattaactaaattaacctccttgaaaataattacggataaaaataacacaacaaataatcaaacatcggacataattactaataatatatatatatatatatatatatatatatatcagggtgtgacactcaacattctctgtctttatgtttccatatgactcaatatatatatatatatgtatatcagggtggtacactcaacattctc

SEQ ID NO: 3045 - DNA, 431 bp, Glycine max
  unsure (1)..(431): unsure at all n locations
agcttcaagattctttgaccctaccagtcatcttttatattaataaaattatttgctaatagttatatatttatctaacactatacaatattgattatatcattgaaataccatacgtaaaatcataatatctatgttaatggatcaatttttattgcatagaaattatattaatgaaacacgtttaactatcaatagttttttaacatgtgactgttaagttnaaatagatanaattctatngcaagggtgtccatgttgaaagaaggtctcatcatataaggtaaactaggtttaaaaattatattagatactaatacacgatgatatatatatatataatagaattatggcngatgacttacttatatttttcnntgattacccaatacaccaataaacactaattaataaacaatatgaaatatata

SEQ ID NO: 3046 - DNA, 311 bp, Glycine max
  unsure (1)..(311): unsure at all n locations
tgctgaaactggcctcgacgatgctgtattgagctttatgcgaattcaaagatcttcgaacacctacttctttattacctttgtacaacacctacctcttctttgtctttctccctctcacacactcgtcctaggattgattatcccttccttctcccaatacttctacattattatattcgaaacaccaaaccaacactctagcttcgttacttgcccttttctctgcccacctacatgcttgtgtaagaactaattagccacctgaagaatgtgggatctgaatgactcccccgacanaaaaaggacta

SEQ ID NO: 3047 - DNA, 446 bp, Glycine max
  unsure (1)..(446): unsure at all n locations
agcttgagcttagctacacatacctctctaatagctaagctcacctccttgagatgagaagctagagcttagctacacaccccctataatagctaagctcacccncatgacaaanaaacatgaaaatacaaaaaaaaagtccttactacaaagactactcaaaatgccctgaaatacaaggctaaaaccctatactactagaatggccaaaatacaaggcccggatgaaggaaatacttattctaatatttacaaagataagcgggctcatacttagcccatgggctcgaaatctaccctaaggctcatgagaaccctagggccttcccttggatctctagccctagcgctgttcgcctatcctccaccctcaactcttattcagagacccatgaatngattgcctagcgctgtttatgtgtcctccaccatcgagtctggaaccc

SEQ ID NO: 3048 - DNA, 397 bp, Glycine max
tcctctgcaacttggtactttatctgttaatctctactcagaaatatggtcaacggacatcaacaatcacaagtattccaaaattcaatcaaaatttatcattctcatataccatcattataaatgaaattatatcaaaaactattattttttagaatgaaacctggattgcgcacaagaaatttcaacactcatttttttaaattatattttcttaattataaaatattatatgttaaagaggacaacatactatatacattattatattatcatccaatcataacccatcattgtaataagcttattgacttttacaagattaccttaaagtcatacacactctgatttattattggttgacgtcgacaacgtaatacaattgtacattattaat

SEQ ID NO: 3049 - DNA, 431 bp, Glycine max
  unsure (1)..(431): unsure at all n locations
agcttgttcagaatggttnggaagtgtccaaacatggttnggatatcttctccctctttcatactaaagagttcatactaacttgttagaaggctcaacttgttacattttacctaagaggacccttcataggtaatggctaaggtgtaccacatctgtttagcacttttgaagttgtgaactttggaatattcttcttgagatagagcacacaacagagcatttcttgcacgagagttgaaaagaaatatggacatatgttgattcgtccactgtccctaggtatctcgntcttatgagcgtctaaaggaatttgattacctttctctacaacgtcccacatattgatgtgagtggattcaaagaaggcaatcattctttccttccagttgtcgtagttggctcccttgaacataagagacttgttcaca

SEQ ID NO: 3050 - DNA, 468 bp, Glycine max
  unsure (1)..(468): unsure at all n locations
ccncgtggcttctntgagaagttttctcaagaggcttctttgagaagctagatccttatctacccacacccttctattaactaaattaacctccttgaatataattacggataaaaataatataacaaataatcaaacatcaaacataattactaattatatatatatatatatatatatatatatatatatatatatatatatatatatatatatatatatatatatcagggtgctacatgttacacttgtgttcgcaaaaaaaatgctacctcgcaaatgcagcagataagctagagctcgtacagtccaatgtcctgcctcacatatggtatgataaatctcttgtacccatgagagtngtacatatgccctatgacactatacattcttagctcttgctttgtctccacagactgtaaggactccactcacactaacactgtgttggtgacatatagagtttct

SEQ ID NO: 3051 - DNA, 528 bp, Glycine max
  unsure (1)..(528): unsure at all n locations
gctaagcgagtctattctttgtaatacacattagtagcttgtgagaagtattataacctntattgggtaaattcactttcgttgagtggttgataaagaaatactctggttctttatatcaannnacttttgttnnntgaaaaccagaaagtgtgattaagtgaccaaaaccaatcacttgggtggttcttatgattaagggggaagtctatagggattttgctcatgtagtggcccttgagaaaaaacttgtaagccatanttaaagtatttttaattgctctctctttagcccatattaaagtatttcaaaagtccatttgttgtcacnatttcgcacacaaggggttttcatcgcgaaataattnttataccatcattggatgacaatccacttttagtcactaaacgagggttcttaccaacttgtntattataacatcttccattctcaaaagggtttatattntgactaacacactattcaaccnccccttctagttacctttacctttcttcttcttcttc

SEQ ID NO: 3052 - DNA, 443 bp, Glycine max
  unsure (1)..(443): unsure at all n locations
ggcttctacataaagagctttgaaatctgaagtttagttttcaaatgatcaaagttgaaaaaaatgcacacacatgacctctatttatagcctaagtgtcacacaaaattggagggaaacttgaatttctattcaaatttcacttgaatttgaaattgaatttgtggagccagccaaaattcactaattatgattagtgaattttagctatggttcagcccactaatccaagatcaagtccaagattctccactaagtgtgcttaggtatcatgaagcatgcaaagcatgaaggacatgcacaaagtgcgactatatgatgtggcatggaggtgtagcaagtaaatgttcacctccctctctaaaatttaantggattgggcttctcaattcaaattaaattatttctcaacacacacatcaaatatttcacttatacatgtg

SEQ ID NO: 3053 - DNA, 482 bp, Glycine max
  unsure (1)..(482): unsure at all n locations
tgcaagctagtataccaaactcagatgtctattatcttcaaaataaaatcatcgtaatatgtatgcaaacaggactctacgagcaagagcaaccaggaaaataagataagagtgaagcagagagaccgagatattatagatgatacacaaatcaacagcacactcaaggcaatggaaacatgtgaaataacaataaagaaaaaatacagcatataaaacactgaagcattatctctatcgccctagttttggatgagttttgtagtttttcaaaccacaatttagaacttatctaacctgaacctcaattgcagcctcacgacctattgtcagcatctgaacagttccacgttcctttaagcaatcacggaatgaaaggaaaaggagctttttccccgcaagataatctggctcanagagaaaaanatcataattaaggtatgagagacagaagctacttgagcatcagtcaggtaagacag

SEQ ID NO: 3054 - DNA, 220 bp, Glycine max
tgctgcagactaccaacttcgtgatctatcaccccagcatatgtacaccgtaaaagagtctgtctatctgattattatagagactggatttgccaatgatatactgtatatcccactgatatactcctaaggtggggtcttgggtggaaaatggatttacccatgagatttttgcccattcgtagcatgattacaaattatcttatggaacaagtgaatt

SEQ ID NO: 3055 - DNA, 466 bp, Glycine max
  unsure (1)..(466): unsure at all n locations
gcaagcttacctattggtcaaccatctactatcaatggccttgttggatcttcccttattggaactaagctctttttcaagccctctcaccagagtttcagacccaagaatttcaggtgaacaaattgcactatgattattgattactctctcctattttctgtttccattcaattcaataaaatatgtcttcccttctcattatattcttggtgattaacaatttatcttctccttcaactagtgaaagggtgttgcaccatgtttgaataaacatcacaaataatcaatagttaccttgaaatatatatcacaaataatagaattctctaattacttttgactcgttattactttcaatgagaaaacatgtatcagttggttaagaagctgaccaatgaagattngtttttgactggtgcgggtattgatcaatcattgcttttggatttctaccttttttact

SEQ ID NO: 3056 - DNA, 430 bp, Glycine max
  unsure (1)..(430): unsure at all n locations
tcgagaagaatggcctcagcaaattccttatttccagaaggaaattctatcaatagaccaccaatctctaatggagagggttaccactactggaaaacccgaatgcaaatctttattgaggcaatagacttaagtatttgggaagccatagaaatagggccatatatacccaccacagtagaaagaattacaaaagatggtagcacatcaagtgaaagcataacaatagaaaaacctagagatagatggtctgaagaggatagaaaacgagttcaatacaatctaaaagccaataacataataacatctgccctgggaatggatgaatatatcanggtttcaaattgtaagagtgctaaagaaatgtgggacactctacagtttacacatgaaggaactacagatgttcatagatctaggataaacacac

SEQ ID NO: 3057 - DNA, 412 bp, Glycine max
  unsure (1)..(412): unsure at all n locations
gcttatcattgatgatgatgatggngaaatattgccgcacttctcctgctatgcaagaatatcatgcaaaatgtaagagtgggactatagtccatttctctgtttgatctccttttgtcatactttgattatacttctttctggcttatttattatttcactacccctagaagtagatatttaaataaataatattcttgaagctcaggtacgggctctatcttgcctaggtagtgcagatacacaagtagtgggcattcaccatgcagtaaaaagaaaaatagtatcatgtagttgcgtttgttgcaaagggttgaacaagacgaacgaaacattggtattttgcttatctttggtgtttttaaaaaatanaacanaagacgatataaggttgaaaatgtattattattta

SEQ ID NO: 3058 - DNA, 253 bp, Glycine max
gcttactgattatatatagagacacacacatacatgtatatatatctacatatatatatgtatacatagctattctatgtacggactcggtagcaaatacgatctctatggggacaacactagattatagcttgacttcgtgcggaagccacacaaacggaaagggatccctctgtaaccgctatctacgacttgtggtatgtctatgcgccatgaaatgaaatgatcataactactgagggtaggtctatga

SEQ ID NO: 3059 - DNA, 446 bp, Glycine max
  unsure (1)..(446): unsure at all n locations
agcttctacttatgtggcagggcgggtttccttcactttcttgtttccaacgtgagctctgaccactgttcttccttcccgcgatgcttcttttcatgtccgcctgagtgggtttatagcctaaaccatacttcccacgatttccttgggtttttatcaggctagttatgccgccattgtctttgcctaaacccatcccgggttcataaccgttccccaacataactcgggccatcattaccgccgcatcggacagacaaggttgcccaaagagggagtccacggaggaaatgctgaccacctcanaagactggaaagcggtttctaacgattcttctgcggcttccacataaggcatggaggatgggcagcttaccaagatatcttcctcgcctgacacgatgaccaagtgcccctccactacgaatttcagcttttggtggagt

SEQ ID NO: 3060 - DNA, 345 bp, Glycine max
  unsure (1)..(345): unsure at all n locations
ctttaatttcaatacaaaggagcatgacttatgcctaggaatctaagttttggttttgaatgtaaaaaggcatgaatatcangacatgtttgagaggtttttgattagaattggctgcctcatgaggaataccttgcacctaggtagcatggaaaatacctttcaatggtatgtatatatgtgaatatatatagcatggaaatgccttgcaaagtgtgtgaatatatggcataaatgtttcgaggccatcaaaggatggtcgttccaccgagagagacgcgtccagctcatggacgatgagtacactgactttcatgaagagatagctcatcggcgcttgtcact

SEQ ID NO: 3061 - DNA, 453 bp, Glycine max
  unsure (1)..(453): unsure at all n locations
agctntactaactntcacttcacattttgtaatcattgattaaatntattntatttgataaataaaatatttaataaaatcaaatattaaatatacataatgagtaataatatatacattctactttttttgaactacctaattttagtgtgtttcttgcattaatggttgtggaggtttgaaaaaaatgaattttcataaaaaatatcattttccccatttcttataaataatgaaaaaataattaatgatttagagaggtccatcaagtctcaactctaaacacatagtacaaaatgttgttctaacaaaaagaaaatcaatacaaaccggaaaattcaaccccttcaaaagcactgcaatttggctctcacttgcaactcgcctctcacttgcattgatttagaatcttaaaatatctttcctcggtgagagacanaaatgtcaaattat

SEQ ID NO: 3062 - DNA, 272 bp, Glycine max
  unsure (1)..(272): unsure at all n locations
cgagagctcaagaatgagatacttacttgatggagtgggtagcaacactaagaatggaagcaaaagcataaaaatagtggcctatgggtgaaaatcctcaattcccgtggtgttggcattttttgagtgatgggggaagattttanattgaatttatgtaacccgccaaaatttactaattatgattagtgaattttagctatgggtcaacccactaatccaatatctaattcgaaattctccactaaatgtgcttaagtattacgaatcat

SEQ ID NO: 3063 - DNA, 447 bp, Glycine max
  unsure (1)..(447): unsure at all n locations
agcttctagccaaatggacttaccttgaattaattcctttgatangccctttgagccttgtttccctttccttgttttgaagctcactacaagccttaagtgaaaaaaccatgatatcaccatatccttaaggaattttggagctttggaattgttttgggaataagtgtggggggtttttgtttcattggataacatgttttgttggctatgcttcatgatgtattttgggccatacttgatgtacattgtatattggttaaatgttggacatgctgaatgagatgttgtttctcaaaggctacagaaaaataataataataataataataataaatatatcgaanaagaaaaagaaaagcaataaagttgagtgaataagatcataaatggcaaaagaatgatgagactcttggtcctattctntatgntataaatttatctttg

SEQ ID NO: 3064 - DNA, 343 bp, Glycine max
  unsure (1)..(343): unsure at all n locations
tctcctccaattntctataaatagggggagaagtgaagtataaataggctcagccctcctggtgatttagaatcactttacattagtgagacaaatcggttccgtgaataaaatccaagtctaagtgcttccgtaatgtttccgtaacatttcccggagtgatttcgcgaaggttttcgaccgttcttagacgttcttcattcgttcttccatgatcttcggtcttcaaccgagaagatccctagatcaagcttttcaattcattctatgcacccttagtgcgcctcatatggttttacgtgctctgatttacattacatatactttccgtaccctcttttga

SEQ ID NO: 3065 - DNA, 442 bp, Glycine max
  unsure (1)..(442): unsure at all n locations
catgcaagcttccatcaataatgtttcactcagaagtccgattcagtcgcataatatatcgagacgctcaaaattcaacaacggaagctctcgagaattcaagtggtcataacttttcacatagatgtccgattcaaggacataatatatcaatacactcgaaattgaataatggaagctctcgagaattcaagtggtcatcactnttatctcagaagtccgattaaggcgcataacatatcgagattctcgaaattgaacaatggaagttctcaagatattcaaatggtcataacttttcagttcgatgtccgattaaggcgcataatatatctagacgctctatattgaacaacggaagctctctagatattcaaatggtcataacttttcactcagaagttcgattaaggcgcataatatatcgagacactaaaaattg

SEQ ID NO: 3066 - DNA, 185 bp, Glycine max
atgtacgattatggtgtacccatcacatgtggtactacgtgtcggtcagccgatggtgcacaacagatatggcacatactccaggcgcgcctaaacccacctttctctgtgggccatctcacactaagctcacggactccctcgtaatccatatacttgttcctatcaacaccgagagaccatca

SEQ ID NO: 3067 - DNA, 212 bp, Glycine max
  unsure (1)..(212): unsure at all n locations
gagggggacgncnnccgcccacatcattgacagatcataatcttacttattccaatactccagtaactatctcttatgtacgcagtagtaacagtcggatcgacgcgcaaatgtttgtggttgttttagtacatccgtccntgctattatcgcaggactcgggtaaataatttcaaatctgaatgatgtacctatccataacaactgagcag

SEQ ID NO: 3068 - DNA, 464 bp, Glycine max
  unsure (1)..(464): unsure at all n locations
agcttcttggatgtttaatggatcctcctctattgtataggccatataatcgggcccataatctgtagcaattcttgctctcttacctcttcgaggctctatatctgattctggttgtgcaagattttcattactaatagcaggaagatgactagatgaagtacccgcactattccttaatttaaaagataatcagaaaccagattctttctcatctctggagtatgcatcacatctttgagaatcaaagtctttccagaggtaaacttcagttcaacatctccagttccancacccgtnntggtgtgagaatctccaagcaacactttcttattttcaacatttgtgtatgttgtaatcatagcacgatcatagtagacatggcgagaggcgccagtgtctacccaccatacatctgatcctgcaatgatattaatcttagttatcacaacaatgggtgactc

SEQ ID NO: 3069 - DNA, 293 bp, Glycine max
actcagcttcaatggaataatatgtcttcacatgtgcattcgtccattcttggaggcccttgcggatgttggcctgtgtgcctttacatgactagaatggatgtccaacaggtcctacatggatttcactgcaccacctgcattagtattccaatattaaacacttcagaacatttgatcacttctttctttcttttttcagtaggagacattaaattacatttatttgcaagggagtgtcgatttccagttgcaacaagtattcaaataatttttattataacacctttttc

SEQ ID NO: 3070 - DNA, 429 bp, Glycine max
  unsure (1)..(429): unsure at all n locations
agcttcaagaatcaagatcaagattcaagaatcaagacaagacttaatcaagatgagtatgaaaaggttntttcaaaaattgagtagcacatggatttttctcanaatatgtttaccaaagagtttttactctctggtaatcgattaccagattgttgtaatcgattaccagtagcaaaatgaatttgaaaaagttttcaaatgaatttacaacgttccaattgatttcaaaaaatatgtaatcgattacaatgttttggtaatcgattaccagtgcctttgaacgttgaaattcaaattcaaatgtgaagagtcacatcctttcacataaaagctttgtgtaatcgattacacntgattggtaatcgattaccagtgattggttatgaataaaccanaatatgtaactcttcaaatnggttttgactt

SEQ ID NO: 3071 - DNA, 365 bp, Glycine max
  unsure (1)..(365): unsure at all n locations
atactaggctngagctcggcttgagttgaatacgtaaggcttaagcttgactcattacctgtcataagctttttttataggcttggctcgacttacataaaagtctgatttggcccatgagcttatttaaaagcttgcttaaagacgtccttgattaattaatcattttaaaatctagtgaaatactaactaaaaaaaacttataaaatttcgtataagtaatgtacaaatccaataataattgataaacaaaatcatattgaattcaagtctgtcaagcacacagtctatcaaaagacaatttaaagagcatgatcttaaaaaatgtatggattatgtgctcagccccaaagcttacaaatcta

SEQ ID NO: 3072 - DNA, 463 bp, Glycine max
  unsure (1)..(463): unsure at all n locations
agcttctggtgggacatcttgactngctntccaatctgacattcaccacagattctgccttcttctattntcagattgnggatgcctctaacagcacctttgtcaatgattntcttcatgcctctcaagtgcagatgtccaaatctttgatgccatattctgacttcatcttctttggaggatagacatgtggaggagtagctggtttcttgaggtgtccataggtaacaattggcctttgatctgctgcccttcattagaacttcactcttctcatttgtcaccaagcattctgactntgtgaagtttacattgaatccttcatcacacaactgactgatgctgatcaagtntgcagtcagtcccttcactatcagaactttgtccagactatgaagtccatcatggactagctttcctattccaatganttttcctttagagccatctccaaatgtcacat

SEQ ID NO: 3073 - DNA, 115 bp, Glycine max
  unsure (1)..(115): unsure at all n locations
ggaaatgatntatgtncaaaggttagtcatatggagctactaacacacaatcttaggacctgacagaacatgggtggtgaatggtccaatattcaaactataccatgggggagag

SEQ ID NO: 3074 - DNA, 486 bp, Glycine max
  unsure (1)..(486): unsure at all n locations
tgcaagcttccttgacaagctagagcttagctacactcacccatctaanatctaagctcacctccttgacaaaatacatgaaaatacaaaaaaaagtccctactacaaanactactcanaatgccctgaaatacaaggcttttatactactagaatggtcaaaatacaaggcccaaaagaaggaaaaacctattctaatatttacaaagaagagtggatccaaccttgacccatgggctcaaaaatctaccctaaggttcctgagaaccctagggcattctttagtagctctagcccaagcctcttggagtcttctatccaatacccttgngggtaggattgcatcagaatgtttattatgatgcanagttaanaaagttttagcatacaaaccatctaattntaatttatataaaccatcacaaagaacattantaccaatgagatgattatgcttaaataaactgaaacatccattaccaaaac

SEQ ID NO: 3075 - DNA, 281 bp, Glycine max
  unsure (1)..(281): unsure at all n locations
tatgggttatgcaacagaactnagcttattgttacaagacttggttcatgtgtcgttgaagcagagattattactgggcccaacataggtcatagaacatacataccaagaatgaatctttctccttctgattcaccatggccattcaagcttattagaagacaatttccattcatggtcttatttgccatgacaattaacaaatctcaaggacagtcgatggcacaagttggattgttttgcccaccccagtattgtactactgcgagtatatgttgcgc

SEQ ID NO: 3076 - DNA, 480 bp, Glycine max
  unsure (1)..(480): unsure at all n locations
tactgatgcaaggcaccaattcatgtatcataaatcgatggcaacatacacccacaaataaagggatttagttaatgcccacctttcacacataatcactcgggaaaacaccacccttccttaataagaatcctacaattaaccttaacgagaaaaaagttaaaaaggtatacattatctaattctacacactatttatttttataaaacactgacttgagcgtcaacatctttatgaataccctgccagagttcgactcatagtagatcatcataaatattgaatttcgcttcaaatactttttaaccttatgctataatgctaaacaagtattaccttcaaattcaaatcataatttaatttaagtcataatatnttctattatttttaaattaaattaaattaaattaagtattattggtatgagtatgctcattattttaaatttaaattaaattctaatctattttaagttctat

SEQ ID NO: 3077 - DNA, 283 bp, Glycine max
atgcgcttattcactgccctgtgtcctccatacactcgcactccataagtttgattataagcgtcatccaacactgtataagaagtgttccttggcgcgggggcatgttgatgcacttctatgcctatctttcacgatgctaacatgtcccaccggttaacctctccagtgcaagatcctttctatacccactgatccctaccgctgacgcacataaaaccttacttgcttcaccacgcaagactacccgacttcatgagacttactcttctctacgacgccc

SEQ ID NO: 3078 - DNA, 503 bp, Glycine max
  unsure (1)..(503): unsure at all n locations
agtcacctgcggcatgcaagctngagtctggctccccatttattttcactctgtgaaaaaattcaactctctgtggtgggaattcctatcctgggtgaaggaacacagaaccatccattgtagaccaatggataattttgtccaacatgctcctactgtaggaacacaggctgttggtagaagatggaaaatctggtggctggcagccacaaactcaatctggaaagtcaggaatgatataatttttcaaaatcaatcctttgatatctctaaattggtagacaccactcttttccttatgtggacctggctaaaggggtgggaaaaggacttcactgtctcttttacatagtggtcctcagcaatgtctttagtatttatttaacactattangaagggctggttttatatgctgtattttgttgggtgcctatatggctatnttctgatgtaatgtctctttgtaatctgtagtaccactggtacttctaattatcaatat

SEQ ID NO: 3079 - DNA, 272 bp, Glycine max
taaggcatgtatccatgttcaaattaaatcagcgttttgaaagttgctcttttatcaagtacatgcacaaacatctaaattcatttggtatttgggaaagtcattcattgcttttcattctcaatgtttccaaaaatccttatgttatgctctgatctaatcaaaagtaagattcaaaaacactgagcgatgattctctccaaagcatgctatgtccaacataaaagattaagtcccaaagagagttatatataacctataactatactaac

SEQ ID NO: 3080 - DNA, 468 bp, Glycine max
agcttaccattataggaagccatggataagatcttgaaggtaggagaagatgagtggagggagaatgagcacaaaattttgtgtctcatatgaagtctgaactttgaagtgtaattctcaaatgatcaaagttgaaaaaatgcacacacaaggtttctatttatagcctaagtgtcacacaaaattggaggaaaatttgaatttctattcaaatttcactttgaattgaatttgaattggtggagcagaatttggagccaaaatttcactaattataattagtaaattttagctatggttcagcccactaatccaagatcaagtccatctccactaagtgtccttaggtgtcatgagacacgtaaaacatgaaggacatacaagtgtgactatatgaagtgacaatatggtgtagcaagcaaatgctcacctcccccttaggatgatccaaaatttaattggattggg

SEQ ID NO: 3081 - DNA, 442 bp, Glycine max
  unsure (1)..(442): unsure at all n locations
tccacaacatccaagcaattcaacatccaaacatcataaactatcaaaaccaagaaaacagggcagaggcagaaaactctgcccaaaacacaaaccaataccgcaactttccttactcaaataccccagtaacattctcttcgttccaatttgttcaccgttggatcgactcgaaaattttattggaggtccctagtacataagtctacattttgaccgttgggatctgttagaaaacgtccagaacccaatatatacaaccctttccacaaccagcaatgcataagcattttctgcacaagcacaaaatcctgctgcacatttcaacaacaaaattctgcataatagtgcagatcttcgaaatcactcttgccctcatccaattnntgcccaaatggatcctaanagtcctaaatcaagtataaatcatatctaaatcaaa

SEQ ID NO: 3082 - DNA, 446 bp, Glycine max
  unsure (1)..(446): unsure at all n locations
aaaatacttttaattaatatttgaattnttattcctttattaatatatatgtgaggggtagagggtgtcacactcttccgcagaaaccgtggcagcatttctcccancatgtgatctttttgcctaatcgtatttgtgctaatcgtgttggtggctggccctcacatggtcagtgtggcagcaacggaataaaataatcttctcaaatgtcacttttgatggtaacaaggtgatggaggatgctattttcacactctggacatggctgaagagttttgagaaggatttcgcaatcccatatacttactgggcatctaacatctcaactggctttcntctcttcatgggggtagaaaatataggaagtgggagcaacttatcactgtatttccctgccttcctgcctctgcagctaatggttcctttcgagactgctcttagtctga

SEQ ID NO: 3083 - DNA, 374 bp, Glycine max
tgcactcgggcatagaatcaggaagttgatgtaactgatatagaccatcgctccccacagatccttttcgtagaacaaatttagcatcctgtgatttaacaagacgaaatgatgagtgaaactcacaaaaacacattattatctttgcaaaactgactgacactaatgagattcttagtaaatagcaatacaaggagcaaataataaattaccaagagtaagagaaaactgaggattgaggggggaggaaaatgtggaaacacctgatgagttaatggtgaggccctgaccaatatacaataatgatttggtcaggcccctcaaaaagtggcacttgctgtatgttctgtgacattactattcacatgatggga

SEQ ID NO: 3084 - DNA, 459 bp, Glycine max
  unsure (1)..(459): unsure at all n locations
agctngatgaatcatgtatcgtagttaggaacaaggctagattgattgctaaaggatacaaccaagaggaaggcattgactatgatgagacctatgcctttggtgcaaggttggaagctattangctattgcttgcttttggttgtattatgaatttcaggttatatcaaatggatgtgaaaagtgcttttctcaatggatacattgaagaagagatatatatagaccagcctccaagttttgtagactttgaacatcctaatcatgtttacaagttgaaaaagacactgtgtggtttaaaagaagcacctaaattttggtatgaaagataaagcaatttcttaattggacagtcttttgtaagaggtcaagttgacaaaacattgtttatcaagagatcatacaacgagttcttgctttgtgcaaattatgttaatgacaattnttggtgtctctgat

SEQ ID NO: 3085 - DNA, 375 bp, Glycine max
  unsure (1)..(375): unsure at all n locations
ntacaaccaagagagtgccttggataagaagcttagagaggaagcttcaaaggaggaagggaatgagatagagagaaagtgacatggaaaattgaaggaagaaagggagagaagttgaactttgaagtatgtctcacaagactctaattcatcaaagttgtgacaagtattacatatgtttctatttatagcctaggtcactaactaaatgaaaagtgaatttcattntcatttcatgcgaatctaaaaggaatattccaaggatatgccaaaggcatcttaacatattccaagaatatgccaaaggcatcttagcatattgcaagaatatgccaaaggcatcttggcatatttcttttagatgctacaagaatg

SEQ ID NO: 3086 - DNA, 276 bp, Glycine max
  unsure (1)..(276): unsure at all n locations
agcttggagatgcaatagtgctaangnttctgtttttagttaatacatattgtcgacaattaacttgaggtcttgtctctatgatatttaacgttaatgtgccaacctgtttctagtttggtctttggcaaatgtgttaaaagatatgcatgttgattaataggaacgattcaacacctatcggatatgaagagactgtnggtgtattgctaaactactgatttctgaatctgatgcaaggctaactagatgatatctactctaatatcaacgata

SEQ ID NO: 3087 - DNA, 395 bp, Glycine max
  unsure (1)..(395): unsure at all n locations
gcagcttatcttacctatctatctcccagatgtctgtgcaaagattcaatatataaaacacatgaagttctaattcaagatgttttctttgttgcatgggcataatgcaatcactctatgtctagcaatgattatattaagatgtccctacctttgagttctactaaaaattatcctctctcgagcgactaatccctaaaactgatgcatataaaaccttcaatgtatttctactaaagattaccctctttcaagcgccaaacccctaaagatgatgcanggatgaaacatataatacatttgttggcattttaggcctgcccagccctaactaaaggggtgtagcctttcattgtcatgagagactnttacactttatggagttgatatggatg

SEQ ID NO: 3088 - DNA, 437 bp, Glycine max
  unsure (1)..(437): unsure at all n locations
agcttatccctagaggtgatggactntntcaggtcttggtgaggatcaataacaatgcctataggttgaacctcctagaagagtgtggagttaacaccacttttaacatttctgatttaattccttctgcaggtggagctgatactgaggaaaaggaaccaacagatttgaggtcaaatcctcttcaagggggaggggatgatgcaatcctccgtaggaaggaaccagtcactatagccatgagcaagaggagaggattgggctagagctattgaagaagaccctagggttctcatgaacctcanggtagaatttggagcccatgggccaagcttgggtccacttttctctgtaaatattagaataggtttttcttcttttanggcttgtgggtatcctacaaagtaagggcaccctaccctacaaaagtgaatttc

SEQ ID NO: 3089 - DNA, 203 bp, Glycine max
ctcctccatataggaccaatgagcggtgcacttgtatagatggacacacttaaaaaatcttcttcgaaactatggctttgctctattctcacgaagaacccaaccatacgaatgttgtgcgctgctcctttcaaacccaagaaagataagcgctggaccatgaagatatacaccccttgtactagccaccaaacaagactagc

SEQ ID NO: 3090 - DNA, 457 bp, Glycine max
  unsure (1)..(457): unsure at all n locations
agctngaaggtttgtacatgaccaaatctttatttattcgtctgtacctaaagcagtctttgtattcgtttaaaatgcatgaagatagatcagtaggagaacaattggatttgtttaataaaatgattctagatcttgaaaatattgatgtcactattgatgatgaggatcaagctctgttattgttgtgctctttgcctaagagttactctcatttcaaagagactttattgtttggaagagatactgtttctcttgatgaagtgtaggctgctctgaattcaaaggaattgaatgaaagaaaggaaaagaagtcctctgcaagtggtgaagggctgacagccagaggcaagaccttcaagaaagatagtaaatttgataagaagaagcaaaagccagagcatcagaagaatggtgaaggaaacatcttcaaaatcagatgttatcactataaaaa

SEQ ID NO: 3091 - DNA, 403 bp, Glycine max
  unsure (1)..(403): unsure at all n locations
tgtctccttgagcttgaaattcgttagccaattgtgtggcgtcgggaacatgcgcgccatcttcagcgtcggtgttggagtgttngtgatgattatgctcaaagggaaggtcagtgaagtgtgacaacgtgggtaaacaacgtttcttcttcttgttcttccaagtcactttcatttttcaccgccacttttctcttccaacgtttttgtttgtctgtgtttgatatggcttctctcttctcttctaccaaataaactcttaattatcttctttacactntgggcctccgtgtttgttgtagggagttactagttattattgggccattctcattgctatggacccctatgtcaaaggatggatatatttcttattccaaaaatatcttttccacataattat

SEQ ID NO: 3092 - DNA, 373 bp, Glycine max
  unsure (1)..(373): unsure at all n locations
gcttgagccaattcaaacgacaataactttttactcggatgtctgattgagtcccgtcatatatcgagacgctcgaaattgaatgttgaagctctgagccaattcaggcgacaatatctttttactcggatgtctgattgagtcctgtaatatatcgagacgctcgaaattgaatgttgaacctctgagcaaattcaaacgacaataacttttttctcggatgtctgattgagtcctgtcatatatcgagacgctcgaaattgaatgttgaagctctgagccaattcaaacgacaataactttctactcggatgtctgattgagtcctgtcatatatcgagacgctcnaaattgaatggtgaagctctgagcc

SEQ ID NO: 3093 - DNA, 412 bp, Glycine max
tctagaaggagatcaacttgatgttctatgcttcttgaatgtggcagtccatgaggaatctccttggaaaagacatctttaaattcctgcaataagggttgaacactatgagaaacataaatagttaactgattagaattatcactctctctcttttgtgtatcactcttttcctcgggtgtatcactcttctttttcatattcctttgtggagcctcactattttctgtctcttgttctctcttttctctcattctgatttggtcatcacacacttctctaggggatagaggtttaagagtaaacaaggaagatttggtcaacaaacgttgcatttgtgtagtccacgcgtccagaaataagcgatgagattcatccagttgatgatatacaccaccattgtcaccagctc

SEQ ID NO: 3094 - DNA, 449 bp, Glycine max
  unsure (1)..(449): unsure at all n locations
agctnnttggagtagaaacatgggaccaactcattttatttcaaaatggaagtcatatctagtcaaggtctgagagaccatacaagtttcctaacgatttctaattatgtgggccattaagtctatcatatgctgacaatagccgagaagcccatgaatctcttcgggggcggagtaggtgtctgccatcgccttggccttggctaacaatcggggaagttcttgactcccgttcaaggtaagagcaaaccgatccatccacatggttgcctcttggtgtaaagagtcgattacccttcctctagcctctttttccgcatatacttgagcatactcatccgcgattctatgctcgtgggccgnggctagacctaactcttcttggtacttggcgatgatagctaacatgttggtctctgtctcgcataaacgctgagacaagcttcttt

SEQ ID NO: 3095 - DNA, 316 bp, Glycine max
cgaaggcaaactggatgcattggttaacttggtaacccaactggccttgaacaagacatctgtacctgttgcaagggtctgtggtttgtgctcctctgctgaccaccatacagacctttgcccttccatgcagcaacctggagcaattgagcagcccaaagcttatgctgctaatatttacaatagacctcctcaacctcagcagcaaaatcaaccacagccaaacaattatgacctctccagcaacatatacaaccctggatggaggaatcaccctaatctcagatggtctagccctcagcaaacacaacagcag

SEQ ID NO: 3096 - DNA, 230 bp, Glycine max
tttctctgacacagaggtaaccacctgggctgttaaaaccctccgcttttgggcgtaatcttatgaaaagattcttagccacactctatgcaataagctcctgtgtttgcattctatccggagccatatcacaattgtactgatattggctatcgaaggcaatcattaagtccttcctataatggacttaagaaagttccaaaatactgtacaagtaacacctacccctg

SEQ ID NO: 3097 - DNA, 341 bp, Glycine max
  unsure (1)..(341): unsure at all n locations
nttgcaagagttatgactactataggaggcatgtttttctcttttcattnctttcattaggttgtcttctttcgtcctctcttattttctttctttcatcttgacttatttcttccactcttttttttcccttttcttttctttcttgtttttctttccataacttgagggaactcaactcatctaagattctagataaagggtctttatgactagtacccttgccattaacactagatgaatgatgactcgtgttggttcctaagttgtggttctttcttgttggaggtttgaaaacaaaaggtaaaagaaactatggttgaaactagccaaataaacac

SEQ ID NO: 3098 - DNA, 280 bp, Glycine max
caggagttggtattacgaatttactaactgccatggaggatcatagtgggtgctatctcatttacccttggtgtcatctctttatcttataactcagtgcattctatcattaccctttcttaatatgctgaagtaccaacatgccaacatatctaatgcaacaaattccaccactaatagtcagcctatgatctaaaaccaacaaaatccctcatgtcagatttctctcatcttctaattttatgatagcttctgcagatttaaaacaagcatttggttc

SEQ ID NO: 3099 - DNA, 302 bp, Glycine max
ttttttgaaaatccaaatatgactgcgtatgtattttctctaagatttgcaactcatttatcgtcgagcatagagcgaagcctaatcatacctgaaggggattcaagcctaagctcctgaattgctccagctttcgtatatgtctgaacaactatactacagtatcatcttcattatggactacccttacataacacaacttgtgaagggatgtcatgcctccaagaccattcttcaaattacacacccaaaatatgaagaacctcttttgtgagcttgcaaatcaactttggcatttccca

SEQ ID NO: 3100 - DNA, 327 bp, Glycine max
agcttcgaattaaaagaggcgttattctttcaattcgcgatgctcgtaccagcgatccgtatgtcgtcgtcaacatgggtgatcaggtttgaatttgcagtttgaggaaattttgttcttctaggtgtgtttgatttagaggaaaggaataaaaaaaaaagattttttttatcaagatagatagtaagagatgtggatcacgagataccacgaaatattgtatacattttttttgttatataattgccctttgaaacaaacacaacctgaaggaggatttggtgaactggggttgtttgagttgagagacgggagcaaatcaaacaa

SEQ ID NO: 3101 - DNA, 314 bp, Glycine max
gtgaaaggaactttgtgggttttaaaagaagtttatttgatcatcctactatgacgactgagaaaactggggcaaatgaaaagggtgagaaagagggagaaacccatgctgtgactgccattcctatacggccaagttttccaccaacccaacaatgtcattactcagccaataacaaacctcctccttacccaccacccagttatccacaaaggccatccctaaaatcaaccacaaagcctacctaccgcacttccaatgacaaacaccacctttagcgtaaaccaaaacaccaaccaagaaatgaattttgc

SEQ ID NO: 3102 - DNA, 325 bp, Glycine max
agcttccatcaagtggtatcagttcacaatagctttaagtaggtgctccttaaacctccattaatttttttttttgccttctcttccattgttgtttcttaatttttctccatgtatctcctcacatgtcttgttctaaatgttgttaacatgattctttagagtttccaccgattaaacttgctatagaagttagatttgattttctatggttcaaatttcttgttcttgttcttgaaccatgaattgtgttgagtttaggttcctttgagttttgtcttgttattttttgtggctgaaacctaaaccataaaattcttacaaa

SEQ ID NO: 3103 - DNA, 173 bp, Glycine max
gaatggctaaactttaacatcaattcagcggtcgatatctacggactaatcgacatccataaaaggattgtcttgaatagctgctagcttaacaatgattcgagcgctcgtttattacggactcatcaactccagtaaaaagtatcgcgttgaatgctcaaggttaacataat

SEQ ID NO: 3104 - DNA, 328 bp, Glycine max
agcttagtgcgtgcttctgttttatcgcgggcttatcgtgtgtcgcaggcttagcgcctgtgctaactggcccgcttagcccgtgatgcacgctaagcgcacgtattgggctgggcctacttcaaattttcttcttttctttaatttttctggtctttttgcttgttacacctccaatttttatatctgcagccaaaattcaacaaaacatcaattctttaatatttaagtgcaaataactgctaaataattatttttaaagataatttttgccttattttctattatcaaaatacaattatttagcagttatcagtgtggctggtta

SEQ ID NO: 3105 - DNA, 344 bp, Glycine max
tgctttatagaagtaactactggtctattttgtgagaatatatgtattagacacaaagcttttttgctgctgtatgaatgaattagacttgcacttgttctcttttgagtgcatttttctgatttctgggttagggaatctcttgtgccaacaattggtatctagagttgatttgatcatgagggactgtgagagaaccttgagtgtagagagaaattggaaatcacaaacagagtttgagagaacccaatcctttttcagaatacccaactttttaaatggcttccaacaatgttccattactagcacctcctgtattcacaggaaagaacgactaaatgtgg

SEQ ID NO: 3106 - DNA, 324 bp, Glycine max
agcttagctgaattcttatcgtttagaagttggcttagctcatccttggccagcttagcgggctaaatcagcctcagatgcatgggttgggcgctaagcgcttgagactcacggcttagcgtatagatcatatccaaatccttaaaacacttagagatcaaactatgtcaaacaatgataaaaatacaatttcctttgtgaaacaaaacatgatataagatctaaaaacaaattcaaaccttttttcaattaaagccaaagagagaaacactcaaagaattataccggttcgtctcatacccgagactatgtttaattctcggc

SEQ ID NO: 3107 - DNA, 334 bp, Glycine max
tcttttggaccttgaacaagcaatttactcctctttcagaaccatgctatgtgctcgcgactggtccctttcttcccttcgcaacttgagttcactattgctaccccatagagctccacgaaatttgttccggccgtactcttccttgcgagccctcttggtctcttgttcaagggctcttgcggtaattgcattctcttcccgtaacctggcacactccttccgaacgtgtgtagcagccaacttgaacctctccttggcgagttttgcctttcctaactcgctctcgagagcttggacttcttcgtcctcttccggtgcttcaaaattctct

SEQ ID NO: 3108 - DNA, 325 bp, Glycine max
agcttagccctagaggggatgtgttcttttcaggttttggagaggatcaataacaatgcctataggttggacctcccagaagagtatggagtcagcaccacttttaacatttctgatttaactccttttgcaggtggagctgatattgaggaggaggaactaacagatttgaggtcaaatcctcttcaaggggaaggggatgatgcaatcctccctaggaagggaccaatcactagaaccatgagcaagaggctccaagaagattgggctagagctgctgaagaaggccctagggttctcatgaaccttagggtagatttctgag

SEQ ID NO: 3109 - DNA, 336 bp, Glycine max
tggagaggatgcttcaatggaggataagaaagttggagagaaagagagagaggggagcacgaaattgaaggaagaaaaagggagagaagttgaactttgagttatgtctcacaagactctcattcatcaaagttacaacaagtgttgcacatgcttctatttatagactaggtagcttccttgagaagctttcttgagaaaacttccttgagaagcttctttgagaaaaattccttgagaagctagagcttagctacacacacccctctcataactaagctcacctccttgagaagcttccttaagaagattcctaaagaagctagagcttagcta

SEQ ID NO: 3110 - DNA, 322 bp, Glycine max
agcttccatcagctgtcttacttgtttagcctcaccctctaaatttatccgatgcatacatgtggatgggctaataccaccaatgtccaccagggtccaacctatagccttcttatgcttcttgagaactgataacaacttctcctcttgctcatcaacaagggaggcagatataattactggaaaacttttgttatcatccaagtaagcatattttaaatttgatggcaaaggcttcaattctggtgtgagcggttggatagtggtagaaagagatggtttctcagcctgtacctcataaagaaagtaagaggtatgtgta

SEQ ID NO: 3111 - DNA, 335 bp, Glycine max
tgcttgtggggcttctatggaggctggatcttttagcttcaatggggtcctttaatggtgattttccaccatggagatgcagcggaagacaaaggaaaggaggtgagaggaggcgccatccattaaggaataagccatggaagaaggagcttcaccaccaagatgagccttggataagaagcttggagaggatgcttcaatggaggaaaagaaagagggagagaaagagggaggggggagcacgaaattgaaggaagaaaaagggagagaagttgaactttgagttgtgtctcacaagactctcattcatcaaagttacaacaagtgttacacat

SEQ ID NO: 3112 - DNA, 320 bp, Glycine max
agctttaaggtcaagagggctgtatgatgatacaacttgcctcgttgtagatattattccttcagatcatcccgtgttgccaacaattccaagaaagaaacgtaacgtgctaacttcccttctctttggaaagaaatctcaaaactctacaaacaaaggcaccaataagctttcttctgttggtgttgtggaggaattatttgaagagggttctgcaatgcttacagagaggtaactgggaccataactgctaaatttatatttgcatgatgtcatttgaagtttaatttgtcaccatcatggtggaaagagagaaaaaa

SEQ ID NO: 3113 - DNA, 333 bp, Glycine max
tctcattactgtatgcacgtcatatagtaactattaagcatgactttgttggaaatttatcatggtaataaatcctgatcataaattcacaatgagtagttaactactttgttttgtgtaagcatattgtgggtcataattggcagaacatgtataggtgttactttttttttttttttgatcagcaaaaatataatatattgatataagtaccagaggtactataaaagtacagaggtagagccaaagtcatggttccaaaaaactaaagcagtttgaaaaggaaccatagcatggctacaaaatacaaggatctggtacagctcctaataa

SEQ ID NO: 3114 - DNA, 324 bp, Glycine max
  unsure (1)..(324): unsure at all n locations
agcttgctccctctgtttatattcaaactttggtttttatatggttggatggagcangtgggtgtgtgaggggcgcttccttgatctggggtgtgggagggaacgatggttttgtagtagctgcaatgcttgtgcactcagttattttaaactaactttgtattcacacacatatatattttggtttaccaaaaaaatattaaaattttatcttctattaaataactttttgactttttataattaaaataagatttttttaatcttttaaagatttttgttttaattttttatttagtaattcttgttcaaagataatgttga

SEQ ID NO: 3115 - DNA, 338 bp, Glycine max
tattatatgtggtaacatcaaaattttatcattctttaataattcttagacttaatgatgtggcaaaattcattttaagaaaagatttcattttgaaaacacttggctccttgaactggaattaaatgatgttgttgagcttggttggtctcacctaaatggtcaaaatttcctctcaaaattatctatcacatccgctgaaatgaattcatggggaaaccaaatcagagggaagtattgtaccaaaattgttgaagtcagaaccaagatggaacaaactcgtgaaatgaatgatatccattcaacataaaatttcgaagcactctataaagagatgg

SEQ ID NO: 3116 - DNA, 316 bp, Glycine max
  unsure (1)..(316): unsure at all n locations
agcttatttttaagatatgagtcaaagncaaaaagaagatatgtttcattttagctcagtcagacaaagtggggctcgcaagtcaaagagagtaagtggctatctcaattttttggatatttcgcccccaacaagaatattttcttattgggctagaaatgttgcactaacactttttggacaaaaagtcaaagccttaaaaggggcttcttgcaagagaacaaaacattcttacggaacctaagttttggatggtgcgcagctgtgtagaactctctagatgtgtagaactctctccttcctccatttttcacct

SEQ ID NO: 3117 - DNA, 210 bp, Glycine max
agacgagaatgaggctgagtgctgtgattatataagaacttaatgggggatgacatccataccattcctctattgatatataggctatgtagaatgcactcaggttagatctcaccatggggacatgctgacgtccctaattatctgggccgagaagctctcagccgttgatatcattctagacttgttacttaccgggatcgatggctg

SEQ ID NO: 3118 - DNA, 317 bp, Glycine max
agcttggagtggatgctttaattgaggaaaagaaagagggagggaaagagagaggggggagcacgaaattgaaggaagaaaaagggagagaagttgaactttgagttgtgtctcacaagactctcattcatcaaagttacaacaagtgttacatatgcttctatttatagacaaggtagcttccttgagaatctttcttagaaaacttccttgagaagcttctttgagaaaacttccttgagaagctagagcttatctatacacacccctttaataactaagattacttccttgagaaacgtccttgagaagcttct

SEQ ID NO: 3119 - DNA, 322 bp, Glycine max
tcctcggggccatttcctgcttatgcaaacatttggaaagttagttttaccaagaaatactactcttaaaacaaaaacggcatacaaccttctccaataaacacaaacatcaatgtaaatttagagcaaactcatgcacatacttcctcacgaacattcactcgcacaagatattcttctaactaagaaaaatgcacccatgcacaatcaaggcaccttcgttacctagattatttatatgcatttccaaggcgtatttgctacctacatcacatgcacttccttggctaaatttacatacatgcatactcaaagcatcttg

SEQ ID NO: 3120 - DNA, 328 bp, Glycine max
  unsure (1)..(328): unsure at all n locations
agctttgaggattnggnctttgttagtgttatgatcgangngggtctgaaaaaaggcaaatttagtcatcctactaggacgactgagaaaactgggacaaataaagagggtgagaaagagggagaaaacccatgctgtgactgccattcctatacggccaagtttcccaccaacccaacaatgtcattactcagccaataacaaacctcctccttacccactgcccaattatccacaaaggccatccctaaatcaaccacaaagtctgtctaccgcacttccaatgacgaagaccacctttagcacaaacccaaaaacaccaaccaag

SEQ ID NO: 3121 - DNA, 349 bp, Glycine max
agcttgacatgaggaagtgtagaagggtgacactgcctgcttttattctttgaccacagagtggtacctggagatatgtcgcgggggtcatgagaccttggggacgtcaggtggggtgctattgtccaaaaccaagcttgaccaatcccgacccaacccgggcatagtcagtcagtgagaacctgtgatgtacttaaatacgcgagctcctggcagtcaacatataaaaggaacaaagaccacaaagcaaggaggcttgtgtggtggctggctatctgtgaactttgattgatatatgggatatggcctctggtaatcgattaccaagggtgggtaatctattacaagg

SEQ ID NO: 3122 - DNA, 329 bp, Glycine max
  unsure (1)..(329): unsure at all n locations
gcctgcaaggcttcacgactttgaagacgttttacctttttggtccctccatcccaccatctgattctgcgtgaaatcacatccaatcgtccattcaaatagtgaagtcgtgccatccttcacaactttgaagtcatggccagtgaacgacttccaagctgcaccattttggtcgtgaatcggtggatctcacaacatgcaaaatgcagaaaaactgcaccattttggccatttgcatgtagtgaattggtgaatcaaaatgcanaaaaaatgctacaacnaagnnngntcgngaagcatggcacatgcatgaatagtttacatagtaa

SEQ ID NO: 3123 - DNA, 281 bp, Glycine max
atccaagtagacatgctattgtgtttgcagggatgtctgatgtgtcacgtgatagaaaccttacgatttgacacctctgaccttttctaaccgttggagggtgcattgaagacaaacattacattctgtctgttgctgctgcacgcatgtgcggtgcacgcacaatactcttgcatacttgtcactcgtggagtgggcaagtattggagttgcggcgcatggatgaatggggttgtgtcgtggtgcgaaaaatccatcttctctttaaatggatgagactt

SEQ ID NO: 3124 - DNA, 330 bp, Glycine max
agcttgtcaactcacaccgggattctgctgtttattcttcacccgcacagcctagagctcccaccttcatccagagggaggccccccaagctccggctccaaccacgactcgcacagccggcaatgcccactttggtgccggctccaacgtgatgaggaactttcccccgaggccaattccagaattcaccccgatcccaatgacgtacgaagacctattgtcgtccctcatcaccaaccagagggtggggagatctcctgggaagatctaccaacctcctttcccgaagtgggatgaccctaacacaacttgcgcataccatgggaaaa

SEQ ID NO: 3125 - DNA, 273 bp, Glycine max
ttgcgcaaaggcggcagaaaaagatcaatcgtggctatataacgaccgaggtgagggatttttgtttcaatacaatccctgaataattgttggatattaggacaatacgagacgttctatcggcatgttcaggagatgcgtgctttttattatacacctgcaggatcgggcatctttcctggccgacatccactattattttttttatcaatgactgtgaataatgttatatggccgaagggggctgacgtttttctagccaaattaattaga

SEQ ID NO: 3126 - DNA, 328 bp, Glycine max
  unsure (1)..(328): unsure at all n locations
agcttcgaagtttaaatggggctattaggtcctaataatcngngacgggtagctgttcataagagttaggggtgatgaagaaagtctcgtacacaacagcagcaatagccgagccaattaatgggccggcccagtagacccagtggttagcccatgtcccgctaacaacagcaggtccaaaagaaactgctgggttcatggatgcaccactaaaggtaccacctgccaagatgttagcacccacaatgaaaccaattgcaattggagcaattatcccaagtttacccttctttgggtccactgcagtggcatacactgtgtaaaccaa

SEQ ID NO: 3127 - DNA, 333 bp, Glycine max
  unsure (1)..(333): unsure at all n locations
atgcaaaagtagctgctgagttcaagttgcttgcttatgcatttgntgccggagctacttcacattgcccaatattaccccttacagctctggttgttcaagtggctgcccttcttctcccaagtttcttttgtaagacattgtattgtatgtcaagttctaatttttatacatgtgcatatctatgtaatataaattggaaggataaagatgtttctgctccagtgtttgctagatagtaattatgttattatccccctctttctctcccagcactagtaggttaggttccttaaataaaattccgttagcattaccatttattcgaatatc

SEQ ID NO: 3128 - DNA, 348 bp, Glycine max
  unsure (1)..(348): unsure at all n locations
accaagtcgatcgcagcatgcaagcttttcaattcataatgtttccggttggttttattgngtntcgggtatttttattctcgtttcatttactttttatacccctttttgacgtgcttaagtcattttatttaagtcatttctcgcttaacctaaaaataaaataaatttccaccgatcgtttgaattgtatcattcgttgatttcagttaaaatgaatttcgaccgttcggtcgtgccgtaaccacgttggaaattaaaaaagaggtaaaataatgatataataatagaaaaataccttttagtaaagtaaaaaatcaatcggacgttttctctttgggatttctc

SEQ ID NO: 3129 - DNA, 321 bp, Glycine max
gtataggttttagttttagtttgatggttttactttgccaaacaagtttcatagatgtggcatttatattggatgttttagtctagacatgatgtttgatatagtttaagttttcttatatccatgtttagtgtgaatgaattataaatttatttcctgtttctgatcttggttagggttaccaagaattttgggggttaatagtgtttcaattcctattctttctctcgtagggttcaaaagaatagtagaatctagggaattacatgtgcatagtgtttgtgaaatacaataaatcacactaaaagggggagttgaata

SEQ ID NO: 3130 - DNA, 325 bp, Glycine max
agcttgcccgatggattcctattcattacccattagaaatagactagtagatagggcagcaagaccctgcctacttagcttcttagatgcatactcagggtacaaccaaatacggatgcatccacaagatgaggagaaaacaaacttcataacctagtcgtctaactattgctatcagattatgccattcggcctaaaaaaggctagctccacttaccagcacctaatggacatgatattcaaagaacaaattggaaagaaaatggaggtatatgttgacaacatggtggtaaagtctaatgatgcagaatcacacacctatgat

SEQ ID NO: 3131 - DNA, 333 bp, Glycine max
tttgactcctgggtctttgggacttgcttaattcttaattctttggcatcatcaaaataatcttggaaagcattgcttccacaatctttccctttttgatgatgacactcctgaaatcaagagaatacatacaagttttgttctatcgttcactcatctctttctccttctttctttttgaatttatgcttaattttaaaactttgaaaatataatatcttgatttctaaaatacccatttttctctcccccttttgcaacatcaaaaaggccaaagtgcgtaaaaataaaatcataataagcaattttaaaacatacacaagacataatttg

SEQ ID NO: 3132 - DNA, 325 bp, Glycine max
agcttgaaaggatgcttcaatgttggaatataaagagggagagaaagagagaggggggagcacgaaattgaaggaataaaagagggagagaagtggaactttgatgaatgagagtgatgcaagctccattggagcttgtaggcctaggatcttcttcatcaatggattcctttgcttcttggaagataaatggcagcggaatggagaaggaagagagagaggagacgccacttcaaggagaagataagtctagaagaagctcaccaccataggaggccatggataaaaacttggaggaagaaggagatgaatgaagggaggggga

SEQ ID NO: 3133 - DNA, 338 bp, Glycine max
tcattaagaggcttccccaaaaagcttcctcgttgcttcttttttaagctttctcaagaggcttctttgagaaggtaacactttaactactaacacccttttaataactaaactcacctatttgaaaataattacggataaaataatacaccaaatataatcaaccatcaaacataattactaataatatatagatatatatatatatcagggtgttataactcacacatgcacctgagtcaaatgttatggccgtttgaatttgccgagagcttccgtgaaaatttcgagcgtctcgacatattatgcacctcaatcagacatccgaatgaaatgtt

SEQ ID NO: 3134 - DNA, 314 bp, Glycine max
agcttggttcgaggttcttactttttgaagatcgaagaacgatgaagaacgaatgaagaacgtcgaagaacggttgaaacctttgcgagattcctcacggaaaacgttacggaaacgtttcggaagcgcctcggcttagattttcttcatggaaacaatttttccaagcaaattcgaaagagagagaagtgcctaaggggctgaaccccttccttcttgccttcctcccctatttatagcaaaataggggaggtggttgccgcccagctcgcccaggcgagctcaactcgcccaggcgagcagggttgcttcct

SEQ ID NO: 3135 - DNA, 326 bp, Glycine max
ttgagggtgcgtagcccaccatcttttcatagtttagtatcgataatgggtctaccatcacgattatcgtctccctttccatcattgggggtaccacttgggccgccagatccctccaccttttaagcgtgttctttgaaagatccgtccccctttttgcaaatgttctatagttgcatcctatccggaaccatatcaaaattgtactgatactgcctaacaaaggcaaccattaggtccttccaagaatggactcgggaagattccaagttagtgtaccaggtaacagctaccccagtaagactttcttggaaggaatgtattag

SEQ ID NO: 3136 - DNA, 321 bp, Glycine max
  unsure (1)..(321): unsure at all n locations
agcttgccttncatattcangatagacttttttacaagaagaaaaatcggagatggaaattacaatgaataataagggcacccaagatgttcttttgtgtaaagcactttgtacttaaagtttcactccaaaatgttgcactatcatttttctaataaaggcttgcgcttagcctggggtgcacacttagcctaaattaatggcaatggggacaattagatcagtgcacaccaaacttcatatctccttccaacagccaccagatgcttgccacgtggccttccaagttgagtgtgatgcactaagcgtgttgcttcattt

SEQ ID NO: 3137 - DNA, 323 bp, Glycine max
  unsure (1)..(323): unsure at all n locations
atactcaagcttagaactttggctgtttttaaatgtttttgctttagattngngtttatgtgaccatttttggttttttttcgaaagtaacattaactatgtccttatatattccttggaatagttactcacgtagggggagtagccacgatgtcatcaggatgatattatcggtttgcaattttcacatgcattctattttttattttgaggttaggttaggggttattttgaaccaatttgcttaacttcaatcctctttttgtgtgacatcagttagattgacttctatttgtgtttcacttcctcagactgaagattaa

SEQ ID NO: 3138 - DNA, 325 bp, Glycine max
agcttgctgactttgttatggctaatcacgtgagttgtaaaattcccgttctattatatacttgttcttgtctctattcatatcccgaaagagaatgcttctctcgttgtaccattattttggatttccaagtatgatatgattatctttacactgttaaaacattccggtgggtatttgcattacaaaatgcaatcattaagataaaaggaccaaatttattgttttggaaatttcttatcttgaatttttattacccattacagccattggagtatatcgggtacatcttctaatttccttggctgaatatgtatcttgtgct

SEQ ID NO: 3139 - DNA, 350 bp, Glycine max
tagaaacccaagctttactaattaaaagatgttaaaatgtttaagattatgataaaaacgatacaaattattttatgcccaattacattttatcaagcaaatttgacttgggttattgggaagccatataaaaacccaatttgtatatttgtttgaggctaatcccatattggaccatggtcaacaaatcggaccataattaggtacgactaaaaaatctcaaaggcaacaattactaacaccattagatttattatttaaactactctcgtgtgttttaatttttctctaaaattatcttttgtagggaaatatgatttcatcgtgtgagagaaaatgcaaaaaaatta

SEQ ID NO: 3140 - DNA, 318 bp, Glycine max
agctttagatacatattaatattatagactactatttgtaatcaacagaaaagatcatttgtaaaacgcttttagttaattgcatttctcctaaagttttctaattgagccattttattcttttagatttcagttatattaattgggttcttcaaaaaaaaaaaagtctagatcatcatattctatatttttcttaaatgagataatttatggtgtccacttgaggagtgtcctctatccatctaatttgatactttcttccgcttatcgcttactcttaactgtgcatttaatttatctgctaaatataatataaat

SEQ ID NO: 3141 - DNA, 329 bp, Glycine max
  unsure (1)..(329): unsure at all n locations
tgcttaacgtttatcctttcatagtagncattttttgcattccaatttatgatgagggaatcacgaacactctctgccgttgcaaagaaagccttattgagctcaaacttctctggagaaaaagggctggtgaactcggcatggaatttgatgcttgaagcaatagatgcagaatctggtacaaattcattgaaagtgtctgcaagtgttattaaagaaagaattattaattaggtccttatttactggaaaaataaaaacaatgttgagactgtatggctaataaatctcatattattagttcaataaaaacataaagatgggacaaa

SEQ ID NO: 3142 - DNA, 316 bp, Glycine max
agcttcagaattcaatttctagtgtctcaatagattacgggactcaatcagacatccgagcaaaacgttattgtcgtttggattagttcagagcttcagaattcaatttcgatcgtctcgatatattacgggtctcaatcagacatctgaggaaaaaagttattgtcgtttgaatttgctgagaccttcaacattcaattttgagcgtctcgatgtattacgggactttatcagacatccgagttaaaagttattgttatttgaatttactgagagcttcaacattcaatttcgagcgtctcgatattttacggga

SEQ ID NO: 3143 - DNA, 304 bp, Glycine max
ttcagcaaattttaacgacaataaatttttactttgatgtctgattaaggcccgtaatacatcgagacgctcgaaattgaatgttgaagctctcagcaaattcaaacgacaataactttttactctgatgtctgattgggtcccgtaatatatcgagacgctcgaaattgaatgttgaagctctcagtaaattcaaacgacaataactttttactcggatgtctgattaagtcccgtaatacatcgagacgctcgaaattgaatgttgaagctctcagcatattcaaacgacaataacttttta

SEQ ID NO: 3144 - DNA, 292 bp, Glycine max
tgagccactgcttcacattattgaagctctcttcatctgtcacatcataaacaatctgccagaggaaccagttagtaaagcatgcaaggatccatctacacgggaaatcaatatccaaaagcccatgccaagaaaatcatcacccacaatgatcccatgggccccacgatagtagctactggtgattgtcctaaatcgttcttgcccggctgtgtcccactacatataaaaacagatcacaaatcaaggtaagaaaactatatgtcaacacaatcatgacctttggtgatcc

SEQ ID NO: 3145 - DNA, 324 bp, Glycine max
tatgaaatccttaattgttctccatcttagcaacttttatctttctggaaccattccaaagaaaattggatcactgcaaaagcttgaagatttggatcttggagataaccagttgagtggaacaattccaatagaagtcgtggaattacccaagttacggaatttgaatttgagcaataataaaataaatggaagtgttccctttgagtttcgccaacctcttgaatctcttgatctaagtgggaatttgttgagtggaacaataccaacacagcttggagaggtgatgggactgaaattgttgaatctgtctcgcaataatct

SEQ ID NO: 3146 - DNA, 332 bp, Glycine max
  unsure (1)..(332): unsure at all n locations
agcttgggttcctaggcctagttttgcattctggcactcattnnaaagccttcatgctgtccctatacatataaaacagtcccacaacccaaagctcacaaaaccatgctcatatctcgttgaggcatttcaccgagcactcggtgggcgcatgtttaggcacgaatatcaagagaatggggacaatgtggcatgcgccatcacttcagaatacaccctaggccaaggccatcccttacaacccctcaatccaacaaaaacaagcaacaatctgaggataaatccctcacgtttcttagcaaacacatgcaatttagagcaccaaaatacat

SEQ ID NO: 3147 - DNA, 333 bp, Glycine max
ttacagaagtcaatatttacgcctttaactatgtttatttctaccttacctattttccatcatggccttggtttgtgtgtttagattgccaccagagtcctaaatagataatatctttcattgcaagtttgcagcagtcccaaaacccaattttttgtcgaaaccaagtgtcatgatttctatattgccaattttgctagctgttgatgttgcatcatagttttgctatgtcatctacctttggcctcatctctttaccttacaatttaggcaattctatcattagcctttttcaatatatagaattggcaacatgcaaacatatctaatcca

SEQ ID NO: 3148 - DNA, 327 bp, Glycine max
  unsure (1)..(327): unsure at all n locations
agcttgcccagagaaggagncctctgaggtaatgctttccacctcaaaagactagaaagcggtttctaatgacgcctctgcggcttccacataaggcatagaggatgggcagctcaccaagatgtcttcctcgcctgatacgatgaccagatgcccttccactacgaattttaacttttggtggagtgtagagggaacaactcccactgagtggatccacgggcgccccaacagacagctgtagggggggttaatatctattatttggaaagtaacttgacaggtgtgagggcctatctgtactgggagatcgatctctcccctaac

SEQ ID NO: 3149 - DNA, 330 bp, Glycine max
tcatacaaacttttagcggtgtagattttttgagaatttcattcaaccaacaattattcatttgtgcaagattaattttgattttcatggtgtcaatggattctaatttataccatcaatgcatgatttagatagaagatgaactcaaggagcttacagaagcatatgctgtagatgagggtgcatttctctccttttcaattcttatagtatttattggtcatatttgtctcttttaaaaaaaggcatgaatatttggtctgcttgtgtaatttctcttgttcttgccaattgtatttgtagttgtattgctgacataatgatactatt

SEQ ID NO: 3150 - DNA, 334 bp, Glycine max
gcatgcaagcttggaaagcatggaaaatgtctctggtattgagccatgcaaattgttcccctcgagagtgatgctgtgaaggcgtctgaggttggaaaattcaggtggaataatgccaaataagtgactgcgaacaatctcaaggtagtgcagtccagtgagattggaaagaacgggtgaaagcagccccactagacctttatcgtacaggattagtcgtgtgacacggttatggaatttgtcacatacaacacccgtgaagttgcacacatgaacagcttcatcccagttagcaagtgaggaatgcgggtctgatatgattgtttttctgaat

SEQ ID NO: 3151 - DNA, 325 bp, Glycine max
  unsure (1)..(325): unsure at all n locations
tttctagaaatttaaatattcttgctttttgaagatnaataccatgagattttattttgttttgtttgcgctttgcttccacatgctaggctgctttatatgatctgaataacaatgcattatgtatttagagctaatttggagaaagagacccaggggaaaacggcttggttgttgttatatggagaaatatagaaggaactcataaaacatatcagcagttcagtaaatggcttcaattgtatgatagatccattgggtcaaattagaggtgcaagaacatggataataaaagagaatgatgactggtacagggttgaacctc

SEQ ID NO: 3152 - DNA, 332 bp, Glycine max
  unsure (1)..(332): unsure at all n locations
gcaagcttgccgcccanctagcccatgccaaatatactgcggccctaaccggacaaagtcgaatgaaggaatctactgcaacgcccccctggaccgggcgcccatctagactcaccacatcacgaaatggaccccgggacaaatcgtcccttaatacttgtcgcagaacgtcactaagcactacgaagggataacaacatctggtactaagcaaacacacggcatgtctgcgaacggatagtccccaaatccttccacagccctcaatctttcctcaaggagatcgagcttcctcctttcttcagttgtcagggacggtccttccgtggaca

SEQ ID NO: 3153 - DNA, 276 bp, Glycine max
ccatgttctcagaatgttcaaaatcagaatgttcgaaactgttatgctcaaaatctggatgttcaaaattaccagccacaaaatgcttatactcaccaataacagaatgcgtatgatgctcaaaaggtacaaaatgatgcctaactaatctatgaaatatcctatctatctcatgatcaatgggttgtaagtcagattgattgcccctagtcatacactacattcagcatgcacaactagttgtcttcttatgcaagtaatattgtacgtttgaac

SEQ ID NO: 3154 - DNA, 324 bp, Glycine max
agcttttgctttctctttcaagtgcttccttggtatcccaaccacccgagttctgttttgtttcactcggtctagctcttgtgccgagatcttgaccactttttctactcttgccatggaggggtataaccccgaaaatagatacgacttccttcctcttagggggcatccctagatcccctcaaactcttcaatggttggtaccaactgaaagtccccaaatgtgaagcaccttagcagctggtcatagtattgagcaagggatgcaatgacttcaatggaaacttctatcatagccaaatcatagattttcccatatgtttt

SEQ ID NO: 3155 - DNA, 335 bp, Glycine max
tccaaattagtgtaccacactactgcggctccttgtaagctatcttgaaaaaagtgtattaatagcttttcatccttagagtgtgcgcccatcttgcggcagtacatcttgagatggtttttgggacaagtcgtccctttatacttgtcgaagtccggcactttgaacttcgggggaataacaacatcgggtactaagcaaagatctgtcatgtctgcgaacggatagtccccaaatccttccacggctctcaatctttcctcgaggagatcaagcttcctcttttcttcggttgccgggggcggtccttacatggacaaaactattggttgtgt

SEQ ID NO: 3156 - DNA, 320 bp, Glycine max
  unsure (1)..(320): unsure at all n locations
agctttaatnntcaatttaattttgatgttatttaagtagaatagaggagtcctgatttatgtttcggtcctaattcagtgattgtattggtggcctttcttttccatcctttgacttttgaacaattcatttgaatggttaaagaatatttctgaatgaatgtcattggattcaataattcaacacctatctgttctatttattgtacggttaggttactcattgtgactatgtcattttcaataaaatttgcagttaaaaaaaactaatatgaaattgattgaaattaaatgcacattctattactaaagaaatcaaa

SEQ ID NO: 3157 - DNA, 190 bp, Glycine max
ggccatcatgtctgttccaaatttttaaaggaggtttattttcggggtcgggaaatgcgtggctacaagtgggacttttaaaattcacgtttgggtggacttatttctctctgtaatctcgtgggtgatggggattactgacagcttatccatgttcatgtttttttttacagcgggtgcccattaattt

SEQ ID NO: 3158 - DNA, 211 bp, Glycine max
  unsure (1)..(211): unsure at all n locations
tgcgccaggcaagccggccccgggnggaattgcacagtgacaagcgctcgccgatggaagattcaggaccaatactgccaaacaagtgactgcaaccaatcataacgggctgcagtcaaaggacaatggagacacaccgctgagagcaccccgcacatacggggatcgcctagagtacttccgagcacccgtcctggaaccggacaacata

SEQ ID NO: 3159 - DNA, 344 bp, Glycine max
atactcaagctttgtgccattttgaaatgctttattttgactcttaaattgtagacacttttcttaccataccaaagatatagatggaaatgttgaatttgttgtcaaaaagactagtgttagcaatgcagggtcataaaattttttaccattgccttaagtgcaaattttgaactattttattcatttgttttttctttattctatttttagtagtttttaactatatagtgccatgcaggtcacaattgtggttgttgcagtccttgaaggtctacctttggttgttaccttaatgtaagtacatgtggctaggttatttcattatgcaacatagatatgac

SEQ ID NO: 3160 - DNA, 321 bp, Glycine max
  unsure (1)..(321): unsure at all n locations
agcttggctaagggttttatattatngattcatgacaaaggactcgtgggatccaatttgggcaaaatcgggtgagggcaagagtgatttcgaaaatctgcactattatgtagaaatttgctgttgaaatgtgcaacagaattttgtgcttgtgcaaaaaatgcttatgcattgccggttgcagaaagggttgcccatattcggttctggactattctatcacatcccaacggtcaaaatgtagatttatgtactaaggacctccagtaaaattttctagtcgatccagcgggtaacgaatcaaaacgaagaaaatgttac

SEQ ID NO: 3161 - DNA, 343 bp, Glycine max
aatacttaagcttttgcaactagccttgccttgtatctttcaatttctcccttggttttcttctttgttttgtacacccacttaacaccaatagccttgtgcccttttggaagggagacgaattcccttgtgtcattcttctcgatggatctaatttcttcatgcatcgcatctcatcatttttatcttgcatagcttcttcaaagttcactggttcataatctgcaaagagacaaaatagtattatattatccaatctctcatttcaatcacaaagatcttggagggttcttgtgcgtgacacaaccctttcactctcaatagatggcaaagtgtcttcatg

SEQ ID NO: 3162 - DNA, 325 bp, Glycine max
agcttccaaattagtgtaccatttcactgcggctctagccaaactatcttgaaagaagtgtattaatagcttctcatccttagagtgtgcgcccatcttgcagcagtacatcttgagatggtttttgggacaagtcgtccctttatacttgtcgaagtccgacactttgaacttcggggggataacaacatcgggtactaagcaaagatccgtcatgtctgcgaacggatagtccccaaatccttccacagccctcaatctttcctcaaggagatcgagcttcctcctttcttcagttgtcagggacggtccttccgtggacaaa

SEQ ID NO: 3163 - DNA, 260 bp, Glycine max
gccaaaaaaaaggggagagggaaaatttcccatccaagaagaagccaaaaaagggagaagggaaattttccatccaaggaaaaaaagaaaagaaagggaatttccaatcaaagagtgggagaaagcgaaaagaaaagaaagaaaatttcccatccaagaatgggagaaagaaaaaagagaagaagaaagggaagaaagttcccgatcaaaaaaaaataatatgcagaaaggtctttggaccggacaatatctgaacaata

SEQ ID NO: 3164 - DNA, 319 bp, Glycine max
  unsure (1)..(319): unsure at all n locations
agcttgtatgcctngtatcttctttatcaatggagtcctttgcttcttgaagatcaatggcagtggaattgatgcaatcctcccaaggagactccaagaagattgggccaaagatgcaggagaatgccctatggttcttatgagccttagggtagattttgggcccatggactaagtatgagcccacttatctttttacatattagatcagggtttcattatttttaggccttgtatttagggcttcatagtgtagggagggtaccctagtaatgtaggactttttagcccttgtattttatgacacctagactagttt

SEQ ID NO: 3165 - DNA, 325 bp, Glycine max
  unsure (1)..(325): unsure at all n locations
tgtangattatggggtacccatcacatgtggttctatgtggcggtcgggcgatggtgcacaacaagctttacacatgcacaatgcgcgcataaacccaccatcccctgttgcccacctacaactgagctcacgtactaccacgtagcccatatcctcgtttctctcaacaccgggtccccatcaatcctctcaagctttcacaacatccaagcaaaacaacattcaaacagcgcaagctatcacagccaatcaaaacagagcaaaggcagaaaactctgctcaacacatcaaccaaaatcacagtgtttcccactcaaagacccc

SEQ ID NO: 3166 - DNA, 314 bp, Glycine max
agcttcttttggaccttgaacttgcaatcaactcctctttcagaaccatgctatgtgctcgcgactggtccctttcttcccttcgcaacttgagttcactattgctaccccatagagctccgcgaaatttgttccggccatactcttccttgcgagccctcttggtctcttgttcaagggctcttgcggtaattgtattctcttcccgtaacccggcacactccttccgaacgtgtgtagcagccaacttgaacttctccttggcgagttttgcctttcctaactcgcttttgagagcttggacttcttcgtcc

SEQ ID NO: 3167 - DNA, 319 bp, Glycine max
ttgaagaaattcaaatggtcataacttttcactttgatctccaattcagacgcatcacatattgagacgcttgaaattgaacagcggaagctcttgagaaatgtaaatggtcataacttttaactcggatgtccgattcaggcgactcacatatagagacgcacgaaatttcaatggtcataacttttcacactaaggtccgattcaagcttataatatatcgagatactcgaaattaaacatcggaagctctcaagaaattcaattggtcataatttttcaaacggatgtccgattcgagcgcataatatgtcgagac

SEQ ID NO: 3168 - DNA, 322 bp, Glycine max
  unsure (1)..(322): unsure at all n locations
agcttgtagggttaaagncccactattattacgtgttcatgcaacaattgtcagccatggctatacgagacatcttgctaaacaaagtcaggttagccataactcgcctgtgctttttcttccatgctatattgtgccatttggagatgtattttccccctgctttctttgacatcatgattcacttgatcgtgcatctagtcagagaaatcaaatgttgtggtcctgtttatctacggtggatgtacccggttgagcaagacatgaagatcttaatagggtatacaaagaatatttatcgtccagaagcatctattgttga

SEQ ID NO: 3169 - DNA, 206 bp, Glycine max
tttaagcttttttcatggtatggttaagcttttaattgtggttttgcttatgctggtgatggttaagccttgttgcttttgccaagtggttaaactttgaggtatagcttctacttggtagctaagctttggtagtttcatggattgatgatttgagcttttgccaaatggtcttgttgatttcacttaatgggtaagcttcaatg

SEQ ID NO: 3170 - DNA, 329 bp, Glycine max
  unsure (1)..(329): unsure at all n locations
agcttgagacatcatggntaatttgtcttctcctatgtngcacaccaagaagcgacagaagtaactatgtgtctctgcacttcctttccaccactccattctgatgatgggtatgtggacagatcaacctatgttgcacaccaagttctgcaagataattggtaaatggcctatactctcccccagtcagattgtacagctttaacaggtaaattgaattgagttttaactagagtatgaaactgtttaaacagatcaagagtttcagatttacttttcaacaaataaagccaagtaaatcgagtgtgagcatcaacagaggttacata

SEQ ID NO: 3171 - DNA, 338 bp, Glycine max
cacagcaacacagaatctaagggtcctttaccccttatttcaatgggttttctaggtttgaaaagtgaaattgagaatgaggtgaatttggagcaaactctcacctcacacaagtctataacatcaatctaaacttgctcaaactggatttacacctaaaatctcaccgaatcaaaatttgactcctcaacacccaatttttgccctaaaaatggctctttgttcactttggtcatttgttttctctctagcacagcctaacctttctcacatgttctaaatggcatttcaagctagggttaactcattttcaacctccatttaccacagaatccaga

SEQ ID NO: 3172 - DNA, 323 bp, Glycine max
  unsure (1)..(323): unsure at all n locations
agctttgaatngaagnngngttttttgttagcgttcttttccaacgaggggtgagagggggcttatataactaactcttcttccaataccttgagctgttctagaatttgtaacctctcttcctcaaagttcgccaatgattcctctaaatataagaccgcgtccacgggggtgttctggttgctgcattcttgatcttgatgactataaaacccgttttcctcctttgcttcatgattcaagtcaatggacaatccatcactatcttcagcattgctacaagagggagatgaagttctgcttctcatgctaccatcccttct

SEQ ID NO: 3173 - DNA, 273 bp, Glycine max
attggagaagagggagaaacatactgctgaagctggcggaaagagctctttatggacaattatggaacttaaagggaccccttggaagtagatttataaaacggggggggcttataagtaaggagggggttccccttggaagtaaatttatacaatggtgggggcttaatagtagggagtaaccgagggatactacaaccaccattatgaaaagaaagagggtcgaaaagagaaaaccatgggcacaaccaaaccagccgttaaggggtgaag

SEQ ID NO: 3174 - DNA, 327 bp, Glycine max
  unsure (1)..(327): unsure at all n locations
agcttgtcgcatctttaactaatgcggttttataaaatcgnccttgtggtagtgtcataaaatctcacttttgcagtagttccaattgcaatctatgtttcaattgaagatccttggcccttcgaaatattttcttagcttagaaatagctaaatccagcaaaggtatctcactctcctagagaaaatacactctatctcttttagaagatacaagtttcttggcatgcaaaccttccaatcttccaatggatcccaacttgaagctcaatcttcatgatggagacatactccttgatccctcagtgtataaaaggttaattggtaa

SEQ ID NO: 3175 - DNA, 327 bp, Glycine max
ggaatatccttggcataaaatgtttgcgttctaaaaaatattctcatattattattgtatgttcaaatatttaaattattttaaatgatctcttcggacttggtagtggcttccatcattatatttcatgatttgcttacttttttactttaattaggccaagtggtctggatgtctagtattgtcataactaggggttactggcattacttttctttcttatcacagcatcacattgcatcattatcaatttctaattcattagctcactctctctttcctcctcctctacatacatccatttaatttgaacatatactaaacaag

SEQ ID NO: 3176 - DNA, 342 bp, Glycine max
  unsure (1)..(342): unsure at all n locations
ctgcangcatgcaaagctgtaggattatggngtacttcatcacatgtggtactacgnggcggtcgggcgatggtgcacaacaagttttccacatccacaatgcgcgcataaacccaccatcccctgttgcccacctccatctgagctcacgtactcccacgtagcccatatcctcgtttctctcaacaccgggtccccatcaatcctttcaagctttcacaacatccaagcaaaacaacattcaaacagcacaagctatcacagccaaacaaaacagggcaaaggcagaaaactctgccaaaacaccaaccaaatcacagcttttctcacttaaagacccca

SEQ ID NO: 3177 - DNA, 315 bp, Glycine max
tatgcttacttgctcccatatctacttgataattcaatggtagccataaccctaaccaaagttcatcaacctccatttctccgaaaatacgactcgaacgcaacgtgtgcttgtcacggaaaagccccggggcgttccattgagcatggtagggctctgaagcgtaaagtgcaaggtctaattgatgcgggctggctgaaatttgaagagaattgcgtgtaaatcctgacattgacaagagatgccacacatggggcaattttgaaagctgttgttaggtgtccctaatgactcatcagggtttccaagtttatg

SEQ ID NO: 3178 - DNA, 342 bp, Glycine max
  unsure (1)..(342): unsure at all n locations
gagccacctgcggcatgcaagcttagatgcaagttcaaagttttatataatcgnnnagaaacaacgaacacttgaaaatgaaaacctataaatactagatgctttgaagaaatgagtaacgaacctacacgctatcattcaaattctttatgtagaaaactctttgtatattcttataaagtttgaaaagctctcaaaacatcttgaatactctaagacaaaaaactaaatgcttagatttcacatttgtttgtaagatgattaagatttaatcagttagcaaatcaaacaacatatcttttgatttgtatagaaccaacagtggcttggtaggacaaagaa

SEQ ID NO: 3179 - DNA, 336 bp, Glycine max
tcaccacttccgactaaacttctttctggagcttatataccctcttgtgcttggcctggtacgtataatttttcaaaaaattgctgtctggttttttgtttgcatatcctgtttttaactggcatgttcttttcttctgtaactgcaaaaaaatatttacttgttgagtggcttctaactttaataatctttaacaatttttaattaaggaatgatgcccattgctgattgcatgaacaaatgaattggaatccttccaatcctttgaataacttctcatgctatcatgcatgaggaatatagtgcaattttattcatatgccgacatatataaat

SEQ ID NO: 3180 - DNA, 316 bp, Glycine max
agcttgtgaaatcaatggaatttttgattctgtttgacacaagtcatgcaattgtgttcttagaaatgtgacctaagcagttatgccataatgctcctgagtttgtattatgaattctacgcttagtaccacacaattcctcattgaaggattcaccataggaagctacaatatcaattaaatatagattatcataagccaagagtgaattagttctaacaatatctgaattaaaagacaacctaaacacattgtttccacatgaacacaaataacccaatttgtccaaataagaaactaaaaccaaattttgtct

SEQ ID NO: 3181 - DNA, 335 bp, Glycine max
tttgttctgcttgtggaccaaatattatgaagatgaggctgttttcatatatcagctttgtttttaaaatccatatgaaaaaataaaaaatatcatatacattatatataatatatgaaaaaatacattctaagacgattctctgaaaaatcgttttagaatgtctacattttaacacgattttttggtaaaactttcttagaaactttaatatgttttttttaaaatacattctaaaatgattctctgaaaaattgttttaaaatgtacatctttctaatacggttcttaattaagacccgtcttagaaatatatccttctaagacggttttgg

SEQ ID NO: 3182 - DNA, 304 bp, Glycine max
  unsure (1)..(304): unsure at all n locations
agcttgncctacggtttgtggattctccaccatacaagatgtgaactggtctttgttgagcaatgttctagtgtgggcagcttcgggtcatctcttgcaacctttcccagacttcaataagactctctgtaacaccctgatatatatatctatatattattagtaattatgtttgatgatagactatttgttgcgttattaacatccgtaattatttttaaggaagccaatttatttaatagaggggtgtggatagataaagatctatcttgtcaaagacacctcttgagaaagattctcaaat

SEQ ID NO: 3183 - DNA, 379 bp, Glycine max
  unsure (1)..(379): unsure at all n locations
ttgaacttcgtaaaactttcggttccggaagtttcggaaaaccccacggnnggtataaccctatgacccgtgttatttccttttttaaaggcgtttggaggttcttggtggtaatacaattgttggcccccaaaaaaacgtaaagggtcatagttgttaccagatgacttgatggtaaaagaggagccgcctactggtttaaatggggtgggactagcctgctactatagcaaaaggggtgattaaaacaggtgaaactcttctttttaataacctatcacctgaacggaatgcgtaaggctgctctttcatttgacttaacaaccattggtaaaatcacaaaacatttgggcttgtgcttgacatatgccacacgctg

SEQ ID NO: 3184 - DNA, 294 bp, Glycine max
  unsure (1)..(294): unsure at all n locations
agcttngagagccattctgattttatttttaagcccaagggagcaacggaagtgccacaatctatcacacttgagattcgaaagtcagcacgatcattgtaaaccacaatacccaataaaaaaactgttttctggcgtaatactagttctctatttatacacaacttatgtactagacagctatctcgcagcataacttggctaagattcatattattaataccatgcgctacaaatttacgatgtattcccacaacttactattaatatatccacctaacaatgcacaagaat

SEQ ID NO: 3185 - DNA, 392 bp, Glycine max
ttgaacctttggaacccctttggattttcgggtaattatcgcaacaaaccccctcggttgaaatggcccaggacaagatattattaacattcctctcaacaaaccccggcatatgcgggttgggttaggaacgcttattcttctagctgaactatacaagcttcatattggaggcccaaccaacatctccatgattctcataactattaacaccaacaccgccaagaaggacaagaacgctggtgtttaaagacatcggggtcatgggcgttgactctcatgacccttacggcgattttcggaagtccatagaagaaattgtggaggcgcagagctgtctggactgggaaggtctccaacagcctttttgttggtatttgaaagtcaacgga

SEQ ID NO: 3186 - DNA, 323 bp, Glycine max
  unsure (1)..(323): unsure at all n locations
agcttcttatccaaggctcattttggttttgaacctccttcttccatggctaattcctaaaggaaggngcctcctctcaccccttttcctttggccttcccctgcatctccatgggggaaaatcaccattaaaggaccccattgaagctcaaaaatccaccctccataaaacccccacaagcaaccttccttaacgctaaggcgttgaaccattaacaatctcttggggtggtcgacaaaagtggggctttcgctcacacatatccttaattgcaatgagaaaatcaaacctacgtatttcttgcagaagtggtaaagttaca

SEQ ID NO: 3187 - DNA, 320 bp, Glycine max
agcttgggttcctatgtctagatttacattcggactctcatgttaaatgcttcatgctgtccctatgtatatgaaacagtctcacaatcccaagcttacaaaaccatgctcatatgtcattgaggcatttcaccgagcacttggtgggcgcatgtttggacataaattgcaagagaatgggagcaatgtggcatgccccattgcttcagaatacaacctaggcctaaggccttttcgttcaaatccttaattcaagaaaacaaacaccaaagcaaaccaaaactgcctcacagttataagcatattctcacaaattaagg

SEQ ID NO: 3188 - DNA, 325 bp, Glycine max
  unsure (1)..(325): unsure at all n locations
gcctttgttcctttttataaaaagataagttatgattctcatcacgttgtctaaaaaggtcttgaggtggatccaaatgctatgatcattcattagcatattcatgatttggtggcatgctcaccactgtttgtttctttaaggaactcaccataactaaaaaagcgcaaaggcacccctataacacccgatccaaaagtaagaaggataacgaacagggagtgccttaacagataaaagcccacatgtcggccttaaaagatcaaatggcttttattacggaagccatgctaaaaattcanaaatcaatagaagacaatgttgc

SEQ ID NO: 3189 - DNA, 316 bp, Glycine max
agcttccatcaatctttaggcttccaaattcgtcctttgtgtaaaaccagattttgtgtaatggtgtactctaggcatgcttcaagattatcagagatggcttggcgcatgataatgaactcatgatcagtattcaattataatttaagttttgtcgcaacctacccttttgcgggcgagcgaggcgaggctcacacgtgcgtcttccaaaggaggaaaatgcgcggagtcgccaccaacatttatttgtggaaaacgtcggaaaaaccgaaggaaaccggtcatgaagaatattccagattcgggagttgtattt

SEQ ID NO: 3190 - DNA, 319 bp, Glycine max
tgccacccagctctcccaggcgagctaagttgtgccttctggaggaacttcctggaaggcccaagtgggcctgattgctatttgtaccccctgtttactaaatacacccctgccttttttttctgattcttttttcgtaacattatggaactttatgaatttcgtaacgatacttgttttcttttcgtaatgttacggaaccttatggattacataatcatcccttttttggcttctggaatgttacggaactttacgaattgtgcaacaatgctttcttttgacttccggcatgttacggaacttcacggattgccta

SEQ ID NO: 3191 - DNA, 327 bp, Glycine max
agcttgttaaaaacggaagaattttaaactgatattgaacgaaataaagatgagaaccaaaaaacaagaaatgaattaaaagtcttggatttggaaacttacccgttgaagaatgaagagcggacgaagaacggaggaaaacctccaaggatttgcttacggaaacctctcggaagcgttacggaagcacctcgccttggattttcttcacggaaacaatttttttcacccaaaacagctgaaatgcatagccaagggaatcagagacccttagaacaacccccttttgcctttttataggaaaaaaggggaggaggttgccgccca

SEQ ID NO: 3192 - DNA, 336 bp, Glycine max
tcatactgggaatacctctagttcatttcccgtgcttcctaaggcacccacccagagggaagctccccaagttgcaactccgaacacgactcgaccggccggtaattccaacacgacaaagaacttccctctgaggccatttccagaattcaccccactcccaatgacgtacgaagatcttctgccatccctcatcgccaatcatttggccggggtaactcccggaagggtcctcgaaccccctttgccaaagtggtatgaccctaacacaacatgcaagtaccatgggggtgtcccggggcattccgtcgaaaaatgcttggcccttaaatacaa

SEQ ID NO: 3193 - DNA, 263 bp, Glycine max
taacaccttcccccgcccaacagattgtgggtgacaagtggttaaaaataacaatttattgcccaacttgctccaaaaagtcctccaaaaatggcttaggaacttttagtccctatcactaacaaagctccttggcgtaccatggaatctcacaatctccttgaaaaacaaaccagccacatgggaaacatcatcaatttttttacatggaataaaatgagccattttagaaaacctttcaacaaccacaaaattggaaactc

SEQ ID NO: 3194 - DNA, 252 bp, Glycine max
acaatcatttaccaataagatgcatgtagcacgacaatggaaaggggttaaggtatgctattaactacgtattgaggatcctacagagcaagttgactgaatggagaaacagaattttttttatgctgttccctacgatatcattcacactgttttttacttcacatgaaacacagttgaaaaatgtattgaacaaatagtacaaagaaagggaggctgaacagatatataatagcttaacatgaaaatgag

SEQ ID NO: 3195 - DNA, 127 bp, Glycine max
atggtgcacaacaagttatccacatccacaatgcgcgcataaaccaaccatactctgttgcccacctccatctgagctcacgtcctcccacgtacccaatatcctcgtttctctcaccaccgggtcc

SEQ ID NO: 3196 - DNA, 470 bp, Glycine max
  unsure (1)..(470): unsure at all n locations
aaccataaatgacaatcacactaaaccgacgatagtaaaaacaaactacataacagtcggggcannntagaactcaacaccaggatttgagagactccgcaaacccancaccccaatccaagggtctaagctttctagcttctataaccaactgaagattcaaagggagccataaacctagccaaggggcatcaacctccaattctcccaaaaaacgaacacaaccccacgtgtgcttgtcacagaaaaacccccgggccgttccattgaaacactggaagggcctctcgaaaccgtaaagggtgccaagaggtcataaaatggaatgccggggcttgcgcctggaaaaaaatggagcgaagaatatgccgcggtaaaaacccgaccattgacaaaagaagccacacatggggcaaataagaaagctggcgtaaggggccccaaagaatcaacaaggtagccaaagtaat

SEQ ID NO: 3197 - DNA, 330 bp, Glycine max
  unsure (1)..(330): unsure at all n locations
catgcaagctttcttcttctgtcttcattatgaatttatacagggncatnaatggcttaggcatttttaagcacactttagtggaataaatcaatcacagaatcacctatcttttggagaagttaaatgagagagtttctaataaaaagttatcagcataatttgatttttgtttattcaagaaactgttcaatttactttcatattttctcttccttttcctacaagtgcttagctaatggcataagttgattttagttcatgcgataactcaattcaattcattttaccttcctatttacttttcttatatatgggcatggcataagt

SEQ ID NO: 3198 - DNA, 250 bp, Glycine max
gcagctttaaagcccacccacctttcactttgctcaactgctcggataggaaaatatttttttttaaatctcaaccatccttttgtcaacacccacaaggaaaaccggcaaggcttataccttattctgtgtaccttgctgttagggtcatttcaaattagtatacagaggcagtgaccacatccttcctatcaactccaaccatgttcatttttcgcgcttttatcacttgtcatgggctggcatccat

SEQ ID NO: 3199 - DNA, 345 bp, Glycine max
ctttggctttgaggacttgctccaatggctcatcttttcttctattgaacctttcttcataggcttgaagagaacccatcaattggtctacggtcattgagtctaaatccttagactcttcaatagcacaaaccacataatcaaatttatcgattaaggagcgaaagatcttttccaccacacgaacatcttccatattttctccataacgcttcatttggttcacaatagccaacaccttgttgccaaaatctgagatagattcagattccttcatatgcaatgattcaaactctctacgtatagtttgtaggcgcaccttttttaccttatcaacaccttcaa

SEQ ID NO: 3200 - DNA, 324 bp, Glycine max
  unsure (1)..(324): unsure at all n locations
agctttacagcagattttagttttgacccactaacctanaagtaaaaggacttaatgccattaacctagggaattaaaaaaaacttaatggctgagtgtaactgaaattgtggcaaccaaaagtcacccccaacagccaataagtcagacaccatttggtctcccaaaaggctgatgcctaggttgccaattgggcccttattacaatttgaactaaacctactaaagcccttttagttgattaacccaaaacatatttttggtcagccaactttacaaggattgggccattatttagacaaactaaacactctaaaattgaga

SEQ ID NO: 3201 - DNA, 336 bp, Glycine max
ttgaaattattatctccatttactttgctaatgttttaggagagcacatgggtttaagacaattttgccccaaatttgggggattttgttggatggataaatttaacggtaagaaactacaacacacatagcaaattaataaaatgttatgtgttaaaaaaataaaaataaaaaagaagaagaaaaagagaaatttaaatgagtgtgtgctgttaaaacaaagtcaagtgaaaggctagtgaatgggctaagtggaatgaaaagacaaactgggttagtctaagatttgtgctctcttagaacttaagcttttgcatcctagaaaaaccaatattt

SEQ ID NO: 3202 - DNA, 323 bp, Glycine max
agctttataaaacattggcagttattatttaaaaaaaaggctcagtgtgattcgtaaatacgtgatgggcccaaagtaaaattaatatactgttttggaaattatcaacgattttcatcaaccattctctgaatcataaatccaaaaaaaaaaaaaaaaactttaatttctcacctttcagcaatttctaattcttacttccaagaatataaggttattagccacaagacattcatggatttcttaatttcaaacaaaaattatttattttttatgtataaagcattccctcattcatgaataatcatatattggatattatt

SEQ ID NO: 3203 - DNA, 323 bp, Glycine max
agcttcatgatgatgaatcaagttgattcaagtagttttgatgatgacaaaaagcccaagagaatgatttcaagattgagtcaacaagttcaagatcaagattaaatcaagaagattcaagagaagatgaattcaagattcaagagaagaaatcaagaatacttcacaagggaagtattgaaaagatttttcaaaaaacaaacatagcccaattttgtttttcaaaaaagtttttctcaaaattttctaagttaccagagtttttattctctagtaatcgattaccattttcctataatcgattaccagtggaaaagtttgat

SEQ ID NO: 3204 - DNA, 253 bp, Glycine max
ctccttgggagagaggcagagcttacctccacaccccctataatagctaagctcacccccatgacaaattacttgaaaatacaaaaaaaagtcctttctacaaagactactcaaaatgcctcgaaatacaaggctaaaatcctatcctactagaatggccaaaatacaaggcctaaacgaaggaaaaaacctattctaatatttacaaagataagcgggctcatacttaacccaggggctcaaaatctaccct

SEQ ID NO: 3205 - DNA, 322 bp, Glycine max
agctttgtgcttaattttaatttcctaatttcattaaataacaatcagattttaaaaaatatcagtgacttaatgagaattcaatcataatatttaaatagaaaaaataattccttttgctaggtgtaaagataaaaataagaggtgccaaaccttttgctttacgttgtgtgtatgcattaattcctctgcacctagctagtgtataataaatatatgcctaggcactactagagatttcgttttttttttattattatttgaaagtactactactgcactaatatataagctataccatccatgtacaataatgcctttt

SEQ ID NO: 3206 - DNA, 200 bp, Glycine max
  unsure (1)..(200): unsure at all n locations
aattatttctgtgaagaaaattcaagccgaggcgcttccgtaacgtttccgtgagtaattacggaagatctcgaccgttcttcaacattcatcgntcggtcttcgttttcttcaatcttcaacgggtaagtacctcaaaccgagcttttcaattcattctatgtactcgtggtgggccacattttgtttcatgtattttt

SEQ ID NO: 3207 - DNA, 327 bp, Glycine max
agcttgtctcagcatttatgctttagagagaccaacatgttagccatggttagcaagtaccaagaagaattaaatctagccacggcccacgagcacaaagtggcagacgagtatgcccgagtgtacacagaaaaggaggctagaggaagggtgattgactcgttgcatcaagaggcaacaatgtggatggaccgatttgctcttaatttgaatgggagtcaagaacttccccgattgctagtcaaggccaaagcaatggaggacacctactctgcccccgaggagatcaacaaacttcttagctaggaagtttgtattgtcactttg

SEQ ID NO: 3208 - DNA, 274 bp, Glycine max
ggaaaaaacgagggacaagtgtacatccctagagagggaccccaatttgcgacagtacatgatgagaaagttaataggaccaaaaggaacaaggtacttggttaaatccggcccatttgaattattgggaggggatgaacgagcataccataacttaacaaaaattcgggaaaggcagggaaggatatggaccaaagccttctaaaaaacacaaaaacttcatggagagatcgaaagggcatatttctttcttccacagagggggtccaacttg

SEQ ID NO: 3209 - DNA, 315 bp, Glycine max
agcttgagacatcatggttaattcttctgctcctatgttgcacaccgggaagcaacagaagtaactatgtgtctctgcacttcctttccaccactccattctgatgatgggtatgtggacagatcaacctatgttgcacaccaagttctgcaagataattggtaaatggcctatactctcccccagtcagattgtacagctttaacaggtaaattgaattgagttttaactagagtatgaaactgtttaaacagatcaagagtttcagatttacttttcaacaaataaagccaagtaaatcgagtgtgagcatca

SEQ ID NO: 3210 - DNA, 240 bp, Glycine max
accccccaatccaatggggtttgggggctcgaacagaccacttttaaagagtggaatttcgagcaacactattccttacacaaatttttcccatcaatgggaaatcgctcaaaccggattttcccccccaagaccgacaaggtaaagattgcctttctagcacacacgtttagcccatttaacggctaaaaggtgacttgggtcattcgctctcactttggcgaactctaacttttctca

SEQ ID NO: 3211 - DNA, 314 bp, Glycine max
  unsure (1)..(314): unsure at all n locations
agcttgngcctctcttgtnttttattgaangnagcatatagatccgaagacccttaggtgctttgctgatggcttcttcccgttccaagcttcaattggagtcttgtcttttacagacttagttggacatctgttgagtatgtaaacagcagtgtagactgcttcagcccagaatgtgttaggtaatcccttctccttgagcattgatctagccatttccataactgtgcgattctttctctcgaacactccattttgttgaggagaatatgcgactgtaagttgtcgctcaatgccttcatcctcacaaaatt

SEQ ID NO: 3212 - DNA, 325 bp, Glycine max
tgttataataatgttttgatgttatttctctcttcgaaccctcccatgcatggtctcttccgcattcctttccgtttatctcattatctccgtcatcgtccttttgtcgaacaggtgctgcgcgtttcaatgcggggtttcctacgacacgatcaccgtcctcaacgcgttccctcacgacccacaagccttcactgaggtcaaccttccctatttcttctttgtttgagttaatgtacaatctgattcgtcaaagtgatcgatgatgataaattgataacttttgcagctttgagaggtgaatccaacttggtagggtaacgtt

SEQ ID NO: 3213 - DNA, 327 bp, Glycine max
  unsure (1)..(327): unsure at all n locations
agcttattccgaggacagnncattatcattctcagtctgcaagagnnggctcacgataggccaatcatatctatggagcattttcttgagcaagtagcctggcctgaagctcaacttccattggtgagacccaacgaggctgcttcgcttgagcccacacctgtgcaggtcaatttagagccagctaacccacaatctccagtggtgaatccaccttcttcgcctgagcttgaagcagttccaccatctcctcctctgattgtcatttttgacacatcatcatatgctcctcctgattcaccagttgtagaaacagctgacccccct

SEQ ID NO: 3214 - DNA, 335 bp, Glycine max
atttctctcaactcaacttttggagttgggacatttggggcgggggacctttttgaaaaatttgcctgacattgcaacaataaccactaatgcctggagtaactaccaacaatgaaggcttaaatgtttttttttttttccatataatttagcattttttttttcatttttatccttgcagaaaaaaaaactgtttgtccttacaaaatgggtttattttatttttcgtccttataatgcctcagacagagggcgagccctggtgcagcggtaaaattgtgccttggtgacttgttggtcatgggttctaatccggaaacagcctctttgtatat

SEQ ID NO: 3215 - DNA, 325 bp, Glycine max
  unsure (1)..(325): unsure at all n locations
agctttggttggtgcgtgatgttatcacatgttcaaagnnggcgcatgatttcgggcatacttgataaatattgaatgagtgtccacacacgcacaatcaatacaggtatagtttcttttcatattagatacatttgaggttatttttattcctttatgtgcatgttgaatgagtgtccaaacacgctgatgcaatcctaccccgcaagggcattggatagaagactccaagaagatagggccagagatgcaagagaaggccctaaggttctcatgagccttagggtaaatttcgggcccatgggctaagtatgagcccacttat

SEQ ID NO: 3216 - DNA, 337 bp, Glycine max
atttataaatctttttcaacaagggttttttgtcttttaatagatagatttcttcacttgagcttatgtttgaagattttggtcgttagagcatttaatgcttacattaaatgcatgtactttttcatgctagaaaatctctcttgtgaacttttgtgttgatcactacaacagaaaatcacttgctttaagtcagagcaagtctgtcactagcagtgagcctcttttgatagagtttgacatcttttagatcttcagcttcatttattcttcataggattcaacagatcttaggaggatgtctttgcaaaatgaatccaagacatagagaaataaa

SEQ ID NO: 3217 - DNA, 325 bp, Glycine max
  unsure (1)..(325): unsure at all n locations
agcttgtgcatccaataccctgttgaggtttgtcttatgtnccnaaaactggattgatgcatttgcttccaaagtttcatggccttgcaggtgaagacccgcacaaacatttgaaagaatttcacattgtctgctccaccatgaaacccccagatgtccaagaggatcacatatttctgaaggcttttcctcattcattagagggagtggcaaaggactggttgtattaccttgctccaaggtccatcacgagctgggatgaccttaagagagtattcttagaaaaaattttccctgcttccaggaccccagccatcaggaagga

SEQ ID NO: 3218 - DNA, 334 bp, Glycine max
tcttccttttcaggaacaagatcacttttgggcattccgtgatcccatttctcacattacaaagagaaaccatataataaaatacgttaactaaaagcagcctcattctcgacaagctaatctcacttaactggtcaaccaagctcaagcttagctaacaacactagggcaaaacataaaccttaaataaaatacaataaataaataaaactaagcaaaatagttcttcattatgctataatgatcagaatggatgtgttaactatagaagcattaatatattaaaaaaagggatagaaggaccctaaagctgccaaacttaaatgattatttg

SEQ ID NO: 3219 - DNA, 336 bp, Glycine max
  unsure (1)..(336): unsure at all n locations
agccgacctgcagcatgcaagcttggttctaatttgattttcattatatgacggnacccaaggggacgtgcgagtaacaattattgccatttgaatttgttacgaaattccgttttcaacttggagcaatttaatatattaggggactcaattggacatccgagtaaaaagttattgtcgtttgaatttggtacgagcttctattttcaatttggaatgtatcgatatattacgggactcaatcggacatccgtgtataaagttattgtcatttgaaaatgctcagagcttctgatctcaattttgagcgtgtcgatatattatgggactcaatcg

SEQ ID NO: 3220 - DNA, 272 bp, Glycine max
cttatgaaagccacccgagaacccattactgctccccctaaactctctggcctttcttcatgccgcatcccatgccttgcgaactccttggagtacctttgcattggggtcactgaaacctcatgcgatgaaaggcgtgatgctttcgtctgatggcactcctctcatgggacatccttcgcatgaagatagaatcccgattcttccttccttctagcgagggaaccatttaatagacgcccctccatgctagccaagagttggtgcacaac

SEQ ID NO: 3221 - DNA, 336 bp, Glycine max
tgcaagcttgctagttgcagaaagctttttcgttcatcaatgaatggcaacttggcaggaccctgaaaaattgtccacagtctctattaataccccttcattataaagtgttaataaaacattaaaacacacgcacaaaccacaatacaaaaactatattacccggcatgcaaatcgcggtccattcatatcaatctcaaaatctgtcaaaaagtgatacagagtcattctagaaactctataaaatatatcaaaagatgtcaataacagacaagtgatctcaccagcagggtagaattgaagaataggtgatgaaggatcaatcatcaaatccct

SEQ ID NO: 3222 - DNA, 321 bp, Glycine max
  unsure (1)..(321): unsure at all n locations
agctttgtacgctngattatcttgcactcgtgaagcttgcacatgcatgaatagtataaaagcaaagttttgtgtaaaaaggatgcaaatgctagtcaaagttcctatctcgtgaagcatgcttatagtatctcttacatgaaatgatgtatcatacccgtggaatcttgccagaaataaagctagtcaataataacttgtatcacaaaccactaaaacaattataagttatgtatattgttggactctaggtgatgcataaatattatacaagttaagatatcagaaggtaaacactttttcaaaaaatcaatacttgtg

SEQ ID NO: 3223 - DNA, 335 bp, Glycine max
ttgccccaaatcaaatcataattctttgtttgtttttcaacaaatcactaaaatttgctatgtacaaaatgacaccaaccccaatcaatccctcccctggtaatccccaatttcattccttcatcattcaaggtcttcatgtcattccttccctgagactttgaagtactgttgtcaatgatttctctacaattccaaaaatctaagaaaagtttgcttgcattcaccccattttgacatcctttaaatcccatggaaatctagctttgagtgcacactatgtaatcttcacatgtctacgattattgttacttgtgctacacagtaattttctt

SEQ ID NO: 3224 - DNA, 320 bp, Glycine max
agctttaaaatttgaattaaaatgttcagaaactgctagtaatcgatgaccatatatgtgtaatcgattacacagggcaaattttgaattcaaattttaatagttgttgcaaatcagttttggccactggtaatcgattacatcctctggtaatcgattaccagagagtaaatttcttgtaaaagactttttaacttaattttcttggccaaaccttttgctacttcaattggaattcacttcctatttaatataccctttctaagactctatagactatcttgatcatccatcttgaatatctttaattgctttgtctt

SEQ ID NO: 3225 - DNA, 401 bp, Glycine max
  unsure (1)..(401): unsure at all n locations
cttggacccccattttcgcgtagtaccgccanaacctcngctagaanaccctccaaccacttgcacggttttttgacttcttcacacggtttttggtggggcccaagccaagttgtaagcactcggaggaaaagagggactgccctatgtttgaggtgggaagaatttgtccaaatttacctgggtcaactttattataaaaaaatccgacacctttgaagtattcaaggagcttgagttctaagactttccaagaaaaaacagactgtgtccatcaagaagaatcaggaagtgacccatgtcgacaaagattgaaaacagcatgttttactgaactctgcacaatctgaaggcatcactcctgagttttctgcagccgttacaccaccacagaatggcat

SEQ ID NO: 3226 - DNA, 322 bp, Glycine max
  unsure (1)..(322): unsure at all n locations
agcttacntcancggtctccgtcatgaaccaatgcagtgtcattaatgtcttatacattgctaagcacacttgagtggaataaaccagtcacagaatcacctatcttttggagaagttgaatgagagagtttgtagtacaaagtcatgagcgtaattggaattttgtttattcaagaaactgttcaatttactttcatattttctcttccttttcctacaagagcttagctaatggcataagttgattgtagttcatgcgataactcaattcaattcattttaccttcctatttacttgacttatatatggtcatggcataa

SEQ ID NO: 3227 - DNA, 319 bp, Glycine max
gcttgaactcacatcgttcgcgcgtattatagactttttacaaggtatgaagtagaggagagcttgatccctataacgccacggggcggacaaaagagggcagaataacttgaatggtcatcattgccaaagcataaaactttctgcgtaacactatccatggctacacatgattgcagcttgtggatacgcgagcgtgaactactctcaatatatccacgctgcatatacaaacgagcacatcttaaacgcttactccgcacacatggtggccttacgggaatgaagcggctaaccctccttctgatgacgcatggac

SEQ ID NO: 3228 - DNA, 321 bp, Glycine max
agcttgtacttagtattacttcttgaatacttattgaaacagaaagggttctaagctacatcaataaaaaaaatgtcatatactaacagaaaaataatgttaagcattaggattaggattgcctctatattagttaacaacatgatatacatacagtgtaaatctattttctatactaatggaatagtccattaacatgagatgatgcatgatgcttttaacatagacctacattctactttgttggaattgaaagtaattccaagaattgaaaaaaaaaggcttttttttcattgccttaaatttatttttatttattaa

SEQ ID NO: 3229 - DNA, 336 bp, Glycine max
ttttgagctcgatttagaaacacatattggcaatttactgaatctatcatgtgaaacctattatgagctaatttatttcaagtttttcccatgaagtaacaaattaatattaaaaaaattagtgtttgatcaagttttttaagaaaataaaaatgtactgaaaaaatgatttctgattattttgagaaactactatgagtaatagtttctatttttgttgtttgctatctacaattcaaatttagtgaatttagggttttatatgaggatactatcctagcctctactaaagactgaccatttttcattaatttaattagagtcgtttcttaaaat

SEQ ID NO: 3230 - DNA, 324 bp, Glycine max
  unsure (1)..(324): unsure at all n locations
agcttaacacacacttttactttattgttcgngcgaaaaagcggcaaggccgcaatgatttacataacatttttctgaacaatagtgctatttctgaccatttctttctaattcaaacaattattgattctctctcgtcgattggagaacgtgtgtctaaatctgatcatgttgacattgttcttgatggtttaccagatgagtntgagttgctgtcacttttgtgagtggcaagtttgagtgctgtctattgatgaagtcgcaactctcctattggctcatgagactcgaatcgcttgcaagaaatcacttgcctcatctgta

SEQ ID NO: 3231 - DNA, 337 bp, Glycine max
gcttttataagtttttcattgttatttttttttgttttctacaatgttttaaatgtttgatgtggtttgaagttgttttttttttttaaatgaagatggtgttttacggttttggccaaagtggttttacaaaggttttggatttataagtctcattttctatatatgttgttgtgtctcctcttgtaaacatgttttaacttgtttgatgttgtttaaagtggtttcttctttaagaatgaagatgttttttttaaccttatttactcaaattgtgttgtaaaagttttggtgtttaaacttgatgtctatttatgttgatgtgttttctctcaaa

SEQ ID NO: 3232 - DNA, 314 bp, Glycine max
agctttgataagtggttggcatgttccaacaagaggcgtcatccaatgtggcatacccaatgcaattcttggtaatagaagccataaatattgtgttaattacaaagcagatccaacataaactcaaaaactaaaaaagaagaagcattaatattaaaggaaagacatcaaacaatattattaaatgaaagccaacaagcccaatttgcgttgaaattacaaggaacgattgttttgattgttgatttaagtcaatgacccatgttttcccttacctttgcatggattgaaggaatcgcgaaagttaatgtgta

SEQ ID NO: 3233 - DNA, 321 bp, Glycine max
tgccgcccagctcgtccaggcgagctcagctcttttcgggcgagccaggttgcttcctccagaagcaacagccttctggaggaatcttctggagggcccaagtgggccagattgctatttgcacccccctgtttactaagtgcacccccctttccatttttttgtaattcttttttcgtaacgttacgaaactttacgaatttcgtaacaatacttattttccttccgcaaggttacgaatcgttacggattatgtatttactcttttttagctttcgaagaagttacggaaactcacgaattgcgcaaaaacacctcttt

SEQ ID NO: 3234 - DNA, 307 bp, Glycine max
agctttataagtgcgggtctgggagacgaaggtcaagtgttcgcgatatgtgaagatgatgttccaagtacttcggatttggtccgaccatgccctcctgatttccagctgggaaattggcgagtggaggaacgccccggcatttacgcaacaagcataatgtaaacctttacggttttaaaagctctatagttgggcctaggctttagagttttcgttttgttaaggctttgggtcttttggttttgaatttataatacaaggatctttcttcatctgttcctgggctctacccattctcattcat

SEQ ID NO: 3235 - DNA, 325 bp, Glycine max
tgaaatgaggaagtgtggaatggtgagacttcctacttttattcgttgaccacagagtggtacctggagatatgtcgcgggggtcaggagaccttggggacgtcaggtggggtgctattgcccagaaccttgtcagtcagtgagaacctgtgatgtacctaaacaggcgagctcctggcagtcaacagataaaaggaacaaagaccacaaagcaaggaggcttgtgtggtggctggccagctgtgaactttgagtgttatatgggatatggcctctggtaatcaattaccaagggtgggtaatcgattacaaggcttaaaagtga

SEQ ID NO: 3236 - DNA, 327 bp, Glycine max
agcttttgtccacaagaaaatcttttgaattcgttcaaatgtctaatgccttaagaggtgatttttacttttatcggttaaaataaaccgtttgaaagtctaaaatcaacattccgcataacttttctttctttttaaagaactacgtaggtctgagttcctcatcctaattgaggatacataggagcaagagccccgctcttgttgaccccaaaaagataaaaaaaaacataaaaagggaaataaaataaatttgaagtcatgattttgcacatttgattaaaggttgtcattcattgtgtcggacgcctggggtgctaatacctt

SEQ ID NO: 3237 - DNA, 324 bp, Glycine max
  unsure (1)..(324): unsure at all n locations
ggataaaaagcctgttaactattattgaatnggtttcgctcattattaaatgtataataaatatgcaaattgacatctccttgcagaatttatatttaccctattatttgcattccgtagtttatatttgttgttgttgcaaagtattgtgttgacatcgcaactcagcaacacggatgttgtgttctgcaaagatgcattatccattcaaatggggagtatcaagaaaagttgattgtagaaatatgtgctaatgcacttcttctaactcaagatcaattcgggtaacgaaacataattgtttataaagtacaaaattccttt

SEQ ID NO: 3238 - DNA, 282 bp, Glycine max
  unsure (1)..(282): unsure at all n locations
caagcttcagcatcgnaaacgttctagttttagcaaaccagaanngggcccggagaagcaaaccncgaaggccgggggacccacaaaaaaaaaacaggaacagaagccaacataaggaaacaacagaacccaaacattcggaagaaaaaaaaaaacacacacacacacacacaaacagagaaacacagagacagaaaaaaaaaaaganagaaaaacccaaaacgagaacccccgccagctagcagaaannntaacgcgggaccaaaccaccccaaaagagcc

SEQ ID NO: 3239 - DNA, 327 bp, Glycine max
agcttctatggaggctggatctttgagcttttataagggccttcaatggtgattttaagccatggacttgatatggaagataaagaagaagaggtgagaggaggcgccatccactagagaataagccattgaaggagaagtttcaccaccaagatagtgtcttggataagaagcttagagaggaagcttcaatggagggtgagaacgagagagagagagagagagagagagagagaagggggcgtgggaattgaaggagactagggagaaaagttgaactttgaagtgagtcttgttagacaagtagcctcaaatatcttaagaagg

SEQ ID NO: 3240 - DNA, 293 bp, Glycine max
ggacctttgcttggggacatgcgacctttctttggttcctgggaggtgcttggcacccatcattaagcaatttgggaaaatgcaagaaatgcccgaaaaccaaaaaaatattggagcacaatctggaagtttccgtgacacaccggaaatcatatggaagcatcggtgcataaataagtgaagttccgtaacattccgtaagtcaaaaaggggatgattatgtaatccgcaagggtccgtaaccattccgaaagaaaacaagtatcgttactaaattcctaagttttccgaac

SEQ ID NO: 3241 - DNA, 329 bp, Glycine max
agcttccatcacagcatgaccacagatcatccttcatttcctatgtctcacacagacctgggtatagggcctaatacctcaatgtttgtgcaaaggtgtaggtgtcctgcgtgcatagaacaaacaaatattcctaactacgaatgtaatagatagctagacacacaaaaaaacacagtaacacagcaagggttatatacaaatatggacaaaataaaagataaaaggaaaaagggaacataaataaagaagaagacacgataaaacattgcacactgatcaaatggcctaactctctaacaagtccccagtggagtcgccatttgtcg

SEQ ID NO: 3242 - DNA, 331 bp, Glycine max
cccagcacgggttctatgcccgattctgctgttatctgagtccgaagcaagaagccgatgcaactgcatgatggagttaaccgccacggcttcgttcggattcacctgcagcatccacggcttcacgtcttcaaggcgccacgccgccacgccacgaaatgcaaacctaacattcacggaccgcgccagctcagcgagcctgagcccaatttcgcggagcgtgtcgcggttgtcggacgagggaagcccaattcccgtgagcctcaacagcggaggcccaccgggccgaagcgccagggcctgaatcagcgcgggccactggagcccctgc

SEQ ID NO: 3243 - DNA, 329 bp, Glycine max
  unsure (1)..(329): unsure at all n locations
agcttccatcaagtnggaatcatatcactttatcttcaagtaggtgctccttagacctccattaattttttttctttaccttctcttccattggtggttcttcatttttctccatgtatctcctcacatgtcttgttctaaatgttgttaacatgattctttagagtttccaccgattaaacttgctatagaagttagatttgattttctatggttcaaatttcttgttcttgttcttgaaccatgaattgtgttgagtttaggttcctttgagttttgtcttgttattttttgtggctgaaacctaaaccataaaattcttacaaaaa

SEQ ID NO: 3244 - DNA, 318 bp, Glycine max
acctcagtgtgaaaagttatgactatttgtatttttcgggagcgtccgatgtgcattttggagcgtctgtatatgtgatgcgcctgaataggacatccgagtgaaaagttatgaccattggaatttctcaagagctggcgatgttaaatttagagcgtctcgatataatataagcctgaatcggacatcagtgtgaaaacttatgaccattttaacttctggagagcttccggagagcattttgtagcgtctatatatgtgatgcgcatgaattggacatccgagttaagagttatgaccattggaatttatcaagag

SEQ ID NO: 3245 - DNA, 323 bp, Glycine max
agctttgacttgacttatcaagttattataaatatgtgaccatggcatgaatttcatatcatctttttcaacatctctttcaacaatcaagaaatctatctttcaatcttctctctcaacattattcaactctttcaacaaatttttcctgaatcgtcttctcttcatctttctaaacttttttgttcaaaactttttctttcaagaaaaaatctttgatcaaaaacttgtgttattcatctttttcattctcttctctctttgccaaaagaacgaaggactaaccgcctaaattcttttgtgtctctcttctccctttcgaa

SEQ ID NO: 3246 - DNA, 336 bp, Glycine max
cttaggctgctcaattgctccaggttgctgcattttatggcaaaggtctgtatggtggtcagcataggagcacaaaccacaaagccttgcgacaggtacagatttctgattcaaggccagctgggttaccaagttgaccaacgcatccagtttgccttcaagcttcttagtttcagatgatgcagatgggtttgtagctacctcatgcactcctctaatgactatggcatcatttctggcactaaactgctgggagttggaggccatcttctcaattaaatttctggcttcaacaggagtcatgtctccaagggctccaccactggcagcatctat

SEQ ID NO: 3247 - DNA, 322 bp, Glycine max
agctttgtataatgttaatttgtccttcaaacaagatttgcaatttggcatctgaagtctgagagctcggggcagataagtctgctaaagctggaggtggggatgaagtagaagatgtagggatgccaactattggtgtaaaggaagaggaaatatcagctactctgatcttggtcttccttgtctctggaaaattaactgtttggtcattcacattccaacagttccttatgatataagctaagtcaatggctggtcttaggttttcataggaggtaagggcatcagatcccactcccttcgatctacacaaggctgtgat

SEQ ID NO: 3248 - DNA, 328 bp, Glycine max
ttttcttaagcttttgctacaacctttttctcctcctttggcaacatcaaaaagccaaagaactcggaaatcaacacagttataacaatggagtagcaagatataagtatcagagtattaaatccaataagccaaactcataatcaaggaaataatcaaaccagaattcaaataacataaaatgtcaacaaccacaaaatatccaagactgaaacacaagaaaaataagcaaagtacttagcataataatgtaaattctaagaaactaaaagccaaaatacacggcttataaaagataaataagcagaatctaaaatctaagaagacg

SEQ ID NO: 3249 - DNA, 272 bp, Glycine max
cttatagtttctaaactacggctatataggtaatgctggattgtgtgtgaaatcacacacttgctctaaccttatttacagtcgtggagatcgtggtggaaaatgccaccaagttcaacaaagttactcaacattggtctttatgctatcctggcgaagaatatttccctatccttacttagaaattgccttccctggttctcactatatgtcattactctctcacatttatagtctaaattacaagagagtgcaacgtgaaaaatgattta

SEQ ID NO: 3250 - DNA, 292 bp, Glycine max
aactcactttatttcataaatataataagttcaaaattatatcatatatatatttggctcatttttatggtgtgtataattttagatatgaaatcatattgataatattatttatttattaattgtaattctatatagagatttgtgatttgtcatatgcatgttcattttttcttcattttatagaatgaagatatctattaaatattaagttgatcaactaaaaaaaaatacacttctaaatagatttggaaaaaaaaattctaaattcttaaataagttagataaaagg

SEQ ID NO: 3251 - DNA, 322 bp, Glycine max
agcttatcaatgccaataacactattgtattaggcgtcttcactggggactccttgctttccactgcccttgccctcccttctgacggaaaggtccctaactaattcatttgcttaataagcaatacatatacataccacatatatatatacacatacgattcttctatcctatgcagctgcatacatagagtcagacgagtaagaattaaaaaatgtaagaaatttctaatgtactacctccatctttactgaataattctacattctagtataattaattatttttcttaaacactttcttttacctcttcactcaggga

SEQ ID NO: 3252 - DNA, 312 bp, Glycine max
tatttttaaatattttcttcattttttagagtagaatagttatgttgccgtactttacaaaataaaatctttttgaaaaaatagcttttagtcaattacatatatcagtctttttcttaaaattttcctcttttccctttaagggctgggtgaatgtcattgttagatcaagaacttggggacattgttattctgtaagtaaggaaaagtgtctgtgcaagaatacatgacaattgtataatcctatcgagaagaatatgtattaacatggaataaaattgaatacaggctttctgaaacgcagcaagtgct

SEQ ID NO: 3253 - DNA, 312 bp, Glycine max
  unsure (1)..(312): unsure at all n locations
agcttatgttatcgattgtatgtctttattngnnaatgatagactaagataaatcattttcttaaattaaacacatgcctattaatttgaaaggaaaacaataaataaaaacgttattttaatttacaagtaattaataatactattggataactatttttcatgtaccaaaaaaggatatcaaatttgtattatgcatgattttttgggtacgaaatatatgataaagtggatagaatttaaaaaaaaaaaataattatgagatgtttgtctgtcttttttgattcgacattattgttttttttattcgtg

SEQ ID NO: 3254 - DNA, 292 bp, Glycine max
tgttacatgcttttcaaacagaaaagcgcgcacacacgcatctgtggtttcttgatcttaaagattatagtatcaactaacaagagtctaaggcgaaatgtagattttaactaaattattcttcacagtgggtgatgaaaatatgaactggaatcaggaagtcacacatatcacactatttcacatgaacggaagcataaatattgatcaggtgacaatttttatataacccatattcatagcaaatactaaaagtcagacgttagtacttagtagacattttattaaacaa

SEQ ID NO: 3255 - DNA, 317 bp, Glycine max
agcttggtttcctccttcttcactacatcaagaatcactgggttgagtcttctttgtggctgtcttactggtttagccccatcctctaaatttatttgatgcatacatgtggatgggctaataccatgaatgtccgccagggtccagcctatagccttcttatgcttcttgagaactgataacagcctctcctcttgctcatcagcaagggaggcagatataattactggaaaactttttctatcatccaagtaagcatattttaaaattgatggtagaggcatcaattctggtgtggccggctggatagtggtaaa

SEQ ID NO: 3256 - DNA, 314 bp, Glycine max
  unsure (1)..(314): unsure at all n locations
agctttcaactaatattttgttttatatnatatatatatatggatatgtatatatatatatatataagtcgcacaattttctataattgctgcactgtgacattttttttccagaacaggtggaattttcacttgtaataattggagcatccctttcttgctgaggtaacctttagtattaaccttctccctgttaccagagatctcaccctgtagaaaaaaaataatatttttgatgatttgaaacaaaaaaatttaaatgatacttctccgatcccttataagaagtaatgcatattagattataataagac

SEQ ID NO: 3257 - DNA, 308 bp, Glycine max
taccggtgatatttttattccatttatggggctcaaattacggaagttaatttctttctgcgcatgcgccccccttcaaagttttttttttatcaattccactcagcaagatttagcaattcttttcttcacgtctggaactattagtcaatgaagtgtaacaaaaatctcaagtattataaggccttatgcacgcgtagtttcataaataaaaaacaaatttttatatatttatttttaaaacttgttttagtagaaatgcttcatacttatattaaaaaaagtacaatatactcccttcggaccta

SEQ ID NO: 3258 - DNA, 314 bp, Glycine max
gcagctgcagcttctagtcgtcatgacctctcttttgtcgctacaaacgggcatctggcattcatcgcatcactaacagaccttgagcgccgtccaactgatggactcgtaccaccaccacctgctccagccataattaacaggaaaaaaaaatgtgcaataaaaattattaaggtttaggacctacaacactctactcacgtctcttagatggtagtacactcgtgtttaatgctctaataggcttttgtgtaatgtattccctcttgccttttaccactcgtgttcctcttaattcctggatggacaaatta

SEQ ID NO: 3259 - DNA, 345 bp, Glycine max
  unsure (1)..(345): unsure at all n locations
ggcttgctctaaatttacattgatgtttgtatttatgggaggaggttgtatgccatttttgttgtaagagtagtgtcccactggtaaaactaactttccaaatttttgccttcgcaggaaatggccccgaggaagcttgcctcaaagaggtccaggaaggacaaggcggccgaaggaactagttccgccccggagtacgacagtcaccgctttaggagagttgtacaccagcagcgcttcgaagccatcaagggatggtcgtttctccgggagcgacgcgtccagctcagggacgacgagtatactgattttcangaggaaatagggcgccggcggtgggcacca

SEQ ID NO: 3260 - DNA, 324 bp, Glycine max
gctttagcaatcccacaccaatttcacatagttcgtggggccagcggggcaaggggcattataaaaaaacaattccaaattaaaaaataaaattttaaaatataaaattggacccatttcaaaaactatgaaatgtttaataaaaaatttatttgccaaaattagtaacataattcgcatcttaaatcacctaaaaagtatttatttacattgtgtttagttaattgatgattctatatcaaatcaaaatattttatcatgattcatcaaccatttaacaatatataaaaaacttaaattctatatattttttaatcttatttt

SEQ ID NO: 3261 - DNA, 268 bp, Glycine max
ttcaagaataatcaagatcaagatctaagactcaagattcaagaatcaagagaagactcaatcaagataagtattaaaaaaaagtttttcaaaatattgagtagcacaaaattttttcacaaaatcttttaccaaagagttttactatcagggaatcgattactaaaaggtagtaatcgattaccagtagctagcattgttttcaaaatagatttacaaagctgtaatcgattaccaatattttaaaacgttagatttcaaatttcaa

SEQ ID NO: 3262 - DNA, 327 bp, Glycine max
  unsure (1)..(327): unsure at all n locations
gcttggattgatttggtctgtttagggatcgaggtttaataatttaggctacgacatagaacacatgagcatgattgattanagaaatatatttatatgcatcagcttgtttatttgaaagacccaacatttctacctactactgttacttttacttaccttgcattttatagtttttagcataaaagtttagtttaaattctgtttgaaattatcaatcatacatgttctctcaacaatgcttcatttctgaacttaacttaggctaacattagttccttgtgttcgatactcggattcatccattttaatttttaaatacttgac

SEQ ID NO: 3263 - DNA, 312 bp, Glycine max
  unsure (1)..(312): unsure at all n locations
gggcatagnctttattgagaacctgggatgtttctaagcaggcgagctcctaacaggcaacagaataaatggaactaagaccacaaagcaaggaggcttgtgtggtggctggccaactgtgaactttgattgatatatgggatatggcctctggtaatcgattaccaagggtgggtaatcgattacaaggcttaaaaatgaagacaggaggctaagatggtctctggtaatcgattaccaaaggagtgtaatcgattaccaggcttgaaaacgaggtcaggaagctaggagggcttctggtaatcgatacca

SEQ ID NO: 3264 - DNA, 326 bp, Glycine max
agcttattataatcaattatatttttgtttttgagacaatgactgatttattcaggagtctctgctttaatcgattaccatgtgatataaccgattacttctctttctataagtgattcaaaagtgaacaagaacattttaattaattaatttgagtatctaatcgattacattgttcttgaactttttcagctttgggaagaacactttaatcaattaaaaagataatctaattgattacttcattgaattaatcgattatcatgtagatttaattgattacagacggctataattattttctcattttctctataagtaaccag

SEQ ID NO: 3265 - DNA, 328 bp, Glycine max
tttcaccttctcgctaattcaatccgtttgcttaacgagtgtctgctaagcgcaacactcattggctaagcgcaaggaagaatctggaagaagatgagttgtgcaggttcgctaagtgcaccgcttcatctcactaagtgcaccacttcactccatccgctaagtgagaaaggcacacgctaagccgaaattcactaatgtgcattaagcggtccagaattgtgctaagcgaatgagcacgaacaaggccacctatttaagcctaaaattagattctgtgaagagagtttgggctgggattcagagctttgcatgtctagagattcta

SEQ ID NO: 3266 - DNA, 320 bp, Glycine max
agcttgcatttcctccatgaatttcttggtctcgaaacgtgcgatggtaccctagttgttcaccaaatttgctttggtcattccaatgtcacggtcaataatggaaagagtcttgttggttttgtcgggcacaacacagatgaagaactatggttaagcatcaagcttgctcttgtcagaatgatcctccataatttttactgcaacaacggtataatctccctgtggcggtggcttcggaggtggtggttgatatggcggcgggcgtctacgccggtgaggaacagaacaaagctaagtcgtattagtggagagaatcc

SEQ ID NO: 3267 - DNA, 282 bp, Glycine max
gaaatcaatcttttcacatatctgcaaactcatcaagctccaaaggattggacatctcgtgcatttacctccttgtctttgctttgaccttctatgcaaactttccggccttcttctttttctccaaagctcgaatctataagaaccagctacctatgatgatacatagttagaaagtggaaagcttgggaaattataaatatatatcgaaaatatattggtaagtacctgattcggtgacacatagagtggattctcatataaagttgggcctccaaaact

SEQ ID NO: 3268 - DNA, 323 bp, Glycine max
agctttgcggatttggtctttttattgaaaggatcgatgtgggtttgaaaaaaggcaaatctgatcatcttgctttgataaatgcaaaaaaaaaaaaaaaaggctggggcaaataaagagggtgaggatgaaggagaagcccgtgctgtgactgccattcctatacagccaagtttcccaccaacccaacaatgtcattactcagcaaataacaaaccttctccttacccactgcccagtcatccacaaaggccatccctaaaatcaaccacaaagcctacctaccgcacttccaatgacaaacaccacctttagcataaacc

SEQ ID NO: 3269 - DNA, 333 bp, Glycine max
tgcctcaaagaggtccaggaaggacaaggcggtctttgaactagttctgctccggagtatgacagtcaccgctttaggagcgctgtacaccagcagcgcttcgaggccatcaagggatggtcgtttctccgggagcgacgcgtccagctcagggacgacgagtatactgatttccaggaggaaatagggcatcggcggtggacatcactggttactcccctggccaagttcgatccagaaatagtccttgagttttatgccaatgcttggccaacataggagggcgtgcgtgacatgagatcctgggtaaggggtcagtggatcccgtttgat

SEQ ID NO: 3270 - DNA, 319 bp, Glycine max
agcttgcttccactttctcaattttcataaacaccaggtctagccaagggaatttgattagtaagtggggcaggaagattaaactggtagtgttgatgagatgtggggatgatgcaagccttaagtttacaaaaacttactgcagtatatgcgcttcctcatctggaaactataatctctaactgacaatagatgccgaaggataatcccatattcagactgaaagcttggaacattgctcagaacatcccaaacatgattgaaaagtggtttaactacagatgacaatggtaacatttttcctaaaaataaaagaaaa

SEQ ID NO: 3271 - DNA, 326 bp, Glycine max
tggctggatactgatatgtaaccttttatttctcactaatgggttaggaatgtaacatagttgagaagcaatctaattttgggaagaggaaagaccaacaggcatgtgttcaccagaagtggcctgatctctagttgacatattttgagtcacaacaggtacaacaccattttcagcatttttcaaagcattgtctgtctcaccagctggccctgcaaagtcaacacaaactgggtggagaggcccctgtaatctcagaaggtaactctgactagaagtttgtcctgtcatatctctgcttgtcacagcaatggcataagactgtt

SEQ ID NO: 3272 - DNA, 321 bp, Glycine max
agcttagtgaaacacttaatatttacctctcttctaatggaaattcaaacatcaatttgccacataatgtaatagggtggtaaaacaggttgaattcatcaattggtagcggcttagatcccttaaccaagtggtccaagatttaaatccgaaattacttgaaagctaaaagaaacaaaaaaatcatcatatttcaaactccaaaatgccaataaaacaaaaaattgaataattaaacaaaatcattaacaaatcgagaactaatacaatttgtgaaatagggggaaaatgaaaaagaaagacggtaaatatgaagaaaaa

SEQ ID NO: 3273 - DNA, 345 bp, Glycine max
agcttggagcatgcaaaatatatgctatattttgagtttgagggataaatatatatcgtttacagactgtattgtgaacacaagatgagtaggctaaaggctgttatgagagtgtattaaggacttatagttctatcatgttagagtgcagtgaggaagctgaatgtaaaaatatctatatgcaaaggacaacgtaacactactatgtgactttctatgtactatatatataatgatgttaataaaaagcatagtgctgactgtgacaatgatctcaactcattcaaaatcaagtatatggagaatcataaattcttcagctgtgtaaaaatctaattttaacac

SEQ ID NO: 3274 - DNA, 323 bp, Glycine max
agcttgtagccattataagatgtttaacatgtgattggaagtatgactgaaaatgttagtaagtttgtcatattgattgtgaaggaatggattgaccgtatcccggttagagtgtgatcgttaaattttaagagaaacgactattatttattactgatttttgcatgaatctctgaagtatgaattgaatgcatgaaattgaggatgatgaatgccatgtttgattgtgatagccacttagccaaaaagttgaccacatgcttgaatgatttatcctttgcacccagtttgagctgaatgaattattgattgattgaaccctg

SEQ ID NO: 3275 - DNA, 311 bp, Glycine max
  unsure (1)..(311): unsure at all n locations
gcttctcaaggaggngagctaagtttttggaggggtttttgtaatcttatctctagcttctcggggaggttgtgttatataatcttttgaaggaagttttcgttagagtatagtaaaaaaagactaaatttcacactaccttgggcccctttgtttcacacctaattttcaattgaaatttacgacctataattgtgtttaaatatgcaccaattatataataaatttttgagccaaaacaacaagcgcactttcctttcactttttttcctggatagtgatttttctgtctacttctgggatttttagta

SEQ ID NO: 3276 - DNA, 321 bp, Glycine max
  unsure (1)..(321): unsure at all n locations
agcttgntctcacatcgttcgcttgtatgatatccgctccagaagctttgaagtagaggagaccttcaatcctattacgcaacgtggcggataaaagtgggcaattaacttgaatggtcattattgtcaatgcggaaggtattctgcgcttcactatccatgttcacacattattgcagcttatggttacgtgagcatgaactactaccaatatatagatgttgtttacacaaatgagcacattttaaaagcttactccacacaatggtggcctcttgggaatgaaacggctatttctccttccaatgacgcatggacact

SEQ ID NO: 3277 - DNA, 324 bp, Glycine max
gcttggagaaagaaatatggcttttttatagccgatgtctatttaagatatacataggtgtgcctccttgcatataaacatgaatttttcaagggctttgaaatattctgtaaaagggttcaaaaggaaaagggttttgcatttcttccatcaaaagtgatcatggaattgagtttgagaatgctgagttcaaatcattttgtgaaaggaatggtattttttgcaacttctcttcatcaagaacacctcaactgaatggagtaattgaaagggaaaataaaactctacaacaaatgggtaggaccatgctttgggaaaacttac

SEQ ID NO: 3278 - DNA, 392 bp, Glycine max
  unsure (1)..(392): unsure at all n locations
tggccgaggggntttgaacctgagactgacgacatcganncacngggganccctagagtccagctttggcatgcaagccgggtttatcttttggttttcgacgcccgggccaccagggtcggttggtctctagaggctgcttcatcaaggacatattttgacttggatggaattgccatgaccaaggtagtagttactgtcagacgaatcgagtaaaagacattgattcgtgtgatgaatatacaattggagagacgtggcacaccatatgccacaaaatgttgtaaacattgttgttggaacaccattgacctctgtgacacacaggtcctgaatgaggtttctgagaactgaggctggttgcctttagagacaggagccaatcaattccg

SEQ ID NO: 3279 - DNA, 375 bp, Glycine max
ctgaacgttgaaccatgatgacacctcgtttgcaaggctctgtaaaaactccgcttagagcaactctaagtttgtaaacgcttttattgaaataacgggttaatccggatgaaaatacggtggtctttgtattgggggattagatagggtatatccttttcttttcattctaatccttgacattaaagttttcatgatattaacaaaacataggttcattaataatgtcattacttaagataaaactttctttcgaattaaaactatgcccttcctcccattataatcatcgactattccacacagacccatagagcctcatcaactgattcgcgaacctaaccattttccaagattagccttattattatcaag

SEQ ID NO: 3280 - DNA, 304 bp, Glycine max
agctttctactgcattttagaattatggatttcggcaatcttgctctgactattccctcttcactttacggactacaactgtccatcttgtggtgctagtttacatggatgatcttattgtttcaggtaatgattctgaagctattcttcggtttaagctttatcttcatatatgctttcatatgaaggatttgggaagattgaaatattttcttggagtggaagttgctcgctcacccaaaggaatttacttgtgtcaaagaaaatacgccacggatattattcttgaaactgggttacttgg

SEQ ID NO: 3281 - DNA, 319 bp, Glycine max
tgagaatgacactactaagacatatacaattttctaatataattactgtgaaggaagatctagcataccagtaatgcctttatccccgtggaacatcaaccaaatacccccctccccacaaaaaacccgaaccacaggccagttccaagtaccacagccgccaaaaaccctcaaacaccaccgccgctccaagtaccaccggctagttccccgagatggtggcatcgaaattggggattccggcgtgttgtacctactccccaccgcgccgttcgagtttcagttcgactattccaagacgtcgaaggtgaagccgatt

SEQ ID NO: 3282 - DNA, 414 bp, Glycine max
  unsure (1)..(414): unsure at all n locations
ttaagcacctgggctgcagctttgtccataaaatcactagaatccgttcaggtccaactccttaacagttgcttttgctcttatcggttaaaatgaacctttcaaaagtttaaaaccgaccctacgtttaattttcttgcttttaaagagctacgcaggtctgagttcctcgtcgcatttgatgatacgtangagcaaggtcgtgctcttgtcgaccccaattgataaaaaaacatacaaaatgaaaaataaataaatgttgaagtcatggtttgcacacttgataaaaggataggcgcccttgtgacggacgtgtggtgtgctaatatcttcctcgcacgtaaacaactcccgaataaatgttttcctagcgttttcttaaaattcgtagagcccctttgtggttttctaacg

SEQ ID NO: 3283 - DNA, 401 bp, Glycine max
  unsure (1)..(401): unsure at all n locations
tatttacttgtatgtnttgtgttagacgtctagacttttntttgttgattatgaatgtcattagtttttagtaaatttttattatttttgagaatttatatgtatatagtatacattatataaactataaaaatttcaaaatagcagttatcccgctatatgcaatctcgctattgagtnttttgagccagcggctccgctctgctatcagagatttaaaacattggttctatgtaatatcatgatttcctaatgtcgtcattttattttatattgttttcccctacttcagggagcatctgcagttaccaagagaactgtcagggcaaaagactcatcttcaactgctgttgctggtggactggatagcttgcccaagaagacatatatggaaagatcta

SEQ ID NO: 3284 - DNA, 392 bp, Glycine max
  unsure (1)..(392): unsure at all n locations
agcttcttagcagaaaataagccatactgatctcaggatatcagggacagtagtacacacaactaacttctgatgtcctttagttctatgtgaatttttagcatgagtatttcattttcataccaaaaatacatcaaaacatatgggaaatcatcactctcctggttcattagattccagtttcacatatacatatatatattccagtaaacagaaaacaaatgtagttaagggcaacaaccttgtttatggataaagagaaaagttacataaaaaactaaaggcaatatacaacagtatccaaaacatagaatctagaggaagtagatgaattacatttcatgctcggcgtttactcanaccgccacgaattgggtcaaactgaatggaat

SEQ ID NO: 3285 - DNA, 377 bp, Glycine max
  unsure (1)..(377): unsure at all n locations
tagggcctccaaaatcatctaaatattattagatgatgagagatcaactcatatcaagagtatgttatcatcaatcattttcttaaaatctaataattataataagtcaataattatatccgcttaattccaagaaaataaattgtgaggatgaatgatagctcttggttggtgtgtaagttgatccattctcttattagatattatatcttctaattaatcaacgatataattatgaagatcataaattaatgaagttaagtaaagctatattagacntttaaaaaataaacatttttttatccggaggatccagctatattataaatntaattagaatattctggccatattattcaatcaatcttgaatatata

SEQ ID NO: 3286 - DNA, 510 bp, Glycine max
  unsure (1)..(510): unsure at all n locations
ttggatcatctcgacccgggatcctctagagtcacctgcggcatgcaagctngcagactaagtgctcaccaacactagataagaatccctcaggttgtttcatgtaaacctcttcttctagatcaccattcaggaacgccgttttcacatccatttgatgcagctcaagatcaaaatgagctactaatgcccaaattactcgaagagagtctttcttagatacaggggaaaaggtctctctgtaatcgattccttctctttgagtgaatcctttagcaacaagtcttgccttatgtctctcaatgttgccttctgagtctttctttgttttgaagacccatctacatccgatggcttttacaccaacaggcaactcaactagatcccaaacttggttagatgccatagaatccatctcatccctcatagcattatnaccacaaattgattccttagaactcatggcttgtgaaaacgtctcagtatcattctcccgctcaatgttgtagg

SEQ ID NO: 3287 - DNA, 438 bp, Glycine max
ctaacataattcacatcattttaccaatcattgggtaacatcacttgttctaaggatttaatcacaaaatcatattctataccttcacattaatcacatgttcataacaaaacatctcaagtacaacacaacatctctcacacacaattcattacccaccatcacgtagcaagtcacaatgatcattacacagacggtatgcaacatatatactaacactcaatcctatattgaatgtggtatcttgtcagtgaaaaataacactagggcacctaggagtacataataaaatacaccacacaatgggtaagcacgtcactcttattaaaagaaatcataacgtgatcaaatagggttattctgtttagcgtgaatgctctaaccatatgagagcgacatagagttaaaggagcactcaaaccgagtgtatttactctc

SEQ ID NO: 3288 - DNA, 451 bp, Glycine max
  unsure (1)..(451): unsure at all n locations
agcttgaggaatcacagganaccactagagatgccgctatcactaccggaatacgcacgtgagaccgcttagaggtaagggatgaatttatcgcaattggggttagaatgaacatgtgtagggatccttacaggattaaattgnggtttattttgggatgtttattgaattataatttttactttatgattataaatacaatattattgtgtttgacataccaattgatgttctaacgagaattggttgataaacttgagtgctcttgatgttttcgtgttttgatctatgattntgattcattgattttaatataattgtgtggaattgtttaaggggttctactccccatgttgtgagaaacattntgtataaattattaatgagattatgaaatggtgattcaaattgtgagtaagtgagacattgaacctgtgattaatgatatgtg

SEQ ID NO: 3289 - DNA, 476 bp, Glycine max
  unsure (1)..(476): unsure at all n locations
cacggacactactagaaactaagctngatntactaaaaccgccatccaagcaaagccggactctatctactttgtcttcaataggttttctaatccatgtttgttccattctaccttcttaattacatgaattctctagtaaatttgttgctgacataggttattgttattattatttgggtatagcttgagtagccaacaccccaatcaattgtttggggtacaatattgttttagcatatgaaaaataacataaaaaactgaccaaatactttataagttcattctgccaactgccaaagtagtattattgccaaagtactacttggggtacatatttatttctagcacggaaagtcaatgtgtggagtgatatgctaaaggaagcacggtctgcaatatacttaggtgttgattcagatccacagaatttcaataaccacatcacttcaataacatgaaacttaactcaaatt

SEQ ID NO: 3290 - DNA, 269 bp, Glycine max
cgttcctaatatctctactattgcaacacctctcaatgagctggcgaacaagattgtggcgtttacctgtggtgataaacaagagcatacctctgctttgctcatagatgaggttactaaggcacctgctctagctctctctgactttactaacacttgcgagctaaaatgtgatgcctatggagtgggagcatgagcagtgttgttacaacgtgggcaccctattgcttagtttaatgagaaactatgtagtgccttccttagctacc

SEQ ID NO: 3291 - DNA, 378 bp, Glycine max
ggagatgaggacgtgtagaagggcgagacttcctgcctttattgatgaccacagagtggtacctggagatatgtcacgcgggtcaggacaccttggggacgtcaagtggcgtgctattgccctaaaccaagcttgaccaatcacgaaccaaccccggcataatcagtcattgataacatgcgatgtacctaagcatgcgagctcctggcagtcaacagataaaaggagaacaggaccacaacgcaatgaggcttgaggtggctggacaactgtgaattttgtgtaatatgtggattgcggcctctggtaatcgattactcagggggggcaatcgattacaaggctataaattgaagacccgatgctaagatggtctct

SEQ ID NO: 3292 - DNA, 413 bp, Glycine max
  unsure (1)..(413): unsure at all n locations
gcttacctagaagtatggcatggattacttcagcgctgtagcgcttggtactcgaactttggctcaacgcattntatctacccttattactctgaaaaagcaggggcaccttgcgtccttgaaccgataaccatattttggctaacctagcctcctccatccctcgagtccaataaagggtagtacaagaatattcaccttttgtccatcgactacgcccttcggccggatcttatgccttgactcaccctccgtggatgaaccttacgaaggaacccttgggttttcgaggcattggattcttaccaacgttagcgttagtcaagccaacattcccgcttctgcttcgaccagcactactcgcatgggtccctccctgtaagatggtacactcccctaccgattcattttac

SEQ ID NO: 3293 - DNA, 517 bp, Glycine max
  unsure (1)..(517): unsure at all n locations
cacacactaaacacaatntgtctacaaactttaattagttttctnttnnnnaagaancggggttgaaccctgacactaatccgaaacaaacataggactcgaatataaagtgaaagcagatatctacttctttttggacacagagtggtacctcgaaatatgtcgtgggggccagaaccctgggatccaggggggtgctattgcccacaaccaagcttgacacatcccacccacctggcatatcattcgtgaaaactatgacgtcctaacaggagaactctgtcgtcttccgatataagaacaaagaccactaagnctcggatgctttgtgggtgggttgccagctattgatcatgagggatatttgaatatggcctctggaaatgataccaacgggtgggaatcaattacacgcttaaaaatgaaaacagaaattaaggtgtctctggaaacaacaccaaggtgtgaatccattacaccctaaaatagggcgggagttgaaatggttcttgaatcn

SEQ ID NO: 3294 - DNA, 204 bp, Glycine max
tcatcgccataggtgtggttgtgttgattgccatcttgcaagacgaacttctttatgaagtccatccgcatatatttcttgcgagataaatatttgtccatgtctttgcttgacttgcatgccgacaaaatatctcctgagccctacatcggtcatttcatactcttgcatcatagcctatatgaattcctccatcatctgaga

SEQ ID NO: 3295 - DNA, 375 bp, Glycine max
aattatgcttgtaaaactaaaaaaaaggaaaataaaagcacaactatatttgtatatatattgtgctcttggaaagggtgaaaatggaaggaatggatggaaacaatcttgtgtcattgaattaccttacagccatatgaaaaatgtgtgtttcaattttttttgttgcacaactgtaatcttgctgtgctattaaatatgaaattattcttaatatgtaggtaccgactgctacagattggcaaaaagtacttgccaacttcattgttactgcaacaaatactgtcatactgctcatcttcggacgtatgtatgtcattcttacactgttgtggttaagaattataattttgcacctgatgtaagtattgttta

SEQ ID NO: 3296 - DNA, 418 bp, Glycine max
  unsure (1)..(418): unsure at all n locations
agcttgcttctacagctntgtgtatacctgatcgagggtttgttttaaattatgaaggccaacctgngaagattcttaggaaggatctgactacactagcttaggtgtggagtgtcctctcatactccaacttggccccagcatcacatacctctgatttgacagttgacagagctaggctgatctttggcctagtctctcaattggatatgaacataggagcattgatctctggccagatgacctctatagcctagtctaacatttctagactcgggttccctactctaatcaccgcattatgcagagctagaggggttgtctctgacaaccttaccttcgagcgcctgagcccgatcattaacctggcctacatcaagaagaactgttggaatcctgaggatctaacagtctctat

SEQ ID NO: 3297 - DNA, 448 bp, Glycine max
  unsure (1)..(448): unsure at all n locations
nnggattgaaaggataatttcttatcccacanaaaagtaatataaaaactaactcctaatcccaaaattgagctacatataaataagacaatgcagacactttttacttatacaaaaacataatatttatatgaaaatacttaaccactccataactcaattgtccatatctggttcatgattaactattgatggaaatgatcagtttataataataattataatgggtattggttcttcaaaatgttggttttagtccctagaaaaacaagagtttaatacgtttttagtccgtgcatttacctaaggctatttttcttaactaggctctttttcattattagacccacagactgtcttagtcctcgcaatttgctttttcttaaggtgttagagggcagcaggttataaaacccggtagtaccactactcanagcccaaagtaaca

SEQ ID NO: 3298 - DNA, 457 bp, Glycine max
  unsure (1)..(457): unsure at all n locations
agcttatcgaaggtacccatggtgtggaccggatggaacgatagcaccaaaattaaaagagaaaacttgaaaggaaactggattcgaggccagcacctccagacaaggcaagaaagaaaggaaacttagcttttttcatatcatgtgtgccttacaattgctttatttatactaattccttgctaacagaatttgtcattttgtgccaaggaatattttaggaaatcaatggctaacaatttatggttacgcttgtctccctaaggccaaccagccatcatctacaaaggcagacaatttttgacaacggaaaattcaagattccctcaaattctttcttttgtagcccgtgagatggtggatgagtggatntgagccatcaaagggcaagattcatncaaattaattnttaagggagatatatatatatatatatatatatatatatatatatata

SEQ ID NO: 3299 - DNA, 390 bp, Glycine max
  unsure (1)..(390): unsure at all n locations
taattggaaactgaattcattttttactattgtaattgaaggtgaatatatcttaactcaaaaactcttttctacaattgaaaattttaaatctttaggatttctcaattagggcaatcattaagttcaagaatatctaaattatcataattgttgatatttattcctatagaatttccaactttgttacattatatcttaaattcaatccttatttcaatttcacagttgtcgataggaatatacgatcaacgcactataagtgaccaaatgccaatttacaaaggcactaaattaaaaaaagacaaacattcaatttaaaagacatgaatttgaattacagataagaattcaaattacatcaagttaacagnaaattgagtacacatt

SEQ ID NO: 3300 - DNA, 273 bp, Glycine max
  unsure (1)..(273): unsure at all n locations
ttttacaacttttataaccatgactcccctctcttgagaaggttggaccaatgttataaaccaattcataatacagaaaataaaattaatgtgttttgaaagaataaacaaaggtggtcctcccttatcatgcttaacaacgtgtggaagatacattacagttaattgtcgcacatacccattgtggcagaggcatctccccctccatagaatgtagcatgagcatncattcaaccatcactgttcccataagcacctaagagaaaccccacc

SEQ ID NO: 3301 - DNA, 435 bp, Glycine max
tagatactatgtctatttattaaataagctatgttatcttattgtaaaaaaaaataaaagttaggtcgtcatttttttgaagtgaagttaggtcatcattttaaaaaatagaaaaaagaaaacccaaattttagtcattaaaaaaagtttaagtgaagttttagtcgttataaaataggatatttattattttaatcttttaaaaaattactccctataagattaaaaaaaattattatcaactaataaagttaattaataataataacaatatttataactcattaactttgttatattatcaaggaaaatatttgcaattcattaatttgttacattactatttacctttaccgtttaacttcattatcatattttaaaatttaaataaattaattgatgaaatatatagaattataactataaatgaaatta

SEQ ID NO: 3302 - DNA, 276 bp, Glycine max
gtagtcgaagagaagttcaagtccatagccatcaaagtctgaaaagagtatgatgaactaagggacgtcaatatggtcacagctgaggccttggaacgagaaaccaataatgcccgaaaggaagaacacgaccaatgcaaagttttgaggggctttatagggcagcaatagtgagctcaagctcggaagaggtgaaaggaatcatcacgggtcaaatgcatgatcttgaaagacgagctataggctttgccttatgtcgaaaagaaatttgtccca

SEQ ID NO: 3303 - DNA, 413 bp, Glycine max
ctgtattttcatatccaggagggtgatcaacacacactacttcttgaataaaaccattcaaaaatgcacttttaacatccatttgattttgaaatcaattatggatgcaaatgctaataagattctaatggctagtaatccaaccactggagcataagtttcttcataatctattccttcttcttggttatatcctttagctactaatatacttttatttctaataactattaactactccatgttcatccaatttgtctctaaatacccatttagttccaataattggatgatcattaagtctatcaactaattcccaaacttgatttctctcacattgatttaaatgcctcttgcatagcaactaatcaaatggtcatcaattatggtttcatttatgttatttgggtcaa

SEQ ID NO: 3304 - DNA, 350 bp, Glycine max
agctgagcatgccaagtggaaggtctaccaatgaatgatctcttatctctggtacaatgtaacaggtttttagaaatatactattttatttactttaacaatgtgaccaataacgcaaagaaaataattattaaatatatagactctaaaaagagaagccctatactatattgtaattatgttaattcgaattgataattcctgggagggaggaatgaactataaagcataatacatatgcgacaacaaaggaggtgcatgcgcagacgattgtggttgagaatagatagcttaagagaactagattgaagccaattacagatctaatgacacctaagctaatgatgcaa

SEQ ID NO: 3305 - DNA, 492 bp, Glycine max
  unsure (1)..(492): unsure at all n locations
ntgttcttgacgtcggaccttaagcaccgcggctgcagcttctcctatttgtataatatggtgtgagtgtaganggaaggnngtcaccccttatggccttctcttctttttcgatttgctgagaaaattattttcgtgaagaaaatccagccgaggggcttncggtacggttccgggagtaaatacccgaagattctcgaccggtcttcaaagaattatcattcggtcttcggtttcttcaggcttcaacgggtaagtacctcaaaccaagcttctcaattcattatatggaccccgggtgggccacattgtggttcatatattttcattctcggtttcatttactttttataccccnctttgacgtgcttaagccatatatttaagccatttctcgcctaatctaaaaataaaataaaattccaccgatcgcttgaattgatcatccgtatttttctaaaatgaattccgaccgttggtcgtgcctaacan

SEQ ID NO: 3306 - DNA, 464 bp, Glycine max
  unsure (1)..(464): unsure at all n locations
ctcaagccttggaaagtgttgtttttcaccttctcgctaagccaatctgctggcttatcgagcgtctgctaagcgcaacactcatgggctaagcgtgaggaagactctagaagaagatgagttgtacaggttcgctaagtgcaccgcttcatctcactaagtgcactgcttcagttcatccgctaagcgagaaagacacgcgctaagccaaaattcactaatgtgcgctaagcggtccataagtgtgctaagcgcacgagcacgaacaaggacacctatttaagcctgaaatcagaattttaagagggagtttggaatgggattcaaagctttgcatgtctagggtttctagagagagaaagggccaagntccatacatgtttgagagatctngctgtgtgaagatctgcaagaccgaagcttgaagcaggagccggtttgagagcttgagatgagtttgtgag

SEQ ID NO: 3307 - DNA, 456 bp, Glycine max
  unsure (1)..(456): unsure at all n locations
agcttgttgaaattgctacaaatttctagaatattcttaaatataatatgtatgaaaatggtagaatatcctagaactatagtgtgtctgaatatggtagaacaatctagaactataatgtgtatgaatatggtagaacaatctagaactataagtgtatgtataagatagaagaatctagaactatcatgatactaatctatcatgaaaactctagaaagacctaaagtaatgtagaatcattcaccaccattgagaggttggtgacttgagcctataaataggcaattggtatgttgtaattgatcatccaagaaatcaatgacatagccttctttctaaaacaattctctaaaactattaactatcaactatcatctaataaactaccaacagtggtatcagagctacgttctgtcatacattgngcgtagttatattacctacctaccattc

SEQ ID NO: 3308 - DNA, 458 bp, Glycine max
  unsure (1)..(458): unsure at all n locations
ggtaaactgtttcatctgtttgataatgatggttataaagggcatctactataagaaaacataaagattatactagttcagtagtataaagggtgatccttacctttatttaatgcatagtttctatggtcatgctagttcaatagaattagtgacttttgactctgttgaagtgttggttctttctggagcatcgtcagggataataaagctttgggatttggaagaagcaaagagtaagttaattagtatattttgaagtcatggactgtataatgtataatgatgttattcatanttgagaaagactgcaggtgaggaagtttgatgtctaatgtttttgggaatgatgattgatgtaggtggtcattgagttctttattggattgttgctntatttttggaccatgctgcttatcatcacaggtacaagtggttctttgtaaacttttgatgtt

SEQ ID NO: 3309 - DNA, 288 bp, Glycine max
aaagggaagaaataagagagaaaagttaactatgcctacataatttaatcccataatatacctatacataggagtgatcagcagagtatgcaactttattagtctcttgttaacttttgggtgaggttttctagaagtgctactcggaggagaatataagaaaatatcttatgataagtgttttcatattgtcaaaatgaatattttattaactaaccattagttaatttatagatgtcttcatatccttcaaaaaaatatttgagaagacttgtataacattactaa

SEQ ID NO: 3310 - DNA, 326 bp, Glycine max
  unsure (1)..(326): unsure at all n locations
agctntcttgagataacttccttgagaagcttctctgttatatcttncttgataagctagagcttagctacacatatccctctcataacttggctcagcttcttgagaagcttccttaagaagatacctatagaagctagagcttaactacacacacctcttaatagcgaaattgacctccttgagacgagaagctagagctgaactacacacccgctataatatgtaagctcacccatatgccanaaaacatgaaaatacattaaggtccctactacaaagactactcaaaatgccccgaaatacaaggctaaaaccgtatacta

SEQ ID NO: 3311 - DNA, 425 bp, Glycine max
  unsure (1)..(425): unsure at all n locations
atttagcacttcanatgaaattgtgttatacgaatgatgagaaagatctaactgtctttccattatgttcatcaatacatgtatctctgatagtatccgtggttcaattccggaatgccaaaaggtcaaggattttgtggaagccatagatgaacagtttgaaagttctgagaaggccttggttagcaccctaatgtctaatttgtcatctatgaggctcattggagttataggtgtgagaaaacacattatggaaatgagggatctagcggctcaacttaagtcgctctaggttgaaatttctgagttattcatagtgcacctaattttaaattcactccaatcacagtatgttccctcataatatcatacaacacacataaagagaaatgatcaatcaatgaacttatgaccatgtgtgtcta

SEQ ID NO: 3312 - DNA, 435 bp, Glycine max
  unsure (1)..(435): unsure at all n locations
aagctggcgatgtcgaaaatctcagctgttagctgtctagagaagaaattgtggctcacgttgagactagtgaggtttgtgaagatgatgaattgcttccctgaaaccacacctcccaatttcttcatggaaaggtctatggaagttacaattgttgagtcattgttacacttgatgccggaccaagaacatgcataggatttcccagttaattgtcctccagagggcaccacccaattgtgcaagctgttgtcatcatctacaagctccgattntatgctgagaagtgcctctgagtaagggtcaattgctagaactgctgatgataccatgaagaaggtaacaagaataagatctttgatgtagaagcatttgaaaatctccattggaacttggagagcatcacaaggtagagagggacaattgtaagtaccc

SEQ ID NO: 3313 - DNA, 252 bp, Glycine max
  unsure (1)..(252): unsure at all n locations
tcttatatacttaaaatttctggattggaagctgggtgcaaaaacattcattccatcccagatatgacttagtctgggacttccacaaagacatattntatgctataggtaacatactttacttttttttaccatagaagtacctaaatgttaccataaggattctttgttagccaaatataaaaatacaatcatagtcagtagtgcctctcagcctctgttaatcaattatcagaatggtagtctaagtag

SEQ ID NO: 3314 - DNA, 448 bp, Glycine max
  unsure (1)..(448): unsure at all n locations
gattagtctactcttaacttaaatcctacataagtataacaaaggttataggttctcttaacttttttattttataaaaaataaggaattttttattgtcaaaattaatttctctttttcattgcttaaaaaaatattcaaattgtaaaaataaaaaaaatcacaagatagtgattatatgataattttatcttcagtaatcaatatcatcattagaaccacaaggatatgatgaaaagtccagcgcaacaattaatttgttttaaaattaaaatcttctgttcaaaactaaaatacatcagtgtaaaaaataactaagatcaatcaaaccataatattctcctataaaataacgttgattnnttttttcattatatccacagacaatgagaatgcatntatcctattatgcatgttaaaaataatttcttatagcacntgttacttc

SEQ ID NO: 3315 - DNA, 380 bp, Glycine max
tcaaagcattttaaaataattattcaacttggagaaaataaggacaaatgggcggagataacttacaatttattacaataaaacatagggatccaacatcaatcatcatccaacacaaaattcaattactgatatgcataaaattggatggtcccacaccataatacatataatccaatacatcttggttttatgaattcactccaaggaaaagcagataacaggtcattaacatcaataaaatatcttttacttacgaagaacataaaagataacatcaacaaaccatatgtttatggttagaattaatccgcttcgtgcaaataaataggaatgccactttcggtttatacataggattatattattatataattcaa

SEQ ID NO: 3316 - DNA, 452 bp, Glycine max
  unsure (1)..(452): unsure at all n locations
tatacattcaatggcatggatagccatgctaatgagcttttatagcttcttccaatagtgaataggtcttcattgaaaagggataagcctaacttctgataaaaaaatctactaatatgtttgctccaatttttttggttgtcaataatatgtttatttgtgcatgcttgtagttacctactactttggagcaggttgtttctaaaaaagttcatcttttagaagggaataaatattagcaacacattatttttaatatatatatatatatatatatatatatatatatatagagagagagagagagagagagagaagagatcaaattgaattgatgtaactctgataacttgtacaccattctataacttcaattgaataatgtgttcttaaaactcatntgtggatagaaaagtcctttcacatagataacataagcaaaattttatatt

SEQ ID NO: 3317 - DNA, 270 bp, Glycine max
agagggaaggagaagagtttattgaagaaggaggaagaaagagagaaaaaaagagaagaaaagaaaggaggaggaaaagagaaaaaaggggggaaaagggaaaggagaaaggaagaagagggaggaggaaggaggaagagaaaagagagaggaggagggagaagaaagaagaaggaggaaggaagagatagggggaaggggaggggggaggaggaggaggaagaaggagaggggaggggggtgaaggaggaaagagagggaagagaaaga

SEQ ID NO: 3318 - DNA, 214 bp, Glycine max
gggggaagaaaagaggagggaaaagaagggggaaagagaaagaaggaagaagaggggaaggggagggaaaataggagaaaaggggaagggaggaaggaggggaagaggaagaaaaagaaaaagaaaaagagggagaaagaagagagaagaggaagaggagatgaaggagggggaaagggaggagagggaaaggaaggaggaaagaaagaagggg

SEQ ID NO: 3319 - DNA, 444 bp, Glycine max
  unsure (1)..(444): unsure at all n locations
agcttaagcattccactctaaccaaagcactctttgcctacaaatagaaaatttcttcaaagtcctaccccaattntttttcactgcgagtgtttcaaagagtttgattagacatttagacttataaaactaggtaatatagagttctatgactattaactgtgtttataacctatacaatccaattaactcagcctgcaccaaactaatttgcatgtttggttttagaaattagactcagaatgttcagagttggtttaggttttatttcagttgtctcgttatcctatatcttctaaatcttaatttttttaataattctatattaattataagacttcttgacttcatggataacattntgcatatnattgataatattgtttcataatattatagatatatatattatataaatacattcattattcttacttcttttag

SEQ ID NO: 3320 - DNA, 453 bp, Glycine max
cttagtaaagctaaacacgtacaatctccacctctggtgaaatttgtctaaaacatacttagacactttctgagcaggtacgagcagttatgcaagtgggatcagcaactttcattatcagagtaatcaagcacagcggaaattctgcatgttgcaagtcgtttccaggatgtcaagacatctcacatgacatcagctttctgcttctgctgcccctgtctacatgcttactgcagcatcttctaacagctactagtcttttccaggatgtcaagacatctcatgtgacatcaactgctccccctgtctacatgctcttactgttgcatcttttatcagctactagtagcttacaccagtcatcatcagcagcagcagtctgcccctcaaaatcatatacatacaactccccctcaaaatcatgaagcatgcatacatcgtatcctactaatc

SEQ ID NO: 3321 - DNA, 345 bp, Glycine max
aacacacactactgtttgaataaaaccatctataaatgcacttttaacatccatttgattttgaaagcaattatggatgcaaaggctagtaagattctaatggctagtaatccaaccactggagcataagtttcttcataatctattccttcttcttggttatatcctttagctactaatatacttttatttctaataactattaactactccatgttcatccaatttgtgtctaaataacccatttagttccaataattggatgatcattacgtctatcaactaattcccaaactggagtttcttcaaattgaattaatccctcttgcatagcaataatcaaat

SEQ ID NO: 3322 - DNA, 568 bp, Glycine max
  unsure (1)..(568): unsure at all n locations
gacacaacacctacaacgagcacgtgtatagtaggngtaaactcacgcatataaatacntnnaaagtnnncggaggnttgaacctgatgcgtcgctgaacnacgcgnannnnagagaannaagcagngaaaacgaggatcacaacaaggatctgatagttagtttttgtagctgacaaaagaatttgcaacacgagaatagacacttgaacagagacacgacacaagatgaacaaacactaagagaggaagcaatgagaaataaagcaagaatagataagataaagagaagaaatggtacacaaaatggttgaataaggaaataggaacgaagagtgggaccacaagaacagaaagaaccaagcagagcaaattgtacaagagacagatacggcagagcttaggaaagatatgatggacgaatgaaaagaataggcgaggaggataagagcattcactccagacatagagacatagagaaggaaaaaagaaaaacatggaggaaaggaaatggaaaaggaaattgtaaggaaataaagatgaaaagggtcaggggagtaaaagaatgg

SEQ ID NO: 3323 - DNA, 539 bp, Glycine max
  unsure (1)..(539): unsure at all n locations
nttgaatctcctgacntagcagncaccncnnagagangacccgcangcatgcaagcttttcaaaatntagagaaagacatactttttggtgttatatcactnggnacaaaattaangttttaatgactgaccatggcctggagtttgtttcaaagccaatcaacgaggtttgcaggaaaatatgcatcataaaggcacaaatacaagtcccctcacaactcccatcaacaagaaatgtgtgttgggccgacaagaaatgacataaccatcatctctggaaaagagtgaggtgcatggcttttaatgcacgactgccaaagaccttttggggagaagctgcaaacacaatagcatatttgattaatagatgcccttcatcaaccttaaggttcaagacaccaatggaagcttggagtggtgaaccccctgttattcaagattaaaggtggttggatcactggcctttgctcatgttaaacactaaaagccggatgcaagggttgaaatagtgtgtcattggctatcctgaacgagaaaag

SEQ ID NO: 3324 - DNA, 446 bp, Glycine max
  unsure (1)..(446): unsure at all n locations
actaagcctattagaggttatatctagctnttaggtaaaagttgcacttatatanttgttagtatgtggttaataataagttaaccaaattccttgtcttaaatttgagtctaaccaatttttggtagatcgtatttgactttggtctaaatcatgcttaatttgagtctaacaatttttttggtcttaattaaagggtactttaggttcctaattaatcacactcaaattaaacaaattgggttttccatttttagagctataacactatatgtccacacaaacatataataattcctagttatgaatttccagggtgtcacataaaggagtttattagggagaagatgaataattttagtgatttggatgaagctaaattgagaagagaaatatatcttccctatctatctattacacaagagaagtanactttatgagcttga

SEQ ID NO: 3325 - DNA, 387 bp, Glycine max
  unsure (1)..(387): unsure at all n locations
agcttgtcttgtgcagaattagggtacacattctttttttgagatntttacacataattccagagcacaccacagtgcctattttgggaaaagagctctggaggcaacaagatgagcaacttttgcagagatacctaggtcttgtaattagagagagattagaagtttatgtagacgacatgatcgtaaagagtaagcaagtggatgaacacctagccaacttgttggagttgttaatgcaactaaggaaatacaatatgagactcaaccctagaaagtgtactttcggggtacaagtaggaaagtttttgggatacatgttaaccgaaagaggaattaaggtaaatcccgacaagtgtaaagccacattggagatgaggagtccta

SEQ ID NO: 3326 - DNA, 453 bp, Glycine max
  unsure (1)..(453): unsure at all n locations
ctaagcctggagagaatgcntcaatggaggaaaagaaagagggagagatagatagtgtggggagcacgaaattgaaggaataaaagagggagagaagcggaactttgaagtatgtctcacaagactctcattcatcaaagttacaataagagttacacatgcttctatttatagactaggtagcttcctttagaagctttcttgagaaaacttccttgagaagcttctttgagaaaacttccttgagaagctagagcttagctacacatacccctctcataaccaaactcacctccttgagaagctttcttaagaagattcctagaaaagctaacgcttagctacacacacctctctaatagctaagtacacctccttgagatgagaagctagagcttatctacataccccctataatagctaagctcaccgccatgaacaaaaacatgaaaa

SEQ ID NO: 3327 - DNA, 456 bp, Glycine max
  unsure (1)..(456): unsure at all n locations
agcttcacatggagctacatcaagtcccaacttatactctataattagctctcacagaattacaatcccataaaattcttcaaaggttaatctatttgaatctgtggagatcaataaattaacatacttccctcaattcttaaaatttcattcagtttatctaattattaaagacactaaaattgtgtcctcttcgtaacaaaaataaatatttttacattggttgtcaatacaataagaaatgtttacatgattgctaatgcaattgctgtaaaaaaaggacatccttattgaaatctgtgactgatgtaaatagacatttttacatcaatggtcaatacaatcgattaacattctctaattcgcgaatgacacaatctttatgggtgaagcatccttgaaaaaattgattaccataaaatgtatgcttagatgctntgaacttgtgttggactc

SEQ ID NO: 3328 - DNA, 457 bp, Glycine max
  unsure (1)..(457): unsure at all n locations
ggttcatcttgagataataggtggtcatcctcatttgaagttgatggttcatcatatttctttggcctaacagaaactccaatatttttacagcttctaatgttatgattggtttggccacaccttccacatgtaaactcagccaatttcctctttagcttatgtcctgtgacattgtcctcatctacagatctctttctattattctttggccttcctctttggacccttntatgtggtggaacaaggtgtgtatattgtgtctgggcccaatattgtggtccttggactggttaataaaatgctggtatgtcttattataaacttctattgacagccactcatgacacatgtccttaggcttccctcctttgtgagttatngttgcaatggcatgtcggcatggcatccctacatcaaagttgttaaatcagcacacatgtacgttaggaatgaa

SEQ ID NO: 3329 - DNA, 213 bp, Glycine max
  unsure (1)..(213): unsure at all n locations
tgtggaagaagacaatggcaacgtgagggatagagatagctctcttaaaagtgcgggggctgagtgaagagagatacaagctctttggtttaaataaaacgcgtgtcttaatggtattattgtatgaattcaaagcacatgcctccgctgggaggagtaaaacgccccatttcccttttactgttaccatactcgttcacaaagtgagtaatn

SEQ ID NO: 3330 - DNA, 532 bp, Glycine max
  unsure (1)..(532): unsure at all n locations
nttgaaactacgacgatccgagaccctnagagnnnanncgcaagcctgcaagcttccatcattaagtcgtctccaactatcatcttctatttggntnntctttataaagctcaatcctaaccgatcactaagtgttgtaaagacatcgcttaaaaaatattgcatggtaataaaccaatccgagatataaccgacctctaactgatttaatgctatcaagtatcacttgagaacggttgaagggccaatgccttaacaactctctgctcttttcaaatgtcacaagatcatttcaaggtccaatgccttaacgactctctctgtttttcaaaatttaaaacattatttcaaggtccgacacctttaacgacttttgttcgcacttaaaatcaatctttcaaaaaacatagagacgatttaacacacgaacgttttcgctctatagaactacgggagtctgaattccttatcgcacctgaggatacgtangagcaatggcaacacccttgtcgacccctaaaaataaaaaaag

SEQ ID NO: 3331 - DNA, 462 bp, Glycine max
  unsure (1)..(462): unsure at all n locations
ctaagctaataaagtccttacgacccacattgtgtatatatgattgcatggaatgagatgaagtgcaaaattgggaactgattgttagttgtttggatgaattgacacttgcctgaaacacttgtgtgcttgagagaaacattggcttgtgaggaaagaagcttagtcaatcttgcttgatgtttgtcatgcttgctaactgatttcatctctttagctcaattgcacatgcttctatcttgaaatgtgacaaatactaatttgggggagatattgattgatagatgtgcagttatctcagttactgtggttggtacttactaaacatgccattaacctaacttagcatagttagcttaatttgcttgaggacaaganaagctntaaatttgggggaagttgataactgatgtgcaaaagtagattatgtaattaaaacatataagaattagcaatattctc

SEQ ID NO: 3332 - DNA, 374 bp, Glycine max
  unsure (1)..(374): unsure at all n locations
agcttaattnttcttttagaatgttagttgtccttccttcaacctcacttcctcccatactttntccattatttttagaagcttttctctttgaaccacccatttataactctaaacagtttagtgccttagtcaatgatgctattctttagaacaatagggcaatgatctgatacactcctattcaagacatgatgagagctcccttgccaagtgagtaacccattctttagatacaaatactctgcccaacttactctttacatggctatttggcttaaaccatgtatacatcctttgaacaataaggatgtcctctagctccatgtaaaanatgaaaccattaaactccctaatggtcccttcaccaccat

SEQ ID NO: 3333 - DNA, 440 bp, Glycine max
  unsure (1)..(440): unsure at all n locations
tatcatccaatatagggataggatatctatactttatagttaatttattnatggctgggcagtctgtacacatgtaccatgtcccatctttctttggaaccaagatcacagggacaaaacacgggctaagactttcccttacaaatcccttntgcaagaactcatcaacttggctttgaatctcctttgcttcttctggactttacctataggctggcctatttagaaatgaagcaccaagaatgaagttaatttgatgcaatacctcttaaaagaggtaatccatatggaatttcttctaaaaaaacatcaacaaattcctgtaacaaggaaacaatctcacaaggcaaagaagagttaaaatcgttagtaaaataaacatcattgtacattagtacaagtagctgctctctggccatcaaagtactctcaacctctct

SEQ ID NO: 3334 - DNA, 357 bp, Glycine max
  unsure (1)..(357): unsure at all n locations
agctntangatatctaattgatattttatgatatgtaagttatctgntggttnttcccttttattgccttagtaccatcctttatgcattatctcatttttttntttgtttcttcattctgtatcacatttgacagtgactggaaaaagattgaatcatttgttgtatcaaagacaatcatctaagtaatttcaaatgcaagctgcaactgtttatttacattatcttgtgtttctgggttgtcatccataaatgttgtggattgaattaggcatgttatagtttctgaagtgtgtttgattatgttacattaaggattttggcactttccaaataaagaacttggtattggacatg

SEQ ID NO: 3335 - DNA, 456 bp, Glycine max
  unsure (1)..(456): unsure at all n locations
ctttcgattcattctatgcaccgatggtggtccacattgtgtttcgtgtatttttattctcgtttcatttactttttataccccctcttgacgtgcttaagccattttacttaagtcatttctcgcttaacctaaaaataaaataaatttccaccgatcgtttgaattgtattatccgttaacttcggttaaaatgaattccgaccgttcggtcgtgccgtaaccacgttggaaataaaaaaaaagaggtaaaataacaatataataataaaaaaacatcttttagtaaaataaagcggaaaatcaatcggacgttttctctttgggatttctcattcttaaccgaattgactaataactaaagtgaaactaaggctaaaattaactcgcctagtcaagcttgtccataaaaataggtnnttggaagttgtcatttcaatttcttactaagtaaaa

SEQ ID NO: 3336 - DNA, 453 bp, Glycine max
agcttccatcaacatattaattaattatttttataggaagcaaagatatttgtaattctatgtgataattttctatgatatttattctcatatttatattgattagtgttaccattgtgggtgaatatattgatatgttatatattatgtgtatgtatacataaaaaatatattatgtgtgttatattgtgagtataaatatgcaatattcataatcactagttgattgatatttagtggaaaaagttatcaatggtatgttaaaaagaatatttatctattttcatgcatttaatgtgctcttgtattaacaacatcaaggaataacaacttaagagatatttaaaggtttttcttgtataccctgaaatttatatgataaaacatatgacttatattactgctccattccttgaagtgaatggtatatataattttatcaaataattattt

SEQ ID NO: 3337 - DNA, 441 bp, Glycine max
tcatgatgataaatcaagttgattcaagtagttttgatattgacaaagatgatgacaaaaagcccaaagaatgatttcaagattgagtcaacaagttcaagatcaagtttcatgagaagaaatcaagaagattcaagaatcaagagaagtttgatttcaagattcaagagaagatgaattcaagattcaagagaagaaatcaagaagacttcacaagggaagtattgaaaagatttttcaaaaaacaaacatagcacagttttctcttttcaaaagagtttttctcaaaattttctaagttaccagagtttttactctctggtaatcgattaccagtttcttgtaatcgattaccagttgcaaagtttgatttcaaaagttttcaactgaatttgcaacgttccaattgatttcaaaatggtgtaatcgattacaagatat

SEQ ID NO: 3338 - DNA, 262 bp, Glycine max
  unsure (1)..(262): unsure at all n locations
cattcactctgcaaatgttntgcaccgagatcttaaaccaagcaatttacttttgaacgcaaactgtgatcctaagatatgtgactttgggcatgctataacaacctctaagaccgactttatgacagaatatggtgtcactacgtggtacagagcccccgaattgctactgaattgtcagaatatactcaactattgatatttgggcggttggttgcaatttgatggagataaatagaagggagcctttaattcctggtaa

SEQ ID NO: 3339 - DNA, 122 bp, Glycine max
actcattttaaaaccttcatgtggtccctatacactataaaatagtcccacaatcccaagcatacaaaagcatgctcatatgtcattgaggcatttcactgagctctcggcaggcgcatgtt

SEQ ID NO: 3340 - DNA, 572 bp, Glycine max
  unsure (1)..(572): unsure at all n locations
cactctcgccatccccacatacacgaatangcacgataaaaaaaggtacacttcgttacannaaaaagnnanaaaaagggtatgatacctagcactccggaatacaaaaaatangcttatnanattatgtgngacaggagtagaaggagacctgctattagatatgcgtatcacnagacggaangccgaattaaataaaatgtgtcgagatgccatactcctctcctggatacgacaagggaagacataacataaaaacgtcggaatgaacgaatataaaactaatgacaaggtgtacatataatggttatacaatgcataaagccctccaaacacctgcgtgtgggaaaaagtgtgacatgccacaataaaattatatacggagacaactaaaacacaagtatagattacgacaacgaaagacataaaagttactgtacacatcgataacacaaatctgaatatgacaacattgtaacttcactgactacaatgcataggctcttgtgacacacacagaacgttggatgtgccacggatcattcagaacaggtgacacagtacgtttggcg

SEQ ID NO: 3341 - DNA, 437 bp, Glycine max
cggatcttaagcacctgagctgcagcttgtgtgaggaaatttaacacttttcatttccttctttgatctcattcaggttagttatcttcttcaccctttttacacagtcaattaatattaagcgttgatgtttgtgtcttagtgagtatgttgaatgaatcttttagttttatatgcacagttggtgtagcaagtctagatcttgatcgtataggtaattgccaaaggggagttgtgaaaaaaaaattgtttgatttaacctatgcatggaaattacatgcaattaatgttaattggtattgttgttggggcttgaaaaaagttctatgacattttcttgtgttaaaaaagattcatggcaattttggaggtcacatccaattttccattctcaagttaatagactttgtgtacgggattagtttagctttcatata

SEQ ID NO: 3342 - DNA, 462 bp, Glycine max
  unsure (1)..(462): unsure at all n locations
ctttcgattcattctatgcacccgtagtggtccatattgtgtttcgtgcattttgattctcgttntgtttactttttataccccctgttgacgtgcttaagccattttacttaagtcgtttctcgcttaacttaaaaataaaataaatttccaccgaacgtttgaattgtattatccattaactttggttaaaatcaattccgaccgttcggtcgtgccgtaaccacgttggaaatcaaaaagaggtaaaaaataatataataatcaaaaagacatcttttagtaaaataaagcggaaaatcaattggacattttctctttgggatttctcattcttaatcgaattgattaataactaaagtgaaactaaaggctaaaatcaatccacctagtcaagctcgtccacaaaaataggcttttgaagttcgtcatttcattntctcactaagtaaaatggatcat

SEQ ID NO: 3343 - DNA, 268 bp, Glycine max
ttagtaattaatgtaagcaaagctagatattaagtttggataattaaggctaatcaatggcgatctaaatctcatagaattagaaaagggtaattaagtcataagaatgtaaagaggaggtatctttgtaaatgactagacaactagcttaaaattaatattatagtataattagtgggtgactaattaaattgtgtgattatatgatgtagcacaattaaaataagttagagatgaaacaccttaaaaaattacaactcagactaac

SEQ ID NO: 3344 - DNA, 392 bp, Glycine max
  unsure (1)..(392): unsure at all n locations
agcttgcaacanagtgctgcatatggagtntgtaattttatctntaacattctttatcattcaactcaggttagctaagggtttcttaaatcacgtatttatcagtctttattactttatttatttccatatttttctcctttaagcctataattntactcttggaagaaagtatgctaggatttgttatcgatcaatattttgaagtttaattaaacctttaatattgacttgtgtttttattgaaacattaaatctcatatgttatcactgtgctgattggaggaatgactattctattatgtcatatcacacctgataaacatagaatgatggggagcaacaaagcaccataatctataactttgtcattcaattgcccatcatataaa

SEQ ID NO: 3345 - DNA, 461 bp, Glycine max
acactactaaaactaagcttcttataagctgaaccatattatcaatgaacacaagttgatgtttattctacaaattagagtttatctcttttatcttagtgagagtgattctcctacattcttgagtgattcaagaacaccttggctgtatcaaaggactttcacaacctttgtgtgttgccctcgctggaaagagtgattctttccttcctttcatcatcacccttgttctttcataccacaatttcagataatccacctctgcccagaattatcttgtggccataactcccattttacgcactcaaattaagtgattcttgagcctaaattgaatttcagaacgagacctttcacctcgttttggaatcacctcatttggagccctgtagcttcaggtattgccatttctatatttctgtccagccaccacttaacctacgtttaccatcccattcatc

SEQ ID NO: 3346 - DNA, 387 bp, Glycine max
agctttgcccctgaaaccctctgtgtaatatctcggtgtctgatttttaccaaattaaggcaccagagaagaagatcctaatctaaaagacttgatcccaaaaacacaatcaaaaccaatgtaaaaaccaaaaagcgatgtgatagataccaactggtaagggaataaggactgaattttattcaaaagaaatacaccagaaattacaatttacacaggagtttgagtaaaccagttaattcataggtttcccccaagatgttagagagcctggtctctcctttcttgaacacccattaatctctgcctaacccccgtgctgttactccataatttattctgcaataactgcttaaggcagttacatatggtcctaaaaacacacat

SEQ ID NO: 3347 - DNA, 328 bp, Glycine max
ggttcttcttctccgcgaagagccttcgaggttagtctccctaactcttcattgcttttaatatccagtattgattcagcagtggaaccttaggatagtaaccttagggtagtggaaccttagggtaaaagatgagagtagaagacgccggaaaaaatgcggaaagggggcttccggaactttcgaaagatgttccgaaaacatctcggaagaagtgtccttccggaagcaaccaaatgtcttccggaagaactacttcttctggaagtctcccggaacacctcttccggaaactttccggaagaagggttcttccggaagacgtttg

SEQ ID NO: 3348 - DNA, 412 bp, Glycine max
ctgcagctcatgaattaatattctttattctcaacaaccttccttcttatgtaggcaaataacctgccattttacccagggaatattcttgtagtccttgactccccccaaaaaagtttctttgcaatgctaccaatctatgagctacctcttacgaaatcttgaagaaggaaagctgatatattggtaaagccttgaggaccgaattgattatagtcaccttccctgccatggagatattcttctgtgcccacttggataatttggattcacatttactgatcagaggctctcacaccaacctgctggaggggttagccccaacatgaatacccaaatagcagaaggaggtttccagttgcctacaattcagggtttgggcagcctgacttaccaattgccctacctctat

SEQ ID NO: 3349 - DNA, 305 bp, Glycine max
  unsure (1)..(305): unsure at all n locations
agcttgcctgagcaagctgggcgattatcatcttcctcattttngctataaaatggcatgaggggctgagaaaaaaggatgagcaccctaggcaagcatattttacttatgtcttgtggagcgaggcggaacgaaacactaatcttagcctgcatgctttgcgtacgctgcggagatgttgctatgatatataacgcgaatgttcggtggcggtcatcatcgttcattgatcttcaactgtgtagttggcgacttcgcagctttgaatacattctatgcaccctgagggggccatgcgtgctatg

SEQ ID NO: 3350 - DNA, 402 bp, Glycine max
tcctcgtgacttcttcgagaagctgtctcaagatgcctctttgagatagtagatccttatctatccacacccctctattaactaaattaacttccttaaaaataattacggatgaaaataacgcaacaaataatcaaacatcatacataattactaataatatatagatatatatatcagggtgttacaactcgctcaggggattcaatgcctgaggatacagtattggggtcgagcttagtgagatggcctcgcttagcgctattgccattccaaagaaagtttcgggcttaacgagatggttcgctcagcccaatcaccatgaaagctatacagagagactcttgagcatagcgcacacaaatgcttaccgagagaccatgttgcacatagcgagctgac

SEQ ID NO: 3351 - DNA, 580 bp, Glycine max
  unsure (1)..(580): unsure at all n locations
ttatgtattactggttttacgtcattacggataatttcgnttgtcngctttananactcatgttattatagagtgattgatacattgctagacccgtgatctnagtatctacctccatgctgcaagctacaagctgctcaatagttccagattgcttcatggaagggcatacgtccgtatggtggtcagcataggatcacaaaccacatacccttgcgacaggttcagaattcttattcaaggctacctgggttaccaagttgaccaacgcatccaggtatgcttcaagcttcttagtctcacatgatgcagatgggtttgagctaccttatgcactcctctaatgactatggcgtcatttctggcgctataatgctgggaattggaggccatcttctcaatataatctttggctttaacatgagtcatgtattcaagggcttcaccaacggaagtatctatcatacttctctccattatctgagtccttcataaaattattgcacaagaatctgttccaaacctagtggttgggtgcactggccattatttctaaatctctcctagacatattcgcgcg

SEQ ID NO: 3352 - DNA, 440 bp, Glycine max
  unsure (1)..(440): unsure at all n locations
ntntggagtagaaacatgggaccaactcattntatttcattaagaaagtcgtatctagtcaaggtctgagagaccatacaagtttcctagcgatttctaattatgtgggccattaagtctatcatatgctgacaatagcctagaagcccatgaatttcttcgggggcggagtaggtgtccgccatcgccttggccttggctaacaatcggggaagttcttgactcccgttcaaggtaagagcaaaccgatccatccacatggttgcctcttggtgtaaagagtcaatcacccttcctctagcctctttttccgcgtatacttgggcatactcgtccacgatcctatgctcgtgggccgtggctagacctaactcttcttggtacttggcgatgatagctagcatgttggtctccgtctcgcataaacgctgagacaagct

SEQ ID NO: 3353 - DNA, 446 bp, Glycine max
  unsure (1)..(446): unsure at all n locations
agctntactatgcagagaatatccaaggaaattaccttcatctgacttagcatcaaattttcctaagttatcttttccattattcaatacaaaacatttacaaccaaagatatgaagatgagagatgtttggttttctgccattgaccaattcatatggagttttctttaaaatgggtcttattaaagccctatntaaactgtagcatgcagtgttaacggcttcagcccaaaagtattttggaagaggagtatcatttaataaagttctagcaatctcttccaaagatctatttttcctttcaacaacaccattttgttgaggggctcttggtgcagaaaagttatgcttaatcccatgcttatcacaaaataattcaaattcttattttcaaactcacccncatgatcanctctaatagatataatctttagatttttctattt

SEQ ID NO: 3354 - DNA, 438 bp, Glycine max
  unsure (1)..(438): unsure at all n locations
ntctcaagaggcttctntgagaagctacatccttatctattcacccctctattaactaaattaacttccttaaaaataattacggatgaaaataacgcaacaaataatcaaacatcaaacataattactaataatatatagatatatatatcagggtgttacatcctcgccatcagagggctacacgtccttgccttcagaggactacacgtccttaccttcagagggctgccatcctctccatctgagggctgcacgccctcgccattggaggactacacgtcctcaccatcagagggctacacgccttcacctttagaggactacacgtcctcaccattagaggactacacgtcctcgccatcatggtgctacatgtcctcgccttcagaggactacacgtcctcagctccagaggactacacgttctcgccttca

SEQ ID NO: 3355 - DNA, 244 bp, Glycine max
tactcacgcttaagctccttcaactgcacaaggctcttaatatttgaagagtattcttgtggaaccttcacccaacgaagacactgacaaaaacttatcttctttttcttggacaaagtatggcatgctggaggcaagtaaattttcttcccatcagaccttggatgcaactgtgatcatatatgtggcggccctaaattaatgaactggttaataataataatttacataacaaaaccatggt

SEQ ID NO: 3356 - DNA, 216 bp, Glycine max
gcttactatgcaaggaataaccaaagaatttttcttcatctgacttagcatcaaattttcccaagttatcctttccattggttaatacaaagcatttgccaccaaaaacatgtagatgtgagaaatttgggttcctacccttaaacaatattgatggagttttctttaaaataagtcctattaaagccctattcatgatataacatgcagtattaa

SEQ ID NO: 3357 - DNA, 388 bp, Glycine max
  unsure (1)..(388): unsure at all n locations
aacaggatgggtcttggaaggaggaggtgttccggaaggaggaacccaaatcttgtgggttgcaccatcattcttgcaaagttagcattntagagttgaagcatgggctactaaaaagttcagaaaaaattcttaatgttaaaagggaggaaagcgtggaggcacaatcctttgaaatcaagatcaagaaaatcattgagggaattaaagagatcaaacaaatgttacaattgttgatcaagaaaaagggcatcaatgttgagtccacataagaggagaaataacccatgcaagtagtatcaattttgctgccatggtgtgggtaataaagtcacaacaagacagtgatttacgaaaagtctntggagtttctgccaatgggagaata

SEQ ID NO: 3358 - DNA, 88 bp, Glycine max
ttaatcacctgagctacaactttcgatcctattggatgacctttactgttactaagcatatcagataattcgaatggctccgatcgcc

SEQ ID NO: 3359 - DNA, 590 bp, Glycine max
  unsure (1)..(590): unsure at all n locations
acctccactcctctcncagcctcgatacttctgcatatactaattatctacagacggnntatacataatnnnnaaggggntaggaganttgataccctcgacacgcttnancnncgnnntnnannaaanctcaatctagtgcatacaanacacggatgaagatgtctcctatgttctgtatactggtccgatccatttgcttacaaagtttcatggccttacaggtgaagacctccacaaacgctctgaagaatttcatattgtctgctacaccatgaaacccctatatgtccaagaggatcatatatgtctgaaggcttattcctcaatcctgatagggagtggataaggactggctgtactacctagcgcaaatgaccatcactagctgggatgaccttaagataggtgttctgagaaatacatttcctgctttcaggaccactgccatcaagaaggatatctcaagtcttatacaacttagtggagaggagctatatgaacactgcgagagatttaacacactatgtgtcagttggccttcccatcagaatacgatcagcttcttgcccacattttatgacggactc

SEQ ID NO: 3360 - DNA, 548 bp, Glycine max
tcgaacggaatccgattttaggtgtcaagcgtatcaatactcaacataaacaatgaatgatctgctgcaacatctgaaccggatcttcagcgccgcagcatcatcgtttgctgtcctctctttgtgctcataataccccacaaacatcaccgtcttattacttacctgtgtgcaatctctcactacctgtaagaactaccgttagattgtggcgtggatcccccctctctgtacctgctcaaaatgagaatcaaacgtaggccacaacatagatgaagtgctttaagatcactgtctgagagaacatgtggaaggtttcagtttgagcgcatctaccaatctctattagtccttttggaataatcacgacacagctatctctatgatggtggccgtagcgtgcactagaccttatccgtttagcattctaagatatctaaagactcattccccttcattagcccaatattgctgcgtggtatataaagaacggtgccaaacagctccctcccatcgtttatgaatagatcacgcggttagtataggcc

SEQ ID NO: 3361 - DNA, 608 bp, Glycine max
  unsure (1)..(608): unsure at all n locations
cacattagacactctcactttagatcttctgtctctcactagttcgtaaattttctccnttcaagtnnnaacggaantttgagacctgctgacntccatagaaccnacannnnnnnananaaanaacaanctatatgcgaagccgctcttggtgcccatatatataccattaatcttatcccctcttattactgagctattctcgaatctctctagctttctaatatgtacatcgcttcaacaatgatagtcttgtcccgcctcattaggtttcatgcaaaagaagaaaatcatatatcacaagcaaaacagtggagagaaattgtcatggtctactattacttccaaccgtgaaggaataacatactataaccagtcatgtttcattctctagaatgtgaaaactctgcatatttatggaacacatggggtatggaggccagtaagcatgtgaataccacacgtcattttctccaattcaagggcttgataaactgctctaagaaaaaagcatacatctggaatattgcttggtctgcagctgttttgagcattagtgagaacaaaactttctgttaccgtgagttgacatgtcaactggtaacccg

SEQ ID NO: 3362 - DNA, 419 bp, Glycine max
  unsure (1)..(419): unsure at all n locations
agcttggaaggaaacaccactgtcattgtgatcaatggatccatttggaanaataaaacctaatgtggagttcacaactgtctgactgcttgtctctcccaagaataccatagttttttgtaagacttgggttgatactgaaacttgtgctttcttacaaggttaggttatgccatatatatagatgagttttaatattagtgctgcattttttaaagattgaaaatacgcatgcacatgctttctgtatgtgttgtcaactacatgaatgacatgacatgctttagcttgcatcagatctgcatgtgtagtcatgttgtgcacggtccctttcacgtgtttatgttaatgcagacaacaatttatcaaacacgatttttcacaatgtgtagtcaagtcagacaacgatatatcataca

SEQ ID NO: 3363 - DNA, 423 bp, Glycine max
  unsure (1)..(423): unsure at all n locations
acactataaaactaagcntttaatgatgaagctcttgataatcctgttgtggaatatcttgttgaaaatgaaccgatttcagcattggagacatttgctccagcaattgaagcaatgaaaagcacaagctgtgattccaaggaagatcagacaaaattttgtgccaatgagaagcctacggtgcgttttaagattgggattaaaaacaaattattaggaaaatccattggtttgatcccacaaaaagaggagcatgaaaagactttgccatggtttgcaatggaagatgagaaggatgacatataaagaatggctgagagaattctaagggaatctttggaaaacccagatcagcttgttcagatgtaaattagattgctttaattagaatctgtatacttgatcacgagaatgtcaggatag

SEQ ID NO: 3364 - DNA, 446 bp, Glycine max
  unsure (1)..(446): unsure at all n locations
caactggtttagagtcctgcatcagtgcaacccttattccaacatcaaaagcatcacattcaatttcaaaagctntatcaaaattaggcaaacaaggcaaaggtgcattggtcaacttatctttcaataaattaaaagctttctcatgcactcagtccacttgaacaccagatcctttttgacaagttcatttaaaggtgtagcaagtgaactaaagttcttcacaaatattctataaaaacttgttaaaccatgaaaacttacctcattagcattcttaggtactggccattccctaatttcctttaccttttcttcatccatacttattccttttgagctaatgacaaaacccaagaacaaaacagattcattgcaaagaacactttntaagattgacatantaattattttctctcaaaacataaaaacaacatgttcttttg

SEQ ID NO: 3365 - DNA, 436 bp, Glycine max
  unsure (1)..(436): unsure at all n locations
atcatcatggactaacaaatccaagcaaaacagagcaaaggcagaatactctgcccaaaacacaactcaaaatcacaacttttcacatacaaataccctagtaacatttccttcgttccagttcattaatcgttggatcgactcgaaacgtttactggaagtctctaatacataagtctacattttgaccgttgggatctgctagcaaatgtccagaaccccatatgtactacccttttcacaaccatccatacacaagcatttttctgcacttatacaaaattctgttgcacatttcaacagcaaaattctgcataaagtgcagatttcgaaaatcactctttccctcatccaatnttgcccaaattaatcctacaagtcccacatcatgtatcaatcatgtctaaaccaaggacaagcttcagactacagcaac

SEQ ID NO: 3366 - DNA, 437 bp, Glycine max
agcttctcggctcatactgagaatacctctagttcaacacccgtgcaacctaaggcacccacccagagggaagctccccaagttccaactccgaacacgactcgaccggccggtaattccaacacgacaaggaacttccctccgaggccatttccagaattcaccccactcccaatgacgtacgaagatcttctgccatccctcatcgccaatcatttggccgtggtaactcccgggagggtcctcgaaccccctttcccgaagtggtatgaccctaacgcaacttgcaagtaccatgggggtgtcccggtgcattccgtcgaaaaatgcttggcccttaaatacaagggccaacatttaatggatgctggatggctgactttccaagaggatcggcccaatgtgagaaccaacccgctcgccaatcatggaggggg

SEQ ID NO: 3367 - DNA, 461 bp, Glycine max
tgtctcagcgtttatgcgagacggagaccaacatgctagctatcatcgccaagtaccaagaagagttaggtctagccacggcccacgagcatagaatcgcggatgagtatgctcaagtgtatgcggaaaaagaggctagaggaagggtgatcgactctttacaccaagaggcaaccatgtggatggatcggtttgctcttactttgaacgggagtcaagaacttccccgattgttagccaaggccaaggcgatggcagacacctactccgcccccgaagagattcatgggcttctcggctattgtcagcatatgatagacttaatggcccacataattagaaatcgttaggaaacttgtatggtctctcagaccttgactagatacgacttcctttttgaaataaaatgagttggtcccatgtttctactccaaaaagcttgtgcaaatcaagtcactccc

SEQ ID NO: 3368 - DNA, 402 bp, Glycine max
  unsure (1)..(402): unsure at all n locations
agcttctaaggaagctatcaagtctataaatagaagcatgtgtaacacttgttggaactttgatgaatgaaagtcttatgagatacacttcanagttccacttctctccctcttttattccttcaatttcgtgctcaccccttttctctttcttttcctccattaaagcatcctcttcaagcttcttatccaaggcaatttttggtggtgaagctccttcttccatggcttattccctagtggatggtgcctcccctctcctattctccttttccttccgctgcatctccaaggtgtaaaatcaccattgaaggaccccattgaagctcaaagatccagcctccatagaagccccacaagcaagcttccatcaagtgggattagagcacaagagcttcaagt

SEQ ID NO: 3369 - DNA, 458 bp, Glycine max
  unsure (1)..(458): unsure at all n locations
cttgtgtaatcgattacacttatttggtaatggattaccagtgactatttctgtaaaaatcaaaaggtgtaactcttcaaaaaggttctgactttttcaaatgagttttaagtttttctaaaagttataactcttcaaaaaggatttgactttttcaaatgggttttaagtttttctaaaagttataactcttctaaatgatcttcttgaccaaacatggagagtctataaaagcaagggtttgttttgcatttcaacaatcttgaatacttttacacttattcaacaatcctttacaagccttgactctctttgaatttcttcttcttctttgtaccaaaaagctttctgaagttttctggttttccaaaccttgaaaacttgtgctattcatcttttcattctcttctccatttgccaaanagaattcaccaaggactaaccgcctgaattctttt

SEQ ID NO: 3370 - DNA, 343 bp, Glycine max
  unsure (1)..(343): unsure at all n locations
agcttattattaatggtaatggtaatattaatatatatatatatatatatatatatatatatattaaattataccaagataactctgatgtttactacattcacgaatgaaatcaagaataaaatatctagaggcaaaaaaatattacatggatgagtaaattaattataactaacttatactcttatacataaaaaatgaanaaagggattattgaccctatcaaccgaatgaactaataatattaatgtctcttttttaaagaacgaagaattccttgaattcatatactttaacaatactattgcaaaaaaaaattcatacccacacacgaaaatgatat

SEQ ID NO: 3371 - DNA, 459 bp, Glycine max
cttgattcaagaacagttacttttgcacccattatggcttctgcattctattctatgtgaattttaaggaggtgttaaaaaactattttggtataaaaaaaatcttttaaactttaaaagactttgtaagaatgcagggacttttaagattttttagaagatttttatgattatggttttatagttcaaattcaaatgaatttataaaatatgaattcatatgatttgagatgacattatgaatttttaggattttaaaagatttcataaattcttaaaaatatttaaaattattgataaaaatatatgaaatttgtctacctaacactttaaataaaactcatcttatacaagaaaccatacatatgttacacaacaaattaattttccttagtatatttacaagcacaataggttgatttttcttcatcatcaattatgttaattgtataaaaacta

SEQ ID NO: 3372 - DNA, 203 bp, Glycine max
ggtgaacctacttgtcatcatttctccctttgaatggctcagcaacagattggatgcctacataagattgtacataatatatccgtgacatttacgcctagttatgggaccattgccagccttaaacatatcaatcttccaagcctacaactgagtgatgttatgaggaacgatgactatccttctatgaagacagttttccg

SEQ ID NO: 3373 - DNA, 243 bp, Glycine max
aatagtagctcctagcaaattcaaaccataataactctttactcggatgtccgattgtgttccgtagtatatcgtgacgctccaaattgaaaacataaggtctgagcaaattcaaacgtcaataagcttttactcagatgtcccattgagtcccgtaatatatcgagaatgctccaaattgataatagtaggtccttccaaatttaaccataataacgttttactcggatgttcgattgagtc

SEQ ID NO: 3374 - DNA, 263 bp, Glycine max
  unsure (1)..(263): unsure at all n locations
agcttccattgttcaattntgagcttctcgatatatgatgcgcctgaatcggacatcctgagtgaaaagttatgaccatttcaatttctcgagagcttccgttgctcaatttcgagcgtctcgatatgtgatgctcctgaatcggacctccgagtgataacttatgaccatttgaatttctcgagagcttccgttgttcaatttctaacgtctcaatatttgatgtgcctgaatcagacatctgagggaaaagctatgacaat

SEQ ID NO: 3375 - DNA, 405 bp, Glycine max
  unsure (1)..(405): unsure at all n locations
ntcgagaatntaaaattgtcataactnttcactcggatgtccgattcaagcacatcacatatggagacgcccgaaattgaacaacggaagctctcgagaaattgaaatggtcataacttttcactcggatgtccgattcaggcacatcacatatcgagacgctcaaaattgaacaacggaagctctcgagaaattcaaatggtcataacttatcactcggatgtccgattcaggcgcatcatatatcgagacgctcgaaattgaacaacggaagctcttgagaaattcaaatgatcataacttttcactcggatgtccgattcaggcgcatcatatatcgagacgctcaaaattgaacaacggaagctctcgagagatcaaatggtcataacttttcactcggat

SEQ ID NO: 3376 - DNA, 410 bp, Glycine max
  unsure (1)..(410): unsure at all n locations
agcttctccaaatggcatagttatttccaatttcctaaaaatatctaggaatctcgccaggtggcattccttatctttcttggaaggtaccaaagggtatggcacttcctttccctcatcagaagctgtttctttactttttttcacttgctttttcactcttactcttttcttcttcttttttttcctccctctatttcttgttcattatcttttatttcttcccttccaacaattattggtttttctctccactgacttctctcatctcttacctcattcttctttttatcagcagtgtccttcaaagcaacttgctccttcaaagaaacaacatcctcatcctcagctggcataagcttcctgcttcttgttacaataactntgcactcttctttgggatgtttctc

SEQ ID NO: 3377 - DNA, 308 bp, Glycine max
  unsure (1)..(308): unsure at all n locations
ggatcttaagtcacctgagctgcagctgaaaggaactagacttatgatcttctgttagngttatgcctctgtattatagggaacagtaagtttgacaatgccatgctagacttatgagcttctattaatggtatgcctttggctatttttaattctatatctcttggtcctttgcagtcaactgatgtggtaattcatttatctaatagaagtgttgcctatcctgctggtttcatagaggatgtcttanttagaggtggtgacctgatttccctgttgattttatattttgaatatggaggacggat

SEQ ID NO: 3378 - DNA, 447 bp, Glycine max
tcgcacttgataatggaggcacatgaacagcgctaggcaatgacattcatggtgctccaaacaaaggtggagtatggaggattgccttgagggtccgcaattaggcaatcatgaaactcatctccaaactcgaaagtggagaacacatgaacagccctaagcaataacattcacgtggctacgaaataggatgagaatggaggatcgccttgagggtcctctcttattcaatcatggaacacagctccaaactcaaaagtggagaacacatgaacagccctaagcaataacattcatgtggctccggaaaaggacgagaatggaggattgccttgagggtcctctcttaggcaatcatggaatacagctccaaactcgaaaatggagaacatgtgaatgacaacgcaattcactcacgtggctccagaaaaggatgagaatggagga

SEQ ID NO: 3379 - DNA, 358 bp, Glycine max
agcttgacacagcattttaactttcaactattgctttagctacaatgctttgtcaaccagctcgggcatatgttcacgctagataaaattccatataaccttgtgtttggattatgaatttcacaatttcaacgaattcgaattgcttttgattctaattttcctcattcttcaaatgctattgttggataaatcaattcaaatttaatctcttccattctaaattctttgtttggataggtgaacttaattttctccatatgcagaattttaattctatattctaaatacatgaaattttaatatctaactttatagaaataaacacaatctaattttgaaatattaattagaaaat

SEQ ID NO: 3380 - DNA, 348 bp, Glycine max
  unsure (1)..(348): unsure at all n locations
gagtgattcaagaacaccctggctgtatcaaaggactttcacaacctttgtgtgttgccctcgctggaaagagtgattctttccttcctttcatcttcacccttgttctttcaaaccacaattccagaaaattcacctctgcccagaattatctcgtggccataactcccattttacgcactcaaattaagtgattcttgagcctaaattgaatttcaaaacgagacctttcacctcgttttggaatcacctcatttggagccttgtagcttcagttattgccatntctatatttctgtccagccaccacttaacctacattttaccatcccattcatccattttatg

SEQ ID NO: 3381 - DNA, 323 bp, Glycine max
agctagtccaatcgatttagagaaatgccttcataagcatatctgcatattgatcaattgcacggatcatgaatgacacgattatgagcaagagaaatattgctcaaattatcaccaaaaattctaggaatagtgtgagaaactttcagcttaaacaacaaggtctgaatttgttggacctctaatgtatctggagcaaggttccagttcttatgcttcagtgctagaacgagcaacaacagattgctttttggaccaccaagagaccatgctgggtcctatatagaaaaaagcattgaatgtagaccccctgttctttggat

SEQ ID NO: 3382 - DNA, 172 bp, Glycine max
agtggtggaactgtaaagagttcaatatgtatcagaacatgcagctaatattttatcaatggaagctgcttaaagggaagtataactggaagctgacactgttcctaaagacatggaccctacaaaaagggaagctcttgaggaggccatgctttagttagttattgaagca

SEQ ID NO: 3383 - DNA, 390 bp, Glycine max
  unsure (1)..(390): unsure at all n locations
tcaatctttaatggagaaggttaccactactggaaaacccgaatgccaatttttatcgaggcaatatatctaaatatctgggaagccattgaaatagggccttatatacccaccacagtagaaagagtttcaatagatggtagttcatcaagtgaaagcataaccatagaaaaacctaaagatagatggtctgaagaggatagaaaacgagtaccatacaacctaaaagccaaaaacataataacatctgccctaggaatggatgaatatntcagagtttcaaattgcaagagtgctaaagaaatgtgggacactcttcgataacacatgaaggaactacagatgttaaaagatctangatgaatgcactaactcatgagtatgaattat

SEQ ID NO: 3384 - DNA, 446 bp, Glycine max
ggtagactggccagacatgatacatgtcaaggtttggtttggttcaaggattaaagggatgccccacattatttccacgacacaaatgcaaaaatgatgatttgtgaaatttatgcaaaactggtcatgcatgcacctatgtggacgctcaagtgtcaaatttttatggtcatgtgatgctagggctcaggattcatttcctctattttaaatcaacccaatgtttccaaaatatgttcttttatcaatttgtgcattcatccgagtccatttcgggcgtccggggaaatttcacagcattcacccttcaggtgtagacacattttccaaaaattgggtatgatcaatgaattttttttcaaagaaaagttggaatcatctcttttcaaagcatgtcggtttttagctagacaacttatttccttttcccatctttattctcactt

SEQ ID NO: 3385 - DNA, 417 bp, Glycine max
agcttgcggactataccttcgaccgaacactttcgtgtttctgtctaggcccggattcaaggcgggctacagcaccggctccacttccctaactgtactggaggcggttgcggtggctttatcctctatggttttctggagttttaacatgacctccgagatggaagccatttgatcttttaaggccgatagatcggccttcatctattcctgcacgccctcttcattatccatttttctggatcgagtgttataggggtgccttggtgttttcttagttatgatgaaattcctaaagaaataaacaacggtgagtatgccaccaaaacatgagtatgcaaatggatgatcggagcacttggatccaccccaagatttttagataacttaatgagtccagaactttctcatttatac

SEQ ID NO: 3386 - DNA, 470 bp, Glycine max
  unsure (1)..(470): unsure at all n locations
ctcagcttatgacgttgaatccagatggattcaagttgttttgatgataacaaagatgatgacaaaaagtccaagagaatgatttcaagattgagtcaagaacaattcaagaattaagagaaatttgatttcaagattcaagaaaagatgaattcaagtttcaagagaagaaatcaagaagacttcacaagggaagtattgaaaatatttttcaaaaaacaaacatagcacaattttgtttttcaaaagagttttctcaaaattttctaagttaccagagtttttactctctggtaatcgattaccaggttcctgtaatcaattaccagtggcaaaattttggtttcaaaagctntcaactgaatttacaacgttctaattaattccaaaatggtgtaatcgattacaatatattggtaatcgattaccagtgtgtttgaacgttgaaattcaaattcaattgtgaagag

SEQ ID NO: 3387 - DNA, 437 bp, Glycine max
agcttcatacaattaatataaaacctatattctaatgtcacatcctatcagagcgttgtgttcccgtgtcctctatcatgagattcttcatagtcattcacctattcatctgctcccccgaacacaaagttcaagatcatcacaggatccaaacatatacaacacacaaggagtgagttatcacattcctaactaatggagaaaaacaagataacatgtaggtataaatatcatataaacaaaatacaacttacttaagcatcactcacgttatttcgccactttgtcgcacaacattacatggcaacactacacatttaattcatcttcacgacattcacgtactcaaggatcaaaacacaatatcatcaagtcaatcaatattgaacaatacacaagcattatgcaacatatacactaagactcattcatatatg

SEQ ID NO: 3388 - DNA, 438 bp, Glycine max
gacgattaaggatcttatgattccaattgctcacatgtgttatcatatctttgtatcaactgtcttctctaaccaaatggctgtcaaaattatgcaaatcctgattctagaggataccaataaagatgtcataatttggagtttatcgaacgatggtttctactcagctaagtctgcttacacactaactatggattgatttggcaatcaaaaacaatatcatgtggaaaggaactggatggtaatttggaggatgaacgcccctaataaaataaaggtattttttgtgaagagcatgcccctctatatgcttttttctgcaataggctatgataaaatctttccactattttttacctgtccaacacgtatatcagtgtgggatagctggtctatgtcactgtatagaaccatatctaacattggttgaatcttttc

SEQ ID NO: 3389 - DNA, 389 bp, Glycine max
  unsure (1)..(389): unsure at all n locations
agctntgagcaacttcaaacgacaataactttttactctgatgtctgattgagtggccgaatatatcgagacgctcgaaattgaataccgaagctctgagcaaattcaaacgacaataactttttattctgatgtctgattgagtcccgtaatatatcgaaacgctcgaaattgaatgttgaagctctgagcatattcaaacgacaataacgttttactcggatgtctgattgagtcccgtaatatatcgagacgctcgaaatggaataccgatgctctgagcatatacaaacgacaataactntttactcggatgtctgattgagtcccggattatatcgagacgctcgaaattgaatgttgaagctctgagcacattcaaacgacaa

SEQ ID NO: 3390 - DNA, 309 bp, Glycine max
  unsure (1)..(309): unsure at all n locations
tcgagcgtntgacatattacgggacttattcatacattngagtaaaaagttattgttgtttgaatttgctcagagcttnggtgttnaatttcgagcatctcgacatattacgggactcaatcatacatccgagtaacaagatattgtcgtttgaatttggtcagagtttcgataatcaatttcgagcgtctcgatatattacgggactcaatcagacatccgagtaaaacgttattgtccgttgaatatgctcatagcttcngtcttcaatttcgagcgtctctacatattacgggactcaatcagaca

SEQ ID NO: 3391 - DNA, 212 bp, Glycine max
  unsure (1)..(212): unsure at all n locations
caccagaggcctgcagcttgcttctaggcggtacgcttacaccgagcttgtggtggggcgagcctctgatggatctgggacagaagtgatgggggagacctgcttactcattgncatatgtccccgcacttgctatgtggtattttaagtaatagatattaaggccgcctctagctgcctgtggggaagacctttgattcatgccctgggag

SEQ ID NO: 3392 - DNA, 439 bp, Glycine max
gagaaaccatataaactaaggtagttcctaaacaaatatcaattgaggaagcttcgccaagtatccccattgaaaaacctttattcaaacctttcaaagttagtgaaaaggctaaacgaaaaattagggaacttagaaaaactaaatccttaattgaaggcgtaggtgacaatcatagtgaattactaaacaagattggtagtttacttaaggtcattccagatactccccaagcctcggaaaatacttccaaaatggtaacaagaagtacctccaaattaattaatattattaatgaagatagtgaccaaaactcagataacacaactgagataggatcagtgtcagaaaagaatataaatgcaattaattccaaacactggataacaccctccaagttatattatcaacgtccgactgcccctgaccttctattaga

SEQ ID NO: 3393 - DNA, 171 bp, Glycine max
atctgaattgaacttgcattgctaattgaggaagagaagccgccactgatcttattaaaacttatatcaaggtaagccatttgttggttcctagagaattggttcattgaatgcgaccatatggtatgagagaggtgcatttcatataaccatgaactcgctacatgcaac

SEQ ID NO: 3394 - DNA, 430 bp, Glycine max
agtctcacgattgtcatgtgctcatgcatcaattgttagccgtggctatacgagacatcttgccaaaacaaagtcagattaacgataactcgcctgtgctttttcttccatgctatatgtagcaaagtcattgatccagtaatgtttgatgagttggaaaatgaggccgcaattatactgtgccagttggagatgtattttccccctgctttctttgacatcatgattcacttgattgtgcatctggtcagagaaatcaaatgttgtggtcctgtttatctacggtggatgtacccggttgagcaatacatgaagatcttaaaagggtatacaaagaatctatatcgtccagaagcatctattgttgagaggtacattgcagaagaagccattgaattttgtttagaatacttagagaaggctaaaccta

SEQ ID NO: 3395 - DNA, 392 bp, Glycine max
  unsure (1)..(392): unsure at all n locations
agcttaanaaggcactctatgggtttaagcttgcccctagagctaggaataaaaggatngatgcctttttggttcagcaatactntagcaagtgctatattgngcatggagtatatgtaagattgcaaaatggaggattggatcaagtaataatatgcctctatgttgatgatctattggttattgggaacaatcttaaggagattgatgatttcaaatctgacatgatgtttgaatntgaaatgatagacttgggaagactcagttatttcttaggtatagagtttacaaatgcttcaaccagaactatcttgcaccaaaagaagtatgcattagaaatattgaaaagattcaatatgactaattgcaacttagttgtgacaccaatggat

SEQ ID NO: 3396 - DNA, 404 bp, Glycine max
accttatgatattttagatctacgtagatgacaaaatcttttgagcaacttcagaaaggacgtgcaagtatatgagacaatgaagtatgatgggtgagctaaagattcttcctaagacttcaaatcattcagaaagatgatggaattttcatccatcaagagaaatataaaaaggaccttctaataagaaggggttggtatacggaccaattaggcctatttaagcctcagcctatgaagcccccaatttagatggaccggataagtctggtccacaaaataaatggactttttttaagttctatatttggcccacaaaagttcacaaacaaaagaatcgatctttagacctaaatattatattgaaagaaaatatattcttctataatatttttaaaaaagtg

SEQ ID NO: 3397 - DNA, 263 bp, Glycine max
agcttacacatacattcactagtcttacacatactcaacatgtgtcatgatcagtccataggtccgatcaagcattctcagcatgatgcatgcacctgacctcaactttcaaatgcagtgtggtaccatccccaagaaaatacgcctaagcgtgtccacacgacactctcattttcatacactatatacaacgaatgagacatgggctccatcaatgctctgaccgcgaataattaatgattctaagccatccccttccagag

SEQ ID NO: 3398 - DNA, 305 bp, Glycine max
ggttccatgtcaatgaagaactaccctgtggcgcttacgagtacataacttgacacaccacattatgggtttgccaggtcactttgactaagtaagatcatagggagaccactcttggtcactacgttttgcgagaatgctccaaccatatgggatcagcatatgcttaaaggagcactgccacccggtgacccccgagggccacactccgagaagtacgactggtctcttcctactgattcaggttctaccgctataatctttttatcacacagacgctgctcgtgagttatacagtacccatg

SEQ ID NO: 3399 - DNA, 457 bp, Glycine max
agcttcaggctgttcaattgctccatattgctgcacagaagggcaaaggtttgtatggtggtcggcagaggagcataaatcacagagtcttgcgacatgtacagatttttgattcatggccagttgggttaccaggttaaccaaggcgtctagtttaccttcaagcttcttaatttcagatgatgaaaatgagtttgtagctacctgatgcactcctccaatgactatagcatcatttctggcgctaaactattgggagttggaagccatcttctcaattaaattcctggcttcagcaggggtcatgtctccaagggctccaccactagcagcatcaatcatacttctctccatattattgagtccttcataaaaatattggagaagaagctgctcagaaatctggtggtgagggcaactgggtgcatagtttttaaatctctccgagtattcatat

SEQ ID NO: 3400 - DNA, 449 bp, Glycine max
gtgcccttaatattgaagcaatatttgacattcccatattgtattccctgacacttcctttaccttgatacttcatggaaatcaacttctgacggagagtatatgtactctgccttatcacttttttcaaagtgcttttcacttacagcaaggaattctttggcactagttatatcatctgaaatagtgcccctaaagacctcaggaatgccactcttaatgatcataagactcatgcaatttgagtgatcccacttctcatgaagtttcctatgtttagaggtactggaatccataggagaagggggtttctcaatccttaatgtaaggtctagatccatgcatgcaagaacaatttgcatgttctctatgcagtccttaaaatttgtaccattaagaattggaatcgaattcagattagcagatatagaagctacaactgataagat

SEQ ID NO: 3401 - DNA, 413 bp, Glycine max
  unsure (1)..(413): unsure at all n locations
agctnntaattgactgagaacaagaaagatttaactgtaggtcattttatcaatcagattaactaaaagcataagttaataagtatgggccaatgaatggttattataaatatataaccttaatacccataaaccaaagctacaataaaaactgataatgtacttacacagttacacttccctagcatgaataatatcctaagttttttagaatttatttaagttgctccagtgccatgagaccatgccaaaagaaatccaattaatataacaatgttagaaactaaatactcatgacaggaatgcttacatgtgactaaaataaaattaaacaaaatacaaatatatatctttttaattaatggagatcaatatagaacaaacatatagtagtgatgatcatagcaatcaaa

SEQ ID NO: 3402 - DNA, 355 bp, Glycine max
acatccacaatgcgcgcataaacccaccatccgctgtagcccacctgcaactgagctcacgtactcccacgtagcccatatcctcgtttctctcaacaccgggtccccatcaatcctcccaagcttccccaacatcaaagtaatacaacattcaaatagcacaaactatcacagccaagaaaacagagcaaaggcagaaaactctgccaaaacaccaaccaaaatcacagctgttctcacttaaagaccccagtaacaattgcttcgttccaattcgttaaccgttggatcgactccaaatttttactggaagtctctagtacataagcctacattttgaccgttgggatctact

SEQ ID NO: 3403 - DNA, 369 bp, Glycine max
  unsure (1)..(369): unsure at all n locations
agctntgtggcaagccagtggttggaggacattgctggatggtgaagttgatttgtgggattcataatcatgaatttgccaagtcattagttggacatccatatgtcgagcgattgagtaaagctgaaaagacacttattgctgatatgacgaagtcaatggtcaaaccaagaanacatttgctgactctgaaggagcacaatgacaatagttgtacgaccatcaaacaaatatacaatgcaagaagtgcataccgtttttccataagaggaagggatactgaaatgcaacacctaatgaagcttcttgaacgggatcagtatattcattggcacagattatatgatgaagacgtggttcatgatattt

SEQ ID NO: 3404 - DNA, 385 bp, Glycine max
  unsure (1)..(385): unsure at all n locations
caagaaacacacacacacttctttcctagttgatcactcctataaatgctcccnctttgttttagaatttatgcttatcttaaaaataaattgattactcatgggagttcttgatgtaaccctatatctctcccccgttggcatcaacaaaaagccaaagtgcgtatcaaacttaaagaatgcaaatatatcttaaacattcatacaacattcatacaaaatatcaaccacatcatgaagtaaaaaccatgaagcaataatcataaatagattaacttataaaatccacatagtcaaataacatactcgttcaaccaaaccattcatataaggaaataataaattgttcaaataccatagtaatatagccaaaatacaaggctga

SEQ ID NO: 3405 - DNA, 354 bp, Glycine max
agcttgacatgcaggttacatggtgttagttatcttattctatgcattgcagataacagccaaagacaacccacttaatactcttagatgtttgtcccaagatcaccaccaagatgttttccattgcagctcaatggaggacgtaggtattccataaaagtaacagatatataatatttttcattatcacttttagactttgtggggaaataaaagaacaattatagcacaagaagaaagatttactcaggactgacagagtatgagacttagaccaacaatagctgaaaatagaagttatagattacatgaaagtcaaatttcattaccctaacaattgatgattgagcaatt

SEQ ID NO: 3406 - DNA, 331 bp, Glycine max
ctaagctatacaaaaattgttttaatgtctcagaatttgatttggctcataaacgaaaatcatgatatttctgccttaagattttattatacgcattagcctctaatttgaaaccgtcacaaggtgccggccccattgctatgtatacgtcggttctttctgactccattttacacaccaaaacaaagtcctttcctctatttctaaaattcttgctcggctcctagatttgacttttcaccttgaccaattctgtagtctcaacaagtctaagaggttcatgcagtatcctaagggcaaaaacatcaaaaagggtcatttttacatttta

SEQ ID NO: 3407 - DNA, 98 bp, Glycine max
tccatcggtggggagataagctgcaaatgtaacacaagtcttgcatctgtaaaagttgcttggagtcatactattatgctgggctgccatgtcagctt

SEQ ID NO: 3408 - DNA, 303 bp, Glycine max
  unsure (1)..(303): unsure at all n locations
agcttatagtggtgattcgngttatgagctgaatgaagtggcagctgcaaagggatgtctngggcatttccctaggggagaaatgatgggaattataaagaaattcattaacttagatgcgggaactgattaactaaggaagttaggagctgttatgagactttntcttttctcactctgaaatcaaagtgatttcaatttctgggtacaacaaatcaaattntgaacttttgtactaaatgtagaataaaaagctttgttctcaaaataacaacgtacactcaactgaaataaatttctcag

SEQ ID NO: 3409 - DNA, 457 bp, Glycine max
cttgcattgcttggcagaattgcgaacaaggagctaagagattctagcccactggttcttaccatatttcataacaatcgcttttaggatttcatcttcggtgtttttccaaacattgccctttatcataatcctcatcttcacttcaactacagtcaacaaccaaacaattcaaacaaagattattagatgtgaaaaataagggaaaagaaaaataatgagacatcaggccttatgttagggagaataaaaaaccacactcttgcaattaggttttgaagtaacgtattatgcgataaggaagaagaatgatccattcaagtgagcgagagtccaaagcgagcttcatcgtgtgaggcatgaaccagagtccatagcactgttgactttgtcggagccatggcagatccacaccgaaccaccatgagtggtatgtgtccaacacttcagaatccat

SEQ ID NO: 3410 - DNA, 220 bp, Glycine max
gcgtctcaatatattattggcctgaatcaaacatccgaatcaaaggttatggctgcttaaatatgccatgtgcttcaatgatcaattgtgagcatctcgatatattatgcaactgaattgggcatctgagtgaaaagttatgccctatgagttagccgagagctctcgttgttaatttcaagcgtctcgcatattattggccagaatacgacatctgagc

SEQ ID NO: 3411 - DNA, 280 bp, Glycine max
  unsure (1)..(280): unsure at all n locations
ctcagcttaacctaagagacggaccatccagtgttgagaatatctcgttatgcccacaaggtngactcgcctagagagtataacgtatgtgccactttcactgtgtgatgatctatctctttttgaagcagatggatgggccttggatttgaagacatatccttttattaacgcgggagtgatgaggtgatatgaatactcttggcacacaggctgacttacgatcagttatgattataccttgacggaatatgcggatactgattaacgaaaggatggt

SEQ ID NO: 3412 - DNA, 356 bp, Glycine max
  unsure (1)..(356): unsure at all n locations
gcttgcagactatacctccgaccaaacactgtcgtgtttctatctcggcccggatttaaggcgggctgcagcaccggctccgcttccctaactgtactggaggcggntgtcgtggctttatcctctatagttttctggagttttaacatgacctccgagatggaagccatttgatcttttaaggccgatagatcagccttcatctgttcctgcacgccctcnttcattatccattttctggatcgagtgctataggggtgcgcttgtgtctcttagttatgatgaaattcctaaagaaataaacaacggtgagtatgccaccaaaacatgaatatgcaaatgaatgatcggagcac

SEQ ID NO: 3413 - DNA, 445 bp, Glycine max
gtgtgagtggattagaatgtgtcttatgaatagatttgcaacctttagagacaagttgaaaaatttcaaatgtgaggtgatgcctaagcccttaaaaagattggactggaaggtaatgccttgcagacatgcagttgccatataattcaaaaattttaaggttgtggattatgtgaataattattattcaagggtaacatatggtgtttgttatggccataaggtgacatcaatcaatggtatggatatgtggccacctatagagtttgaagacattcgaccaccaaaatacataaagggtcttagtagaccaaagaaattgagaaagagagagcctgatgaggaccctaacaagactagactaagaagggacctagttccatataaatgcaccagatgtcgggcaacgggtcataattcgaggaggtgtccattgctacctcta

SEQ ID NO: 3414 - DNA, 388 bp, Glycine max
  unsure (1)..(388): unsure at all n locations
nnagctttatttaatttgctaattaagagcatttatgttagaaaccacaaacagaaataaggaaaaatagtagtgagcagcaaacactactgagaaatttgtgtattatgaagcataaaggaaaatacagagggatcgtaatccctactgcccagagcaaagctccttcagaggcacaaatgctctcttcacattccagtttattaattcctaatcttaattaatggaattacattacaacctgttggagtataagttgtaaatgtaacagtatcttgcatctgtaatagttgctaggagtcagactattatgctgggctgccatgtcagtttagtgatttgctaagttagttaggtttctaactaattggtctagagatatatatat

SEQ ID NO: 3415 - DNA, 253 bp, Glycine max
ctgcagcatgcaagctaaaagcctatcatgtccatgctgtatatcctaaaccatggccaactcctgattatgcagagcttgcaagatgtggccttgcaacgaccagttatgagcatggaggaatttctgcataaggatgcctagccaggagtgcagccttcttctttgggagggggagaggtctctgcaacccaggatccttagacggacctagaggattgatgagaatgctgaagttggcctaaaacaggct

SEQ ID NO: 3416 - DNA, 437 bp, Glycine max
tctacttatgtggcagggcgggtttccttccctttcttgtttccaacgcgagctctgaccaccgttcttccttcccgcaatgcttcttttcatgtccgcttgagtgggtttatagcctaaaccatacttcccacgattcccttgggtttttatcagactagttatgccgccattgtctttgcctaaacccatcccgggttcataaccgttccccaacataactctggccatcattaccgccgcatcggacagacaaggttgcccaaagggggagtccacggaggaaatgctgaccacctcataagactggaaagcggtttctaacgattcttctgcggcttccacataaggcatggaggatgggcagcttaccaagatatcttcctcgcctgatacgatgaccaagtgccccttcactacgaatttcagcttttggt

SEQ ID NO: 3417 - DNA, 384 bp, Glycine max
gatccttaatcacctgcggctgcagctggagaaaataaaaataaatccgattaagcagaatgctagaaataccttggcagctctggttgtagctctagaccaacgggaaatggcagtttcatgtttctcaatgttgaagaaagatatagagctgtgcttgagttcagcaaaatctaagagcttccacctatgtattaaaacaaaaagataaaattaaaactcatggagagtctagtaaagaaggacagaggttctcattgcagtaaataaagtaccagctttgttcaataagaattgcacaatctgctagctttcttcttgtacgaaagactttgtatactttctgcagtttaagtgcagccctatatttggggttatctggat

SEQ ID NO: 3418 - DNA, 451 bp, Glycine max
  unsure (1)..(451): unsure at all n locations
tcttgtctagtagaacttntttttatcgtgaatatatgatcatcacatggacattgcctattgagaaatgaaacacctaaattccatctgcatcggcaatgaaaaagattttaattaaggaagggatccatcatattaattacttgcagttattactgaaacaaaccaacaaacataagggtaattgtatattatgttcagctggatcaattaatataaaaataactaggtataggcaagtaagtcaatggatccttctttcttgcaatgtgcgtgtgaggaaagaggggtatattattatagtcaatgtatgtacacaaccaaagcaagatagtaatgccctatagaccgaaacagggccactcctattgcattagtaaggcacaaactttgaccaaatggaagaaagatgttggcatgtgtttggtttggatatgtggatgacaatttg

SEQ ID NO: 3419 - DNA, 268 bp, Glycine max
ctgttcaattgctctatattgttgtacagattggctaaggttcgaatggtgggcggcagaggagcataaatcacagagtcttgcgacatgtacagatttttgattcatggccagttgggttaccatgttaacacaatgcgtctagtttaccttcaagcttcttaatttcagatgatgaaaatgattttgtagctacctgatgcactcctacaatgactatagcatctattctggcgctaaactattgggagtggaagccatcttccaa

SEQ ID NO: 3420 - DNA, 405 bp, Glycine max
tgcccttaattttgaagcaatatgtgacattcccattatgtattccctgacattacctttaccttgatacttcatggaaatcaagttctgaaggagagtatttgtttctgccttatcacttttttcaaagtgcttttcaatttcagcaaggaattctttggcactagttatatcatctgaaatagtgcccctaaagacctcaggaatgccactcttaatgatcataagactcatgcaatttgagtgatcccacttctcatgaagtttcctatgattagaggtactggaatccatatgaaaaggggggttctcaatccttaatgtaaggtctagatccatgcatacaagaacaatttgcatgttctctttccagtccttaaaatgtgtaccattaagaattggaat

SEQ ID NO: 3421 - DNA, 406 bp, Glycine max
agcttggagataaataaaaccttagtaccatatcagattaataaagcatcaccaataacaaagcatccttacaatccccttgtctctctcctcatgtaaccctcttctggataataaatagcacaacaataagtatatatccctcttataaaaacaaaataccccattttatatatgctcttaagctcatcctttgaaatttcaatgcgcacaattgaaatttaggatgcaaaatcaaatttatcaacattgaagattgaccattttataaaaactcctccaccttgaaaaatgtctattccgtctaattatccccagatactattataacacgacaacaataaacaatagagataaaccttgaggccaagtaacaccgcatctatatatatatatatatatatat

SEQ ID NO: 3422 - DNA, 292 bp, Glycine max
  unsure (1)..(292): unsure at all n locations
tgatgctcttggagagtatttaaagtagagacgcgagtttttgtttgatgctgaacaaaaaaaattaaatgcagaagctanttnttgctggcactgatagacatgaatagagagaggtggaatcaatctgtattgcagatgaagttttaaacacaagtaaatctgttgacagaaataccacgcagcagttctttagaatcatgtttattccaacaatttatgataatttcaaatgactaatttttatcctgtntttgttgtaaaactctcgcataataatggcatgatgtag

SEQ ID NO: 3423 - DNA, 172 bp, Glycine max
ccccccccccccgctccgccccccctacgccccccgaaccccccccccaaaaagcccgccgaccccccccccctcccggccgcccgacccccatctccccaaccacaacccccccccaatgccccccgccacggagccggcccaccgcaagccctccccgcccccccgacgc

SEQ ID NO: 3424 - DNA, 375 bp, Glycine max
cgcctatagaggtccaggaaggataacgcagccgaaggatctagttccgctcctgagtatgacagtcaccgctttaggagcgctgtacaccagcaatgcttcgaggccatcaagggatggtcgtttctccgggagcgacgcgtccagctcatagacggcgagtatactgatttccatgaggagataaggcgccggcggtggacatcactggttactcccatggccaagttcgatccagaaatagtcctcgaattttatgccaatgcttggccaacagatgagggcgtgcgtgacatgaggtcctatgtaaggggtcagtggatcccgttcgatgcagatgctatcagccagctcctgtgatatccgttagtgctg

SEQ ID NO: 3425 - DNA, 396 bp, Glycine max
actagatgccttgggtattctggtatcccaactggccatgaatcaaaaatatgcacctgtcgccagactctgtggtttatgctcctctgccgaccaccacatagacctttgcccttttgtgcaacaatctgaagcaattgaacagcctgaagcttatgttgcaaacaactacaatagacctcctcaacctcagcaacaaaatcagccacaacaaaacaattatgacctttccagcaataggtacaatcccgggtggaggaatcatcccaaccttagatggtcaaatccttcacaacagcaacaacaacaacaacaaccttattttcagaatgctgctggcccaagcagaccatacgttcctccaccaatccagcagtaacaataacaacaacaata

SEQ ID NO: 3426 - DNA, 448 bp, Glycine max
  unsure (1)..(448): unsure at all n locations
cttgaaaagtgttgttttccaccttctcactaagccaatctgctggcttatcgagcttccgctaagcgcaactctcatgggctaagcgcaaggaagactctagaagaagatgagctgtataggttcgcaaagcacaccgcttcatctcactaagcgcaccacttcggttcatcgctaagtgagaaaggcacgcgctaagccgaaattcaccaatgtgcgctaagcggtccataattgcgctagcgcacgagcacgaacaaggccacctatntaagcctgaaatcagattttagagggatagtttggattgggattcagagctttgcatgtctagagtttctagagagagaaaggtccaggttccagagaggtttgagagattctactgtgtgaagatatgcagagaccagatgcttgagcatgagctggtttaagagcttgagatgag

SEQ ID NO: 3427 - DNA, 433 bp, Glycine max
  unsure (1)..(433): unsure at all n locations
cccaggcgagctatgttgnttnctnctgaagcaaccgccttntggaggaaatttctagaaggcccaagtgggtctggttgctatttgcacccccatttttactaaatactccccttgctcttttttggtgattctttttccgtaacgttatgaaactttacgaatttcgtaacgatgattgttttctttccgtaatgtagcaaaaccttacggattacgtaatcatcccctttttaccttccggagcgttacagaactttacggattgcgcactaacacttccttttaatttctggcatgtcacagaacttcacgaattgtgctacaatactttcttttgactttcggcatgtcacagaacttcacgaactgtctagcgatgggtgccaagtacctcgaagtggtcaaacgagggtcgcatcccaacaacgga

SEQ ID NO: 3428 - DNA, 480 bp, Glycine max
acactactagcacactcaagcttcttagtttcagatgatgcagatgggtttgtagctacctcatgcactcctctaatgactatggcatcatttctggcgctaaactgctgggagttggaggccatcttctcaattaaatttctggcttcagcaggagtcatgtctccaagggctccaccactggcagcatctatcatacttctctccatattactgagtccttcataaaaatgttggagaagaagctgttctgaaatctgatggtgagggcaactggcacatagtttcttaaatcgctcccagtactcatacaggctctctccactgagttgtctaatacctgagatatctttcctgatggctgtggtcctggaagcatggaaaaaattttctaagaatactctcttaaggtcatcccagctcgtgatggaccttggagcacggtaatacaaccagtcctttgccactccctctaatgaa

SEQ ID NO: 3429 - DNA, 436 bp, Glycine max
  unsure (1)..(436): unsure at all n locations
tactcagcttctatatagctgacccattctatcaatagacacaagtntgttgttattctttaaatacagtttatctctttgatcttattgagagtgattctcctaagggctcgagtgaatcaagagctccctgtctgtatcataggactctcacaacctttgtgtgttgtcctcgctggaaatagtgattctttccttactttcatcttcacccttgtgtcttcaaaccactattgcagaatatccacctctgcccagaatcatctagtggccataactaccattttacgcactcatattaagcgatcccttgagcctgtattgacttttaaaaccagaccttctacctctgtatggaatcacctcatttggagccgtgtagcttcaggtattgccatttctattattttgtcctgccaccactatacctacatgt

SEQ ID NO: 3430 - DNA, 365 bp, Glycine max
  unsure (1)..(365): unsure at all n locations
agctntgggataattatgatttatcattggaatcgaaattgcttgaatttcaaggagctcttttgttcattgaaactacttggcaaacaagttggattatattttggcttgacacagactcatcaacaataggttttcaatctttctctaaacatgctcttctcccctagaagctcaagaattgatggctcaattgccttttttcttacctctgatatgcaatttgtgttctcatattttagggaaggaattcttgactaacagattaatatcctgatctgacaaaaattggtcacttgggggactttgtccgtcgtcagatatctaatgtataggcatttccccataacaatgttttgactaac

SEQ ID NO: 3431 - DNA, 445 bp, Glycine max
  unsure (1)..(445): unsure at all n locations
gcttgtcttttataaatgagaagttctcattacgttatctaaaaatcttggggtggatccgagtgctccgatcatacatttgcatactcatgtnttggtggcatactcaccgttggttatttctttaggaatttcatcataactataaaaaaaccaaggcacccctataacactctatccagaaaaatggataatgaagagggcgtgcaggaacagatgaaggccgatctatcggccttaaaagatcaaatggcttccatctcggaggtcatgttaaaactccagaaaaccatataggataaagccaccgcaaccgcctccagtacagttagggaagcggagctggtgttgcagcccgccttgaatccgggcctagacagaaacacggacgtgttcggtcgaaggtatagtccgcatgcttatacttatggcctgcctccggact

SEQ ID NO: 3432 - DNA, 339 bp, Glycine max
  unsure (1)..(339): unsure at all n locations
acctgcggctgcagctttatttatttgctaattttagcatttatgttagaaaccacaaacagaaataatgaaaaatagtagtgagcagcaaacactactgagaaatntgtgtattatgaagcataaaggaaaatacagagggatcgtaatccctactgcccatagcaaagctccttcaaaggcacaaatgctctcttcacattccagtttattaattcctaatcttaattaatggaattacattacaacctgttggagtataagttggaaatgtaacagtatcttgcatctgtaatagttgctatgagtcagactattatgctgggctgccatgtcagt

SEQ ID NO: 3433 - DNA, 393 bp, Glycine max
  unsure (1)..(393): unsure at all n locations
tgagctcattgctgttgccccacaaagctccacggaatttgtcccggccatgctcttccttgcgagccttcttggtttctcgttctaaggctcttgcgatagctgcattttcttctcgtaacccggcacactctttccggacgtctgtaacgactaacttgaatttttctttggcaagtctagctcttcctagttctatttttagagctcggacttattcatcctcttccggagcttcgaagttctcctcgttgataactttcaacatggagagccaatctaaccctcgtgtacaaactttaagccattcatgataaccaccgatgatgcaattacggatgcccctaaggtctttatctctccttaacgggctntcccacgccttatggactc

SEQ ID NO: 3434 - DNA, 403 bp, Glycine max
  unsure (1)..(403): unsure at all n locations
agcttcttcacatagtccgccttttcttgatcttctntatgcttaanaacagaaacattatgcataggcaaaaaatcaagaggagttagtgggttaaaaccataaacaacttcataaggagaacaattagtggtgctatgaacaactctattgtaagcaaattcaacacggngtaaacaagcttcccaagtttttaagatcttgctcaaaactgtcctaaccaaagttcccaaagtcctattaacaacttccatttgcccatcggtttgtgggtgacaagtggttgaaaataacaatttagtgcccaacttgctccacaaagtcctccaaaattgacttaggaacgtagagtccctatcactaacaatgctccttggcagaccatggagtctcacaatctcct

SEQ ID NO: 3435 - DNA, 456 bp, Glycine max
  unsure (1)..(456): unsure at all n locations
nggaaggtagtcatacctcacaaaatatatatatatatatatatatatatatatatatatatatatatatatatatatatatatatatgtatgtttaggtagcaagataccttggatatgcatgtatatagcaaaaatacctcacaaaatatatatatgtatgtttaggtagcaaaatacctcatgaaaaaaaaacaaaaaaaaaacaaagagagaacaaaaaatatatctttcggctgataagccaacatgcttttgaagagaaataacttctagcttttctttgaaaaatgattcactgatcatataccagttttttgaaaaaaaaatgtgtatacacctgaagggtgaatgctgtggaaattttccgaacacccaaaatggacttggatgaatgcatgaattgataaaagaacatatnttagaaacactgtgttgacttanatagggaaaatg

SEQ ID NO: 3436 - DNA, 446 bp, Glycine max
  unsure (1)..(446): unsure at all n locations
tgtacttctaacttatataagtctcactttagataagcctatttactagataaattaaggtaaacttttctttatggcttaaattaactttggacactataaaataggtgtttatttattttaatcatttattttttttattgctttaatgatttaaaatgtttcattttagtttttgctatcaaataaaagcgttaacgaatgatatatcaatgattttgacagtttaatgatttatgacattatcaaagaatctgatgaaataatcatgtataactnttttagaatcaccaaaaaaatatgtaaatttttattaacacttaaattttttttaagactaaaagtatttttaaaaaaaataaggattaaaaaatattaaatcttatatttttttattcgtaaaaattatagactatatgtcaatgaaagattcaacttataatctt

SEQ ID NO: 3437 - DNA, 396 bp, Glycine max
  unsure (1)..(396): unsure at all n locations
tatatcgatggctcaaattatcatcggaaactctcgcgaaattcaaatgggcatagaatttcacacggatgtccgattcgggcgcataatatgtcaagagtctcgaaattgaacaacggaagctcttgagaaattcaaatgggtataaaatttcacacggatgtccgattcaggcaaatcacatatcgagacgatcagaattgaacaacggaagctcttgagatattcaaatggtcataacatttatctcgaatgtccaatttaggcgcatcacatatagtgatattcgaaattgaacaacagaagctctcgtgaaattcaaatggtcataactnttcacactgaggtncgattcacggctataatatatcgatacgctcgaaattaacatcggaa

SEQ ID NO: 3438 - DNA, 269 bp, Glycine max
ctgagtcggacatccgtgtgaaaagttatgaccctttgaatttctcaagagcttctgttgtcatttccagcctctcaacatagtatgcgctcgaaactgacattcgtgtggaaaggtctgaacatttgaatttctcgagaggttccgatgttctaattcgagcggatcggtatattataagcccggatccgacattcgtgtggaaaggtatgaccatttgaatttctaaagagccttcgcgggttaattttgatcctcttacaatatat

SEQ ID NO: 3439 - DNA, 334 bp, Glycine max
  unsure (1)..(334): unsure at all n locations
agcttctccacgttntgttgagaaatggtttccatggctttcgtggcttctgtaatgcttccgtaaaatttcctaaaaccttgggtaagcatatttcacttaatattggtgaaagggaagagaaaaaaagatgaaaatgaaaatccaaaacacttctgtaaggctttcgtaacttttccgtaaagtacgaaaaggggggtgaacttagtaattgaggtacacttagaaatctttctcaagaagcccctaggcggcaaagcacctccttattccctataaataggggaagggggttggttcaaaaatttcggaccccttggctataaatagggga

SEQ ID NO: 3440 - DNA, 235 bp, Glycine max
gggtgaattaagatatatctaactgtttcctctaattaaaaatctatatcacacttttttttactcaattatgagtacccttaatgacaaactctcttaaatatttattccaatgaaacaatttaaatatgaatataaagcattactaataaatgagattaatggaagagaaaatgcaaactctgtgttatactgtgttggtcacaccctttgtgcctacttccagtccccaagc

SEQ ID NO: 3441 - DNA, 323 bp, Glycine max
  unsure (1)..(323): unsure at all n locations
gcttnattgttaatttaagcgatatgatattatgcgcctgaatatgacctccggtgaaaagcatgaccgtttgaatctctcgagagcttgcgttgttcaattatgagcgtcttgatatattatacgcctgaatcggagcttcgagtgaaacattatgaccatttaaatgtctcgagagcttccgttgttcaatttgaagcgtctctatatgtgatgcgcctaaatctgacgcccgagagataagatatgaccatttgaatgtctcgagagcttacgttgttcaatgtggagcgtatcagattcttatgcgcacgaatcagacc

SEQ ID NO: 3442 - DNA, 428 bp, Glycine max
tttgagcaatgcaaatggtcatagctatttactccgatgttcgaatcaggcgcataatatatcgagacgttcgaaattgaacaatggaagctcttgagcaattcaaatgatcataacttttcactaggatgttcgattcatgcacataatatatcgagacgctcgaaattgaacaacggaagctctcgagaaattcaaatggtcataactttttcacacggagggcagattcatgcgcacaatatatcgagacgctcgaaattgaacaatggaagctcttcagcaattcaaacggtcataacttttcactcggatgttcgattcatgcgcataatatatagagaccctcgatattgaacaactgaagcttttgagaaattcaaatggtcataacttttcattcggatgtccgattcaagcgcataata

SEQ ID NO: 3443 - DNA, 226 bp, Glycine max
agctcttattttcaattaggagtgtctcgatatattacgagactcaagcggacattgcgagtcaaagttattgtcgtttgacttttcttagaggatccgttttcaatttcgagcgtctcgaaattttacacggctcaaactgacattccgagtgaaaggaactggcggttgatttttctcaaaacttccgttttcaattacgagcgtctcgatattctttcggact

SEQ ID NO: 3444 - DNA, 328 bp, Glycine max
agcttgtagaggctcttagaagctgtcctattatttgtcagcatagactaggctgtggccttcatcatgaactattttttgtactatctgtcaattctcatatagacacacacacacacatctctcagcaaactaaggctgaggatcctttttgtgtgcatattttcatactcaaacatttcaagttggtatcagagcgggacgatcccgctctgcgcttttgtctctgtctatcactgatcaccatcaccaccaccactgaccaccgtcaccgatgccgccacacctatcttcgacaatacccagatctgggtcgtcttcttcagcg

SEQ ID NO: 3445 - DNA, 329 bp, Glycine max
agcttagagtttcttccaccattttagatgtggctattgaagaagtttgagatgttgatgctcaagtcccttttcccacttcagaggcttagtgtgtggcgcaggccctcaacacctttatatcatggttgagacatcttgtgaaccctatttcacatgagatatttacttaagttatgtttatttgtactaagaaattcttatattggcaaaaaaaatttattaacattaacttgtgttatttattaactaaataagattcacatagatgtccaaagaaataggttgaatctgttcataggtcaagcccattagtgatcccttagttg

SEQ ID NO: 3446 - DNA, 323 bp, Glycine max
  unsure (1)..(323): unsure at all n locations
agcttaagctgntagcattttcttttcaatcatttttagaatttgcttgatattttccctgatgaaaaggtggactgattttgtcttaaattaagtggcctgctgtgataactgatactccaagtctcatcgttctgactagtgagagcaagacatctagtatgccattcagtatgtttgaaatgtgaatgccaagtgcataaaatctgtattgattgttacttatatccatagggtaacaagagaagtgctgggtttacagatgaagagaggaaatcatttgcaaagaacttcttatctaggggatttgtagatacctttat

SEQ ID NO: 3447 - DNA, 331 bp, Glycine max
agctttaaattcattctatgcatccttaggggtccattcttgctttggatgttttcatcttcattcttctactttcggtattctttttcttcgttttaagcgagtttcaaccggtcatttaagccataacctcacttaattaatgtttaaatgaatttcaaccgatcatttgtgttgtaatctagttaattgcctttaaaataaaattcaaccgatcgttcatgtcgtaacctcggttgaataaaaaaataaaaaaaaaataataaaataagtgtcaaccggacattttactttgaaagtcgtctttaatgatttgagaaataatcaagtg

SEQ ID NO: 3448 - DNA, 324 bp, Glycine max
agcttctcaggtccggtcatggaaagacttggcaactgccttcattaggcagtaccaatacaacacggatatggctcccgatcggaaccagctttagagcatgaccaagcgagaacatgagtccattaaagaatatgcccaaaggtggagagacctcgcagcccaagtcgttccgcccatgactgagagtgagatgatcacaattatggtagatacgttgcctacgttctactatgaaaagctgatagggtacatcccagctaactttgcggacctcgtcttcgcccgagaaaggatcgagtccggactaagaaaaggcaagtt

SEQ ID NO: 3449 - DNA, 303 bp, Glycine max
caagtttatggactatgtcatagccaaagtgctcatcgatatggttccagtttaaacgtgatgcctaaaagcactttggagaaattaccattcaatgctttccacttaaagccgagttcaatggtggttcgtgccttcgaccgcaccccccgagaggttaggggagagatcgatctcccagtacagataggccctcacacctgtcaagtcacctttcaaataatggatattaaccccccctacagctgtctgttggggcgcccgtggatccactcaatgggagttgtttcctctacactctac

SEQ ID NO: 3450 - DNA, 320 bp, Glycine max
agcttgtatgatgtttaaacctttgaggcacgctgcaagagtgattaatcctatcatggggagggtgtgtgtcaagcgcgtgtatctctaagtgaagtgcttgcataatttcaagaaaagtaacatgacaagtgcgagtagtgcaattcctgattctctaccagtacttgatggaaataatttcaatgattgaagggtaaaaatgaatgccatatttggctttcaagatgttgaatatgttgtaaaggtgggatttcaggaacttgggaagaatgctactgaagaataaaaggtagcccaaagagctcaagagacttgat

SEQ ID NO: 3451 - DNA, 281 bp, Glycine max
agcttgctcaatgtttatagttttggttaagttcttgtgtgcttatagggagcaggttgtgtcctatatggatgttattacaaggtggtgaattgttgggttgcgacctaaatccatatggaagtttattctgttattttttctgacttgtcctctgcctatataaggcaaagatgccctgaatttttcaaagataaacttccattggtttactacaaccatcataagaaaagctctctgttttccctcctgtggatgtagacatgatcaaagtgaaccac

SEQ ID NO: 3452 - DNA, 323 bp, Glycine max
agcttatagaaaatcttgaagatgttttgtcttttacatgcccaactcctttgagtggcatttgtgttggttgttatagtgaatgttgcattttagtccatatcatatcttttgtgcatcatgcatcattatgagtaagtgagaagaaaatttctaaagttagaaaagtttcttcagaaggcaacactctttgttttaatcgattacaaccttatcataattgattacacaagttttcttaagcttgcagagttatgtcttgtattagtttaatcaattagagccttattgtaattgattacacaattgtttttgagaaaatg

SEQ ID NO: 3453 - DNA, 314 bp, Glycine max
agcttgtcagatggagatgatcttgccatgactttgattctatcaatcttatccattctttcctcatgtgagaaatttctgaattgaaagccttcaaccactgctgcttgatcatcatccaattcatcatcaagaatcccacattcagaggctatggcccttgctgtgtgcgcattatctcctgtaatcatcttaatcttcactccagcattcttgcacgattcaactgctgctccaactcctggcctacaagggtctttcaacccaagtattcccaacagtgtgagttctgtctcttcaagttcaagtttttc

SEQ ID NO: 3454 - DNA, 313 bp, Glycine max
  unsure (1)..(313): unsure at all n locations
agcttgtgaaagtgaaagnagttttccaaaagttcgacatttagttgagtgtatgcataacaatggggtggatcgatggcggatttgattttctttatcctcgtcccattaaaacgcatgacgaactcttggttagtttaaaagagatggatttacatatttaaattcttaccactccttggtgagtcttatggggtgaggacattcatgatttacccaccacaccctttactacaattttaagtgcatcttaacactaactacattgtagtttaaataatatactcaactgatttaacaaccacgaacttta

SEQ ID NO: 3455 - DNA, 318 bp, Glycine max
agcttgctgtaaactgggaatgtcttttcattgttactgaatcactcggaaaatggagcctactgactggagcatttattcgacaaggcaattatgagaacttggaatgttacatatctcaaatgctattatagttgagcttgtaagtaatgaggtacttttttgcctactttaacattttttcccatgaggtttttgttagagaggttttaatgaggcacactcaaattttgcattgaataataacattatagattcaagaagaataacattatagattcaagaagaataactcatctctctgactaaagacctaaa

SEQ ID NO: 3456 - DNA, 327 bp, Glycine max
  unsure (1)..(327): unsure at all n locations
nagcttggttngaggtacttactttttgaagattgaagaacgatgaagagcgaattgggaacgtcgaataacgaacgaaacctttgcgagattcctcacggaaaacgttacggaaacgtttcggaagcgcctcggcttagattttcttcacggaaacaattttttccaagcaatttccacagagggagaagtgcctaaagggctgggatccttttcttcttcattttctcccctatttatagcaaaataggggagatgcttgccgcccagctcgcccaggcgagcagggttgctttctccataagcaacacgccttttggaggaacc

SEQ ID NO: 3457 - DNA, 329 bp, Glycine max
  unsure (1)..(329): unsure at all n locations
agctttggaacgagaaaccaatttggcccgtttggaagaacacgaccaaagcaaagttttgaggggctttatagggcagcaatagtgagctcaagctccgaagaggtgaaaggaatcatcacgggtcaaaggcatgatcttgaaggacgagctaaaggtttgccttaggtcgaaaagaaatttgtcccaacagttaagcgagactgaagggaatatgtgggccatcatcgataagtgcaaagagaagctaaatctagcggcgactcacgagcaaaggctagaggatgagtatgccaagatatcancagaaagggaagcaagggaaaggg

SEQ ID NO: 3458 - DNA, 330 bp, Glycine max
agcttgcctcaaagaggtccattattgataaggcggcctttggactagttccgctcctgagtatgacagtcaccgctttaggagcgctgtacaccagtagcgcttcgaggccatcaagggatggtcgtttcgacgggagcgacgcgtccaactcagggacgacgagtatactgatttccaggaggagatagggcaccggcggtggacatcactggttacccccatggccaagttcgatccagaaatagtccttgagttttatgccaatgcttggccaacagaggagggcgtgcgtgacatgaggtcctgggtaaggggtcagtggatccc

SEQ ID NO: 3459 - DNA, 251 bp, Glycine max
tttaattgttaatccccccccttgaaattcatccgtagacaaaagaaaagaagtgataagaggcgccatccactatggaataagccatggaaaaaggagcttctacaccaagatgagccttggataagaagcttggaaggatgcttcaatggatgaaaagaatgagggagagaaagagagagggggaggacgaaattgaaggaataaaagagggagagaagtggaactttgtattatgtctcacaagagtc

SEQ ID NO: 3460 - DNA, 303 bp, Glycine max
agcttaaaatatttttgttattgagaaagacaatcattgactaggggagttgagctgacatcctatcctataacacttttaagcagttgggtatattggagttagagctccatccccgagatgacccactattcggcttcaccgaaaaaagagtgggaaccaaaggatgtctatgactatacaatacaaaggtttgaagatttgatatgtgatagtgcatgcccacatctactacaacatacttctcggtcgctcgtccctaaatgctcttagtgctatagcgtccaccctccacttggccat

SEQ ID NO: 3461 - DNA, 317 bp, Glycine max
agctgtactatgcatataatattttatgaaaataccttcggctgactgagcatcaaattttcctaaactatcttttccattattcaatacaaaacatttacaaccaaagatatgaagatgtgagacgtttggttttctgccattgaacaattcatatggagttttctttaaaatgggtcttattaaagccctatttgaaatgtagcatgcagtgttaacggcttcaacccaaaagtattttggaagaggagtatcatttaataaagttctagcaatctcttccaaagatctattttttctttcaacaacaccatttt

SEQ ID NO: 3462 - DNA, 223 bp, Glycine max
  unsure (1)..(223): unsure at all n locations
atgatagttgtttgagaaatgagagaggagggatgtttnataatatggttttttaaagatttttagcttacaaaagtttgggggataatggtgaaacaacgttgtggttgttttgtacagggtggactttttaatgttggaacgaaggttgtgtttgtttctgtgaaaagaatgggggagaattattgtgatgggaaaatattttcatccagagaaatgttgg

SEQ ID NO: 3463 - DNA, 261 bp, Glycine max
atcactgtgcatctcttgaagatgcaattgaaggagaatgaagaaagtcaaggaaatgaaagaagtcaacaaggtctaggaagagctcaaggtcgcagtctaggacaagttgtatgtggcaacaatagacgaggttcaaatttcatcatctacagttacaagaaaggaaaaagctcaacaagaaaacgtggaagaggctatgcaagcacaaggtatgataaatttcaaacccgatgctataactgtcaaaagattggccac

SEQ ID NO: 3464 - DNA, 338 bp, Glycine max
gcatgcaaccctaagctcactgttgctgctttacaaattttcacaaaatttgtctcggccatgctcttccttacgagccctcttggtttcttggtccaaggctttggtggtagctgcttttatatctctcaattcggcattctcctttcggatcttcagagctgttgatttgaacctttctttgactgtttgggcttgctcaagttctgccctaaaggcttgcacctcttcgtcttcctctggtgcctccacttcctcccttttaacggttctcaaactcgggagccaatccaaaccttgcacgtgggctttcaaccacttacggtagccatcgatgg

SEQ ID NO: 3465 - DNA, 317 bp, Glycine max
agcttaaatattcaacttcgagtttctcgatatattacgagtctcaatgaaacatgcgagaaaaaaagttattgtcatttgaatttgctcaaaggttcaacattcaatttcgagcgtctcgttatattacaggactcaatcagacattcgagtaaaaagttattgtcgtttgaattagctcagagcttccacattcaatttcgagcgtctcgatatattacgggccttaatcagacatccgagtaaaacgttattgtcgtttggattggctcagagattcaacattcaatttcgagcgtctcgatatatgacgggac

SEQ ID NO: 3466 - DNA, 334 bp, Glycine max
cctgcggcatgcaagcttttagcttataattttttgggatttcatatttttctttaggggcttattatttctatttgaggaacacttttgaaggatatcttaatttttggcagagaaaatctggattatagttgccagcttgttgatggggaaagatgcaaagagccacttttgaaggtgacaaggcatctctcacagttggatttggagagagaataaaggaaggcttctagatctattttctttaaaagtagatgactaagggatcttatgtgtcttatatattttgagttaataatgggttgctaattttctttgggctatggcttgaggg

SEQ ID NO: 3467 - DNA, 247 bp, Glycine max
agctttaccatgcttacaagaaatcctgcctttaataattttcaaggagggccctttgttttccctggtaagttccagtgattatgcatactgaattctatgttatgtgccagcgcaatacatacctgccctttcctaggcatggcaacggggcgggtcggggtcggattttgtttacccaccctcatgtaacgaatttcaattttatataagggtagatctctttactcgttaaagaaattcttca

SEQ ID NO: 3468 - DNA, 330 bp, Glycine max
agcttctaaggaaggacctcattatcactatccctgacctagagtgtcgtatcttactccagccttgcccccacttctcatacgtttgatctgaaaatggatagggcgaggttggtgtacacactggtgatgaagatggaaatggatgtgggcttcatcatctctagacagatctctcagatggcctagtccaactcctctcgacttggcttccctgccatgatcattgccttatgcatcgccagaggagtggtcccagactctctcacctttgagtctctaagccctgccattaatttggcttttattcgaaagaattgctggaacccg

SEQ ID NO: 3469 - DNA, 322 bp, Glycine max
agcttgctcactctttctcaattttttctagctgctgcaaaagcaatgctatttgtttctggcatcacaatagggagtgcatattttgactgcctcaacatgacagagatgccagttgactgttgtaagttagaacaacttttctaaatttcagcagtgcattattgaggatgatgtttgcattttctgattctctgtgtgattttcttccaaatttggaaaagtatatgcttcatatttgatatttcacatgctgtaatgaagtgtaacaaacaaagatgtgtatgataatgtttctgattgctgcaaaagtaatctctgt

SEQ ID NO: 3470 - DNA, 323 bp, Glycine max
agcttggtacatattgtctgattcttgggtcctcttaaggacttagtcaaaatatccgctggctgatcattagaaccaatgaactcagtgacaatctccttggacagaagcttctctcgaatgaaatgacaatcaatctctatatgcttggtcctctcatggaagactgggtttgaggcaatatggagagcaacctgattatcacaatacaacttcatttgcaactcttcacaaaacctcaattcttgaagaaattgtttgatccacatgagctcacatgtgaccatagccatagatcgatactcagcttttgcactagaccg

SEQ ID NO: 3471 - DNA, 320 bp, Glycine max
agcttttcaaatgttttaaaggctcacattcactttcttggacatcatattcaaatttgtccaaataaataataaagtcatctcgactcaaagaaaatcatataagtctcatacaattaatatagaacctatatcctaatgtcacatcctatcagagcgtggtgttcccgtgtcctctagcatgaggttcttcttagtcatccacctattcatctgctcccccgaacacaagtgagttatcacattcctagctaatagagaaacaagacaattaaatatacatattatataaatgagataccacttgcttaaacatagct

SEQ ID NO: 3472 - DNA, 322 bp, Glycine max
agcttgccccccattctccacctaacagaatacactgacctgtaaattttcaaggaaggacaacataatgaacattcaaatattatcacactaagaatgaagctagatataagaatcaacaatgtttgaccattatcatgaatgttgaggttgaggatccaaacttctggtccacatacatgtaacaaatgaaaattaaaaaaaagggaagatttctttattagttaaagaatacatcataatgaaaagaaattgtcttttcccttcagtacctttgtatgcttaaagaatgagcatgcaaaacttccttaatttgtataat

SEQ ID NO: 3473 - DNA, 332 bp, Glycine max
acctgcaggcttgcaagctcataaacaattaaactattctaaaaattactaggagggatttgtcttataatgatgctccgacttttaattattggagctggaaacccaaaatgaatgaacctaaaactatacattactatgtccgtatgaaacccggtttaccacatattaccactaatttgagagaggaagattctagctagaaaatctttgatataagaaccctgagggcggggcgcatccagaggaaactgcattatgtgatcaattgttacagtaccaatgtaattcaattcttatagttctattgtttcaaaaataaataaaaaaag

SEQ ID NO: 3474 - DNA, 219 bp, Glycine max
gttaaaaccataaacaacttcaaaaggataacaagcactggtgctatgaacaactctattgttagcaaatcctacacggggaaaacatgcttcccaagattttaagttcatccttaaaactgatctaaccacagtaccgacagttctataaacaacaattatttacccataggtttgggggtgactagtgggtgacaataaacaattaatgcccaattt

SEQ ID NO: 3475 - DNA, 325 bp, Glycine max
  unsure (1)..(325): unsure at all n locations
acctgcggcatgcaagcttttgtagatcttacattttttagagcgggaagtgaccganaagaatacttgtagctttgagataagttagtggaaactcggtggattgccaagaactgggcgtagacttggggtagagatgaactagtataaacttttgtgtgcttttctttactatttatctttgtgttcattgacaacagttcaaattttttattagataatacatctagttttgatctatcaagaaaatggtttttgatcatcatttgacaaagttctcttaatctattgttagctatatttgcatcagacgataaatgagttt

SEQ ID NO: 3476 - DNA, 331 bp, Glycine max
agcttcttcacatagtccgcctttgcttgaccttctttatgcttaaaaacagaaacattaggcataggcaaaagatcaagaggagttagtgggttaaaaccataaacaacttcaaaaggagaacaattagtggtgctatgaacaactctattgtaagcaaattcaacacggggtaaacaagcttcccaagtttttaagttcttcctcaaaactgtcctaaccaaagttcccaaagtcctattaacaacttccatttgcccatcggtttgtgggtgacaagtggttgaaaataacaatttagtgcccaacttgctccacaaagtcctccaaa

SEQ ID NO: 3477 - DNA, 330 bp, Glycine max
  unsure (1)..(330): unsure at all n locations
cgcttgaactatctgtgatncctcaacttctatgtttcctcgaaaaagagttcatgtcattaataaatatagcaaaaacattgaatttcacccaaaaaaagggacttttcttcaacttaaataggctttgtacatataaaagaaggatttatgagaaattgaatctaaccaccccccgaaatataaagtatcaacactgtaattatattctaattacccaaaatagttgaggacctcaattatttgatctgctaaatcttcagcagaaggaataagatcctcggcacaatttgcagttgctcccaacttcaagaactcttgtggaagttt

SEQ ID NO: 3478 - DNA, 327 bp, Glycine max
agcttggttcgaggtacttaccttttgtagtttcttaaacgatgaagaaggaatgaggaacgtcgaaaaacggtcgaaaccttcgcgaaattcctcacggaaacgttacggaaacgtttcggaagcgcctcggcttggattttcttcacggaaacaatttttccaagcaaattctaaagagagagaagtgcctaaggggctgaaccctttttcacttcacttctccccctatttatagaaaattgggggagaagcttgccacccaactcgcccaggtgagcagggttgcttcctccaaaagcaacagccttctgaaggaatcttttg

SEQ ID NO: 3479 - DNA, 331 bp, Glycine max
agcttggagaaaaataaaaccttattaccataacagattaataaagcgtcaccaataacaaagcatccttacaatccccttgtctctctcctcatgtaaccctcttctggaaaataaattgcacaacaatagttatataaccctcttataaaaacaaaataccccattttatatatgctcttaagctcatcctttgaaatttcatgccaacaatgaaaatttaggatgcaaaatcaaatttatcaacattgaaatttgaccattttagaaaaacttctccaaccttgaaaaaatgtctattcgtcctaattatccccagaaactaaaataa

SEQ ID NO: 3480 - DNA, 324 bp, Glycine max
agcttgttgagaatttgcactttacttttggacagtttcggttgttcgtccaataatgtctgatggaaaactgccccatccttcaagttctgcattacctttgagatggctaggcattcaacctcagcttcaatccttagcctaaaaaggtcctcaagctccgactcaaccactttacatttttcatccgacgaatctacggttctagcagactcttccctagaaatcttaacactactcgaggatgtttcaagttcagcaatcctggagtccctcagagcaagcacaccctgtaaatcttccaacttgctttccaaaatattt

SEQ ID NO: 3481 - DNA, 320 bp, Glycine max
agcttgcttctacttttatatgttttttaatttattcatggaacttgggcaatcactatttatgtaaccaatcaacttaaagttggtcatggttttataccatatactaaatttcttcgtgccttgtaagtatctttgaattctttatactattatttgatatgggttttatagaaatcttaataaaatacttaacacacatgatgtctaattgtgtggttgtaagatataatatgctttcaattactcttccgtaatgtgatgcattggcatttgagactccattatctttttgcaacttctcatttgtcatgaatgca

SEQ ID NO: 3482 - DNA, 310 bp, Glycine max
agctttagaaaattttcttgcttcttcatttctcaccatgggcaggtgaagcaaatgaaagaattgaaggaacgatacaacattgttggactttcccaggtaaagcatgagaattatgatcttcttcatttttgcctattatgttcatgcaatttgccattatttttattctttaaagagcaagtaggtcctagtgggatgagacttttgttgttagagtgcaagtgggtgccgattattgctctattataaagcatttgatcattacaaaatttttgaaataatcttataaatcaaatggcgtcaacaa

SEQ ID NO: 3483 - DNA, 288 bp, Glycine max
agctgatatacacttttactgttttcttatgtctcccacagggaatatccaaatgcctcagcttcctagacttgcctcgaaagtctctacaatgaacgttacggaataccatcatgctgccacaaacctgatgttccatctcccaagagagctttactatgactctctaccaagagcacaggttccttgggtctgaatgtggcgcatctttcacttgatccagggtgatagccaatagcaggacaatcttgatcctcgatttcctcttcctgcccaaggaagccatgc

SEQ ID NO: 3484 - DNA, 380 bp, Glycine max
  unsure (1)..(380): unsure at all n locations
aggcatgtttggttgagctttgagcttgannctcgcaaacccccattacccaaaccccttgaacgtttgcacttatataaatataaagttttcaaggggcacttggtaaagggcgacccaaaaaacccaactatttgtgaattttggggaaacccttcatcgtgtttattcaacaaagtttacaaaaataagtgtattacattcaacacccttttaaagtaagatccatatacaaaaatttttgagacaatcgaaaggaagttctgttcttgaaaaaaaatttgcaaaatgccaaaaacaattatagatgatgtataactcctctaacactaaaaaaaacttctaagcacacataattaaattcacataacaacttaaag

SEQ ID NO: 3485 - DNA, 318 bp, Glycine max
agctttctcggggtcttttccttcaaaggcagacatttggaaagttagttttaccaagaaatgctactcttaaaacaaaaatggcgtacaacctcctccaataaacacaaacatcaatgtaaatttagagcaaactcatgcacatactttcttacgagcattcattcgcacaagatattcttctaactaagaaaaaatgcacccatgcacaatcaaggcaccttcgttacctagattatttatatgtacttccaaggtgtatttgctacctacatcacatgcacttccttggctaaatttacatacatgcatactcaa

SEQ ID NO: 3486 - DNA, 261 bp, Glycine max
ccataattcactccatcttggatttcgaacgggtttatttggccatggaaaagctactcaatgaaagcaccaaagcgttatggcccaatgactaagctggcaaattcctagaatttgagtgctaggactctccaaatacaatagaagagaagatgagttttattgatttatgccctttttcattacataattcttgctttatataaagtctatggattaagtgctaatagaattctatcaattctggggacaaggcctaat

SEQ ID NO: 3487 - DNA, 331 bp, Glycine max
agctttaagaattatgggctcatcaaactacttgtttcccgagggaagttctataaatagacctcccatctttaatggagtgggttaccactactggaaaacctgcatgcaaatctttatagaggcaatagatttaaatatttgggaagccatagaacaaggaccttatgttccctctatagtggccggaagtgcaacaatagaaaaacctagagcagattggactgaggaagaaagaagattagtacaatataatttaaaggccaaaaatattattacatctgctctaggaatagatgaatactttagggtttcaaattgtaaaagtgct

SEQ ID NO: 3488 - DNA, 335 bp, Glycine max
atgcaagctttagtcaaggaaagtaactttttaaaattttcaagaataaagggtggaaagagagtaatgcatttgaaacgttcagaaagttagcagatgggcctaaaagaaatgttataacttggcaaggatacgatatcaacaagtatttgttctacacgaaatcacaagatgacaacaatacaatgcaaaatagtagtgttagtctaagggttgaatctcaacactttgctattgtacatgatgacaatccctatgtagctttcatgtcttactttggagtcattgaagaaatctgggaggttaattatgtaaaattcagtgtcactattttc

SEQ ID NO: 3489 - DNA, 328 bp, Glycine max
agctttacaccgttaaagagaattttaagctcttagaaggaaaattacccggttcttccaggtgttgattttaaacagctttcatctgataggagcttttttcaaagatgagattaaatctgtatggagttgcgatgaagataaaagccccggtccggatggctttaatttccccttctttaaagcatgttgtggtgtcttgaaagatgagatatttggaattgtttaagagtttcactcatcaggtattttgctgaaggctgtaacatcctcctttattgctttgatcccgaaaaaggataatcctcaatctttgtcagattatgga

SEQ ID NO: 3490 - DNA, 293 bp, Glycine max
  unsure (1)..(293): unsure at all n locations
atttggagatacagagccggggcttgtgatggttactatgtttaaaacatataaaatatttgtatataaaagaaaagatatatatatatatatatatatatatatatatatatatatatatatatatatatatatatatatatatatatatatatatatatatatatatatatatatatgaaatattatttaatattatttgagggagaagagaggttcccttttttttgttaataccctgtgcacacgaatanattatttaaactcgtaagatatattttttttttttggct

SEQ ID NO: 3491 - DNA, 331 bp, Glycine max
agcttaagacctgtttccgcgttcttatcatatcaatgttttggaaggggttctttaataaagtccgggccaaaacatttgaattaatttggtatttgggaaagccattcattgttttcattctcaatgtttccaaaaatcactttgttgtgttctgatccaatcaaaagtaagtttcaaaaacaccagttgttgattctttccaaagcatgttatgtccatgaaaaaaaattgtttaagtcccaaaaatagttatatatgatctataactacactaacataaaaaaatatatcaaagcacacataaatcagtcaaaaacacaaactcacg

SEQ ID NO: 3492 - DNA, 219 bp, Glycine max
cttaactcatatacttactttaacattaagaatactttattttacatgtcccccattccttcccattaataaatgccccctctcaaaatttacatacaaaattcacatacgtcacttcttccattttcaccatgacatattctaactacaaaattttgttatttcacccatttaaaaacaacaaaacaatttatataccaaaatagattcttgactctc

SEQ ID NO: 3493 - DNA, 213 bp, Glycine max
caaaaatacttaacaaacctgcaaaaggagttttgcggctttttgcaaattccgccatgtttggatcaaggccatacttgactgaggatcgatatttgctgaccttcattgtcacaagacaaattttgaagtaatgaaacttaatgcctcatcttgctgaattgtgaatcacctttttttgctttcaccttagatataaattgcctgacaaca

SEQ ID NO: 3494 - DNA, 319 bp, Glycine max
agctttgagccaattctaacgattataactttttactcggatgtccgagtgagtctcgtaatatatcgacacgctcgaaattgaatgttgaagctctaagcctattcaaacaacaataacgttttactcggatgtccgattcagtgacgtaatatatcgggacgctcgaaattgaaagttgaacctctgagccaactcaaacgacaataactttttacttggatgtctgattgagtaccgaaatatatcaagacgctcgaaattgaaagttgaacctatgagcctattcaaacgacaataactttttactcggatgtct

SEQ ID NO: 3495 - DNA, 322 bp, Glycine max
agcttcacaaatctggcaacagtataaatatattgtacctggtacaagggtaatagtgtgacagcaggaacatctcacacttgtagcaccacgtgtgtacattagcaatgtcgtacagcctccacaatagagttgtgacatgtccattcctgcatgggcatcatgaaattaaaggttcccccagatgtaaccattcagttaaagtacaatacgtgtgaatgaatatttaatcaagctaaatgcataatttcttttcagtttatctcgctctcaccacacacacagtatctttcaaataatatgcctatgttattaatagcta

SEQ ID NO: 3496 - DNA, 323 bp, Glycine max
agcttgtcccagagtttcgcgttagcaagagctaatcctggggttctcaaagcagaaactcaggtgaagtttttccagcatcacgatcggcaagcgtcgcatagcgcagtggaatctgtggattggtgagaagataatgaagacgatgtcttttaatcgcaggttcaacctgttgacaccgtaacagataattggacttcttgagtttctccaatatcgaatgtgaaaaatcctttgtagttgcggtggaagatgcgacggcgactggtgtttctgcggaaattggtgtcagaatttcttcagaagcagaagccatgaagagg

SEQ ID NO: 3497 - DNA, 316 bp, Glycine max
agctttcttaagaagattcctttagtagctagagcttagctacacacacccctctaatagctaagctcacttccttgagatgagaagctagagcttagctacacacacccccctataatagctaagaacacctccatgccaaaatacatgaaaatacgaaaaagtccctactacaaagactactcaaattaccttgaaatacaaggctaaaatcctatactactagaatggccaaaatacaaggcccaaaagaaggaaaaacctattctaatatttacaaagaagagtggacccaaccttggcccatgggctcaaa

SEQ ID NO: 3498 - DNA, 312 bp, Glycine max
  unsure (1)..(312): unsure at all n locations
agcttctataaaaggctcgnttctaatttctgtacaattgcatcacctctcaatgagctggtgaacaaaaatgtggcatttacctggggtgaaaaacaagagcaagcctttgctttgctcaaagaaaagcttactaaggcacctgttctagttcttcctgacttttctaaaacttttgagctagaatgtgatgcctctggagtgggagttggagctgtattgttacaaggtgggcaccttattgcttgttttagtgaaaaacttaatagggccaccctcaactaccccacttatgataaagagctttatgcc

SEQ ID NO: 3499 - DNA, 385 bp, Glycine max
  unsure (1)..(385): unsure at all n locations
acccaatcggttgaacctttgagcctttgaatctctnanaccgccaagccccatgcanccttaaagaccagcaacactttatttatgttnccctcttcctccaggcaatgggtggtctagcgcctaaatgccaaacttacactgatgtaaattagaaacaaactcttacctcacaccactccataatatttatttatactcgtccaaaccggatttacaccaaaaattccaccgtatcaaaatttgactcttcaacacccaattttgccccacaaatggctctcggttcactttgatcattccgatttccctctaccacacactaacctttctcatctgtcttaaatgaaaatccaagctacgatcaatccctttaacctccatt

SEQ ID NO: 3500 - DNA, 328 bp, Glycine max
agcttctccaaagggcatggttatttccagtttcctgaaaatatccaaaaatctcaccaaatgacggtccttctccttcttggaaggtaccacaggatatggtacttccttaccttcgtttacaactttatcacttctacttttctcttcatttttattttttccatctttttcaatttttttattttctttttctttttctacttcttttttctttttctgggtcattaaattctttttgcttgaccattatttgtttctctttttcttgattgctttcaccactcacctcatttttcttgccatcagtacctttcttttcagcagt

SEQ ID NO: 3501 - DNA, 330 bp, Glycine max
agcttggttcgaggtacttacccgttgaagatcgaagaacgatgaagaatgaatgaagaacgtcgaagaacggtcgaaaccttcgcgaaattcctcacggaaacgttacggaaacgtttcggaagcgcctcggcttggattttcttcacggaaacaatttttccaagcaaattcgaaagagagagaagtgcctaaggggctgaaccctttttcacttcacttctccccctatttatagaaaattgggggagaagcttgccacccaactcgcccaggtgagcagggttgcttcctccagaagcaacagccttctgaaggaatcttctggag

SEQ ID NO: 3502 - DNA, 330 bp, Glycine max
  unsure (1)..(330): unsure at all n locations
agcttctcggctcatgctgggatctcctctttttcaacacccgngcagcctaaggcgcccacccagagggaagctccccaagttccaactccgaacacggctcgaccggccggtaattccaacacgacaaggaacttccctccaaggccattgccggaattcaccccgctcccaatgacgtacgaagatcttctaccatccctcatcgccaatcatttggccgtggtaactcccggaagggtcctcgaaccccctttcccgaagtggtatgaccctaatgcaacttgcaagtaccatgggggtgccccggggcattccatcgaaaaatgc

SEQ ID NO: 3503 - DNA, 331 bp, Glycine max
agcttgttacaggaagcaagtttttgcactgtctagatctacttaatgtgaattggtggaaacgaattgggttacttgtaattcagaaatgttattgaaccaaagtaaagattgttaattgttggaaaaaacctgaaggttctattagattcgtaaaaagataaaagtgaacaaaagattgtttttacaaagtctagagacctatatatagctttctaaagatatcaatctaaaagggaatactatggtcgtggtaaaatctaccacagttgtggtcgaacgtgatgctaaagctatgaggcgttgtggattgattacggtcctcatgctt

SEQ ID NO: 3504 - DNA, 326 bp, Glycine max
ctgcagcatgcaagcttggccaacttattgattttgccctataaacagggtgctgtggatcaattgcaaggtacatgaaggacacgattatgagcaagagaaatagtgctcaaattatcaccaaaaattccaggaatagtgtgagaaactttcttcttaaacaacaaggtctgaatttgttggacctctaaagtatctggagcaaggttccagtacttatctttagtgcttgaacgatcaacaacagtttgctttttggaccaccaagataccatgctgggtcctacaaagaaaaaagcattgaatgtagaccccctgttatttgg

SEQ ID NO: 3505 - DNA, 324 bp, Glycine max
agcttgcgcatgcttttcccttttgaggatgttccatatgctcttaagactggactgattcatttgcttccaaagtttcatggccttgcaagagaagacccgcacaaacatttgaaagaatttcacattgtgtgctccaccatgaaaccccgcagatgtccaagaggatcacatatttctgaaagcttttcctcattcattatagggagtggcaaaggactggctgaattaccttgctgcaaggtccatcacgagctgggatgacctttagagagtattcttagaaaaaatttttcctgcttgcaggaccacagtcatcaggaa

SEQ ID NO: 3506 - DNA, 314 bp, Glycine max
  unsure (1)..(314): unsure at all n locations
agctttgtaacccatccatgcctcnttctttcggacagaggtaagtagcaaaagatgttgatatttgcctatcatcaatatcaatcatggtagttatatatttctagttgttgcagtctgcagcactgccttttaccttattatgttctaaaatgcttccttatagatgaaaccataaatagaacatacttaattctttgatcctacaatccttttgatttaaaaatttaactataaaacatcttgatcccattgattggattatccaattgattcaattattcatctgattagttgtaccaaattaaaaaatt

SEQ ID NO: 3507 - DNA, 320 bp, Glycine max
agctttgatgtttatagagaatttagagctctagagaatacacggagaagaagagagcgcgagcaaaataggttgcgtcaaatataatttaaaatgtaatttcaacatcggttttcaataaaaaaactgatgttaacaaattgatgttaaatgatcatacgttaacatcggttttctacaaaactgatgttaacggatacacattatttacaattatgccaccgcgtgtatgttaacatcgattttgtcaaaaaccaatgttaatctgtcgatgttaaaattgctttttgtagtagtcgacggtcgcacgaaaaacacaa

SEQ ID NO: 3508 - DNA, 294 bp, Glycine max
gcctttgtaaaaacgctgtccgggctttgtgaaccatctgatcttttcgaaaattggtctgaaaattcacatgatagttgtccctgatcttaccgatgggatctttgagaaaatgtttggagcgagctataaaccccttaatgaagcttttgggggaagcctcctaatgaagcttctaaagaaacctacatgaagctaccttattaaaaacgcttcccaaccttatttaaccgttggatttttttccaattgggttttgaacttctcaagacaattgtacatgatctgaccggt

SEQ ID NO: 3509 - DNA, 309 bp, Glycine max
agcttgctctaaatttacattgttgtttgtatttatgggaggaggttatatgccatttttgctttaagagtagtgtcccactggtaaaattaactttccaaatgtttgccttcgcaggaatggccccgaggaagcttgcctcaaagaggtccaggaaggacaaggcggccgaaggaactatttccgctccggagtacgatagtcaccgctttaggagcgctgtacaccagcagcgcttcgaagccatcaagggatggtcgtttctccgggagcgatgcgtccagctcatggacgacgagtatactgatt

SEQ ID NO: 3510 - DNA, 315 bp, Glycine max
agctttaccaatcttgacccattccgggcatagtcggtcagtgagaacatgtgacgtacctaagcaggcgagctcctggcagtcaacagataaaaggaaaacaagaccacagagcaaggaggcttgtggtggctggccagctgtgaattttgtgtaatatgtggattgtggcctctggtaatcgattaccaagggtgggtaatcgattacaaggcttaaaattgaagacagggggctaagatggtctctggtaatcgattaccaaggggtgtaatcgattaccaggcttgaaaacgaggtcaggaagctagggaa

SEQ ID NO: 3511 - DNA, 232 bp, Glycine max
accttggggacgttatgtggggtgctttttcccaaaaccaagcttgaccaatcccgacccaacccgggcatagtcagtcaatgagaacctgtgacgtacctaaacaggcgagctcctggcagtcaaccgatttaagaacaaagaccacaaagcaaggaggcttgtgtggtggctggccaactatggatcttgagtgatatttggaatatggcctctggtaattgagtaccaa

SEQ ID NO: 3512 - DNA, 329 bp, Glycine max
agcttccatcaacatattaatttataattttaaaataggaagcaaagatatttgtaattctatgtgataattttttatgatatttattctcatatttatattgattagtgttaccattgtgggtgaatatattgatatgttatatattatgtgtatgtatacataaaaaatatattatgtgtgttatattgtgagtataaatatgcaatattcataatcactagttgattgatatttagtggaaaaagttatcaatggtatgttaaaaagaatatttatctattttcatgcatttaatgtgctcttgtattaacaacatcaaggaataa

SEQ ID NO: 3513 - DNA, 329 bp, Glycine max
agcttctcgatatattatgtccttgaatcatacatctgtgggaagagttatgaccatttgaatttctcgagagctaccgtagttcaatttcgagtatctcgatatactattttcccaaatcggatatccttgtaataagttatgaccattcgaatttctcgagatcttctgttgttcaatttcaagcgtgtcgatatattatgtcctctaatcagacatccgagtgaaatagtatgagtagtcgattttctcgagagtttccgttgttcaatttcgagtgtctcgatatattatttccccgaatcggacatccatgtgaaatgttatga

SEQ ID NO: 3514 - DNA, 332 bp, Glycine max
agctttgcttctacacattgagttctataactcaacctgttactagaataaatcccttgcaccctgctgagcctaatatgaataaattgtctttgaaacccaagttgaatgaaactaataactatctaatattaggttgtaggagagcacgggttaagacaaatttaccactaatttgggggaggaggattcttgggagaaaatttttgtttcaggaacactaataacaatacacatccagaggaaactgcattatgtgatcaattgttacagtaccaatgtaattcaatttttatagttctattgtttcaaaaataaataaaaaaagaaaa

SEQ ID NO: 3515 - DNA, 307 bp, Glycine max
tcaagcttgactccttttttcaattaacccaaatggcctcggtatttatagatttgttcttaaagttcactatgtaggaaaaattgtttgctatatacaatggtcaatactcaataactaccatggtatgagaaagcctaacaaaaaggaatcttatcttagggagaaaatgtattactgtaaccaagactgttcgagtcattcagtgtactcctttgtaactaggcgagcataaaacagtcaatttgaccctttggtttatagcctatacccattgataccctacaattctttttatagagcaaga

SEQ ID NO: 3516 - DNA, 323 bp, Glycine max
agcttgtaattgattacactattactgtaatcgattaccagagcagattttcagaaaatattctcaacagtcacatctttttatgtggttcttgaatggctatcaaaggcctatatatatgtgacttgagacacgaatttgctaagagtttttcagaacaaaaaggtcttatcctcttataaagcaaaatcgttttatcctcttacaaattccttggccaaattacttgtgattcaataaggaattatttgagtgctcaaattgttcaatctatctctttcaagaaagatttcttcttttcttcttcttcattctgaaaaggg

SEQ ID NO: 3517 - DNA, 317 bp, Glycine max
agcttgccacccatctcgcccttgcgagcagggttgcttcccccaaaagcaacagccttctggaggaatcttctggagggcccaagtgggcctggttgctatttgcacccccctttttactaagtacaccccctacctttttttggtgattcttttttcgtaaagttacggaaacttacgaatttcgtaacgatacttgttttctttccgtaatgttacggaaccttgcggattacataatcatccccttttttgacttacggaatgttacggaacctcaataattgtgcaacgatgcttccatttgatttccggtg

SEQ ID NO: 3518 - DNA, 320 bp, Glycine max
agcttgatagaagattggttcttgaacacttggaaaagcttggaagaagaatgaggatggtgtttccttccctcatgaccagctcatgaaagagaggaagaatgacaaagttttgtgagctcttagagtttaaatgaaacttatagaagaagcttagagcatggtccattggattattgtgtaggacttaatggccaaatttgacacactaaatgaccttgatgggctatgtgtagttgtgccatccaataccaagtgtggtgtgcttcacttttaaattttttactcaaaaaggttaaagtagagttttgcaaaaatgg

SEQ ID NO: 3519 - DNA, 316 bp, Glycine max
agcttgttgaaaatctgtgagtttgtcaatgtcatcaggtataggggagtgacatcatgatccgacctatctgcaagttttgctggtctctcagctccttgtttatccaacacagttaataaacataagtgaatgacaatcaacactttatttgtaacaaatccttttttaataattcttaaaaacaacaaaatgaaatacttattttgaaaaactctttacaagatgtgtcggccaagtaaggaaggtgttaagtgcatgtccaactaaatgaacctcttaagcgggtacatgaacgctagcatcagcatctcaa

SEQ ID NO: 3520 - DNA, 315 bp, Glycine max
agctttataacaatgcctagggttgagctttacaaggcacccatcttggtcttgttagggataaacatgtctttgaagtacattcaacatctagttatgtcttcttttaccatggcatagtgcagtgactaacactgtattgagaaccattttttgtccctcatttttagtctttgtttcccacctcttaaacttctgcattttcccttttaggtttcttgtttttttcaggaatggtggaaattatgttttatatggataagactgttggttggaattggaatgagaatcaacatggtgatcatacttttgttt

SEQ ID NO: 3521 - DNA, 315 bp, Glycine max
  unsure (1)..(315): unsure at all n locations
agcttttatagaatgttcgntcctaattncggtacaattgcatcacgctgtcaatgagctggtgaagaagaatgtggcatttacctggggtgaaaaacaagagcaagcctttgctttgctcaaagaaaagcttactaaggcacctgttctagctcttcctgacttttctaaaacttttgagctagaatgtgatgcctctggagtgggagntggagctgtattgttacaaggtgggcaccctattgcttattttagtgaaaaacttcatagtgccaccctcaactaccccacctatgataaagagctttatgcctt

SEQ ID NO: 3522 - DNA, 328 bp, Glycine max
agcttaacaaacttagaaatcatttgatcatgtattccgaaatatagggggagtaaacggatgcacattttatctatatacaattgtttgttgcttgcttgaatcttgatttcaggtattgtattgtcatcatcaaaaagggggagattgtagatgcaattggctttgatgttttgatgatgatcatgatgatgtgctgcaaatgggcttttcaagattaaaattcaagacaatacttcaagattacaagtcacaacatcaagatgatcactataatattaggaagggaattcctaattgaattagcaaaggtttggccaagtgattt

SEQ ID NO: 3523 - DNA, 330 bp, Glycine max
  unsure (1)..(330): unsure at all n locations
agctntacaaccctttttcccctttatgcattatcaaaaagccaaaggactcgagaatcaacacagatataataatggagtagaaaaatataaatatcaaagtataaggcataaccatccaaactcacaaataagaaataaccaaaccagaatccaaataaatcaaaacgtcaaaaaccacataatgtcaaagcagaaaaagctgaaatccaaataccacaagataaataaagtacttaacataataatttaaaagacatataattagaaactaaagtctaaaaaggcggaggtggtggtggaagatcgaaactctgacgaatgtaacct

SEQ ID NO: 3524 - DNA, 329 bp, Glycine max
  unsure (1)..(329): unsure at all n locations
agcttatcccatgcttctttggtcgtcgtttcgtnggatatcttctcggatgtatcttcatccaccgattgataaatgagaaagagagctttcttgtctctctttcttgactccttcaacgtctcctttacaccttggcttagcgaggcttcatcttgctcctcgaagtcattctctacgatatcccacacatcttgagctcctagtagcgccttcatcttgatactccaattatcatagttgttctttgtgagcatcgacacttggaaaggaaaacctccattcgccatcttttgaggatcttgaagctctgataccactttgttgga

SEQ ID NO: 3525 - DNA, 328 bp, Glycine max
agcttggaggggttgatggggattctatgctgagaggaacgaggataagggctacgcaggagtgcgtgagctcaattgaaaggtgggcaaccggggatggtcggtttatatttgacttgtggaagtgggagagttgatttgcgccatcgcctgatcgccacctagtaccacatatgacgggtaccccataatccactaagcttgatgtgagaaagcggggaagagtcagtcttcctacttttgtttgttgaccacagagtggtacctggagatatgtcacgggggtcaggagaccttggggacgtcaggtggggtgctatttcccaaa

SEQ ID NO: 3526 - DNA, 310 bp, Glycine max
agcttttagcaaattctaacgacaataacttggtactcagatgtctgactgagtcctgtaatatatcgagacgctcagaattgattatatatatcgagaccctcagaattgattatcgaagctctgagcaaattcaaatgacaataactttttactctgatggctgattgagtcccgtaatatatcgagacgctcgaaatggagtaccgaagctctgagcaaattcaaacgacaataactttttacttggacgtcggattcagtcccggaagaaatcgagacgctccgaaatgaatagccaagatctgaa

SEQ ID NO: 3527 - DNA, 316 bp, Glycine max
agcttgattactattttccctattcatattccttcattcaatgcaatgacaagaggaggagtgcttcctgggttcggaatgtgaacgtgggtatattgatttctgttttttcttctttttttttcaaatgctaataattactaatctttttaaattaatttacgttcttaaataaaataatttaaataactacatcaaaattttcaattacttgtattattattttaaaattattatcttcctatctctttatttatttctcattaattttttaaaagagaataattaagtaaaaatatttaagagaaaaaattat

SEQ ID NO: 3528 - DNA, 319 bp, Glycine max
agcttgcatgcagctatgaagatatccaaatacaaccatagggctcaacttttgggataaacccaaattcatgaaccattttatgaaatagtatcttcccttcttgccacaatcctgagtgactacaagcatgaagagctccaatgaatgtgatgtcattatggatgacccctagtgcttccatttcttcagagttccaatgctgcctcaccatgaccatgcattgcaaaaccagatatcatggcatttcacattgaaacatcacggtccatggccgcagcaagcagtgcatctatgtctccacacttggcatacgtgt

SEQ ID NO: 3529 - DNA, 285 bp, Glycine max
  unsure (1)..(285): unsure at all n locations
agctttaacgcatgtgctatcttctaagaaacaanccaagggttttggtaggtgttaaatatccctactgaaaggcattctaacgatgatagtcctcataccaatccaactctgaaacaggaatagacttttttagctacacctaagcgggccccataatctgcatcttaatgaatcacccgtagtttttttgtccatacaagatcaattactgcacagaaaaatgcattcttttttgggccaaaacaaccagccttgaatgtaaaattatttgcaacaaccaaa

SEQ ID NO: 3530 - DNA, 323 bp, Glycine max
agctttacaaggattttcatctttatatgattgcttagagaggaaccgtgagctagcatgaccaaacttattatgacatacccagtgatgctgtttgattgaaagtatgcatgataccttttgactggacagatcaccaagtttaatcttataaagatttccttgtctcttagcagagaagagtggtattgtatctactgtcacataattgacttatgctcaatagattatgtttgaatcctttaacaagcaaaacattatcaatagaagaatagggtggaataccctctgaaggaagagaagagcacaaaaggggggggggg

SEQ ID NO: 3531 - DNA, 337 bp, Glycine max
  unsure (1)..(337): unsure at all n locations
gagccccctgcnggcntgccagctttttcatattttctaaatgttatttcgggcgaggagtaactcggggtaacctccatttaccacagaattcagacttaaccttccaactcataaagcctcactctctttccactcataacatcacattctcactttctaaccctaggtgaacgctacctttgatgtctaacagtcatccataagtgatttcagcatataaacatcacaaacggcataacaaactccctaaaacagaatgggtatgtctaactcatccaaacatggcgatgtcaacaggctttcaacttatgtcttcacaaataatcatcacacg

SEQ ID NO: 3532 - DNA, 313 bp, Glycine max
agctttatattacttaacggatgtctgaatgggtaaagggtggagcaacccacccggcttacaggtctcgtatatcatttgctgacagaccgagcattgggccacgaattggcggacatcacccctgataatgggccaatcaaaattttgttgaagacagcggagcgttttggccgtgccgaaatggcccccgattggagaggcgtgagaactctttcaatagcgactgtgtaatagcgcatgggaagggaattcaaatacgcttgttacggaaaataagatcgtggtggatggacaactccggttggtttgc

SEQ ID NO: 3533 - DNA, 341 bp, Glycine max
  unsure (1)..(341): unsure at all n locations
gacctgtggcatgaagcttaacttgattggatgaaccttttcataaaagcatgagcttggttcaaccccataacccaaggaatggaaattttgattgccaatatttcgaccacatttcacaaagatgaatgactcgggcatacttaagctatgcatggaaaaagtaattatgagattgagacgcccgaagaaacatcatttcctagttaaacacgcattaggtaccatgctcaatcattttgttttttaagagaaacagggttatgatcccaacatggttagcttatggtacctaacacatgcaactaagaatgtagtgtgaactttcatgcttncttttt

SEQ ID NO: 3534 - DNA, 81 bp, Glycine max
ggatccttaagtcaccgcggctgcagcttgagctataggaatatttttgttgttagaaccaatatgaagttaaaaaaggga

SEQ ID NO: 3535 - DNA, 458 bp, Glycine max
cttcgagcgtctcgttatattataggactcaattagacatccgagtaaaaagttattgtcgtttgaatttgctcagagcttcaacattcaatttcgagcgtctccatatattacgggactcaatcagacatccgagtaaaacgttattgttgtttgaatttgctcaaagcttcaacattcaatttcgagcgtctagatatattacaggactcaatcaaacatccgagtaaaatgttactgtcgtttaaatttgcttagctctccagctttaaatttcgagcgtctcgatatatgacgggactatatcagacatccgagtaaaaagttattgtcatttgaatttgcttagagattcaacattcatcttcgagtgtctcgttatattacgggactcaattatacattcgagtaaaaagttattgtcgtttgaattgtctcagagcttcaacaatcaattt

SEQ ID NO: 3536 - DNA, 439 bp, Glycine max
agcttcaacaacaggtgctcggtgacgttctaatagtctcaaataagagttttttctgattgcttttctaagaacacccacaatagactatcctttatctgaagttatccttttgattgatcatttttaccacaaaaacaaacatacaccccaatgcataagaacccccacgtaatagtacaaaaagtaaacgaacacaaccttacctccgcaagatgaataatgcatatgtatcttgattagtatcaatttataattgctttgtgtgtgtgttgatatatattaactattataaaatcaatatatttatcttaaaattattacattattaatgcataacctatttttttatattaaatatagaatagatactttctttataggaatagaatatatatacttataagttattagtatgagaatacccaacacaatctct

SEQ ID NO: 3537 - DNA, 459 bp, Glycine max
  unsure (1)..(459): unsure at all n locations
nggaacaatggaatactgggtggtatttttcctcgtcagataacttgagcttataagcaacaggaccaattctttcaataacttggaatgggccatagaatcgtttggcaagtttggcggaagctgatgaagttcccttggtagaagactgtcgatagggtcgtaaccggagaagaacccaatcgcccacctgataattcacctcctgacgcttgtgatcagcttgcttcttcatctggtcttgtgcctttagtaatttcttgcgaatggtttgaaaagtagcgtctctatcagttaacaagtcctcaacagcttcaatgtttgacgtgccagagatgtattctagaaaattaaatggcttccgaccaaacgttacctcgtagggggttgaccctgtccctgcattccatgaagtattgtgggaccactcaatccatggaaggagcttaccccatttat

SEQ ID NO: 3538 - DNA, 513 bp, Glycine max
  unsure (1)..(513): unsure at all n locations
gcaacgagaaagagagaacgtgaaccaacgaaataaaaaannnaaaagacaactgagaccggacnnaagnnacgagcagcacnnnnaaggaaaggcaaaaagaaatttgaccagcctcaaggtccgctggagccctgaaccacgccacaaaccaattcagaaattaaaaagagaaccacaccagagaccaaaggtgcaagaagaaaatccgacacaaaccctaccaagaaaacaccaccaaaccgggaacaccttgcacaatggccaacctcaataccggaacaatgaccacggaacaaataggccgggccgaaagaacaaaaatgccaggcaatggaattggaacgaggaaaggagaaaacggagctaagaaggagcatggagaaaattaccaaggcaaggcccgacgcgtcagccatttgcgcaccggtaccccctcaaccgcaaaccaagcaggggaaaaatccaatcgcacaaagagaaaaggggagaagacttcagcaaaacgccaat

SEQ ID NO: 3539 - DNA, 430 bp, Glycine max
  unsure (1)..(430): unsure at all n locations
tcttggcattgaactcatgtgctacaaccaagccatgtntgggtttgcaccctatggtccttattggcgcgaactaagaaagattgtaaacttagaaatcctctccaatcgccgagtagagcaactagagaatgttcgtgtctccgaagttcaaagttcgatcaaagagctcttcaatgtttggtcaagcaacaagaataatgagtctggctatgcgttgctggagctgaagcaatggttttctcaattgacatacaacatggttcttcgaatggtcgtcggaaagcgacttttcggtgctagaactatggatgatgagaaagctcagagatgtgtgaaggctgtgaaggagttcatgcgtctgatgggggtgttcacggtggcagatgctattcctctcttgagatggtttgatcttggtggctatgag

SEQ ID NO: 3540 - DNA, 259 bp, Glycine max
agcttgtaattgataactgaagctctgagcatattcaaacgacaataacttttaactcggatgtccgattgagccctataatatatcgagacgctcgaaattgaaaacgcaagctctaagaaaagtcaaacgacaataactttaaactcggatgtccgattgagccctataatatatcgagacgcccaacaaatgaaaacggatgctctatgaaatgtcaaacgacaataactttcgactgggatgtccgaaagtgccc

SEQ ID NO: 3541 - DNA, 467 bp, Glycine max
tatgcgcatatttccctacgaacgttcacttgcacaagacatcctattaactaagaaaaatgcacccatatacaatcaaggtagcttcattacctagattatttacatgtacttccaaagtgtatttgttatttacatcatacacgccatcttgtcaaaatttacacacatgcatacgcaaagcatttcggggtaccaaaaattgcacatgcgctcatcttggtatttctaatatctatacatatacaaacttcatgatgaatcttgactacctacgcaataaggtgctacatttcatgctctctcttttttttttttttttttttcaagtttttgctacctaaagccatatgcaaattcaagcatatcttcctttgctgactaaaattgtattcaaattagaaggtatatatctttttgtaatatgtttccttcacataacatgcaacacatctatatatatattt

SEQ ID NO: 3542 - DNA, 415 bp, Glycine max
ttcaaacgacaataactttttactcggatgtgtgattgagtcccgtcctaaatcgagacgctcaaaattgaatgttgaagctctgagccaattcaaacgacaataacgttttactcggatgattgattgagtcccgtaatataacgagacgctcgaaattgaatgttgaagctctgatccaattctaacgacaataactgtttactcggatgtctgattgagttccgtcatatatcgagacgctcgaaattgaatgttgaacctctgagccaattcaaacgacaataactttttactcggatgtctgagtgagtcccataatatatcgagacgctgcgaaatgaatgttgacctttgagccaattcaaacgacaataactttttactcggatgttctattcagtgacgtaatata

SEQ ID NO: 3543 - DNA, 453 bp, Glycine max
cgcttgtggggcttctatggaggttggatctttgagcttcaatggggtcctttaatggtgattttccaccatggagatgcagcggaagacaaaggaaaggaggtgagaggaggcgtcatccattaaggaataagccatggaagaaggagcttcaccaccaagatgagccttggataacaagcttggagaggatgcttcaatggaggaaaagaaagagggagagaaagagggaggggggagcacgaaattgaaggaagaaaaagggagagaagttgaactttgagttgtgtctcacaagactctcattcatcaaagttacaacaagtgttacacatgcttctatttatagactaggtagtttccttgagaagctttctttagaaaacttccttgagaagctagagcttagctacacacacccctctcataactaagctcaccttcttgagaagc

SEQ ID NO: 3544 - DNA, 443 bp, Glycine max
  unsure (1)..(443): unsure at all n locations
tctacagaaggtgagtttctaatatctctacacttgcctcacctctcaatgagctggtgaacaagaatgtagcattcactcggggcgaaagacaagaggaagcctttactttgctcaaagaaaaactcactaaggcgcctgttctaactcttcctgactttatctaaaactcttgagctataatgtgatcagaggctatagagaggcatcgaaggctgactatatcagcacacatctgatgacctcagacaaattcatagttagagccacaaccacatatagagccacatgcataggcgcataggattgtangacctctatttggaggaagtccagttgatttgttactactgtgatcttacagggaccactatgttggtcattgataattctctcggacaagtgtgggatttattagcaagtgcactgagtcataaaagtag

SEQ ID NO: 3545 - DNA, 407 bp, Glycine max
agcttgagttaacgcataggatggatatgtacagtacagcatgcagagaagcatatatatcacatcacacagtagaatctgaatagtatatatagtccctttctatataaacgtgctattgcgatttcaattggtactactcttttgtttgctacagattatggagttgacccaccagagacttgaggaagataaaaatatagatgaggcacgagtggctcacgaagctgcaatggcaattgctgagatagagaaagcaagatgtatagcagccatggaaactgctgaagcatctaagacaattgcagaggtggaaacacatagacaagcgagtgttgaagttaaatctcttaacaagcataggaaatgacgaagctattggaaaatctaccccaaactgatgtgag

SEQ ID NO: 3546 - DNA, 464 bp, Glycine max
  unsure (1)..(464): unsure at all n locations
ntctattctataccttcccgagaaccacttatctggaaaagtacctccagaaattggcaactgcatgtctttgacagagttacatctgtattccaatcaacttgagggaaacattccaagtgaactgggaaaactaagaaaactagtggatcttgaattgttttcaaatcaattgacgggtgaaattccactcagcatctggaagattaaatctctgaagcatctccttgtgtataataacagtctttctggggaacttcctttggagatgacagagctcaagcaactgaaaaacatctcattgtttagcaaccagttctccggagtcataccgcaaagcttgggaattaacagcagtttagttcttttggattctacaaataataaattcactggcaacatcccaccaaatctgtgtgttggcaagaaattaaacatcctgaatntgggcatcaaccaacttc

SEQ ID NO: 3547 - DNA, 410 bp, Glycine max
agctggaccttaggcctcggctatattatttgcctaaattctcacattgtataaagttagtgatgaagataaaatatcaagaattttccaagacataatttacataaaccaagtaaatcacctatagatggattatcattttaaattacttataaaaggactatatgtcatcataattagtccatcttccaaatatgttatgaagttgttaaaatgtttctgccaaggtgttccgtgagaacagtaactatatatatatagggaaaagcagagggaaaaaaaacaaagagtgggaacaagggtagttgcagtgagagcagaaagcagcagaggaataggttgcgggtggtacttctttctctgggtttcgaaatcattaaaagacaaaagacagcctacaagagaatcct

SEQ ID NO: 3548 - DNA, 467 bp, Glycine max
  unsure (1)..(467): unsure at all n locations
tgaacaagtntagggaaatgaggagttgtctgctttgcttattcagttagcacccaattagtattaggtaggaaaccttagagtgaaaccgttagaatcccttgaaactaagtgagagttatgagtcaagtataccgaaatgaggaagataatgttgagggaagagacctaggtccgaatataagtaaatcatttattcttgagagtcacgtgtggactangattggtagagcgttgaagtcttgaaacttatacctcttttcttgaatcgtcccatgttcgaaaaagagtcagccatgtggccaatcatgttaccttgtatctatttgttcgtttcagattctcattagtgtctcttataatattacccaacttcaaaatagtatgccattcacattctattatcattcagatgtcattctcgtgagaaaatttgacttatgaaatactattattgaggaagcgag

SEQ ID NO: 3549 - DNA, 436 bp, Glycine max
  unsure (1)..(436): unsure at all n locations
agcttaagctatgatgtgaagatacatgaatggttttattactttatgttatatttctaacgccccctcttacaagctccatttatctttctctcccttgctttgatacatgttatattccaaaagcttaaactattaggtgaaagcatacgactaattttattactttatattatatttcagacaagaactacttgtctaggggattgtctaacagtctatgtctattgccactgctattctaataattttaattaaaatactatttttcttctttgttaaccaaactaatgatttagagaaattttataaatcttaatttaatgagcggatgccacatgacaattaaaggccttgtgtatgctagaaaggccnggtgcctggttaaaaataaagaaaagagagatctataaatcgacatgccataccttgatgt

SEQ ID NO: 3550 - DNA, 415 bp, Glycine max
  unsure (1)..(415): unsure at all n locations
tgtatgctggatctttgaacttcaatgatgtcctttaatggggaatntccaccatggagatgcagcggaagacaaatgaaaaaatgtgaaaggatgccccatccactaaggaataaaccctggaagaaggagcttcaccaccaagatgaaccttggataataagcttggaaggatgcctctatggaggaaaagaaagaaagaggggggagctcgaaactgattgactaaaagagggagagaaggggaactttgaagtatgtctcacaagactctctttcataaagtttcaacaagtgtacacatgcttctataatagactaagtcgctccttgaacgctttcttgaaaacatttttgagaacttctttgagagacttcctggaaagctagagcttactacacacacccttctttn

SEQ ID NO: 3551 - DNA, 465 bp, Glycine max
  unsure (1)..(465): unsure at all n locations
tattgcatgagctatatcaggttgagtacatgccatagcatacattattgaacctataatgttagcatatgtgatactctccatataagtatactcttcagctctctttggggattgacttacacttagtttgaattgatcatatataggtgtcacaataggccaacttcgaatttgacattccaaacctttcaataaatttattgaggtatgtctcttgagatagatacaaaatcttcttctttctatcccttttgatttccattcccaatattctccttgttgtcccaagtccttcatttcaaattccctttttaactcagctntgaccttggtaatttcggccttaccgttacttggtattaacatgtcatcaacatatagcagtaggattacaaaggtacctttattccttttgaatagccattttcaattgactacccttgaaccaatgggctttttgat

SEQ ID NO: 3552 - DNA, 425 bp, Glycine max
  unsure (1)..(425): unsure at all n locations
tgcaagcttanggaagtctctgtaaacatgagagactctgcccanaattccctaaaacttttggacaaagttgtgttgtgaaatttgaagctaaaccctgagaggtagaggctatctttcgattttattgtgaacatgttctattgtctcaaagtttttgtaaaatctaacagttggatttttgtgaaatttgtcttgaattaaactaaacacaacattcaacaacttttatgttgaggtaaaaaatattcgagcttaaatttgaggccatctgtggccttaaagttgacctctcttttctagagtttgagactaacaatgctatgtttttctcaaatatgaaactttgtgtttatgatttgaaaatatgatgattctatccttgaatagacaaaataatattttaaccatttacgttatgttaa

SEQ ID NO: 3553 - DNA, 456 bp, Glycine max
  unsure (1)..(456): unsure at all n locations
cttatgcaataaaagaaagaaatcatgtttttatcttatacctgatcatatttttaagcctttttggtccattgagattttgaagcaaagttggtcggtttgaagtattcggaccgcttattgaaaagcttgcatactgaaagcattttagatagtttcttcttttttcactagttgaatagcttgattgttcggttaataggttttcttagtagtttataatattttttgagactacttaaaatattaacttctagttttgaattttttatattatttttttgtccttaattatttattaaaatttttttaatctttttcatttaactatttaaggaaatttttattattatttttattctttatgaaattntacattttcaattatttcaacacataatttcaccaaacacatatgcttcaataagataagatagggaaaatgataattagtat

SEQ ID NO: 3554 - DNA, 244 bp, Glycine max
  unsure (1)..(244): unsure at all n locations
actgggtttacgaataaaactccactgaatcaaaatttgacccctcaacactcaatttaccctagaaatggctcttgctttcactttggtcactcattttcctcatttgctcaacccaagctntcccataagtcctaaatgacatttcanactaggattaactcactntaatcntccattaccactaaatccagatttagcctttcaaaccctaaagcatcacatttttccactcatatcacta

SEQ ID NO: 3555 - DNA, 421 bp, Glycine max
  unsure (1)..(421): unsure at all n locations
ntattcaagacaaagaaattaaagatattcaagatggatgatcaagacagtctatagagtcttagaaagggtatattaaataggaagggaattccaattgaagtagcaaaaagtttggccaataatttttaagttaaaaagtctttttcaacaaatttactctctggtaatcgattaccagaggatgtaatcgattaccagtggccaaaactaatttacaacagctactaaaatttgaattcaaaatttgcactgtgtaatcgattacacatatatggttattgatcaccattggtttgccaacgttttaattcaaattttaaagattgtaatcgactccatatatactgtaatctattaccagcgcagattttctgacaatattcttaacactcacatcttttcgagtggcccttgaatc

SEQ ID NO: 3556 - DNA, 384 bp, Glycine max
ctgcagcttatggctcttgcatttgaatttttattctttgcacttgaagttgttctgatttctcatcttgttgctcccttcctccagttatcacactgtgagagtcataacactggagagacatgataaggtgatgacagttgtgcttttggaatggaatttaatattgatgtgatagtttcccctggtttacatgaattctttatgtaatccagtcaccatcatatgcctcttttgtgttatggttctcaagtcggtctgtttcttgagaatgatcaaaagataacaggtggaagggtaacctgcagctttacttcatttcagtataataactattatccaccctctttctccatgttcttgtgctaaatgctgattttattc

SEQ ID NO: 3557 - DNA, 459 bp, Glycine max
  unsure (1)..(459): unsure at all n locations
tcannacctcaatttctcgacagtctctttctcgttcacttgtgccccatatgattataaacagatggggtagcgttattttcctcgaagattgaagatttatacagaaatgaaaagcccgcgaatcaaaatcgctttgggtagctcgttgagctcggaattttttttccttttagaaaaaaaaaggtggtttttttttctgaagatgatgactatcgattggttgtaccatctctgaaccactgaacggaaactgatctggtggaagctgtgtctctattctttctctgtgattctctccacaaacacggagaagcttatcaagaattctggaagaaggtgccggtattggattggatgtgttttctgagaatgagtaaaattaaaaacgaatttgacaacgtggctcaatttgattggctcgattcatgataactcgactcctaccaatatcaatta

SEQ ID NO: 3558 - DNA, 370 bp, Glycine max
agcttgaaagagctcgggtagttaaagagaagttcaagtccatagccatcaaagtctgaagagagtataatgaactaagggacgccaatatggccaccgatgaagccttggaatgagaaaccaagaaggcccgaaaggaagaacacgaccaaaacaagttttgaggggctttatagggcagcaatagtgagctcaagctccgaagaggtgaaaggaatcatcacgggtcaaaggcatgatcttgaagaacgagctaaaggcttgccttaggtcgaaaagaaatttgtcccaacagttaagcaagactgaagggaatatgtgggccatcatcgatgagtgcaaagagaagctaaatctacggcgactcacg

SEQ ID NO: 3559 - DNA, 449 bp, Glycine max
  unsure (1)..(449): unsure at all n locations
tgtaatcgattacacaaatactgtaatcgattaccagagcatattntcagaaaatattctcaacagtcacatctttttatgtggttcttgaatggctatcaaaggcctatatatatgtgacttgagacacgaatttgctaagagtttctgagaacaaaaaggtcttatcctcttaaaaagcaaaatcgctttatcctcttacaaattccttggccaaaacacttgtgattcaataaggaattatctgagtgctcaaatcgttcaatctatctctctcaagagaaattactccttctcttcttctttattctgaaaaaaggattaagagaccgagggtctctngttgtaaagaaatctgaacacaaaggaagggttgtccttgtgtggttcagatctcgttatacgctcttacaagatactggaactctcaagccggttgcttgaggact

SEQ ID NO: 3560 - DNA, 368 bp, Glycine max
agctttacaggttgacctaacctagtatgtttagaagtacgacattgtatttgatgccgttttgaacgatgaggttaccgatgatgagataactataatgggggtcaatctttggttgagagaatgaatggacaaatacctatgccatcttagcgttatttataacttttgaattccttatgtgagtcgtgaaatacagagcacataattccaataatatttctacgcacgaaggcaacttgcttttcatatggtcaaacacgtgagaacagcccctcgaatttgattatgtgattgccagtcttatagtttctgaaaaataagcggagatattctcacatggtttcattttgtctaccttgtagtat

SEQ ID NO: 3561 - DNA, 472 bp, Glycine max
  unsure (1)..(472): unsure at all n locations
ngatgaaacatatgtgatccatcaaatattacatctctgctgagaagaactctccttacaggtggtgaccagatcctatagcctttcactccatcaccataacccatgaacagaccctatctttatctaggtaccagctttccttcatagacatgataataagcattgcagccaaatactcttaggtttgagtagtttgctgttttgccattccagatttcaatacgagttttaagtcctatatcaatatagggtattctattgatcagaaaacaagttgtatngatagcatctccccaaaatcttctgttgagaccagcattagacaatatacatcttgttctctccaagagtgttatgatcattctttcagcaactccattttgctgacgagtgttgctaacagtaagcatgctatcaatatctccatctttccgagtcttttaactttactgtgagttcgatgctcaaa

SEQ ID NO: 3562 - DNA, 358 bp, Glycine max
agcttattaacttacctgtgacattgattaataaaatatattgccttcgtaaaattggagattcttgacattttttttaataggttgcttgtttaaaataataattaaggtcttgacagcgaagttggggtgggatggactctttaattgtatgtaatcaatatgatttcattgctaaaagacatatttttaaggcattattgtgattaacgaggtcattggttcttaaaaaaggtctagaaaagaatgctaattgaacttaaaagtgaatttcgaaaaattaaagcatgtgatttttcgattggaactttctaaattatatgttcgaaatatttggaattaatgacaactagagatc

SEQ ID NO: 3563 - DNA, 471 bp, Glycine max
  unsure (1)..(471): unsure at all n locations
ngtcaaaactcagggcaaacacatcctcggtccaaggctcgacaaacctaaagttcacccttggtgagccctttctgtttctaagttccatcttcaaaggaactcgaggtacacaaggtctgtccttgacgatcttctttattcctagtttttatctgtctaggaatacgagtatatataaaacccaaggtctgcccttggtacagattcctccaaaacccaaggtccacccttggtacgtactcctgtaaaacccaaggcatcccctaggtccactcactcgcagcaaccatgacgaccacaatcaaaggtctaagttcaacaacacaaactaccaccaaactatttggcaaggcctttcaatcacgtggaagtcatacttgctcctcaaaaccatcagagaagaagcttcgcaagtcaaaacgacccatcaccaaaatgagtgacaagaccttcaatcaagtgcaactc

SEQ ID NO: 3564 - DNA, 315 bp, Glycine max
agcttctctcctctcaattccaacatggtggagtcttaactgtgtgtgtgtgtgtgtgtgtgtgtgagtttctccctggtcttatttgtccccctcgctccatctttttccttccctcactccatcttcttccttgtgggctttgatttccccatgtctgcaagtggcagttcttctgcattttctggtacaaccattcgtcaatgccaccatggaagacgtgcagctattccaactggaagaacaaggagaaacccaggaaggctattctatacttgtgcattgtcccaaatagacccagataactgttatttt

SEQ ID NO: 3565 - DNA, 467 bp, Glycine max
  unsure (1)..(467): unsure at all n locations
taagtggttgtaagaaaatatgccaccgcttcccatggaaccaacacaacaacagttagaagcacattgtaaagcttacattntgcggctgattggtggggttttaatgccaaacaagatgggaaatcgggttcatttgatgtacctcactatgttggtggatctcgaacgagtcaggcggtatagttggggatctgcttgtctagcaacgttgtacagggaaatgtgtagggccactgaccctgatgccaaaaccatgggcggttgtgtgtcattgttgcaatcttgggcatggtatcgcatgcccttcattgtagcaagagttaatcggacaccatcgtatcattattatatgattagcatagtatgtattaaattaataattcttcatttattagatggagtggcagtggattaagctntattggtacaccacatggagatgtcatcagttatagaatgagatt

SEQ ID NO: 3566 - DNA, 367 bp, Glycine max
  unsure (1)..(367): unsure at all n locations
agctngtgactcttggaaatctctttaaaactattaacttaaaaagttgtgacttttgaaaaaatcttcagaaacaagtcacttgaagaattatgactcttggaaatgtatttttcgaaattagtcactggtaatcgattaccattaaggtgtaatcgattacacatcaacagatgtgactcttcatttttaatttgaaaattaaaaagtttaaagactctggtaatcgattacacgtgttgtgtaatcgattacacaagtttaaaatactttaaaactgtttaaacataagttgtaactcttgaaatttgaaatcttaacgttgtaaaacactggtaatcgattactaccttctggtatcgatact

SEQ ID NO: 3567 - DNA, 469 bp, Glycine max
tctagccaaatggacttaccttgaattaatatccttgatagcccttttgagccttgtttccctttccttgttttgaagctcactacaagccttaaatgaaaaaccatgatatcaccatatccttaaggaattctggagctttggaattgttttgggaataagtgtggggggtttttgtttcattggataacttgttttgctggctatgcttcatgatgtattttgggccatacttgatgtacattgtatattggttaaatgttggacatgctgaatgaaatgttgtttctcaaaggctatagagtaaaaaaaaaaaaaattcgaaaatgaaaaagaaaagcaataaagttgagtgaataagatcttaaatggcaaaagaatgatgagactcttggctctactctttatgtctaaatcttatccttacttctttctatgttcttattatcttcttattatgcacttattc

SEQ ID NO: 3568 - DNA, 389 bp, Glycine max
agctttgaccaaaatcaaacgacaacaactttttactcggatgtcggaatgaatactgtattatatcgagacgctcgaaattgacaatatatcgagacgctcgtaattgaaaccaaatgctcgaagcaaattctaacgaccataactttttactcggatgttcgaatgaatcccataatatatcaagacgctcgtatttgaaaacataagctctaatcatattctaatgataataactgtctactcggatgtcagattgagtcccgtaatatatcgagactcccgtaattgataacggatgctcgtactaatttaaatgacaatattaatatgctctatattgagcaatggagctcttgagcaattcaaatggtcatcacttatatttt

SEQ ID NO: 3569 - DNA, 469 bp, Glycine max
  unsure (1)..(469): unsure at all n locations
ntacagcagaatttagtaatgacccactaacctagaattaatataacttaatgccattaacctagggaattaaaacaaacttaatggctgagtgtaactgaaattgttggcaaccaaaagtcacccccaacagccaacaagtcagccaccatttggtctcccaaaaggctgatgcctaagttgccaattgggcccttattacaacttgaactaaagcccttttagttgattaacccaaaacatatttctggtcagccaactttacaaggattgggccattatttacacaaactaaacactctaaaattgaaataaagtggtgtcatttagtcctccatttgggccatgatacaactcacaaccttggacttttctccttgaaacttgcgcttgtattcaaatagtatggacagcacttgttgaagagcttccttggctttccttgctctagcccttgtcatacgtcctc

SEQ ID NO: 3570 - DNA, 372 bp, Glycine max
  unsure (1)..(372): unsure at all n locations
agcttgtgtggaatcgacaagcaaggacaatatggaatcttcaagtgacgtgacgaggaatccgtggggtagctcactataggtaaggggagtttattataaaatttaccattgtaacaccatagttaggattaaggaacctagctatgaggatatctgcctgtccttgtgcatgctgatttttcttcaaagaaaattacgttttaactaatgggatgcgatatatatattgtgatgaatgatattgctttggctgtttgaaggctgtgcgtgacgaaatgatattgctgtgtatgtctgaattgtctgtgatgntgctattgaggaatttaattgatatgtgatgattatgagactctgatgatattgatt

SEQ ID NO: 3571 - DNA, 460 bp, Glycine max
  unsure (1)..(460): unsure at all n locations
ntccacatccacaatgcgcgcataaacccaccatcctctgttgcccacctccatctgagctcacgtactcccacgtagcccatatcctcgtttctctcaacaccgggtccccatcaatcctctcaagcttccacaacatccaagcaaaacaacattcaaacagcacaagctatcacagccaagcaaaacagagcaaaggcagaaaactctgctcaacacatcaaccaaaatcacagcttttctcacttaaagaccccagtaacaattccttcgatccaattcgttaaccgttggatcgactccaaaattttactggaagtctatagtgtataagcctacattgtgaccgttgggatctactagcaaacatccagaactcattctgcactagactttccacagccaaccacacacaagcatttctctgcacttgtgcaaaatcctgctgcacaatntcaca

SEQ ID NO: 3572 - DNA, 425 bp, Glycine max
agcttgtcatatgcaatatatgcaactattgaatggcttattcctggtttaagaatgaggtgataagtcacataaatggttgtgttgtgtcctctctttctgttgtagcaacaggtaaaagaggattgatggaactttatgaatgggggcacctacttatatagtgctggaagggctctcagtcaatcctacatgcaatcttctctgttggctcaataatgtgcatttcttattgaagaggacaggtcctcaaaatcatacccatttgaaacctctcacgttagtcactaatatgttgacagtggggaagatataaaaatgaaatctatgagacttatataacaagttaatcttctgcatcaatagatgtaacatcctgttatctaattacaaattatgggtaatatagattttaaaataattat

SEQ ID NO: 3573 - DNA, 468 bp, Glycine max
  unsure (1)..(468): unsure at all n locations
ctttanatgtctntcgtagaatcttaacatcgaatcgtttctctctttccaatggaaggaactttaagttattttttatggattgtacgagaaatgagagtattggattgtcagacttgagcaccaaataacgctactaaaaaagatatgagaaaattctaagttactgattaaatataattgaattttctcttatcatattacttttaaaatgatcatatcaaacatacaataaattaaataatctttatttccattttgaaaatttacgaacatgtgacatcaaaaaggaaattttatgaacatagtattatggggatagaatacaaaanttcaattcaaaaataaattctactcaaaagtatctcatataaaaattaatcaacttatatagcaaaacaactaataaaatagttaactttcacaggttttcccctttctaaactagacaaattgtattacaataat

SEQ ID NO: 3574 - DNA, 424 bp, Glycine max
  unsure (1)..(424): unsure at all n locations
agctntgacatttgagaattatgtcctgtatgctaaccattggctatggcccattgagattttggcagcccttgccatctggtagccattatgcgccggtgattatgtcctcgagatgtctgtcgttctatatactgatcagtgtcaaaatcataccctgacagtgtaaccccttctataacttcatcattgtctaagcagcgagaagttacatgtggaggagtacaatgatccgcaaatatatctggattatgtgcttcanagtcacatgtaccagaagatgctctcagtggtgaaacatcctctcctgtgctgcgtatgttctctttaatgtctgtgtcatcttcgagtcgtccctgccttgtgtccttctgctaagcttttctggtgttgctatctaaatctctatttcgattaaagacca

SEQ ID NO: 3575 - DNA, 416 bp, Glycine max
  unsure (1)..(416): unsure at all n locations
tagtgcatgtcttacagagaaataataaatcaatgtccgctatctatcaacagtgcatgtattatgacattcttccgatctctggccgttaatgatatatatcctggaggttcctggctgcaacgactttcattgccctanggcggtacttgcaatatttgggctggcgatgtatttcgggtgactatattgaaatgtatgtattgaaacatgaacttattttaataaaacaagtatctcttttattattttaccgagtttgactatctgtatctctagaaagtactcatatgcaaagtatttatttcaaagatattccttaaaattcaaataaactcatcctttattngagcatctatcgcatgctgcataccatcgcgtgggtaaccaccgaaacgtgctcgcatgaatataac

SEQ ID NO: 3576 - DNA, 388 bp, Glycine max
  unsure (1)..(388): unsure at all n locations
agcttgttgatacacctataaatccaagtatcatgcnttttgccaaattatgggatattgccaaatttcaactcacatggcaactagcgtatatattaactacgtcattgcgtaagttacatgtgacaggcacggtgcatatgtttcatatgctctatcttgtcttattattctccgcatgtacaactgagttttgccatgtattttatctacacattttaccacatgccattttttttatttctcttcaacaaatgctaaaggcatcgaatgtgatacaaaaattgtatgtggatattcaaacactatgttctcatgtattaatatccattatgcttttgactggttactctcaatcattgtaatgattgaaaatttcaacatgaat

SEQ ID NO: 3577 - DNA, 461 bp, Glycine max
tcactcatgatgctctgtgacggtgtttaaggtgtggtgaatggcggtttatgcattatggtttctatatttatttaactttctggttttagaaaagcttatagctgctgtattattgatttcttagctggttaaagaccccttttatgttgagtttggatgcacaaaaacactttctctttaattatcttaagtgcttttctatgagattttctttaattgttactactatgttttacgttgtggacattccttacactgtactttgctctaattcctcatcttttgtgatactggcaacactattgtattgattgactgtaattcctcatgttgtgagatgctggcaacacttttttctatatcataacaatctatccgccatgatgaatgtgtctctatggctagcctatgtgtcatacttgtctacagactttatacttagtgatcaacatatactt

SEQ ID NO: 3578 - DNA, 424 bp, Glycine max
  unsure (1)..(424): unsure at all n locations
agcttcatcttcaatccaagaagaaagtgataaggaagatttaattgatttggatgaagatgatgaatcttaaccttttgtaaaaaggttcaacaagttcctgagaatcagaggaaatcaaaggagaccatattttaaacctaaaagaaggacaaaagattcatcctctactccaaaatactatgaatgcaatcaacctggacatctgagggttgattgcccgatcttcaagaaaagaatggagaaatctgaaaagaaaaattttagtgaaaagaaggcgaagaaggcctacatcacatgggatgacaatgatatggaatcattngaggattcaggaaatgaagtaataaacttgagtctaatggtaaaagttatgaaagtgatgaagaggtaacatcttcaaataacaacttatccatttctt

SEQ ID NO: 3579 - DNA, 199 bp, Glycine max
  unsure (1)..(199): unsure at all n locations
ncgtgtaatcgattacacttatttgataatcgattaccagtgtttgtttctgaaaaatctaaagatgtaactcttcaaaaaggttttgacttcctcaaatgggttctaagtttttctaaaagttataacttttctgaatggtcttcttgaccagacatcaagagtctataaaagcaacgctttgatttgctgttcaaca

SEQ ID NO: 3580 - DNA, 337 bp, Glycine max
agcttgcccagagaaggagtccacggaggaaatgcttaccacctcgaaagactggaaagcggtttctaatgactcctctgcggcctccacataaagcatagaggatgggcagctcactaagatgtcttcctcgcctgatacgatgaccagatgcccttccactacgaatttcaacttttggtggagtgtagagggaacaactcccactgagtggatccacagacgccccaacagacagctgtaaggggggttaatatccattatttggaaggtaacttgacaggtgtgagggcctatctgtactgggaggtcaatctctcccctaacctctcggcgg

SEQ ID NO: 3581 - DNA, 456 bp, Glycine max
  unsure (1)..(456): unsure at all n locations
ngagatgtggaagtgttgaagggtgaaacttcctgcttttattgttgaccacagagtggtacctggagatatgtcgcgggggtcaggagaccttggggacgtcaggtggggtgctattgcccaaaaccaagcttgaccaatcccgacccaacccgggcatagtcggtcagtgagaacctgtgatgtacctaaacaggcgagctcctggcagtcaacagataaaaggaacaaagaccacaaagcaaggaggcttgttgtggctggccagctgtgaattttgtgtgatatgtggattatggcctctggtaatcgattaccaagggtgagtaatcgattacaaggcttaaaaattgaagacaggaggctaagatggtctctggtaatcgattaccacgaggtgtaatcgattaccacgctcgaaaatgaggtcacgaagctaagggagcctctggtaat

SEQ ID NO: 3582 - DNA, 402 bp, Glycine max
  unsure (1)..(402): unsure at all n locations
agcttcanactcagcaaatccttagcaggaacatgagacataatttcaatcaaaatgtcactgttgagaaacctatcaaccttcttcattttctgaaaaaaaaaatggaacaaatagcaatcaattaaataaccattcagcttataacaaagaaaacagaacatcttacatcagcattaaatcacagagaggaaccttagtagcaaaatattttgctttatcattcaaatataaaaaaaaaactaaagcaaaacataaacaaaacgttctttggcaattagcattagcaatgcagattcgaaaatcaaacttcttcatttttttttcttgtgaaagactggaataagaacaatcaattaatattcccaagtacaaagaataccgacaaaatcttactacaaa

SEQ ID NO: 3583 - DNA, 467 bp, Glycine max
  unsure (1)..(467): unsure at all n locations
ngtattatgttgcttctntaacttcttggactctgtatttgtgcttgtttcattattagattgtggtatgaataccatggtttgtatatcttaattttgcttgtattttctggctcaatcgcattatcttctgtgtgtgcctgcagaggttttcgaagaagttttggagattgtatcatatatgacttttttctctccaacaatatcattggatatgtggagtctttggccattgatgatggaagcactggcagattgcgcaattgatttctttccaagtatggtgctctttcaactctttttttctctctcttataatgtcctagtgcatagtttgaataatttgtggatggtctcttttgtttgttgatattaaatctagcgatgagttgatctctgaattaacctgaatatatacacagctatggactgcttagaaacattttttgataaagaaacaagctaaa

SEQ ID NO: 3584 - DNA, 340 bp, Glycine max
  unsure (1)..(340): unsure at all n locations
agcttctatntgcagaccaaccagaaggatgtgcaacaatcagaatgtcatgttttggtgcatcaattaacctgtgtatatgacacttgaataagttcatcaacaagttcactgaatttatctttcaagcaatgaaataaaagaatccaatttagtttttacaaaaaaatttccaaatagcagtctgcagttgatagatgtatactatagtgacttgtgtcacacaatttatttttttcagaggatggttataacaatacattttccccgagcagagtttcccatgaaaagtgtgaacaataaaactagtacagtaacatgaacaatgagtggaaaggga

SEQ ID NO: 3585 - DNA, 469 bp, Glycine max
  unsure (1)..(469): unsure at all n locations
ntgatgagtgcaacataagttggccttcaaggtgtttaagatgatttgtctttgtttcaaggaagtgttgacagtggccactgtggaggatctagtaatgtaatcaggcaaagtgtggggagaatggccgtacagagctttaaacaaagacattctgatggcagagtgaaaggtggagttgaaccaatattctgcctagttgagataattgaaccaaaggcaaggatgcttactgacaaagcatctaaggtaagattccaaacttctattcaccacctatgtttgaccatcggtctctggatggtaggcaatgctgaactgtaattntgtgccttgcattttgaacaattccttccaaaaagcactgagaaagagaggatccctatcagaggtgatagttattggaagaccatgtatgtggcatctcttagtggagaagtgataagctaaatttgtagcagcatacttt

SEQ ID NO: 3586 - DNA, 559 bp, Glycine max
  unsure (1)..(559): unsure at all n locations
cgattacccactctatcaatgatgatataatatagtttatatancctgactggtnnncnnnaaccacaagagtgattcataacntnctcagagatcctntanattctacctgcatgcatgcgaagctatcatatcagaaatgccgaaagcatttccgttatgcatgctgattgatacgcattcacaagaatcaatccaaggctattgtgcaagcaatcaaaggggcaatacacaccaaatgatgatgatgatggatggctcatactgtaacaaaggtgaactatcctgaaaaatgagcgtcaaacctgcgtggcatgtaaagaagaatcccgcgattcttgtcacaatatggcgacaactttgatcttacaaaacatgaccgatgtggtgaacatatcctatatactaatgagacacatgctaaggcgtattgcacacataactgatcgaaaaattataactaaacaggcgacgagctaacaccatatgatcattaacacgactaacataatcactcgacccaacaaactgcaaaagccacaacacttcctctatacct

SEQ ID NO: 3587 - DNA, 431 bp, Glycine max
tctcttggaccttgaacaagccatcaattcctctgtcagaaccatgctatgtgctcgcgactggtccctttcttcccttcgcaacttgagttcactattgctaccccatagagctccgcgaaatttgttccggccatactcttccttgcgagccctcttggtctctcgttcaagggctcttgcggtaattgcattctcttcccgtgacccggcacactccttctcaacatgtgtaacacccaactcgaacttctccttggcgagtgtttgctttcctaactcgcttttgagagcttggacttcctcgtgctcttccagtgcttcaaaattctcttcgctgacgactcttaacttggcgagccaatctaaacctcgtatgcgaactttcagccattcgtggttcccaccaatgatgccattacgaacgcctc

SEQ ID NO: 3588 - DNA, 404 bp, Glycine max
accacagatctagagagtccaccaatgatgaagcatctctcatgcgtaagaaattacggccgatgatgaaaaatcaaagaaatctccaacattgctctagaagacacgaccccaggtgcacgaaaaaacacacggaagagagtaatgagatcatctattttgaatgctgaaaacctgaacatatgaaggctgaattctcccactgaagaagatacgccttcttgcgacaggaaacagaacaagttgatgaccacttgggatgactccaatagtgacaaatgtaccagttcagacaacgaacaaaccaccatatatctgatgcagactatgggcaaaacagtaaagcacaaacatatctgaaccctatacccgcctgaatgtgcaccatttataagcgcttcgcg

SEQ ID NO: 3589 - DNA, 466 bp, Glycine max
  unsure (1)..(466): unsure at all n locations
ntgaagtagaggagaccttcaatcctattacgcaacgtggcggataaaagtgggcaattaacttgaatggtcattattgtcaatgcggaaggtattctgcgcttcactatccatgttcacacattattgcagcttatggttacgtgagcatgaactactaccaatatatagatgttgtttacacaaatgagcacattttaaaagcttactccacacaatggtggcctcttgggaatgaaacggctatttctccttccaatgacgcatggacacttatccctgacccaactacaatttgtgcgattggtcggccaaaatcaacaaggatacggaatgagatggattgggtcgaaccatctgagcaccgacaaaaatgtagtagatgtggagccgaagggcataacagacgtcgctgtccaatgcaatctgagcatgggagttgtcaaatcattgattatgtatgtta

SEQ ID NO: 3590 - DNA, 319 bp, Glycine max
agctattccaagctgaaccacttttcaccctctaccaatgcctctatatggcctcattttacctgaagggagatgccttgagttagttcaagtgaatgcaccaaaacaactaattggcagattgggatttcttctcttgccctagaactgcgattcaacccttccctttttgagaaccaccaagcaaagttgtttaagctctatcaacatgattttgtggctgattaccagcaacagtttaagaggccatgcaaccatgtccatggtctcacaccaaaggcactccttaactattacagttctaggcttcaacctggta

SEQ ID NO: 3591 - DNA, 468 bp, Glycine max
  unsure (1)..(468): unsure at all n locations
tcaacatcagaccacttccagggtgctggaactacttcacatggacttgatggggcctatgcaagttgaaagccttggaggaaagaggtatgcctatgttgttgtggatgatttctccagatttacctgngtcaactttatcagagagaaatcagacacctttgaagtattcaaggagttgagtctaagacttcaaagagaaaaagactgtgtcatcaagagaatcangagtgaccatggcagagagtttgaaaacagcaagtttactgaattctgcacatctgaaggcatcactcatgagttctctgcagccattacaccacaacaaaatggcatagttgaaaggaaaaataggactntgcaagaagctgctagggtcatgcttcatgccaaagaacttccctataatctctgggctgaagccatgaacacagcgtgctacatccacaacagagtcacacttagaag

SEQ ID NO: 3592 - DNA, 176 bp, Glycine max
agcttatatatatatatatatatatatataaacttccctcacatcatcgcttcttgtccctaataattttggcctggcccgcaaatattttaataatcccattttattccttttcccttggtggaactttttttctcttcaatcttctctttttatggcttccctcctttcttacc

SEQ ID NO: 3593 - DNA, 438 bp, Glycine max
cttgcataccatatatatagttggtggtatgatttcttttcataactcaacccaatgtgattctttacaatgatgtttgtgtaaaagaagtgcccgaacagtaacactaacaagaagttggggattaatgaaattgtttttcacaaggatgtctgtatctattacttagtgttttcatgacgtggtggattatgttttagttttttagtcatgacttctttgtagttcatttgttctgtgtttcatgtttgctgtggttaatggtattaatcctggatttaaaagtgcattgcaattatttttgcttgctttagagtttagatgattgaatctgctgctcattgtcaattagtttggtttcttttgaatgccattttctcactttaatatttattggattggtttatttgcttatacttcatattatgactgttcgca

SEQ ID NO: 3594 - DNA, 356 bp, Glycine max
  unsure (1)..(356): unsure at all n locations
agcttgtgcgagctactgaactagtgaagcttttgactctgganaaatcaatgagaggtgcaataaaacttgttactgctatgaagcttccaaacctggccgaaaggttcagctgcatattaaaggtagtctcttacatcctaacaaaatttcagtgtaaacaattcattgccatatttaccttggaattcctgcatgtctaaaataggaaaggctacttgaaaaagccaaaaaagctatggaaaccaacatcaaagaaaatagtgctgcacccgttactgctgatgctattcctggcaaaagcaaagccccaactcacactgaaacattaaatgctgttaccatgtcatcattcc

SEQ ID NO: 3595 - DNA, 466 bp, Glycine max
  unsure (1)..(466): unsure at all n locations
taaccgagactcgcgctcccggttaaggggccagtagtttccttttatcagtttcggggccacccccctgatattggagggcgaccaactgtgcaagcacaaccagagagggaggctatcacacaactactatgcataccggggcaagatttcacccatgccgctgcaaagagacgagtgtggatcatgtgtaccaacatgacccctttttacacagatataaatgacgttgctacttaacaacattctgcccagcgaccgcaataccgatctccccctgtggaagtatcaattggtctgtgccatcccgacatangtaggtatgcattatttccaactaatttctaatgccatctactatttgtagggatcgcgcncgcaagacacccagtggacccgaagaagtccaacagggtcttggagttgttaagctctaattacgggtctctgtcagttctacggagta

SEQ ID NO: 3596 - DNA, 394 bp, Glycine max
  unsure (1)..(394): unsure at all n locations
agctntccaaagttatctggttgtctaaaccttgaaaacttgtgctattcatcttttcattctcttctccctctgccaaaaagaattcgccaaggactaaccgcctaaattctttttgtgtctctcttctccattttccaaaagaacaaaggactaaccgcctgaattcttttgtgtctcccttctcccttgtcaaagaattcaaaacgacacaatctgagaatacttttgattcttccctttccctaatataaaagtgttcaaaggactaaccgcctgagaattcttttgtatccccattcacaaagtatcaaaggtttaacagcctgagatctttgtcttaacacattggagggacatcctttgtggacaagtagagggacatctacttggt

SEQ ID NO: 3597 - DNA, 466 bp, Glycine max
  unsure (1)..(466): unsure at all n locations
ngaacattagcttcagccacgtaccgacaagtttcaccaacccttgggtctgtctctcccaaaatctgcttctggacttctaacccagtggtgtagcacattattgaattctcaagttggcccagcatagcataggtgtctcccagttgcatgtgaccagcaaatttagcaagggcatgttgttggctttccccaataacaggaatctcaattgagcgctcaagaatcggaattgcctcaccatattgacccaagctgcaatatattgctgctgtaacatgtaaacacataaccagctccaaacttggtttcccattaccaaacttctcaaacagttccattgcttgaagagctaagtcaagagccttctgcggattatccnctgatgaaatcagatctcttgcctgctntagcaatacaagtgcgcgctcaggtttttctaatgctgactcagccatactctcaa

SEQ ID NO: 3598 - DNA, 206 bp, Glycine max
aagctatgaacaaccccctgtttacaaagaaccacccctgtctgatttcctcgtcggtattgacgaatacaccagagcaaagggaaacacccttgtccgacacttaaatataattacttaaggatgggattacggatctattgtcttataacggaacataacatatcaaggcatgttcgcacacttcattaatgggctgccgccct

SEQ ID NO: 3599 - DNA, 318 bp, Glycine max
agcttttatttcttgtttatatttgaggtctacaaaagcggcgctcttgctcctgcgtaaccctccattcgaagaggtacattacaacctacatagtctctttaaaaaggggcaaatcaagacggtctttttacttgaaagggagtcatttaatgcgctggaccttacaacgttcttagtgatctttgcggaccaaccttgattttcgagttgatgctactcttactttcactttggctattagtcaactacattaagaaacaaaaatcccatagaaaacgccccactgacttttatttttattctactacacatatt

SEQ ID NO: 3600 - DNA, 432 bp, Glycine max
gttgctgtgctatacaaagagaccaccccagagcagcctatgtgggtgcagccgtgctcctcgggtgtccgtaaaatgcatttgggtcatgcaccgcataagcatctcttgatgcatccatcccatgatcgacgctggagtattgattcacgcaggactcttcattctagtataaatgggatcaaatcaaacacctctgctcaagaaaaggttttatcaactcaaacataagagcttataggtcaccggtttacgagagtcggggccattgacgggtcaacttcaatggctagccttccgcagagcctatggtcagatttgggatctatatacggtcgaagtctccgtggaaacaattgcatcccttaccactattatgaccaagcactgatgcgcttcacatttgaggacttccagattgtgtcgactgtg

SEQ ID NO: 3601 - DNA, 204 bp, Glycine max
  unsure (1)..(204): unsure at all n locations
ttaagcacctgaggctgcagcttgccacaanatagggttttgaagtctgtcatttcaatttctcactaagtaaaatggatcattttcaaggtccaacgccttaaaatgatcacctcttaaagtaaaaaagaatcacttgataagaaagaactaccgtggtctgattccctcatcgcaattgaggaataccgtggagcaaaggga

SEQ ID NO: 3602 - DNA, 419 bp, Glycine max
cgtagaatggctagacatgatacatgtcagggcttggtttggttcaaggataaaagggatgccccacattatttccatgacacaaatgcaaaaatgacgatttggaaattttatgcaaaactggttatgcatgcacctatgcggacactcaagtgtcaaatttttatggtcatgtgatgctagggctcacgattcatttcctctattttagtcaacccaacgtttccaaaatatgttctcttatcaatttgtgcattcatccgagtccattttgggcgtctgggaaaatcttcacagcattcacccttcacgtgtatacacattttttcaaaaactagttatgatcagtgaatctttccaaagaaaagttggaagtcattctctttcaaaagcatgttggtttttcacttgacaactta

SEQ ID NO: 3603 - DNA, 275 bp, Glycine max
gagtactttggatttggtacgaccatgccctcctgatttccagctgggaaattggcgagtggaagaacgccccggcatttacgcaacgagcataatgtgaacctttacggttttaaaagctctatagttgggcctaggctttagagattttccttttgttaaggctttgggtcttttggttttgaaattataatacaaggatctttcttcatctgttcctacgtctctacccattctcattcatttgcatggttacttctttttctgaaacgaca

SEQ ID NO: 3604 - DNA, 472 bp, Glycine max
  unsure (1)..(472): unsure at all n locations
tganagagcccgggtagtcgaagagaagttcaagtccatagtcatcaaagtctgaaaagagtatgatgaactaagggacgtcaatatggccacagctgaagctttggaacgagaaaccaagaaggcccgaaaggaagaacacgaccaaagcaaagttttgaggggctttatagggcagcaatagtgagctcaagctccgaagaggtgaaaggaatcatcacgggtcaaaggcatgatcttgaaggacgagctaaaggtttgccttaggtcgaaaagaaatttgtcccaacagttaagcgagactgaagggaatatgtgggccatcatcgataagtgcaaagagaagctaaatctagcggcgactcacgagcaaaggctagaggatgagtatgccaagatatcagcagaaagggaagcaagggaaagggtaattgattcattgcaccaagaggcaacaatgtggacggaccga

SEQ ID NO: 3605 - DNA, 402 bp, Glycine max
  unsure (1)..(402): unsure at all n locations
agcttcacacagtttattnttctcaaacttgagntttggaagaccaattactaagtatttcctaattagatgatttacatgatgcatgttaatgtgtggagtcctatgatgtcacaacctagaatcatctattttacttaccaagcaacttagctcatgaaatgatgcatgttcaacatttagcatatagatattacctattctctttccaatgaggacacctttaccggatatgacttcacttatatggcaataatttctgttgaattcaactttcaagtatttatcacaatgttgactaatgctttagtccatccacatataacacattctttatctaattnttccctatattcgttctcccactattttctctttgctattggcttcaaacatgacata

SEQ ID NO: 3606 - DNA, 420 bp, Glycine max
  unsure (1)..(420): unsure at all n locations
actaagctngaggcaaactagatgcattggttaacttggtaacccagctggccttgaatcagaaatctgtaccagtcgcaagagtctgtggtttatgctcctctactgaccaccatacagacctctgcccttccatgcagcaacctggagcaattgagcagcctgaagcttatgctgcaaacatttacaatagacctccttaacctcaacaacaaaatcaaccacagcagaacaattatgacctctccagcaatagatacaaccttggatggaggaatcaccctaatctcagatggtctagccctcaacaacaacaacagcaacctgctccttccttccaaaatgttgctggcccaagcagaccatacattcctccaccaatccaacaacagcaacaaccccagaaacaacaaacagttg

SEQ ID NO: 3607 - DNA, 393 bp, Glycine max
  unsure (1)..(393): unsure at all n locations
agctntataagcgcgggtctgggagacaaatgtcaagtgttcgcgatatgcgaagatgatgttccgagtactttggatttggtacgaccatgccctcctgatttccagctgggaaattggcgagtggaagaacgccccggcatttacgcaacgagcataatgtaaacctttacggttttaaaagctctatagttgggcctaggctttagagtttttccttttgttaaggctatgtgtcttttgtttttgaatntataatacaaggatctttcttcatctgtncctacgtctctacccattctcattcatttgcatgtttacttctttttctgaaacgacagatccgatgacgagtccccgaaggtactaatacctgtgacccacctatcgact

SEQ ID NO: 3608 - DNA, 472 bp, Glycine max
  unsure (1)..(472): unsure at all n locations
ngaaagagcccgggtagtcgaagagaagttcaagtccatagccatcaaagtctgaaaagagtatgatgaactaagggacgtcaatatggccacagctgaagctttggaacgagaaaccaagaaggcccgaaaggaagaacacgaccaaagcaaagttttgaggggctttatagggcagcaatagtgagctcaagctccgaagaggtgaaaggaatcatcacgggtcaaaggcatgatcttgaaggacgagctaaaggtttgccttaggtcgaaaagaaatttgtcccaacagttaagcgagactgaagggaatatgtgggccatcatcgataagtgcaaagagaagctaaatctagcggcgactcacgagcaaaggctagaggatgagtatgccaagatatcagcagaaagggaagcaagggaaagggtaattgattcattgcaccaagaggcaacaatgtggacggaccga

SEQ ID NO: 3609 - DNA, 348 bp, Glycine max
agcttgttcaaacacaatggcaatgaactaatggtgaggtcagtgtgttcaaacacgaagcttgttcaaacacgaaggttgttcaaggaaaccaccaaaacacgagggtggggcgagcgtcacggtgaccacggcggcctaagcgtggccatgcgagagttagcgtcggggatcagggacaatgccagtgatgacggcggcctgagggtgcctttgtgagagtgagtgatggaagcttgcttgtggggcttctatggaggctggatctttgagcatcaatgaggtcctttaatggtgattttccaccatggagatgcaacgaaagacataggagaagaggtgagagga

SEQ ID NO: 3610 - DNA, 460 bp, Glycine max
  unsure (1)..(460): unsure at all n locations
tcaatgttaatgtcacatcagataatatcaaaaacctcaaattatgaagattgtggtatggtattataagtgacatccttggccagagcgggtttgattgggatgacactaagtacatgttcacagttgagaatgaaaatgcttggaatgaatattgcactgtaagtattctttagtatattgctatttgttatgtaaagatagagccactggtcatggagctgaagctgctatggatgctgatgaagcgatgagtagagagacaaatgaagtggaattcatggggttaggtgctactactactatagacttanaagaaccaagctctaatacaaaagaaaaaagacaaggttcaacttcttctggcacacattcattctcacaagacaaatattggagaaaaagaaggaataacagtttctttggatagaatgaccaactcttttgaccgaatggtaga

SEQ ID NO: 3611 - DNA, 235 bp, Glycine max
  unsure (1)..(235): unsure at all n locations
acgccttaaaatgagcacctcttaaagtaaaaaaaaatcacttgataagaaagaactacgtatgtttgatttcctcatcgcaattgaggaataccttggagcaaagggaaacaccctcgtcgaccacaaaaagagaaaaatattcaaagggcttaaaggatattaggacttaaaagggaacataanaaatccagggtcatgttggacattccaataaaggctgccgtcccttggg

SEQ ID NO: 3612 - DNA, 472 bp, Glycine max
taaacgtagaagaaaagagcttagatggagaagaagagagtgcgagcaaaatatggctcgctgttcggattccgacaagtgcaccgaatcgcataagtagtataaaacggtaagaaccgagtatcgaactctcggggaacttgtgttatttggtaagctatttcagcaaataggtgtctagtgtgtaaagataagtgtgaatatgaacaggtgtataaactatctgtgcaaaaagaaagaaaattatgcgagagaaatgatgtgtaaaaacaagtagagaacacgttggccttcctaataggtgcctgatgctaaaaagatattctctatctaacaatgctcatgtgttcttatggtgtctcctgagatactaaaccccgattcctcatgatagtttagcctaatcctgatcaagcatcatccgcagattctctcttgtaggactaaactcaaccaggaccgcattaagaca

SEQ ID NO: 3613 - DNA, 565 bp, Glycine max
  unsure (1)..(565): unsure at all n locations
tcactttcctccgtttttntattctatacactctanctacgntcaatnttatacttaaccactagggcnaacagagattgaatcnattctcttccgacccgtgatcctctagagtcagctgtgngcatgcaagcttctaggttagtgtaccaaatgactgtttctccgcccaatctatataggatgatatgcatcaccatctatttggccctacagtatgcacccatctttcaactgtacatttgtaggagaggattaacggcaacgtcgttcctttgtaccatataaaatgtaagtccttagagccttatgaggcatgacgatggtcataactaatcaaaggttggacattgtgcgagaccggaggatctccgaatccttaaatagcacacaaggtcttttcgatgagatcgagttatcccatatccttttgctgacagaggtggctgtccacccngcataaagaatggatgcattcgatggcttcaggcctccgtcacaatgcttcacgtatcgctcggtcatcgccccctaactatactgtcttgaagatatacttctagcg

SEQ ID NO: 3614 - DNA, 444 bp, Glycine max
  unsure (1)..(444): unsure at all n locations
tctagccaaatggacttaccttgaattaattcctttgatagccattttgagccttgtttccctttccttgttttgaagctcactacaagccttaagtgaaaaaccatgatattaccatatccttaaggaattttggagctttggaattgttttgggaataagtgtggggggtttttgtttcattggacaacttgttttgttggctatgcttcatgatgtattttgggccatacttgatgtacattgtatattggtttaatgttggacatgctgaatgaaatgttgtttctcaaaggctaaaaaaaaaaaaaaaaaagcaataaagttgagtgaataagatcttaaatggcacaagaatgatgaaactcttggttctactcttcatgtttaatattcatccttctttgtattntcttattatgttttcgtaatatgcacttattc

SEQ ID NO: 3615 - DNA, 336 bp, Glycine max
agcttgaccttctacagggatatcaccaaattcgcatgcactctgaggacatcccgaaaatggcttttcgaactcaccatggccactacgagttcaaggtcatgcccttcaggttgtgcaacgccccatcctcttatcacgcgaccatgaacttaatattccgttcatacctttgccactttgtcgttgtcttcttcgacgacattctggtatacagcggttcattagaggctcatctgcttcatttggagatgactttccaggtattacttgacaaccactttgtcctgaagctctctatatgcttttttggccaaccgcatgtcgaatacttgg

SEQ ID NO: 3616 - DNA, 442 bp, Glycine max
  unsure (1)..(442): unsure at all n locations
gggtcatgctagagcatagtctcgtaagaggacttccaaagctgtcatatcaagatgactctctttgtgaagcttattagaaagggaaaaaagtaaaaagttattttaaagccaaaaatgttctttccactttgaggcctatagagccttttgcaccttgacttgcttggaccaaccaggactacatccctttttggatgcagatatggtctggtcatagtggactattacactaaatggacatgggttaggttcctagtccacaaggatgagtcttttgataccttctattaattctataaaaagattcaaaatgaaaaaggcatttgtatctcttcaatctgaagtgatcacggcagagagtctgaaaatgatctttttgaacaaaattgtgaagagaatggtattcaccataatntntccacttcaaggacaccacaac

SEQ ID NO: 3617 - DNA, 461 bp, Glycine max
  unsure (1)..(461): unsure at all n locations
taactctaccatgacttcttcctcctgcaagaaatttcctttctaaaaaatataactcctcttgccataaacattttatggtcaaaaggttggtttaaacaatatcccctaatttctttggaatacctaatgaatctacatttgtcagacattgccttaagtttgttgataactacgaaatctgagctaaattgatagtcatttttggctaataatgataatagtttcttcattctagtagtgtttttaatgaaattacgaagaaattaacatctttgcaatttatgattagcaaaaatcaaaagaagaagaattaaagtgttttagagggaatttgataataaaatgtggaagacaaaaaattgaagaatagttggaagaattgcatggctcgcttagcgtgcaacccaggctcagcatgtgatgctcgctntgtgagaagttccaggcttagcgtgatg

SEQ ID NO: 3618 - DNA, 425 bp, Glycine max
agctatgcagatttggtcttcgccgaggaaagggtcgaagcggatctgaaaagaggcaaatttaatcatcttgcttggacgaatgagaaaactgaggcaaatgaagagggtgaggatgagggagaaacccatgttgtgactgccattcctataaggccaaggttcccagcaacccaacaatgtcattacttagccaatagcaacccttcttcttacctaccacccagttatccacaaagatcatacctaaatcaaccacaaaacccacctaccacacaaccaacacgaacaccacctttatcccaaaccaaaacaccaaccagatatgaatttttgcagcgaaaagcttgtagaattaccccaattctagtgtcctatgctgacttgctcccatatctacttgataattcaatggtagccataac

SEQ ID NO: 3619 - DNA, 455 bp, Glycine max
  unsure (1)..(455): unsure at all n locations
acagcagnatttagtaatgacccactaacctagaattaatataacttaatgccattaacctagggaattaaaaaaaacttaatggctgagtgtaactgaaattgtggcaaccaaaagtcacccccaacaaccaacaagtcagccaccatttggtctcccaaaaggctgatgcctaggttgccaattgggcccttattacaacttgaactaaacctaactaaagccctcttaattgattaacccaaaacatatttgtggtcagccaactttacaaggattgggccattatttagacaaactaaacactctaaaaattgagacaaagtggtgtcatttagtcctcctccatttgggccatgatacaactcacaaccttggactnttctccttgaaacttgggcttgtattcaaatagtatggacagcacttgttgaagagcttccttggctttcctt

SEQ ID NO: 3620 - DNA, 544 bp, Glycine max
  unsure (1)..(544): unsure at all n locations
acactgacaaactcatggtagcgaggtanatcacaaatctaaactacccaagcncannaagtatgaatctcccatcaggaccgatcaataactgacggaggaagagcatcaagtgatgcccagataactgtttcctccgcacaactatgaagaaagagatgcgggaacaacatctcgtccctcaagtatgcacccaccatntcgacagcacattatctatgtgaggtcttagggcaaggggtcctcttgtacctatcaaagataggtacctcgtacttcggagggatgactatgttcacaactaagctaaggtcgggcatgtccgcgaacggataaacaccggatccttcgatagcctcaatctttcttcaatgagatcgagattccccttctcttatgctgccaggggggggccctccacggacataaatattgtgctgagttgatggctttcaagatctccccgatagtagcgatgaagcattgcttctacattgtgatatcaacggatacagcggcagtatatagatgcnactcctgctcg

SEQ ID NO: 3621 - DNA, 250 bp, Glycine max
agcttcacagcggagacgacatatcacctgtactttccaaggcaattcatgagtccaggattgctattactgtgctttctcaaaactatgcttcttcctcgttttgtttagatgaacttgtaaccatccttcactgctagagggaagggttgttggttataccggtctttcataacgtaaatccttctgctgtcagacacctgaaaggtagttatggacaagcaatggctaagcatcagaagaggttcca

SEQ ID NO: 3622 - DNA, 465 bp, Glycine max
  unsure (1)..(465): unsure at all n locations
tatccagaaaaccaattgaattgtgaactgtaattaaattatggcagtgttcaaatgaaaattcctccaaatttgggagaccagatacgtcaggaatctgtgttaaacatttgcacccgtcaaaattcaatgttcttagatttacgaacatctgccaaaaaaaacagaaacaagaaagaaataagaacagaatgattaatcttaaaagtgaatntattaaataacaagatgtggaaaatgtactctttaagcttaccttccataagccatcccactcaaatgacgaaatacaactatagggtaacttgcatatggaaagttttttcggatgaaaatcagatggtaaacaatgtgaaggatatctccaccattccagtactctcaaattgtttggaagatatttgggacctttggaaaanttaccatttctaataataagtgtcttgagggttttcatcttcttga

SEQ ID NO: 3623 - DNA, 434 bp, Glycine max
actagatgccttggttaacctggtaacccaactggccatgaataaaaaatctgcacctgtcgccagactctgtggtttatgctcctctaccgaccaccacacagacctttgcccttctgtgcaacaatctgaagcaattgaacagcttgaagcttatgctgcaaacatctacaacagaacaattatgacctctctagcaacaggtacaatcccgggtggaggaatcatcccaaccttagatggtcgaatccttcacaacaacagcaacaacaaccttattttcaaaatgctgttggcccaagcagaccatgcgttcctccactaatctagcagcaacaacagcaacagcacagccccaaaaataacaaatagttgaggcccctccgcaaccttcccttgaagaacttgtgaggaaaatggctatgcaaaacatg

SEQ ID NO: 3624 - DNA, 572 bp, Glycine max
  unsure (1)..(572): unsure at all n locations
ctgtcatctactcattcatatttgtgtccatgcttntgttcgtattcttattactttctctccncgnnncagcgtnnttgatgcgtcccgtcccgggctcctcttagtctatctgcagcatgcaagcttcaccatttcttattggcggactgggaggttgttcatcaactacaatcgtcttccgatggcggcgaaattcaaaagtgatggccgtatgagaacgctgtcggtggctacctactttacggggttgagaaagaatgcatacgagttgatgtgatgcacgaatgatgatacacatctctaggttgcaaaatgtcgtttggagggggttcatgttaaggctcataggtctgacccaatacggattcatccatctccgaccgttatggattatgagcaaggaaaatatgtgattagggcaccagacctactaagcttcttcctttcatggaaagatggcttgatatgctctatcacatacttatagcacataatggggagacaacaaactcttaattcactttacgttaagatttatccacgtgcgaccctaatatgtgcctgggacn

SEQ ID NO: 3625 - DNA, 473 bp, Glycine max
  unsure (1)..(473): unsure at all n locations
tgcanaaagaaacaagttcaatttgcctccatcaccaccaattctacccataattggcaatcttcatcagctaggaacactaccacatcgctccttccatgcactctcacgcaaatatggccctctcatgttgctgcaattgggccaaattccaaccctagtggtctcatcagctgaagtggcaagagaaataatcaaaaaacatgatattgccttttccaaccgcccacaatctacagctgctaaaatattactttgtggatgatgcaatgatataaaaaacaaaaatattgaacatgttgaaaaccataagtaatacactcagatcaaacagggaagagaaaaaaaataattttcacaggtatctttctcttattatttccactagctcaaatctgattggtgtgttttatgtaaagggaggaatagacttagtaatcaagattgagagcactccatcttatntaaaaaac

SEQ ID NO: 3626 - DNA, 424 bp, Glycine max
  unsure (1)..(424): unsure at all n locations
agcttgngtccctaggcctagaatcgcattctagcactcattttaaatcctccatgctgtccctatacatataaaacagtcccacaatcccaagcttacaaaaccatactcatatgtcattaaggcatttcaccgagcacttggtgggcacacgttttggcataaatagcaagagaatgggggcaatgtggcatgccccattactccagaatgcaacataggcctaaggccatcccttacaaccccctaactcaaaccaatcaagcatgaaaacaaaccaaaattgctccacaaatttgagcacattcccacaatttagagcaccaaaagaagaccaaaatacaccaatggaaagctgaaagctcaaggatgagatacttacttgttggagtgagtangagtatcaaaaatgaaagcaaaatgc

SEQ ID NO: 3627 - DNA, 471 bp, Glycine max
gtgtgctcaatttccactggaagatgacatgcctttccaaagacaacccaataaggagacattcctatgggtgctttgtaggcagtccgatgtgcccagagagcatcatcaagcctggtactccaatctttcctgcttggctgcacaatcttctctaaaattctcttgatttcccggttagaaatttctgcctgcccattggtctgggggtggtatggtgtggataccctgtgtaccaccccgatactttttaagcagggcatgcattgtactgttgaaaaatggggtccttgatcactaacaattgctttaggtactccaaacgtgcataacagattagacctgacatagtctgcaacaactataacatcattacttctagtgggcgctgcttccacccattttgaaacataccctagctgcaggagaaatgacacataacctaaagagacatgaatagggcccatgaag

SEQ ID NO: 3628 - DNA, 84 bp, Glycine max
gcaagcttggggaataatatgggtgtctgtcttaaggcacatcgatttcgggagtcacacgacacacagcacacgacacgcaca

SEQ ID NO: 3629 - DNA, 422 bp, Glycine max
  unsure (1)..(422): unsure at all n locations
tgttaacaagacgaatgttggcaaaagtccnccttgccatcacctcatcattgcctcgacgacttccataagaattgaagtccttgcgttccaccccatgctcaacaaggtatttggcagcaggactgtccttgtgaatgcttccagctggagaaatatgatcagtggttatactgtcaccaaaattcagtaggcaataagcatcttttacaccatgaggtccaggaggatccatggtcatgctcttgaagtaagggggttcatggatatatgttgagtcagggtcccatgagtatagagtgtcagcaggaacttgtagttgattccacattgggttccctttggtaatagcctcatatgtacttcgaaacatctcaggcaacacactggattggacaacctaagataaaagtcacccaaag

SEQ ID NO: 3630 - DNA, 572 bp, Glycine max
  unsure (1)..(572): unsure at all n locations
tatcataccttttctntactaatattagtctgatctatgaatngatcttacannnnannnncaataagacgagctttgattcctcantaccagngcagctcaaagtcaacctgcaggcatgcacgctccgaggtccaagtgcacaacgtattggttcctgtgatggaaaagggccttgatggttctattcatactgccgccatcatccattgaccccgagatcaggtacgcgacactgggaacagacttactggatgactgggtggacgacctcagctttgacgtcccgaaaccaggctcctccaccctgcacacgtgtacagtagaggtacagcactggatacgaataggacgagacgaacatggatataagtatgaactgggcggacagtaatttagacagaaccagaggaaaacaccacttcttgtttagctgctagccgccgggctccatgggatgatcaagcttacactcgaataccacccaccctctggtgctgcaagactaattacgtatcgctgacgtatctattacacgtttgctcaccataggccgtaccctaagacatgcn

SEQ ID NO: 3631 - DNA, 437 bp, Glycine max
  unsure (1)..(437): unsure at all n locations
agcttatcaaatagacctgggtgttgcccagtttcatcatatcttccgtaatacttaccacctctatcatatccaataattttcacatttatgtctaattgcctttttatttcattgtggtaaatttctaacgcatccattgcctaagaaatctcgggcagtaagtagacataatcgtaacgtgaataatcatcaataatgatgataaagtatccttcctttccgaaagaactaacatgaaaaggtccacaaataccaatatgcacaatttcaagaagctgagtgcttcttgtagctcctttctttgtatgtnttgcttgttttccctcaatacaacctacacanatatttagatccgcaaatctagataaggaaaaattcattctttattaatcttttcatcctttctctaanaaagtgacctaaacatttatgtc

SEQ ID NO: 3632 - DNA, 344 bp, Glycine max
  unsure (1)..(344): unsure at all n locations
tactagaacaatccaatgatcctggattntaacctggttgtattgtatctacaatcaacaatttgtaaatttgtaggcaagagaagcaaaagaccagctacttcccacactactgagctaataaaaagccccaagagttggcatgggaatgcaaatcactcatgtatatataccttttttcgtgttttgattccaacaattgatatttgagtgaaggacttgacacaactttctttagtgggttcacttttgtgtgttccttcttgtccaatgtttttttttcaataagccccatcaagaagatgctgaaattgttcatactgcttttggggggggggtggggg

SEQ ID NO: 3633 - DNA, 403 bp, Glycine max
  unsure (1)..(403): unsure at all n locations
agcttgtcatatctctcttgatggtctctanangtatcatccncttcgaagaacatattgcggaagtagggactactagcaacaatatgttatcaaaaagaaaaactctagatgagggttcactgtaatcaagcaagtcagagacctagcataaccacagattcacctccactccttatgttcccatggacccgggtatagggccccttttcaactcaccgtgtgtgcaaatagtgttggtgtttgtgtgcatcaaatgaataaatatttacctcatgcatacattttaaaacacactaaaagcatcaaaagagtttatatatacaagaacataagagaaaaaagacaaagaaaaagacaaaagggaagtcatagtaaggagagcacactgattgattggcct

SEQ ID NO: 3634 - DNA, 472 bp, Glycine max
  unsure (1)..(472): unsure at all n locations
ggcatgattcacattctcccnctttgtcaagcaaattcttttttatatcatcaaaacctgcatgatttacaactttcctttcgaaatctccaagaaacgaaacctgaagtttatgaattgtaaaggttcgttccaaaacacgtttttcaattgcttgaaagtgagaacacaaggtgagtatatatagagaaaacaattataaccgcctgtaattgattagattagcaatataattgattatctcgagaaggtaatcgattagatttcccatttaatcgattaaagtgttcttccccaaatctggaaaacattcaagaataatgtaatcaattatagtgttcttgatcacttatggaaacacttttcaagaatgatgtaatcaattactaaatcattataatcgattaaactagagacccaagaaaacaaacatggtttctaaaagaactatgtaatcgattacgaatatatg

SEQ ID NO: 3635 - DNA, 282 bp, Glycine max
agcttatactgagaatataataccttcaccattccattagaaattaaccaaataccatatgatatggcaccttccttgtacagtgtcaaaccacgcaatttcatcattttcttggtacaacttgcaagtgatacacgaactgaagatgggagagcacccaacattggaaggatactacttatattaggaagcttaaccaaaggaggatttcttactcgtgtcttaaatcagcccgaaaataaataaattacttaatagatgaacccccattataatccatat

SEQ ID NO: 3636 - DNA, 447 bp, Glycine max
  unsure (1)..(447): unsure at all n locations
tcatcatcttatccntgttagcagaccatggtcccctctctcagctgctgctgctactactacctatccatcaaaagaaaccaaatattcatgctatgaaacttatacacaacaataagtggtgcgtgctgccaatgtatgagacaaattacatggcatgataatatcacgcctatgatgaaaatcacttaaaaacatgagcaaataattccggttggtaagaaaagacagagaacactaattgacaggcattttatagaacagaagatgtgcacagtgagaatatcccaaactgaacgggaaagtaaacgcactatgcaccacacataagttcacattctaacaaggaacgcgtgacggtgccaaacgagtccaacgcagtgccacactgaagacgagagtcacagcancaggcaccacacaggagttcaattttttctgttatct

SEQ ID NO: 3637 - DNA, 376 bp, Glycine max
agcttgtcctattatgtgaggatactcgatgatagaaaatatgaactgatctgtgttaagtaatgtcatggtgtgggtagcttctaatcatatcttgcaaccttttccaagcttcaggtagactctcttactgccattgcacaaattttctaatgtccctaatgtactgatccatcttcatgggagagaaatactttcttaagaaggcacttgtgcactggttccatgtagtgatgccactctcaagtggtgaacacaactagtcccttgcctttccattgagagagaaaggaaaaacataaagtctaacatactttgtcagtacacagttctatctcaccgtgttggtcaactgatgaacttcctcaagtgctat

SEQ ID NO: 3638 - DNA, 449 bp, Glycine max
  unsure (1)..(449): unsure at all n locations
tcggaagaaagtgatgaggtacaagccctaaaggcagagcttgaaagagcccgagtagtcgaagagaagttcaagtccatagccatcaaagtctgaaaagagtatgatgaactaagggacgtcaatatggccaccgctgatgccttggaacgagaaaccaagaaggcccaaaaggaagaacacgtgccagcaaagttttgaggggctttatagggcagcaatagtaagctcaagctccgaagaggtgaaaggaatcatcacgggtcaaaggcatgatcttgaaggacgagctaaaggcttaccttangtcgaaaagaaatttgtcccaacagttaagcgagactgaagggaatatgtgggccgtcatcgatgagtgcaaagagaagctaaatctagtggcgactcacgagcaaaggctagaggatgagtacgccaggatatcagcagaa

SEQ ID NO: 3639 - DNA, 431 bp, Glycine max
  unsure (1)..(431): unsure at all n locations
agcttgcataattgttattgaaaactaatttacttatttgcaatatttcaacaatgagattttaataactatacttgaagatttttgtggtggtagtaggaaaacattaaaagatttggtgcccaaaaaagaaatttgccaagtagtcatatttatctacttttttttcctattaatttattaacattactaataggtaatgtttaaagatacttgatctggtgacttgtatgatgacatatgaagttagatcaaaatccaaccacccaagtgttttggttcatgcttacccatggtttaggatgttttattttattntattctattttttatctgacaacgttgaattagataattgaacatgattcttactttactttttattgtcaaaaaataatattaaagtgtctctaacttgatagcactatgct

SEQ ID NO: 3640 - DNA, 454 bp, Glycine max
  unsure (1)..(454): unsure at all n locations
ctggagcnttttacaataatgacagcaggaggaggctttcttatggaagtaataacgcccaatgaagtgacttatattgctatttttgctgcttgtagtcactctgggatggaggatgaaggcctgcatttgttccatacaatgaaagctacccatggggttgaacctataggtgaccattatgcttgtcttgtggacttgcttggcacatccggtcgagtcaaagaggcctattaactgatcaatacaatgccatctcaatttgaacaaagtatatgcatggagtatcttgcttggtgcctgtacgattcaccagagtgtagaatttggtgaaattgcagcaaatcacctgtttgtcttggagccaaatgtagctaaccattatgttctaatgtccaacatatactcctcagctggactatgggaccaggcattgcgagtacctaatacaatg

SEQ ID NO: 3641 - DNA, 344 bp, Glycine max
  unsure (1)..(344): unsure at all n locations
agcttctatnagtgctcgaggattataacttatatggaggatgagaacgaacaaaggatgatttcttaccactgaaatcangtcaaaacccaaacgaaccacaactaaaggtccctctgtcaacgataatccaaaccaagctgactggtttttcttggagaggaataaaagagctaaataatagtgtctagagcttgattcatatttacaaagatttgcaagggatatatgactctcacttccttatcttcacacccatatttcacttaatgcacctaccctcttctcatgactcatcgtccatccacttaagcctaaacactctagaacttactatccacacc

SEQ ID NO: 3642 - DNA, 441 bp, Glycine max
gtttttaggcatagcatgtcatttttgaaagtctagtttgatttgacaatctacttaaagatatatcacatatcaaatcttatatatatatatatatatatatatatatgacctatgcttaaatccattaatcgaatgatagatgtcaaataagttatgaattatgaaaattaaaacaattgatactctcaatgtaaatgtgtctagtctcattattttggatgcctcttcggatgggaaacattcgcccacaatcacttataggttgctcacaagagcccgctcaacccttaatactattgcggctaacggaacttatgtgtggttgaaataacacttatcacattagaatgaaggttgaacagtgtgtcagataaatataaaaactcttctttacaaaagacgctcttcacgggagaatatgctcacaaacaaattact

SEQ ID NO: 3643 - DNA, 283 bp, Glycine max
agcttggttcgaggtacttacccgttgaagatcgaagaacgatgaagaacgaatgaagaacgtcgaagaacggttgaaatctttgcgaaattcctcacggaaaacgttacggaaacatttcggaagcgccttggcttagattttcttcacggaaacaatttttccaagcaaatgcgaaagagagagaagtgcctaaggggctgaaccccttccttcttgccttcctcccctatttatagcaaaataggggaggtggttgccgcccagctcgcccaggcgagca

SEQ ID NO: 3644 - DNA, 462 bp, Glycine max
tcgaagggaagagagagaccaatcacgagcacattgcatggtcttgaaagaggagttagctgcttgctcaaggtccaaaagaaacttgtctcagcgtttatgcgagacagagaccaacatgttagctatcattagcaagtaccaagaagaactaaatctagccacggcccacgagcacaaagtggtggacgagtatgcccaagtgtacgcggaaaaggaggctagaggaagggtgatcgactcgttacatcaagaggcaataatgtggatggaccaatttgctcttaccttgaacgggagtcaagaacttccccattactagccaaggccaaagcaatggcggacacctactcctcccccgaggagatccacggacttctcggctattgtcagcatatgatagacttaatggcccatataattagaaaccgctaggaagtttgtattgtcactcagatcttg

SEQ ID NO: 3645 - DNA, 397 bp, Glycine max
cgacaataacttttactcggatgtctgattcagtccccgaatatatcgagacgctcgaaattgaatgttgaacctctgagcaaatgcaaacgaaaataattttttcttggatgtctttttgagacccgtaatatatcgagacgctcgaaattgaatgttgaagctcttagcaaattcaaacgataataactttctactcggatgtctgattgagtgctgtaatatatcgagacgctcaaaattgaatgttgaacctctgagcaaatgcaaacgacaataatctttttctcggatgtgttgttgagccccgtaatataacgagacggctcaaattgaatggtgacctctgagcaaaatcaaaccggaatatcttttttcttgaatgtttgaatgagtc

SEQ ID NO: 3646 - DNA, 447 bp, Glycine max
  unsure (1)..(447): unsure at all n locations
atactaagcttgagcacatcaaacgaagataactntatattcggatgtgcgattgagtcccggtatatatcgagaggctccaaattgaaaacggaagctcatatcaaattcaaaggacaataactttttactcggatgtgcaatagagtcccgtaatatatcgaaacactccagattgaaaatggaagctcgtatcaaattcaaacgacaataactttttactcagatctccaatagagtcccgtaatatatcacaactctccaaattgaaattggaagctcgtatcaaattcaaacgacattcacttttaacttggatgtccgattgagtcccgtaatatatcgagaccgctcaaattgaaagcagaagctctaagcaaattcaaacgacaataacttcctattcggatgtccgatcaagtccgtaatatatcgagacgctctaaa

SEQ ID NO: 3647 - DNA, 398 bp, Glycine max
  unsure (1)..(398): unsure at all n locations
agcttgaaggcaaactggatgcattggttaactnggtaacccagctggccttgaatcagaaatctgtacctgttgcaaaggtttgtggtttgtgctcctctgctgaccaccatacagacctttgcccttccatgcagcaacctggagcaattgagccgcctgaagcttatgctgcaaatatttacaatagacctcttcaacctcagcagcaaaatcaaccacagcagaacaattacgaacctttcagcaatagatacaaccctggatggaggaatcaccctaacctcagatggtccaaccctcagcaacaacaatagcagcctgctccttccttccaaaatgttgctggcccaagcagacctacattcctccaccaatccaacaacaagcacaacccc

SEQ ID NO: 3648 - DNA, 465 bp, Glycine max
tggaaatgatttctatacaaaagttagtcgtataaagcgactaacaaaatccctacaaaataactataaattggggaaactatacaagttttggaaaatgttttctatacaaaagttagtcgtagaagacgactaacactcaaatctgttggaaaaaatccctatgttgacaaaaattgcccccattctgagtatcttgttcatttctttccgtaacatcgcgaaaccctacagattgcataacgattgatgttaagtagctcaacttggccaatgaaaattctcatgttgacaaacaattgtctccagacgaaattagggtatgacaactatgaaacaaatagtagaggacgttgagtcctatgaggctaaagacacaggacattgagtcctatgaacatgccaacaggtactggtacacaaaggcttaaacttgtaagaaggcgaaaggttgactctcttaaa

SEQ ID NO: 3649 - DNA, 428 bp, Glycine max
agcttgtgtcacactttcaattgtcgaagctgaatacatagctgcaagaagttgttgtgctcaaagtctttggatgaagcaacaatgatgtaagctccattggagcttgtaggcctaggatcttcttcatcaatggattcctttgcttcttggaagatgaatggcagcggaatggagaaaggaagagagagaggagacgccacttcaaggagaagatgagtctagaagaagctcaccaccataggaggccatggataagagcttggaggaagaatgagatgaatgaacggagagggagagaagagcacgatattttgtgctctagatgagctttgagatctgaaagttaatatgcaaagatcaaagctgaaaaaaatgcacacacatgacctctatttatagcctaagtgcacacacaatggagggaa

SEQ ID NO: 3650 - DNA, 460 bp, Glycine max
ctaagcttaggctgctcaattgctccaggttgctgcatggaagggcataggtctgtatggtggtcagcagaggagcacaaaccacaaacccttgcgacaggtacagatttctgattcaaggccagctgggttaccaagttaaccaatgcatccagttttccttcaagcttcttagtttcagatgatgcagatgggtttgtagctacctcatgcactcctctaatgactatggcatcatttctggcgctaaactgctgggagttggaggccatcttctcaattaaatttctggcttcagcaggagtcatgtctccaagggctccaccactggcagcatctatcatacttctctccatattactgagtccttcataaaaatgttggagaagaagctgttctgaaatctgatggtgagggcaactggcacatagtttcttaaatcgcttccagtactcataca

SEQ ID NO: 3651 - DNA, 393 bp, Glycine max
agctatgaacaatatacttgtccttcatttaactgtctttgggcttggcgaccatgctcaacaaagtactttcgacacctactgtacgttgatttcaccaatgttgttatgggaatgttgcgacaatcctttaaaaccttattgatacattctgagaggttggttgtcatgtggccatatcgacgtccttctctatcataagtcatcgtccatttttcctttgaaatgcgatcaatccatgttgctatggctggactcagttgacgaaatttttctaaattctgatcaaaaatgtgcttgcaatgagtgtaggctgcataaaactagttatgaataacaattttaagtatatattaagctaaataaacgtgaccatcaatttattatatctta

SEQ ID NO: 3652 - DNA, 398 bp, Glycine max
  unsure (1)..(398): unsure at all n locations
taagctgcctagggatattattttaatgttgtgaagatcttcttgggtattgcatgagtgcctcatccacgaatgtaaaattatttgtctggctgaagtccttaacaattatttgttgtttgtagtaagttcatcaaatacttacactaagacatttattgggattgatggagctggaaagcgattagctgatgaagtgagtcccgagacatgcaaatttatgtatctcaagttagcacgcccaattntagttctgatagctgtgaatttatctcaaattgtgtcatgttgaatgattatggcctttcatcaaaataggtcttgcaagttgttaaaaaggggcattactcaacccgcagtgcctatgatctgattggagaaggtgaaagagatagaag

SEQ ID NO: 3653 - DNA, 423 bp, Glycine max
  unsure (1)..(423): unsure at all n locations
agcttaataaaaaataagtgagataacaaacctgctcatcgacccaatctcatcagagttgtgtaggtggaagaaatcaatggtggagtcgacacacatggaaacgaagaggaacaaatgaaagtttctgagatagttttgcttggatgcaaatggagatgaagaagacctaacggcatagaaaacacagataaagtatgggaataggtatatttaaaaattgggaggtgccagattcaaaattggaggtgtttgattcaaataccgagcataaaatggcccacactgaggaggtccaatccaagccacggttataattagaccaataattacccagtacaaanattacacaatgtcctaattactatttgactctaatgtagccttangcttgtttttatacctatattcatttctatgata

SEQ ID NO: 3654 - DNA, 470 bp, Glycine max
  unsure (1)..(470): unsure at all n locations
taactagttggtanaatagcatacatgaactatataacctttgtgattacaagatatgcctttaattaatcagttcaatattttacaccatgtatggaagctttcagaaaaccatgaaaatgatttgggcacgaaaagttttcaattatcatcctgaataatatctttctgaatatagaagttagcacaataactttgtgacagttgaatcatcataacataatctaagtagtctaagaaatacatttatggctggtttgtttaaactattattttaaaataaatgtttttttagaaaagcactttttaataagcagataggatttgcttctcaaaataagcagaaactagcattgttttaaaaagaaccagtttagacaaaaacacttaaaaaaaatagaaacttgcttattntattaaaaaaagtgaaactctgtttctaaaaatatgattctctctctgctaatccc

SEQ ID NO: 3655 - DNA, 367 bp, Glycine max
  unsure (1)..(367): unsure at all n locations
agcttcagggcaatgccaaacactntgatgcttcgtccagctgatggtaatgaaactgctggatcatacaaagttgctgtggttaacaggaagagaccctcaattcttgcaccttctaggcaaaagttgacccaacttccaggaacttctattgagggagttgaaaagggtggctacattatttcagacaactcgtcaggtaacaagcctgatgttattttgattggaactggttctgagttggaaattgctgctgctgctgctgaggatctaaggaaggaaggaaaagctgttagagttgtttcttttgttagctgggaactntntgatgagcagtcagatgaatacaaagagaggttctccctgc

SEQ ID NO: 3656 - DNA, 469 bp, Glycine max
  unsure (1)..(469): unsure at all n locations
ntcttttccgcgctannattttctcggaaaaacaaaatacgaatggaatagcaagaataagcgaaggaaatggaaaatggaaaacctgaaaaaccctaggaatagggttgggagttgaaaaggagcagaatcgcactctaattactgaaaaacggtttttgtgcgctctctgctctgtttgtttggtttgaaatgcagaaaagtgaaagaaaaggaaaagtagtgggcaaccggatctaccggtaacgggcaaatggcgtttgggttggggtggatggcgtcgtcaaacacagacgcggataagtaaatggcaaacccacgacggcacaagaaatggaccacttcagcaaaagtaatcaaaagaaaatccgtgtcttaacccgattgtgatggacacgagtaacttaacaattaagtaagtaaacgcgtcatttcaaaaatagggtcacttatttaaatntattgattg

SEQ ID NO: 3657 - DNA, 363 bp, Glycine max
agcttcaaagtggacagaagttgaaagatgtatgaattacaaggactcgtgcttggaaaactaaaaactccacaatctcagagaccatacagtttagccgtggtgcagtttctaaagctgaggagggcaaggactgcttgagaaatgatgagaaaatagtcaatgtgatgcgggcacatgaacccgaattagaaaggcaaacttgtgcaaaaatagataagagaggagtggggagtaaaattttgaaagaaagagaaaaacaatcttgtctaaagggcaagaagcttttgctgaaagaacagactatagccaacactatccacacaggaaatgatcaacatccacatactcttcacgaagtga

SEQ ID NO: 3658 - DNA, 460 bp, Glycine max
  unsure (1)..(460): unsure at all n locations
tgacactnttagcacttccttacatgaatacaataatcattcttcatcacgagcaaaaaatatccagcccttaaaatctttcaggccatggcatgcccattggcataggtgccaaaggagccttcatgcacctcccttagtatttgctcagcttcacttacatccacgcaccggagtaacaccatatcatggtttcttttgtatagcacgtccccattcaaaaagaagttagctgccaacctccgtagtgtcctcttgtcattctcagaggcctcatataggtactccctatctttgatatatctcttgatattgaaataccaaggtttgccatccctttcttcctctatcaaacaacagtgagcaggctcactgtgacatctaatttctatacatggcaagtccccatgagggctcacctggaacataaatgacaaagtagcgagggcgtcatccattt

SEQ ID NO: 3659 - DNA, 316 bp, Glycine max
  unsure (1)..(316): unsure at all n locations
gcttcccttcaaaagtacacatgatcttgatttnacaaccttggatcaaccttaggcaactaataaagagggaatttgatcattaaggttaaatccaaagtgtatatagtagcagtcacatttcattctattgaatgatggagaaattagggccgtcctttttgtctggaactgcttatgatttttacagtaattgctagagtggaactatatcatggaaggtttattccttatttgatgctatggtactaaaaaaaaattcagacctatcatcaaaaatcttctatagttccatacttatattataattcattta

SEQ ID NO: 3660 - DNA, 428 bp, Glycine max
ctacataaacaggaacatatggtgtgccagtaaagttattttcatgcaccccagaatgaatatcttgcataagctgcatcaataaattacactatcagctggtcctggatcacatattctcatatataaggctccatataatggatattgatgcataagttaaaagcacttaattaatacagagaatgatttagttccaatcccaaaactatctagcttaccaccaaccaacacaaagccattgaggaagtgagatttgcaagattaccatcagttaagtaagttcaggtgcaatattttcttttctatattgttctatatcagcattcgcatcgtcaatttttttcttatgaagaattatagtgaattttaattatcttgatattcacgttgtcccttatggttgtgagtttcacacaccaacatat

SEQ ID NO: 3661 - DNA, 345 bp, Glycine max
  unsure (1)..(345): unsure at all n locations
agctngaaggtatgtacatgaccaaatctttagttaatcgtctttacctaaagcagtctttgtattcgtttaaaatgcatgaagatagatcagtaggagaacaattggatttgtttaataaactgattctagatcttgaaaatatcgatgtcactattgatgatgaggatcaagctttgttattgttgtgctctntgcctaagagttactctcatttcaaagagactttattgtttggaagagattttgtttctcttgatgaagtgcaggctgctctgaattcacaggaattgaatgaaagaaaggaaaagaagtcctctacaagtggtgaaagggtgacagcaa

SEQ ID NO: 3662 - DNA, 463 bp, Glycine max
  unsure (1)..(463): unsure at all n locations
ntntcggagccatttcctgctagggcaaacatttggaaatttaatttaccaggaaatgctatttcgaagcaaaaacgacatgctaatcttttcgatttgaacaaacttgtgcacgcatttccttaaagaagaacatttatgaacgtgcatgcgcagagtatcctgctatttatatcaatatacaaggacattcaaaacatcctagttaccacatatatttttttttaaaagaattcatatatgcatgctcaaggtattgtgccaaaattacacatgtccatattcaaagtattttcctaccaaaaattacctatgcacatttgaagtattttattaacataaaaaaaaatttgttgtttcattcacatttatttatacatatatgcacattggagagccaatctcacgtcacgtacacacttgcatttatntgaaaagggaatttcatgccatctatctacac

SEQ ID NO: 3663 - DNA, 382 bp, Glycine max
  unsure (1)..(382): unsure at all n locations
agctntgatactttgtgaatggngatacaaaagaattctcaggcggttagtcctttgaacacttttgtataaggaaatgggaagaatcaaaagaattctcagactgtgtcattttgaattctttgacaagggagaagggagacacaaaaaaattcaggcggttagtccttcattcttttggaaaagggagaagagagacacaaaaagaattcaggcggttagtccttggcgaattctttttggcaaagggagaagagatgaaaaagaatgaatagcacaagttttcaaggtttaaaaaaccagaaaactttggaaagcttttggcacaaaaaagaagaagaagttcanagagattcaggcttgtaaaggattgtgtaagatt

SEQ ID NO: 3664 - DNA, 331 bp, Glycine max
acacaaacatgcattttctacaaaactaaccaccgaatatcagattcacctcgatcatcgatcaaacatgctattgtccaatctacacacactcaaacagcagaaatttctaacactaataaagcatatactaaataaatgacacgaactaactagctgataaaataaactattccaaattggcaaaaatttcaaaactatgcaggatacaacatcgtttcctcgattatggggaaagtatctcaccacctcctcaaacttggctggatatttagccacaatatgtttccctgcttgagctccaagaactctatctctttcttgtgcctaa

SEQ ID NO: 3665 - DNA, 340 bp, Glycine max
agctactcataagactagtgtagtcgattactatataatcggtaatcgagtaaaacagatagtatatgcattgaagacgcttctaactttaaaaacaatcttcctatctctacatgaggatgcatgacgtacatatggatagattaagattaagatgcctcattctcacatatgccgctgaatgaattatgcatgtaacacgacaaaactcttcaaactttaaagcttaatcttcatgttgccccccatactttaacactaccaagtgaactctcgcagtaacgttataatttttcaccatttaaagatattccactattaccttcacaaccaatctact

SEQ ID NO: 3666 - DNA, 452 bp, Glycine max
tcatatgtgtcatctcctgcaccacttggtagccaagcatcatctcctgcaccaccaatcagccaaactatatttggtagatcaaccaatcacaatgtagttgaatttgcaccacagactatgcaccagtctccaatgaaaagaatttgcttggatgtggagtgaactttgtagatcctatgaatgttttgtggtctatcttgagaatattcttttattgtaatttggatattcttgatactatatgtgctgttatgtatttagaatgcttaaaaatggcgtgtgttggtacacttcaaatgcctatagaccattcttagacatgtactcattattgatatctctttatataaaaagaggtgattaatctctgctgaagatcttgagcatgcacaagttaaccatgttcctcctacatacactattcatacttaaggacgagattaaatcct

SEQ ID NO: 3667 - DNA, 400 bp, Glycine max
catcttatgttcaaaccaagtggggataattaacgttgattaatggtgatctatattccatatacttacacaaagggtcatttactcataaaatgtaatcgaggaatgaattttcgtaaatcactatataactactcatcaaacacaattttcgatttactcgctgtcgactacctacagtgctcctttatatgatcgtcatctaattgatacaattcttagttgtactgccttgtcataacccactcatacttacaaaaaaactctgtgttgtgtcatccatgcccgatcaatgcatttcaagatcttctcatctctaatcccacatttcacgctatcccttatccttgtaatcctccacctcacatcacactctaatcacatctctccccttaactcc

SEQ ID NO: 3668 - DNA, 462 bp, Glycine max
tatgttaagaaccacattttgtgtgttaacaaccatcattgcttatgaagaaagctaaaccaatattaacaacttcgattcctatttaacagcaccactggaactcaagtcacaagacttaatttcacaacattcacaagaggtcattgtagattgaggaatatttcagtcacaactaaacacgtgaaaaccttgacacaagcttaaatcctcataacagagtgcctaaacaaacttagtcatatttcagtcaaaacatattttacagctgaatataaaattaatagcaaatttgaacacccataaaatcttctttcattaacatagccattgaacaattcaacaattacaatatgcagattacaaaaaaccaaattatcaccattactttcttcctaaataaacaacataatggtgccaaattactaccatttgcagagacccaacaaaaaaatcaccaac

SEQ ID NO: 3669 - DNA, 364 bp, Glycine max
caagaatagcaacttcctcataaaagatgcgatggggatagggctgagcaccgggaaagatgaaacttcccctggtgtaattcacaaatctaacattgagggaaagcatttcagcaaatttcaatatgggtgggattgcaagcagtagctttgtagcaccacaggttttgatgatgatcttgtatgcataaacaaagagactggactcatacagaacataggagtcgacatgatcatttctgagagatgaaacaatggtgcaagcagccggtgtaagtatctcatccaactgggactttgcaagagcttctaaacccattccctcagggtcagcaaaaagtccggctggaaaaaggatatttcc

SEQ ID NO: 3670 - DNA, 473 bp, Glycine max
  unsure (1)..(473): unsure at all n locations
cgccagaataatgggttggatacagattattctgggatggttggtcatcttggtaagccttttgagtctcactagattctactctgcaggctttttcgtccacaatgaaggcatatgccaacacttctacaatgtgagggatgtttctgatggttttgatgtcaaatcactctctgatagagttggagaagtgatagacaagttggaaactttgcaggccaagcttgagtcaaaagtgcaagaaatggagaaaaacaaaggcacctagttggacaagaagtttttaaaggatcaaatagttacgccatttcatagtgctaatgttgctctaaggcgggttcgggttccgaaggttgatgaagggatgaagtccgcagtgaaagaggatcatgtgatcaattttttcatcactgaggagactangaagtacataagctcaaaggagaatacggttggtaagatcaacctatatc

SEQ ID NO: 3671 - DNA, 320 bp, Glycine max
  unsure (1)..(320): unsure at all n locations
atccttaagtcacctgcggctgcagcttgaataggaagtgtaaaagggtgaactttctgcttttattcgctgaccacagagtggtacctggagatatgtcgcgggggtcaagagaccttggggacngtagggggggtgccattgccaaaaaccaaacttgaccaatcccgacccaacctgagcatattctgtcagtgagaacctgtgatgtacctaaacaggcgagctcctggcagtcaacagataaaaggaacaaagaccaccaagcaaggaggctttgggtggctggccagctatgaacttgaatgatatgtgggata

SEQ ID NO: 3672 - DNA, 435 bp, Glycine max
  unsure (1)..(435): unsure at all n locations
cttccatcggtgctcccctcatggggtaccctaactgtcttatagcaagtgcgggattgtagttaatgcaacccctcgttcctatcagtgggatgtttgggtagcccccacatgagaagagaactccctccattccttctttccatcgtggaaaccagttgactgttttgcctcctatcccagccaagtgttggccccaatctactcttcttttttcgacacacaagcgatggcttcngagcggacatggatgccttatgtcttgttggaataagtgcaaaaccaaccatacacagagagcgggtaaacaacagatgatccgtgcactactcttttcgtaccttcgatcaaatgtgtcaaataagtccgccaagacagctaccaccgggctctctntgctatggtgatatgcaaggaaagcatcaattgcagcta

SEQ ID NO: 3673 - DNA, 408 bp, Glycine max
agctatgatattttactagcctcttcaagcttcgtagttgagcctaggggttgtgcatcattctatcaattcttggctgaacatctagaatccttgatatacaacgagcctcacctcttatattatatgaactcatgactagattactagtgcagtactccgcccatatatattatcatattaccttactaaatggaaacaaacattcattatatcctaattaatatcaggaatatatttcatctaattatagaatcctatcttatctctcaaaaaagaaaacgtatgtagatcgaccctggagtgtctataaatgaccccctaggcccctgaagaccatatgacactttttatgttgggatagataattttgagccctatagatcctaaaccaaaacaacttacaaa

SEQ ID NO: 3674 - DNA, 476 bp, Glycine max
  unsure (1)..(476): unsure at all n locations
tactaagcttccacaactcctcgaaactccatcttgctgctcctcgaacatcttcccccataggacaccataagcagatttggccgtgtactgcccacttggatccgccttccacacccactggtcaccttgctgaggctgaattctgtggccttcgacctcccttagaaatgataccgccatgtctatttcattatcgaataatggtctcctccatctaaaatcccattcccaccctttatctcggaagacccccatgtgttgtatgatatggttttgttgtgaagatataacatacaacctagggtatcttgcaatcaacgaaacctccccgcccatccatctgtcctcccaaaatttgaacttgtccccacagtttgagccttgatgaatgtcagcattgccaatttttgggaaaagtgatgcanaatcaacagaagtggcatgagggaaatcttgtcaccatatacgtgtag

SEQ ID NO: 3675 - DNA, 416 bp, Glycine max
agcttgtagagagatcttcattctggtttaattgattactgattatttgtaatcgattacactattcagttgagaccatgtctcattttcatgagtctctactttaatcaattaccaagtgattgtaatcgattacatcgttcttgaaagtgttcccagtagtgatcaagaaaactttgatctattaaatcaagagtctaatcgattacattgttcttgaaagctttctaggtgttgggaagaacactttcatcgattaaaaatgataatctaattgattacttctttaaaataatcgattaatgtggcaatttaatcgattacatgcaagtatgaatggtttctctatatatagccacctggtgtctcagctcttacgactccacattctaatcttcattcctgaagcattcatg

SEQ ID NO: 3676 - DNA, 446 bp, Glycine max
tcgtaaatctctataaggcctcaaacaatctccaagggcgtggtttgacaggctaacaatagttgtcaagcaagatggttttgctcaatgccaaacaaaccatactatgtttgttaagcattctctggatggaaagatagctttgtttattgtttatgtagatgatatcataattctaggagacgattatgatcaaataaatcatctgaagaatcttctagccgaggaatttgaagtcaaggatctacgccagctcaagtattttctagggatggaaattgctcggataaagaatggtatttttgtttctcaaagaaagtacactctagatttacttcaagaaacggggatgcttggatgcaaagcagccaatgctaccatagaaccagtcaaaaggagtgaagaggagagtgtagcagctgacaaagatagatatcacagtctag

SEQ ID NO: 3677 - DNA, 239 bp, Glycine max
agctctaacatcaatgtatgcacttctagatttgcttatgatcgtgattgaataattccatgacacggttgcgagtgttgaaagtgcttacatcaaatttataccactgcgctgattgtctatctcactaccgttgtcctctcacaatgtgtaatggtcaggtgcgtacctctctttgatttcgtttccttttaaaagacacaaaaaataccttgcattatcttttattttatggactc

SEQ ID NO: 3678 - DNA, 425 bp, Glycine max
tgtcataaaattgattgataaaaacaactagagaaaattaccagccattaacaacaacgggccagtaatgagctttagttggagcatctaatcgatgaacaataactggatcagccttcatactagaaattgagaaacctaacagactatgaaatgatgctcatcagaactgcataatgaatcacaaaagacaagggctgattgctaataactgtggcgacaaacctgccatataaagagaagtcataaatgaccctgtataaactctatcaacagccaatccatgttctagttgtaattctggaactgattcttcagctgtaatcattagtaccattgtacgagtgccacctaacctgcatatgaagaatcatttcactaaacattctataggaaaaatatcgtcacaaggaatcttgaacatc

SEQ ID NO: 3679 - DNA, 410 bp, Glycine max
agacttcatgaaggaactctctaagaatttctttaatatattcaaacaaggagaatctagaatcttacactaacacttgaactaaactagtcgatacaacttatgaatctgtgtatgaggcttagtttgagatagaacttgttcgaagcaaccagaggttatcattcctaagaagggatatttatactccatgtcggaggtgatcattcaagatacctgaagacatgagtcaaaagactcttctaggatgtggtgtttgatatttttccttcataacattataggattaaatttattgtccaaagagaattggatcaatggtgtgggtctccgtcattaacctaataaattatgaaaagttgtatcttcagatacaaagtgagaaaccttttccatagtgtcacctttgg

SEQ ID NO: 3680 - DNA, 471 bp, Glycine max
  unsure (1)..(471): unsure at all n locations
ntggctggcaaatcagaaactcttggaggagggacgctctttgccaaaagaatcctgctatgcaaataacttttgcagtcttcaaggccttctctgtattcctctttcggtattgcaataacaaccacataacccttcaaagcttataaatatgtttacatatggcaaatatatataacagatcactatacatatatagaataaaagtatacttaagcaaatacatatattttatatatgaaattgaaatctaaaacaaaatcactacatatgtatccttatatatatatatatatatatatatatatatatatatatatatatatatatatatataacacattagaatcttatatacactataatttatatatggaaaacacatatacatatatcactaacatactccaaggcaaccataggaatctagccacgagaaaattagtcaatagaagactatgatcaatctcg

SEQ ID NO: 3681 - DNA, 422 bp, Glycine max
agcttgtttgaataatgaactgattgattatgatattcagtggtgtgatttcttatgaatgagtgtttgtgaatgacttgaatgagcaaatgtatgaattgaatggattggaatgtttagattttgctctaatcaagcttgccgccattagaagagaagagaaagaacatgtgattagatgtatgactgaaaatgctagtcagtttgtcagattgattgtgaaggaatgcattgaccgtatcccagtgagcgtgtgatccttaaattttaagagaaatgactatcatttaatactgatctttgcaagaatctctgaagtatggactgaatgcatgaattaacgatgatgaatgcctgtctgattgtgatagccacttagccaaaaagctgaccacgtgcttgaatgattatcccttgcccca

SEQ ID NO: 3682 - DNA, 454 bp, Glycine max
  unsure (1)..(454): unsure at all n locations
tgtcttaagtgtttatatatcaacttgtgatatgtactatcaaaatagttagttaggagtaaaagtcttgtgtgcatgagcttggttctggtacccttgatggaatgtaatgtgccatgcaatctttttacgtattatttattcaaatttttttgagaattaattattttgaaattcaagagcttataaaaaaatccaatttttaatgtgacaaattttgatgaggcccgatcacaaaaatcatgagatttccttcttatttatttaatttttccttttatctttaaatacttttattaccgtatcaaactatcaattattttaattgccctttaattccttcttatttatttaattttcccttttgtctttaagcatattatcccctagttcctaatttcgtttaatgatcccattagctctcttggtacggtatcaacaaaactttnttctc

SEQ ID NO: 3683 - DNA, 402 bp, Glycine max
  unsure (1)..(402): unsure at all n locations
agcttctcccncattttcctataaatagggggagaagtgaaaggaaaaaatgttcagccctcctggtaattcgagaatcacttgaaattagtgaaaaaaattgtttccgtgaagaaaatccaagtcgaggcacttccgtaacgtttctgtgggtgattttgcgaagattttcgaccgttcttcgacgttcttcattcgttcttcgtcgttcttccgtcttcaaccggtaagttcccgaaattgaacttttcaattcattctatgtacctttagtggtcctcatttgctttcacgtgctcttattttcgtttcatttactttctatacccccttctgacgtgccttagtcatttattaagtcattttctcgcctaatcaaaaataaaataatttccccgatca

SEQ ID NO: 3684 - DNA, 446 bp, Glycine max
  unsure (1)..(446): unsure at all n locations
tgccacccagctcgcccaggcgagctaggttgcttccttcataagcaaccgcctgctagaggaacatcctgngaggcccaagtgggtctggttgctatttgcaccccttgtttactaaatacacccctgccttttttgctgattctttttccataatgttacggaaacatacgaattacgtaacgatacttgttttccttccataatgttatggaaccttacggattacgtaatcatccccttttttgcctttcggaatgttacggaactttacggattgcgcactancacttccttttaatttccggcatgtcacggaacttcacggattgtgccacaatgctttctgttgacttccggcatgtctcggaacttcacgaattgcctaacgatgggtgccaagttcctcacagtggtcaaacgagggtcgcatcccaacaatggat

SEQ ID NO: 3685 - DNA, 427 bp, Glycine max
  unsure (1)..(427): unsure at all n locations
agcttgngactgccagattgggtaaaatttcagtgcagcttttaattggacaaatgcagcttgcgccacttctctccattgaaaactgtcctttttaagaagctggtgtaagggtttaacaatctttccataatcttttatgagccttctatagtaccctcttagcccttaaaatccccacaggctgttaatatctttaggtactctttagattctggtgagtggcgagaaccacggagcttctactttcttgggtcttctgacaccccttcagctgagataacatgtcccatatattccagatttggtcaacccacactgtgtgtccttttggtcatcactagcttatttcttataaatgcttgcaagttgcaacaccttcctcaaatgatgaccttgatctttactatgcgaacgtctggacagt

SEQ ID NO: 3686 - DNA, 466 bp, Glycine max
  unsure (1)..(466): unsure at all n locations
cttgcatgattcacattctcccctntgtcaagcaaattcttttttatatcatcaaaacctgcatgatttacattctccccctttntgatgatgacaagcattatccaaggcttgatctttttgacatcatcaaaatcttcatgatttacattctccccctttttgatgatgataaccacctataagttaggagcaacaacaaagaaaaaatatctatttgcatatagtttactcccccttggttttggaatgtttgcttatatgagacaattgaagatttcatatttttcatatataaaaagttgtctcataaagaatagacatttttccttactattttatcttgtatatttctctccccctttgtcaacatcaaaaacaaatcatgaatagagaggagaaaaatgttaccacttgttgtaatgtataaaaatcaagtgataccaaaaggtattaaaataaacta

SEQ ID NO: 3687 - DNA, 434 bp, Glycine max
  unsure (1)..(434): unsure at all n locations
agcttcctcggngccattcctgcgaaggctaacatttggaaagttagttttaccaagaaatgctacccttaaaacaaaaatggcatacaaacccctccaataaatacaaacatcaatgtaaatttagagcaagcttatgcgcatacttctttacgaacgttcacttgcacaagacattctattaactaagaaaaatgcacccatatacaatcaaggcaccttcgttacctagattatttacatgtacttccaaggtgtatntgttacctacatcacacgcatttcctttgctaaatttacatacatgcatactcaaagcactntggctatcaaaaattgcatacgtgcacattctgtatttctaatacctatacatacacaaacttcatgatgaatcttgactatctacacaataatgtgttacatttcatgct

SEQ ID NO: 3688 - DNA, 442 bp, Glycine max
  unsure (1)..(442): unsure at all n locations
cttgacttaagtcatcaagagagtataaatatgtgaccatggcatgaatttcatatcatctttctaaaacatctctttcaacaatcaagaaatctatctttcaatcttctctctcaacatcattcaactttttctatagaattttctgattctttttctcttcatctttctaaaagtttttgttcaaaaatttctcttctaagaaaagctctttgttcaaaaacttgtgctattcatctttttcagtctcttctccctttgccaaaagaatgaaggactaaccgcctgagaattcttntatggtacaagttgagggtacatctacttggggattgttatactaagaacaagagagggtacatctcttgtggatcagttcaagtggagggtacatccacttgggttttcaaagagaacaagggagggtacatcccttgtggat

SEQ ID NO: 3689 - DNA, 270 bp, Glycine max
  unsure (1)..(270): unsure at all n locations
agctttgatacttngtgaatggngatactattaaattctcaggcggttagtcctttgaacacttttgtataaggaaatgggaagaatcaaaagaattctcacactgtgtcattctgaattctttgacaagggagaagggagacacaaaaaaattcatgcggttagtccttcattcttttggaaaagggagaatagagacacctaaagaatttcggcggctattccttggcgaattctctttggcacagggagaagagatgaaaaagaatg

SEQ ID NO: 3690 - DNA, 611 bp, Glycine max
  unsure (1)..(611): unsure at all n locations
ctctcctccactncncntcanctccttcgcctcctcccgcgcgacccccctncnttntnntntcacctntanctcaaaggcnccnnnncncccggttgagttcgtgacntatcnaacacgtgacacnatnnaacacncaacctcgatcaaaacaaaatctatacgttgcgatccgctttattcattcaactcgcaatgagttcaaacacagccgttcattgcaaacaaaaccaaaccctggatatcaagatcaactacatgattgctcaaacctgcttatgtacaagctacacacacttaaacaactgaaatgtaaaagactaagtaagcataaactaaataactgacatgaactaaatatctggtagataaaccattcaaaatatgcgaaaacttaaaaactaatgcagattcaccatctctcccttgataatggggaaagtatctcaacatctccctaaacttggctggatatctagccacaatcatgtatccctgcttgagcctcaagaactacaattatatctcgtactaacttcctcgggaaaatgattctcctaaaataccctctagaagacataccangacacatcttgagcttcagcctctag

SEQ ID NO: 3691 - DNA, 415 bp, Glycine max
agcttcacgtcacattagcttaatgttaactccttgggacaactgcggaatttatcagcaagtgcactaagtcatacaagtagtataaaacgataagaccgagtatcgcatccacagggagtttgtttcattcagaaaagcgttcattcaatcagtagacatttgtgtaacatcatgaaatggaattaaaaacaggatataattgcaattctaaagataactacaaaattaactaagtaaatgcgagagataaacaaatgattaaaatgttgggcctctctactgagtgacttgatgcaactaacggttattctctatctaatgtcgtctctgtgttctataatgatgaaaatatcccaaatatcaatgtcttgcatgaatgggctaattctaattaaacttcattcttggatcc

SEQ ID NO: 3692 - DNA, 354 bp, Glycine max
  unsure (1)..(354): unsure at all n locations
tgagatgangaagtgtccaacggtgaacttcctgcttttattgttgaccacacactggtacctggagatatgtctcggtggtcatgagaccttgatgacgtcacgtggggtgctattgcccaaaaccaagcttgaccaatccagacccaacccggtcatagatcagtcatctgacaacctgagatgtacctcaacaggcgagctcctgtctctctacacatataatgaacaaataccacaaaccaaggaggcttgtggcggctgaccagctgtgaaactagattgatatgtgagatatgggctctggtaatccaatacccacgtgggtcatctgattacaaggcttaaaaatga

SEQ ID NO: 3693 - DNA, 404 bp, Glycine max
gatatatatgattccatcgcaaatacatacaaacatatctttttcaaccgatatactaataagcgaagtaccctatcgcgacgctcacaatttatcatggaatcattctgataatcccgacatagctaaagctttgactcgcacgtatgattgacgaccataatatatcatgatgattaactagttgaattggaatgcccatgcgtatttccacagccataacgtgtgactggattcccgactgaagtcataataaatgtatatgctctcaggataaactgatgcctatgcaaattacaacggacgtatcatttcctccgcatatttactcccacagtgacctactgcacactcaaattcacatgactactgtctgatctccctgtccatacttccatctaacc

SEQ ID NO: 3694 - DNA, 472 bp, Glycine max
  unsure (1)..(472): unsure at all n locations
tcaaaccccagcaacacanaatctaggtgtccaaaacccctcaatttaatggattttcaaggtttgaaaagtgaaatttagaatgaggtaaatttgaagcaaactctcacctcacaccagtccataacatccatttagacttgttcaaactggattcacacctaaaatctcaccgaatcaaaatttgactcttcaacacccaaatttgccctagaaaaggctctttgttcactttggtcatttatttttctctctagcacagtccaagctttctcataagtcctaaatgacatttcaagctagtattaactcactttaacctccatttaccacagaattcagacttagccttcccactctcaaagcctcactctntttccactcataacaccacattctcactttctaaccctaagttagttctacccttcgtctctaacagatttccatcagcaatttcagcatataaaca

SEQ ID NO: 3695 - DNA, 333 bp, Glycine max
  unsure (1)..(333): unsure at all n locations
cgtcctactataaaaagtgatcaaataacaagcatagattcaaaaagtactaagttgcctcctagtaacgcttctttaacgtctttagctggacgccttatgacttgtcggtcactgacctagtactttgcttacctttggctttggacttggttgcctattggtcggccatgtgtcgtangcaacgctctaacctttntatggatgaactgaggtgaactttagaggtggtggcggtgtgtctattgcctgctaccggccatcccaatgctgctgtggtgcttcgccctgcgcccgcctgggggcgcatacttttttatgaaagctccattg

SEQ ID NO: 3696 - DNA, 470 bp, Glycine max
  unsure (1)..(470): unsure at all n locations
ctctccactaagttgcctgatgcctgaaatgtcttttctgatggtattggtcctagatgcagggaagaatttctccaagaacaccattttaaggtcatcccagctgacaatggacctgngagcaatagtatagccaatcttgtgccactccctccaaagaatgaggaaaagcctttagaaagatatgatcttcttggacatcagggggcttcatggtggaacaaacaatatggaactccttaagatgcttatgaggatcttcacctgcaagaccatgaaacttgggcaacaaatgtattanttcagtcttgagaacatatggaacaccctcatcaggatattgaatgcacaagctttcataagtaaaatcaggtgcatccatctccctaagagtcctcccacgaggtggaggttgagtcatgttctctntatgaaaattagtagtggaatgctcaaaatcagaatattca

SEQ ID NO: 3697 - DNA, 422 bp, Glycine max
  unsure (1)..(422): unsure at all n locations
agcttcttatccaaggctcatcttggtggtgaagctccttcttccatggcttattccctagtggatggtgcctcctctcacctcttctcctttgtcttccggtgcatctccatggtggaaaatcaccattaaaggacctcattgaagctcgaagatccagcctccatagaagccccacaagtaagcttccatcaacacatgagctcaaagggaagcttccaatctggtggttgcatgataggagaggtggttagccttttcctcaactcctcaaatgcctctttgcagggttggtcaagcacaaagcctatatgtcctttataagaagcttggacaatggcagggcaatactgctgacatctgnatgaatctcctatagaaacttgcatgtccaagaaaagaatgcacttcccaccaaaagc

SEQ ID NO: 3698 - DNA, 470 bp, Glycine max
  unsure (1)..(470): unsure at all n locations
cttgcggatntggacttcgccggcagaaagatcaaagcaggtctgataagaggcaaatttaatcatcccacttggacgaatgagaaaactggggcaaatgaagagggtgagaatgagggagaagctcatgctgtgactgccattcctatacagccaagtttcccaccaacccaacaatgtcattactcagccaataacaaaccttctccttacccaccgcccagttatccacaaaggccatccctaaatcaaccacaaagtctgtctaccgcacttccaatgacgaacatcacctttagcacaatccaaaaacaccaaccaagatatgaattttgcagtgagaaagcttgtagaattcactccaattccagtgtcttatgctgacttgctcccatgtctacttgataattcaatggtagccataacctcaaccaacgtttatcaacctccatttctccgagaatacgact

SEQ ID NO: 3699 - DNA, 395 bp, Glycine max
  unsure (1)..(395): unsure at all n locations
agctnggaaggatgcttcaatggaggaaatgaaagagggagagaaagagagaggggggagcacgaaattgaaggaagaaaaagggagagaagttgaactttgagttgtgtctcacatgactctcattcatcaaagttacaacaagtgttacacatgcttctatttatagactacgttgcttccttgagaagctttcttaagaaaacttccttgagaagctttcttaagaaaacttccttgagaagtttctttgagaaaacttccttgagaagctagagtttatctacgcacacacatctaaaaactaagctcaccttcttgagaagcttccttgagaagctagagcttatctaccccacccatctaaaaactaagctcacctctgtgagaagctt

SEQ ID NO: 3700 - DNA, 453 bp, Glycine max
  unsure (1)..(453): unsure at all n locations
tgtccacanaanagtcactaaaaagggatttgaaagtttattatttcagttttccttaccaagtaaatggatcatttttaaaggtccaacgccttaaaatgatcacctttcaagtaaaaagaatcgcttgattcactcttaaggaagaactacgtaggtctgatttcctcttcgatggagggtacgtaggagcaagagccccgcttttgtcgacctcaaaaattaaaaagaaataaaaggtaaaataacacaatttcacaattctaaaaataggctgttgtcctttgagacaaacgtgagaggtgctaataccttcctcanacgtaaatacaactcccgaacttagaattttcgttttgaccacgttccttcggtttttccgacgttttccacacataaatgttggtggcgactccacgcatctttcctcccttggaaagtgcacccgtgagc

SEQ ID NO: 3701 - DNA, 418 bp, Glycine max
  unsure (1)..(418): unsure at all n locations
agctttcaacaagtttcttcacaaataactatcatgaagcagaaaactagcaagactacccatcatatctccccaaaccccatacccacgaaaatcaaaggagaaagaagtccacccaaacctgaaatttcgaagtcccactcgtagccacgcacttcacgactccaaaaacgccatcctttcacgatttggggaagaaatgatggccaaaggttggagctttgttggggtttcaatggagaatggaggagaaggaaaaagcaacgtgaggaagagggagagcttctgaattttctgctttggctgagtgaggagagagaaaagctttttggttttaaataaaaagggttttctcttttctattattntattcaagctctgccacatgtccctatttgagtggagcaaaagggcccac

SEQ ID NO: 3702 - DNA, 459 bp, Glycine max
ctcagctgctgtgggcttctatggagactggatcttgagcttaatgaggtcctttaatggtgattatccaccatggagatgcagcggaagacaaaggagaagaggtgagaggaggtgccatccactatggaataagccatggaagaaagagcttcaccaccaagataagccttggataagaagcttggagaggatgcttcaatggaggaaaagaaagacggatagaaagagagagggggagcatgaaattgaatgaagaaaaagggagagaagttgaactttgagttgtgtctcacaagactctcattcatcaaagttacaacaagtgttgcacatgcttctatttatagactaggtagcttccttgagaagctttcttaagaaaacttccttgagaagcttctttgagaaaacttccttgagaagctagagcttaggtacacacacccctctcataac

SEQ ID NO: 3703 - DNA, 399 bp, Glycine max
agcttggttatctccttcttcactacatcaagaatcaccgggttgagtcttctctgtggctgtcttactggtttagctccatcctctaaatttattcgatgcatacatgtggatgggctaataccaggaatgtctgccagggtccagcctatagccttcttatgcttcttgagaacagataaaaacttctcctcttgctcaccagcaagggatgcagatataattactggaaaacttttgctatcatccaagtaagcgtattttaaatttgatggcagaggcttcagttctggtgtggccggctggataatggtacaaggagatggtttctcaccctgcacctcataaagaaagcacacgtatgtgtacttctcgaaacatggttagttctatctgact

SEQ ID NO: 3704 - DNA, 473 bp, Glycine max
cttcccgttttcgcactgactggccaatggatctataagaataaatatagacatatgacaaatcaaatttttaacataagaacttgaattcagtgacactaaaaagaaattgatgtaggaaggaatgaatgaatttcttatgatttacacacaaggtagagatccaaatagtccagttgcaaatcttgtaaagttttatcaaatgcctctgggacattttccggcaagtgatcattacacctataaaacatgtgcaaattaaattgggtataaagaatgtaattacagaatcagaatgataaaggatgtaattgagtttaagaacaaactagcaagaacagtttgaataaatgccagaaatctgtagactgttattgagaaagtcctctgcttctcataaaattgttcaagtttttgaacaacaacgtatgatcacaatagtactttgacagacaaagatgaagaactatacg

SEQ ID NO: 3705 - DNA, 403 bp, Glycine max
agcttgtggtgcaaaagattacatctatacttaggaatctttgatggggcagcctccaagactccattaagattccttgggtgaggtgggacatagtctgcctacctaagagtaaaggtgggttatggatcaaagatttgattaaattcaacgaggctttgcttgctaaatgggggtgggagttggcaaataatcagaatcagttgtgggccacaattctattgtgtagatatggcggttggagggattcgatttctcatacgaactgcagtttatactctccttggtggagagacctcaatgttatcttcaagcagcagcaaagcaccacaattggtaaaaatagctttattttgccataggtaaggacggtccatggaatacaaaccaagtacttattggc

SEQ ID NO: 3706 - DNA, 463 bp, Glycine max
tgtaagtatttgttggtataatttgcctgttccattatgcttttaatgtctctagaggttacttcctcgttgacatcttttgtcttgaatggaattgccatgacaggtttgttgttactgtctttgatatttggtagttgatattgtgttgtgggaggtaattccgactggattaactcaccatccttcacttgccaatttgttatgacatttgttgttggattacctatgatgtcttgtttccaagggtagtctatatcctttctgatggcataagcatgaaaccaatcaaagaaaaggacattaattttgactctttcgacaaattcgtagaacttgtcttggatttgttttctgtttgtacccttgtaatgttggaaaaaccatctcctttgaggttcattctccggagaatagacaattttcctaagggtttccttatcaatactaaagttgtcagata

SEQ ID NO: 3707 - DNA, 189 bp, Glycine max
agcttgagatatcttctgaaccatctatgatgatgaaggtgtagtcctcattataaccgtgatcactcaaattaattatgggaattgagtccagagaacgaacatacgaatgttgtggcctttcatcttctgggaggataaatcttggagataccgaacggagagaacaaaactcatttgctaactgaa

SEQ ID NO: 3708 - DNA, 461 bp, Glycine max
  unsure (1)..(461): unsure at all n locations
tactaagctttggcttttttnttttctttcactgttatggtctaaccttgttttctctattatcttgcaaactgggtggcgttgcatttgttaacccatatgttatattcctttaagtattctgagtctacatatttgatgaagttatgattaaatcacagaagtctaattatggagctgagtctacatgtcagtctttacttcactagttagctcgaattctgtntttgaagaaatctaatttccttaaccgaaacactctacatgtagtacaatagggtaatcttatggcgctttgttcacgaggcatgtctgcgtgacaggcctcattattctccctcttccctcattgaactgttctggttggcactagatttttttttcttattctgcaatatctgcaagaattcttctgcttaccatgcaccaaagcctttaacttggtcacaaattaaaacgtg

SEQ ID NO: 3709 - DNA, 348 bp, Glycine max
  unsure (1)..(348): unsure at all n locations
agctngagatgaggaagtgttgaagggtgaaacttcctgcttttattgttgaccacagagtggtacctggagatatgtcgcgggggtcaggagaccttggggacatcaggtggggtgctattgcccaaaaccaagcttgaccaatcccgacccaccccgggcatagtcggtcagtgagaacctgtgatgtacctaaacaggcgagctcctggcagtcaacagataaaaggaacaaagaccacaaagcaaagaggcttgtggtggctggccagctgtgaactttgattgatatgtgggttgtggcctctggtaatcgattaccaagggtgggtaatcgattacaaggct

SEQ ID NO: 3710 - DNA, 486 bp, Glycine max
tgctattacggaactataaaactaagcttctctttgtgcaactgtctcatcctctttttcaggtgtagaatgaagcttgacaggttcaggtgcaggtgttgctactggtggaggcacttgaatttggttgctagacctcaaggtgatggcactcacatttttcggattttgcacagtttgtgaaggcaatttgtcagaattttgggactgagcttggttcatctgagtagccatctgccccatctgatttgtcagactttgaatggaggctcttatctcttgctgaaattgcatattatgcatggtcattttgcctcactaactcttctaagggaggttgaggaggagcctaagttgcttgttgtctttgtggtgactgctgctattgctgttgctgtattggaggaggaacatatggcttgcttggaccagcaacattttgaaaaggagggacagactgttgttgttgtggaggacttgtccatc

SEQ ID NO: 3711 - DNA, 429 bp, Glycine max
agcttagctattagagaggtatgtgtagctaagctctagcttctttaggaatcttctcaaggaagcttctcaaggaggtgagcttatttattagaggggtgtgtgtagctaagctctatcttctcaaggaagttttctcaaagaagcttctcaaggaagttttctcaagaaagcttctcaaggaagcaacctactctataaatagaagcatgtgtaacacttgttgtaactttgatgaatgagagtcttgtgagacacaactcaaagttcaacttctctccctttttcttccttcaattttgtgctccccctctctctttctctacctctatctttttctccatcgtagcatctctccaagcttcttatccaaagctcatcttggtgggaagctccttcttcatggcttatccctatggacgcgcctct

SEQ ID NO: 3712 - DNA, 451 bp, Glycine max
  unsure (1)..(451): unsure at all n locations
tgtntaccccatgttgagtntgcttacaataaagctgttcatatcactactaattgttctccttttgaagttgtttatgtttgtaacccactaacttctcttgatcttttgcctatgcctaatgtttctatttttaagcataaagaaggtcaagtaaaggcggtctatgtgaagaagcttcatgagagagtcaaagatcaaattgacaggaaaaataaaagctatgctaaacaagccaacaaagggagaaagaaggttgtcttcgaacctggagattgtgtttgggtgcacatgagaaaagaaaggtttatggaacaaaggaaatcaaagcttcaaccaaggggagatggaccattttaagtgcttgaaagaatcaatgacaatgcttacaaagttgagctacccagtgagtataatgttagttccaccttcaatgtctctgacttatctc

SEQ ID NO: 3713 - DNA, 414 bp, Glycine max
gagtctccgcggcgcactttcgagcgggtagatgagttatgtccccgaattggacatctgcgtgattagttatgaccatttcatgttttcgatagcttccgtgtggacactttccagcgtagcgatgtatatgaccccgaatcggacatgtgtgtgtaactattgaccattccatgattcgagagctttcctagctatatttcccgcggctcgatgattatgtgcctctattcatcatcctcgtcggtacctctgaccctttcgattctttgagagctcccgtttgtttctttctgacgtgtagttgattcatcgttttccaattgacatctcgcgtgtacagatcgtgagtattcttatttattcaagaactatcattttttaggatctgcggtgtcgattgtgttccggtcg

SEQ ID NO: 3714 - DNA, 464 bp, Glycine max
  unsure (1)..(464): unsure at all n locations
tcccaagttnttaagttcttcctgaacactggcctcatttatgttcccacagtcctattaacaacttccgtttgtccatcggtttgcgggtgacaagtggttgaccataacaatttattgcccaacttgctccacaaagtcctccaaaaatgacttaggaacttagagtccctatcactaacaatgctccttggcaaaccatggagtctcacaatctccttgaaaaacaaatcactcacatgggaagcatcatcaacttttttacatggaataaaatgagccattttagaaaacctatcaacaaccacaaaaatggaatctctaccattgcttgtttttgcgcagcccaaaacaaaatccatggataaatcaatccaaggatactccggaattggcaatggagtatacaatccatgaggctttaccttagactgtgcctttntacatacaatgcaatgttcaca

SEQ ID NO: 3715 - DNA, 312 bp, Glycine max
  unsure (1)..(312): unsure at all n locations
acattttattcttataatttagagtgtttttcattagtgaaaaattattttttttttttatttttagtccttataaattatgtttattttgtttttaatccttaaaataggggtttggatagtgaaagatatgttatccaaaatatctaaagaacttagagcacgaatgacataatttgtcggaagataaaatttacaaggaaaaaaataaaaatcacacttaattataagaactaaaaattgtatttaaggcatatatgaatgatctaggactttgaggaaagaaacccnccaagtctcagtttaaaacac

SEQ ID NO: 3716 - DNA, 432 bp, Glycine max
  unsure (1)..(432): unsure at all n locations
cgaccggatgtaagatacatcttcttcaacctttgtcattcttgactccatttcattgaagcgcatatccacttgcaattccaaagtatcaaacctctcaccaacaaaggtttgaagaccatcaagcctttccataatcttcgaaagaagagataaatcttctccttcatgtccttcttcaccaacatttctagcacccttcttcacccaagagccatcatgctcctttatgtaaccaaaggatgctatgtctgaagcgcctataaggaatgatctcttgattggaacataaggttcagaatcaagagggatgttgaaatgttgaaggaaaagggtaacaataggaggataaggtaatgaggcattcaatcgcaatgccttatgcatgcgatatctaacaatgtgntgcccaatcaattgtaaacctttatg

SEQ ID NO: 3717 - DNA, 334 bp, Glycine max
  unsure (1)..(334): unsure at all n locations
agcttgtaggattatggngtacccatcacatgtggtactaggtggcggtcgggcgatggtgcacaacaagttttccacatccacaatgcgcgcattaaccccaccatccctggttgcttacttcaactgaacttaacgtcttccacgtaacccatattcttcggttctctaaccaccggttcccattaaatcttccaaagtttcccaaccttaaaagtaatacaacatttcaaccagcacaaactatcacaagccaagataacagagcaaaggcagataactttgcaaaacaccaaccaaaatacagcttttctacttaagaccccagaacaat

SEQ ID NO: 3718 - DNA, 229 bp, Glycine max
  unsure (1)..(229): unsure at all n locations
gctgagaatgggaatcgcactagcaatactacgcatgctccaatcttatgtggatgacacattaacgnatcacaattatggggctccgaaaaggggtgataatggagaattctctaagctatcactacgcatagctacaaactctaaggtggaggacacatgaactattactcatttcatggggctccgaatagattgagaatggataattgcactaaaaaatcactac

SEQ ID NO: 3719 - DNA, 96 bp, Glycine max
  unsure (1)..(96): unsure at all n locations
atcaagatttcattaacacaagtcgttcaattntgttcttagaaatgtgacctaagtgcttatgccataatgctcctgagtttggtataacaattt

SEQ ID NO: 3720 - DNA, 130 bp, Glycine max
tattgctatatgcaagtgagcgtactttaaatatgatggcagaggcttcaatactagtgtggtcggctagacagtggtagaaggagatggtttctcatgctcttactcataaagaaagtcagacgtatgt

SEQ ID NO: 3721 - DNA, 273 bp, Glycine max
gccctggagctggatgttgctctcttgctccataagttgtgtattacacgacaagaagctgaccatcatactactatcatcttccatagctacattaatgagtggctatagaatgatggtgtttagactaggccatgtttaactgtgataacgttgaaaagtataaattcgttgcgagattatgagctttgatatagactgggcgccccagtccttcacccaatgactgtgaccttatctatttgcaggattatacgctccttccttcctttt

SEQ ID NO: 3722 - DNA, 167 bp, Glycine max
atcaaccttccatcactggccgtggagagaatcttctcatggtgcaatacaaagatatatatcatcattcacacaacaaaaccgctacatggcagatatatgaaataaaaacctaccttaaacgcaagaattgacttgcaaaaccgtaaacacaataaaaccaaaca

SEQ ID NO: 3723 - DNA, 291 bp, Glycine max
  unsure (1)..(291): unsure at all n locations
ttcttcgtgacatcgtaaaatcttatgattacattctcccctttttgatgatgacaaccacctgtaggttaggagcaacaacanagaaaaaatatctatttgcatatagtttactcccccttggttttgcaatgattgcttatatgaaacagntgaagatttcatatttttcatatgtaaaccttattgtctcataaacaatagataattattcttactagtttatcttttatctttctctccccctttgtcaacatcaaaaacaaatcatgactagagaagagaaagatg

SEQ ID NO: 3724 - DNA, 131 bp, Glycine max
  unsure (1)..(131): unsure at all n locations
gctaagcttctagcctaatggacttacactgaattaattccttctgatagcccttttgagcctatgtttccctggctgtgttntgaagctcatgacaaaccttatatgaaaaaccatgatctcaccttatc

SEQ ID NO: 3725 - DNA, 323 bp, Glycine max
  unsure (1)..(323): unsure at all n locations
agctntnntattagcgaatccttatgatgggactgattcacgtgaaattatgagtaagctncttcatanatattcttgtacctggttggtctttattgatataaagtgatttgtgatacccttgaattgagcagcttctattggagatcgattatagactctgatgaccaaatgagaaagcaggcagttcttgttacctgtgatatttttagntcaaacctaaaactttgttcatccaaactgttatctcaagccaccgaaagacgctgggatataaaagcatgtgctngttgaatttgtatgctcgatgaatgatggaatag

SEQ ID NO: 3726 - DNA, 332 bp, Glycine max
  unsure (1)..(332): unsure at all n locations
agcttattgatttgtcatgaattgaaccctaaactttaaatgattatctcttaataccttgtttagattctaggagagcatatggttcaaggaaaatttacttctaaattggggggaggaaagtcaattagaatgaaaagaanaaagttaagcatcagcacacacaacaaataagttgtatgtcaaaaaaaaaaagaaaaaaaaaataacttgtgctgttacaaaaaggtcgaaagcaacttaagaaaagggaatagtgagaaggctatttgtacaaaacaagaaaagatcattgngattagtctaggacttgtgctctcttagaatctaaa

SEQ ID NO: 3727 - DNA, 295 bp, Glycine max
gtagtccccaaagctaagaaaaataaaccaatttctcttaaaaaatgtgtcactgggagtaaaaagctcacaggctgagacctagacaagcagttctaataaggtggactcttctgcatataatcacttattatattgaccatggattctttgttattgatggacctttcaaaatgggaacgaccctagactgatataaaatgctctccttccatgctattcagactatattatgtcattacattttgtagatagaaatttttgttatactaagactttctcattttatcacact

SEQ ID NO: 3728 - DNA, 288 bp, Glycine max
cgttctcttgcacaagacattctattaaccgaaaaaaatgcacccatatacaatcaaggcagcttcgctacctagattatttacacgtacttccaaggtgtatttgttacttacatcacacacctccttggctaaattcacatacatgcatactcaaagcattttggggtaccaaaaattgcacatgtgcacatcttggtatttctaatacctatacatacacaaacttcatgatgaatcttgactatctacacaataaggtgctacatttttatgctcttttaaagt

SEQ ID NO: 3729 - DNA, 211 bp, Glycine max
  unsure (1)..(211): unsure at all n locations
tcttagcatattccctttagatgccacaagaatgaaaggtgtgactctagcacatgggaaatgaatatgccacaagaatattccaagaatatgccanaggcatcttaacatattccttgagaagctaggggggagaaactacacacacccctctaatagcttagctcaccctcatgccaaaatacatgaaaatacanaaaagtccctacta

SEQ ID NO: 3730 - DNA, 410 bp, Glycine max
  unsure (1)..(410): unsure at all n locations
agcttatcatccaatttattaaactacacataatatntaaaggtttaaatacattnttattcttataatttagagtttttttcattagtgaaaaattattttttttttttatttttagtccttataaattatgtttattttgtttttaatccttaaaataagggtttgaatagtgaaaaaaatgttatccaaaatatctaaagaacttaaaacaaaataaacataatttgcaagaaataaaaatttacaaggaaaaaaataaaaatcacactaaattataagaactaaaaattgtatttaaggcatatatgaatgatctaggactttgaggaaagaaacccnccaagtctcagtttaaaacacacaaatttgaacattgtcttagtcactttcaatccatttattatgac

SEQ ID NO: 3731 - DNA, 575 bp, Glycine max
  unsure (1)..(575): unsure at all n locations
cgtgggttgaccctgtgatccctgtgccgatgantgcananatagnnangaagcccgangtnagaaatnttnttaacctttncattcttgactcatgtcattggagcgcatatccacttgcagaggcaatgtatcgaacctttcacccacccagctcgaagaccatcaagcctgtccatgatctgtggaagaagagatgaatcttctccttcaagtccttcttctccaacattactagcacccttctcatcgcagagccatcaggctcctntattgtaccaaaggatgctctgtctgcagcgcccataaggaatgaggtcttgagtaggacataatggtcacaatcaggagggatgctgatatgtcggaggaatagggtcacactatgaggatacgtgcatgtgcattcgtatgcaatgcttagacctgccatcctaatagtgtagcgcgatcactcaatgaactgcgttaatgcgatctggcatgagtactacgaactgacgagtctatgcgtggagcgcggcgatgtggagtccgcattggatcgctgtgcactgttagccggtgtatccccg

SEQ ID NO: 3732 - DNA, 480 bp, Glycine max
  unsure (1)..(480): unsure at all n locations
gcaagctaagctccttaactgacaaggctcttatatttgaatatatccttgtggaaccttcacccgacgaagacactgacaaaaacttatattcttcttcttggacaaagtatggcaggctgggggcaagtaaattttcttcccatcaaaccttggatgcaactgtgatcatatacccatatcagctagatcttgacagatattcaagccatccttcgtcttgccttgaatgttaaggagcgttccaatcacactgtcacaaacattnttctccacatgcataacatcaatacaatgtctaacctcaagatcacaccagtaaggaagatcaaagaanatgaacctcttcttccatatgcaactctgacttttatccttcttttgggtcttcccaaatacaatattcaggtgtngaacccgttgatataccttgctactagtcaacagtatcggcgcaatatcatgctcttgaacttcatt

SEQ ID NO: 3733 - DNA, 562 bp, Glycine max
  unsure (1)..(562): unsure at all n locations
agggatgcgnnnnttccaaattaggcttatcctaactgacntngcaaaanncnccccgcatntnnnctgtgagatagttatctttattagctantaagtcatatgtgcgatctcaacaattactcatacggacctgtttatgcatatctgccaactacttctaagagcctatagtatgttatgatgctgatgcgacaacactccatagtactgatgagagtcaatatctaacatatatttatgtgtcaaaaccacagtacaacaatttgaatatttggtagtgaccatcctgcttttaacatgaacgggaagactactctgtcttcatggtgtatgacgtgttcccaatatatacgttctattcatctcctgaggtgtagaagctctccaaaataatactgtaaattgaaatttgtactgcatcctaataacacttggttgagtatttggtgtttaatacgcttaggactgtttattgcgattctatatggtattaggctgttatgactcggatcaaatgaaagacctaatatgcatatgatattttatccgatgcgaattg

SEQ ID NO: 3734 - DNA, 279 bp, Glycine max
  unsure (1)..(279): unsure at all n locations
agctttgattagctntatatgaatatattagtattttctaatgcgtaactttctccatttgttttttgctaatgtaagttgtttggctttcttgtgttgaaatccatatgctaattatgtgcagactaaatntctacaagcaaagttaaatccttctaatacttatatactgaaacttataatcacgaaggagatattatatatctttgctggtaatgttaactatgaggtcttcctggatcgggactctntnntagttttcaaaattcattataatta

SEQ ID NO: 3735 - DNA, 433 bp, Glycine max
  unsure (1)..(433): unsure at all n locations
tctcatcataccggtaatgccttctcctacaatattaaagagcaagggagctagagggtccncttgtctcaaaccccttgtaggtgtaaattccttagaggggctaccattaatcaaaactaatatagaagctgagtggaggcaagctgatatccatgatctccattttgggcagaaccccaatctaaacagcatgtagtccaaaaaagaccaagacatngaatcatatggcctttcaaaatccaccttaaatatcatcactggtttcttgtttctccttgcctcctcaaccacctcattgagtatcaagataccatggaggatatgtcttcctttaatgaaggcagactgcctttcatcaattaacccatccataacagacctcaatctattagacaacaacttggctataattntatacatacaacctatc

SEQ ID NO: 3736 - DNA, 321 bp, Glycine max
  unsure (1)..(321): unsure at all n locations
agcttcattaagaggcttcctccagaagcttcctcttggcttctttgagaagctntctcaagaggcttctntgagaagctagatccttatctatccacacccctctattaactaaattaacatccttaaaaataattacggatgaaaataacgtaacaaataatcaaacatcaaacataattactaataatatatagatatatatatcagggtgntacaccgtgtccagacatacagttatctagtgctgctctatctaagtctaaggatcaaaacattttccaatgctaataatcttaactttacacccacatgggtgat

SEQ ID NO: 3737 - DNA, 332 bp, Glycine max
  unsure (1)..(332): unsure at all n locations
agcttatgaaatcaatggaatccaagatttcattatcacaagtctttcaattntgttcttagaaatgtgacctaagtgcttatgccataatgctcctgagtttgtattatcaattttacgcttagtaccacgtaattccgcattagaggattcaccataagaagctacaatatcaagtaaatatatattatcataagccaagagtgaaccagttccaacaatatctgaattaaaagacaacctaatcacgttgttttcaaatgaacacagataacccaatttgtcaaataagaaattgaaatcaaattccttctaaatgacggtacaacaaa

SEQ ID NO: 3738 - DNA, 302 bp, Glycine max
  unsure (1)..(302): unsure at all n locations
catgcaagcttaatggaggaaaagaangatagatagaattggtgggagcacganattgaaggagaaaagagagggagagaagttgaactttgaatgatgtagctccatgtggagcttgtaggccttggatgttcatcatcaatggagtcctttgcttcttaaagatcaatggtagtgaaatggagaaggaagaaagattattggagacgccacttcaaggagaagatgagtcaagaacaagctcaccaccataggaagccatggataagagcttgaaggtagaagaagatgagtggagggag

SEQ ID NO: 3739 - DNA, 365 bp, Glycine max
  unsure (1)..(365): unsure at all n locations
taagctaagtggtaggctcattccatcatgaacaactatcacaagtcctatcttttgcatttcatctcataccatacagaaataaacacacaatatgaatccaaaggactttctaggcttgtaatgaggttaggctgccaacaaatcaatggttttctaggattcaaaagcttagattctacaagagcattcatccatagataaacctntacttgtttttttattcattcctaccccatacttgccttgtattaagcacttagctttcattgatttgatttgcagcacacacacttatatacatgnttatttatacttacagttgttgttacatacagaaaacaatgtgtatatgttgctctgtt

SEQ ID NO: 3740 - DNA, 70 bp, Glycine max
  unsure (1)..(70): unsure at all n locations
agctntgatggtgtcgagaagatttcacatgtgtgtcatcatcataaagggggagaatgtgaatgtatgt

SEQ ID NO: 3741 - DNA, 271 bp, Glycine max
  unsure (1)..(271): unsure at all n locations
agcttcttgcgtagccgctcttgttgctcagattatcccanaaacaaatccctcttattactagctantttgaattctttagttcctgaatgtacgaaccttcaaattgttgttcgttccccttcttttcttttctgcaaaaaaagaaaaatcaaatgcctgtgaaaaaacatggatgaaagtcctaaagaaaaatcaantatcaannagaaaacatgggatgaanatcacccaataaanaagcaccaactacnnctatctttcaaaagtc

SEQ ID NO: 3742 - DNA, 656 bp, Glycine max
  unsure (1)..(656): unsure at all n locations
ntgatggggtatctgattcaccttcatttacancatcgatncntgcgacannnnaccantnnnntaagcntnntgcaagacacttgtnacntagacagatatnntgattgtctcaagtaagttataatagttgagctacagagaggagtatatatcagaggggtgatgtcatacattaatgacactcacatcatgatgtcatatagtgtatgcaagctaattacatgtatcttgtacctattgtgtcatatcatatatgaggacatctacgtcgatacttgtataatctatgactacatatgctctagacgatcattatgctcccatatatgtactagcgttaatacaactgccttactcataaaatatgctcacaggaaatactcttaatgatgacccttcacagataaataactatagattatacacatgtatagttctntcactactattatagagagggagtataccaagaatataatagtgtttttataactctaccttacttgttatactagaagtagaattctgtatacatatattgaatagtcacacacatataggattctatgatatcgtacattcttttatgcgttcttaatatgacatgagtggtcgccataattacatctagataatcgatccatcggtagccg

SEQ ID NO: 3743 - DNA, 407 bp, Glycine max
  unsure (1)..(407): unsure at all n locations
agctnttcgattcattctatgtacccgtagttgtctcacattgtgtnttgggtatttctattcttgtttcatttacttattatacccncttttggacgtgcttaagccatttatttaagtcatttctcgcttaacctaanaataaaatataattccaccgaacgtttgaattgtattatccgttaacttcggttaaaatgaatntcgaccgttcggtcgtgccgtaaccacgttggaaatcaaaaagagataaaataataatataataacaaaaaaatacacctttttgtaaaataaagcggaaaatcaatcggacattttctctttgggatttctcattcttaattgaattgactaatatctaaggtgaaactaaggtctaaatcaactcgcctagtcaagctcgt

SEQ ID NO: 3744 - DNA, 389 bp, Glycine max
  unsure (1)..(389): unsure at all n locations
taagctggaggggcaactggatgcgtnggtcaacttggtaacccagctggccttgaatcatanatctgtacctgtcgcaagggtttgtggtttgtgctcctctgctgaccaccatacagacctttgcccttccatgcagcaacctgtagcaattgagcaacctgaagcttatgctgcaaatatntataatagacctcctcaacctcagcagaataatcaaccacagcagagcaattatgacctttccagcaacagatacaaccatggatggaggaatcaccctaaccttagatggtgcagcccttagcaacaacaacagcagcctgctccttccttccataatgctgctggcccaagcagaccatacattccttcaccaatccaacaac

SEQ ID NO: 3745 - DNA, 261 bp, Glycine max
  unsure (1)..(261): unsure at all n locations
gaatggagaactcttcccttagtactattgttcactaaggctgataccttacttgatatcaagcaaaccctaatccgccaaatccacttatcactaaaaccgaatctctcaaacattntaaaaaagatttctaacttacgaaatcatacactntntcataattaactgtgaagaagtaaacattnttttcttctttttgaccatctaccactttagacatcagactggtacatcgcaaactctcacaaagccaaatctata

SEQ ID NO: 3746 - DNA, 143 bp, Glycine max
  unsure (1)..(143): unsure at all n locations
agcttagctcatttactatgtggaggtctgatgatcatangnggagaggaggcctatttgtcacatcatcgaaaactatgacatcgcagggtggatgcatgaagatcaatctgctatgctggacgaataaatctattatgatt

SEQ ID NO: 3747 - DNA, 58 bp, Glycine max
ttcatcaagtgggtatcagaagcacaagagctttcatagtaggtgctccttattacct

SEQ ID NO: 3748 - DNA, 464 bp, Glycine max
  unsure (1)..(464): unsure at all n locations
tgcgattcataaaagatttctccaaagtagccaaaccgctgagcaatttgttgaacaaagatgttgcttttatgttcaatgaaaaatgtatgaaagcatttaatggattgaaaacaaaaatagtgtctgtgccagtaattacaacaccagatntggggcaaggatttgagttgatgtgcgatgcaagtgattatgttgtangtgtcgtgcttagacaaaggaaaggaaattnttttcataccatctactatgccagcanagttctaaatgatgcatgggttgaatanntgtaccacagaaaagaaatgctggcaattgtctatgcacttgaaaagttcaaattttattcggttggctcaagaagtttcatctacactgatcatgcagctattaatatactcgcctaaccatgtgtgatcgcctaccaagattgaatttatgggatctgctgatgcatatctccc

SEQ ID NO: 3749 - DNA, 161 bp, Glycine max
  unsure (1)..(161): unsure at all n locations
tcttcgccgggataggatcgaagcgggtctgattgagacaaatcttatcatcctgctntgatgaatgagataatgggggcaaatgaagacgatgagaatgacgaaggaacccatgtagtggcgtgcattcctacatgtacgaactacatcactagtccaac

SEQ ID NO: 3750 - DNA, 467 bp, Glycine max
  unsure (1)..(467): unsure at all n locations
agtcacctgcggcatgcaagcttgtaaaatgtcgtgacacgagccacttgttgtacacgaaaactcataagaaaaaacagtaaatatatggtatagctgtattgcattactagcgatntcacacgattgcttttagctagtttcttggggaaagaatcttgattaaattcctagtatattaactgtcattctaataaagtaatattctgtcaagaggacggtggatatgacaaggtcattgctntagacctcttatgcattcacttcttattcattatattatatatgttattgatagttgttgactttgcaaatgaaatatgcagcagttagcattcatccaatggtttagttagtagttagtggcccatcataatgataatagaaacataagtgccaagattatnntataattgaaatttaaatgtattgcttattaatggagaaaatcattattaatgtcacgt

SEQ ID NO: 3751 - DNA, 271 bp, Glycine max
cggtggtggtggtggtgtctgtagtgaataatatgattcttcatcaaaatctgagcaaaacaacaacatatggtgatgatgatatgagagagtgaaaagatctgacataagatataactctaatgaagccaaaaacattaaagaagatatatgtgtctgtaccgaatagttgtgatccttctccattcctattagcttataaagaagatggctgtaatcgagagagacccttatcgacctcacttctatgtaagacaaaaccccacacctc

SEQ ID NO: 3752 - DNA, 326 bp, Glycine max
tgcagatgaagcttaaagctatatctatttttaaatttttatcaatttgtttttactcatattgattgtgacaatgtgaaagataaacataataaaattgaacaaaaataattgaaaaaagaatttacaataaaagttcataggtgctacttattgaataaaatttatttagtacaataatacatgaatactcacctaacaaccttttcttgaacattggtataacaagttatttcttcttccgacactcttgcaagcaagaattcatcacatgtgttgcaagaccacgaacacctaataagtaaagatagttataagacacatgc

SEQ ID NO: 3753 - DNA, 400 bp, Glycine max
agcttcaacattcaatttcaagcgttccgatattttacaggactcatatcggatagccgagcaaaaagttattgtcgtttgatattgctcagagcttcggtattcaatttcgagcgtctcgatatattaagggactgaatcagacattcgagtaaaaagttattatcgtttgaatttgcacagaacttcggtattccattttgagcaactcgatatattacgggactcaatcaaacattcgagtaacaagttattgtcgttggaatttggtcagagcttcgataatcaatttcgagcgtctcaatatattacgggacttagtcagacatccgagtaatacgttattgtcgtttgaatttactcagagcttcggtcttcaatttcgagcgtctcaacatat

SEQ ID NO: 3754 - DNA, 341 bp, Glycine max
  unsure (1)..(341): unsure at all n locations
agttatctctnttatcttagtgagagtgattctcctaaattcttgagtgattcaagaacacctcggctgtatcaaaggactttcacaacctttgtgtgttgccctcgctggagagagtgattctttccattctatcatcttcacccttgttcttgcaaaccacaatttcagaaaatccacctctgcccagaattatctcttggccatatctccaattttacgcactcaaattaagtgattcttgagcctaaattgaattccaaaacgagagcttccacctctgtgtggaatcacttcatttggagccgtgtatctttcgttatcgccatttctatatttct

SEQ ID NO: 3755 - DNA, 603 bp, Glycine max
  unsure (1)..(603): unsure at all n locations
aggattgtgggttctgattcactagtgncnatgaatagcgaccttaaatctaagctgccaccagcttgcagacgagcttgctgctttctgcacaagctcagtctttgtacgaatcttcggatgtgcccaatgggcctggttgctattctcacccctatctatctaaatacattcctctgccctcttctcggtgaatctatgttcgactagtgtccggaacttacggatgtcacaaggatactgtggttggtatcactaatgttacgcgacgctcgcggattacataatcatacccttttgtgactaacggaatgtttcggaaccatactaatggttgcacgatgctatcttctgatttccggtgtgtcacgaaaccttactgattgtgcattaatacattctttcggttctcgcacatctcagaacatcacacattgtctaatgatgggcgccaagcagcttataatgactatatacaatgatgcatgccaccacgctcatggtccctagtctatattatagtatgtcaccttgtattatactatcattgcttatatatatatacattcgcatgatgatttgtcgtgtatatctacgttcctt

SEQ ID NO: 3756 - DNA, 571 bp, Glycine max
  unsure (1)..(571): unsure at all n locations
gactagacnctnngatctcagagtcgctctagagtcgacgctgcaggccactgcaagctgtcgagccaattactaacgatatatatactnntgttatctcgntattgtccngannncgagacccgcatgaatataattcgacagcgacatcgagaatgtgagatgtntgatgncttcatgagacacagatgcaatacaaacgcataacaacttattacgtcggactgcattgatntgagctcgctgtcagaataacacggacacctcgaaagttgggcgatgaagcgtatgagccgttccatacgacaagaactgtttactctgatgtgcgattgagtctggcaagatatcgacacgctccaaagtgaatgttgaacctcttagcctattcaaacaacaataacgttttactcggatgtccgaatcagcggcgcaatatatctggacgcttcgaattgaatgttaatctttgagctcactaataacacaataactgttaatctgctgatatgatcgggcccacattgatcggacgcccaaaatgatggtgaccttgaccccttcaacaact

SEQ ID NO: 3757 - DNA, 387 bp, Glycine max
  unsure (1)..(387): unsure at all n locations
agcttgtaggattatggngtacttatcacatgttgtactaggtggaggtcgggcgatggtgcacaacaagtttntncacatacacanatcgcgcataaacncacaatcccatgttggccacctccaactgagcttacgtactcccacgtagaccatatccttcgttctctcaacaccgggtccccatcaatccttccaagcttcccaaacatccaagtaattcaacattcaaacagcacaaactatcacagccaataaaacagggcataggcagaaaactctgcccaaaacaccaaccaaaatcacagcttttctcacttaaagaccccagtaacaaattcttcggtccagtacgttaaccgttggatcgactcgaaaatttactgg

SEQ ID NO: 3758 - DNA, 233 bp, Glycine max
  unsure (1)..(233): unsure at all n locations
atgaagatatntctctaatcaatcatgtctttgtgttctatattgtagcccacaatacgtgacctcgatcgctcataagtttagacttatataacctaaacttcgttcgcagatccctctgcttagactaggcttaacttatacagcatttatcatacaacatattcagaataccataaccccaacaatccatccctggtcatatggttattcaatactgcatctatcaagtt

SEQ ID NO: 3759 - DNA, 387 bp, Glycine max
  unsure (1)..(387): unsure at all n locations
agctttgatagttactcaaggttatccccgaatctcctcagccttcagaaggaacataanaaatggtaacaagaagtaccttcaaattaattaatgtcctcaatgaagatagtgaccaaaactcataaaacacaactgagataggttcggtatcagaaaaagacataaatccaataaattccagacactggaaaacacccttcatgttatattatcaacgtncaacttgccctgaccttctactagaagaaagaggtcagaataattttaatatttttagtgcacataacatttatgagtggaacatagatgcccanacggagtacaatatcatgaatacactccaacacatgaccatggttagcacaacctaccaaaacgtccatg

SEQ ID NO: 3760 - DNA, 63 bp, Glycine max
caagcttgagaaatattctgcctcatgaagttcttcatttagttcatcaacagtgggaatagg

SEQ ID NO: 3761 - DNA, 216 bp, Glycine max
tcttgacacacctatactcatgccactatatatactttctcttaacgttgaggatttgtctgttattcacgatgtctacttctctaactagaacactattcacaattagggtttcttgctcaatctccatctattaagctagttgtagcgatgtgtaactatctcttgacaagattcttaagaatcctacgcatgtgttcttcctcagattcaact

SEQ ID NO: 3762 - DNA, 314 bp, Glycine max
  unsure (1)..(314): unsure at all n locations
agcttaaacatacctaaatgccatcgttgagttagaggaaaaatagtgaaatgaagaaaaaataaggataaataactatttgagtgcggaatttatttttgcttcgtggagtgcgagaaatataggactaggaaatctattacttaaatagactatatacattggttaacccaatacacactagcaacatggantttagaaaccgaaccaactcgacaagtttaattgagtctcgttttgggcatctaanaggaatagtgtaaaaaaattggttagcaactgaattgaactagtttatttaactcgaatagtaa

SEQ ID NO: 3763 - DNA, 385 bp, Glycine max
ctcgacaagacagtcacactgtgcttcttaacaagattaacttgtgaaatctactctgaagatacatgggataatacccataattataacactccctctcaagctggagcatattaattatatgcaccatgcttggaacatataaactgaattctatgccccctcaaggatttagtcaaaatatctgctggctgatcattggaaataatgaattcagttacaatctcttttgacagtagcttctgccgaataaagtgacagtctatctctatgtgcttggttctctcatggaatactggattggaagctatatgcctagcagcctgattatcacaatacaacatcatattgcatcacttgctgaatataactctgcagaattagt

SEQ ID NO: 3764 - DNA, 77 bp, Glycine max
aaaattattatccttaattaaatatttatagatcaaatatacctcttcactatcaaatggacatggcatcaacctga

SEQ ID NO: 3765 - DNA, 299 bp, Glycine max
  unsure (1)..(299): unsure at all n locations
agcttcaagaaacgaanattgaagaattgagttttaaaagatcattcaaagctcgttgttgaaagtgagaacacaagttgggtatatatagagaaaacaattataatcacctataatcgattaaattggcaatgtaatcgattatctccagagaataattgattagattatctttttaattgattaaagtgttcttccccaaacttggaaaacattcaagaacaatgtaattgattacaatcttgatttaattgattaaagtgttcttgatcactgctgcgaacattntnaagaactat

SEQ ID NO: 3766 - DNA, 275 bp, Glycine max
gaagtgaattaaaagtctcagttttggaagcttacccgtggaagaacgaagaacagactaagaacggtggataacggaggaaaaccttcacgagattgcttactgaaacatctcggaagcgttacagaagcacctcggcttggatattcttacggaaacaattttatcacccacaacagtcggtgtagactcgtgaatacgaatatcgaacgatgaatgttgaagaactgttgaatatgctcgcgtgattcccacagaaacgttgtggaagcgcc

SEQ ID NO: 3767 - DNA, 192 bp, Glycine max
  unsure (1)..(192): unsure at all n locations
tcacctgcggcatgcaagctaataaagtccttaggattcacattgtgtatatatgattgcatggaatgagatggagtgcaaaattgggaattgattgttagttgtttgcatgaattgacacttgcctaaactctgagttnttgtgtagtangtgccttanactactaattcatactgttttgatggtttatt

SEQ ID NO: 3768 - DNA, 444 bp, Glycine max
  unsure (1)..(444): unsure at all n locations
gctaatgtccttaactgccaagactctaatatntgaagagtatccttatggaaccttcacccgactaagacactgacaaaaacttatctntctccttttggacaaagtatggcaggctgggggcaagttaattttcttcccgtcagaccttggatgcaactgtgatcgtgtgcccatatcagctagatcttgacgggtattcaagccatccttcgtcttgccttgaatgttaagcagcgtcccaatcacactgacgcaaacatctttctccacatgcataacatcaatacaatgtctaacgtcaagatcagactattacggaagatctaagaacatagaccatctctttcatatgcaactcttacttatatccttcttttgggtctgtctaaatcaatattcatgtgtagtacacgctcatatacctgctcaccatacaacagt

SEQ ID NO: 3769 - DNA, 123 bp, Glycine max
  unsure (1)..(123): unsure at all n locations
agcttgtttcttgcttgngcagcaactgaagcagtatcctgaaaccaggcattgattaataaattaacacatcgaaatcaatagtgttaaaagacagacaggatagtcagcttancattaccc

SEQ ID NO: 3770 - DNA, 356 bp, Glycine max
gatgatatcacaagatgatgtacccagggtgatgacacaaagctcttaggtgaatcaaagaatgagttctagatattcaagatagaatccagaacacttccagattccagaggagaggtggtttctagaatcaagaatccagagaccccgatttctctaatttagactgccctatactagtattttcagcctcagcaagattccactcaattcaaatattctttcacaagcctttccagactcaaacccaaacagcttcctattgtaacactcacaacaaccgtggtgtgctcacaaataactttagaagcacaattcctaatttttcttctagttccctctgtgggggattattc

SEQ ID NO: 3771 - DNA, 165 bp, Glycine max
ctagtgcccattatatcaagtcttggcaatggtttaatggtagtgatatccttgtgtatgtcaaacatgataataaatcatataaatacaaaccatcttgatggtttatattacatgcaaacctataattataatgtttcatacatgtggtatgtaataattaat

SEQ ID NO: 3772 - DNA, 327 bp, Glycine max
  unsure (1)..(327): unsure at all n locations
agcttcttcatgtcgctcctcctttctcttacactcttattcttctatcttatcgatgacacttctatcttgtacattataaagactgaaaggccaatgaccttgagtatatatacttnttttaatgaaatagtgaaataggttgagacactatccttttatttctgagtaaacttctctacactaagaagagtaagttgctaaagtatccattttccttagagagccaaaagtaagttttttctctattgggcttncaaatatgttgagacatttctagggtgaacaactgaacatacaagacacccaattttttcttggttctgg

SEQ ID NO: 3773 - DNA, 342 bp, Glycine max
ctgagggtgcgtatcccaccatcttttcatagtatagtatcgataatgtgtctaccatcacgatcatcgtctccctttgcatcattgggggtaccacctgtgccgccagatccctccacactttgggcgtgttctttgaaagatccgtccacctttatgcacatgttctgtagttgcattctatccagaaccatatcaaaattgtactgatactggctaacaaaggctaccatttggtccttccaagaatggactcgggaaggttccaagttagtgtaccagagtacaggctctcccagtgagactttcatggtaggaatgtatcagcgatttctcatcttt

SEQ ID NO: 3774 - DNA, 374 bp, Glycine max
  unsure (1)..(374): unsure at all n locations
agcttctcaaggaagctacctagtctataaatagtagcacgtgtaacacttgttggaactntgatgaatgagagtcttgtgagacataactcaaagttcaacttctctccttttttcttccttcaatttcgtgctcccccctctctctttctctccctctttcttttcctccattgaagcatcctcttcaagcttcttatccaaggctcatcttggtggtgaagctccttcttccatggcttattccctagtggatggtgcctcctctcacctcttctcctttgtcttctactgcatctccatggtggaaaatcaccattaaaggacctcattgaagctcaaagatctagcctncacagaagcccacaagcaag

SEQ ID NO: 3775 - DNA, 402 bp, Glycine max
  unsure (1)..(402): unsure at all n locations
agctntgttgatttagttntcacttacgaaaggatcgaagtgggtctganaagaggcaaatttaatcatcctgcttggacgaatgagaaaactgnngcgaatgaagagggtgagagtgaaggagaaacccatgctgtgactgccattcctatacagccaagtttcccaccaacccaacaatgtcattacttagccaataacaacccttctccttacctaccacctagttatccacanaggccatccctaaatcaaccacaaagcctgtctaccacacttccaatcacgaacaccacctttagcacataccataacaccaaccaaggaagggaatttgcagcanaaaacttgtagaattcaccctaattctggtatcctatgctaactngctctattatctac

SEQ ID NO: 3776 - DNA, 370 bp, Glycine max
  unsure (1)..(370): unsure at all n locations
tctagcacactccagacaacttctcaaagatccttactgtcatattatggacaattgtcttgtaatgctgcataccgtatttcgagagaatccaacggttaacgaaggctggacaacgtntttaccgaggcagcttcatgtagctgtctcaagaagcttcattaataggcgttctctagaagcttcctcgtggcttctattagaagctatctcaagaggcttcttttagaagctagatacttatctacccacatccttctgtttactatatttaccaccttgaaatttattacggatatatatatcacaactgattatcaaacatcatacataattactaactatatatatatatacttatatatatata

SEQ ID NO: 3777 - DNA, 283 bp, Glycine max
  unsure (1)..(283): unsure at all n locations
agcttgtaagttacaaaatagagatattctagatatatatatagcttccctttgtatcacatcattctatcagaatatgtaactactaccaactaactttaattaaaataaggtttattctctgtatatatatccctcatcctatatcactacttattgtcttggtatttaatggttctaaagaataattgatcttgacaaatattatggaaaataagtgcttcatattcttcacaaattangaaatgaaaatttggattttgtttaggttcaacagcaacac

SEQ ID NO: 3778 - DNA, 303 bp, Glycine max
  unsure (1)..(303): unsure at all n locations
taagctgggaggatacaccactgtcgttgtgaacaatatatccatntggattaatataacctaatgtggagttcacaactgtctgactgcttgtctctctcaagaatgccatagttattttgatagactctgggtgatactgaaacctgtgcttacttacaaggttatgttgtgccatatatatagatgatttttatattagtgctgcttcttcgaacgatcgataatacgcatgcacttgcgtactgtatgtgttgtgaactacacaaatgacaatgacatgctatacttgcatcatatctg

SEQ ID NO: 3779 - DNA, 446 bp, Glycine max
  unsure (1)..(446): unsure at all n locations
aaggcttatgattcattttcccttattaaaatcaacccagtgtttccaaaagatgctctttttatcaattatgcacacatccgagcccatttaggcattcagaaaaattntcacaggggtcttgngaccccactcgaacttgatggccagggtgatcttgacagaattacgtaactaagcacccttggatatgaacccctctcaagaagttgatgagatactatatcatccctatctctaacagcaacctacttttatattatcgcgctcatttgtacacttcgcatccccaccctccgttcgtcgtcgttctcctctcactcatatatatcttcctctacctcactctctgtcacactatcactgttgttcgtctcacgtcatcacgtatcctctcgcctttcgcttctctctatgctcctcccgatcgtcacgacatacgcgcg

SEQ ID NO: 3780 - DNA, 446 bp, Glycine max
  unsure (1)..(446): unsure at all n locations
agcttgcatgatttacattctccccctttctcatgcaaattcttaattcttcttgacatcatcaaaatcttcatgatntacattctcccccctttttgatgatgacaaccacctgtaggttaggagcaacaacaaataaaaaatatctatttgcatatagtttactcccccttggttttgcaatggatgcttatatgagacagttgaagaattcatatttttcatatgtaaacaaattgtctcataaacaatagataatntttcttactatnttatcctttatctttctcttccctttgtcaacatcaaaaacaaatcatgaaaagagaggagaaagatgtaccacttgttgcaatgtatgagaatcaagtgataccaaaagggcataaaacaatcattcaatattaatcaagcanaaacaagtacaataacacatcaatcaaaca

SEQ ID NO: 3781 - DNA, 362 bp, Glycine max
  unsure (1)..(362): unsure at all n locations
ctcagcagaaccattccatcaattcaatgggtcntttagttgataacagatgggagtggaagtgtcaatggatgagaaatctctctgatcacgaaatagatatggcagcagctttcatggcatacatctgttagtatcaaatccaaccttcaagcatggaccttctcctttgggggcctgattctggtggaccctactccacaaagtcatgatacaatcttcctgaaggatggtgtcactcaggttactgaagattgcgcgttcaagattatctgtgatctctaaatccatctatagcagtgcttactttgagaattttatgaacgaatacctccaaggttatctaatgagggacatgtgag

SEQ ID NO: 3782 - DNA, 115 bp, Glycine max
gctgctggagcttcttgagctgattcgagcttcatgtgtcttaatgggattcccatgaagcacggaacaagaaagagggaagagcccctcattagataccttgataagtctctct

SEQ ID NO: 3783 - DNA, 301 bp, Glycine max
  unsure (1)..(301): unsure at all n locations
agtcactgcagctgcagctcgcccataagctnggtaacagtgaacatatgccctcaagtagtgttctaccacgcgattcanaacttctgtctacccatcactntgtgggtgatatgaagagctcatgtgcagcaaggttccactcgcatgaaagagttcctgccaaaagcgactaatgaacagggggtctctatcggagaccaagctcctaggaatcccatggagtttgactacgatgttgacgaataaggaagcaggcatgtgtgccatatgtgcagttcgaaggattcctaagtgaatt

SEQ ID NO: 3784 - DNA, 188 bp, Glycine max
gttttaaccattcacaggtaggaccctttaattgtgaccattccttcctgggtgtggtgtatgttaagaactccctaatcggtccagacggaagttgactcttttttcccctgcctctttctttctttcgtgatcactttgctttttattcttaattacaggtttgtatgttttttgtgatttttact

SEQ ID NO: 3785 - DNA, 326 bp, Glycine max
  unsure (1)..(326): unsure at all n locations
ttgagggtcctctcttaggcaatcatggttcacagctccaaactcataaatggaggacacatgaatgacaacgcaattcattcatggngctccgaaaaagggtaagaatggaggatttgcttgatggtcctctcttaggcaatcatggaacacaactccatactcgaaagtggaggacacacgaacaggcctaaccaataacattcatgttgctccaaataaggatgagaatggatgatctcgatgagggtcctatctagggcattattgaacacatctcctaacttgattttggatgtcacatgaatgacaacgcaatttattca

SEQ ID NO: 3786 - DNA, 434 bp, Glycine max
  unsure (1)..(434): unsure at all n locations
agctntgagccaaaatcttgactcaccataaaccttgacccagggtgagaatgtcaatccttaccctcagaagcaaaaaaagaagagaaggaaaatttccaatcaaaggaaaaaggagaaggaaaatttccaatcaaagaggaagcaaaaaaaggaaagaaggaaaatttccaatcaaaggaaaaagagaggaaaggaaattcccaatcaaagagtgggagaaagcaaaaagaaaagaaagaaaattcccaatcaaagaatgggagaaagaaaaaaagagaaggagaagaaggaaagaaagctcatgatcaaggatcgaaagaaaacaaaagaaatgtgcagagaggtctttggaccagacaatatctgaacaatacggaattgtcaccatatgaacaaaagaaagaaaaggaaaccataacctaaaagtggtc

SEQ ID NO: 3787 - DNA, 338 bp, Glycine max
tgagttagacatacccattctgttttagtggttttgtgatgatgtttgtgatgtttatatgactgaaatgctaatggaaatctgttagagacgaagggtagaactaacccaaggttagaaagtgagaatgtgatgttatgagtggaaaaagagtgagactttgagagttggaaggctaagtcggaattctgtggtaaatggaggttagagtgagtcaatactagcttgtaatgtcatttagaacatgtgagaaaggttacgctgagctagagagaaacataaatgaccaatgtgaaccaagagctcattttagggcaaaattgggtgttgaagagtca

SEQ ID NO: 3788 - DNA, 446 bp, Glycine max
  unsure (1)..(446): unsure at all n locations
ctgcaatttgtaagttacttcatgtaaagcatatatgctatgaatntatctaacgagttactactgtctaagaaaacatagtccttattacgagttagatttttatgtatttcatatttcgctcatttttctttcattgaaaaccatgactttntataacatagtattaattgttatcttttatcttgaatatatatatatctttttctattgctccaaaactactctatgattgagagcacacttgtgaatgtgatttacacgattatttttataatagtatattttntattttgtatattatttttactttgtaattaaatntattcagtaatattcttatnttgtgaattttataacattacttttatgaattattatttcaatattatnttaaaccttnnatttaatatttatatgaatattatctatttatttttatatta

SEQ ID NO: 3789 - DNA, 225 bp, Glycine max
  unsure (1)..(225): unsure at all n locations
ctcgtagtcgttcaagtagctgngtctngatgctgttcgtttgggcctcgtttctgcagtgtctggcccagtgtgggtaactcaaggtgattcctatcaataccctctcccgcgaagaccaccttgtcctcaaggtggttaaggtcgcgaacttctgaccattgtacccaggtggtgtcttcaggaggttgaccttcccattgcactagcacgagtcgtattgga

SEQ ID NO: 3790 - DNA, 316 bp, Glycine max
  unsure (1)..(316): unsure at all n locations
tcttaggcacttctctctctctcgaaattgctgaggaaaattatttccgtgaagaaaatccaagccgaggcgctctcgtaacgtttccgtgagaaattacgcgaagattctcgaccgttcttcaagattcatcgttcgttcttcgttttcttcaatcttcaacgggtaagtacctcaaaccgagcttttcaattcattctatgtacccgtggnggtccacattttgtttcatgtatttttattctcgcttccattttctttntatacccccttctgacgcgcttaagtcattacttaagtcatttctcgcttaatc

SEQ ID NO: 3791 - DNA, 518 bp, Glycine max
  unsure (1)..(518): unsure at all n locations
agggcgaggggntactgcttcggaagacatgatttgcagnanncctctatntncaaganannatcaaaaattatggtcctctatactccattcatgggtcgttacgtttgggagtgtatttagaatgatgtgaattccaaacatactctcaccttacaccagtgcataacatctatgtagacgtgtacatactggatgtacacctgatatactatccgatcaaaattgaactcttcaacacccaattgccctagaaatgggctgtgtcacttaggcatttggtttctctcagcacagtcaatgtttctataagtccaatgacatataagctagataactactctacgtcattaccacagatgatagtaaccttcactttaatgctgatcttttcactcaaaatacatgtccctgtcacgcagttactcaccttatctattctggtcatagtattcacataaactccaacgatactaacctaaaggatggtgtctatctcaacctgagttatggcttct

SEQ ID NO: 3792 - DNA, 395 bp, Glycine max
  unsure (1)..(395): unsure at all n locations
agcttgtccaanactaggtaattttagatgttcatggtccagaatccaattaagtccatgcaaagattagataacactataacaatcatgaagctctcataataaaattacctctttgatttatggcagatactctactatcaagcaaacaagataaataaaattagaaagaaacccatgaaagatgaagaaacactcgagaattttcattctagtaactaatttgttagaagatttgtaatgctagatcttcccacaaccaatctttcctganaaaccattaatgatttaccattcttatttcaaaaatattaaggttaacttttatgaaccataatcatggatcatgttattcgaaagaanatttataccatcatcaagaaagagaatgatac

SEQ ID NO: 3793 - DNA, 357 bp, Glycine max
  unsure (1)..(357): unsure at all n locations
gtaacgtggtcnggttaacaagagaatcatggtttttcttagattctacacttaggttcaaggagagcattcacctattccttgtctacttaaaagtaccacttttctttgacctcccaacctttattgacatgccacaattaacagngcccaaaggtatttcttgtgtttggtatgcatttgctttcagttcatattttccccttatttatctacgatgataggtattacaaaagaatgtagttctgattctctatgtgtatgttactcatattcctggaacataatttacccaaaacactctcccaatattggaacaaatgtgtcttgatccataataatgcactcctatagcct

SEQ ID NO: 3794 - DNA, 431 bp, Glycine max
  unsure (1)..(431): unsure at all n locations
agcttcacctttggtcctcctcatagttgttgcatgagaaaacatgctctanntttcatctccactccaagtaggccctcggatcattctttcctttaaatggaggaatgttgagtttaataccatcaatttcgtttttgtctaggaacaccaatatttccctcttctcctcctttcttcttcattatgatctctattctncatntgatccaacctctcatggagcgcatcatctcgttgtttcattaacctctccatatgttgcatcaaagcttgcatntggaattgcgaaagtccccatccatcattaggaaattgtcctgccatctcanacaaacaaatcaaacgtaacaagacaattatagttgttggttgaatacctcacccactcaagtgtatcacacaantatggcttttctctaatgaaacac

SEQ ID NO: 3795 - DNA, 427 bp, Glycine max
  unsure (1)..(427): unsure at all n locations
ctaagctatatcaatgagtattatgaactcgcttagctcatcattctcgcttagcgagttcatcgcgtnttccagataacgtagataacacagctcgtnttctcgcactttccaagcctccaaaaggcatattggacatgcaatgtgtgtgccatactcaattcagtatacaagcttacatagccctcatcgtaaactaattataacataacataaaaaccctaaaaatctaaagctacagttatagtcttctaccctaaagcttagacaagagacagagaataacgaccaaggaacttactcggacagtgtatgatcgatgcttcaaagtcgaaaatgcacaaagagagtacaatgaataatgtgcatattatggagagagagaatgctgaggctatgtttctgatatctggcaaatgtgagtgta

SEQ ID NO: 3796 - DNA, 434 bp, Glycine max
  unsure (1)..(434): unsure at all n locations
atccttaagtcacctgcggcatgcaagcttcttcagaaagatgtagaattgtgcttgaccaaccttacaaataggaaattgaggagctgaggaggaggcttaccacctctcccattatgcaaccactagattgggagcttccatttaagctcatgtgtgatgcctccaattatgcacttagggttgttttgtcacagagagttgataaattaacacatgtcattgcttacgcctcacacactctagatgcagcccaagtcaattacaccactactgaaaatgagcttttagatattgcttttgcattatantaaattagatcttatntgctntgctcccatattactgtctatgtgacaccctctacctcgacatacatataaataagaaaaacattantttattcatttagactttcagagaccaacataatc

SEQ ID NO: 3797 - DNA, 334 bp, Glycine max
  unsure (1)..(334): unsure at all n locations
gtatacagatcaagttgatccgtatgcttattgcggatcaactngatctgcaagaagcttacagatcaacttgatccgtatgcagcttctntcatgcgtaatctttgcggatcatctctaacactattgcggatcatctcagtcctaacacttgtctactgcggatcaactcataggctatgctgatcatctacacctaacctatgtctagtgcggatcaactcataggctatgcggatcaaaagaagccatggaatatgtacaccaaccacaatgtgaacagagtcgcaattgacaccactgtgagggagaacacatcttaccttgacaatgc

SEQ ID NO: 3798 - DNA, 263 bp, Glycine max
  unsure (1)..(263): unsure at all n locations
acacacaaaatgaaaatactaagtatttattatctatacttaatagaaaatacttataacactacaaaataaccataaattgggagagtntgatacaacttatacaagttntatacacaaaagttagtcgttttcactaactaacaactcccccaaatttaaagttntgcttgtncttaagcaaaaagggaacaactcacttgtcctcaagtgacaatgacatgcagtgactatgtacaaaggtgtatgctacataagttaca

SEQ ID NO: 3799 - DNA, 465 bp, Glycine max
  unsure (1)..(465): unsure at all n locations
taagcttgaataatctgtgaggctgtgatcaggatatctactcggctataaatgtgggtgctaatggtttggaatgagagcctagaaagaagaggtcactactctcgaaagagtagcattgtcaaaaaaactcatgcatgcttntacaaacatcctcctcaatagtctcccagaaagatntataaaaattaaagccatagtcatcagggcctgtgctttgtcctccttcacaacaccaaacaacattctttatctcttctgaggtgagagacatatatatccttgaatactcctcctctgaaagttgtttaaatcgaactccatctagaattggtctatgtatccctggctcacataacaaatattcaaagtgtgatctgattgtgggttaaacctcatcgacctcatgcacccaactctgatcagtattaatgcgctctagcttatntatactagttcttattc

SEQ ID NO: 3800 - DNA, 332 bp, Glycine max
  unsure (1)..(332): unsure at all n locations
agcttaaccaattattctttcanaaagtctctccaatcttcatgcgcttaatagcatttgctagtagactcacacaatacctattgtgttcactatgaactntagaagcactaatctcttgattacctcttctaaccttttcctctaacctaagagaatgtgcactacaccttntgngataacttctactgaggctcatcgtatcaaggtgtttacaaaatctcctatgaatttggctccatctagagtttttttgctaaggaaatttcttcctattanggtattctggatagactctntntttaccttaccctctctatttgcacaccttc

SEQ ID NO: 3801 - DNA, 144 bp, Glycine max
gctcagctgctcaggatatattctcatatatgcttctccaggtaagtttctcaagaaagcggctcaaggaagctacctgagctatatatagagacatgtataacacttgtcgtaactctgatgaatgagagtctagtgagacac

SEQ ID NO: 3802 - DNA, 322 bp, Glycine max
  unsure (1)..(322): unsure at all n locations
tcacatgtttgtcatcatannaaagggggagaatgtgaatgtatgtataccatgatttgatgatgtcaaaagaagaatcanaccagggatcatttgcttcaagataatacaagattgttcaacanacanagcctngattcaagattcttcaagatcaggtcttgtctacaatgaaaggttcaagcattcaggcacatgaatcgataccntacatgaatcgatacaattgttgaaggtgaatcgataccatatatgaataataccaagactctgacgtggaatccatttaatgaggtccactgtcagaaacactggtatcata

SEQ ID NO: 3803 - DNA, 284 bp, Glycine max
gtggagggtggaaagtatgatactatatgacgagttgaaggcttgtcaatggttgaagaagagcttgactgaatagttgagtaggacggaagagaatatgtggacaatcattgaccagtataaagagaagttaaacctagttgctaaccatgagcaaaggctaaaggatgagcatgcaaaagtatcggctctgctagcgtgaaaggatacatgagagagagtgatagattcattacactgagaagctatgatgtggatggataagtacgatttcactctgaatg

SEQ ID NO: 3804 - DNA, 90 bp, Glycine max
  unsure (1)..(90): unsure at all n locations
tgcaagcttcttagtttcagatgatgcagaggggnnattgttacctcatgcactcctctaacgacgagggcatcaccagtggcgacaaac

SEQ ID NO: 3805 - DNA, 171 bp, Glycine max
gaatacatagctgcaagatgttgttgtgctcatagtctctggatgaagcgacaactagaagactatcgagtatatcttgatcacatgtctctcaaatgtgataacacatgtgctatatagtttaccaagatacccttcatgctttctatgactaagcaacttgaaataaag

SEQ ID NO: 3806 - DNA, 262 bp, Glycine max
  unsure (1)..(262): unsure at all n locations
agcttaactttaaagttatatatatagtcacatcttcattntattagtgttttatttatagaaaatatattaaataaaataatataataaatattcaataaaacaatatataaaaatacgaaattaaaaatacataaaatttaaaaaaatattaacttaaataaaatattaacttaatataaattattaggcgaatttaaaggttataaataatttatntaaaataaatattttatacatattnttattaatatttcctata

SEQ ID NO: 3807 - DNA, 480 bp, Glycine max
  unsure (1)..(480): unsure at all n locations
agggtggtgnnaaagtcgattcatncaactgatagcaaagctaccctaagggactgacctttaggtntggaaggacaattacatgcctttgttggacctcataagagaggagtcagcgccctttaacaatctgattaactcctctacatgagatctgatattgtgaagatgactacatatataggaacaatcaattgacggatagtgattgcatgaaaattttaaggcaatcattaatcaagtactttgtatctatagataatagttggttaaacttattaaagttcaatgtatacttgaatggattttattactaaattattctacatgtgtctaatccatgatctctttaccaacttctataggcatggtctggaattctcctaatgttactaatagtcttcaatataatagcatatctggtaatttttaacggtttcatcaaattatgtgttaagtattttcccgaatacttatacg

SEQ ID NO: 3808 - DNA, 113 bp, Glycine max
  unsure (1)..(113): unsure at all n locations
tgcagctagcaatgacttggtgttgccagtatancatatcttccgtaatacttatcactgctatcatatctaataattgtcacatttatgtctagattgccatttaccttatt

SEQ ID NO: 3809 - DNA, 268 bp, Glycine max
agcttgcttgagaagcaaggaaggtagcttccattgaagctatatgaagaaagcttccttgagaagttagaggggggatactcacacccctcaaatagctaagctcacccccatgccaaaatacatgaatatacaatggggagcttccttgagaagcaaggaaggtagcttccttgagaagcaaggaagatagcttccttgagaagctagaggaatgatggaagcttgcttgagaaacttttagtgaggctagatcattgggcttcaa

SEQ ID NO: 3810 - DNA, 331 bp, Glycine max
  unsure (1)..(331): unsure at all n locations
gcttgaggaatccaacanaatcaccacaatgatactcctcacaatgtgatatagttccctcaattatccaagtcatgacatggtaccttggtcacgcctgcgctatgacaatctgaaaagatgttggttgtatgggtgagcttccggtctatgcacaaaccaccaaacagatggtccttaaagtatctgtgaatggagaatattgatagggtaattcaatttgttaaaggatattattacgtttcaattaaatcagatgtttggataaacatctgaaaagagattgaaattggagtattttgattaggaatgtcatttaactcaaatatta

SEQ ID NO: 3811 - DNA, 370 bp, Glycine max
  unsure (1)..(370): unsure at all n locations
agtctataccgctgatntaatgtaattagagcctatagatttcctctctcntttgtnttctgaaatctacctcattaaataaacaaagagatcttgtttcatctgttcttgcagttccaccttttctcatatcnatttgcactgttttgtttctctggtcttggttggtatagatatgagggtcgattctttgaggatcctaacaacgagggtttgacaatcgattntgatagagatataagccaaacgataaacgaggaagatgaagaggacgttctgtcaccagagttggagaggttggtcgctcacgaagaacgtgaaatgaagccttaccatgaagataccgaattggttaacatggngaccactg

SEQ ID NO: 3812 - DNA, 105 bp, Glycine max
agcttggcgacgggaggagactgaaaacgaatcgttttgtactggcgatcgggatacgccggcgacagagtccgtcgaaaagaggccattactttaagaaaaaat

SEQ ID NO: 3813 - DNA, 395 bp, Glycine max
taagctcgatcctcgctgttatgctgcaataaagcttcacgacatatacgttccttatggagctcaaggcctgaacctccgcgtcaaactcctttgacttcccagcagcgaacttattcccaagcatgggagtgctgctccacgacgactttctcctggcggtgacatcggtgttccatatatgcttcaccgctagttctttctcgttggaaagcgtgaccctgtacacgttccctgaacctgctattactatgagattctcctgcttgatggaatctagaatcttcccctccttgaaactcaacacgtggaacgatatcacgtcccacgtgattttcttcaaggaactgctcccgtatttctctgcctccttcatcctcctcttgagttgcatg

SEQ ID NO: 3814 - DNA, 444 bp, Glycine max
  unsure (1)..(444): unsure at all n locations
cctgcggcatgcaagcttattagggtgatgaagctcatcccaaatattctttccaaganattccacattctggaaatgagcccttcttactcccagacaaccatctttcttcttcctggtgataatatgccagtttacaagatgaactcttcgctcttgattatcactccaaataaattgcatgcttaatcaagggtattgcagatccgttgaggcacccattgaatgtgcatggtgtaagtggngattgatgcaaccactaaattcacatgggttactctccctacccgattcaataatcttcccttccaagttgctaaggcacctctgaaccctctctagaagaaaatcacaatggctattattgacatgaccatgcactatgttgaacctagatatttgctagatattagtgacctaatgttgagacatggagagttactc

SEQ ID NO: 3815 - DNA, 224 bp, Glycine max
  unsure (1)..(224): unsure at all n locations
ctcatctnggtggtgaagctccttcttcatggcttattccctagtggatggcgcctcctctcacctcttctgctttgtcttccgctgcatatccatggtggaaaatcaccatttaaggactttattgaagctcaatgatccaaccttcatagaagccccacaagcaagcttccatcaaccactgttcatggcttgacagaaccatctgcattgtgagaaattgc

SEQ ID NO: 3816 - DNA, 65 bp, Glycine max
  unsure (1)..(65): unsure at all n locations
agctntgtccttagatccctcttgttggactagtcttagaccaaacaacattattggtatagcat

SEQ ID NO: 3817 - DNA, 286 bp, Glycine max
  unsure (1)..(286): unsure at all n locations
taagctcgatctacacaccaccgcaccatttcttagttttctatttattttaatatnagtagcantttgtgttctagccgtgtatttggctatactattatgacatntgaacaatttagtatttcctctagttgcatggtatgatataacaattatgaattatgttatatgactatgtgattgttatatattcgatctactcatgtatcttgcttcatgactggtatatattcttcaatgaacgtcttgtgaatgattaataatgtctgtttgtgttttacttgta

SEQ ID NO: 3818 - DNA, 102 bp, Glycine max
agcttgtacaagccttccactacatcatactgtttcattcatcctctgatggctaatatccggaatcaaccccgattaaggcttaaaagttacctggcattt

SEQ ID NO: 3819 - DNA, 202 bp, Glycine max
tgcttatctcttggcaacctttattcttatatgtatgtaagagattaagctactacctaccctcctagtctgcacaactcaaggttcattgatgtcaagataatttgtgacaaggtgagtccatgtctccttgtttgggatatctgctaaaagaaagacttcaagttgtactattatgaggagatgccttcaatgaaagtga

SEQ ID NO: 3820 - DNA, 148 bp, Glycine max
gcttgtaggtatttgagaagtgtgttgtatgaactcctcaattaccgtataactgcttgagggcccattgttataccagccatgctttacaatatgtgatgggggatcccaacctttatttaccaatccataatttagaatgatcatt

SEQ ID NO: 3821 - DNA, 497 bp, Glycine max
  unsure (1)..(497): unsure at all n locations
attctattcctgagcacaggtatacttgcagcatgcatgctgtgagcaattaaatgacaataactntnttcncggatgtctgttcgaaccccgtagtatagcgagatgcttcgacctggatgcccaagcctcgacctggaaggcgacgctcataaccaattccaaacaaaaacaccgtttaccaccattgtgtcacaagtgtccagaataatcaccccaccctctgtattcaactgtagggagcgcgcgccacatactttctacctatcacgttataaaagagtaggggttaggtctcccaccaacattgaaaggcttggtgacctgtacatataccttcgtgcccagcatcatacaaacgccctgctgacctctttgcgtataatcttgcacaatcgtcttcacagcaattgttacccttccacacagatagcgtaaagatatgcatcttattcctctccgcacagctatcttacggctagctactctttaggccg

SEQ ID NO: 3822 - DNA, 317 bp, Glycine max
  unsure (1)..(317): unsure at all n locations
aacataaacactactctngatttctaggttgaaatctttggtgctggcagcttgaacatacgaatttgtaaaacttactgagaattggtcacaatgaattttgagctgaaggaaaaaatacgaaaaatcacacaagttggaaggaaaatcaatgtctagggaaaaaaaagtgaatgggaagtgtgcttgtctatttcgctcacaattcgactataatttgtgcctatttataccaatcatagttctaaaatatcaggtgaaaattattgtgaaagcaagtgccaaaactagaggcttcttgagtttatttattttac

SEQ ID NO: 3823 - DNA, 288 bp, Glycine max
  unsure (1)..(288): unsure at all n locations
atgttcttcatgatttcagatcatggttagaacactaggtntatgtcgtgcgttaggagttggtagaggtagaggcattattgaggatacgcatgaggctgatgttcctctgcgtcacagacctactgcttcagcacgtatgcaacaggttcatctgcgtgaggacgtgacagagagacctgaggatgtgcctcacttgcatgatgatgttcctcatgtgtctgatgccaccccatagatgacaggcgccaccgattctgttcagacagagggagtggctactgatgg

SEQ ID NO: 3824 - DNA, 224 bp, Glycine max
ctatacaaaagttagtcttatcaaagtataataaacttaatcatcataaaactaagacaaacaaaacttaacatatagacagaccatcaaatagcaaaaacacacacaagaacataactaagcctcatcctcatctaggtttatgaagttactaagggataacctagtttctatgttcttaagccttgttgtaatgtattctaaagagttgtgaacttattgga

SEQ ID NO: 3825 - DNA, 244 bp, Glycine max
  unsure (1)..(244): unsure at all n locations
agaagatgagtggagggagagggagagaangagtactatatnctgtgcctcacatgaggtctgaactttgaagtgtaattctcaaatgatcaaagttgaaacaatgcacacacatggcctctatttatagcctaagtgccacacaaaattggagggaatattgaatttcaattcaaatctcacttgaatatgaaattgaatntgtggagccaaaatttcgctaactatgattagtgaattttag

SEQ ID NO: 3826 - DNA, 108 bp, Glycine max
acctgcaggatgcagcttgtatggtacaaggtgtaggacaccccgtcgttggctagatctctggagaagacctcaccttatgacctgaagtggtacaacaaaccaccg

SEQ ID NO: 3827 - DNA, 206 bp, Glycine max
  unsure (1)..(206): unsure at all n locations
gctccttcnttcatggcttattccctagtggatggcgcctcctctccgctcttctcctttgtcttccgctgcatctccatggtggaaaaccaccattaaaggacctcattgaagctcatagatccagcctccatagaagctccacaagcaagcttccatcaagaaccctcaccattaacactagatgaagaatgaagactcatgtt

SEQ ID NO: 3828 - DNA, 382 bp, Glycine max
  unsure (1)..(382): unsure at all n locations
cactgcagctcgcttaaacctataaaacttgtctatcgcttgtataaaagagctttgatattatggtgaaaaaatgaaagctgcaagctgaatgatgctacttctatctatcagtattacatgacctgaaattcaattattttcattttttcatccattgttntgatgcatcaagcattaagtgacctgtagttagatcactgctcaataattgatgctcccaccatcaaattgattacttgtagttgatcccctatgatgcatgggtaatttaactggtagttgtacctgtactangtacgtattangttcagatattgattggatacacatgtgtatgccatgtcccaatgctttttttnntttttatcttcgaaatttg

SEQ ID NO: 3829 - DNA, 327 bp, Glycine max
  unsure (1)..(327): unsure at all n locations
ctaagntatgcttgttttatattgtcacacagatntcactctcttaatggctgctnngttttcagacactggctgattttcttgatggccttgttactgcatggtgcgctatcctaatatctgtgacattaattcttntgtttggtgaggtgagaaagttctgtccttatatgattgtaagtgtaatacatccatgtcacagattaagtgcttgtgttgtatgatagaggttggaacctgtaacaaatatctggtggcacaacacccgtattgtttggtcacgttattccatttggagaacatttttgttatataatcatccaatat

SEQ ID NO: 3830 - DNA, 305 bp, Glycine max
  unsure (1)..(305): unsure at all n locations
agctnttcactttanaagagtaatatctgtctcatatgataattgatcttataaagggtaataattatttcttttagttaatggatttattntgttgatgtacataaaataatggttgttaaatcatacctgcgggtgatcaatctgacacattctgttagtttaatcccccgcatcttgcaatcgaagtgacgataaccacacataattnttcacttaacagttaaaaaaatggaaaggtgtgactcttgcaacaaaccacaaggcacaaggtataaaaacagttatgattggtcactacttcg

SEQ ID NO: 3831 - DNA, 590 bp, Glycine max
  unsure (1)..(590): unsure at all n locations
actatgtccctacgagacngtgcgactatgcgacactacagantactaagnctgctctanattacatngatgtntgtatatatngtgatggggttgtattccatntctgttgtaacggtagcatttcttggtgaaaactaactatccatatgtgtgccttcacaggaatggccacgatgaaacttgcctctaaatggtccatgaaggtcatngctgcctattgaactaattccgctccagagtacgacagtcaccgatatatgagtgctgtataccatctacgctctcaggccattaatgtatgtgtttgttctcaggatcgaaactttcaacgcatggactgattacatatctgcattaccgtatggttacattctgacttctgaatgacaattcttgactcctataattgactcattcatctcgtaactatacattgaatattatctacttgtatatcctacttgttaggtatctggatatttattctgcataatgtatattatatatttcttatagactagtaatcagagttcatacatctgatacatactacgttagttctattcacattttgacagctatgtccg

SEQ ID NO: 3832 - DNA, 186 bp, Glycine max
  unsure (1)..(186): unsure at all n locations
agctntngtctcggacttcggtacagcaagacttcttgattgtcattcatcaaatcaaactcttccagctggtacttatggatatgttgctccaggtaaaggtttttctcttcttgttataaaaccataaattcaattcctttatagatagtgtttcgatattaacaatctgctgtatacttactt

SEQ ID NO: 3833 - DNA, 177 bp, Glycine max
  unsure (1)..(177): unsure at all n locations
ctaagctcatntctaataaagaggtaaaacattaatgtattatcttttaatgagttaagacacatgtactgattagagaaatataataatatcttctaatcataaattattntataaatcttataatatattatgatcaggaaattgtgaatggatcactatataaataaattttac

SEQ ID NO: 3834 - DNA, 295 bp, Glycine max
  unsure (1)..(295): unsure at all n locations
agcttcagtaaagacttgtaataaatatatgtgcatcaataataatatttggacttccaaatgttagtagtatttgatgcctaatgagaaagaaaggaaagataannaaaatatangtatcataggtgatgtgataagaagaaaaaaataaatcaaaatgatgaatataaattaattttgaaaaaattttaatgtctaaaaatcgattgcttatatattaaagatctactcatataatagcataccattgtttatagagctcaatttataagttgagccaattttaattttctta

SEQ ID NO: 3835 - DNA, 374 bp, Glycine max
  unsure (1)..(374): unsure at all n locations
taagcttaccggcaccacacatgtatacatcttcacatggggaggaataactgcatattatgttgggactcccagttatacataggcctcaaacagcccttctgttgattcacatcgatcactatgtaggtngactcatncgttcattatccctntacatctatgtaccggcagaatgcgggaagctgagacccatctgccgcctaatatgctctgggatgagcctattgatcagttcaggtgatgctccatctaactggtagttaagtntcattgcagaatgattaagatattattctggtgttaaatactgttcacaatattgatataagagaaattgttaattggattcccttgtgtttggtaggatcatg

SEQ ID NO: 3836 - DNA, 248 bp, Glycine max
  unsure (1)..(248): unsure at all n locations
tcaattaaaacaaagagttgtaacttcagaagagattntctaactntagacattntctccttactcctacatgaacatgcatgatgcacatatgaaatgatagagactaagatgcaacacacaatacaacaatcaacataaatgccactcaagagagttggacatgtaaaagacaaanacttcttcaaacttcaaggctaagtcttcatgttgctccccctatctctaacaacaactntntctctata

SEQ ID NO: 3837 - DNA, 243 bp, Glycine max
  unsure (1)..(243): unsure at all n locations
tgaacaaattagatgtaagctaccaacatgnatgaatgaatgtctcgattcaaaacttacccgtgagaacgaagaactaactagaacggatgaaaacggtgagaacgactgaaaccttacggattgctatggaactctcggagcgttcggagcacctaacttggatttcttcctgaacaattttttcacccaaacatctgaaatgctagccagtggatgaggatattggacaacccctttctc

SEQ ID NO: 3838 - DNA, 421 bp, Glycine max
  unsure (1)..(421): unsure at all n locations
agcttgcattccacataatccttcttgcacagttatacttagttgaaaaacctttgattctatgcagncttttgttgtaaattacacccatcttgtgcccattgattctatgaatngaaggattagctctttggatgtacctaataagcacggcttatngtaatctaaatagaatggacacaaaagtntactcctggtgcanacagcanacctatccctataagaaaatcttctgttacaccttcatgaagcttgctgactaatgctgactcatcattcatatcctttattatttggatacatgatacagtcatattntttctctagagccttccttaacaatccctcangcacctattggatntatgtagataattataaatacttntgtaatcacatgtgatgcatatttatatcaact

SEQ ID NO: 3839 - DNA, 118 bp, Glycine max
  unsure (1)..(118): unsure at all n locations
tgtccctgatggttatcaanatctgcttattcagcaacttggttttatgaatgcttcgctccccaatgcaggtaacggaactctcatctctcccatgcacaccaatagatgccatatg

SEQ ID NO: 3840 - DNA, 105 bp, Glycine max
  unsure (1)..(105): unsure at all n locations
agcttgacgagagactaagttctctcatggagtgtataganaagaataaacaaaactcataaattttagtcaacttttagaatatgaattatttccgtttaaaat

SEQ ID NO: 3841 - DNA, 563 bp, Glycine max
  unsure (1)..(563): unsure at all n locations
tggncctgaatccttgataattcgttagacatgcattangcacactntatantactaagcnttcaatgttcnttagcaaaagctaacttatgcgcgcatactttgcgtttccaaactntcaagaatctattgagattgagtgtgatgcttcaaatgctgggattggcgctgtgttgatgcaagaaggccatccaattgcttattttattgaaaagttaatgtggtcctacccttaactatttaacatatgattaggagntgtttgccttattactgtcttctattactattgctctcttcttttatcccaangaatttgacttcctatgtaccatgatccttcaaattatcaggggcatagttgctatctaatgctgcgatgtggtggatatctcctgaattctctttatcttacataaattgaaatgttattattccttcttggttatttgtatgtcatccttatacttaacacttgacagttgttctcttaccctattgttcctcaatctctatcatttcaaaattatcctttctactaattattcccctattatcatacg

SEQ ID NO: 3842 - DNA, 173 bp, Glycine max
  unsure (1)..(173): unsure at all n locations
cnagcttgtcagcttctttctggtaatggttggaccatgtgttattgttgtaaaagcnnctttggcccgtgaattcagaaaatcttcggctgcatnacaccaaaatcacttcaagcagtnatctgacaggaggatcaanattntcaggtnttcgaactaaaaactgatcattt

SEQ ID NO: 3843 - DNA, 356 bp, Glycine max
  unsure (1)..(356): unsure at all n locations
tacatcttaatatgtattattacattntattaattcattttaaatgcatntaaatgtttcatttattattattatgtaaggtaataaatgtcttattatttattccctcctccttcaaagcaaagaacaatgttnttcattaacaacaagattcaaactcattaaactattcttatcaattaaactaactctgttgatgtcaaatgattcattctataattcttaatgtatcttctatcatacttttaagataatatctactcattagtttgttttgataatatatattctcattaattcacttggattgttcgttattttctatgccacctacatttactcgattgtgcatatat

SEQ ID NO: 3844 - DNA, 129 bp, Glycine max
agcttgacttcctgtgtttgagaacctctccttctctcaggtgtacccaaacccaatcacctggttcaagcacgactttctttctgcttttgttggcttgccttgcatagctcgcatttttcttttcaa

SEQ ID NO: 3845 - DNA, 255 bp, Glycine max
  unsure (1)..(255): unsure at all n locations
agcttgaggaaaagttgtgggatcatcaatgtcatctggcatactaaatcatcatcaggttgcggcctattagtcgatccctttgctacttgtttatctcacatagtcaatatacataattaaatganaatcaacattttatttgcaacaaatccttacaacaaaggaagatatcttttctaanaaagtgtgtgcaggatgtgtcgaccaagcaaggaaggtgttaaggatctaccccactaactatacctattc

SEQ ID NO: 3846 - DNA, 317 bp, Glycine max
  unsure (1)..(317): unsure at all n locations
gctgaactctagtgtgtgtgtgtgtgatgtgtgcagtatgttaccagcttctaagagttatgtagacttagggtgtgtttgacctattcatactctccctttcttttattntattactctggaatgtgtaaaacctccgtccagtcatggtgaaacgagtntccatacacacacttagccactaacaagtgatatagtttcctgagtgtaagtttaatttagttaataaagttcaaatttcatttccttccattatatcgctcaaaacaatcctgttgacttacacacttgaatcctgaacaattgtattgacgcat

SEQ ID NO: 3847 - DNA, 118 bp, Glycine max
  unsure (1)..(118): unsure at all n locations
agctnttatatttgacttaatggatttcaaagagtgtttttctaatatcgtctttgaacattggcatttaaagacagtttttccaaaatcgtctgtgaacacttgctntcaaagatga

SEQ ID NO: 3848 - DNA, 108 bp, Glycine max
atgttttgatgataacaaagatgataacacaagatgatgacccaggtgatgacacaaagctcataggtgaatctaagaatgagttctagatattcaagatagaatcca

SEQ ID NO: 3849 - DNA, 486 bp, Glycine max
  unsure (1)..(486): unsure at all n locations
atgcgcatatntccttacgaacattcacttgctcatagacatcctatcaactaagagaaatgcacccatatacaatcaaggtagcttcattacctagattatntacatgtacttccaaggtgtatttgttatttacatcacacacgcctccttggctgtaattacatacatgcatactcaaagcattttggggtaccaaatactgcacatgcgctcatcttggtatttctaatacccatacatatacaaacttcacgatgaatcttgactacctacacaataaggtgctacatttcatgcttatttttcaagtgtttgctacctatagccacatgcaaattcaagccatatttcctctgctgactaatattgtatacaaattagaaggtatatactattntgtaatatgatnntctcacataacatgcaacatatatatatatatntnttgtgagacatttcgactaccataaatatatatacata

SEQ ID NO: 3850 - DNA, 331 bp, Glycine max
tctaagctccaagttttagttatcctaaactgtcctaagcaaagttctatagtctataacaacttcgtttgcccatcggtttggggtgacaagtggttaaaatacaatttatgcccacttgtccacaaagtcctcaaaaatgcaatcatcaacctagttaggatgccttttaatggtgatgttattagggcttacattagaacaatgcccatgtccatcttttagggaccaaatcactggacagcacaagactcgtactatctttaccaacctttgctatagacatcacttgtttgaattcttggatctgtaatacttctatggctggcta

SEQ ID NO: 3851 - DNA, 349 bp, Glycine max
  unsure (1)..(349): unsure at all n locations
agcttanactcanataattaatattgagacaattcacctataatatggaaattctaagagtatgganaccaaccatcattggaattaaatggtagtccccatagaaagtaatcaattgcaaaatgtttgtcgagggatcctcaagaaaagtgatcaattggaccatatagaaatttggtgaaaaatgctagattgagtgaagtctgagaatttttcgcanaaatgaggaanatgatgggtaaatgtgtggataagatagatggaagtncanatcatcattataaatggactattatagatggatctaaatcaaactatcattatttctagaatgagtgtcnaatgacta

SEQ ID NO: 3852 - DNA, 150 bp, Glycine max
ctggtagtagagcggattatggtgttcattcgttaggattctctctgtttctctggtacagttgcactttctaatgtaataaaagatatgcttctcgctagagattctctaatattgattctatgcaaagtgtgtccgtatatgatgatt

SEQ ID NO: 3853 - DNA, 111 bp, Glycine max
  unsure (1)..(111): unsure at all n locations
gtcacctgcggcatgcaagctntgtgtaatcgactacccttatttggatatctattatctgtgactggctatgataaatcaaaagatgtaactcttcacaaagtttttgac

SEQ ID NO: 3854 - DNA, 418 bp, Glycine max
  unsure (1)..(418): unsure at all n locations
agagcactntntnggccaatatggaacttcttcctaagaatcctagagtcatgatacctcttcactttctccttgtaaatctcggagttctcataggcttctaagcggatctcctcaagttcttgcaattgaagcttcctatccatacccacttcatcaaatgccatgttacaactcttcaccatggtgctcaatttccaccaaaaggtggcatgccttacctataaccaccctataggaaaacatccccaaaggtgttcagtaagcggatttgtgggcccatagagcatcctcaagtcgctttctccaatccttcccattaggctgcactaccttctgcaacacttgcttgatctctctattaaaaacctctgcttgcccattagcttggggatgataagctataacaactctatgc

SEQ ID NO: 3855 - DNA, 266 bp, Glycine max
  unsure (1)..(266): unsure at all n locations
agctntactagacttatttcggcttgagttgaatacccaagacttgagtttggcttattacctatantgtttttgtaaagtctcgacttgtcttacatgatagcctagcttagcctacaagcctatatagaagctcgcttaaaggtctttgatcaattaattattttaaaacctaatgaaatactaattaanaaaaaaagaaacttattaaatttcatataagtaatgtacaaattgaaaaataattgataaacaaaatcatattg

SEQ ID NO: 3856 - DNA, 330 bp, Glycine max
  unsure (1)..(330): unsure at all n locations
catggaaaagactgtnacatatgtgagagatagatacaataacactccaatcttcctaactgaanaatggtagcaacacatattaaacttctnttntttattacacacattctgttcattgatgataatgcanaaaactttatatgatatgccgaagaagttgatccaagattcacttctgaagaacatctcaatgatgtttatagaataatatacattggtggatcacatatatgctctgttgcatcaataaggtaagatatataaacaggatatgaaatgattataaccatcccactgattccattatcactataatgttatctatta

SEQ ID NO: 3857 - DNA, 77 bp, Glycine max
  unsure (1)..(77): unsure at all n locations
agcttgctcgtcttgctgatatttatcatgcagatcnttctgatgatgaccgaggaacaattagggatcacctggaa

SEQ ID NO: 3858 - DNA, 165 bp, Glycine max
  unsure (1)..(165): unsure at all n locations
acttgaatctcgaatgaatcatagcgaagaaagaactccacaacgaaaagcctcgaaaccaatgtgacgaagtctntttcggcgcattgcttgttcccatgtgttggagactcagtctcaggcccattggaccacatcacgtgcttgaggagctactaccacttc

SEQ ID NO: 3859 - DNA, 298 bp, Glycine max
  unsure (1)..(298): unsure at all n locations
agcttagcgccagcatggcacttagcccaacttgactactggaacataattgcattagtgagaatggcttgctaagccttatttctgaacagagaagaaaattacgctagcgagcatgactcgcttagcgcatgaacagaaattaagaaaaccaaatttgccttggggctagcgagactgactcgcttagcccaagcttattcaagctaaagaagcatggtggcttaacgagactgactcgcttagccgtcaatagaataccanaagcctaaacattctgacctaactatactaactc

SEQ ID NO: 3860 - DNA, 420 bp, Glycine max
  unsure (1)..(420): unsure at all n locations
tatgtgaagctgtccaatagtntcctacccacaatatcttaactttaaggtagatataacatgtataaactgaattatactagcaaaggaatggtaagagatgttaaagttatatttatcaattatcaagactaagtacattatctctaatcacaccttcttgcttattcttatagggaaatgatcactttatggcaacataagttattgaagccgtaatggatacacctctactgcctattcagtctgggatagacctgaactaaataactttctctgccgatgttggtcaccgtcatacctagtcaaggtgaacatatgttggcaactcattaaagcctagctaaaggggtagtcatctaagtttgtgtatatatcatacaataatatatcactnattacatgtatattgactatata

SEQ ID NO: 3861 - DNA, 451 bp, Glycine max
  unsure (1)..(451): unsure at all n locations
agcttctggnctctttagtcaatgttcaattcatacgctcagcaataccattatgttaagtgatgtaagtccatgtggagcttgtaggcctntgattttcttcatcaatggagttctttgcttcttgaagatcatggcaacaaaatggagatggaaatcatcgaagcagaatcgaaatggaagaaagatgattggagacgctacttcaaagggaagatgagtcaagtacaagttcactaccataggaagccatggataagagcttgaataagaagaagatgaggggagggagaaggaccacgaaattttgtgcatcaaatgaggtctgaactttgaagtaattctcanatgataaaagttgaaaaatgcacatacatgacctctatttatagcctaagtgtcacacanaattggagggaagattgaatntctattcanatctcacttgaat

SEQ ID NO: 3862 - DNA, 441 bp, Glycine max
  unsure (1)..(441): unsure at all n locations
tatactngtacactaatattcgccacatttgcatgataatatattcaattatatatgctagtataatctctgatagtgatcttcatttatctcccaatcattaattntctgaattatcatatcatatgattaatttgaaattgatctcagcattaattttctgaattatgatatcattgatctcagcatcattggaggcatcataatcgcagtgggtctatactctgtggtgtggggaaaaggcaaagactataaagatgacacgtcatcaccagcaacaacaaaagaaacagaaacaatgcagcttccaattaccttaccaaataataaataacagacactgtgtgttaacttatagaanagaaaaattacatagtaattcgatcgacttatgttggcggaagtgaccgatgatagcgtaaattgcaaatcatatagtga

SEQ ID NO: 3863 - DNA, 417 bp, Glycine max
  unsure (1)..(417): unsure at all n locations
gcttcaagatcaagatctaagattcaagattcaagaatcaagagaagacttaatcaagataagtatgaaaaggttttttcaaaaactgagtagcacatggttttttctcaaaacatgtttaccaaagagtttttactctctggtaatcgattaccaaattgttgtaatcgattaccaatagcaaaaaggatttgaaaaagttttcaaatgaatttccaacgttccaattgattgcaaaaagttgtaatcgattataatgtttttggtaatcgattaccagtgcctttgaacgttgaaattcaaattcaaaagtgaagagtcacatcctttcacataaaagctttgtgtaatcgattacactgatntggtaatcgattaccagtgattgtttctgaataaatcacaagatgtaactct

SEQ ID NO: 3864 - DNA, 341 bp, Glycine max
tggagaacgcatgaacgaaaatgcaattcatggtgctccgaataagggttgaggatggagaatcgcactaagaaatcactacgcatggctccaaactcgtgggtggaggacgcatgaacgaaaacgcaattcatggggctccgaaaaagggttgaggatggagaatcacactaagcaatcactacgcatggctccaaactcgtgggtggaggacgcatgaacgaaaacgcaattcatggggctccgacaaagggttgagaatggagaattacactaagcaatcactacgcatggctccaaactcgtgggtggagggcgcatgaacgaaaacgcaattcatg

SEQ ID NO: 3865 - DNA, 427 bp, Glycine max
  unsure (1)..(427): unsure at all n locations
agctngacactggttgaatcagaagagaaacatactttcctttttgcaccaatgtttgacgatgttatagttgttcaaaatgaacagagataaagggacagtaaattggtttaaagaaaaaaatgttatttaattgtttttcttgttaatgatttgttaagagaactaataaaaacaattaaatagtgaatgttatattatactgataaaaaaaatagtgaatgttatattattattgcttgtatcataacgaattattttccttattaaaaataagtataaatgtaaagtaaaatcatatactgtgtaagaataaaaagattgaatatgatatacgtgaagataagatccacacgttataacattaagatcttagattaacatatgatgtcaagttcattttgttattggtataagtctgtcgcgt

SEQ ID NO: 3866 - DNA, 387 bp, Glycine max
tagtaaataagctcacaatataaatggtttacaccaaattcattaaaataagtccttaataatttacaaaaaaggtaataatcactctcacacgtatgaatagttataagttgtatcgaaggcgtccccaaatgaattgtctctatgcccatacacacatgtgacatgttggaaaagatatgatgtatgaaaagaagcaagcaataaataagatttgaagaagacgtttacttgctgaccaaaaacggagcaatatataagggcaatggagaattctattttgttcgggagaatggtcctattggtccatgcatggtttcagcgacgctcatgatgtttatgtccaattggcaaccataatgtctagcttcatacgtactttctgtt

SEQ ID NO: 3867 - DNA, 502 bp, Glycine max
  unsure (1)..(502): unsure at all n locations
ggatcctctaagtcacctgcggcactgcaagcttgatctgcctctatattntcaacaatcccatcctccctccagataatgagtttctggtggagagtagatggcacagccccaactccatggatccattcccttcctaatagcaagttaaaattagccttggactgtatcaccaggaataaagttggtcgaactatactgcctacagcaacatctacttgaatggctcccaaagaatagccagttttaccctcataattcgaaagcacaatgttgtgggcagatagatcagtgtcatgtttcccgatcttgtagagcatagatcgaggcattaagttaacagccgctcctccatctatgagcactntgttgattccaacattctcaacttttgccctgatgaanagaggtttgagatgacttntcatccgaanatctggcttttcgaaatagggctaatggtcttccacacagccattggtcataacatagtagcacactg

SEQ ID NO: 3868 - DNA, 350 bp, Glycine max
acaattatatctgcagtgtcatcatctatatatttggtcaatcaatgatatttattgatattggaaggttaaagatcattacaaacatattagtctattgaaactagtgatatctaattcaaaataatctgacgatcaccaatcattaaagtcataaaaaaaactgtatcgcagtattagaatctctatctatataatgataagtcgccaatttaaaaattaagaaatttacgcaattagcaattgcctaaaaagatacgtatagtaataaaaaggaacagtggtttatttaaactaaaatcgatcgtgttatgtaatcgagagtaggatggacacaattattcacgact

SEQ ID NO: 3869 - DNA, 484 bp, Glycine max
  unsure (1)..(484): unsure at all n locations
agcttcttttggaccttgaacaggcaactaactcctctntcaaaaccatgctatgtgctcgcgactggtccctttcttcctttcgcaacttgagttcactattgctatcccatagagctccgcgaaatttgttccggccatactcttccttgcgagccctcttggtctcttgttcaagggctcttgcggtaattgcattctcttcccgtaacccggcacactccttccgaacgtgtgtagcggccaacttgaacttctccttggcaagttttgcctttcctaattcgcttttgagagcttggacttcttcgtcctcctccggtgcttcaaaactctcttcgctgacgacttttaacttggcgagccaatctaaacctcgtatatgaactttcagccattcatggtaaccaccaatgatgccattacgaatgcctctaagctcttgatctttccttaacggggtttcccatgccttatggattct

SEQ ID NO: 3870 - DNA, 353 bp, Glycine max
  unsure (1)..(353): unsure at all n locations
tcaccggatgatgccgatcgaacatttcctaatcgacatcatccaattgttattcatggattgaatagaataaacaatggccggtgtcggtcgttatatggccccgactgatatctttcagccgacattgcgcaatttcctttacaaacgctggccgataattgttttttatttacggtagaggaagttntttgttttggtgttgcctaaaaaatttacaacgtaggacggctagctttgtccgtccgagctcaaccgagggttcgttccgaccgacactggcatgttgttcttctcatttaggaggataagaaaacgttcgcccacctcggcaaaaaaacaaaaaaaaacat

SEQ ID NO: 3871 - DNA, 334 bp, Glycine max
atacaagaatgaagctctgatactacttgctagacaagtggcctcagatatctgtaagaaggggggcgggggggctcatggttttttctcaaaacatgtctaccaaagaatttttactctctggtaatcgatcaccaacatgttgtaatcgattaccaatagcaaaaacgatttaaaaagtttcaaatgaatttccaacgttccaattgattgcaaaaagttgtaatcgaatataatgtttttggaatcgataccagtgcctttgaacgttgaaattcaattcaaagtgaagagcacatccttcacataaagcttgtgtaatcatacactgatt

SEQ ID NO: 3872 - DNA, 452 bp, Glycine max
  unsure (1)..(452): unsure at all n locations
gtataatgagtaattgtgccaatgcaccctgaatatacatcttaccatccctctcacacctctaattatttccaccgcacaaaatctgcactataaagtccatcacctcctcttgtattcaccaaatagactattagccccagaggtccaagactgaccctaatcacactctataattattttttttttcgtgttggcatatttcctttttctaaacattttgtgctctttttgtttgtggtagatccatgagccagaaaacaaaatcccattcatgggccttcgttgcagatctacttggttggaattcattgaccgtgtcttatatttcnttgccctctctnttatgctgtgtcttaccctttgcggtaaccatggccaataaacatcttcaacgaccatgagttcattgataaataaatatggtaaaagtctaatttttcgttttctaa

SEQ ID NO: 3873 - DNA, 444 bp, Glycine max
  unsure (1)..(444): unsure at all n locations
tctcgtcccggatccttaagtcacctgcngcatgcaagcttgttgttcccgaacgataaagggcgtagaatctatctatgcgcgtttacctactcagggtgttgttcctgaattataaaggttgcagaatctgtctctgcacgtttacccactcaggttgttgttcctgaatgataaagggcgcataatctgtctctacgcatttacccactcagcttgctattcctgaatgataaagggcgcagaatttgtctctgcgcgtttacccactcagcttgtgtgtgcggataaccgcatgtcaagttactccagtgtcagtatgacagaaattgtctgcgcggaagatgacgtaaatctccgcgtgtcaacaggcttgttggccgcgattgacaaagggtgcagaagacgacgttagtctctgcgtgctatcatgctntgtgtctt

SEQ ID NO: 3874 - DNA, 399 bp, Glycine max
tctctgggaccttaggcaaacctttaacccatccttcaagatcaaactgtctactcgtgattggtccctttcctctctccagagcttaagctctctgttattgtcccacaaagcccctcggaattttttcagccgtgttcttccctacgagcccttttggtctcttgttccaaggccttggtgttagctatatttacgtctctcagttcggcattctcctttcggatcttaagagctgctgatttgaacctttctttgactgtttgggctttctcgagttctgccctaagggcctgcacctcttcgtcttcctccggtgcttcaacttccaccactttagaggttctcaaactcgggagccaatccaaaccttgcatgtgggctttcaaccacctatgg

SEQ ID NO: 3875 - DNA, 447 bp, Glycine max
  unsure (1)..(447): unsure at all n locations
gcaacgatgaatagaatgtagctntttagttggtttacaagcaaatgagtagacatattattaacctgagctcatgctatccaaatttaccaaaggcatgttttttgcctactgaatttgctgaagatatgtagttgatatatatatatatatatatatatatatatatatatatatataatatttttttatactgacagttaagttttattgacctacacggngcttcaaaaaaccccatattagcttgaagtgggttcaaaccggaactttaactatcttcacctgccattgtcaaggcaactgcttgngtcattcaccatttattgtgagaacaccgtgtagcctccgtgtagtttcataaggtatnttcgtttataaatagtagcattcatttttcatttttgtaatgcctgtttctttttctgcgaaatctcagtctcttag

SEQ ID NO: 3876 - DNA, 443 bp, Glycine max
  unsure (1)..(443): unsure at all n locations
ggttcttngattttccttagttctttaacaagctntgaacaatatacttggccttcatttaactgtctttgggcttggcggccacgctcaacaaagtactttcgacacctactgtacgttgatttcaccaatgctgttatgggaatgttgcgacaatcctttaaaaccttattgatacattctgagaggttcgttgtcatgtggccatatcgacgtccttctctatcgtcagccatcgtccatttttcctttgagatgcgatcaatccatgttgctatggctggactcagttcacgaaattnttctaaattntgatcaaaaatgtgcttgcatggagtgtaggctgcataaaattagttatgaataccaattttaagtataaatgaaagtaaaataaacgtgaccatcaaatatganatcttacccaatttcttcaacatttc

SEQ ID NO: 3877 - DNA, 474 bp, Glycine max
  unsure (1)..(474): unsure at all n locations
agctntaatcaactntaggtgtttatcacttaaaatcttctagggatagctggtccggaagcaaagctagtacttcagcctactccacagcaaggcccaagcaaaaaacacgcagaccatcctagatgactgactttgccaattattagaattttcaattagaatgcgatttacttttatctgttatctgtatggttctgctttatagcccgctgggagctttgccttataaagggagccttttcagttgtaagaaggttatgaaatgaatgaagtattttctttttattacctagtcttagattaaccaagtgtatatgaaatgaatgaagtattttctttntattacctagtcttagattaaccaagtgtagccctagattctctacgtgtcactgtcactttattatggtccaacaaccaacacanacaactctacttactaatacatganatatgaacagtgagaggatg

SEQ ID NO: 3878 - DNA, 479 bp, Glycine max
  unsure (1)..(479): unsure at all n locations
gggaggtgggataagagaagttgctaaaatatagcagtacatcgggggtagttnttttaacttttatatatttttccaacttatttcactttgagcactcaacactgttatgttgtccaatctccatacattcgaagaactcatgagagagcacaagtggggaatgaaactaataaaaaaataaggggggaagtgggtcaaaatttagattatgtaacttctaattttgtagttttttttcttttgtccaagaaaaaattattcaaaagttaaggatttgtaatcgaaagagaaggagagagaaaatacaaggtacctacttnttgtttgtttgcactattgatttttcttatgcaattctattcattcattattgtaattagatcacactacacatgcaactcatgttgcttgccttacccctactgcaatttaattatgttctcattgttgcttaatgaataattntattactaatg

SEQ ID NO: 3879 - DNA, 401 bp, Glycine max
  unsure (1)..(401): unsure at all n locations
tagctntgagccaaataaacgacaatatctttntactcgaatgtgtgattgagccccgcaatatatcgagacgcttgaaatggaatgttgaacctatgagcctattcaaacgactataactctttactcggatgtctgattgagtcccataatatatcgagacgctcgaaattgactgttgaacctctgagccgattctaacgacaattactctttactcggatgtgcgagtgagtgacgtaatatgtccggacgctcgaaattgaatgttgaacctttgagccaattcagacgacaatatacttttactcagatggctgattgagacccgtaatatatcgagacgcttgaaattgagatgttgacctgtgagcgcattcgaaccactataactttttact

SEQ ID NO: 3880 - DNA, 400 bp, Glycine max
  unsure (1)..(400): unsure at all n locations
taaacattcaactntgtgcgtctcgatatattattggactcaatcagacatccgagataaaagttattgtcgtctgaattggcttaaagcttaaacattcaactttgagcgtctcgatatattacgggactcaatcagacatccgagtaaaaagttattgctcgttgaattggctcagaggttcaacattctatttcgagcgtctcgatatatcacgggactcgatcagacatcctagtaaaaagttatagtcgggtgaattgctcacacgtcaacattcaatatttagcgtctcgaatattataggactcaatcgcacattcgagtaaacagttattgactgttaaattggcgcatagggtcatcattcaatttcgagcgcctcgatatattacaggac

SEQ ID NO: 3881 - DNA, 417 bp, Glycine max
  unsure (1)..(417): unsure at all n locations
agctggggaaacttgcagagaaagataaagagaataaaagaataagctcgatctattattgaagtgtaaaaattggccagttacattatgttattgtagctatgtacacataagttagttgaaataactaactttcaactaactaactaactagagttctaaccattaaccatgatcaaactaaactaagcatctaactatgctatggtcgcccctcaagctaggaatgaatgttggatattcctatcttggcgtatatatctgcaagttgaatggcaaaagatattggaaacaatntgacaagccctgcaaggatcttctctcgaacgatatgacaatcaattntcgatatgcttggtcctttcatgaaacacaagatntgcaacaatatataaagctgacttgttatcacagtac

SEQ ID NO: 3882 - DNA, 304 bp, Glycine max
tcgtagaatgtggaaaggtgcaccctgtgacactgttagaccaccgataatgcctagaccatggccacataatgctactgttaacagatgaactccatgactactcaatgttaacacctatgagggatatcaaactattatcatttcaaccagtaaataaatgagatactctacttataaataatccaactcctcgtatatatgttctgacagaatgtgcaaacgactcatgtctctatatggtctttactttctctttctgcaatgtgcctcactttatgacacattattggtgatgataatg

SEQ ID NO: 3883 - DNA, 475 bp, Glycine max
agcttccacaacatccaagcaaaacaacattcaaacagcacaagctatcacagccaagcaaaacagagcaaaggcagaaaactctgccaaaacaccaaccaaatcacagcttttctcacttaaagaccccagtaacaattccttcgatccaattcgttaaccgttggatcgactccaaaattttactggaagtctatagtacataagcctacattgtgaccgttgggatctactagaaaacatccagaactcattctgcactagactttccacatccaaccacacacaagcatttttctgcacaaagccaaaatcctgctgcacctattttgacagcaaaattctgcataagtgcagatttcgaaaatcacacttcctctcatccaatcttgcccaaatcaattcctacaagtcccaaatcatgtatcaaccatgtctaacccaaaatcaagctttacagcacagcaacacagaa

SEQ ID NO: 3884 - DNA, 366 bp, Glycine max
  unsure (1)..(366): unsure at all n locations
tgcttgtggagcttctatggaggctagaaactntggaagcaagtggattagtccagttttaagaacatatgggatatcctcatcagggtattggatacacaggctttcgtaagtgaaatcaggtgcagccatttcccttagagtcctctcacggngtggaggttgtgccatgttcttagaatgttcaaaatcagaatgttcaaaactataatgctcaaaatcaccaataacagaatgctctggatgctcaaaaggtactaaatgatgtctaactaatctatgaaatgtcatatctatctcacgatcaaagggttgtaagtcagatggattgcctctagtcatacactatattcaacatgcacaact

SEQ ID NO: 3885 - DNA, 230 bp, Glycine max
tggactttgagccctagcggtgcgtagagtataaggagcatccacagggggcttctgtcaatgacttgaggagattgagacggttggccactactttctttttaagcggaggtatcctatacaaatgaaatcatgatgtggttttgctctgatgtgtagacactaaagaagccgaccgaatgctctgtaggtacatcacagcatctacgtgatgcatgctagtgtgcatg

SEQ ID NO: 3886 - DNA, 481 bp, Glycine max
  unsure (1)..(481): unsure at all n locations
cctgaaactgagagnaaatgattattaaacacacaaaatggaagtactaagtatttattacctatacttaacagaaaatacttataatgctacaaaataaccataaattggaagagtttaatacaatttatacaagttttatacacaaaagttagtcgtattcaccgactaacacagctcaattcgatcggcaagaatccaaatgttggcaaacgatcgtcctcggatgaaattagggtatgaaaactagtactaattataaagcatgtcatttcccttgtttccatagctaatgcagaaaatcaaggtctatgaatgggtttcatataaaaaaaaattaaaggggaataatcaaaatacaataaatggaggcattccataaaagtgacatcaaatgcaccacaatgtgtcgaaccatctttgaaaatcaagaagatatatagagagaggaaaactattagtaccactacataacttaaga

SEQ ID NO: 3887 - DNA, 423 bp, Glycine max
  unsure (1)..(423): unsure at all n locations
agcttctgcactataaatatgatggtaagcagaagttgaattgtacattttcgcattntgtgttaaatacaaagtttttccccaaacactaaaatctaataataccaaatagcagcggggaacatccattctgaaaatgttacagcaggtactgggatggcggcaattttgaattaaaaaatgaaagggtaaaacttagaagagagcacaagacaacgaaataagagacctttttaagagagattaaaaacagtacatgacagggatagaacaaagctaggcagcagcagtcacagttggttggaaaaagtgatgggtttcccaaaaaagtggctgcataagactcaaggatgatcagaatccatggagagcagaggatccagatgtncaaatggctagaaaatgctaggagatgttggcaat

SEQ ID NO: 3888 - DNA, 451 bp, Glycine max
  unsure (1)..(451): unsure at all n locations
ctaagcttacanaattcttattcaatgcaattccagcctttgcatcataaatacttgatctagaacaataatttaaaaaaaaggttaacagaccaatcactaacaagaaaatgaataatgtcaagttgtcaacttaaaaaaggcaattgtgttcaataactttacagctgttaacataatttatacctgttatcaccaacaaagtcggtggagaccacatcatcttcagtgtaaccaagaattcccttcaacttgccctctgattcctccctgagaaagacaacattatataagacaatacaattgagaaggaccaatcccaaaatggaggcctttattaataacaagtaatgaaaatttgctttaagacccaataatacacaacatatatcattagaggagaatcanagaattctgtcattacttgatnagcattttaatttcatcatat

SEQ ID NO: 3889 - DNA, 476 bp, Glycine max
  unsure (1)..(476): unsure at all n locations
agcttgtgtntgtcttcttctaccctacactctttaatttccgctgtgtacttttaattgccgcttttacttttggttaagtttttgttgctgttctttactttcttaacttagtagtaaaagcctagttgaatctagtaacattaagaaggataaattttaattagtcaagacacattaataattaattcaaccccctcttcttaattattctgaggccacttgatccagcaagtagtatcagagcaggtatcttgagaaaaggttcacaacttcaagataaatggcctctttaaattctctgtttgtcaaaagaaatntaaggtataggtcaaatctgaaatcatttgaagatcatgatgaagatcaagccaaattatgtttcatgaaaaaatatcatgagaacaacgaggaagaatctgtaaggaagaagtggtacatcgacagtggatgttacaagcatatgatgggagatg

SEQ ID NO: 3890 - DNA, 462 bp, Glycine max
  unsure (1)..(462): unsure at all n locations
tgtnccacaaaaaaggtcattaaatggagtttgaaagtttatcatttcagttttccttatcaaataaatggatcatttttaaggtccaatgccttanaatgatcacctttccaagtaaaaagaatcacttgattcactcttaagaaagaactacgtaggtctgatttcctcttcgatggagggtacgtaggagcaaaagccccgcttttgtcgacctcaaaaaataaaaaactaaaagttaagataacacaatttccacaattctaaaaaataggttgttgtcctttgagacaaacgtgagaggtgctaataccttcctcaaacgtaaatacaactcccgaacttagaattntcattntgaccggnttcctttggttntttccgacgtttcccacaaataaacgttggtggcgacttcgcgcatctttccttctttggaaagcgcacncgtgaagcctcgct

SEQ ID NO: 3891 - DNA, 395 bp, Glycine max
  unsure (1)..(395): unsure at all n locations
tctaagcaccgcagctgcaagctttcaattggcatctgaagttagagagctctgggcagataattatgctaaagctggaagtggggctgaagtagaggattcanggatgccagctattggagcaaaggaaaagggatcatcagctgctctgagcttggtcttccttgcctctagaaatttaactgtttggtcattcgcattccaatagttccttatgatataagctaagtcaatggctgaccttaagttttcataggaggtaagggcatcagatcccactcccctcgatctacacaaggttgtgattaaagctggaaagcctaagcgagaagagttagactgagccaacatggttatttgtccagtgatcaaactgccaatgttaatgtccatcc

SEQ ID NO: 3892 - DNA, 414 bp, Glycine max
  unsure (1)..(414): unsure at all n locations
tatcgcatttccaggaaatatagttgaataggaagatatggtccttgctgttcgtgctagtcttaagagatggaaattnttgtaccttggagacctccaggtgaatgaatgttccatttacttattagtacttccaaagtcagtgattaatgttctacatgcgattaatggagaatatgaattacacatgattatgaaattttgttatccatgcacctttatgtacttgagaatccctaaacttttatgtcttgtttgctctttccactcctggaaaaaagtgattctacgacggtcaaataagggatacnaacgatgtttttcgaacgtcgttgaatgtgacgttgtcgaaacataaaaatttcaacgacgagtcccanaacaccatcttttgatagtgagcaactttaaaga

SEQ ID NO: 3893 - DNA, 469 bp, Glycine max
  unsure (1)..(469): unsure at all n locations
agcttgtgaaaatacaattcaacccttcaacccctttcttgtagtanttttgtcacttcacatgtaacatattctccatacttgtaaagatcttttttataaaagatttaaaatgatttaatcatttaacctttaaagattttgaataaaaacaagaatttgagagtttcaattagaaggaaagtaaggaaataactataataattaagaaattatactcacataacctattattaaaaacctaacatgacattgataataatagtgttataattaaaccataaattatctataaggaatggaataacttaatcatttcacatggttnttaatctctcatttaggttattaaaatttcttgatggattagtgtagaaaggtctaggttcgataggtgtgattaaggattgagtttaggggtaatttaagcccacctaacanaaaaaagatgggggatagataaatcaag

SEQ ID NO: 3894 - DNA, 430 bp, Glycine max
  unsure (1)..(430): unsure at all n locations
ggggtgatgttgcgcgtactgatgggtaccatgaggtgtttgctggggtttgacccatgcgggtgttgaagagacggcatgggcatcntccttccttccttttgcccctgttgccccgattcttttggcgttcacgtttgtggaggaaacgtaatcaaactttcctctcttcaatccaacctcgattctttccccggcaaacaccagatccgcaaagctggacggcatgtaacccactagcttctcatagtagaacactggcagagtgtctaccatcatggtgatcatctctctctcaaccatgggaggagctacttgtgccgccaaatccctccatcgctgcgcatattctttaaaggtttcaccctctntcttaaacatattctgcagttgagtacggtcacgagccatatcagaattgtactgatac

SEQ ID NO: 3895 - DNA, 425 bp, Glycine max
agctgagttcattgttgctgccccacaaagcttctctgaacttatttcagccccattcctctgttcgggccctcttcgtctcccattccaatgcttcggctggggccatgctgatgtccttcagctcgtggtactctttctatacctttatggctgtcgtcttgagtttttctttgaccactcaggttctttcaagttctgccttcaaggcttacacctcctcgctctccgcaaaggtttcggcctcttcctcacttgaaaccttttgcttcgggagccagtctaactcttgcgtccgagccctcatccacttgtgatagccaccgatgatcccattactacttcctcgaagctccttatcctttctttgcaccgcattccatgcttttcagactctttgaagtatccttgcattggggtcactg

SEQ ID NO: 3896 - DNA, 400 bp, Glycine max
  unsure (1)..(400): unsure at all n locations
ttcataggtgatatcaggtgcagccatttcccttagagtcctctcacgggctggaggttgtgccatgttctcagaatgttcaaaattataatgctcaaaaccaggatgttcaaaatcaccaataatataatgcttagactcaccaataacagaatgctcaggatgctcaaaaggtataaaatgatgcctaactaatctatgaaatgtcctatctatatcaagatcaaagggttgtaagtcagatggattgcctctagtcatacactacattcagcatacacaactagttgccttctcatgcaagtaacattatatgtttaaactacaactacccncaaatgatatccaaatgacttgaaattttgtgagcaacaccctaaaatcatgagaagatagcaca

SEQ ID NO: 3897 - DNA, 464 bp, Glycine max
agcttgagccttgtgctgctaccccatatagcctctcgaaacttattcctgccccattcttcctttcggacccttattgtttcctgctctaatgctttgactgtagtcatgttgacatctctcagctcatcacactctttcctgaccctagtgaccaccttctttagcttctccttgaccattctcattttttcgagcttgcttttcttcgctgtcctcaggtacttcagcctctttcccacttaggccttttagctatgggagccaagttatcccttgcgtcctagacttcaaccacttgtgatagccactgatgatgcattgccaattgccctaagctccttatctttcctttccgctgtattccacgctatacagattctctgaagtatcttcgcactggcttcattgaaacctcgcgtgatgaaaggcacaatgatctccttctacggtgcacctctcat

SEQ ID NO: 3898 - DNA, 483 bp, Glycine max
  unsure (1)..(483): unsure at all n locations
ttgtctgtatntatggagtgatagtagtgtaacttgngagtgtgatccctcatctaatgcagctggagcctggtgtgcatttcgaataatgattcttttatggtagaaaggagggtagtggggaggggtttcataatgttggaaggctggtggattaaagacaacaagaaggtattcatcattaatgtatatgctccctatgatttacaagggaagagagatcaatgggaacatcttctacagctgaaatcctcctatcaagatggcttgtggtgtgtcttatgtgacttcaattcgataagacaccaacatgagagactgagttcatctcattcagtgagtaactccactagcattactgaatntaactcatggatctctgatatgactgttgaagaggttaggtgtattgggagaaagttcacttggtgcagacctaatggtggaagcatgagttagctggacagggtnttcttatctgat

SEQ ID NO: 3899 - DNA, 170 bp, Glycine max
cttgacgctctgtgactcggataatcatgagtgccacatgtcatctggggaacgaccagaattatcacaaaagttgaagaggtgtgaggaaagaacatacctgctaggcacatgcgatattgagatcaatgtggtccttaaggttcccactcatgcacactcgatgggga

SEQ ID NO: 3900 - DNA, 210 bp, Glycine max
  unsure (1)..(210): unsure at all n locations
gcaccatgactgcactnacattgagatttgttcctagatttctatttcggccgatgtattttaagcatatatcgctatatcccaaatttctagactctatgatcatacccttgaatgtagatgacttatctgttgagctttcaacttgccaggcgggggtattagagatatcagatactagcgtctattagatacagtgtgtgttcttag

SEQ ID NO: 3901 - DNA, 473 bp, Glycine max
  unsure (1)..(473): unsure at all n locations
agcttcttatccaaggctcatcttggtggtgaagctcttttttccatggcttattccttaatggatggcgcctcctctcacctcttctcctttggcttgcgctgcatctccatggtgaaaaatcaccattgaaggacctcattgaagctcaaagatccagcctccatagaagctccacaagcaagcttccatcatggcctcaaccaaatgaatcatccaacctcggctagggtacgcaaggatttgcgaagtacgggcggccccatttatgcgcacaatcaaaacgagcatgccttcccaccatatggctggcctaccaactatacaccacccaatgtggcatacactcccaatgaggatgtcaataactccgctcccatactcattgaaagccgacaacctcatcatgcacatgtctcttaaaccatggnggagacacatganatgccccaccacaatctagcggactttga

SEQ ID NO: 3902 - DNA, 403 bp, Glycine max
  unsure (1)..(403): unsure at all n locations
ggtgttgcttatgtcttggcatcatcaaaaccttttacacatacattcacacaaatcattggccaaacacttgtgaatcaattgagtattcttctaagatcttcaatgatgcaagcctaccccccaagggcattggatagaagactccaagaagattggaccagagatgcaagagaaggccctanggttctcatgagccttagggtagatttcaggcccatgggctaagtatgaactcacttatctttgtacgcattagattaaggtttcattatttttgggccttgtatatagggctccataatgtagataaggtaccctagaaatgtaggatttttcagcctttgtattttatggcacctagactagttcttgtattaggggtagttttgaatttcacatg

SEQ ID NO: 3903 - DNA, 373 bp, Glycine max
  unsure (1)..(373): unsure at all n locations
agcttacccaaacaggntctatatgctacttctatagttataacttcccagtcgttaatattattatcataagatataacaccaacatattatgatctcaaataaatactctatctattgaggctactcctctctgtttcttcttctaccaaatagaggaaccataaaatgggtaacgaaaatggaagaataataaatacgaaaaaagaagaagaaagaaagaaatagaggagggaattaaaaacgaagctgaaaaagaattacccgtacccaacgaagtaaggatcggaggttccttggacggagaagtctacgacgccaccgacgacaccttgtcagattcgaccgtggcgtgctctgtcgcgagctctca

SEQ ID NO: 3904 - DNA, 528 bp, Glycine max
  unsure (1)..(528): unsure at all n locations
cgtgcgattggggctgatgacctgatactcctcgcananaccngacnctntngaatactcaacctcganatagagcatcgacatcttagttttgcgttctcatgttcactggaggcaggaccgtgttcattgattgatcttaatcacactgcacacaacctcgctgatgaaattcttgcacattatcattgcttggactcatcatttatattatgaactggaggcgtacaaggactaatacatagcctaagtattctaaataatgggcgctctatgccacgctgactcgtgttttgcgtatttcgatataaactacatattcactacattcataatgataactatgagcctttgatgcgaacacattctcttttatatgtgtctcggcttttcgtagaaactactatgaatgtagatcaaccgctcaatacgagacgataccagactttttgacaaaaacaactcttctttgtactccttgtaagaagatatgaagcgtatatctgatttagactgacgacgcttctt

SEQ ID NO: 3905 - DNA, 472 bp, Glycine max
  unsure (1)..(472): unsure at all n locations
agcttcgatattcaacttcagtgctggaccatgccatgactntctgcttcctggaccaccaggatatcaagtttgagccaagaaagatagctgctcttgatgtggaacgtctgtcatcaatatctgatgcccaatcagcatcatagaaagcatagagtgccatatgttttgaaacagaagcaggttgaaggaataaaccatgaaatatagtacccttgagatatcttaatatccttttgaccacaacccaatgagaatccaatggattagccatatactgacaaaccttattaacaacataactaatctcaggtctagtaagggtagcatactgcagggcacccactactgacctatagagagttggatcatgaaataaatcagctccatgtttggacaatntacagtttgtaaccataggagtagagatagagtgtgcctcagccattttgagtttatgaagtagatctct

SEQ ID NO: 3906 - DNA, 461 bp, Glycine max
cttaatatgtctacaaactaggaaacttacaactatgttgttatgtgtctagcctctgctcagatgtaatctcatcctagctacaagttgacactgatggtaaaagctacctagatcaacttgtacacatgtctacatgcaagctatccccctttagaggcaagacaataaactctgcaaccgaattccacttgcatagcacataccaaatagcatgtttatgaatgaatgatatagctcacatagagaatgcacattctattcaaaacaatggactattgtcaaatagattgttgtctacttcattcattcgtctagccttaaagctttattgtaaaaaatcatgcgatcaactcttttcctctaggcactatgtggcgggcattgtatttaaactaacttctaccacatccttaatgtgatatcgtgataatagtgcgatcatctcatagcctcacccg

SEQ ID NO: 3907 - DNA, 387 bp, Glycine max
agcttgcaagagcgcggcccatagaatcccttgtacgatttcttattcgacgacgaggatgatggaggcggcttgcgtggctacaaagatggctcgcttggcggctaagtgagcgaacttggagtaagggcaggcgtcgttcaaggctttgcaagagagtgttaactcctcatcccaagtgctattatggcccttctcttctctgcgggagagggcctgccagaagtaaaagcccactcgctgagtggggtttccgagctgggaaacggattctcgcaaacggcttagggattccgcggcctgatccggctccgttgcagccagagaggcgcactccgccagagctttgaggaggggatgtacggaggagtccgagccggagtccac

SEQ ID NO: 3908 - DNA, 403 bp, Glycine max
tcagcttctaatacaataatgtcagaatgcaatgctacagaaacatatggaacttcgttaagttcaactagacaaggcattttatatattaagaactaactagtcaaattgttccaaaaaatgaagtggatgtagaaaagaatgcatcaataactttaagttctaggagctataccttcccaagtaaattggagtgccaaggaaaatttgggacagaatgacagaaaacccaggttgaagtggatagtaaagggcaaccaaagttggccccaagatcttattgctccatataaggagtccatagtttagggcagatgtaatacttccctgaacaaataagggaatttgctttgtgaaaaatctaaatgtttataaatccatcaaaatcacccgttagaagatg

SEQ ID NO: 3909 - DNA, 439 bp, Glycine max
  unsure (1)..(439): unsure at all n locations
agctngaacaccaggtgaggtaatatccacctgtgatgataaatagagaatgggaaacacgatttaggtggatgaaagacattacagtcttaattaaaaacaaggtggataaataaagagaaggagaatattcgaagccaggtcatgagtagtacatctggcagatctgaagcaatcaagtactcattaattgttgttgtgttttcatatatcttgtcagtaattccctctggtgcaggtccaccgttttccatattatatttaatcccaaaatcctgcaacaaggaaaccaaatgacagttacaatcattcatagttaatcttacaacccacaatgtctcagcataatatcataagggaacacccatcaactcctacatgtatgttatggaaatttcaccttactaacttaatattatgtcttgttgatatctgagag

SEQ ID NO: 3910 - DNA, 458 bp, Glycine max
  unsure (1)..(458): unsure at all n locations
ccctgagatngacgagcattactntgtgaactagaagctgtagaagacagcgaattgacaacatcagatttctggtccttggaccctgaagaagaaactggaggaggctgataatttaatggttttccatccaagcgtctcccagttccagaaaatgggttgaacttgggctcctcttcagcaggggtctcctcagctgtgagcaggaacaagagttgtcagtcttaagaataatatgggctagaggagtatcactgcaatgtacacactacattacttgtataacacgttacagaaaaatcttcaaatgatagtaaaggttttttctttttaatcttaaccctttggttcatcaaaagacaaaaatcttaactaatctggagttcagtcgaaaggtaagtaaagtctgaccaataattatttctatcaagaatagaactcaagtagtattcaaaata

SEQ ID NO: 3911 - DNA, 471 bp, Glycine max
agctgagcacatggacttgtgtgttgcccagtttcatcatatcttccgtaatacttatcacttctatcatatctaataattttcacatttatgtctaattgccattttacttcattgtagtaaatttctaaggcatccattgcctaagaaatctcgggcagtaagtagacataaccgtaatgtgaataatcatcaataatggtgataaaatatcattcttttccgaaagaactaacatcaaaaggtccacacatatcagtatgcacaatttcaagaagctgagtgcttcttggagctcctttctttgtatgttttgcttgttttccctcaatacaatccacacaaatatttagatccgtaaaatctagataatgaagaattcattctttattaatctttccatcctttctctaagaatgtgacctaaacgtttatgccacaagagaacagatcgttcattcactaaattat

SEQ ID NO: 3912 - DNA, 497 bp, Glycine max
  unsure (1)..(497): unsure at all n locations
ngatcataattgtctagaagttgcatgatgtgcataacattacatgagaatgagtggtgaatattttaggactagccagaggagttagcaaccctttctttgctaaagcagaaattcccctactaagaacctcttctacaatgcaaaaaaagcaaaagggatggccaatggagttgccattaactgaaaggaacaacttggttgataacagaatagactgaatcgatgagtagaaagtagggtggaacccaaaagccttgagaacctggatgagaaaaccccagtcaagcatatcanatgccttcttaatgtcnaatttgatagccatattacctccatgagttttcttattcaagagattgactgcctttgaagcaacatnggcatactcatagatcgttctgccttttatgaataccctctgattttcagaactggattgtagcattacacacatcagaagcattgatgcctaatgagttgataaagtgaccaca

SEQ ID NO: 3913 - DNA, 401 bp, Glycine max
  unsure (1)..(401): unsure at all n locations
agctcatacatngactaaggcacgaccgatgagtgatttatataatnacaacacaagaaataaaataaataaaatataaataaaattaaatatcacgccaaaagtatggatcttttaaaatatgaaaaccaaaattgtaaattttttagaatttggagaccaaatatttctatcataaaatatgaggaccaaaattacaaattttctagaaggaccaaatgtgtatattttaagaccaaaattatgcattaagtaaaatcggaggaccaaaattacttttaagccaaaaaggtaataatatatacttatgtatatcacatagaaattaaacccagacaataataattgcacatcatacgataatttctcgaagataaaagttaatttgaactcgactccat

SEQ ID NO: 3914 - DNA, 396 bp, Glycine max
  unsure (1)..(396): unsure at all n locations
aggcacaagttcatgtcaatattttctttcttagtctcttgaatacacaacaaatcaattntttctttctagactattctcctaattgcagcccattttacccccctccctaaaccccttacattgtaggaaataatattcatgggttttgtgttcttgcacccaatctctctgcctccttcaaatccctttcctccatttcctcaattctgttgattagcctctcttggtctatttcacctgtcatccccatcaccttagccatgttccagatagcttctgcctccactagctgagaagtgaaatgttntgtattttgtaagtcttgcgtaattggtatgtctattttctgacccaggtgtccattgttgggagacgcgcctttatcatttctct

SEQ ID NO: 3915 - DNA, 485 bp, Glycine max
  unsure (1)..(485): unsure at all n locations
agcttgtaggattatggngtaaccatcacatgtgtgactaggtggcggtcgggcgatggtgcacaacatgttntccacatccacaaagcgcgcataaacccaccatcccctgttgcccacctccaactgagctcacgtactcccacgtagcccatatcctcgtttctctcaacaccgggtccccatcaatcctcccaagcttccacaacatcaaagtaatacaacattcaaacagcacaagctatctcagccaagcaaaacagggcaaaggcagaaaactctgcccaaaacaccaactaaaacataacttttctcacttaaagaccccagtaacaattccttcgttccggttcgttaaccgttggatcgactcgaaaatttactggaagtctctagcgcataagcctacattgtgaccgttgggatctactagcaaacatncagaactcattctgcactactctntccacagccaattacacaca

SEQ ID NO: 3916 - DNA, 449 bp, Glycine max
  unsure (1)..(449): unsure at all n locations
attgccttactcatttccaaatatgcatgtgaattatgacgcatcaacaagaatcaagccaaggctattgtgcaagcaatcaatggggcaaaacacaccaaatgattataatgatggatggctcaaattctcacaaaggtaaaatcatcactttcaaattgagctttcaaaactatcatgacatgtagagaagaatcaaggatttcaagtcacaaaatgtcaagaacttttattttcaaaacaattacccatttcttgaacatatcctataattcaaagaanaacatgcaaagtcgtacgtgcacatganattgacccanaatattaaactgaanatccgacgaaactaacaacattaacaaattaacacaactaacaaattaacaaaaccaaccaaactagcanaaccaaagaacactccccccatactaaacaacacattgcctcat

SEQ ID NO: 3917 - DNA, 426 bp, Glycine max
  unsure (1)..(426): unsure at all n locations
agcttatcataatcactntatagtatactaaccttatgttacattntttttctcttccattgtttttaactgtacaaaaaagtatatcccataaagcacgtgactggttaaatagggtttaacccacatgattctcaaataaattctattcactagcaaagcgtgttaaaaacaatcttaaaaacaaattcttggcacttccctattaattcttactagggtcatatactcataaaaagggtatatttcagaaatgattatttatatacatattacgtagtaaagtttaacataatttacccatacaattagacgaaaataaacgtgccttatgcaaatttgttatcaaacactgaaatcctatgtctagttcttttcacatcgtacactnggtggtgccaatataatacaagcattaattaatga

SEQ ID NO: 3918 - DNA, 123 bp, Glycine max
gacttgttagtcaactagacaggatttattattacactgatgcttgttgtgcaatatgacagtggttaatgaatgcatctgcttaatatttagcgtaccttctagaaagtgatgtcacgaata

SEQ ID NO: 3919 - DNA, 451 bp, Glycine max
  unsure (1)..(451): unsure at all n locations
agcttgtggttggaaggaaataccttgtgttgttatcgatggtatagagcacaagtattcagcttcttctcctacccagaaagggtaagttatattgtttactttcacaccctccctgctctaactctntgtctccatctttgtctatttgtttgttactttgtgcagtatgttttcattagtgtttgtctatatatatgtgtgttgttcagtgttgagtatgatattttagattttactgtacctcaatgtgaattttagatatcatataattttngtagtttgtagcattatctgtttaatattattcttgcatttcttacctttatttggattatcttcttctttctaaacttacatctggtcttatgtgctaatcagttgaagttagatgacaaagaaattaacacttgtgtacnttggagagacaaataattatgccagtatgcat

SEQ ID NO: 3920 - DNA, 379 bp, Glycine max
  unsure (1)..(379): unsure at all n locations
tggtatctctaactagagggttnttgggagtatatctcatgttcatgttccagacgagagaagagcataaattgatgcaaaagtgacatactcatcttcattggttatgattcaagctcaaaagggtacaagttgtacaacccatactacaagaagatggtagtcagtagagatgtggtgttcggcgaagaatgacaatgggactttgagactcatgaaaattaggggtgggaataggccaggccaggccaggctttaaaaggcctgagcctatcctacaatgaattctttaggcctgagcctgtcctatagcctatcaaagacttttattttggctcggcctagccttattaaaagcctagtctggcctgatagtctt

SEQ ID NO: 3921 - DNA, 460 bp, Glycine max
  unsure (1)..(460): unsure at all n locations
agcttagacactgtgttctctggttntgtggcgattgtgaaaggaaagaggagtggtacccatttcttgctcctacgccgctacaatcgccggccaccgctaccgccaccgcggctccaaaataaggtcgtggaatcgtgtggtttgaatcagatccacattatctttccaccatcttttctatttttaattattttttcttggaaaaagtgaagtatgatttgtgggatgaaatctagtgcggggatctgtactgttcatacactgttaccttcgtacacgtggccgtctttctgatctgcttcttcccatagaataatattaggaccaatatcattttaggtaaatactcattttaattactgtctcacactnttaagattaaaatanatatttatataaaatattatcttcatcctagtttataagatattattgactaattcatgtatattaaaaa

SEQ ID NO: 3922 - DNA, 431 bp, Glycine max
  unsure (1)..(431): unsure at all n locations
ggagagatcacttntcttatatgtaacgtcactcttcacgttgttttaagaacatatatttaagtctcatctatcttaaattaccgcacttgtgatagaagtgttagattccaatagcgacaatcgctcaatcaacatccaagatatatatttatagctcagctattgtgaatcggattcatattctctgcatacagggattttctgcattcatgtatctagctaattggaagcattctctgcattcatgaaataaaaaagatgtgaaaggttaaaagagagataaaattaagcgtaacgactatacatacaataatatagaagtattctccgcgccaatatgacatgaacagttaatggctttcttagcaaacaaaaatatgggcggtngacaattgacactcacctcgcgccactaacaacaatccttt

SEQ ID NO: 3923 - DNA, 474 bp, Glycine max
  unsure (1)..(474): unsure at all n locations
agcttcccagctgatgctctctagaaaataattttcagaattgttctcattcttatgtgaccaaagcacagcttcaaatttggccactttagatgtatcacacaatcaaataaaggggcaactcccagattgttggaaatcagtaaagcaattactgttccttgatttaagcagcaataaattgtcagggaagattcctatgtccatgggcgcccttgttaatatggaagccttggttttacgaaacaatggtttaatgggtgagttgccttcttctntgaagaattgcatcagtttatttatgctggacctgagtgaaaatatgttgtcgggtccaataccatcatggattggagaaagatgcagcaattgataatcttgaacatgcgaggaaatcacctctcaggaaatgtacccattcatctcttgtatttgaaccgtattcaatagttggatctttcaaggaataacttg

SEQ ID NO: 3924 - DNA, 577 bp, Glycine max
  unsure (1)..(577): unsure at all n locations
tatactgaagtagcaactancgtacttggaactggggttatttgttctcgcaagaacgacagtatttgatatgtgacctcgaacncgtgaaactaagcttgcacacgcaacgtcataatcagagtgagaaatctacttttgacgcaacaccatctagagtagggatgctactgtcttacaatatgtagagcttagtactcacgcggctatacacggagagacgcttgatcacttaacaaccgtctacaagtgctatatctcagtcttggagaacataatctatgcgtgaccaaacctttctaggttgtgaagattcctatctgtcgtacatcttagaccttggagggctattctgatctatccaattaaccgatagcagatgaggctatcctctatctgtttattgacaacttttgacctgacatcatcgagtaaactcggtcctctacttctggcacgagggatcggcgagttatacacactcgagagagtgacgctggtgatgtatctcatgtagaaaggtggcttcgcttcatcaaattctatctctttgcgacctagcatatgataccgttcg

SEQ ID NO: 3925 - DNA, 421 bp, Glycine max
  unsure (1)..(421): unsure at all n locations
agcttccactcctgtgatgtctcctattataccatcttccccgggaatatacctgccaattacctcccgtacgttttttatgagtagagggggtatggtccaagtaagtatgaggttcataatgcaaatctgttagctggcccaactgaggcccacattgtatggacttagcctgctgttcagctctgtcttccttatcatatattagcttatgtgccttcttcatgatgtgcttaccctntattaccttatatgcattgtttgctggatactgacctgtaaggccagcaccccattcccagacatcaggtccatgttgttgaatggccatatactgaacctcattgagaaaaacacatgccgtatcaatattattgcaaaacaatggccttctccaaatatagctccactcccacccatt

SEQ ID NO: 3926 - DNA, 229 bp, Glycine max
ctaagctgaaggagaagtgggagagtcagtctttctactttttcgttgaccacaaagtggtacctggagatatgtctcggggtcataaaccttgggactcggtggggtgctatttcccaaaaccaacttgaccaatcccgaccaacccggcatatcagtagtgaaacctgtgacgtcctaacaggcgactcctgaagcaaccgataaagacaaagaccacatagcaaga

SEQ ID NO: 3927 - DNA, 334 bp, Glycine max
  unsure (1)..(334): unsure at all n locations
ggatccttaagtcacctgctgctgcagctgctgaatgagtaagtcttccttctacttacttgtttncgcatccatgctaggcctataaagtttctggaatgttccaattgctttgtgtcaatgatctcattcaatttgttagacagacggttgcctgatacaattacatcgtgatgaacttggactctcgctatagcaagaactattgaagaaatctcactgtggtgactagagtatatctccagaacaaaaatcctttacagtataaggatgagcgcttctttgaccaaattaagaattataagcccattgtcctctttgagcatgataatac

SEQ ID NO: 3928 - DNA, 244 bp, Glycine max
  unsure (1)..(244): unsure at all n locations
ataaataggcttctgttatgacatatattgtataagacctaagttctgaaaggcttgaatgctatcaaaggtttcatcaganaagaattccatatcaataaacttatggtcgataatggaacgagctgagaaaagatntgagtaccgtttctactattcttcggaagaaaacaatggggaagaggacaatgagggtggaattgggctgtggatgcgctagtggcttccgaacgatgagctcttg

SEQ ID NO: 3929 - DNA, 473 bp, Glycine max
  unsure (1)..(473): unsure at all n locations
agcttataagaacngaatagcctcatatcatttcataaatgcatgtgaattaagacgcatcaacaagaatcaagccaaggctattgtgcaagcaatcaatggggcaaaacacacctaatgattatgatgatggatggctcaaattctcacaaaggtaaactcatcactttcaaattgagctttcaaaactatcatgacatgtagagaagaatcaaggatttcaagtcacaaaatgtcaagaacttttattttcaaaacaattacccatttcttgaacatatcctataattcagagaataacatgcaaattcgtacgtgcacactaaattgacccacaatattaaactgaaaattcgacgaatctaacaacattaacaaattaacacaactaacatattaacaaaaccaactaaactagcataaccaaagaacactcccgcccatacttaaacaacacattgttctcaatgtag

SEQ ID NO: 3930 - DNA, 148 bp, Glycine max
  unsure (1)..(148): unsure at all n locations
gtatatgtgtccacatggatgtatgcatgattagttctgcataaatttctaatcatcattggcatatgcgtgccatggaaataattaggtgcattcccttattcttggaccgctcgncaaacaatatcactgacatgcatcatgtacc

SEQ ID NO: 3931 - DNA, 365 bp, Glycine max
agcttgttaaattgttcaattgatattaaaatctctcataatgatatatcatatttgttagtacttaaagagggtgaagttcaccactttttgaaaggatagtattcaaataaaagtgaatatgagggagagtgaggagagtataggtataggaaaacataattttcacacgtttatatagagagaggggtttagggaaaagacaaagtttgtgtcttttttttaaagaagatttaaataaattttcaaattttgttttaggttttcaataaattttaatctgtgttaagttctaattaaaaaaaggtatttttttttaaaattttgtggtcagttgagtgaatatgtgatagttaaaataatta

SEQ ID NO: 3932 - DNA, 399 bp, Glycine max
cgtgcataggaagaatacacgagagccaaagagcgatgatcatcggttagtttacgaatctggtccaaccgaggcttgagaggatctgttttcagagctaggacggatctcctaatcgactcaaatccatgtgcaacaccaccgtcagaaccctagttcaccaccacaacaacagattagtaacctaacatcatcaaatctttttttcttctcagaaaatgaaaacagtttgaagaaaataacaaacttttccactttctagcagtaacatttcctttgaaaaatttccacaccacaagcacaaatcaaattaaaacaaaacaaaccctgtttgtttcctaagaaaattagctcgcatcaagcctatttcaaaagcacaacagcaatattgttcctttc

SEQ ID NO: 3933 - DNA, 484 bp, Glycine max
  unsure (1)..(484): unsure at all n locations
agctgtccacatccacaatgcgcgcataaacccaccatcttctgttgcccacctccaactgagctcacgtactcccacgtagcccatatcctcgtttctctcaacaccgggtccccatcaatcctctcaagcttccacaacatccaagcaaaacaacattcaaacagcacaagctatcacagccaagcaaaacagagccaaggcagaaaactctgctcaacacatcaaccaaaatcacagcttttctcacgtaaagaccacagtaacaattccttcgatccaattcgttaaccgttggatcgactccaaaattgtactggaagtctatagtgtataagcctgcattntgaccgttgggatatactagcaaacatccagaactcattctgcactagactntccacagccaaccacacacaagcattgttctgcactggtgcaaaattctgctgcacaatntcacagcataaattctgcataagtg

SEQ ID NO: 3934 - DNA, 471 bp, Glycine max
  unsure (1)..(471): unsure at all n locations
ggcttcagtataataggaagcaccaatataaatatgttgatgcctactattgatatatagcattgaccatacatgatactagctagagagaatagaaactattgataatagtacactccataggtagtaaaccacaaaaaactttagtggcttgcataactttagttaaatttagcggcttttaatgcttatcctatatatattataatgacataagtatttctaacttgttacctcctaagagattccctttggagtccttactggtttgttaatcttttagctgaaacattgcattttggccatgaggttgatacaagggttgaatatttttataagctaacattgttggaacatcctaattgagcatttgagatntgagatcatacctcaatttacctatgactagaaatctggcctagaccncttttgttcaaggatacttacatgtagtcactaaaacaatctatg

SEQ ID NO: 3935 - DNA, 451 bp, Glycine max
  unsure (1)..(451): unsure at all n locations
agcttgcagaggtcggtggcagactcaagaataatggaatgtgtagtggctntgtctcatacctccattacacttcatttgtacctgagcttgcttccctatttttattaattntgttcatgtttatgtgtgagttgaatcttccccgcgaggaccaaaagataaaaaaaattggaaatataagaaccaaaatgaatgtcttaaactatagggactaaaacaaattatcacaactataaggactaaaaggataattaaatcaaaataaaataaactagagcaaaataatggtggtgtggttaggcacttttaatcctaaatgtctccttgtagacatatatacctctacatatgtgtgcattttgcaaccaccaccattagtggaataaaattttatatgcaaacccttctatggtatatatcctatataggcatngttagtagtaaatac

SEQ ID NO: 3936 - DNA, 467 bp, Glycine max
taagcttgaatgttcatattgcacaaacctttactggttctgatgtttgcagaaagtaaaattctttgaaagaatcgaaatgctggaagtaaattgacaagggaaaggtaaattgcagaatttaaaggaccaacgaattcattcgatcgaatgaaccatttaaaagacaggaattatataaaaatgaaacgtaaattgcattgcattcgaaattgtaaagtttacagaaacttaaaatggttcacaatcatacattctccttgcgtactcgtttctctctgcgctgggtactttgagtgtataaggatttgtagaaatgatttgcgacctcgaaatctgactaaaaactgctatatatagacattcgaaaataaactgccctaacggtcgaacactatcctaatgccaagtgtcctgctacgtacaccttacatgcacataactgctccttagaacggttatccaca

SEQ ID NO: 3937 - DNA, 478 bp, Glycine max
  unsure (1)..(478): unsure at all n locations
agctntaccactntatgatcttnttgacggagtgtacttatataactatatgattnttttctctgtcttgaagccatgaaatgccttgtattgtagtgacatcatatccaatcatgtttctttaaacttcgtgaaatttgctatgcttgtgtaattaaaaagattgaacgattacaaattacaaataagaaaatgaaaatgaggacaactttacacaagtttgaaagaattgaatttgttggtaaccatttatatcattttctcaaacttatcaagcatttttaccctttgcatggatctgacaaatagtgtcataaaaatacctgcacatcgaaatgctatatctatcagccttaagaataatttgaacatgattagacaataacttgagagaaagctttataatatatagtcacctgcaccaatgaaagatccattcgcaatagttatgttgccttggctgctcagagtgatacca

SEQ ID NO: 3938 - DNA, 451 bp, Glycine max
  unsure (1)..(451): unsure at all n locations
cttgcatgggatctntaccttccacagcacattaaaagcactatcctgattttcatcaatatggtcccgcatgagcatcttgtacacattccccactgtgtatacaccagatgcatcttccttccaaatccacttgtcttctcggtccgggtgaatgcatcaaaaagttgccttctccattgaaaatcccactcccagcctgcagctgcaaaacttcccatctgctatatgtgttggggagattcgaggggtacacctgtggaccacgagccaccacataaagagacctgacaccacactctaacccaaaaccttaaggctcaggtttatgggtcttctcctcacttatatggtgctcaaccgtttcacttctacccgatgtaggacttcacctcacacttgtaacccaacacatctctccctcaagtgtgagtctcttcacatggtagtc

SEQ ID NO: 3939 - DNA, 276 bp, Glycine max
  unsure (1)..(276): unsure at all n locations
attgataaagacttagatnttaatcatgggttaaggagttgtacaacagatggagatatattatacttagtgagggatgctctggaaaatgagaatgagataaatgtttattttcatcatgaagtagatccaattttagaagaagtcccatagatgttgtgcttggaatgtcatccaattcccgaagctgttgagaatgaggatgatttanatgatgtacttgttgctggccatgaggaagggaagttntaattcatttgtacttggtccaacatg

SEQ ID NO: 3940 - DNA, 412 bp, Glycine max
  unsure (1)..(412): unsure at all n locations
gatgatgtggtcttcaccgacgaaaggatcaaagtatgtctaaaaagaggcaaatctgatcatcatgctttgatacatgccaaaaacaactatggcaaatgaagagggtgagaatgagggagaagcccatgctgtggctgccattcctatacagccaagtttcccaccaacccaataaagtcattactcagccaataacaaaccttctctttacccaccgcccagttatccacaaaggcaatccctaaatcaaccacaaagtctgtttactgcacttccaatgacgaacaccacctttagcacaaaccanaaacaccaaccaagaaatgatatttgcagcgagaaagcctgtagaattcaccccaattctggtgtcctatgctaactngctcncatatctactcgataattc

SEQ ID NO: 3941 - DNA, 424 bp, Glycine max
  unsure (1)..(424): unsure at all n locations
agcttgctntntgcaattccaagacacttgagatcttccaagtatattacatgtcctatttgtacttttctatctaatgtgaatcctacataatcagaatatgaaaaccctgttaagtttaaggaggtgcctttgggataccacaaacctacattggttgtgcccttaagatacttgataatccctttaacagcagttaagtgagattctttaggattggactggtatcttgcacataagtaaatgcttagcatgatatccggtctacttgcagttaggtagagaagtgatccaatcatacctctgtatcttgattcatccactgttatacctttctcatctaagtcaaagtaggttgatctagccaaaggagtagatgtttctttgcattttttcgtaccanacttctntatcagttctatgc

SEQ ID NO: 3942 - DNA, 501 bp, Glycine max
  unsure (1)..(501): unsure at all n locations
tgaaggtaggagaagatgagtggagggagagggagagaaggagtacgaaaatttgtgcctcanatgaggtctgaactttgaagtgtaattctcaaatgatcaaagttgaaaaaatgcacacacatggcctctatttatagcctaagtgccacacaaaattggagggaaatttgaatttcaattcaaatttcacttgaatttgaaattgaatttgtggagccaaaatttcactaactatgattagtgaattttagctatggctcagcccactaatccaagatcaagtccaagattctccactaagggtgcttaggtgtcatgagacatgtagagcatgaaggacatgcacaaagtgtgactatatgatgtggcaatggngtgtagcaagcaaatgctcacctccccttataanaattaattggattgggcttctcccaattcaattaaatntatttcccaacacacacatcanatattcacttaatgcgtgtgaaaatacaa

SEQ ID NO: 3943 - DNA, 475 bp, Glycine max
  unsure (1)..(475): unsure at all n locations
agcttcagaccaaagcaactcanaatctaggtatccaaaacccctcaatttaatggattttcaaggtttgagaagtgaaattgagaatgaggtaaatttggagcaaactctcacctcacacaagtctataacatcaatttaaacttgctcaaactggatttacacctaaaattccaccgaatcaaaatttgactcctcaacacccaattttaccctagaaatggctctttgttcactttggtcatttgtttttctctctagcacagcccanactttctcataagtcctaaatgacatttcaagctaggattaactcactttaacctccaaatgccactaaatccagatttggccttccaactctcaaaactcactctntttccactcataacaccatattctcactttctaaccctaggttaactctacccttcatctctaacagctnttcataagcaatntcaacacataaaca

SEQ ID NO: 3944 - DNA, 452 bp, Glycine max
  unsure (1)..(452): unsure at all n locations
tctagtattcaaagaccttcttcttcaagtgtttgttgtctctaagcgaatagaattcttcacttgagctntgtcgcaagctacccttttgcgggcgagcgaggcaaggctcacaggtgcgtcttccataggaagaaaatgcgcggagtctccaccaacgtttattgaaaggaaaacgttagaaaaatcaaaggaaaccggtcatgaagaatattccagattcgggagttatctttacgtttgaggaaggtattagcacctctcacgtttgtccccaaaggacaacagccttagattagaattgtgtgaaattatgtatctaaacttttatttcttttntattntntgaggtcgacaaaagcggggctcttgctcctacgtaccctccatcgaagaggaaatcagacctacgtagttctttcanaagggacaaatcaattgattctttttta

SEQ ID NO: 3945 - DNA, 454 bp, Glycine max
  unsure (1)..(454): unsure at all n locations
agcttaagaaaagtcacaccacaggaatgggagactagctagcaggtggtgaataaggttcttgaatgaactatgtccaacagtttaaggtctcatttttgccaactaataatgagcactttggtagcctttttttctctatgcaaccatcctttttctatggtttgagaagatatctgtaaatcacatatttacaagatcgtaatagacgcattggtcgcctagccttctcgttagatgaaaaaacaaaatacagttaataagttatgatagcaatgcaaaaaagtcaaatatgcaaaattaattaatccaaacatgttctatacatgtttgaattaatttatnttatatttaaatcttttggtaaaaaaatcattggttttatcgtacattntttaaaaaaatatgaataagataaactatctaaatgtatattttggctcanaaataaagc

SEQ ID NO: 3946 - DNA, 435 bp, Glycine max
  unsure (1)..(435): unsure at all n locations
tgttgttttagctcttctctgttntagtaatatgatactctaacgtactatattggtttcaattaactacacgggtgtggtaaaatcatgcgttgtatatttctgaagggattgtgtgttgaattggaagattttgcagtttgtacacacaagaagctcgagatttgttttggttcttttgacttagaagttntatttatttatttttgataaatggaacttcactatggactgatttcttttggtttcactttcaatggtgatcaatgctattggaaatatgaaaaattagttagttcataaaaaataccagcagagaagcaagtggtcctcttaagcnatggctgttgtattgaaaccataaagaccctaaactttggctcatcgagatngttaccattatatgttgaataattttttaaccaaatacatgac

SEQ ID NO: 3947 - DNA, 422 bp, Glycine max
  unsure (1)..(422): unsure at all n locations
agctngagatgaggaagtgttgaagggtgaaacttcctgcttttattgttgaccacagagtggtaccttgagatatgtcgcggnggtcaggagaccttggggacgtcaggtggggtgctattgcccaaaaccaagcttgaccaatcccgacccaacccgggcatagtcggtcagtgaaaacctgtgatgtacctaagcaggcgagctcctgacaatcaacagataaaaggaacaaagaccacaaagcaaggaggcttgtgctggctggccagctgtgaatattgtgtgatatatgggttgtggcctctggtaatcgattaccaagggtgggtaatcgattacaaggcttaaaaatgaagacaggaggctaagatggtctctggtaatcgattaccatggngtgtaatcgattaccaggcttg

SEQ ID NO: 3948 - DNA, 428 bp, Glycine max
  unsure (1)..(428): unsure at all n locations
tcaagaataatggcctcagcaaacttcttatttccagaaagaaattcaatcaatagacctccaatctttaatggagagggttaccactactggaaaacccgaatgcaaatttttattgaggcaatagacttaaatatttgggaagccatagaaatagggccttatatagccaccacagtagaaagaaccacaatagatgggagcacaacaagtgaaagcccaacaatagaaaatcctagagatagaggatctgaagaggatagaagacgagtacaatataatttaaaagcctaaaactagataataatcatcgtnttcttagcaaagatgatgatccatggttatggcttaaaagaattgctcacataaacatggatcacttaaacaaaataatntcaaaagattagtatttggtttgctaaattaaa

SEQ ID NO: 3949 - DNA, 403 bp, Glycine max
  unsure (1)..(403): unsure at all n locations
agcttgctctaaatntagattgatgtttgtatttatcgggaggaggttgtatgccattttgttttaagagtagtgtcccactggtaaaactaactttccaaatttttgccttcgcaggaaatggccccgaggaagcttgcctcaaagaggtccaggaaggacaaggcagccgaaggaactagttccgctccggagtatgacagtcaccgctttaggagcgccgtacacgagcagcgcttcgaggccatcaagggatggtcgtttctccgggagcgacgcgtccagcttacggacgacgaatatactgatttccatgaggaaataaggcgccggcggtgggcatcactggctactcccatggccaagtttgatccagaaatagtccttgagttttatgccaatg

SEQ ID NO: 3950 - DNA, 343 bp, Glycine max
  unsure (1)..(343): unsure at all n locations
ttagctagacaacctnttattcccattattntcttttntccttcatggtttntcattccttgcttgctctcttttccttttcctctttttttccttttttagttatttatcatttgttcattacctctctcttctttctttttttttctctttttctctctgaaaaagtcgtgcggacaagggcacacactacctactcacgtctaaccacaaggtgaacgagaaacgcacaaaaatggtaggtcgtaatatggtgacgaaatagatgagagccataacgccgaatatttctaacagaaacgagcaataatgatagtaatgttagtaaccatatgaacaaaat

SEQ ID NO: 3951 - DNA, 471 bp, Glycine max
  unsure (1)..(471): unsure at all n locations
agcttgagctggagcaagcattccaccaatgcatgtatatcgccaacatcacaaagaagctcaaggaagctgcataatgttgatccaatattcttgaaaaccattcacattatattttagtcccagaatgagttttgaattctgttttataggtgcttgcattgcatgctatagtctttttctttttaaaaaggaaatgttctgtattgagtctattttttgttacacggtgcagtggttattgaaatttgttgaataaaggaagtttgtcttgtgtcgtgtacaccattattttttttcctttnttgttataacaaactcaatttgatcacaattcaactgttattgttctaacgtaacaatgatcacatagtgtcggcaacagccttcatctgaagatttagagcactaacaaaaagcataaaagctatcagctatgaagagntaaaatacaacagattcaaatgatct

SEQ ID NO: 3952 - DNA, 330 bp, Glycine max
  unsure (1)..(330): unsure at all n locations
tgcacatgcaagttgaagaatagcacctagtgtttaaaccttcaatatggcttccaaatcccacaaagnttccatgagtttatttcttcttttctattttgagtgtgaccaagtgagctcaaaatggataggtaggagcgtagtttgttttgatggaatgtatttggtaattaatgtgggataataaaagttaaaaatatgcatggtcatgttgccacttgccatgtcggcttggcaagtttcatatgaggtccaccgctggtagaattgttgaaatttgtgccccaattaactgtggggtatacttcatattgtaccgaccgaattgaa

SEQ ID NO: 3953 - DNA, 392 bp, Glycine max
  unsure (1)..(392): unsure at all n locations
agcttctatggagaatgttagtgttatcaaggctattcttagaagctttgaaatagcttctggcctgagaatcaattttgctaagagccaactcggagcaattggtcagtctgaacagtggatcagatgtgctgctgatttcttgaactgtggaccactacaacttcctttntgctacctagggctgcttataggtgttaatccgagaaggaaggtggtgtgggaacctattatcaataaattcgaggctagattgaacaaatggaggcagagaagtatatcaatggctggtagaatcaccctaactaatgttgtcttaacagctctgcccttgttttacatgtctnttntcagggccccttcaggagtgattaacaagctcactaccattc

SEQ ID NO: 3954 - DNA, 422 bp, Glycine max
  unsure (1)..(422): unsure at all n locations
agcttagaaaaagcttaganatcaagtgatcatcaattccaaaacatagggggagtgaacgcaatatattatgcatatacattgcttgcttgtatcttgatttcaggacttaaattgtcatcatcaaaaagggggagattgtagaagcaaatgactttgatgttttcatgataatcatgatgatttggtgcaaatgcgcttttcaagtttaattcaagacaatgattcaagaatacaagacacaacatcaagatgatcactagtattttaggaagggaattcctaattgaaatagcaaaaggtttggccaagatatttaagttaaaaagtatctttcaagagatttactctccaggaatcgattaccagaggatgtaatcgattaccagtggccaaaaatggtttacaacagctattaaaaa

SEQ ID NO: 3955 - DNA, 409 bp, Glycine max
  unsure (1)..(409): unsure at all n locations
gggctgatgttctcgtagttcccatgagcccttggggttttgaagtgagggggaagagttntgggtgaagaaaacgttccccctccacccctttatattttcgtacaggggttcctcgcccaggcgagctaacctgtacttttttttttttttaggggaacattaaccatgtctcctccttccttatgggttagcgtttgcccacttgaacctacttaaatcagaattaggtgttgattacttatttaaaacaaacaatagtaaaagaaactgcgaatgcaaaggatactgggctgccttacagcgacgttctctgcttgtttagcgccgggaaggggcaacgatcggtcggttgtgaccctatccccacttgcatccgtccctatgtacctgtaagtaggaaacaaaa

SEQ ID NO: 3956 - DNA, 480 bp, Glycine max
agcttgttgcagcggagaatatcacagtgatgcgcccaataaaaaaaaaataatgattcaaatagaatatttaagttgaaaagtttcaagcggtgaatatgtattaattaattattattttattgatagaaagagagagattaaattaaggtggatctaaaaaataaataggagagagaaaataatttctttcaagaaatcataataattagttagtgataattagttaacgaataaataattaataagacttatcctatttaaagttccacatgttaaaaaattcctaacaatatcaggaattaaagtgcaaatttactcacacaagagtgatgaactgatgattaagagaactttctcccgtatgttgtgcggacataattaatttgaatgaaattaattaatgtaagtttcctaaaatttctttaatttaaaatcaaatctagaatttataactaattttcaacataaaactaaata

SEQ ID NO: 3957 - DNA, 432 bp, Glycine max
  unsure (1)..(432): unsure at all n locations
tatcagttgagtgggctccacttcaacagtcttatgtgggactntaagaggatattaaagaatatcttgaagataagttgaagcattccatttaaagaaacttgagcttggtctttgtgtcagaaatctacattttctattataaccctctctgttgagaatgaccaacttatgtattgaacttgtaatttgtaatagatctaagataaaagtaagaaactatattttcctaagtgtaaatcctctatgaggtgaaaatttgtgtttgtgcaatctgaaaacacagaaaccctttntgttgttgaaagtgcaatagtgactagcattgttgaaatccagtggtgttgttggtctagtntgggctaggtttaaagtccagtgggagtacctagcaagtgttgaaatccagtggttcactacaagaaaaaaata

SEQ ID NO: 3958 - DNA, 434 bp, Glycine max
  unsure (1)..(434): unsure at all n locations
agcttgttgggatnggtgttgatgaagatacattatggtgatggtgctaagttagttgatggtattgagttagcctttctattggttggtgcaattgggtttctttggacaaaagtagggttttttggatagtagttgtcatttgcttcctagtctttggtgttgttgtagaagtttgtgttttttccctattgtcatttgatgttgttgaagccttactagtagttggaacaatttttcccttatcattctttcatgttgtcccattttttctcttgttatttacctaaccaataaagaagatgataacattttagcaaatggaaatttaaaattaacaacttatggataacaactttggaaggaataaggaaacattacctgagttttttcgacattggcagaaggatcattntcagacatttgtcactgac

SEQ ID NO: 3959 - DNA, 503 bp, Glycine max
  unsure (1)..(503): unsure at all n locations
tgtacgcacatcgttcgcgtgtatgatatccactccacaatgtttgaagtagaggagagcttcaaccctataacgcaacgtggcggacaaaagtgggcagtaaacttgaatggtcatcattgtcaatgcggaaggtattctatgcttcactatccatgttcacacattattgcagcttgtggttacgtgagcatgaactactaccaatatatagatgttgtttatacaaacgagcacatcttanaagcttactccgcacaatggtggcctcttgggaatgaagcagctattcctccttctgatgacgcatggacacttatccctgacccaactacaatntgtgcgaaaggtcggccaaaatcaacaaagataagaaatgagaatggatgggtcgaaccatctgagcaccgaccaanatgtattagatgtggagccaaagggcataacatgcgtcgctgtccaatgcaacctgagcgtggaaagttgtcaaatcgttgattatg

SEQ ID NO: 3960 - DNA, 462 bp, Glycine max
  unsure (1)..(462): unsure at all n locations
atatatatatatatatatatatatatatatatatatatatatatatattgaagttatcaagcgaanataaaatacttaagacttaagagccttctaaacaaaactcttatcgaaatactaaacatacaagccacttgacacttatgggtcatacaaagcgtaaaaataaacgtacataaactaaaatgtgctctcatacatttgaanggacatgctaaactatctcctgctgctagtatcttcaagcaatcaagcttcatcttagaatgttcacctgcgtaaccttaaaaaacatgagactttagacaatgagacacatgtcttagtgactgctcaaaacactatacgatcagcgatatgagtctcttatcctagtgattcttttcttagctctcaggggcttactcactaaaccactaagaacatttcttgccgtatggttacatctatactaacccttag

SEQ ID NO: 3961 - DNA, 363 bp, Glycine max
  unsure (1)..(363): unsure at all n locations
ctcctggtgatttctctgatgtttgtcggaccttaaaaaaggtatattatgtgcatgttagaaatgatgtgacttggccttgccttttgttaataaagctctgacattgtttagatctatatgtttccactcaaatgttgtgtctgtttagacttgggatatatcttgtgttgatgattaggtgatgttgatgagttattnttcttattggcaaaataccctgggtctggtttgttagttttgccactgacatgactttaaaaggattagagcataataattttccatttaaatcttgttactgggacatattttctttaatctcgttgtatctaggtagtgtagagttactccctctattat

SEQ ID NO: 3962 - DNA, 419 bp, Glycine max
  unsure (1)..(419): unsure at all n locations
agctntacagcagaatttagtaatgacccactaacctagaattaaaataacttaatgccattaacctagggaattaaaacaaactaaatggctgagtgtaactgaaattgttggcaaccaaaagtcacccccaacagccaacaagtcaaccaccatttggtctcccaaaaggctgatgcctaggttgccaattgggcccttattacaacttgaactaaagcccttttagttgattaacccaaaacatattgttggtcagccaactttacaaggattgggccattatttagacaaactaaacactctaaaattgaaataaagtggtgtcatttagtcctccatttgggccatgatacaactcacaaccttggacttttctccttgaaacttgngcttgtattcaaatagtatggacagca

SEQ ID NO: 3963 - DNA, 436 bp, Glycine max
  unsure (1)..(436): unsure at all n locations
cttctggtttcaattggagcgtttcgatatatttctggactcaatcggacatcttagtaaaacgttattgtcgttagattntgctcatagcttctgttttcaatttcgagcgtctcgatatatttcgggacttaatcggacgttcgagtaaaaagttattgtcgtttgaatttgctcagagcttcgaaaatcaattttgatcgtctcaatctattacgggactccatctgacatccgagtaaaaagttatttattgtcgtttgaatttgctcagagcttctgttttcaatttcgaccatctcgatatattacgggacttcatcgaacattcgagtaaaaagttattgttggttgaattttctcagagcttctggtttcaatttcgagggtctcgatatattacgggactccattggacattcgaggtaaaattatt

SEQ ID NO: 3964 - DNA, 476 bp, Glycine max
  unsure (1)..(476): unsure at all n locations
agcttattcaacaatggcaaatcacataacaaatttttaagaaactcggcctcactagtagttgtgtctaaagcaataattgttgcttccatgctagaatgcgaaataatagtttgttcagtagatttccatgatactgcaccaccaactaaagtaaagacaaccacttgtcgattttgtttcattagaatcagaaatccaatttgcatcactaaacccctcaattacatcctaatctaccaactgcatatgcaatgtcagacccagagaagtttgtcaaatgcaacaaagaaccaataatttgaggatatttatgtgaaaaaattcctttactcaaacttttctttaacttaatggatgagtcataagaagtagaaacatgtttcacatcaaaataattaaacttcttcaatagcttttcaacataatgtgattgggttaaaaccatgttatcattnttctttataagcttaata

SEQ ID NO: 3965 - DNA, 364 bp, Glycine max
  unsure (1)..(364): unsure at all n locations
ntaacctcattgtctctcatagtctntagatgtgggagccaatccaatccttgtgttcggactctcagccacttatgatagccgccaatgatcccattactgcttcccctaagctctctgtcctttcttcatgccgcatcccatgccttgcgaactccttggagtaccctcgcgttgtggtcactaaaatctcgtgcgatgaaaggcgtgattgatgcaagctccattggagcttgtaggcctaggatcttcttcaccaatggattcctttgcttcttggaagataaatggcagcggaatggagaaggaagagagagaggagacgccacttcaaggagaagatgagtctagaagaagctcacca

SEQ ID NO: 3966 - DNA, 380 bp, Glycine max
agcttatccttttccaccttttcagctaactctattttatccccctgctagcccttgcagtgcttaaatagttcattattttccaatcgagtgcatagcaacttgacaagcacactgctaaccttagacgacaactgatggttcgacttcacagcttcagcgaaggcaacggtggcactggctatcttaaggctctccactctctagatcatgcgagcaatagccctttatttggtgacctccacctccaaggatgccactttgcttagcgcctcttagtgccatagcctattttcttaaaggattgccaaacttcgctgaaaaaagaccttggcagaattcatggcatgctggaccccagctgaccgaatcacattttt

SEQ ID NO: 3967 - DNA, 343 bp, Glycine max
ggacctataatctcagctgcttggggcttctatggagctggatctttagcttaatgaggtccttcaatggtaatattacaccatggagatgcagcggatggcaaatgagaagaggagaggggaggcaccatccactagagaataagccaaggaagaaggagcttcaccaccaagaattgccttggatcagaagcttgaagaggatgctttaatggaggaaaagaaagagggaaggggggagcacgatattgtacgaataaaacagggagagaagtggaactttgaagtgtgtctcataagactttcattcatcacagttacaacaagtgttacacatgtttct

SEQ ID NO: 3968 - DNA, 458 bp, Glycine max
  unsure (1)..(458): unsure at all n locations
agcttggtgggtttgaaagtgtcatgaataanattattaaagttagtattattctttaatcaaattgatgtttctcctccataattcatgtaataaaaattggtattaaaaattctatatatgaatcgaattgttgtagttcagttgacaacaacacacaataaatttatggaagaggatgatttgagtttgattttcacataatacatgtgattaagttccagatcaaggattagtcccataatcgacccaaacaccctaagtacaattgttaaaaaaaaattagtatatattaggagagtaaaattttaatttggattgaaaattaacacacaaattacttatttttggtaaagaataaaatctgatagaattattataaatgatgaagttttcttttttaaacattcataactgattcattatgctgaaatcatatattaccattaaaaaagtag

SEQ ID NO: 3969 - DNA, 458 bp, Glycine max
  unsure (1)..(458): unsure at all n locations
ntaatgctcgtaccattttaatgtgtttatttaagtcaggttaattaagttgtaagtgtcatgctaagccttgtacttgtgtgatttagacttgttattatgaggcgattcacatagtaaaccccaagttcattagtttctccatcaattactgagtgttttatgtgtctgtatttttcgttctgttcacgtctttctccttcttagcttcgctgtgcattttactgaaatgtttcaaacattttcttgcctgccttgttcttcttctgctagcctttngttgttcttcttatttatgtcatctccttcattggtttgttctaccactgtggcatctcctgcgtaacataacacctgtgtttcttgattagttccgatctccttcattgtgcatttttccggtgtgttntaaatagtctccagccactgtgggctgatctcccaatgccatgtcatca

SEQ ID NO: 3970 - DNA, 476 bp, Glycine max
agcttacactccagttcccattcgagtacctaacgggtgtgattctcaaacattaaaaaccagaatacacaatacccttaagctaaccgacaagcaatttttggatgaaatttactaccagcagcctttcacgtatgcaggtaatcaatttcggtttcaatgtatgcaactgaaagatgatgttgatgttaacacaatgttaatgtgtaatcatgaattttttttgttggtccgattgagttattatgtagcattgctagaaccacagacagtattttaaacttacttgaaactactatgacccctactcatgatgtcctgctatattacaatgggaggtggaacatgtcacgccaaaatgagtttgttggttactcgttcacaggagaaaatcccaaaaactttgacattcccaccggatgaacatcccatttgtttataaatatattaaaaagttttagtaaaaaaataaaaat

SEQ ID NO: 3971 - DNA, 377 bp, Glycine max
  unsure (1)..(377): unsure at all n locations
tagcagagaggctcaccaagggtgaaccttgggtttgtcgagccattagaggtccgacgagactcaccaagggcagaccttgggtttggcaagtctttggagattcgacaagactcaccaagggaggacttcgggtttgacgagcctttgttgattcgaccaggaacgcattcgccctgagtttggtgagtctctggggacaaacctcgggtttgacaagcctttgtgaagtcgacgcatacacgaggaaaattataaaactgaagggagagataattttattcgatttgatcatttgagtacaaattcccttcattccccaagtgtggctctntaaaacctctcaagggcaaaaccctgattttctcttttgggac

SEQ ID NO: 3972 - DNA, 460 bp, Glycine max
  unsure (1)..(460): unsure at all n locations
agctngtacaacccaattctttgtccatataagccattactgactctatacaaatcaaacatatttgttgtttgcttgcacaatgactaacttttaatcgtcttccatacggatatacaatctcaacacttaatcttttctctcaaggtgttcaaggtgttttgagaccttttccgaactatacaacaatttacaaaaagtgttttacaaaaaagaatttgaatgaaagtgcatagattcgtgttgatatcttcaaagcttctaatatttataaatctttntcaacaagtgtttgttgtctctaaatagatagatttcttcacttgagcttatgtttgaagattntggtcgttagagcatttaatgcttacattanatgcatgtactttntcatgctaganaatctctcttgtgaacttttgtgtngatcactacaacagaaaatcacttgctttaagtc

SEQ ID NO: 3973 - DNA, 321 bp, Glycine max
tggttggtgcgtgatgggatcacactagcaaagttggtgcatgatttcttgcatacttgataaatattgaatgagtgtccacacacgcacaatcaatacaggtatagtttcttttcatattagatacatttgaggttatttttattcctttatgtgcatgttgaatgagtgtccaaacacgctgatgcaatcctaccccgcaagggcattggatagaagactccaagaagatagggccagagatgcaagagaaggccctacggttctcatgagccttatggtaaatttcgggcccatgggctaagtatgagcccacttatc

SEQ ID NO: 3974 - DNA, 437 bp, Glycine max
  unsure (1)..(437): unsure at all n locations
agctngtaagacaagaaagtgcatctgagatattatatgccctaccactgattgagtaagcctgaagatggcacatttgtggagcaagatttcgttattaaaggacaattaggtcttgccatacaatagatttgacccatcaggcctgtttgaaattatttaacttactgcaatgaatcctagcttggtaaataattcttcaccgactcatcccatatggagaaaagtagcttatggtggtatgcaacctgtttatgatgacaatcatacagatgaatctttccttgaaggaatggtcatgaatgccagtgtttgtaaacgggacatgctaaaggtgatgctggactcggtttccatgtctgaatatttatgcattgttgctcttgttgacttggtctggacttgacacttgcatcaactattgatatatatctctc

SEQ ID NO: 3975 - DNA, 327 bp, Glycine max
  unsure (1)..(327): unsure at all n locations
tgacgcgttcttcgaggaggaggatgagtgcgtgagccttttcggaatgaacgacgacngaagcagtggtgggaggagaatggaggagcgggggtggctgcatgaagaagatcatgggtggttgcaagagaaaggtttggatgatgcatatgaagatgctatatttaaagggatcgacgaggaaagcggagactccggtggcggtggttctgatgaaagctaatttggagtgagagcaggagaggacttctaacctttgagcatgaaggtggatgaggacgacaataaggatgtggttgattcaaagaggtatgtgggcatgatggg

SEQ ID NO: 3976 - DNA, 461 bp, Glycine max
  unsure (1)..(461): unsure at all n locations
aagctntgcataattggagagttctagagagagaaaggtccaagtaccagagagtttgagagaatntgttgtgtgaagatctacagagaccagagctggaagaggaagccgtcctgagagcttgagatgagtttgtaagtgattgtgaggtcctagaggtggaggagattgtcgcaacctacccttttgcgggagggcgacgcgagggcttacgggtgcgtcttccatgggaggaaaatgcgcggagttgccaccaatgtttattgaaaggagaacgttagaaaaaccaaaggaaaccggtcataaagaatattcctgattcgggagttatgtntacgcttgaggaaggtattagcacctctcacgtttattccaaaggacaacagccttagatttagagttgngtgaaatcatgtatcctaaatttttgtctctttntattttttgaggtcgacaaaagc

SEQ ID NO: 3977 - DNA, 347 bp, Glycine max
tcaatctcttaaagaaatgtagtgaaaatcccttagttaactctcttgaactattttctcaaagataaaaacatatcaagagtcaataatgaaaagaacaattaagggtacttataattttagcagacaaaactaatttaatatattatcaaactatgtaatcaattaatttgttaaaatccctcttgtttggtatttctataaacattatgtatggatgaatcatccagttatgaaacattggaccatccagacctaacattgagaggtttagcgacttatctttcccctttctagccatttctatctcaagaggaagtgttggctgccattggttggcctactac

SEQ ID NO: 3978 - DNA, 474 bp, Glycine max
  unsure (1)..(474): unsure at all n locations
agcttcaagaaaacgaaattgaagaattgagttgtaaaagatcattcaaagctcgttgttgaaagtgagaacacaagttgggtatatatagagaaaacaattataatcacctataatcgattaaattggcaatgtaatcgattatctccagagaataattgattagattatctttttaattgattaaagtgttcttccccaaacttggaaaacattcaagaacaatgtaattgattacaatcttgatttaattgattaaagtgtttttgatcacttctgtgaacattttcaagaactatgttatcgattactatatcctcataatcaattaaaccagagacccatgaaaacatacatggtctcaaaagaactgagtaatcgattacgaatatatggtaatngatgaaaccagaactatgatctctctgcaagtttctcaaagaatnttgtaatcaattatagacaatggtaatc

SEQ ID NO: 3979 - DNA, 453 bp, Glycine max
  unsure (1)..(453): unsure at all n locations
aacgganaaaaagaaaccgaaattgaaccaaatattaatgattgccaagaaacaagaagtgaattaaaagtctcagttttggaaacttacccgttgaagaacgaagaacagacgaagaacggtggataacggaggaaaaccttcacgaatttgcttacggaaacatctcggaagcgttacagaagcacctcggcttggattttcttcacggaaacaattttttcacccaaaacagcggttgaagaccgaagaaaacgaagaacgaacgatgaatgtcgaagaacggttgaaaatcttcgcgtaattacccacagaaacgttagggaagcgcctcggcttggattntcttcacggaaacaatnttcctcagcaacttcaagagaatacgacgtgctaagaaggctgaaccctttccttcttcatttcctcccctatttacagcaaaatatggga

SEQ ID NO: 3980 - DNA, 479 bp, Glycine max
  unsure (1)..(479): unsure at all n locations
agctngcctcanattagggctatttaaattgtttcatgaacaggtagctgtgtctccggcaaaaccacctccgaagcccgatccggaggtcgatgatccgctttatctgatgacattgatcatcccagagcttttcttgaggccttatcaggttagatgggatgccaccgtgttcggggtctttaatccagatttccccctctacataaagcacgaatacctctctgaaatcgcacacggtggtcaatgtctcagcatatcagtgttacagttatggattttgtaagtctttatataaaaggcttttaattacctaagttatggctttcaattcataaatatttaactttgacttaacataaacaggcatctcactgaaacatgtatgcgagtggngaattctgatatctatggattcctcgagccacagtccatttagaggtctgggcaatcgcagtttgagtctgaaagttcataaa

SEQ ID NO: 3981 - DNA, 370 bp, Glycine max
  unsure (1)..(370): unsure at all n locations
acactaaatatacacctctcttctaatggaaattcaaacatcaatctgccacataacgtaatagggtggtaaaacaggttgaattgatcaaaccaacccacataatccgccaaaaaatggcagagtatattacgtgattaaattcatcatcccaccttgtataagttgtcaacttaaggagttggaggctaaagagctaacttgctcagtgtgatcaagactataccgatcatgattcggtcaaggaaccaggttgacgggtcagtggttgaattgaacgtgggtcgctagccgaactggtatatattaaatatntaaattttatactaaatatatcatatataaattagttttttcgtatctatatcat

SEQ ID NO: 3982 - DNA, 440 bp, Glycine max
  unsure (1)..(440): unsure at all n locations
agcttgcttaagtgagcataacaacattngaagcctccatgtatatggctcacttaagcggngctaaaaggctcacttaagtgagggtcaatgaatttggacctcaaaattttggctcacttaagcgaggtcagttgagtggacttcgtgggtctttattcctcctctgttccattgagtgagcttcctactagttctccaaaggcacccttcaacaaaatccttcaaaactaaccaaaatgcaaatatcaagaagaaaaagtaacaaaactaaatttctaacttgaaaatgatttttcaaaattcaactaaatgaagtacgaacatatagcccaaatgtataatcagaaatactacaaaaatgcaagtataggtagcaattatcaaacttccttttggaaaaacagtttggataaattcttgaccaacttctgttatat

SEQ ID NO: 3983 - DNA, 424 bp, Glycine max
  unsure (1)..(424): unsure at all n locations
tccactcattagtgcacatctccttcaagaatntagcatatcttggaattntctttatttcatccagcagaggtatgtttacctctacttttctaaatgtttccaagatctccctctccgcctcttccattnttttgttggaaattgctcttggagggaatggaagagggatatgatacttttgtaaatcagaattaccagtggaagattcacctgcatagaaattgttaggtaacttactctttaaatttttgtcatcatctttttctggagtagagtgaggttgggcaggttcatttgcggatgaggaagatgctactagttgaggtccttgacactgctttcccaacctcaatgtaatggcactcacanttttgggattctggacagatngaaaaaagtaatctatcagaattctgggact

SEQ ID NO: 3984 - DNA, 426 bp, Glycine max
  unsure (1)..(426): unsure at all n locations
agcttgcatntggaattgcgaaagccccactccatcattatgattagtacctgacatctcaaacaaacaaatcaaacgtaacaagacaattatagttgctgtttgaatacctcacccactcaagtgtatcacacaattatggcttttctctaatgaaacactcttgccttttaccactctaattccccttgagttcttaggcaattcaagagattatggccacaacaaagaacaattcaccaatatgtgtaagggaaggctagacaaggaaaaggttaaccaagaaaaaggctaacaatgtttttaggcacaaatgaaggaaataaaattcagaatttaggaattcaagtaacaatccttcatgcaaccaatatattaccttaaagagttnntttttnttttaagttcttcaagcatgaaccattc

SEQ ID NO: 3985 - DNA, 415 bp, Glycine max
  unsure (1)..(415): unsure at all n locations
gctcctgtnttagcttttacccgatttactcaactcatttgaagttgaatgtgatgctagtggagttggcattgnggctgttttgatacaaaacaaaaggcctatagcttatttctcggagaaattgggaggagccagattgaactattgcacctatgacaaagagttctatgccattgtgagagctcttgatcattggaatcattanttgcgttctaatcactttatattgcattcagatcatgagtcattgaagtatatcaatgggcagcagaagttgagtccaaggcatgctaaatgggttgaatttcttcaatcttttaatntctcttcaaaatacaaggatggtaagagtaatgtggtggctgatgcactttcaaaganggatgctttaatttcaattctttgaaactcg

SEQ ID NO: 3986 - DNA, 368 bp, Glycine max
  unsure (1)..(368): unsure at all n locations
agcttaatatagggccagggtccgtacgcagtctccaaagatggaaatgatggatgttgctaggtgcactaacattattgcttgtgcacccaacaattttacttaattccgaaaatgcccatatgctttcttcttcctttttaagttgcttttttcagttacgctttgttcttctctttctctgtttcctcttggnttttcattgttgtgagaggtgcacattgccgcttcggtcgaggtgaaagtgttacagaggttcgtcggtggtgattgttgcaatggttggttcggttgttaatggagatacgtcggaggtacaccgttaaattttttntatttacgtaacatatggattaagtattccataa

SEQ ID NO: 3987 - DNA, 461 bp, Glycine max
  unsure (1)..(461): unsure at all n locations
ntgaagaatccactacatgttggttaaaaacacaattattcctcaattntcaaatgcataccatgactgcacaccaaatgaccattcacatatcaggttcatatcatgaggttcccaaaccaaaactctgcaagaagtgtcccttcaaatcgttcagtagcactataaaaaacaacgatgttttctaggagtagcaagctcgccaaatcagtgtttccatctcacagtttaagaacaaatgttgaactgactccacctgctttgagcatgacgagcaaagggaatcttcatgttgatgaatatattcctactcaccaaattgtcttttataggaaggcttttagaggaaggacacaactntgttgggaactntaaggctctaaatgaatgaanatatctccttatgctactcttctncaccaagtagaagtatcacctcatacgtggagtgagtaaaatac

SEQ ID NO: 3988 - DNA, 474 bp, Glycine max
  unsure (1)..(474): unsure at all n locations
agcttctggtgggacatcttgacttgctttccaatctgacattcaccacagattctgccttcttctattttcagattggggatgcctctaacagcacctttgtcaatgattttcttcatgcctcttaagtgcagatgtccaaatctttgatgccatattctgacttcatcttctttggaggatagacatgtggaggagtagctggtttcttgaggtgtccataggtagcagttgtcctttgatctgctgcccttcattagaacttcactcttctcatttgtcaccaagcattatgactntgtgaagtntacattgaatccttcatcacacagctgactgatgctgatcaagtttgcagtcagtcccttcaccagcagtactttgttcagactangaagtccatcatgaactagctntcccattccaatgatctttcctttagagccatctccaaatgtcacataactagtggag

SEQ ID NO: 3989 - DNA, 495 bp, Glycine max
  unsure (1)..(495): unsure at all n locations
ggacctataaaactaagcttccatagtttcttggcttcaccatggacttcgtcatatcatcaataagtgtttnttcagctttagtcaatcgccccgcatatgaatgtccaactaatgacttgaccaattcatgattatgcactccacaaatcaacttcaccatccagccttctcctccaaccactggcttgcaacaaagcttgaagggacacccacatttcctagtcccagtgtctcttctgataaattcttttttcctacacctatactcgtcactcctttcacagccaattaacacaaacgtagtccttcctctactacctgtgtttgtgtccgaccataaaatcaccgccacaaatctgttntcatgagccacggatcgagcccaccacgaaacatcctctcggcactcaaacacctacanaatccacataatnntaagtttctactagtattcattntatttaaaatgtgacanacattaacattataact

SEQ ID NO: 3990 - DNA, 424 bp, Glycine max
agccttgagactgaaaaatatataacagcaccaatgctctagtttgactctctcctctcctctctctgctttagttttgagttttaggcttttcttcttcttttagacactttttcgttttgcaattgcagttgttacttttctttttagcaataaaatttcgttctctattgattaatggaaggctaagtctccagcgttgttttctcttgaggatcaagcacagttctctttgaggttctattattgctattaaaatctgataagtttttcctcttcactaattactctgtatttgttgctattaattcatgcatgcttagtgcttgattaattgtctctgcgcttaatttacgttcatgcttaatgattggttatgattaattggtgtatgtgttgcttaaacacataatgaatgccttat

SEQ ID NO: 3991 - DNA, 371 bp, Glycine max
  unsure (1)..(371): unsure at all n locations
nganatgaggaagtgtggaagggtgagatttcctactnttattcgttgaccacaaagtggtacctggagatatgtcgcgagggtcaagagaccttggggacatcaggtggggtgctattgcccaaaaccaagcttgaccaatcctgacccaacccgggcatagtcagtcagtgagaacctgtgatgtacctaaacaagcgagctcctggcagtcaacagataaaagaacaaagaccacaaagcaagggggtttgtgtggtggctggccagcaatgcatcaggagtgagatttgggatatggcctctggtaatcgattaccaagggtagtaatcgattacaagacttaanagtgaagacaggaagctaagat

SEQ ID NO: 3992 - DNA, 353 bp, Glycine max
  unsure (1)..(353): unsure at all n locations
agctnntgaaagggtctatttttaccttctcgctaagccaatttgctggcttagcgagcgtccgctaagcgtaacactcatggactatgtgcgaggaagactctggaagaagatgagttgtacatgttcgctaagcgcactgcttcatctcactaagcgcaccacttcagttcatccgctaagcgagaaggcacgcactaagccgaaattcactaatgtgtgctaagcagtccataagtgtgctaagcgcacgagcacgaacaaggccacctatttaagcctgaaatcatgatttagagggagagtttggactgggattcagagctntgcatgtctaggggttctagagagag

SEQ ID NO: 3993 - DNA, 452 bp, Glycine max
cttcggctgctcaatagctccaggttgctgcatggaaaggctaaggtctgtatgatggtcagcataggagcacaaaccacagacccttgcaacaggtacagatttctggtttaaggctagctgggttaccaagttaaccaatgcatccagtttgccttcaagcttcttagtttcagatgatgcagctgagtttgtagctacctcatgcactcctctaatgactataacatcatttctggcgctaaactgctgggagttggaagccatcttctcaattaaatttctggcttcagcaggagtcatgtctccaagggctccaccactggcagcatctatcatacttctctccatattactgagtccttcattaaaatattggagaagcaactgctctgaaatctgatggtgagggaaactgacacatagtttttaaatctctcccagattcatac

SEQ ID NO: 3994 - DNA, 352 bp, Glycine max
  unsure (1)..(352): unsure at all n locations
atacttagagtcagctgccgcatgcgagctagcanatcccaagaacctctcactagagagcaactggttatttccaagtctccaccaaatgtctcattcttagctgtgtcctaaacagagggccatgcacgtgtttttaaacccctctcatcccatcattcactgctacccctgcccttaactaaaccctctacatcctttataactgaaccttccctcacaccttccccatgaaacatcacactctctatatctctcttgccttctctcttttcaactcattgaggcattcatcaaacaccttctcaaaatggccaaagttggaagactaacaaagctcaagtcagcaatc

SEQ ID NO: 3995 - DNA, 432 bp, Glycine max
  unsure (1)..(432): unsure at all n locations
ctgatgacaccttatgagcaccacttgaaaccaattagttctatctgccattacatgaaatcgcaaggcagaattgctgtataacatcagcatgtttgctgtcgagaatcttactcacttggtttggatctccagaacttcagattgcatttgaagccacatttggtaggaagaaaatcatggtgaatggtgagattgctgattaagaagttattaatggaagttcgttggacattgcatacaatgggaatcttcatgccaaaagagcagtggatgtgtgtgtatcaacagtttcaatgcggggtactggttttgggacatcaagtntcttgggtaattggtcactactctatcaactctcgcctatttgtggtcgtcatgctctgattattagactcacacaaattggtttctgctgataatatatatgaa

SEQ ID NO: 3996 - DNA, 470 bp, Glycine max
  unsure (1)..(470): unsure at all n locations
agcttagctacacacacctctctaatagctaagttcacctccttgagatgagaagctagagcttagctacacaccccctataatagctaagctcacccccatgacaaaaaacatgaaaatacaaaaaaaaaagtctttactacaaagactactcaaaatgccccgaaatacaaggctaaaaccctatactactagaatggccaaaatacaaggcccaaacgaaggaaaaacctattctaatatttacaaagaagagtggatccaaccttgacccatgggctcaaaaatctaccctaaggttcatgagaaccctaaggccttctttagtaactctagcccaagcctcttggagtcttctatccaatacccttgnggggtaggattgcatcaaatacttaatgttagtcgcttctctcanaagtaagaatcacactctcatcgggttatggttaaagcattccttcacaatc

SEQ ID NO: 3997 - DNA, 403 bp, Glycine max
tcatgctgctcaattgctccagattgctgcatataatggcttaagtctgtatggtggtcggcagaggagcataaaccacagactcttgtgacaggtacaaatttctgattcaaggccagctaggttaccaggttaaccaaggcatctagtttacccttaagcttcttagtttcagatgatgaagatgaattcgtggctacctcatgcactcctctaatgacaatagcatcatttctggcactaaattgttgggagttggaagccatcttctcaattaaattcctggcttcagcaaaggtcatgtctccaagggctccaccactggcagcattcatcatacttctctccatgttactgagtccttcataaaaataatggagaagaagttgctcacaaatctggt

SEQ ID NO: 3998 - DNA, 317 bp, Glycine max
  unsure (1)..(317): unsure at all n locations
agcttgcattaattccaatcttattcctcactgaatgcagaatgaatcactaaatgggggtagaaagctttttgtggacaagcactctaaccttagggttcgtgatcttttgatgcatgtgtatttcaagttgaatggattatagtcttgtcaaaatttggatgtgctaattacatgtggtgcttgagtctaaacacaaacctatancgcattggtaaggctaagtgtttttctttgagagatttctatcaccatgatacattcttaattttgacttgactacttgtccactttgcattttgtgatcatgtngtcat

SEQ ID NO: 3999 - DNA, 337 bp, Glycine max
  unsure (1)..(337): unsure at all n locations
agcttgtggagcttctatggaggctggatctttgagcttcaatgaggtcctttaatggtgattttccaccatggagatgcagcggaagacaaaggagaagaggtgagaggaggcgccatccactanggaataagccatggaagaaggagcttcaccaccaagatgagccttggataagaagcttggaaggatgcttcaatggaggaaaagaaagagggagagaaaganagaggggggagcacgaaatngaaggaataaaagagggagagaagtagaactntgaagtatgtctcacaagactctcattcatcaaagttacaactagtgttacacatgc

SEQ ID NO: 4000 - DNA, 470 bp, Glycine max
  unsure (1)..(470): unsure at all n locations
agctntgacgtgtcgggatcgtatcgagttgacttggaatatccaagtcgtacaaggacattcctgtgtgacaaaaacaattgaaccgcgatatttgtcgctntctcttctccttctctgatgacgagtcagaattcggtgacgagttgcaacttgatgagtttgactttagctttagcttcttcgagagatcaaaatccacaagcattatgtgacctgtttcttggatcatgatgttctctggctttaaatccctatacactactccaaagttgtgcaaatactccaatgctagaaccaattccactgcgtaaaaccttcaccatggaaaataaaaaattgtatcanatcatcataatcattcatacttcaccgntcttgagagtgaggaaaatggactaaattcgttctatttggcacatacaaatcatataaaanaaataatcacacataaatacctataataacac

SEQ ID NO: 4001 - DNA, 447 bp, Glycine max
  unsure (1)..(447): unsure at all n locations
ggtagcatagtctgatggggtggagttcacagtcagagagtgttagtgccttcaaacttcgttagcagatatttattgttttcttttgctgagtatctgaagtaaatgttttatccatggcaggtcattattgtcctgcattgtcaaaagctgttaaaaccatgaagaagggagagaaagtgcttctgacagttaagccacaatgtaagcgccgcataatgttttggcgattagctattactaacattcttcatgaaagtttctttctcgtttctctaatttggagttatgttcgtttctttgtcgggtcatagatggatntggtgagaaggggaagccacaacaaggtgatgaaggtgcagttccaccatatgcaacattgcagattactcttgaattatgttcatggacaactgtttctgaagttactgatgacaagaaggtcat

SEQ ID NO: 4002 - DNA, 477 bp, Glycine max
  unsure (1)..(477): unsure at all n locations
agctntntcctcttaataatgaagagttaggtcccattnttgtgttgggcaacacacccatctttgctaaaggaaacatcaagtccactatcacataattgacttatgctaagcaaattatgtttaagccctttaacaaaaagtacattatcaatgggaggatagggatcaatacttatctttcctactcttgctatctttcccttctaatttccttcgaaagtgactattccaccatgcataggagtcaagcattgaacatatacttttctgatgtcctgtgacgtaagcaaccactatccaggtaccatgattgatgtgttctttttgtggttgaatatatctgcaacataaattattttctaattaggtacccaaattttcttaagtcctctgttgttagttcttaaagcattggacgatccagtctttggtagatgtctacacttagatgtcaggtgtccaacctttccacat

SEQ ID NO: 4003 - DNA, 439 bp, Glycine max
  unsure (1)..(439): unsure at all n locations
ntgatccaacatcaaagacttaataaatgaaagctattctttaagctatgcattaacatctgtttagcataatgcaataactatgtgtcaataagtcatcaacatcaaaattattgtcaatactaagaattgagaaactaatgcaaactcaaagcagaattaaatgtttcccccctaccttttacaaacggcaatcccaagacctacaccacagttaggtcgagttggtccactatgagactgggcaaacctggtaaagagatgcaaataattttaattttcatatacttataattttntnttcacttactcttagcttcatagttcagattgtgttgggtgatcgcttcattactcacatgtacgttctattatntaggattagaattcttgctactaataatagagatcactctaagattacgtatgactaaacatg

SEQ ID NO: 4004 - DNA, 441 bp, Glycine max
  unsure (1)..(441): unsure at all n locations
ccggatccttaagcgactgcggctgcagcttatattgactaatggattcaaagagggtttttctaaaatcgtctntgaacatttgcatttaaagacagtttttccaaaatcgtctttgaacacttgctttcaaagatgatttttataaaatagttgtcattttttcttttatttataaatttaccaccgtattttattctaagacggtttcaaaacaatcgtcttagaataaacgtcgtaaaatattaattttatagtagtgcattaatctaattttttgttacaaataaaattatacttactatattataaaaataaaacatgtgagaaaatganttgataaaaataattgtaaacgaggccatgataaattaccattaactccgctaggagacatgttgcaactccacaagcacctgagtagccattcatcgtctcaac

SEQ ID NO: 4005 - DNA, 500 bp, Glycine max
  unsure (1)..(500): unsure at all n locations
atactaagcttannaccaggccagacactcgtgcatgcagaggcttcttcaagaaaaattccaaaatccctttgcaaatctgatttcaagcttaaataggtggccttgttcgtgctcgtgcacttagtgcagatctggattgcttagcgcgcataagtggattttggcttagcacgcttgttttgcttagcagatgagctgaagcggtgcgcttgatgacctggaatggtgcgcttagcgaacttgacagctcatcctcttctggattcttcctcgcgcttagcaattgaaggttgcgcttagcgaattctcgctaagccagcagcttggcttagcgaaagagtgaaaaataacactttgtcaaagttgcctatttaacctaanattgagaagaaatgattattaaacacacaaaacaaaagtttaaatatctatacctatattaacnaaaatactatagtttacaaacactataattggaaattgatcatatacacagt

SEQ ID NO: 4006 - DNA, 451 bp, Glycine max
atattacacattcaccacgtaatggatttgatataggtataacaattttatatactactataaagtattttaaccataatgcatttataaaagagggtttttgtaaattttaaaaatagatggagtatcctatacaatccaaaacatgcaacaagatatttcatcaatttcatatatatatatatatatatatatatatatatatatatatatatatatatatatatatatatatatatatatatatatatcccactatagtgaattggattcatatatctaaaaaaagagtgagaattttttatctctctctattcacacatacaagaatagaatgcgtgtcttttcattgaatcctcctagttacagagatatatccaagagatatctctgggttattcaccgtgtcacaacacaaaaatggatgagatgttaaacttacgtgtcacag

SEQ ID NO: 4007 - DNA, 429 bp, Glycine max
  unsure (1)..(429): unsure at all n locations
tatagatactgcaattacttggtaagacattgagcctctcttatgatttcactnggatatcctcaactatagttgaagaatagtaatagtgaaggtggagccttgtttaagaggaaccagtttgcttttaaaaaaccttgaatgcgtataaaaaccatcattgtggtggttttcaaacagactttattttcagaaaaatgacattcttaacaataaagatacttttgcttgcattcacaacacttttaagaggtggcagctatcattttattcctaatggatgtgatcaaacattgctccatttttttggtatttaatagttgggtgcaggcaggttaccctatttcaagggtagaacacatcacaagcttaacaagggctacccactgatagaatcaaacccaagactcattggaacatggagctact

SEQ ID NO: 4008 - DNA, 391 bp, Glycine max
  unsure (1)..(391): unsure at all n locations
agctgcaagctcgaagtattattggataattntcctgttccattatagctttgatgtctttagaggttacttcctcgttgacatcttttgtcttgaatggaattgccatgacaggtttattgttactgtctttgatatttggtagttgatattgtgttgtgggaggtaattccgattggattaactcaccatccttcacttgccagtttgttatgacatttgttgttggatcacctatgatgtcttgtttccaagggtaatctatatcctttctgatggcatacacatgaaaccaatcaaagaagaggacattatatttgactctttcgacaaattcgtagaacttgtcttggacttgttttctgtttgtacccttgtaatgttggaaaaa

SEQ ID NO: 4009 - DNA, 459 bp, Glycine max
  unsure (1)..(459): unsure at all n locations
gaaactcaagcctacctatcattgagcccgtgaagtagaatccangaaaagagatcatcagtcaacaccccagcagacccctatacaatattcactcggcccaatgaaggaaaagtggtcagcaatctaattcgtggcctaatagacaaaaccactctaatatggtcaccaccaaactaaccggactaaaaaaccataataattcattgctgttgtcaaactntggaattgacaatttgtacgatgtatccaattcctcatttaaaacaatggagctcaccactattgtcattcaacanatgattaaaatgttacagatccttggtctcttgcatcatctcgagacatacttgtgaagtatatggtgatgtatgttggcttgattatttgtgagttaattttttagcaagttggtattgaaatcgttatatagcaataatgaagagagcactacgttca

SEQ ID NO: 4010 - DNA, 248 bp, Glycine max
cacatagtactctctcactggccagatttggaataaccattggcgactgtctacagatccttagaaattaaagaatcttctgaaaggacaaatatcgacatgcgtgaagtgcaatacatagatatatatatattatgacctctgcaacttgagcgactctactgcaggaccatgatagatgtgtgctttatgtgagagaaatactatgcaactacattcttcttaactggatccttcttctcttaagt

SEQ ID NO: 4011 - DNA, 317 bp, Glycine max
  unsure (1)..(317): unsure at all n locations
nttatcggaagatcattagaggttacgaggcttttgcancttcgttaaccacagggctctgcaaagatgccttcaaatgggttcacgagtctcagactgcattcgaacaactaaaaggcgcagacatggcagcatccggcttggctcttcccaatatcacgctaccctccgccgtcgaaacagatgcgttctccatcaacaaagacaccctatcgcgctcttcagtaaaccctcctgctctcaactgcaaaagagcggcacatatgtccgagaactgcatgcaatcgatggcaccgtccgcaagtggcggcagcact

SEQ ID NO: 4012 - DNA, 459 bp, Glycine max
  unsure (1)..(459): unsure at all n locations
agctnggagaggatgcttcaatggaggaaaggatagagggagagaaagagagaggggggagcacgaaattgaaggaagataaagggagagaagttgaacttttagttgtgtctaacaagactctcattcatcaaagttacaacaagtgttatacacgcttctatttatagactaggtaacttccttgagaagctttcttgaaaaaacttccttgagaagctagagcttagctacacacacccctctaataactaagctcacctccttgagaagcttccttgagaagattcctaaaggagctagagcttagctacacacacctctctaatagctaagctcacctccttgagatgagaagctagagcttagctacacacccncaataatagctaagctcacccccattccaaanaatacatgaaaatacaaaaaanaatgtccctactacaaagactactc

SEQ ID NO: 4013 - DNA, 382 bp, Glycine max
  unsure (1)..(382): unsure at all n locations
tatagagaagaacaatgatgacattgcaggcctttaagaacaatgggttgtaggcagacatttcacactntgctagaataagtgatcctaaagaagggacaaataagagcaatcacaccttccactctaaagtctagtaatagtttcatgccaatagaaaaccaaaaagttttttcaagcattgtgttgttacaaattacaaataaagtattagggatgagaggggtattctataatacctataaccacttaattntagacactagaagaaaaagatatcacaatcttttccaatgaaagaaaatcattcaattaatatgaacatcacntaaattttatagaanaaaatgaagaaaagtatactaattcattntcagtctat

SEQ ID NO: 4014 - DNA, 414 bp, Glycine max
  unsure (1)..(414): unsure at all n locations
agctntgtgttttctcacagataggacatgcatgatgccctttcacactgtatccacttaaatttccatatgctggaaaatcattaatagtacaaaacaccattgtgcgtaacctgaacgtctgctgcacatttgcatcccacacatctaccccttcttcccacaattgtttcaagtcttcgattaatggtgtaagatacacatcaatatcattccctggctgccttggacccgcgatcatcatacacaggataatgtatttacgcaaaatgcacaaccatgggggaaggttgtaaatcatcagtaaaacaggccaggaactgtggttgctacttaagctaccataaggattcattccatcagaagcaagagcaagccttatgttccttggctcatccccaaactctggataca

SEQ ID NO: 4015 - DNA, 340 bp, Glycine max
  unsure (1)..(340): unsure at all n locations
tcattggttntcttgcagcattccattggcacgaaagcagtctttggtcgtgtttgtactcgtaatcacaaggtaggttttgctcaccccaccctcgcagtcttcgccattctgttaacttcccttagttataagttcccttaaactaagcttttaacttccctaagttggtcgcaacctgcatttgatctatttaagaaagctgttgttttgactgtttgaaggttcatataccctgaaactaggttcaggccctttgatttgcactatatcagaggtgagttagcctattagcaattaccctcttgttcttagtgattattatttatgtnntgtgtga

SEQ ID NO: 4016 - DNA, 472 bp, Glycine max
  unsure (1)..(472): unsure at all n locations
agcttagtgcacagtgattntnntgaaaacatatcactgcagcatttggaggatataaaacgaggcactatgctntttggaggaggttggtgaagggcatgctttgaagcaaaaacatccactttgggagcttttcttcttccattttctttcatttcctctgtttcatcttttgtttttgagcttttcatgactatgagagactaaattacccattgttgggggcttggataccaaacactctntgatgtaatgatttttactatccatttaatgttatgtcaatattattgtttcctttctaagtatatttccttgtttatggtttgataatccatttacatgtatgttatagggttntaatcattggaaaatggttttaacctaaaaacttgaaggagcttctaggtaacccatgtctagggattaacggtattatttagccttgtttatggatctttattcttaacac

SEQ ID NO: 4017 - DNA, 389 bp, Glycine max
  unsure (1)..(389): unsure at all n locations
tgtgcatccaataccctgatgaggatgtcccatatgttcttaanactggactgattcatttgcttccaaagtttcatggccttgcaggtgaagacccgcacaaacatttgaaggaatttcgtattgtctgctccaccatgaaacccccagatgtccaagaggaccacatatttctgaaggctttccctcatttnttagaaagagtggcaaaggactggctgtattaccttgctccaaggtccatcacgagctgggataacctgaagagagtattcttagaaaaattttccctgcttccaggaccacagccatcaggaaggatatctcangtattagacaactcagtggagagagcctgtgtgaatactgggagagaattaaatactatg

SEQ ID NO: 4018 - DNA, 470 bp, Glycine max
  unsure (1)..(470): unsure at all n locations
agcttcctcggagccatttcctacgaaggcaaactattggaaagttagttntaccaagagatgctactcttaaaacaaaaatggcatacaacctcttccaataaacacaaacatcaatgtaaatttagagcaaactcatgcacatacttccttatgaacattcactcgcacaagatattcttctacctaaaaaaaatgcacccatgcgcaatcaaagcacctttgttacctagatttatttatgtgtacttccaaagtgtatttactacttacatcacatgcacttgcttggctaaacttacatacatgcatactcaaagcatcttggctaccaaaaattgcacacgtgcacattctggtatttctaatacctatgatatacaaactntgtgatgaatcttggctatctacacaataaggtgctacatgtcatgctttattcaagtttttttactacctaaagccgcatg

SEQ ID NO: 4019 - DNA, 342 bp, Glycine max
  unsure (1)..(342): unsure at all n locations
tgtattatcactcggatcttgactagttataactntctgaataaaatgagtttatcccatggttttattccaaagaccagtgggaatcaagtcactcccgcattttacctctagcatgcattcatttttctttacctactcctcacatttggttgtttaggagaaacaccataactaaacgcgccccaaggcatccctatcgcaccagatccaaatctagaacgatgggtgatcaagaggagtcacaagaacagatgagagctgacatgtcggctttgaaaaagcanatggcttccatgatggaggccatgttaggaatgagacaactcatggagaataatg

SEQ ID NO: 4020 - DNA, 421 bp, Glycine max
agcttcttgagccgatgcgtgtctcttctgaggtatgccttgtatactaatttaggccagataacttcctagctattatttattttaatgatgttttgttgggtgtagtatgccacaaatttgactggaggttcatttgatgaagctcgaatgcttcaaaatgtagaagcatgtgaatggttgaccagtgccttgcgtggtcttggagtgcctaatctagatcctagttatgcaaacatgagagctgtatgttcctttctttacttttctcttaaaaatcatctggtaaaataaaccgatcatgatttggccatttatgaaacaaaattatcaatgagacatagagtgcttgttgtatttattttagacaaatattaatggaaatctttttaaggtgatagatatgaattttcattcatta

SEQ ID NO: 4021 - DNA, 464 bp, Glycine max
  unsure (1)..(464): unsure at all n locations
anngcttgatttcaaatcttttttcattntgaatcaaattggctagtttacgaaaaactttgaaagcatttttttcaagtataataacaaggtccatgtaaatcttgaatagtcatccataattactaaggcataatagtcccctcctatgctcatagttctagaaggaccaaacaagtctaaattcaagagttcaagtggtatagaggttgaaatcatgtttttagatttaagacctcttagaatttccactaaagaatcaagtacaaacactatgcacatacaattccctaattctactcttcccttgaaccctacaagaggaagaacaagagttgaaacccaatcaactcacacaaacccttggtaactctaaccaagatcaaaaacaagaaagaaatcagaattggattgaatgcacctttatgtgtagatcaacatcttcaagctctttgataaatgac

SEQ ID NO: 4022 - DNA, 225 bp, Glycine max
acacttgaatctcagcttctccccaatttctataatagtgtggagaagtgaagtgataaaggttcaccccgaggcacttcttctctttcaattgcttgaaaaaagtgttccgtgaaataattaacggagcgcttcgaacgtttcgtaagaatttccgaagattgaccgtcttggcgttttattcgtcttatcatcttctatctcacaggtagtcctcaaccactt

SEQ ID NO: 4023 - DNA, 354 bp, Glycine max
  unsure (1)..(354): unsure at all n locations
agcttaganatcaagtgatcatcgattccaaaacatanggggagtgaacgcacaatatattatgcatatacattgcttgcttgtatcttgatttcaggacttatattgtcatcatcaaaaagggggagattgtagaagcaaatgactttgatgttttgatgatgctcatgatgatttgatgcaaatgcgcttttcaagtttaaattcaagacaatgattcaagaatacaagacacaacatcaagatgatcactagtattttaggaagggaattcctaattgatatagcaaaaggtttggccaagtaatttaagttaaaaagtgtttttcaagagatttactctctggtaatcga

SEQ ID NO: 4024 - DNA, 407 bp, Glycine max
tctccctcaatttctataaatagggggagaagtgaagtgtattagggttcagccccttaggcacttctctctctttcgaatatgcttgtaaaaattgctttcatgaagaaaattcaagccgagccgcttccgaaacgtttccataacgattgcgtgaggaatttcgcgaatgtttcgaccgttcttcaagattcatcgttcgttcttcattttcttcagtcttcaacgggtaagtacctgaaaccaagcttttcaattcattctatgtacccatggtggtccacatttcgactcatgtatttatattctcgctttcatttactttctatactcacttttgacgtgcttaagccatatatctaagtcatttctcgcttaatgtaaaaataaaataaattgcaccgatc

SEQ ID NO: 4025 - DNA, 481 bp, Glycine max
  unsure (1)..(481): unsure at all n locations
agctntattggcatgcgaccaacttccttatgaagtaagtaaaaagttgaaatctactttaaaatcattgcttaatcaggatatttatacttcattgcctcttatgaaattttaagtatgatatttcaaatacaagaaaattcagcatgtctttctcatatttaatgtagtatatatatcaaagtagaaaagttgcatgcatgcctcattgggcattgttttacatgcatagaaaacaacaacaacatttgttttattcatatttagttntaattgaatttgtcacatataaacaatgaaatataactttaattntaatattatatatttagttaaataaataactttattaaatatttgatgatccccattagaataatttattaataatttaagttnttatatnggatgtgttagggacaaaataacacaagaaattgttgtaattgcanaannaaaaaatatgatatgatatattatt

SEQ ID NO: 4026 - DNA, 495 bp, Glycine max
  unsure (1)..(495): unsure at all n locations
aggagccatcgtctccatgctgcatctgaagatgaagttcttcaccctgacggnggagattgtaatcgttaagtcaaatttagcaagcatgacagtgctatgcagaaagcttaaaggttgcaccttatcctcaccccacagtggctgaaggtactcaagtcataagtgtggacaaagagcctcaaacccgagccctgaccatttaccagataagcctggatgacaaattcaatataggtttgtgtgacgacacttctgatagaggcccaaagcctattgaagagctcatcaagttgtagctcgagcccaaacccaggcagtgtatgctgctcagtagggacctcaccagccatgagcacaagcgcatcactaatgtcctacacagaaacacagacctgctcgcttgatattcatctaacatgccagggatccaccctagcattatcttccacaagcttngccattgtccncaagcaaaaccgatatcacataata

SEQ ID NO: 4027 - DNA, 413 bp, Glycine max
agcttatccttatggcctgcctccggacttcactctccatgccaccccaattcccaagtggggaactggcgcgtgataagccagtcagaagtctataccgctgattcaatgtaattagagcctatagatttccgttctcttttggtttgtgaaacctaccttattaaataaacaaagagatcttggttcatttgttcttgcagtaccaccctttctcatatcattttgcatgttttttggttcttttgtcttgtttggtatagatatgagggtcgattctttgaggatcctaacaacgagggtttgacaatcgatttcgatggagatataagccaaacgataaatgaggaagaggaagaagacgtcttgtcaccgaaattggagaggttgttcgctcaggaagaacgtgaaat

SEQ ID NO: 4028 - DNA, 351 bp, Glycine max
  unsure (1)..(351): unsure at all n locations
tcagctgcttgtgagctttatggggctgatcttgaactttatgaggtcctttaatggtgattntccaccatggagatacagcgaaagacaaaggagaagaggtaagaggcggcgccatccactagggaataagccatggaagaaggagcttcaccaccaagatgagccttggataagaagcttggagaggattcttcaatggaggaaaagaaagatggagagaaagagagaggggggagcacgaaattgaaggaagaaaaagagagagaagttgaactntgagttgtgtctcacaagactctcattcatcanagttacaacaagtgttacacgtgcttctatttatagact

SEQ ID NO: 4029 - DNA, 465 bp, Glycine max
  unsure (1)..(465): unsure at all n locations
gatttatcctttaacaattttttatcaaattagccaaccagctagaacctatagtttgcacctctgcatttcacatcatttgttcacaataacatacttttgattgatgttgctttatttgtgaacaccataatcattntatttcttaatttgattacccgacaataagagaatcagccaaaaccaggaaagcaaccagaatattatgcaataattcaagtcatcaaggtgagtaaccaagtcactggtttacttggtgaccacgtttacaatagatgtcactagtagtttcttcttccctatgccatgacagaatacaattcgtaatagaaataaactcgactttaacagctacactatgactnagaagtttttggtctttatctttctaaattttntgctactatattgggtttatggtctttgtaccaatagcttggtacagtgaaaaacacgatgcactga

SEQ ID NO: 4030 - DNA, 435 bp, Glycine max
  unsure (1)..(435): unsure at all n locations
ctcttcgtaagataaagataacaacagcaaggtctgaattttatggtatcatgagtatctcaaggaaggagacatgtgggatntgaattccaataaacctgtgatgtattacaaatgatcatagctagcttgcttcgggtttgaatgcaaactctgttggtatattacgttaagaatttatatagtactactatttgattcttaattatgtcaaattactctgacaagatgtagaatatgggtacttttgctattaattaatcatgcatttgcaaacatcaaaaagttcatcagcctgttttcgataggttctagtaatatacagaagttaattaagcagactctttcntttcaatgaaatattggtagttgataatgactttggtcttaataacatattcttttntattctattgtggataaatcanacttcat

SEQ ID NO: 4031 - DNA, 456 bp, Glycine max
  unsure (1)..(456): unsure at all n locations
agcttgaagaggatgctntaatggaggaaaagaaagagagaaggggggagcacgaaattgaaagaataaaagagggagagaagtggaactttgaagtgtatctcataagactttcattcatcaaagttacaacaagtgttacacatgcttctatttatagactaggtagcttccttgagaagctttcttaagaaaacttccttgagaagcttctttgagaaaacttccttgagaagctagagtttagctacacacacccatctaaaaactaagctcacctccttgagaagcttccttgagaagctagagcttagctacacacacccttctaataactaagttcacctncttgagaagagaagctagagcttagcttcacacccctataatagctaagctcacccncatgacananaacatganaatacaaaaaanatcctactacaaagactactc

SEQ ID NO: 4032 - DNA, 347 bp, Glycine max
  unsure (1)..(347): unsure at all n locations
nggtgggagtgactagcaccccatagaattggcaaaggcctctgatcaaagccggaaccccggtgccctattggacttctaagggtccattaagtgtctaggaggtgtgatccctgcagattaatatatagtgtctgagatcaattgggtcacttggacactcacctangtcaggatggcatagaccagttggcacttcggcaaggggaggtcggaattatggttgttgggaagaatattgctaagcagcaacatcattcaaatatgtgtaagggtggtcatgctagtacacatgatccgcacccatttccccgccacgctcccggcaaagttctgccccaaaacac

SEQ ID NO: 4033 - DNA, 179 bp, Glycine max
ctgcaagcttcctatagatatgatagagagggttcacatcaataatgtggacttaccatatgcgtaatgcttagtgatgatatgcatcctatacaggctgtatacaggtggccatgtgcatggggctaatgctaaaccaaacgccatgtctttttcatatatgctgtagttgctatatc

SEQ ID NO: 4034 - DNA, 483 bp, Glycine max
  unsure (1)..(483): unsure at all n locations
tggagttgcaatagtgctaaggtttctggttttatttacttcatattgtcgacaattaacttgnggtcctgtcttcatgatttttaagtttaatgtgctaagttgtttcaagtttggtctttggcaagtgtgtacaaagatattcatgacccgctaattaataggaaagattcaacacctataggatatgaagaaacttttagcgtattgctaaattgctgatttcttaatatgatgaaagactaactcaatgatgtctactccaatatcaatgatatagagtcttgggaaattgagggtttttgcttaaaaaaattcaaatactgaaagttntatttccttaatatcttggttctataaagattccaataaacaagaagaaaagagacactcatcttcaaataattatattgtctcttacattgaagaattcannataaaaggtcgattcttcttgttagtcctatcactttatatatgttt

SEQ ID NO: 4035 - DNA, 356 bp, Glycine max
  unsure (1)..(356): unsure at all n locations
agctnttcagcacgggtttggtgcctatatttatctagttctagagttaaattacttataaatatttcacaagtgacttgtttgagttttgctggggtaaacatgttatgaaatgagcttgatttgcgtgtatgatgacgttgtatcaacaatatactgagtatttattcctgtatagtaagatttgaagttatatgagaatgagattatcctattcaaatcgatagatattgcatcgaattgtatgaattgaatatggaattttaagattctaacacgtcatttgtcaacgttttgtgtctttgatcgtggcgatatgattcccatggatattgtatatgagaaagtggttgaat

SEQ ID NO: 4036 - DNA, 345 bp, Glycine max
  unsure (1)..(345): unsure at all n locations
cggacctataaaactaagcttgatacttcgaagatacgtattagtgaagtatcagtgcatgatcaatagnatggtacccttctcgactatagacaccaaccgttccttccagccagcaggcacgtcgtagacatactcagcagagtccttcttgctggagttgccaccatacccgccgtagtttgcggcgctggcggcggtgccgtantagacttggtagggagactcttgtgctaaagagggtgctggtgcggtggttaaaatggtggcgatggcggcggcggcagttaaggttgctaagggttgtttgaagggtagaagaggcttgcatgatggggagggtgg

SEQ ID NO: 4037 - DNA, 481 bp, Glycine max
  unsure (1)..(481): unsure at all n locations
agcttggaagaatgcttcaatggaggattagatatagggagagaaagagagaggngggagcacganattgaaggaataaaagagggagataagtggaactntgaagtatgtctcataagactctcattcatcaaagttacaacaagtgttacacatgcttctatttatagactaggtagcttccttgagaagctntcttgagaaaaattccttgagaagcttctttgagaaaacttccttgagaagctagagcttagctacacacacccctctcataactaagctcacctcctttagaagcttccttaagaagattcctaaagaagctagagcttagctatacatacctctctaatagctaagctcacctccttgagatgagaagctagaacttagctacacacccnctataatagctaatctcacccncatgacaaanaaacatganaatacaaaaaaaagtccttactacanagactac

SEQ ID NO: 4038 - DNA, 380 bp, Glycine max
  unsure (1)..(380): unsure at all n locations
agtttaataattcattattgttgtcacttactccttctgttaaggattagtttttcctcatgttggacaagtggcctcaataacttaagaaggggtgaattaatttcccattaacaaagttttaacccccttctaaatgatagactcagaatgcagaagaagaagcagcaatcaattgaataatattctttaaacatgcaagacaaaattgattgcaataaaatataagagataagggaagagagaaatgcaaactcgatttatactggtttggccactccccatgcctacgtccagtcctcaagcaacccacttgagatttccactctctntgaaaactctnttacaaagtctgaaccacacgggacaacccttccctt

SEQ ID NO: 4039 - DNA, 475 bp, Glycine max
  unsure (1)..(475): unsure at all n locations
ctgcagctggacttntatgtttgngaacctctccttcctcaggtgtacccaaacccaatcacctggttcaagcacgactttctttctgcttttgttggttntccttgcatagcttgcatttttgttttcaatttgagccttcacttgcttatgcaacttcttcacatacttagctttagcctctgcgtccttatgcttaaacatagcaatgttagtcataggcaacaaatcaagaggtgtcaaaggattaaatccatacactatctcaaatggtgaacaattagttgtgctatggacagcccgattataggcaaactaaacatgaggcaaacatgcttcccaagatttaagattnttctttaaaatagtcctaagtagtatgcctaaagtcctattgactacctcagtttgaccatcagtntgtgggtgacaagtagtagaaaacaacaatntagtaccaatcttacccctcaag

SEQ ID NO: 4040 - DNA, 412 bp, Glycine max
  unsure (1)..(412): unsure at all n locations
gtgacctataaatctcagcttcttagaaggttcgttcctaatttctctacaattgcatcttctctcaatgagctggtgaagaagaatgtggcatttacctgnggtgaaaaacaagagcaagtctttgctttgctcanagaaaagcttactaaggcacctgttctagctcttcctgactnttctaaaacttttgagctagaatgtgatgcctctggagtgggagttggagctgtattgttacaaggtgggcaccctattgcttattttagtgaaaaacttcatagtgccaccctcaactaccccacctatgataaagagctntatgccttaataagagccctccaaacttgggaacattaccttgtttccaaggaattngtcattcatagtgatcatcaatcacttaagtaca

SEQ ID NO: 4041 - DNA, 446 bp, Glycine max
  unsure (1)..(446): unsure at all n locations
agctngtagaacaccccanaggataatctgttgttgatgcaaagtgggtgttaagaaacaagctggaagaaataggtaaggatgtgaggaacaagcctaggcttgtggccaaaggttactcacaacaggaaggtatagattatactaaaacttttgctcttgttgctcatctaagggcgatactcattttactatcctttgctactcatcatggtatgatgttgtatcaaatggatgtaaactgtgtgttcctcaatggacttatcaaggaagaagtctatgtgaaacaaccccctgcgtttgagagttctatctatcctcatcatgttttcaaacttaataaagctntgtgtggtttaaagcaagcttcttgagctcggtatgaaaagttaagttcgtttttaattgaaaatggctttataagaggaaaggtaaatactatgcta

SEQ ID NO: 4042 - DNA, 357 bp, Glycine max
ccttgagccaaatcctgactcaccatataccttgacccagtgtgagaatgccaatccttaccctcggaagcaaaaaaaaggagagagagagagagagaagagaaggaaaatttccgatcaaaggaaaaaggagaaggaaaatttccaatcaaaggaaaaaggaaaggaaattcccaatcaaagagtgggggaaagcaaaaagaaaagaaagaaaattcccaatcaaagaatgggagaaagaacaaaagagagaagttaaaaagaagaaatctccttgtcagagaaaccagaagatatgtgccgagaggtccttggaccacacaatatctgaacaatacagaattgtcaccaaatgaa

SEQ ID NO: 4043 - DNA, 419 bp, Glycine max
  unsure (1)..(419): unsure at all n locations
agctngacgccaganacttcaccttcaccgttgttctcaacgttgctacccccacgaaccagaggcaacgccgtacgataaagagaaaatgagaagtaaagctttttgaatatggacgtaataagctttttcgaaaaaaaaatgacatttttaaggaagaaagatggtaggagcaattttggcatttaataggtttgctgggtgcaccagcaaaaatgctaggtgcacctagcaacactctacttctaactcaagagcctcaccctccataaaaaaaaaacacctagatgtggtaaagaattggattaagacatcatacacttcctctagtatgtattataaggtttaattaattgattaactagaatccaatttttaattaatttaatgtagaacgtcaaattttttctaaattcata

SEQ ID NO: 4044 - DNA, 127 bp, Glycine max
ccttcaggtagctcattgactccagatggctgcacattatgacttttgtcaacccattggcaagtgttccaaactagtcacacgttgtaaacatctcacaagtccgagagtcgaattcacaaggact

SEQ ID NO: 4045 - DNA, 386 bp, Glycine max
  unsure (1)..(386): unsure at all n locations
agcttgcatgaccaagtttcttatgtcatagcctataattntcttttacagataacaagcatgataccttntaatctgatagttctcccaacttggtcttatagaggttaccctttctcttagtagagaagtgcaaagacctatccttgttctggatgatacactcatctttgttaaaggaaacaacatatccattgtcacataactgacctatgtgttagtcgatgaatacgactaacttttgtgtaataaatatgtgcaaatngtatctaactcctcccatttatggnntatttgtagtattggaattactttctgttaaatataggtaataagtacttagtactcctattttgtgtatttaataatcatttcctttcaatttc

SEQ ID NO: 4046 - DNA, 317 bp, Glycine max
actcagctagcaagagaatagcatatttgtgactcgcattaagtatcccatcccattgacacaagcaacaacttaagtgttaaatatatttatttctattttctcatttaacaatcaaatacaaaatagaacttctttgtcaccaaaaagctaacagttacatctcaaagcattcacactgcaaattcatcactgtacacagcagccgttctggctgatttctaatttttcagcaatctaagaaacaaactccgaccctgtctaggaaacatggatactaacatagtctctagtctctacccatgtcaaacaaatac

SEQ ID NO: 4047 - DNA, 402 bp, Glycine max
  unsure (1)..(402): unsure at all n locations
agcttctntggagaaacttccttgagaagctatatcttagctacacacacccctctcataactaagctcacctccttgagaagcttccttaagaagattcgtaaagaagctagagcttagctacacatacctctctaatagctaagctcacctccttgagatgagaagctagagcttagctacacaccccctataatagctaagctcaccctcatgacaaanaacatgangataaaaaaaaaaaagtccttattacaaagacaactcaaaatgccccgaaatacaagggctaaaccctatactactagaatggccaaaatacaaggccttgatgaaggaaaaacctattctaatattttcaaagataagcgggctcatacttagcccatgggctcgaaatct

SEQ ID NO: 4048 - DNA, 370 bp, Glycine max
  unsure (1)..(370): unsure at all n locations
atgatgatacatgatttgngacttgtatgtattgatttgggcaagattggatgagaggaagtgtgattntcgaaatctgcacttatgcagaatttttgctttgaaattgtgcagcagaattttgcacaagtgcagaaaaatgcttatgtgtggttggctgtggaaagtctagtgcagaatgagttctggatgtttgctagtagatcccaacggtcaaaatgtaggcttatgcactatagacttccagtaaaattttggagtcgaaccaacggttaacgaattggatcgaaggaattgttactgtggtctttacgtgagaaaagctgtgattntggttgatgtgttaagcagagttttctgcctttgctct

SEQ ID NO: 4049 - DNA, 409 bp, Glycine max
agcttcacaagtgagagaaccacaccagtgtgtatgaaaagtcatgaagaaaataaatccaagcaaggcacattgtttagaaataacaagttcatggggcatgcaagcgtgcctcttgtgtcacaaccagctgagaaagaaagccttcttgtggaatctaacgatgatgacgacgatgatgacacagaaaccgaggaccaagacgttgaaggaggaagaaccgttgcttagaacaatgacaggggaaagggtccacctattattggtggagaaagttcaaaaacagatggtgatgaaggaccagatgtggataagaaggctgatgagttcattgctaatagaattgagtcaatcaagaggagtataaggagtgctagatactcttcatggtaataatattgtagatgga

SEQ ID NO: 4050 - DNA, 465 bp, Glycine max
  unsure (1)..(465): unsure at all n locations
tgtaaggattctaccgaaatcattgtgattgaaaggaaatgataatttaatgtaaatatgatgctaggacaacaaatggttgtcattttgagatgattaatacactggcttagtacttcaatttattctttagaaccaataaggagactgagtattttaaagtaaaaatacagaggacttctatattttggaaacatgaatgttgaaacaccgtggacatagcatggtcatgatgaatggcattgcttttgtaacatgttgaaattgtaggtactgggtggaaaactgaaaagagacaatatactttattttaccaataggactctatataattgttatattgcgataataaatcactaatgttatnttccaatttgtactaatattctagatcaattagtagtgtgatactatgaattaatgcacactgaagcccaatatcactcctaacataacactactatc

SEQ ID NO: 4051 - DNA, 163 bp, Glycine max
agcttacctggattgttgaaagtgttgcgatatgaagtagatccatggcactacaggaatgtgagcaaaatgcagatgaatgcaaagagtgagaaagatgctttgtaagagtgaaatggtaactgcctaaggcaattgtgccttattatttttagcagttttg

SEQ ID NO: 4052 - DNA, 450 bp, Glycine max
  unsure (1)..(450): unsure at all n locations
tcgaagggaagagagagaccagtcacgagcacatagcatgtgtcttgttagaggagttagctgcttgctcaaggtccaagagaagcttgtctcaacgtttatgcgagacaaagaccaacatgttagccatcgttagcaagtaccaagaagaattaaatctagccacagcccacgagcacaaagtgacagaagagtatgcccgagtgtacgcgaaaaaggaggctagaggaagggtgatcgggagtcaagaacatccccgattgctagccaaggccaaagaaatggcggacacctactccgcccccgaggagatccatggacttctcagctattgtcagcatatgatagacataatggcccatataattagaaaccgctaggaaatntgtatggtcactcagatcttgactagttataaactntctgaataaaatgaggttatcccacatt

SEQ ID NO: 4053 - DNA, 462 bp, Glycine max
  unsure (1)..(462): unsure at all n locations
agctggtaggattatggggtacccatcacatgtggtactaggtggcggtcggtgcgatggtgcacaacaagtttttccacatccacaatgcgcgcataaacccaccatcccctgttgcccacctccaactgagctcacgtactcccacgtagcccatatcctcgtttctctcaacaccgggtccccatcaatcctcccaagcttccacaatatccaagcaaaacaacattcacacagcacaagctatcacagccaagcaaaacagagcaaaggcagaaaactctgccaaaacaccaaccaaaaatcacagcttttcccactcaaagaccccagtaacaattccttcgatccaattcgtanaccgttggatcgactccaaaattttactggaagtctatagtgcataagcctacattttgaccgttgggatctactagcaaacatccagaactcattctacat

SEQ ID NO: 4054 - DNA, 464 bp, Glycine max
  unsure (1)..(464): unsure at all n locations
ggccgcccagctcgcccaggcgagcaaagttgcttcctctttaagcaacattcttctggagggcccaagtgggcctggtttctatttacaccccctttttactaaatgcaccccccttttctattttttttgtaattctttttccgtaacattacgaaactttatgaatttcgtaacgatacttattttccttccgcaaggttacgaatccttacggattatgtatttactcttttttggctttcaaagaagttacggaaactcacggattgcgcaaaaacacctcttttcgatttccgccacattacggaatttcacggattacgcaagcctgcttccttttggattattgagacgtctcgggacttcatntattgcatgtcatcaagtaataatccccggacgaaattanggtatgatagttgcccctctttacttgcctctcatcggagataagaggaaag

SEQ ID NO: 4055 - DNA, 52 bp, Glycine max
atttatcaggttaggaagccacaaaagaatgtaaaactcccaataatagaaa

SEQ ID NO: 4056 - DNA, 416 bp, Glycine max
  unsure (1)..(416): unsure at all n locations
ngagagcatgttgaagttgttcctttggcagttctcagttctactactttccatcaccgccccctccaccaacccatttgcccctgcagcctgtgattgcatatggcgccttctacttcgtttgatgatgatgaagttatatagggctaatgccatggctgcaatccccaccactactagcccatagtatagcatggttgtgctggatttatccgaggaagagagtgaaggagggggtgacactatgaaggggccttggaaatcacccatttctgggattttgggtgagggggagaggaaattaagacaagaacaagttgggttggggaataatcagaatatgttgttgacaactagacatcaatcaaagtaaatctcatctattagctatggcctctggttatacaattatagac

SEQ ID NO: 4057 - DNA, 308 bp, Glycine max
ggtagcaaattcgaacgacaataacatttcactcttaagttctattgagtcccgtaatatatcgagacgctcgaactttaaaaccgaagctcgtagcatattctaacgacaatgacatttcactcggaagtcctattgagtcctcgaatatatcgagacgctcgatgtttaaaatcgaagctcgtaggaaatactgacgacaatgactgtacactcggaagtcctgatgagtgccgtgatatatcgagagcactcgaaatgtaaaacctgagctctcagatactgctaacgacaatgacttttcactc

SEQ ID NO: 4058 - DNA, 160 bp, Glycine max
agctcgctctaaatgtttattgatggtagtattgaggggaggagcgcgcatggcacattggcttaaaaacacacatccatggggcatgcctgcctgccctttgtgtcacatccagctgagaaagaaagctctctttgggaatctaacgatgatgaccacc

SEQ ID NO: 4059 - DNA, 254 bp, Glycine max
cgtattcttggtatattccataaggagatggtgggtactgttgtgttgtattgcaaacctcaaggaatacaagttgagggtgtaaagtctccatggagtcaagtctatctttgttgtcaatgattaatcaactggtgatgatgatgtttgatggttgaatcatgatgttgatgattgcttgactaatgatgatgatgaggtttggcgattgaattcttatgtgatggtcttcgaattaatgttattatcagatg

SEQ ID NO: 4060 - DNA, 340 bp, Glycine max
agcttgtctcagcgtttatgcgagacagagactcaacatgttagctatcatcgccaagtacgaagaagagttaggtctagccacggcccacgagcatagaatcgcggatgagtatgctcaagtatatgcggaaaaagaggctagaggaagggtgatcgactctttacaccaagaggcaaccatgtggatggatcggtttgctcttaccttgaatgggagtcaagaacttccccgattgttagcaaaggccaaggcgatggcagacacctactccacccccgaagagattcatgggcttctcggctattgtcagcatatgatagaactaatggcccacata

SEQ ID NO: 4061 - DNA, 438 bp, Glycine max
tccttgagaaaattcctaaagaagctagagcttagctacacacacctctctaatagctaagctcacctccttgagatgagaagctagagcttagctacacaccccctataatagctaagctcacccccatgacaaaatacatgaaaatacaaaaaagtccctactacaaagactactcaaaatgcctcgaaatacaaggctaaaaccctatactactagaatggccgaaatacaaggcctaaacaaaggtaaaatctattctaatatttacaaagataagcaggctcatacttagcccatgggctcgaaatctaccttaaggctcatgagaaccctagggccttcccttggatctctggcccaatctacttggagtcttctatccaatgcccttgcgggatatgattgtatcattcctccctccttctcattctctct

SEQ ID NO: 4062 - DNA, 290 bp, Glycine max
agcttctttgatggtttctccatttgaagggattatttgaattttcaatcggttcaaatgaaagagaatgaaaaaagatgaagtttgggctttgtggtgagtgatttgggcaagaaatgagtgagatatggcagaaaggagaattgggaacgagggttttcgaaaaagtgagaagttgcagatttctgattttgaattttgaatatataggagcagagacgcgttgtaatcgattacagaatttggtaatcaattacaccttacttaactgcctgtaatcgattacacta

SEQ ID NO: 4063 - DNA, 449 bp, Glycine max
  unsure (1)..(449): unsure at all n locations
ctgtctcagcgtntatgcgagacggagaccaacattctatctatcatcgccaagtgccaagaagagttatgtctatccactgcccacgagcatagaatcgcggatgagtatgctcaagtatatgcggaaaaagaggctagaggaagggtgatcgactctttacaccaagaggcatccatgtggatggaccggtttgctcttaccttgaacgggagtcaagaacttccccgcttgtgagccaaggccaaggcgatggcagacacctactccacccccgaagagattcatgggcttctcggctatcgtcagcatatgatagactcaatggcccacataattagaaatcgttaagaaacttgtatggtctctcanaccttgactggatacaacttcctctttgaaataaaataagttggtcctatgtttctactccaaaaagctagtgcaaa

SEQ ID NO: 4064 - DNA, 252 bp, Glycine max
agcttgagtatatgaagtgttgaagggtgattcttcctgcttttattgttgaccacagagtggtacctggagatatgtcgtgggggtcaggagaccttggggacgtcaggtggggtgctattgcccaaaaccaagcttgaccaatcccgacccaacccgggcatagtcggtcagtgagaacctgtgatgtacctaaacaggcgagctcctggcagtcaacagataaaaggaacaaagaccacaaagcaagga

SEQ ID NO: 4065 - DNA, 381 bp, Glycine max
tgtgcgaatcaaatcactcctgcatttcatctctaccatgtatttttctttctttacccactcctcacgtttggttttttagggaaaaacaccataactaaacgcgccacaagacatccctatcgcaccagatccaaatctagaacgatgggtgatcaagaggagacacaggaacagatgaaagccgacatgtcggctctgaaagaacaaatggcttccatgatggaagccatgttagggatgaggcagctcatggaaaagaatgtggccaccgctgccgctgtcagttcggctgccgaagcagacccaactctcttagcaactgcgcaccatccttcctcaaacatagtaggacgcggaagggacacactggggcacgat

SEQ ID NO: 4066 - DNA, 371 bp, Glycine max
  unsure (1)..(371): unsure at all n locations
agcttgtattttatacctcgatcagtcatctttcctggccgacgccgactgtcattnttttcgatcaatatcggtgaataatatttttttgccgaggtgggctaatgttttcctggccgaatgaatgggaacatgccagtttcggccgaaacgaaacatcggttgagctcgcacgaaaaaacctagccgacctacattgtaagttttttatgcaacaccgaaacaagaaaacttcccctgccgtaggaaaaaacattatgggccagcgagcgttattttaaaataaaaaattgcgcaatgtcggctgaaaaatatcagtcggtgccatttcacgaccgatgtcggntattgagttttctattctatccctg

SEQ ID NO: 4067 - DNA, 462 bp, Glycine max
  unsure (1)..(462): unsure at all n locations
ctcagcttaacatcagaccacttcagggtgctggaactacttcatatggacttgatggggcctatgcaagttgaaagccttggaggaaagaggtatgcctatgttgttgtggatgatttctccagatttacctgggtcaactttatcagagagaaatcagacacctttgaagtattcaaagagttgagtctaagacttcaaagagaaaaagactgtgtcatcaagagaattaggagtgaccatggcagagagnttgaaaacagcaagtttactgaattctgcacatctgaaggcatcactcatgagttctctgcagccattacaccacaacaaaatggcatagttgaaaggaanaacatgactnntgcagaagctgctanggtcatgcttcatgccaaagaacttccctataatctctgggctgaagccatgaacacagcatgctatatncacaacagagtc

SEQ ID NO: 4068 - DNA, 449 bp, Glycine max
  unsure (1)..(449): unsure at all n locations
agctntataattatgtataaatcctaaacattttcatgaaataattttaaaagaaanatgaacaagaccaacttgtaatagaaagcataaggcataaaattaaagagaaaagtttagagatactaggttgcctcctaggagtgcttctttaacgtctttagtcggatgcatggttatggctgaggcttcgccatctcatccttcataattctttccttcgatcgtgagcaaatctgatcgtggatttagcacctgttggcatttgctctaatgccttgaaaaagagaatgttaacatgcaaatgtttaaaatgctttgaaatgctcgtatcgcatttcctatttgcccctaggtctactcaaggctcacgcgtggtgcctatcataacccaaatgactcttcattttttgcatcacttttagagatgataagatgcagtcgtatgcatg

SEQ ID NO: 4069 - DNA, 401 bp, Glycine max
  unsure (1)..(401): unsure at all n locations
tatntagaggacaacttattatcatgcacagcctgcgagagttggctcacaacaggccaatcatacctatggagcattttcttgagcaagtagcttggcctgaagctcaacctccattggtgagacccaatgaagctgctcctcctgagcctgcaccggcacgggttgaaccaatgctagctgagccacgatctctagtgnggaatccacttccttctcttgagcttgaagtaagttccccatcttcacctctgagtattatcttcgatgcgtcaacggatgaaactgcttgcccttctgagatacccgcttgaggaaacagctaatccccctgattccccagttggaggaattgccgatctttctgattcgtcatctgcagaagttgtggctctcactga

SEQ ID NO: 4070 - DNA, 263 bp, Glycine max
  unsure (1)..(263): unsure at all n locations
agcttcaagatcaagaattaagattcaagactttataatcaagagatgacttaatcaagaaaagtatgaaaaggttttttcaaaaactgaatagcacatggttttttctcaaaacatgtttaccaaagagtttntactctctggtaatcgattaccaaattgttgtaatcgattaccaatagcaaaaaggatttgaaaaagttttcaaatgaatttccaacgttccaattgattgcaaaatgttgtaatcaatataatgtttt

SEQ ID NO: 4071 - DNA, 457 bp, Glycine max
  unsure (1)..(457): unsure at all n locations
agctttatgaaatattacacatctaaacattattatatttaaaacataactttttagaatcaattaataacaacattcaactcacataaaaaggacatttcatttacaagcatcgtaaataaaaaaatcaagtaatcgatatcgtaactcaaccattaaatatcatcatcataaattggtcgatcaaacatcaccatgcataccaatcataaacaccaaagacaaacactactccatggagatttgacaccatatgagaggtcccccataagttttatcccttaatatagnctctttctctctctaaccattcaaggagtctctttggttgaccatatggagaattgtgatttgtcagaatagatgagtataggtggtgacttacctcaattagatcttaacctttagagaaagtcactcattcatccactctacaggctcattcgacgttagtcct

SEQ ID NO: 4072 - DNA, 400 bp, Glycine max
  unsure (1)..(400): unsure at all n locations
tcctacacttgatggctttttatcaacttatactaanggatcacatccaaatagcttagcaaaaggtgtattaatcgcgttattaacatatactaaatgcctttcaacaagatctgctcatcgttatctgctcaaatttgtacatatacacttcattgtgagtctcagagaaataaataagcgcgtttctatgttaaatgttatatcatataaaaaaatcaatattttatctatcctattatgttattctgattcactatctctagataagcgttgatgacttattgttgataacaaaccacacgaaattattttcacgtgatctaaatgtccttggataaaacaatatgacaatctaattcttaaacaaataatggttggtaccatgttatactatgca

SEQ ID NO: 4073 - DNA, 157 bp, Glycine max
  unsure (1)..(157): unsure at all n locations
agcttataaggctctttattataccaagcttgtttattaangagaaagttttaaaaaagctgactctaccatttaattaaacaggtcagttagaccagactttatgaaggtcatgtcataagttcctgaagaccggcctgacctattttccctattt

SEQ ID NO: 4074 - DNA, 521 bp, Glycine max
  unsure (1)..(521): unsure at all n locations
ctcgacannnatgtgagcctggacttgcannacgtgagcatagaacaccgagcctccagggataggagagaatgttatgtgggctgtttgtactgtctcgctgnctttgagtttagcgcatgtcagtttgtctcacaattcacagttcctagaccttgttttcttttggtatanagattatattctctagataaccttcgtcctaagataactaatcacgaatgacaaaattcttcctataaactcttagtgcagcttcttggctcgaactaataacaacggattaagtcgcaacaacttctggcgtatagatccccgtgctaaatgatctacacgttttctcgacaagacttgtctacttataatagctttcatatatgattataaaggaaatactcttctaaattataaagctcgttacctatcaattcacatacttattcttcaatgaccttggtaatacatggcgggctggcacctatgttccgtctccctgcatntcaacaacgtgattctccacc

SEQ ID NO: 4075 - DNA, 251 bp, Glycine max
  unsure (1)..(251): unsure at all n locations
agcttataagaacaaatttttcttaatcatttcctaatatgcatgngaatnaagacgcatgaactagaatcaagccaaggctattgtgcaagcaatcaatggggcgaaacacaccagatgattataatgactgatggcacaaattttcacaaaggcaaaattatggctttaaaattgagctctcaaaactatcatgacctgtccataaaaattcaggatatcaagtcacaaaatgtccacatcgtttattt

SEQ ID NO: 4076 - DNA, 345 bp, Glycine max
ctattcaagacaaagaaatttaagatattcaagatgtatgttctagacagtccctagagtcttaggaagggtatattaaataagaagggaattcctattaaagagcaaaaggttggccaacaaatttaagttaaaatgtctttttcaagagatttactctctggtaatcgattaccagaggatgtaatcgattaccagtggccaaaaatgatttacaacagctattaaaacttgaattcaaaatttgcattgtgtaatcgattacacatatatggttactgattaccagcaggtattgaactgtttaattccaatattaagcttgttatcgatcacacacatact

SEQ ID NO: 4077 - DNA, 369 bp, Glycine max
  unsure (1)..(369): unsure at all n locations
agcttcaggttgctcattgactccaaattgttgctatattgacaaagatctgtatggngatctgcaaaagaacatagaccacagactcttgcaacatgtgcagatttctcattcatggcaaactgagttactaggttgaccaaggcatcaagttttccctcaagctnttattttcagtagatgaagatgaatctgtggccacctcatggactcctctaaggacaatagcatcatttcttgcactgaattgttgggagttggaagccatcttcttaatcaaattcctagcctcagtaggggtcatatcaccaagggctccaccactggcagcatcaatcatactcctctccatgttgctaagttcctcat

SEQ ID NO: 4078 - DNA, 451 bp, Glycine max
tcactccatcactctccttgatatttaattcctgtagtaatgtgttcaaccagacagcttgacaaacactcattgcagctgcaccatacatgaatatgtaacctgttgtactctttctgtcatctctgtctcctccccaatctgcatcaatatatcccattaattcctctgagatgctattgtctttatttggaaataaaattccagcattgatggtcccttttatgaaccttagaatcctcttggcagctacgagatgaggaattctgggtcctatcgtatatctacttaccagtccaacagcaaattccatatcacgtctcgaatgacacaagtacctgagagaaccaacaatctgtgtgaactcagttgcatcgactttgtcttcctttccctcctgttcaagtacaagacctgcctccgctggtgttgctgcttgaatacattcaac

SEQ ID NO: 4079 - DNA, 380 bp, Glycine max
agcttgatgcgagagatttatggcgcacgctttcaagcaagcaacttgtattgttgctacaaggcatataaattttcatcattgcaagttgcaaccattttgaccaaaaaccaataataagctttcgaccaaaagaagaaagaagaacccatttatcatcgttggaaaaaatcccagatctcaaaaaatggaattttcgcagagtcacagggtagagatgataagcatggcagttgctcttgttgccattgttggtggcaccgcttactattactacgtcaccaagaagccaaaaggttttgcttttggtcttttttttctggtttggattttttttcattgccaccaataaatagattcctttcgaaaggagttgagtt

SEQ ID NO: 4080 - DNA, 442 bp, Glycine max
tagaaactgaattgcgctctcataattaccaaatcggacacttgattctgaaataatgtgtgatgcaagtgattatgcactacgagcagtttttggtcaaaggaaaaataaaattgttcatgtcatacactatgcaagtaaggttttaaatgaatctcaaattaacaatgccacaattgagaaagaatttcttgaagtagtgtatgcttaggaaaactttagattttatttgataggatctaaagttgtggtttttactgatcatgctgctataagatatatgttggttaaagctgattgtgaaccccgacttatctgttggattttattgttgcaggaatttgatttggacatttaggatgacaatggaagtgaatatactgtggctgatcatctttctaggctaactattgatgatgtgacttcacaatgaccttatatt

SEQ ID NO: 4081 - DNA, 386 bp, Glycine max
  unsure (1)..(386): unsure at all n locations
tatggnaanagcnnggcancgacannaaagggcccatactctgcaacaacaaccgggaaagcaganccggaggaagctaatcccagcaaccggggcaccacttgntgattcttatacactttataagacagtgacatattaattactattctattaattgaaaaatactataatctcatccaatactaagaccatgcactacaaaatgttcttgacaaacctacaatagcctgtggtcataagcatctatcgaactaccaaatatgggtccccctacgattanaagtttgacctgaaatgggatgaccatactagttattactaaaactgcaagctacaatccataatagaactttactcacctggatacaccaccacctgggaac

SEQ ID NO: 4082 - DNA, 374 bp, Glycine max
  unsure (1)..(374): unsure at all n locations
ctatattaatttatgcagattattttcttaatttattatttgactaangcatgaatatattcttgcttgtattcttgagtgaatgactaattattaactgagtccaatatgtcaaagcatttttagacacacaggccattcaagtcgaacccactaggacacactttgcttcactcttggacaagggtcttctgcaaattctaatatggtattgaagcctgtattcaacataagatctgaagactaaagaaaagagactggcccagaacaattgacaagccctaatgtataaagggggtcggaccaaaattgactcaggcctgtaatactcaaggagcatccaaatgtcttatcatcagatgttggttactctg

SEQ ID NO: 4083 - DNA, 407 bp, Glycine max
  unsure (1)..(407): unsure at all n locations
agcttctactttaagagatggcctataggattaatgatggatcatcaaaggaaaggaaggagaaaatcacaaggagctgaattggagcacgtttaaaattgttgaacaacacgcctcggcttagcatgcgctgtcaggcttagcacgagctgtctggcttagtccaaaaatatgaggactcaagtgtaaaaaaagttaaaaaaattacattcaaaatttagtagccctctctcctagtgtgtgcttattggtttcttttaatacttccatttttttttgcataattgcagtggtttatactcagccaaaaaaaataacaacattagagaagaattttttttaagncttatcttcctaacttgttttcnttggcattttttgagttgcccttctttttgagctttact

SEQ ID NO: 4084 - DNA, 399 bp, Glycine max
  unsure (1)..(399): unsure at all n locations
ggcacaacanngtaactaatttgtgttttacaaaatgaagttactaactaactaactcttactagtatatagagtgactactcagaaggaagcgatgggtcttcattaggctcatctaatctacctaattaaactaattacacaaaacaaaacccaaacttgaagcccaattattcaagtacaaaggttctgacttccaagctcaaattgactctcaaaatggcagaattggccaaagcttattgctgacaaaattgaagatctctgtcttaacttcaaagagactacaattttcagatttttgtcacactctccatttggagttctatagtattctctaggtcttgcacaaggcaggtatatcacgtaagcacaaaatctgaaaataagttacaattc

SEQ ID NO: 4085 - DNA, 311 bp, Glycine max
  unsure (1)..(311): unsure at all n locations
ctaagcttctttcggaccttgaacaagcaatcaactcctctntcagattcatgctatgtgctcgcgactggtccctgtgttcccttcgcaacttgagttcattattgctaccccatagagctccgcgaaatttgttccggccatactcttccttgcgagccctcttggtctcttgttcaagggctctcgcggtaattgcatnttctatccgtaacccggcgcactcctttcgaacgtgtgtagcagccaacttgaacttcttcttggcgagtgatgccttttctaactcgctcttgagagattggacatct

SEQ ID NO: 4086 - DNA, 226 bp, Glycine max
aactgcgaaactgttatactccagcatcttacgtttttgtcataaccactcacattttgcttcacatttcagaaacggagtaagataactaatcaaatgagcggagcttgccacatttgaaagtctgatgctctgttctaatcttataccatattaagagtccctaggtaatacttggaatatatgagatgctaatacaattctacaggactcactaagcacgaca

SEQ ID NO: 4087 - DNA, 197 bp, Glycine max
taagcttgagcctcaagacagtggtgcgggtcttcctgcgcctttctattttcttctccccatgcagaagagctgcgactgtactctctctgacgctttctttcaccatcccacacgtgaggtctttctaatcccgcttcctgtgtttatgataaattaaaacttgttttggttatgtttacctatattccatttta

SEQ ID NO: 4088 - DNA, 412 bp, Glycine max
  unsure (1)..(412): unsure at all n locations
atcgacgcagctgcagcttaggctgctcaatgctcaggntgatantggaagcatatgcttttatggggcacaaagagccaaaccacagaccctngaacaggtcagattttggttaaggccgctgggtaccaagttaaccaatgcatccaatttgcttcaagcttttagtttcagatgatgcatctgagtttgagctacctcaccactcctctaatgactatacatcatttctggcgcaaactgctgggagtggaagccatcttttaattaaatttctggcttagtaggatcatgtctgcagggctcaccactggcacattatcatactttctcatatactaagccttataaaatattgaaaaacactgcctgaatctgatgggagggcactgcacataatttttaatctctc

SEQ ID NO: 4089 - DNA, 266 bp, Glycine max
  unsure (1)..(266): unsure at all n locations
ctccaggttgctgcatggaacggctttgtttctttgcggtcancacaggagcacaaaccacatacccttgctacacgtacagatttctgattcaaggccatctgggttaccaagtggaccaacgcatccagtttgcgttcaagctccttagttacatatgatgcagatgggtatgtagctacctgtcataccctaatttcggtcggggactcttcgttgatgacatgtgaccaatctctggtccatgtgaggtgcttggcacccat

SEQ ID NO: 4090 - DNA, 278 bp, Glycine max
  unsure (1)..(278): unsure at all n locations
gcttctacttatgtggcagggcgggctctctcatcttcttgtcttctacgcgaactnngaccattgttcttccttcccgcgacgcttcttttcgtgtccgcctgagtgggcttatagcctaaaccatacttcccacgatttccttgggtatttatcatgctagttatgccgccgctgtttttttctatacccatcccgggttcataactcgtccccaacataactcgggccatcattaccgctgcatctgacacacaacgctgcccaaagacggagtc

SEQ ID NO: 4091 - DNA, 452 bp, Glycine max
  unsure (1)..(452): unsure at all n locations
ctgcagctaccgactaaatttggaagtcaccttttataatggggtttatcttctagagacatggattaattgctactgcattataaattcctcttttggacatgcagataacaagagctagggagattcaacataattaagagagagagagagaaacaagaggcagtttcttgaattttctttggttgatcgacatgttaaagtgacaggtgcagttaaataaatacaaagttgtagttgttgattattagtattttttatatatgcatgaacatatatactattttcttataatcttaattattaatggtttaatccataattactattttgtaattttcatctgaatntaacttatttctggagtnaattagagtaaaatatttaaattagtcctgaaaaaacgcacgaacacttttatttttcttaaaagaaaaagctatataatgcag

SEQ ID NO: 4092 - DNA, 410 bp, Glycine max
  unsure (1)..(410): unsure at all n locations
actaagctntataacgtgcgggttcgggagacaaaagtcaagcgtccgttattgctattatatattccgagtactctggatttggtacgaccatgctctcctgatttccagctgggaaattggcgagtggaggaacgcccccgcatttacgcaacaagcataatgtaaacctttacggttttaaaagctctatagttgggcctaggctctagagattttccttttgtttaggctttgtgtcttcttgttttgaatatataatacaaggatcttgcttcatctgttccttggctctacccattctcattcatttgcatgtttacttctttttctgaaacggcagatccgatgacgagtcccccgaatgtactaatacctgggacccgcctatcgacttcgagctagagatg

SEQ ID NO: 4093 - DNA, 245 bp, Glycine max
  unsure (1)..(245): unsure at all n locations
agcttgcgaatgtaattttataacaaacaactcngtgtttgcacttccacattttaaaagcaaactcattcgaccaggagcctgtggaagatgcccaaagaaaattgtgatagtagggtacatcagatgttatgcgctcatgcaaacttcctaagattctttttgaatccagggtagcctttggtatataaattcttttgggatcagcccatttaacccactttatcaagctttagcgggatcga

SEQ ID NO: 4094 - DNA, 451 bp, Glycine max
  unsure (1)..(451): unsure at all n locations
tctntgtgatgctgatatccaactcanatgtttctgcaatttttaaaaaagaaaagctacaattgatgagtcatgagtcaaatgccactaagagaaataacatacctcacattccttagaccccaccaaaatgtgcaacattagagacgagcaattgccactctgaagacaactccaataaaataggaattagaatatattcaacacaactgctatctcatctcacaaactcttctctagtgtcaaaatatatcatgaaaagaaagcatcaatccttttctcgcaacaaattatcaaaactttctaatactaattactaattgaccaaatgcctacctctaattatacccaacacttgtcaatgtcattctaaagatattattaaaaacgaaaaaattaaatagataactatntttggaaaataataattataaattcatataagttatca

SEQ ID NO: 4095 - DNA, 139 bp, Glycine max
tacatacctcaaaatgctccgtcacactatgaataacgatacacatcacgacagacggtaccctgccaccatcagcacaagcattctgtcgtgttccaaacaagggtgtccgccctacgaaagttcctgtggcctatgg

SEQ ID NO: 4096 - DNA, 233 bp, Glycine max
tctcccaagcgcaccactccacgagtgagcgtgaggaagaatctggacaaatgatgaatcgtgcatgctcacggagtgaaggggcattccgcttaacacaccgcttaagtccatctgctgagtgaaaaaaacgcatgctcttccaaaattcactattgcgcgcttagcggctcagatttgtattaagcgcgcaagcactaaccaagccccctatttaagccttgaatcagatt

SEQ ID NO: 4097 - DNA, 384 bp, Glycine max
  unsure (1)..(384): unsure at all n locations
ggcctcaaagagatctatgaaggataaagcggttgttgtatcttttccgctcccgaatatgacagccaccgctntatgagcgctgaacaccatcagcgctttgaggccatcaagggatggtcatttctctgggagcgacgcgtccagctcagggacgaccagtataccgatttccaggaagagatagtctgccggcggtgggcatcactggtcacccccatggccaagttcgatccagacatagtcctcgaattttatgccaatgcttgtccaacagatgagggcgtgcgagatatgagaccctgcgtgaagggtcaaaggatcccgttcgtgcagatgctatccgccatctcctgtgatatccttctatgcttgaagagggtc

SEQ ID NO: 4098 - DNA, 302 bp, Glycine max
atattcgactgacaacatctgagaaaggtatactcctagtgctttatgctccgattattgttctgtcaatactcttctgatcacagagattttatatatgatatgaggctattacggagacgtacatgaattacatgatctgggaaattttctcatgaagaataccgggtagttggggtctgagatctgtctgtagttatggcttgagcttatagagaaaccattatattcttgtcttttcctgtgttatcagccttaatacccggctattttttaatatacgtgagatttattggtcagct

SEQ ID NO: 4099 - DNA, 196 bp, Glycine max
  unsure (1)..(196): unsure at all n locations
agcttgcnaaaggaattgttatgtctttcttaggggggcaggataaccctcatcaattctgtcccaacagccctccctatctaccttctctcttttttcagaattcctaaaaaagtgatacataaggtagtttctattcagaggaactttttgtgggggggtggttctttagctgatcgaataccaatagtgacct

SEQ ID NO: 4100 - DNA, 485 bp, Glycine max
  unsure (1)..(485): unsure at all n locations
nttgacctagtacctcggacacgcgacacatnaacactaagctgcgggcagatgtcactctagtcaaaantnctgttatatatgtttatacagaagcatgactctaggcttgaggaaaccattataatggaaggaaatcgctgtgcagtgatccagaagatgctcgcacccgagtataaagatcctgcgagtgtgactatccctcggtcataggagaagttaatgtgggacaaactcttatagacttggcagctgctaacgatttgatgccactctccatgagcagaagatcgggagagctggaaataatgcccactcgaatgacctcactatcagttgaccgctctatacctgatcattggacgagagatcaagtgtgagtcccctaaagttttatctttgcgacccacttattggtttggacttcaattaatacagcgatatgttgtaatcagtatttgactccgtacaactattgtaaggtc

SEQ ID NO: 4101 - DNA, 421 bp, Glycine max
  unsure (1)..(421): unsure at all n locations
agcttaactctttgtgctagctnttatatgtatttcattagngggcgcttgntgatggnaccatatcttgaatattgctctgtaacactgttaaaattaatcatgttcaagttttcaaataatgtgtaggttggaagccaatttaactggcgtgttgcattctgggttgaggcaattttgatgcttccttttcccattttgggttttgtaataaagcctttgcaattggaaggtgaccattttcttctgtttgatgtgtttcaaaatagcctcaatntttttaatccctatcatagtaatgcattatttggtaatatattatatattttcttatgaattttttaggaaacatattttcttatgatatttttgcaatttactgggagaaatattgtccttcaatattatcttcgtaatatca

SEQ ID NO: 4102 - DNA, 126 bp, Glycine max
tatgttgatcccatatggttggagcattctcgcattcatcttgaccctgactggtctccctatgatcttacttagtgagagagacctggcaaacccattgtgtggtgtgtcctgttatgtactcct

SEQ ID NO: 4103 - DNA, 220 bp, Glycine max
agcttgtcaagcccttgagcctggtcaagagtagtttaagctgcttctgtcaagttgtttgggctgaacatgcttttgtaggctagttttgacgcgttaggtgagggaagcctctatatttgacaactctgccctttttttttaccgttggagagtgcattgaagacaaacgttacacaatggagtgggcacatacaagagacgtggtgcgtgggtgagt

SEQ ID NO: 4104 - DNA, 363 bp, Glycine max
  unsure (1)..(363): unsure at all n locations
ttagctctngatacaggttctatcctatccaattnttttctttgtaatttgtctcacgttcgtgttttgtccttgttctgttatttgtgttcttgtttttgtcttgttgagatcttgtttttgttcttgttcttgtttgtgttcttgatttcgttcttgttcttgtccttgttacgttcttgttcttgttcttgttcttgtttctttcagattctgtgtcaaaaaaaatgtttgaattctgtttggggacaatttggctttctagaagaatttatgggtttagggtttagtaggctcttgaatctattttcctatctgcctattgaacaaattgcctaaattatcctagacaaatttgaaaag

SEQ ID NO: 4105 - DNA, 402 bp, Glycine max
  unsure (1)..(402): unsure at all n locations
gctgagaatggttttttttttaacacattattggttagtgcgcatttaattttatttgngtccccacaagaaaagtttagaaacattgagagaatcacaggtctttgttttcgatgatcaagtcagaaataccagggaatgtgcctttatgctttcttcaagaattcatcaccaaatttgtgaatacaacgacttccctaaaggtatggtagagtagaatcacataaacaaagtggacttatcacttgtcccaagcattataagtatgtcaatagaaaaatttccaccatatatatcttggtatatgtggcctagtgcatctgacatttagtttaaaatactaaattttcgccatatatcctagatgtgcaatgcaatgttcatcaaaatgaaattcacatg

SEQ ID NO: 4106 - DNA, 446 bp, Glycine max
  unsure (1)..(446): unsure at all n locations
ntagcaccaagagaatncctttggatagaagcctacaaagtaatcttcttttttggaagagaacgagagggggagagatagagaaaaaaagtggcgtgaagaattgactgaataaagagagagatgttgaacttgaagtgtgtctcataaggttctcattcatcatagtgacaacaagtgttacacatgtttgtatttatatgcctacgtagcttccttgagaagctttcttgggaagcaagtgttacacccctccagctgacctcacccccatgccaaaaaacatgatggaagaaagcttccttgggaggcgagtgttacacccttccaatttctaggctcacccccctaaatacatgatagtacaataaagtccctactacanagactactaaaaatgccctgatatacaacgtgtaaaccctatactactagggtaaccttaa

SEQ ID NO: 4107 - DNA, 186 bp, Glycine max
aatgggttttatatatgctaacctgatcatcgtgctgtgataaatgccattaaaaaaactacggctatcgaatagggtgagaatgatggataatcccatgctgtgactgtccatgctatacagtcaaggttgctaccaacccatacaatgtcattactcacgcaaaactagccttgttcttaccca

SEQ ID NO: 4108 - DNA, 267 bp, Glycine max
  unsure (1)..(267): unsure at all n locations
attcctttgtatcaagacacttctatctctattatcanatcataagaattgctggattacaggtgcacactaaccagtggcggatcaaatcttttttagtacggacaaaaaatattttagcatttactaaaacaaaaaattatataatcgttattaataatggtcataaaaaatataatatagtcaaatctaagggttgggtcatattagtttctatttattctcttttattgtgttacaactatttacattcatttcaataaaaaa

SEQ ID NO: 4109 - DNA, 411 bp, Glycine max
  unsure (1)..(411): unsure at all n locations
agcttctccccaatttctataaaggggtgatgtgaagtagaaaagggttcatccccttaggcacttctctctctctcgaaatagctgaggaaaatgagttccgtgaagaaaatccaagccgaggcgcttccgtaacgtttctgtaacatttccatgagtaattacgcgaagattctcgaccttttttcaagattcgtcgttcgttcttcgttttcttcagtcttcaacgggtaagtacctcaaaccaagcttttcaattcattctatgtacccgtagtggtccacattntgtttcatggtatttttattctcgttttcatttactttttatacccccttttgacgtgcttaagccatttatttaagcatttctcgcttaatctaaaaataaaataaattttcaccgatcgt

SEQ ID NO: 4110 - DNA, 458 bp, Glycine max
  unsure (1)..(458): unsure at all n locations
tgactccagattgctgcaaagaaagactattatctgcattgtgatctgcagaagaacatataccacagactttatcaacaggtgcaaatttctgattcatggcaagctgagttactatgttgaccaagcgcatcaatagttttctcctcaatgctttcttattttccagctgatgaagatgaatttgtggccaccacatggactcctctaaggacaataacatcatttcttgcactgaattgatgggagttggaagccatcttcttaatcaaattcctatcctcaacatgagtcatatcaccaagggctccaccactggcagcattaatcatactcctctccatgttgctaagttccttatagaaatattgaagaaggagttgctcataaatctggtggcgagggcaactngcacatcattatcttgaatctttcgcagatctcatacaagctcctct

SEQ ID NO: 4111 - DNA, 508 bp, Glycine max
  unsure (1)..(508): unsure at all n locations
tgacgtctggngttgtactcgacctgcatnacgtagacataaacaccacctctcagcatgactgctggataaagcgatgaattctgtttcttgctctacaatcaagcgacacctggagacttactcctcttcctcctcataagaccgccattgggtgtagatggatatacaagatcaaacatagagcagatggttccatagaaaggtacaaggcacgtctcgtatcaaagggctacacgcaaatggaggggctcgactatcttgacaccttctctccagtggcaaagctaaccacagttcgtctcttccttgctcttgttgcccttaatcagtggcatctataacaacttggatgtaataacgcctttctccgtgcgagttagatgaaaaagtttatatgcatgtcccgcctggattatcggttcccaactctcaacatgtatgtcgtttgcagggttacttatcggactcaaactatcgagtcgttaatggtctacatactatcgcg

SEQ ID NO: 4112 - DNA, 418 bp, Glycine max
agcttcataagcaagtcttcaacaagtggtatcttatcacaagagcttcaagtatgtgctccttaaacctccactaattatcagctttactttctcctccattgttgtttcttcgtttctctccatgtatctcctcacgtgtcttgtgctgaatgttgttaacataattttttagaagttccaccgattaagcttgctatagaagctagatttgattttctatggttcaaattccttggtcttgttcttgacccatgaattgtgttgagtttacgttcctttgagttttatatcgtcaatttttttggctgaaacctaaaccataatattcttaccaaagcattaaatgagaagaaaacctctaaaatctagaatgacatattcacctattgatagtttgcataaaagtcatgtctat

SEQ ID NO: 4113 - DNA, 295 bp, Glycine max
atgaggtcatttcttcattcatcttcgaagagaaagtcgaggatctctgtatattccataaggtctttgggagtaagattagtgtccttggattatacgttgatgatattctgctcgcaacttatgataatggtatgctatttgaggtgaaacaatttctctcgaataactctgctatgaaggatatgggagaggcatcttatgtcataggcatcaagatccatttatagagatctcgaggaatgctatgcttgtctcaagaaacctatttcaccaagttttagagagagttaca

SEQ ID NO: 4114 - DNA, 301 bp, Glycine max
  unsure (1)..(301): unsure at all n locations
agcttctagccaaatggtcttaccgngaattatattttttgatatgcccattgagccctgtatccctttccttgctttgaagctcactacaagccttaaatgacaaaccatgatatcaccatatccttaatgaatttttgagccttggaactgttctgggaataagtgtgtggggattgttttcgcttcattggataacttgatttgctggctctgctccatgaagtatatggggccatactcgttgtacatagcatatgtggcaaatgttggacaagctgaatgaattgttgttcttccc

SEQ ID NO: 4115 - DNA, 387 bp, Glycine max
tggacaatcatcttatgggagattcccagtgtgtctagctctatttggcgtcatagaaccccgacgcccacaaaggacattatcgaggagcagtacttaaagacatcatccttcacccattcgtaaccagcaacgacgggaggagacgagggtgctctaacactatggctacacctgttgcgaggtgaaaccataacttctccaccatcactccttcccgtatccatcaaaatgaaagaaggaagggcggttgtgacaagaacaggctctttgaccatatgagcattaaaaggccctacccttcatatggtcgatagcttcctttgccaacatgacatatatccatcaacctttcaaaggatgaggaccaactatcgaagcttcatg

SEQ ID NO: 4116 - DNA, 204 bp, Glycine max
cacatctttttatgcggttctagaatggctatcaaacgcctatatatatgagacgtcgagacaagaacttgctcaaagtttttcagaacaaaatggtgctatactctaataaagcaaaaacggtttatccattgacaaattacttggcccaaatacttgtgattcaataaggaactatttgagtgctgacatggctcaatctat

SEQ ID NO: 4117 - DNA, 173 bp, Glycine max
taagcttgagccaatcaaaacaataactattactttttgtttgttttagtcccgcaacatatcgagacgctcgaaattgaatgttgaacttttgagctaattctaacgacaataacattcttctcagatgtctggttgagtaccgtggtatatagagacgctcgaaattgtat

SEQ ID NO: 4118 - DNA, 168 bp, Glycine max
acacgcgagctattatcgccaagtaccaagaagagctaggtctagccgcgggccacgagcataggattgcgggcgaatatgcccaagtatacgcggaataagaggctagaggaagggtgatcgactccttaacccaaaggctaccatgtggatggatcgggcagtacg

SEQ ID NO: 4119 - DNA, 357 bp, Glycine max
  unsure (1)..(357): unsure at all n locations
tctggtacatataggcctcatctttaagtgtttgttgtctctcaacagatagaattcttcacttgttctttgtttgatagaaaatggtcgttggatcatttattgcttgcattaaatgcatgtcttttcttcatgcaaagagtagactctttgttgctagcgtcttgaacactacacaggaaatggccttccttttgtcagagtaagtctatgtagcagagctcttcttntgatggtgattgagaaattttagattttgacttcatttatccttcataggattcaatagatcataggggaatgtttatgcaaaataggtcccaaacacaaaatattaaatgaagtcttaaatgtcat

SEQ ID NO: 4120 - DNA, 418 bp, Glycine max
  unsure (1)..(418): unsure at all n locations
agcttattctatatagaatcacacagatatctgattaaaagattaaacttacttgaatggttcattcacatgatctcctgacaagtgtgagcttccaccaatggaattctgcagataattaatatagatggttatcccccttccactctcccaaatatctttttgtgacaagtgaaaacaacacttttcagaataaaataatgtcttaccgcccaagtaaacaaaaggctgactttagctctttccttaccagtgttcaccaactaccaaagaaacaagtaatttttttaataagcctgagaatatatattacttcgcatcanaacactgaaattaaatattggataatatgaaaagaatgcacaatatggaaactctanggtatattaagttcttcacccactttgcttaatggaat

SEQ ID NO: 4121 - DNA, 440 bp, Glycine max
  unsure (1)..(440): unsure at all n locations
tgtgccgaaacactctagggtggggtgctatgtatgccattttggctntagntcagtgatagaagcaatgttcaatgactgccaactggtgctgttgcctttcaagggtgaccagtttttcatggccaaggatttggaggcaagggtagaggtgaataagggtgatgaagatgggttctttcacaaagaggatatattggaggcattgaaaactatcattgtgaaggatagcaaagaaccagggaagcacacaagagaaaaccacatgaaatggtgcaagtttttgtcaaataaggaaattcagaacanattcatcacaggtcttgctgcccagttgaagtccatggcttagctaggattcggatttcttggactagaagctattatttaaaatctaaatcttcacattttcttagtgtgactcttaattccgatgggaa

SEQ ID NO: 4122 - DNA, 356 bp, Glycine max
  unsure (1)..(356): unsure at all n locations
agcttgcctgcagccaacataaaaccaaagattgctataagacaatttagaataacaaatttaactaaccaaccatattatataattccacaagtaataatcaactgctatctaaacacatactctntgggatgctgggccattgctcgaacagattttttatggtttgtaagagttgacattgttttacctgaatgaaaatgattgcatcatgtgtcagattgagcatataatcactacacagacaagcaagaagataggaaaaaataaaaccataaattaccatatctaaggtcccacatcttgatggtagtgtcatgagaaacctgtacaactaggggatcctgtaacaaaat

SEQ ID NO: 4123 - DNA, 478 bp, Glycine max
  unsure (1)..(478): unsure at all n locations
gacacttgaatctaagcttataataagagcggaaatcaaacaatgtttaaccactcatagatattagtacataacaatgagaatgcttaacaaccataaggcataagcaaaaaagtttcatgatcaggattgattttggatgaaaaacatgatgtgattatgaagaagttttttgctagttgttattctgttttagtttgttgttgttacagcttggtttgtttttaataagtcctagtctgtaggatttagttgcttttgaattattccaatgaatcatgcagttattcatgagatattttcttgtattctgtttagatntgtaaaggctatataatagcctctttgaattcaataaacatagcaatcagttntgcaagagtttgaataattgcatacctttattatcttcaaactggtatcagagcccccactgggcctgatacatacatctaagccgcagcttatcttatagaag

SEQ ID NO: 4124 - DNA, 449 bp, Glycine max
  unsure (1)..(449): unsure at all n locations
agctntacagcagattntagtaatgacccactatcctagaattaaaataacttattgccattaacctagggaattaaaacaaactaaatggctgagtgtaactgaaattgttggcaaccaaaagtcacccccaacagccaacaagtcagccaccatttggtctcccaaaaggctgatgcctaggttgccaattgggcccttattacaacttgaactaaagcccttttagttgattaacccaaaacatatttttggtcagccaactttacaaggattgggccattatttagacaaactaaacactctaaaattgaaataaagtggtgtcatttagtcctccatttgggccatgatacaaatcacaaccttggacagcacttgttgaagagcttccttggctttccttgctctagcccttgtcataggtcctccaagtccttcaagtggat

SEQ ID NO: 4125 - DNA, 469 bp, Glycine max
ctggcattggaatggcgaaagccccactccatcattaggattattacctgacatctcaaacaaacaaatcaaacgtaacaagacaattatagttgctgtttgaatacctcacccactcaagtgtatcacacaattatggcttttctctaatgaaacactcttgccttttaccactctaattccccttgagttcttaggcaattcaagagattatggccacaacaaagaacaattcaccaatatgtgtaaggtaaggctagacaaggaaaaggttaaccaagaaaaaggctaacaatgtttttaggcacaaatgaaggaaataaaattcagaatttaggaattcaagtaacaatccttcatgcaaccaatatattaccttaaagagattttttttttaaaagttcttcaagcattgaaccattcagcccaattttttttttttttttaaatttgcttatacgaaattctg

SEQ ID NO: 4126 - DNA, 451 bp, Glycine max
  unsure (1)..(451): unsure at all n locations
agcttcttttanacatatggcagtaacacagtttctaagaactacttcttttatgaactttgcatttaccatagaacaaattgaacacaaaaataacatgtgccatccaacatactgaaattttctagttgtgactatgagtctcatcacaattctgagcgcaatatgaagaaaatgactttttctcatcttctatagaaggtttaaaaccattctaagatcccagtcatttttaacatgcatatatttcgcatacacagtgtattaagatttgttgtgtcaatgtcatgtattgttatgatatatcaaagaaagatttgataagcacaatataactctctttggaaaatctatccttcagatttgagagctatatatccttgccaaagtacgattcaagagactgaatacttcttactaactgaaactcatcgaaatctgttcccttcta

SEQ ID NO: 4127 - DNA, 442 bp, Glycine max
  unsure (1)..(442): unsure at all n locations
tctctcctctcaattccaacatggtggagtcttaagtgtgtgtttctccctagtcttatttgttcccctcgctccatctttttcctctcctcacttcatctttttcctagtgggctttgatttctccatgtctgcaagtgacagttcttctacattttctggtagaatcattcgtcgttaccaccatggaagacgtacagctattctaactgcaagaaaaaggagaaacccaagaagaaaactaagtttctaatccttcttctgtcacaagagaatcaatgatagtgactaatttgaactttcaaattgaagcattgcagaagaaaatgagaaatttagcaaacattgtgttgttaggtttttcaattntaattntaatgttagttntaggggaaatatatnttaggaaaaatttgtagtaacatctctggatattataagt

SEQ ID NO: 4128 - DNA, 438 bp, Glycine max
  unsure (1)..(438): unsure at all n locations
agcttgtaatcgattacacatatactgtaatttattaccagagcagattttcagaaaatattctcaacagtcacatctttttatgtggttcttgaatggctatcaaaggcctatatatatgtgacttgagacaggaatttgctaagagtttttcagaacaaaaaggtcttatcctcttataaagcaaaatcgttttatcctcttacaaattccttggccaaattacttgtgattcaataaggaattatttgagtgctcaaattgttcaatctatctctttcaagagagatttcttcttttcttcttcttcattttgaaaagggattaagagaccgagggtctcttgttgtgaaagaattctaaacacanaggagggttgtccttgtgtgtttagaacttgtaaaagggaattacaagatagtggaactctcaagcgtg

SEQ ID NO: 4129 - DNA, 452 bp, Glycine max
gaagaagaagaagttcaaagagattcaatgtcttgtttaggattgtatgaaataagtgttcaagattattgaaatgaaaaacaaagccttgcttttatagactcttcatgtctggtcaagacaaccatttagaagagttataacttttagaaaaacttaaaaccaatttgaaaaagtcaaaaaccttttgaagagttacatcttttgatttattcagaaacaatcactggtaatcgattaccaaatccgtgtaatcaattacacaaggcttttatgtgaaaggatgtgactcttcacatgtgaatttgaatatcaacgttcaaaggcactggtgatcgattaccaaaacattataatcgattacagctgtttgaaatttattggaacgctgtaaactcaatatgaaaactctttcgaaacaattttggtactggtaattgattacaacaatc

SEQ ID NO: 4130 - DNA, 382 bp, Glycine max
  unsure (1)..(382): unsure at all n locations
gatccttagagcaccgcggctgcagctatcgaatcgatatacagttgctttttatacaatgatngagttattaaggagtctttggtttaatcgattaccatgtgatataattgattatttctctttctataagtgtttcagaagtgaacgataacactttaatcgattaaaaagataatataatcaattacttcattgaattaatcaattatcttgtagatttaatcgattacaagcggttataattgttntctctataaatagtcaccttatgttctctcttataacacttagaagaacaagtttttatgagctagaatcacatgctgatattagttaaagagagtgcttaggaaatagtactcacaacctctaatctatg

SEQ ID NO: 4131 - DNA, 311 bp, Glycine max
  unsure (1)..(311): unsure at all n locations
tcgtttgttggaaacatctgcactaggtatagggaaaggactaaacaaaagcatcgtttgtcctaggtacaacatctaagacagtttttaagtaaaatccgtcttaaaatttcagcattcaaagacggtttttaacaaaatgctgacattctaagacgagttttaattaaaaaccgtctttgaatgttagcattctaagatgagttttagttaaaaaccgacttataatatcgtcagttctaagacgatttttanctactaaaaatcgtcttataactgatgatattctaagtcggttttaaagggaccgt

SEQ ID NO: 4132 - DNA, 253 bp, Glycine max
  unsure (1)..(253): unsure at all n locations
agcttaaggattagtgnccaactggccttgtaatataactagaccttccctttacataaaggtggatacctcatgttgacatcaactgctgtggatacacatactatatgggaagctgggccacagctcgaacaaactgtctatggtttgttagaggcgacattgtgatagctgaatgaaaacgaccgcgccatgtgtcagactgagcatgtgatcactacacagacgagcttgaagataggaaaaaataaaa

SEQ ID NO: 4133 - DNA, 407 bp, Glycine max
  unsure (1)..(407): unsure at all n locations
cgtanggttaaagtctcacaattgtcacgtgctcatgcaatatattgtttagccgggctatacgagacatcttgctaaacaaagtcaggttcacgataactcgcatgtgatttttcttccatgctatatgtagcaaagtgattgatccagtaatgtttgatgagttggaaaatgatgccacaattatactctgccaattggagatgtattttccccatgctttctttgacatcatgattcacttgattgcgcatctggtcagagaaatcaaatgtngtggtcctgtttatctacggtggatgtacccggttgagcgatacatgaagatcttaatagggtatacaaagaatctatatcgtctggaagcatctattggtgagaggtacattgcagaagaagccatagaa

SEQ ID NO: 4134 - DNA, 246 bp, Glycine max
agcgtttactctgatttgtctctgaaggattttcacgcattacagaaaacgagaagagattaaagcctgcattctatattggcttcgctcgattcccttttctctcttgatgaatattattcctccaatcccaatggcgacatatggtgaaactaaatgcctaaccctgtggctacatttcatgacgatccaacggttatccagtccgccatcatatctttatacgacaggctttgaatctttatg

SEQ ID NO: 4135 - DNA, 404 bp, Glycine max
ggaacatctcttaattagttcgtgcaaatccgtgtatcagatatttgtggcggatgaaaactcgggtcaccatcatcatttcagaatatctgctccaactgaactggtgagcatttcaaatagctttaattggttctttcttatgttagacttattagcattctattgtgaacctcaagcatattatcaactgtgtgatataagttccgattttccccaacttggagacatttgtgatttctgacatggacaacttggagtcaatatggcccgaccaactcactgaaaattccttctatcaattgaaaaagatggaaatcacatcctgtgacaatctcttgaatgtgttcccatgtcatgtgctatacaaattacagagcctgtaatcactgaatttatggaac

SEQ ID NO: 4136 - DNA, 328 bp, Glycine max
  unsure (1)..(328): unsure at all n locations
agctntaacaatctccttcacatgcattgctttcaacctgtgatactcttgtgtctccctcgatcccatcatttgctcctgtagcaaaacgaagctcgtgttgagctctagttgcaacaacaaccctaaacacgttgtcgggagaaccaccataacttccacgctattgaacacccacacaaccctatttgcctccatattcgccatcgagtaccacttcccccttcccttacaatactccacgtcggtcgacgacacctcatctgtggcccgcctcgtccaccccgagttcagcaccatcacggagatcgaggaggtgagcaccacg

SEQ ID NO: 4137 - DNA, 430 bp, Glycine max
tcgatcaatgtctccagaagcatccaatccaatatgtatctgtgaagtatatccaaagaggatcgttattgaatacataaaacaaattgaattatctgaccttcataaatcataggtttggatatttcatctatacatgttagtgatgtatccaagagagattcagttacgtgaagtaaattaaattctcggcacttcatagattggtttcaataaaccatgacttatgtccaccttttctactttagcctgctatttttatttttttttatctagtgagcctagcgcttaaaatcctcaaatttcttgaaatcttccatgcacttcctcatatatataattatctgacgcctactttataaaaatgaaagaaaaaaataatgacatactactatctcaaaagcttattattacaaacaaaattcacaaa

SEQ ID NO: 4138 - DNA, 366 bp, Glycine max
  unsure (1)..(366): unsure at all n locations
agctngctccagacccatgaggtaatatgctgtctagctaatgacgttacacgagcatttactgggaggtaacccaactctttttattttcattaatcattgcatatagttaggattaacttgtttatgattgcttgagtaagtcatcaacatgtttagtgttgaaaatggggttgtttaagcttctttgaagttgtggatgagaagtaacttanaaaattttttagtcatccacttgcttagcgtgccctgtgtgctaagcaaatcattatctatgcgctaagcgagtcattattctcgctaagcgcatcatcctctaccaattggctgagggggtgtcgctaaacaatacactgtgcttaccca

SEQ ID NO: 4139 - DNA, 450 bp, Glycine max
  unsure (1)..(450): unsure at all n locations
ctacccgagcactcgtgcattcatccaatgtttcattgtttctcttctaaagccctttattggaccactagacacggtgcagattgagaaactgccaccaagggcggttgataatcagccagttcccatacccttggctattctgggccacaagactctcccgactaaccacgggccaaagcagctggtcttagtgcagtggcagggacttcaccctgacgaaacgtcgtgggaagactggtcacgctttatgagctntatcaccttgaggacaaggtgttgtttgaagcacgcgggaatgttacaagtagcagctatgaaccgcaagcaaccaggcccaacagtgataacagcaaggagttagtagcaggaaggcccaaaagaggaagcaacactcctagttatctgaaagattacgtgctagaagcttaagtgttcacgagtgcatgc

SEQ ID NO: 4140 - DNA, 249 bp, Glycine max
agcttttatttgtcatcctttcttccatgtttgcaagcattggcaatttcaagaatgttcatgtggaagtcatgaatgcattcttcctccttcatcttcagattttcgaattttgtagccaatagttgcaatctggacatcttcactttggaggttccttcatgagtggttttcataatctcccatgcatccttggcaactgtgcatgtgttgatcaatctgaagatattcttgtcaactccattgaat

SEQ ID NO: 4141 - DNA, 380 bp, Glycine max
  unsure (1)..(380): unsure at all n locations
ggagctcactgttgctgccccacanagctccacacaatatgtcacggccatgctcttccttgcgagccctcttggtttcttgttcaagggctcttgcggtagctgcattttcttctcgtaacccagcacactctttccggacgtctgtagtgaccaacttgaatttttctttggcaagtcttgcatttcctagttcagttttcagagctcggacttcttcatcctcttccggagcttcgaagttctcttcgttgataatctttaacttggagagccaatctaaccctcgtgtatgaattttcagccattcatgataaccaccgatgatgccattacaaatgcccctaagttctttatctttccttaacgggctttcccac

SEQ ID NO: 4142 - DNA, 239 bp, Glycine max
agcaagctttccttctttccttctcccttatccatccaaagcacaacagttgagttaacaaaagaaggagaagtgactgaactgaccttaccactgacgacgtctgtagcgaacttgcaaacagcgtcgagtgtgttctcaatctgcgtctagaggaacgcggttggagctctcctttagtctattaacattaactggagacattgcacgttactctaattcacattaaacctgcaacc

SEQ ID NO: 4143 - DNA, 331 bp, Glycine max
  unsure (1)..(331): unsure at all n locations
agcttaccccaggagcagcaccagaatatctggttgtttttttnnccnngnaggacttcttctagaaccataaattctcttgtcttcttatgtcttgcttttttccaatattgaattgtgcttcgatacaaatttcagcatggccctacattcatattcccgctgaatcaacaacaagcaagtgctgcggcatctgttcggcctgtatcattgaagtcattgccaacttctattaatggagcacccttcagtgtctccaattcaacaacaaaagcctaatccggtaaggctgttgcttctatgaccactacgacgattaagctgcatatcc

SEQ ID NO: 4144 - DNA, 236 bp, Glycine max
  unsure (1)..(236): unsure at all n locations
nggttcaactgagtagccatctgccccatctaatnngnctttctcttaatgtatgctctcgtctcttgctgaaattgcatattctggatggtcatttgcctcactaactcctctaaggaaggttgagaaggggcctgacttgcttgttgtctttgtcgctattgctgcattggatgaggaacatatggcctgcttatactagcaacattctagaaatgagggacaaattgttgttg

SEQ ID NO: 4145 - DNA, 441 bp, Glycine max
  unsure (1)..(441): unsure at all n locations
agcttattattattattattattattattatttttattattattattattattattgnaaccataaatgtgattacgggtaaacagtattttctgtagttttgtaaccaacacctaattataagcatattgattatttgcatgtaagttcaaagctgtttaaataaacttacttgggagtcacataatactttaatttcatcaaagttaacggatgaagtaacagtgttactttaatttacattanaacctgcaacctaattagttttaattataaacattaaaaagaaaatagaaaagaagagagaaccttatgcttggcagttcaagattattntaattaactcgtccaaaccaaacaacttcaagtntatgtatggcatacatacatttaattaagcacanatattagtaaaacagacaagtcatttctcataccatt

SEQ ID NO: 4146 - DNA, 450 bp, Glycine max
  unsure (1)..(450): unsure at all n locations
gaattatcaatgtaataaacaaactcttgacaaagattattctggctgctccaccccatctccatcaatgatcataccagtaccttggcactctgggcagaatacagttcttatatgttttccaatatctttttcttttccaattttgttgccatctgacgcaacctttctcttcactactcgtctaacatttggacagactaaatgatttgtgattatctcaaattcacacaagattatccagtgtataaggcaggatgtatggaatacgtgaaatgcctgcatataaatgccaatttaagttgtgtaaattggcaaatgaaacatgaatataactcttttccttncctcaagtttagaatatgcatgatatgaatacgatgaagtttcaatatctcaagttttcatacaagcctcactatcaacaaactaatatagcaaaacaaaatc

SEQ ID NO: 4147 - DNA, 499 bp, Glycine max
  unsure (1)..(499): unsure at all n locations
nttgagncccttgnactatgtngctttgagagncaccggcaggcatgcaagctctcgaagaatgcanacggncatagctatttacacggagggattatttctgcgcanaangnagagagacgcgcgaacttgaacaaccgaagcgcncgcaaagaaacaaggccaaacttggacgcggtgtccgattcagcgcatgaatattccgaccctcgaaagtgaacaatgaacgctcctgaacaatgcacatggtcataactgtccactcggacgtccgacttaggcgcatgatatatccagacgctcgaaattggacaacggcagctctccatatattcaaatggtcataacttttcacacggaggtcacattcatgcgcatactatactgacactgctcgaaattgaacaaccgtagcctcttgaaaattctaatggcctatactttaactccgatgctggatcatgcgcatgatatctcgacacgctcaaatagaacacag

SEQ ID NO: 4148 - DNA, 251 bp, Glycine max
cgtctcgatatatatgcgtctttatcttttatccggagtaaagggtatgacctcttgaatatctcgagagcttccgatgatcaatttcgagcggttcaatatattatgcgcctgcagcggacctatgtgtggaaagttatgaccattggaatgtccccacagctctctgtgttcagtttctaagtcctcaatatataatgcgcctgagtctgacattctacgtgtaaagtcatgatccattctaattgctc

SEQ ID NO: 4149 - DNA, 453 bp, Glycine max
agctcgccaagaaggtggtggatctcgaggctctactgaaggaattttattccatgctcaaggagtctgagctacgggctgctagagagagggaggccaacaaggagctagaggagagagttttcattttcaagaaggaggccgtggatcagcatgaaaaatggccttaacaagccgttgggcaggctgggttcttcaccaaggaccttgacttgggtctctttgacccttttaaggacgtgaagaatggttgtttgcttgacaaagacgatattgctgctaaagaggagtaaggcgatgatgccattggttagggtgcctttcgtttattttcttcttttctccattgtctgaatttagccgcatgggccttgtaattatgacaaattctcttcataagctttcctttgatgacaaattttgcactatttatgtatgtcttgtgtgtctgcc

SEQ ID NO: 4150 - DNA, 370 bp, Glycine max
taggagaacattcacccattccccatctacttaaagaaccacgttttcttggacctcgcaacctctatagacatgccacaattaacagctcacataggtaatgtctttttatataatattcgcttttaactcatatttccatattatttaaacaataatatgttctacaaaagaatgtagctcttgttctctgtgtgcctgttacttacatgcctatcatagaatttacccaaaacgctcccccaagtttgaacaaatttttcctgacccataataatgctttcttatagcctaagataatgtgcacaatgatttcatatgcatctagctcacggttcaatgacacattcatttacatttaagctctaaa

SEQ ID NO: 4151 - DNA, 310 bp, Glycine max
  unsure (1)..(310): unsure at all n locations
agctngnangaaaattttgttcccatcacatttggtactagngnggcggnncgggcgatggngcacaatatggttttcacattcacaaagcgcgcataaacccaccattccctggtggccacctccatctgagcttacgtactcccacgtactccatattcttgtttctctcaacaccgagtccccatcaatcctcttaagcttccacaacatccaagcaaaacaatcattaaacagcacaagctatcacagtcaagcaaaacagagcaaaggcagaaactctgctcacaccatcaccaaagcacagttt

SEQ ID NO: 4152 - DNA, 448 bp, Glycine max
ctagagaggaagcttcaatggaggaaaagaaagatatagatatggggaggggagcataaaatcgaaggaggaaaagagagagagaagttgaactttgaaatgtgtctcacaagactctcattcatcaaagttacaacaagtgttacacatgcttctatttatagcctaggtagcttccttgagaagcttctttcataagcttccttgagaagttagagcttagctacacacacccctctaataactaagctcacctccttgagaagcttccttgagaagcttccttaagaaacttccttgagaagataactagagaagcttgagcttggctacacacaccccctttaatagctaagctcacctccttgagatgagaagctagagattagctatacacaccccctataatagctaagctcacccccatgtcagaatacatgaaaataca

SEQ ID NO: 4153 - DNA, 285 bp, Glycine max
  unsure (1)..(285): unsure at all n locations
agctngtaatactacttttatttcttaangtttgttnntgtttgtactgcacatccagcattcactgtatagagcaactngtaacttccaaattcatgtatataagcataactcccatgccattctaagttagatagccaacaaacaaaggtgaatgtgcttatactcaattaagctcctttatggttgcaaaagtaaatagaacaatcctctttatggccactatcaaactcattaattagtgtaatcaacatacttctattaagaagagntggtttattgatg

SEQ ID NO: 4154 - DNA, 374 bp, Glycine max
agaaccataagttgggagagatatgtacatttttgaaaactcttctatacaaaaggtagtcgttgaagacgactaaaaaactctcctaaattcatagttttgcttgtcctcaagcaaagaaagaacagttcagttgtcctcaagtgacaaactcacagtggtcattcacaaggtgtttgttccatagaattcaatcacatgacatgaatggcatacaatgtttcaatcaacagcttgtcacaagacatgcagcgtttcaaagatatgaacatgattgttaagcatcacatctgaaataagctatcatgaatgacaggtatcaaggaatgatcatcaaccaaagccttacggtcacttgttcacgtcatgcacaa

SEQ ID NO: 4155 - DNA, 211 bp, Glycine max
  unsure (1)..(211): unsure at all n locations
agcttgagatgaggaattgttgaagggngaattctctctgcttttattggngaccacagagagggacctggagatatgtcgcgggggtcaggagaccttggggacgtcaagtggggtgctattgcccaaaaccaagcttgaccaatcccgacccaacccgggcatagtcggtcagtgagaacatgtgacgtacctacacaggcgagctcct

SEQ ID NO: 4156 - DNA, 425 bp, Glycine max
  unsure (1)..(425): unsure at all n locations
acatgatacatgtcagggtttgtcttttttcataggtaaaagggatgccccacattatttatatgacacaaatgcaaaaatgatgattgggaaatattatgcaaaactggtcatgcatgcacctatgcggacactcaagtgtcaaacttttatggtcatgtgatgctagggcttacgatttatattctctatgttaaatcaacccaatgttttcaaaaaatgttcttatatcaatttgtgcattcatgcgagtacatttctggcgtccagagaaattccacagcattcacccttcaggtgtagacacgtattatttatcttcgaaaatcggtcatgatctatgaattcnttttacgatgaagagtatgaaatcatctcttttcaaaacatgatggttttatctagacaacttattttcatcattt

SEQ ID NO: 4157 - DNA, 291 bp, Glycine max
  unsure (1)..(291): unsure at all n locations
cctctcacggngtggaggttgtgctcatgttctcagaatgttcaaaatcagaatgttcaaaacaataatgctcaaaatcaccaataacagaatgctcaagatgctcaaaagttactaaatgatgtctaactaatctatgaaatgtcctatctatctcaggatcaaagggttgtaagtcagatggattgcctctagtcatacactatattcagcatgcacaactagttgccttcttatgcaagtaacaatgtatgtttgaattacaactacctttaaatgatatcccaatga

SEQ ID NO: 4158 - DNA, 314 bp, Glycine max
  unsure (1)..(314): unsure at all n locations
agcttaaagatgccctantattcatcccatgatatgttgttgaagtattggcgatcagaattgccattccttggattatagggttgaaccaagctcatgcttttacaaaaaggttcatcaagtcaagttgaaatatggaagtaaccgtcttgcaaaattggggcaaaagatgaatcgagtcacatcactgcttcatctactgccaaacatatttaggattgttgatgtccttgttactctcaagttcacttagacaaagatgttgtggaccatgttgaaaaattaaactggtttacaccatattctgtgtaaaa

SEQ ID NO: 4159 - DNA, 402 bp, Glycine max
  unsure (1)..(402): unsure at all n locations
ctaagctccattgtcaattcgagcgtctcngaanttatgtgcctgtttgtgacccccagnaaatgcatgaccattcgaatatctcgagagcattcgttgctcaattatcgagcgtctctatatgtgatgcgcccgaatcggacctatgagtgaaatataatgaccatttgattttcttaagagcattcgttgttcaatttccagcagctagatattttatgacgctgaatcggaccttcgagtgaaaattattgaccatttgaatttcgtaagagctttcgttgttcaattccggcgtctctttttatatgcgcctgaaccggaccttcgattaaaagtatgaccatttgattattcgcgagagcttctttgtgtaattcaagcgtctttatattgatgccc

SEQ ID NO: 4160 - DNA, 302 bp, Glycine max
  unsure (1)..(302): unsure at all n locations
aagacatgagaagcaatcaagtataatgctacttccttcactaaagcggggatccatctccacacatattttatcaatagcaacataaaaaatctctgcacggtaatgatgaagaatagtgatagtcctcccttctgctcttgaacgaccccgaactggtatttcgtcatccatatttgggaccagaatacttttagcaacacanaatccttggacatcggcaaaaaaattattccagccactctctctcatttgcccaaccgagctttgacaacatcaactatatccatggcattcacaat

SEQ ID NO: 4161 - DNA, 366 bp, Glycine max
  unsure (1)..(366): unsure at all n locations
agctttgaacaagaagcaggaagctnggggctgctgatgatgtggatgtngntgctttgaaggagcaagttgctttgaaggacactactgttaaaaagaagaatgaggtaacagatacaatgagttagaggagggaaaaacaaataatggtcaaagagaaagaaataaaagaccaagaaaaagaaattgaggtaggaatagacaaagaaaaagaagaaaaagaaaaagttgaaaaaactaaagatgaacaaaagagtatgagtgaagaagaaagagaatagaggaaagaaaaagcttcagaaaagggtacggaagtgccatatcccatggtatcttccaagaaagataatgaccaccatctgggga

SEQ ID NO: 4162 - DNA, 323 bp, Glycine max
agcttgtacctctcccctcccccttccttttataacctgtacaaattctctgtagtctaaatgaattactatgatgcacaaggtgagaactgagaactgcacccccaatctggcagcaccaagcatgcaacttgtgacagatgttccccttccaatcagtaagaaaatcaagacaatcagtcgacacgagtcaccatccaaatagtttttaagatagcaaccaatcaatcactcgctactcgctgtcagtgtgcaagtaacaaaagaatgcatcaagaaatttggaatcattttctggcccatgatgccgttcttcccgcaca

SEQ ID NO: 4163 - DNA, 455 bp, Glycine max
  unsure (1)..(455): unsure at all n locations
ctggaatcagatttcctcaaacttttaatcatctttaatactcaaaatctgaaaagttccatcctcttttggattttttttgtgtgacacttactgtgcacaatttgattctcaattcaacaacaacaaagctttatcctactaagttaggtcagctacatggatcacttgatgccattcgacacggttaaaaaccaaggttttagaaatattgtttagcctaagattccccttgatgatttcctccaacctcctttttggtctcccacgactcctttttaccagactaacaaccatgcaatctattcttctaacgggcacctcctcttgtggccttctttgtatantgcctaaatcaccataaccagtttctgtcatcttttcctaattgggtcctacaccatanttttcttgatatagtcatcatgcattctatcctttcttggatgatcaca

SEQ ID NO: 4164 - DNA, 317 bp, Glycine max
  unsure (1)..(317): unsure at all n locations
actaagctgaatanataatggaaaaagggaaaaccctgtaatgttttaactaattagctnnnctctctcctcactcagccaaagcagaaattcagaagccttttctctccctctctcacgtagctttcttcttcttcattctccattgaagcttcaagcaaagcttcaacctttggccaccatttctgccccaaatcgtgaaaggagagcatttttggagtcgtgaagtgcgtggctacgagtgggacttcgaaatttcaggtttgggtggacttctttccctcttgattttcgtgggtatgggggtttgggagata

SEQ ID NO: 4165 - DNA, 410 bp, Glycine max
  unsure (1)..(410): unsure at all n locations
agcttcaagaaccaaaaataaaattattatgttattaggaaattatttcaaaaataaaaatctattagaaaaaaaataaaatttaaatatttattaaagataaaaatatatttaaacctttaaaatattcttactaaaaagaacacttggctagtaatactcgagtaacaaagaaagttatgatatgggtatttagtaattataactatcttgtaaacattacttaaattttntaataatttatatacaggactntaattttttttgtcaaaataataacatttattttgaaaacatattcatatgtataacatattatatggctggtgaatataggatatacattttttaaaaaaatatgtataaacaatgataatatactccatttgaanatacttgtaataaatata

SEQ ID NO: 4166 - DNA, 407 bp, Glycine max
ctcatagcatcacgagcctctccataaaagaactccattttacctatgtttgtgaaaacctctgcagctcctataaggaagtactgaggcacttgccataagattgacaagggaacggtttcaagatcatagttgtttgtttttctgataatatcaaggcgaacaacctctaatatgccagctacaatcatggagattatggagattacaaggccgatgcctatgcgttgaagctgtgtgaatccttgttcatggccaatgaactttcttgctaatgggacaatcatgctatcatacactggggccctaaagatgacactaagggtgtctaacagggagagggatgctgctggaatttaaattgttgaccaatgtgtggtccatttgttgctctgtgacacaacatg

SEQ ID NO: 4167 - DNA, 182 bp, Glycine max
  unsure (1)..(182): unsure at all n locations
gcaagctttgagctcattcaaacgacaataactgtttactcggatgcctgtntatctcgtgatatatcgagacgctcaataatgaatgttgaacctctgaccaaatgcaaacgagaatcattccttcttggatgtctcttcgagcctccgaatagatccacacgctcgatattgaatgttga

SEQ ID NO: 4168 - DNA, 368 bp, Glycine max
  unsure (1)..(368): unsure at all n locations
tcttgagcanattcaaacgaagataactntatattcggatgctcgattgattttcggaatatatcgagaggctccaaattgaaaacggtagctcatatcaaattcaaaggacaataactttttactctgatgtccaatagagtcccgtaatataatgaaacactccaaattgaaaatggaagctcgcatcaaattcaaacgacaataacgtgtttactcatatctccaatagagacccgtcatatatcacgactctccaaattgaaattggaagctcgtatcaaattctaacgacatttacttttaactcggatgtctgattgtgtcctgcaatatatctagatgcttcaaattgaaaaccgaagctc

SEQ ID NO: 4169 - DNA, 401 bp, Glycine max
agcttgtaattgattacacacatactgtaatctattaccagaggattttttctgattacattctcaacagtcacatctttttatctgattcttaaatggccatcaaaggcttatatatatgtgacttgagacacgaattttacaagattttttaagaacaaaaaggtcttatcctcttaaaaagcaaaatcgttttatcctcttacaaattccttggccaatacacttgtgattcaataaggaattatttgagtgctcaaattgttcaatctatctctctcaagagagatatcttcttctcttcttctttattctgaaaagggattaatagaccgacggtctgttgttgtgaaagaattctatacacaaatgaatgattgtccttgtgtgtttataacttg

SEQ ID NO: 4170 - DNA, 415 bp, Glycine max
  unsure (1)..(415): unsure at all n locations
gctgataaaataaaagatcttgggtagttntgaatgtcctctgatcccttctctccactgttgcatggtatgattgctgggtaattctaaagattgaatgaagcctttatttattgtcgattgccactgaatactttatgcagacaattaagtaattggacttgatcatctagacctcatgctattattatgttcagatacattcaagaaaactattctaaaatttgcgatgtggagcgtgagcttgcaaatntttcactacagatgaaacttacanctggaccgaaaaaagcaggtttctaaatggtattgttgccctntttggcataaaatagtgcattggtgatatattagtttcttactaagtaatgatcttggagataacattatttaagcactntacccagcaaataca

SEQ ID NO: 4171 - DNA, 438 bp, Glycine max
gcttagatctaacaattcactaaatatataaatgttaatttattaaaatataaaaataaatttatggaaaaataaaaattgaaccagaataaaaatttagccaaaattcaacctatgaattaggttgaacatgcattaaaacgcgcctaacataaaaccaagcgttacaatcatcccatacggaaaaaaatattgttataaaagttgattttgacgttcagttattttctaatcgtacaaatttaattataaaaagtaggaaattaaagttagtggagaatttattcaaataatataaatagtaatatattaatttatcttattttctaataaaatacagataacattagatgagatgacacaaatttataccttagatggagccagctattgttatcggtgttgaacctgatggcttaatcactttttttattttgt

SEQ ID NO: 4172 - DNA, 438 bp, Glycine max
  unsure (1)..(438): unsure at all n locations
tatatgcatgtcatgctgtaagcatgactnttttggatttttatcatggtaataaatcccgatcatatattcacaatgagaagttaactactttgtttagtgtaatgatattgtgggtcataattggcagaacatgtataggtgttacttttatgtcataatcacaatcttctttgtaatttttttttgttttattacatcttctacattctttgtctgctagtaattatgtgtttaatgtacatagaaccaagtagagagtgcctctctaaaaaaaaagggggtttcaatgcatcttgtgatcaaatgagaaacaaccagctggttattaaattgaacaaagtatctattcaaatgatatgtctaacaaatcgttttgctaggtcaatgatttaatctcattttatctaacttgctactgctgtgtgttaaataaaa

SEQ ID NO: 4173 - DNA, 383 bp, Glycine max
  unsure (1)..(383): unsure at all n locations
gtttcgactgaaggaaccagagncctttctcaaggagtctgagctactggctgctacagagagggaggcctacactgtgcttgaggaggaggttttcattatcaagaaggaggccgtggagcatcatgaaaaatggccttatctaaccgctgggcaagcctgggtcttcaccaaggaccttgacttgggtcttttttacccttttaacgacgtgaagaatggtgtttgcttgacaaaacgaatttgctgttaagatgataaggctatgttccattggtagggagctttcgtttatttcttttccccatagttgaattagccgctggcccgttatatgcagatttttctttgcttcttcaaaacaattgcctttatgatgttcg

SEQ ID NO: 4174 - DNA, 465 bp, Glycine max
  unsure (1)..(465): unsure at all n locations
gacactataaaactaagcctgaacatggtcgggttaacaaggaaatcatggtttntcttatattcaagcacttacgttctaggagatcattcacccattccccatctacttaaagaaccactttttctgtgacctcgcaacctttattgacatgccacaattaacagcacacataggtctttctttttatatatatttgcttttaactcatatttccatattttttaaacaataatatgtactacaaaagaatgtagctctggttctctgtgtgcctgttactcacatccctataatagaatttacccaaaacgctcccccaaatttggaacataattttcttgacccataataatgctttcctatagcctaagataaggtgcacaaggatagcatatgcatttagctcatggttcaatgacacattcattcacatttaagctcacaaaggtgcaagggattcaa

SEQ ID NO: 4175 - DNA, 96 bp, Glycine max
atactacacatcctgaccaacgagccaagttcaccaaacctgcacagagattcttactacatggaacacgtggctaagagaacgcgcacaacaagg

SEQ ID NO: 4176 - DNA, 426 bp, Glycine max
  unsure (1)..(426): unsure at all n locations
ggacacttaaaactaagctgtctctaattctatgaattagtcaccttcttcctttgtgttaatatccgcacgtngcatttcagtactacagtacttcaagtcaagttgttttttgctcaccttttcacgaagaaagtgaaatctcgtctctatgtgttttgatcatctgagcgctactggattcatggtccatctgatattgggtttgttggccacatacaatacaactagcctctgaatttctatctccaattcttcaagtacagagtctagccataaggcgtggtatgcaacatagcatgctgcaatgtactcagcctctcaggaagatatatgccactacacgttgttntctctgaacaccacctttgatatgaaacatgtcctcatcaagcatgttggtgcacctacgaacttgaagagata

SEQ ID NO: 4177 - DNA, 212 bp, Glycine max
agcttactatgaccatactctgaccggtgtttatatttatctaggatataccactaaagggtctacgttttctagtgtccccattccatatgttgcgagagcccctcagtatcgaccactatcacaacccttacatcttgtgatggaaggaggactttctgttatagttgaaaagataaaattcgatcatattgaggaaaggtctaaggcca

SEQ ID NO: 4178 - DNA, 399 bp, Glycine max
  unsure (1)..(399): unsure at all n locations
tatgacaagtgaaccttctcaaacgctgcctgcttgtgtgtgttgaaaacacttggcaataatgaacaacattcatgttatgtaaaacacttatcaagatcacctaacataatagagtctcttaattaatatccaaataataggtcaactaacataatagagtatggctaataattgtcacagaaaaatatacaaaaaattataataaaaaatactattctacacatctcaataaaaaaattattcttagttacttaactagtgatcttatgaaactaattaacattcttcaacagaatatagtatagtaattagtttgttcttaccagtctgagagcctataattccttcatcaataaagccttatggactcaanacatgccaatgaagtaactgaag

SEQ ID NO: 4179 - DNA, 335 bp, Glycine max
  unsure (1)..(335): unsure at all n locations
agcttgagatgaggaagtgtagaagggtgaatcttccttcttttattcgctgaccacagagtggtacctggagatatgtcgcgggggtcatgagacattgtggatgtcaggtggagtgctattgtccaaaaccaagcttgaccaatcccgacccaacccgggcatagtcagtcagtgagaacctgngatgtacctaaataggcgagctcctggcagtcaacatattaaaggaacaaagaccactaagcaaggaggctcgtgtggtggctggccagctgtgaactctgagttatatatgggatatggcctctggtaatcgattaccaagggtgggt

SEQ ID NO: 4180 - DNA, 355 bp, Glycine max
cagcaggcaatgctcatactgctcttctcacatcttccggcgaaggtgtcatataggacggttagcatagcgacaaccgggcttgccttgtggtcattataggcgataaaagcgtcaatcgctgttaggtacaccaacccattcacattgggaaagaggactccttcgaagatcaatagtgcaagaatgtctatgaatggggcccattcgcctctacctgccaagattcttgcttttgtctccaaatattttctcggtattccaaccaccccatattcgacttgctttctgtggtctaattcctgcgccggaattagactatcctagaagtctagcttatgaggacagaaccctg

SEQ ID NO: 4181 - DNA, 399 bp, Glycine max
agcttcctatttatctccatcatgagtaactttggtcttcaatctcactaaaagtgaatcattaagtgtgattgagattggtagtcatacaaaagtgttggacaaatggcctcaaatatcttaagaagggggggttcaattaagatattacaaactatttccccaattaaaattctactttgatttcaatacaagttccaagttcccttatagatgaatttctaaataatgattcacattaaacaatctaaatataaatgtaaagcaataataaataatagagtttaaggaaagagaaagtgcatactcaaatttatactggttcggccacacccttgtgcctacgttcagtccccaagcaacccgcttgagagatttactatcttgtaaaattcttta

SEQ ID NO: 4182 - DNA, 444 bp, Glycine max
  unsure (1)..(444): unsure at all n locations
tgctaacccatggaagctcctaatatctattacactctnctgtgtgggccattcttggatggccttgattatctcagggtccacttggaccccatttctaccaactacaaaacctaagaaaactatattatctacacaaaaggtacacttctctatatttgcatagagggtgtttttcctaaagactgaaagaacttgtctgagatgtcctaaatgatcatctagcctcctactatacactaaaatatcatcaaaataaacaactacaaatctacctatgaaatcccttaagacatgatgcataagcctcataaaggtgcttggtgcattagtgagcccaaaaggcatcactagccattcatacaaaccaaacttggtcttgaaagcagtttccactcatcaccctttgtatcctgattggtgataacactttaaatcaatttt

SEQ ID NO: 4183 - DNA, 323 bp, Glycine max
agcttccatcttaatatatataaattatcattctgtaaatcatcccgaatgggtaagtcctcatcagacacatgttcgatccgactcaaatgatcagcaactaaattttatgctctgctcctatcacggatctccaagtcaaattcttggagccaaagcatccatcagatcaacctatgctttgaatcagccttctgcaacaagtactttaaagctgcatgatcagtataaacaataatgcgagtaccaagcaaataagaatgaaatttttcaagagcaaaaactatggctagtagctctttcttagtagtagtataattcgc

SEQ ID NO: 4184 - DNA, 385 bp, Glycine max
  unsure (1)..(385): unsure at all n locations
ntcttgcagaaaggacattgcagatcctgcttttgctcctgtctcctatgcagattcatccttgttggtagtctatcttctattagcctccaagcaaaaactgaaattttgctaggaattntaatcttccataattccttacaccagtcctgttgctgaccccctttagaagcttccaaaatcagattgtaggcactacgagtggaatatacccttgtttgatcacctaaccattcccattcatccgatccttgccgctgaatgtgtataccttcgatgtcctttaaaaaattgactgctgactcaatttcattttcgaacagcggtcttcttcacagaaactaccactcccaacctgactgcatgtgctggccatgtgtctgat

SEQ ID NO: 4185 - DNA, 521 bp, Glycine max
  unsure (1)..(521): unsure at all n locations
nttgagaccccttganantcgcgatgattacagtcactcgcacgcatgcaagcttcacatggagctacatcatgnnggatcttgatcatctcatttattgttgttgaaacacccgatgggaagcgctcatacacacatgtncgatccgactcaaatgatcacccacctaaaattttgctctgctcctaacacggatctccaagaaagatacttggagccaaagcattcatcataacaacctcagctttggaaacatccctcccgcaacacagtacgtttaaagactggatgatacacgtatataacacaaactgctatgtactccagctcattaataaagagattctttctacaacaaaaactcatggctagaacactctcttccattaatatgatataattcctttgggctgcctctaaagacccttaaagcctataatatctccctcccgaaatttatccacatttcggcacaggaccaacctccaagcgtcatactaaacatcacctcttactcctat

SEQ ID NO: 4186 - DNA, 442 bp, Glycine max
  unsure (1)..(442): unsure at all n locations
ctaagcctgctgattacattctcccccattctcaaccaaactattttttgatttatttaaatcttcatgatttacaaatgttaaaaccaaaagataaacataaatttgcaaactcaaaatatagttgttacattactaacgcgaatagaattttcaatgtattattaaaggataaaaaaattacacttagtgataatcataaaattcatccatttgcgcaatgaaaaagaaagagatattacaaatttcactatgtctttagacatcggactaataattgtttacgttttagagatatgatacaaaaggctaataatgaaagaatgctgaagtttgaagaaaaacctatgctagtggatattaattctttccaaatccanaccaattatgtcnaacctatctaaattttgatgtacgggctttgatgaacatcacagattga

SEQ ID NO: 4187 - DNA, 411 bp, Glycine max
aatcaccggagctcctaacagtgaaaaaaaaagaagcaaatagatgagaacacacaaaggacaacgcagaaacacaaacactagcaccctgtcagcactcatcacttttttcttttcaacttatatatatatgaactaacacccacaacctcaaaacaaagttccacaataaaaatcacacgaacctgaaacagaaacagaaacagagtggagccctttcgattccacttttctgcccttgacctgttatcattagaaacagacacacgcacacacaattaatagcgtccaaggccaaacacttcacccgtcacttgttttttatgtaatagagtgtgattgagacacaaacaatacagacagagacagctgtatatatatatatatatatatatatagagagagagagag

SEQ ID NO: 4188 - DNA, 320 bp, Glycine max
ctgcacgcatgcaagcttgttcgcacatcgttcgtgtgtacgatatctactcgacaatgtattatttatacgagaccttcaatcctatcacgcagcgtggcggacaaaaatgggcatttaacttgaatggccattattgtccatgtggaaagtatattgcgcttaactatccatgttcacacattattgcagcttgatggtatgtgatcatgaactactaccaacatatagatgtagttacacctaagaacacatgttaaaagcatactcctgacagtggttgcctcttgggaatgaatcgtcatttccttcttctgatg

SEQ ID NO: 4189 - DNA, 452 bp, Glycine max
  unsure (1)..(452): unsure at all n locations
ctaagcttcacaagaagagatgggccagagaatcaaggatggactattcatcttatgctttgaaggaggaagccacatgtaactgaataggagcaccttgaagatttcctaaacgactcgcttagcaacaccagctcgctaagcgcaatttcatccagatgaaataatttgcttagtgacactagcttgctaagtgcaattcgaaatagaggagagattgtgcttagtgtgaatgtctcacttagcaacaaccttctgcgagtntaagttaaattttgcttagtgacactagctcgctaagtgagtcttgtaggttataaatacgcccaacactgagaaaaatgtggatttctacccctcttatccctaaaccctcacccaaaccctaaacccaccttctcttccacccatggtcaccaaccgtcactgcttgcaccaaaccaccgcacaga

SEQ ID NO: 4190 - DNA, 237 bp, Glycine max
agcttctcagctacgccgggactcttcatttcagcacccgtactgtctatagcgctcgcgcccatccaaagggaggccccccaagctccggctccaaccacgactcgcccggctagcaacgcccactttggcaccggttccaatgcgatgaggaactttcccccaaggccaactccagaattcaccccgatcccaatgacgtacgaagacctcttgctgtccctcattgccaaccag

SEQ ID NO: 4191 - DNA, 471 bp, Glycine max
  unsure (1)..(471): unsure at all n locations
gacactatgaatctcagcttatntagaggcttcctccagaagcttcattaagaggcttttatcattctacatacatcctctcaaagatcccaacggtcagatcatgctaaattgttttgtgaagttgcagaccaaatttcgagaagatccaacggttaatgaatgctgggaaacgtttttaccgaggcagcttcatgtagctttctctagaagtttcattaagaggcttcctctagaagcttcctcgtggcttctttgagaagctgtctcaagaggcttctttgagaagctagatccttatctatccacccctctattaactaaattaacttctgtaaaaataattactgatgaaaataacgcatcatataatcaaacatcacacataattactaataatatatagatatatatatcagggtgttaccagttctgtagagaccgaaaccctaatctgacctttcttttctt

SEQ ID NO: 4192 - DNA, 251 bp, Glycine max
agcttcctatatggaaacaaaacttatctgaataagtctctggatctattttagagcaaggccaactaatggctgtgttttgttttgtggcactgtattacaacattttaggatgatacaaattttacctcattcgtgtattaaatgtttgagctcgagctgctcccctttttgtgaaatactaatcatatagtatttgaccaacttactacatatttatctttgtatttcgatctcatatagttatatta

SEQ ID NO: 4193 - DNA, 424 bp, Glycine max
  unsure (1)..(424): unsure at all n locations
tcaagtgactaaatatattacttctnttgttgggagacaatattaatatttaatatataactttntttacttaattactttttacctatataattagattagattatgtttttcggtaagatatttcaactaatttttaaattgtttttactagctgaacaacttaagtaatttttttaatgaattttagtattttttttaaatattagttgaattagtattttaaaaatattaatttctaaatttttttttcttttctttttgttcttgatatttttatcaaattttctaattattatttntaaataaattataattgtattgtttttatattattttacactctttaattattctaaccactaattgtatcaaatatttattaattatttagatttgtagcatcatgttactgactgttagt

SEQ ID NO: 4194 - DNA, 147 bp, Glycine max
ccataattataatacacaaccttttccatttgatgtgttccctctcgcactttcctctatttacattcttccgcatatatattttcgttgcgagtaaatgatttttacctctcccttgcggatttaggtgctttatttgttattttc

SEQ ID NO: 4195 - DNA, 441 bp, Glycine max
  unsure (1)..(441): unsure at all n locations
tgtgtaggaagttatagagagagaaatgtctcaagttcttctagagttctgaaagactntgttgtgtgaagatctgcagagacgagagctcaatgcgaaagccattctaagagctttagatgagtttgtgagtgactgtgagatcctagaggtgaaggagacatcctcaccacttgtgatttttcaatctttcaccttgttcttctctgtgttgtaaaggaggtttccagactatggaaagctaaatcctctattggatcttccctgtaggtacctgatgtaagctccattggagctngtaggcctaggatcttcttcatcaatggattcctttgcttattggaagatgaatggcagcggaatggagaacgaatatgagaaaggagacgccacttcaaggagaagatgcgtctataagaagctcaccaccatatgagacca

SEQ ID NO: 4196 - DNA, 278 bp, Glycine max
agtatttattcgactttataaatacaaataatgtctgttatgatatataattatattaaacttaactttaatcatatatatcttataatgtacaaatttaaattttacatctcgacacattttggcatacagctgtattttcgtactaatattgcatgactgggcttacctgaatattaatactatagaaggtatgttcctctctagaaatacctttcttttttgattataaggattgttatttaatatcagattactccagacagatggatcatgaa

SEQ ID NO: 4197 - DNA, 390 bp, Glycine max
  unsure (1)..(390): unsure at all n locations
agcttgttgcaagttgttctcgttgntcccttatctttgaatcaacaaaaacctatctgccaacaatgggcacctccaaaagcaacatattatcaatgaacaaattaaccttatccatttttgaacaagaatatgaagatatactatattcccttcttcgctccccctagaggaaactatgctaaaatctctagtgatgccaaaatctccatttcttctccaatgaacaaggtgaatatacgttaataatcaacctatgcctcaactccctattccattntcctctgagccccaaaaaccatatctagcanacattntttatccacctcanactttactcttttctagatgcaaagcanactccncgtctgatgcaatcctacctcccca

SEQ ID NO: 4198 - DNA, 458 bp, Glycine max
  unsure (1)..(458): unsure at all n locations
gacactatgaaactcagcttctcaagaggttagcttagttattagagaggtttgtgtttnttatctctagcttctcaaggaagcttctcaaagaagcttctcaaggaagtttctcaagaaagcttctcaaggaagctacctaggctataaatagaagcatgtgtaacactttttgtacctttgatgaatgaaagtcttatgagacacacttcaaagttccacttttctccctctcttattccttcaatgtcatgctccccccttctctctttcttttcctccattaaagcatcctcttcaagcttcttatccaaggcacattcttggtggtgaagttcgttcttccatggcttattccctagtggatggtgtctcccctctcctcttcttctttgcctttcgctgcatctncatggtggaaaatcaccattgaaggactttattgaagctcaaagatc

SEQ ID NO: 4199 - DNA, 394 bp, Glycine max
  unsure (1)..(394): unsure at all n locations
agcttagagccaatttttatctacaaaacttttttacttttatgtcnngacgagncccgccatatatcgagacgctcgaaanttaatgttgaagctcttagccaattcacacgacaataactttatactcgaatgtctgatatgagcctgtaatataacgagacgctcgaaattgaatgttgaagctctgagccaattaaacnactatatctttctactcggatgtctgattgagtcccgttctatatcgagacgctctaaattgaatgtagaatctctgagccaatctcaacgacagtaactttttactcggatgtctgattgagtccctgtatatatcgagacgctctaatttgaatgttgaagctctgatccaatcaaacaacaatacttt

SEQ ID NO: 4200 - DNA, 294 bp, Glycine max
ccgagaaaaagtatcgcgttgaatggctcaagcttaacaacaatttgagcgttcttatatgaccggactcatcaacattcgagacaaagtatcgtcgcttgaactgctcaagcttcgcattcaattcagcgtctgagatatacgtgactctatcaacatccgagtaaaaagaattggcgttgaattagctagaactcaacattcaatttcgacgttcgattgtgacaagactaatcacacatgcgagtaaatgtcttgcgttgaatcgccagagcttcaacttcattttagcgc

SEQ ID NO: 4201 - DNA, 278 bp, Glycine max
  unsure (1)..(278): unsure at all n locations
agctnaacatcttataactgcttattcatttctgncttcgttggattcaaatagtaaaaagtctcaaaagccactagtgcactatcagtaataagtctaccaggaacgagtacactttgatttatactcactatagaaggaagaattaccttgagtctgtttgcaattgttttggcgatgagctcgaagataacattgcataggctgatcggtctaaataggcttgagtgagtaggcttctttaccttagggactagtgcaatgaatgtcttattcaa

SEQ ID NO: 4202 - DNA, 436 bp, Glycine max
  unsure (1)..(436): unsure at all n locations
tattgaacgtgatgatgtgctatcctgtgtgtagagtaattcttatcaaactcttgattattcatattttntttagcttgaaggctatagagaaagccatagttagctctgatcttggtatgactccaaataatgatggagaattgatacgactgagcatcccacagttgacatctgataggaggaaggtattctccagttccattgatgctgcagtgtctaagtttattttttctctgtcaattacattcttgttctcattgactgaaagtaatattcttaattggttttcatttcttatttaactattaacaaaatcgcatagaatcacctcttctacagtcatgacccatgagaaaactgatctctacagtgacttaatatgttgtttgccatgattccaatagtattagttatcaatttatcttgtctatga

SEQ ID NO: 4203 - DNA, 283 bp, Glycine max
agcttgttctctatgctgatgccatactcctttgcatagggattattctcataattgttttgttgcattgtctgcaagcaaatagggaagttctatataaataaaacaggccgaacacaaatttcttgttgatgaggaagagcttatatgactattaaaggatgaaatcaccctgattgcaattcaatacatggcgaggacctatttaaactatataatgctcaatccactgaacacaaattatggatcagtaatggtacgatggagggtgagaccaagaacc

SEQ ID NO: 4204 - DNA, 407 bp, Glycine max
  unsure (1)..(407): unsure at all n locations
ggagttaaggagccagaagtggcagtgataaatacttgtttcttgtaaaagctagtgatacttggtggtttgcaaagaatttgacatagtctcggtgatatttgcatttagaaaaataattattggccagactttacttatctcctagtctatctccagattaatcaagattcctttcacctgatgaactaggggttaagaagaaaaaaaaccatatttatgatagtntgacaagcaaacaatacccatgtagagctcgatgcaatctgaaccgtctattttatcagtgtaatcttggttgtggctgataaatgattcacgagagaacatcagaanatgctaataaatacaagtagtggtctgaggtacctcattaattgtgttgatatcacatattagttaaagat

SEQ ID NO: 4205 - DNA, 318 bp, Glycine max
  unsure (1)..(318): unsure at all n locations
agcttccttgataagcaaggaaggtagcttgtttccttgngaatttagaggaagaaagcttccttgagaagctggagggggctactcatacccctccaatagctaagctcaccccattccaaaatacatgaaaatacaatgggaagcttccttgagaagcaaggaaggtagcttccttgggaagcaaggaagaaagcttccttgagaagcatgaggggggtgtcataccctaatttcgtccggggactattgcttgatggcatgcaacctttgattgacctcttcgaggtacttggcaccctttgttgcacaatatgt

SEQ ID NO: 4206 - DNA, 453 bp, Glycine max
  unsure (1)..(453): unsure at all n locations
tgttgaaagtgacaacgcaagatgggtattgtcgcaactctatctcttcggcgggagggcgacgcgagactcacaggtgcgtcttccaagaaaggaaaatgctcagagttgccaccaacgtttatttgaggaaaacgtcaaaaaaaccggaaagacgtggtctacgaactttaagtatgaaaggtttgggagttgtatttacgcacggngaaggtattagcaccccacgcgttcgtcacaagggacgacagcctttaaatcaagtgtgcaaacatgacttcaatttgttttattttcgcttttcttacgttttatgtccttttgtatttttntttatctntttgtggtcgacaagggtgtntcccttgctcctacgtattcctcaattgtgataagcaaatcagacctacgtagttctttgagaactaaacgttgtgttaaatatttttatcc

SEQ ID NO: 4207 - DNA, 474 bp, Glycine max
  unsure (1)..(474): unsure at all n locations
ggatccttaagtcacctgcggcatgcaagcttggttatctccttctttactacatcaagaatcaccgggttgagtcttctctgtggttgtcttactggtttagctccatcctctaaatttattcgatgcatacatgtggatgggctaataccaggaatgtccgccagggtccagcctatagccttcttatgcttcttgagaactgacaacaacttctcctcttgctcatcagcaagggaggcagatataatcactggaaaactcttgatatcatccaagtaagcgtattttaaatttgatggcagaggcttcaattctggtgtggtcggctggatagcggtagaaggagatggtttctcagcctttacctcataaagaaagtcagaggtatgtgtacttcctgaaacatggntagtcctatctgactctataaaatcaatctcaagaggaaaacaccaccaccaggcatgcatg

SEQ ID NO: 4208 - DNA, 424 bp, Glycine max
taccagtgaatgatttcttatctctggtacgatgtaacaggtttttagaaatatactattttttttactttaacaatgtgaccgataaccaaagaagataattgttaaatatatagactttaaaaagagaagccctaaactatattgtaattatgttaattcgaattgataatttttgggagggaggaataaactataaatcaaattacatatgcgacaacaaaggaggtgcattcgcagacgatgttggttgagaaaagaaagctaaagaaaactagattgaagtcaattacagatctaaagacacctaagctaatgatgcaattgcctcatgctcagccattcaaaagctgtgaatcatgaccaagattctgacttccaacatatgttgttgaacaaataccagaacacattaagttattca

SEQ ID NO: 4209 - DNA, 454 bp, Glycine max
  unsure (1)..(454): unsure at all n locations
agcttctttatagacctcgatctgtaatgtttcctggccaatttcgactgtcatgtttttcgatcaatatcggtgaataatatttttttttctgtgattggctaatgttttcctggccgaataaatgggaacatgccagtttcgggccaaactaaaggtcggttgagctcgcacaaaaaaacctatccgacctaaattgtaaattttttatgcaacaccaaaacaaggaaacttcctctaccgtaaaaaaaccattatctgccagcgagagtttttcaaaaaaaattgttcaatgtctgctgaaaaatatcagttgggcctacttcacgaccgatgtcggctgttgggttttcaattcaatccgtgaacgaaatttgcatgatgttggtgaggaaaagttcgatcagcatcatcttgtgaagcttctattntagacctcgatcggtcatgtttg

SEQ ID NO: 4210 - DNA, 453 bp, Glycine max
agcttgcttgtacatcatataggagggatgtataaaatatcatcattgacgtaaaaaatggacaatatataactgctatatgaaaaattatccacatgatttaaagagtagggtggcactatgatattaagaaaattgcatggttaatcgaatattaattgaataaataatatatcatatactacatgaattataacctaatcagtcagctattatgttaggtattggtgcgaccagtggacacagtatttgacttgaattttaaatgatgtaacagattcttgcatcagcttatgcaaaaacggttaagtgaggtggtgagtcgttgtgagctctagaatagtttctttgacttcgattgataaaaaagaagattctcgagtaattattatcggagacatatttcaactgactcaatgactgccgatcacactcaactctcattgatatgaa

SEQ ID NO: 4211 - DNA, 421 bp, Glycine max
  unsure (1)..(421): unsure at all n locations
agctntaggtagtgttataggaagagcccttatagagaagtaaatcatgattcagatgaagtttcccaacagcggaggcccacaagatctgcacataggaaacaagaagctgcccctgttgctaagaatgttcagcacgtggatcacgcagttgatgaggtccacaaacagcctgaagaagcagctgttgatgatgaagttgctgatgctaaggattttctaggcaggccgtatgacatatcagttctgactggttatgttgatcatgttgcagtcattgttaggaaaaatatttatattttaaataaattattttaataagtatttgttattattgttaaaatgatttaattttttttaggaatgtcctaagttgaagctatcatcccacggaaggaaggtttagaaattcgacaggcct

SEQ ID NO: 4212 - DNA, 391 bp, Glycine max
  unsure (1)..(391): unsure at all n locations
agctntaggtagtgttataggaagagcccttatagagaagtaaatcatgattcagatgaagtttcccaacagcggaggcccacaagatctgcacatatgaaacaagaagctgcccctgttgctaagaatgttcagcacgtggatcacgcagttgatgaggtccacaaacagcctgaagaagcagctgttgatgatgaagttgctgatgctaaggattttctaggcaggccgtatgacatatcagttctgactggttatgttgatcatgttgcagtcattgttaggaaaaatatttatattttaaataaattattttaataagtatttgttattattgttaaaatgatttaattttttttaggaatgtcctaagttgaagctatcatcccac

SEQ ID NO: 4213 - DNA, 434 bp, Glycine max
agcttaccacattaaatgttgaaggatgctatattactgctgcatgtttagagtttattcatggtaaaaataaattcccattttattctttgaagtgccatttcattttattttttcttaattttagacagcagttttgtttgttctggaagtcattctgtaatgcatgagcttgctttcatattttatttggaaaattaaggatttgaataatccagcatgcaatcaaatggtgctaaagcggcaaaggctatgtttgaacttggaaactcatttacttattattccaatgcctaaacttttcctaattagttctttaatcatagatatattttttgtacagccttaacttccttggcatgcttaaatctcaacagatgtggtctctctgatgatggatttgagaaaatttctggtaactttgatatataatg

SEQ ID NO: 4214 - DNA, 442 bp, Glycine max
agcttagcaaatggacctgtgtgttgcccagtttcatcatatcttccgtaatacttatcacctctatcatatctaataattttcacatttctttctaattgtctttttacttcattcttgtaaatttctaagacattcattgcttgagaaatctcaggcagtaagtagacataaccataatgtgaataattatcaataatggtgataaaatatcattcctttccgaaagaaataacatcaaaaggtccacaaatatagtatgcacaatttcaagaagctgagtgcttcttgtagctcttttctttgtatgttttgcttgtttttcccttaatacaacccacacaaatatttagatccataaaatctagataaggaagaatttcattctttattaatctttccatcctttctctagaaatgtgacctaaacgtttatgccaca

SEQ ID NO: 4215 - DNA, 445 bp, Glycine max
  unsure (1)..(445): unsure at all n locations
agcttcatgatgaatcaagattgattcaatgaagttntgatgataacagaggtgatgacaaaatgctcaaaggtgaagaacacttcatcataacaaagacgatgatctcaagaatcaaagaataagttcaagatgttcaagattgaatcaagaacacttcaaggttcaagaggaaatttgatttcaagaaacaagaatcaagattcaagattcaagttccaagaatcaagatcaagattcaagactcaagattcaagaatcaagaatcaagagaagacttaatcaagataagtatgaaaaagtttttcaaaaactgagtagcacatggatttttctcaaaacatgtntaccaaagagtttttactctctggtaatcgattaccagattgttgtaatcgattacgagtaagcaaaatggttntcaaaaagctttcaactgaattta

SEQ ID NO: 4216 - DNA, 443 bp, Glycine max
  unsure (1)..(443): unsure at all n locations
agctntgtctttttcaaccttatgatatctataactccacgttgcttctcttcattcagcacgaacaacttgaacaaatgaagcgctttcaacgagacactcttgtagtcttgttttccccgaaagcattaatcacaaccttcaatttgccaacttggctcacgtaacagcatatcacaccaccattagtagtcatgtatgatatattgaaatttgctagatcataacggccgcgcattcaggggactcggatgataaagtcattatttgtttgaggtctttaatttgttgatagaatgtaacttaagttctgtggtgttatcctcttaattatatatgacgacaatgaccgagttggtaactatttactgtactcactaagggtgacgtgtgtggagtggtgatccattggagtatgccgactaaatgtgagtctcttactg

SEQ ID NO: 4217 - DNA, 438 bp, Glycine max
  unsure (1)..(438): unsure at all n locations
agcttcacaagacaaaccttatacataccataccatccttttatctatctctacttcaaaatcaattnttgcaacattcactcaatggtgcacttaattaacaaaccctcatccatatacacatatttagagatcaacaatatgattatctatcaaaaatacacaaaatcagtgtgtgtttgggtaggcgttgacaaaaattagttttgaatgaaattgattttataattttttttttgttaaaattgattttgaagtaatattatttatgtttggatgttttattaaaaaattaagttatgaataaaatgaagtacataattttggaccaaaaattattcaaaattatttcaacccaaaattaattctgtatccaaagtcaattttaaaattttctttgatgtgaaactaaacatgtaaaaatgtatntaaattaaa

SEQ ID NO: 4218 - DNA, 435 bp, Glycine max
  unsure (1)..(435): unsure at all n locations
agcttagagagaaggaagcaagctntgcatgagtagcgcttggcacttgaacaagatgtacatattgttatatctccatccaatatgaattgtgactgtttaaatttaatttgcgagtttgccctgtgcttttgctgcttgtttttaatgtggcatgtgatttcattttttggacattcttgggtttgacattccggacatcatttttgctatttttttttctttaaattgattgaaccctttaatttaaattgtgtaaaatattcatgcagaaaccaaaaatggtttataatgaattttccttgtgtattactacaacttatggaagatgtgggttgttaataatggaaccgctttacattgatttatgatatggataaaatgaattctacactaatggagggttatcanaaattataatttaaagtgttactt

SEQ ID NO: 4219 - DNA, 456 bp, Glycine max
agcttcccaacatccaagcaaaacaacattcaaacagcacaagctatcacagccaagcaaaacagagcataggcagaaaactctgccaaaacaccaaccaaatcacagcttttctcacttaaagaccccagtaacaattccttcgatccaattcgttaaccgttggatcgactccaaaattttactggaagtctatagtacataagcctacattgtgaccgttgggatctactagaaaacatccagaactcattctgcactagactttccacatccaaccacacacaagcatttttctgcacaaagccaaaatcctgctgcacctattttgacagcaaaattctgcataagtgcagatttcgaaaatcacacttcctctcatccaatcttgcccaaatcaattcctacaagtcccaaatcatgtatcaaccatgtctaacccaaaatcaagcttta

SEQ ID NO: 4220 - DNA, 426 bp, Glycine max
  unsure (1)..(426): unsure at all n locations
gcttgctnttatgtccttttattgctattattgttgaattatccttgaaaaattgtcttgttaaaactccattggtttagctttcatttcactttttttgtctttggttattgcttgtctctttgtttccttgtttgtgagttgccatatagggaattagaaaggaggattggtggcatcccttgaagaattagagtcaaaaagcaaggggccaaccaccttaagagctattcgactaagaagcactccaaattgagaacctttttgtaattntgcaattgacaatttacttactttcattgctttcaaattatgtaacaaaaaggtctttcattggatgtaagttaagagcctccaataggtcaccctacttccatttgtgtgtagtaattntaggtaattttcccttacgatatgagtgtttat

SEQ ID NO: 4221 - DNA, 350 bp, Glycine max
ggctgcagctatgtcgaaatgttcacaatagaccttctcaacctcagcagccatatcaaccacgacagaacaattatgacctttccagcaacagatacaaccctggatggaggaatcaccctaacctgagatgagacaaccctcaccaacaacagcagcctgctccttccttccaaatgctgctggcccaagcagaccatacattccttcaccaatcctacaacagcatcaaccccagatacaaccaacatgtgatgcccctccacaaccttccctcaaagaacttgtgaggcaaatgactatgctgaacatgcacgctcagcaagagaccagagcctccattcacagct

SEQ ID NO: 4222 - DNA, 453 bp, Glycine max
agcttaggaagatctgatgcagcattgcagttaacagctacacttaccaatggtgacacagaaaacttcatagctctaatggggtgtgcttcaatttctgtctcatttgttatagtagcattcttggtgatgaaatggtccaaaccagccaaggcaactgtgtttccacaaggaacatcctcaactgtttcatatttcttccccatccaaattgaagtcccctgaacactcttcacatacaggtctttcttctccccaggaacaaaatttggccccataattctagccttcatattagttgacaccttcccagagaagactcggccaaaagcataaaaccttcccttatcagatgtaggaatcatctttgacacataaagcattaggggcccttcagggtcacaatttctgatagcagaagcgtaagggtcatcaaggggaccctcatacaaa

SEQ ID NO: 4223 - DNA, 447 bp, Glycine max
agcttgtgcaaatcaaatcactcctacatttcatctctagcatgcattttctttctttacccactcctcacgtttggttttttagggaaaaacaccataactaaacgcgccgcaagggatccctatcgcaccagatccaaatctagaacgatgggtgatcaagaggagacgcaggaacagatgaaagccgacatgtcggctctgaaagaacaaatggcctccatgatggaggccatgttaagtatgaagcagctcatagagaagaacgcggccaccgccgccgctgtcagttcggctgccgaagcaaacccgactctcttggcaactacgcaccatcctccctcaaacatagtaggacggggaagggacacactggggcacgatggcagccctcacctgtgatacaaccgagcggcttacccttatggattgccggccaactattca

SEQ ID NO: 4224 - DNA, 430 bp, Glycine max
  unsure (1)..(430): unsure at all n locations
agctntgacatttgagaattatggcctggttgcgaaccattggctatggcccattgagattttggcagcccttgccatctggtagccattatgcgccggtgattatgtcctcgtgatgtctgtcgttctatatactgatcagtgtcaaaatcataccctgacagtgtaaccccttctataacttcatcattgtctacgcagcgagaagttacatgtggaggagtagaatgatccgcaaatatatctggattatgtgcttcaaagtcacatgtaccagaagatgcttcagttggtgaaacatcctctcctgtgctgcgtatgttctctttaatttctgtgtcatcttcgagtcgatcccttgccttgtgttctttctgtctaagctatttctggtgtttcctctctaaaatctcatattttctataaatag

SEQ ID NO: 4225 - DNA, 444 bp, Glycine max
  unsure (1)..(444): unsure at all n locations
agcttcaaggctaagtcttcatgttgctccttttatctctagcaaaattgaagccaacgggtgaagttgctaaatacaaggcatgattagtggccaaagggttactgcagaaatatgttttggattaccatgaagtctttgttctagttgcaagaattgaactaattagacttatggttgcaattgctagctaacggggttggtcattgtatcaattagatgtgaaattatcattcttaaatgggcccttagaaaaagtctatgtaagtcagccacttggatttgaagtgaaggttcaagaggacaaaatgtacaagctaaggaaggctttatatggcttgaaataaacacctcanatccggaacaagagaatagatagcttccttatgcaacaaaatttgtgagatgcacttctgaacatggtgtttgttacaaactcaacaa

SEQ ID NO: 4226 - DNA, 402 bp, Glycine max
ctgcagcttagcttcttaggaatcttctcatgaggtgagcttagttataagagggatgtgtgtagctaagctctagcttcccaaggaagttttctcaaagaagcttctcaaggaagttttctcaagaaagcttctcaaggaagctaccttgtctataaatagaagcatgtgtaacacttgttgtaactttgatgaatgagagtcttgtgagacacaactcaaagttcaacttctctccttttttcttccttcaatttcatgctcccccctctctctttctctccctttttcttttcctccattgaagcatcctctccaagcttcttattcaaggctgcatctggtggtgaagctccttctttcatggctttattcctagtggatggcgcctcctctcacctc

SEQ ID NO: 4227 - DNA, 77 bp, Glycine max
ctgcaagcttgtaagtacttataggagaagaaaatataataagcttctccaattagcttatacataagtgaatatca

SEQ ID NO: 4228 - DNA, 439 bp, Glycine max
agcttcgtcctcagatccctcttgttggaatatgcccaattgagacagccctcttaggtttagactatcttaaactgagtttcgtccgcagatccctcttgtaagactagactcagctcaagcagcttatgaaagtttagcctaatttagcctaagcttcgtctgcagatccctcttgtatgactaggcctagactaaacaacattattgtaacaacataattaaaaccaaaacttaatccacagatccctcctgtaagactaagtttcgatcttgcttcaatcaagttctaaggcaataatacatttgctaatgctaaagtcacctaactatgcacacaaatggattatcagaccaaaagcatacaaacattaagcattgaaagaagcattgaacacagaaaacataatcaattagatattaggtatttatatcagct

SEQ ID NO: 4229 - DNA, 407 bp, Glycine max
agcttgaatgtgtgtaacccaccattttctcatagaagtgttgtggttgggggcgaaattgaggcccctccaaagtgttttgcaggggtataccaccaactgcttgcccttcagtggcatatccgaggcaaggctcgaagtcggctagattgtggtggggaatttcatgtgtctcccccatgggttgagagacatgtgcatgatcagattgaggttgttggctctcaataagtatgggagtggagttattgacattctcattgggagtgtatgccacattgggtggtgtatagttggcaggcaagccatataacgggaaggcgtgcttgttttgaatttgcacataatgggggccacctgtacttcccaaatcttcgcctacaatatctgagattggatgattcatt

SEQ ID NO: 4230 - DNA, 419 bp, Glycine max
  unsure (1)..(419): unsure at all n locations
agctttgatgcaacatttggagaggttaatgaaacaacgagatgatgcgctccatgagaggttggatcaaatggagaatagagatcataatgaagaagaaaggaggagaagagggaatgatggtgttcctagacaaaaccgaattgatggtattaaactcaacattcctccatttaaaggaaagaatgatccggaggcctacttggagtgggagatgaaaatagagcatgttttctcatgcaacaactatgaggaggaccagaaggtgaagcttgccgccacggagttttccgactatgctcttgtgtggtggaacaagctacaaaaggagagagcaagagatgaagagccaatgtgatgtgaatcttacggngcgcggatcgctngaacaggctgtatagtttttggatgacgccact

SEQ ID NO: 4231 - DNA, 438 bp, Glycine max
  unsure (1)..(438): unsure at all n locations
agcttgcggttgcgggtgtgaacactctgtataaagtaaaagcgttgagaaaaagtattcggtgtgggagtggaattcaatgcttggattgaaggaaggagttgttcatggcagcgttgtagacaatgcgtgaaggggttctcttgtctttattgttttgttgtccttcactggttagtggagtgtggaattggggagagtgtgttgtgagagagagtctagtctgggttcggttgtttctgtctttatctttctaaaactaaaactaaaactaaaaaactgtcatttctctctctagaagttgtgtttgtttgctccgtaagaggcttgtgtgtttagacgccttctttttgtctttaccctgngtggatagggaatcggggctggccaaagggcttttaatattccctaanggtgcaagaatccaaacatgcctta

SEQ ID NO: 4232 - DNA, 431 bp, Glycine max
  unsure (1)..(431): unsure at all n locations
agcttatagatganaagagtcaccaagtattgatcatcttagctcacgaaccctagcattactttctcgcggattaaagatcgtagacttttttttcgatcaaacgttacacataaaaaaattcaatgttgtttttggtgcagatccgaaattaagtttagttaaaaaattaactatttatgttaatgtatcctattctagttgtataacgagagaatagacattatactcgatgagtctagaaagttctacaaatttattgaactataacctattaattatgataaatttatgaacttttcaaataattatattataataattcaaatggtgatctatgagtgaataagaatagaaacttaaattattttatatcctataaaaattaaactcttacaacaatatatcacatttatgctattttatcctca

SEQ ID NO: 4233 - DNA, 447 bp, Glycine max
  unsure (1)..(447): unsure at all n locations
agcttcaagaatcaagtttcaaagaatcatgattcaagaataatcaagtttcaagattcaatcaagtttcaagaatccagattcaagaataatcaagatcaagattcaagactcaagattcaagaatcaagagaagactcaatcaagataagtactaaaaaagtttttcaaaacattgagtagcacaagaattttttataaaatcttttaccaaagagttttactctctggtaatcgattaccagaaggtagtaatcgattaccagtagccaacattgttttcaaaactgatttacaaagctgtaatcaattaccataatcttgtaattgattaagaatgttttaaaatgttagatttcaaatttcaagagtcacaactagtgataaaacatntttcaaataatttaaacttgtgtnatcgattacacaatacttgtaatcgattac

SEQ ID NO: 4234 - DNA, 443 bp, Glycine max
  unsure (1)..(443): unsure at all n locations
agcttccatcacatggagtcctcgacacagtgtgctaacgtacatgttggactatgcgagtcataggacttggtggtctgtggatgaccatatggagactatagtattcttggacgatcggcattgagtcttacacaaagagtgctgacaaccatgtcggtctgtatgatgtatctgcattgaagctcggaggccatggatcttcttcatcaatggagaccattgcttcttgaacattaatggcagaggaatggagaagaagaagaggttagaggagacgcctcttcatgaagaacatgagtctatatgaaccgtcccaccataagatgccatggataagagcttgaaggttggagatgatgagtggagggagatggagagacggggcactanatattgtgcctcacatgatgtctcatctttgaagtgtgattctcacatga

SEQ ID NO: 4235 - DNA, 442 bp, Glycine max
  unsure (1)..(442): unsure at all n locations
agcttcagaccaaagcaactcanaatctaggtatctaaaacccctcaatttaatggattttcaaggtttgagaagtgaaaatgagaatggggtaattttggagcaaactctcatctcaaacaaaactatgacattaatctaaactcgctcaaactggttttacgacgaaaactctaccgaatcaaaatttgactcctcaacacccaatttaccctagaaatggctcttgccttcactttggtcactcattttcctcctttgcacagcccaagctttcccacaatcctaaatgacatttcaaactaggattaactcactttaacctcctgtcgcaacgtgcccttcgcgggcgagcgagggcgatgctcacaggtgcgctttccaaaggaggaaagatgcgtggagtcgccaccaacgtttatttgtggaaaacgtcgggaaa

SEQ ID NO: 4236 - DNA, 437 bp, Glycine max
  unsure (1)..(437): unsure at all n locations
agcttaagctatgatgtgattatacatgaatggttntattactttatgttatatttctaacgccccctcttacaagctccatttatctttctctcccttgctttgatacatgttatattccaaaagcttaaactattaggtgaaagcatacgacntaatttattactttatattatatttcagacaagaactacttgtctaggggattgtctaacagtctatgtctattgccactgctattctaataattttaattaaaatactatttttcttctttgttaaccaaactaatgatttagagaaattttataaatnttaatttaatgagcggatgccagatgacaattaaaggcctttgtttatgctagaaaggcagggtgcagggtaaaaaataaagaaaagagagatagataaatagacatgtcataccttgatgt

SEQ ID NO: 4237 - DNA, 442 bp, Glycine max
  unsure (1)..(442): unsure at all n locations
agctntcttgagaaaactttcttgagaagcttctttgagaaaacctccttgagaagctagagcttagctacacacacccctctaataactaagctcacctcattgagaagcttccttgaaaagattcctaaagaagctagagcttagctacacacacctctctaatagctaagctcacctccttgagatgagaagctataacttagctacacactccttataatagctaagctcaccccatgacaaaatacatgaaaatacaaaaaaagtccatactacaaagactactcaaaatgccttgaaatacaaggctaaaaccctataatactagaatggccaaaatacaaggcctaaacgaaggaaaaaacctattctaatatttacaaatataagcgggctcatacttagcccatgggctcaaaatctgccctaaggctcatga

SEQ ID NO: 4238 - DNA, 444 bp, Glycine max
  unsure (1)..(444): unsure at all n locations
agcttggtttgaggtacttacccgttgaagactgaagaaaacgaagaacaaacgatgaatcttgaagaacggtcgagaatcttcgcgtaattactcacggaaacgttacggaagcgcctcggcttggattttcttcacggaactaattttcctcagctatttcgagagagagagaagtgcctaaggggctgaacccttttcttcttcacttcatcctctatttatagcaaaataagggagaagcttgccgcctagctcgcctaggcaagcaaggttgcttcctccagaagcaacagccttctggaggaatcttttggagggcccaagtgggcatgattgctatttgcacccccatttttactaaatgcacccccttctatttttttggtaattctttttccgtaacgttacgaaacttcacgactntcgtaacgatacttattt

SEQ ID NO: 4239 - DNA, 438 bp, Glycine max
  unsure (1)..(438): unsure at all n locations
agcttgtcaaacctaacacctgcgatatattttaaatntaaaacgggaaacaaaaattacggcggaaaaattaatcaaacccgaaataatatatagaattgtggacatttatttatctatatggttattcaaaacttgacatagaaaaaatatttatctattaccattggtgtaatttatttgtctaagaacttcacagcaactgcaagagaatggctctggtggtgggggccaacgacaaagtgacctcacatcttggttatttggtggctgagtttgattctcttgtgggggatccacgttattaccaactcctccttctccaaagaanaaaatatcatcgccatgtatgaagaatcgatcaccttggccttcggggatcagttccttacccgcccccctcggtggaccctcttcctcctccacatcaacaacatc

SEQ ID NO: 4240 - DNA, 433 bp, Glycine max
  unsure (1)..(433): unsure at all n locations
agcttgatccttgaatcttgattcttgattcttgaattcaactttcctcttgaatcttgaagtgttcttcaacttttccttttgagtcttgaagtgttcttcaactttcctcttgaatcttgaagtgctattgattctatcttgaacatcttgaactcattctttgattgacctttgagctttttgtcatcacctttgtcataatctttgttatcatcaaaacatctttggatcaatcttgattcatcatgaagctntgcttctacaatctccccctttttgatgatgacaacttctgaaatcaagaaatacacacacacacatactttttcctagtcgatcactcatataaatttccattctccccctttgattatgaatntatgcttctcttaaaattaagttgattactcgtgtgagttcttgatttaat

SEQ ID NO: 4241 - DNA, 431 bp, Glycine max
agcttgagatgcaattttgatcatcttaatcgttttcattgcacgtttctcttgcatggctaaatatatctttgatatggtatcagagctcttctgatgaagagctctgctgcgcactcacctcctttttcatacttctctcaactttaatcattcatcatgaatgaaacaacactcagcaacatggaaagctacttgtacctacatccgagtgagaatccaaccattgctctcgtctctctagtcttggattcaaccaactaccattcatggagcaggtccatgatcactgcattgagcgccaagaacaaagtggaatttgtagatggaagcgtgcctgaaccattgaaaactgacagaacgtatggagcatgcgccgatgtaacaacatggtagtctcctggatcattcactcaatagctacctctatc

SEQ ID NO: 4242 - DNA, 449 bp, Glycine max
  unsure (1)..(449): unsure at all n locations
agcttagcttgagatgcctgacctttagcatacagtaagacatcatctgcgaacagtaaatgagaaacactagggccatttgaggtcaacttaactggcttccacctcacctcccatcagacactacctaagagatcatatcaccaagcctctccatacatgatacaaataaatatgggaacaatgggtctccctgacgaagccctctcacaggaataaaactattttttgttctacctccattccacatgatagaaatagaagtagatgacagagcatgtagaatcaaagacataatgttattaggaaaataaaaaaaataaaaaagagtttcccaccaaaaaaatcctagtccacacgatcatatgccttctccggatccaatttaaaaataaaatccctttcttccttttagatntatgcataaaatgaactaactcttgaagaat

SEQ ID NO: 4243 - DNA, 438 bp, Glycine max
  unsure (1)..(438): unsure at all n locations
cacctgcggcatgcaagcttaccagtggttcaagtaacaaagggattgtaagtttttcgttttcatanggatggtaatttaaataataatagtgcaaccaactaattacttgttgatttaggaataattaattctgaaaaattttcttttttatttgtctgaaagatacaagtaattaaaataatagataattcaatcaataagaatagttaggtgttgaatcccctttatttcaccgggataatctcgttctattacatgaacaatgtaatactatatttttcataatgtatgattaagtatatttaattaacatttaagagtaattaaatttaatttaactgtctataattaattaattatgagataatgtgcttgagcgcctatatatatatatatatttatatatatatatatatatatatatatatatatcta

SEQ ID NO: 4244 - DNA, 423 bp, Glycine max
agcttgaatcggacatccgtgtgaaaagttatgaccatttgaatttctcaagagcttccgttgttcaatttcgatcctctcgacatattatgcacccgaatcggacatctgtgtgaaaagtcatgatcatttgaatttctcgagagcttccgatgtttaatttcgagcgtatcgatatattataaccctgaatcggacctcagtgtgaaaagttatgaccatttgaatttgacgagagcttccgttgttcaatttcgaatatcactgtatgtgatgcgcctaaattggacattcgagttaaatgttatgaccatttgaatttctcaagagcttccgttgttcaattctgagcgtctcgatatgtgatttgcctgaatcggacatccgtgtgaaaagttatgaccatctgaatttctcaagagc

SEQ ID NO: 4245 - DNA, 452 bp, Glycine max
agcttccatcacatggagtcctcgacaaagggtgcaaacttctcatgtgggactttgtgtgtcattggacttgatggtctctggatgacgatatggagactaaagtagtcttggtcgataggcattgagtcttcgacaaagagtgcagacgaccatgttggtctctatgatgtagctccattggagcttgtaggccatggatcttcttcatcaatggagtccattgcttcttgaattttaatggcagtggaatggagaacaagaagagttgagaggagacgcctcttcatgaagaagatgagtctagaagaacctcaccaccatacgaagccatggattatagcttgaaggtacgagataattagtggatggagatggagagaatgggcacgaatatttgtgcctcatatgatgtctaaactttgaagtgtaattctcaaatgatcaaagtt

SEQ ID NO: 4246 - DNA, 439 bp, Glycine max
  unsure (1)..(439): unsure at all n locations
agcttatcatatgtcaatntgtgattggatattaatataataatatccttattgtcaccttatagagtattttctcttttactatttcatcaatacatgcatatttttgtttctatattttttttgttaatattatttgacattttttagtttttatcattttctttttcaatttttcaatcattttttttactttttctcttgcaacttttcaaaatgtgggccaagttggttggatgcaaaccatgcaaaaatgtgattcatttaataagcggatcagtctgctctggtccatttaaatgcagaccgaaatggaccgagctagcctgtatatatatatcttgctgttataaattaaacaaagctcttttaatttgagtaattcggggtatatcnntactcttaagtttagcgggttatgatcatgatacttaaaatc

SEQ ID NO: 4247 - DNA, 445 bp, Glycine max
  unsure (1)..(445): unsure at all n locations
agcttataagaacaaaattgccttaatcatttccaaatatgcatgtgaattangacgcatcaacaagaatcaagccaaggctattgtgcaagcaatcaatggggcaaaacacaccaaatgattataatgatggatggctcaaattctcacaaaggtaaaatcatcactttcaaaactatcatgacatgtagagaagaatcaaggatttcaagtcacaaaatgtcaagaacttttattttcaaaacaattacccatttatttcttgaacatatcctataattcaaagaaaaacatgcaaagtcgtgcgtgcacacgaaattgacccaaaatattaaacttaaaatccgacgaaactaacaacattaacaaattaacacaactaacaaattaacaaaaccaacaaaactagaaaaaccaaagaacactcccccccccnccccatact

SEQ ID NO: 4248 - DNA, 441 bp, Glycine max
  unsure (1)..(441): unsure at all n locations
agcttcctcttcgttgaataaattgaatgtttaaaaaagaatatgcaaaacctgcattntgatagtgcaactcacttgaagcattggaaattcaggtgatgtatatgtccatatgaattgattattgcccaagacgtgattagcagccatgttgtccacaggactctctaattccattgggtgtttcgaatggcccattctgaatcggacagccttagcagaatatatagggaagccatgctgaaaatatgctgacaagtaaacatagattctttgtcagatgattaagcaaaagttcatgatcctcaacatacccatttttcagattaacttgatacacaatggagtttaatttagctaccangctaaccttggaatggatggacataaatctccgtaacaagacantaatttgaagctagctcataaactaaagtctca

SEQ ID NO: 4249 - DNA, 442 bp, Glycine max
agcttcaagataaggccatactcccttctctctctaaaaaaaccctcacatgcagaagctccttcagaaaaatggccaaactccccttccaaaatctgatttcaggcttaaataggtggctttgttcgtgctcgtgcacttagcgcaattctgaaccccttagtgcgcattagtgaatttcggcttagcataggcttttctcgctcagcgaatggactggagcggtgcgcttagcgggatggcccttcgctcagcgaacatgcacagctcatccttcttccagattcttcctcgcgctcagccgaggagtgttgcgctcagtggatggctcgctaagccaacaggttggcttagcgagagggtgaaaatcaacactatacaaactcacctaattaatctgaaattgagaaaaaaatgattattaaacacacaaaatggaagt

SEQ ID NO: 4250 - DNA, 445 bp, Glycine max
  unsure (1)..(445): unsure at all n locations
agctnttttgtacgacaccttgtaggcaatattactgttaatcctctcttgaatcaaagaaacttttattgatggatcttctctgatcatgcctgttaatagaataacaaaattaaaatgacaattaacacaaaagtagcataatatgaacattaaatacgtacctactacacaagtggcaattaaatcataatcaagcttctcgtgatcttgtgtcatggtcatattgagacatgtgtgtggttcaccccattgtgtgactttccatgaatcagtttttttagataaaattgtccttatatagaacaggcaaggacactctgcgcttttattcaagcaacaaacaacatacttgttcgatttgctttcaacaactttgaaagtttgatgcaccttcataacatattgttntaatgcattttttaccgcatccttagtatcaaaa

SEQ ID NO: 4251 - DNA, 439 bp, Glycine max
agcttggtgttaatcaccttgctgacctttctgttgaggaattcaaggcttcccgtaatggattcaagaggccccatgagtttagcacaacaacatttaagtatgaaaatgtgactgctattcctgcagccatagactggaggacaaaaggagctgttactccaatcaaagaccaaggtcaatgtggtaagataaagaacatcatataataagtactttattatgttccataaccatcattatttccttcatctcatttcaattatttccttcatctcattttatgtgacacatttaaaatattcctgcttcaattttttttatcactttaaaatataaaaaaaatactaattactttttttttttccaataacatcctgactactgcattgattagtccttctatttctactactgcaatacatttttggaaataata

SEQ ID NO: 4252 - DNA, 434 bp, Glycine max
  unsure (1)..(434): unsure at all n locations
agctngagatgaggaagtgtataagggtgaacttcctgcttttattcgttgaccacagagtggtacctggagatatgtcgcgggggtcaggagaccttgggaacgtcaggtggggtgctattgcccaaaaccaagcttgaccaatcccgacccaacccgggcatagtcggtcagtgagaacctgtgatgtacctaaacaggcgagctcctggcagtcaacagataaaaggaacaaaaaccacaaagcaaggaggcttgtggtggctggccagctgtgaattttgtgtgatatatgggttgtggcctctggtaatcgattaccaagggtgggtaatcgattacaaggcttaaaaatgaagacaggaggctaagatggtctctggtaatcgattaccaggctcgaaaacgaggtcaggaagccatgagggcttctg

SEQ ID NO: 4253 - DNA, 421 bp, Glycine max
  unsure (1)..(421): unsure at all n locations
agcttcaagataaggcccaatctccctttcttaatctgatttcaggcttaaataggtggctttgttcgtgcttacgcgcttagcgcaattctgaaccgcttagcgctcattaatggatttcgacttagcgcgtgcttgtactgaagtagtgcacttttctggatgacacttcacttaacataaatacacaactcatccttcttccaaattcttcctcgcgctcagccaaggagtgttgcgctcagcggatggctcgctaagccaacatattggcttagcgaaagggtgaaaatcaacacctcacaaacttgcctaattaacctgaaattgagagaaaatgattattaaacacacaaaatggacatactaagtatttattacctatctttaacaaanagtaattacaatactacaaaacaac

SEQ ID NO: 4254 - DNA, 453 bp, Glycine max
  unsure (1)..(453): unsure at all n locations
agctntgctatagcaggttcattccatgatggggaatcatttccagaaagatggctgctgccatccactcttacatccgttcaaatctttacactttcgagtttgaagtatctagatgaggaaagccttcagcaattgacctctctggagactttggggattgcacgctgcccagaacttcagtgtatgccagcaaaccttacttcttcaatttccacccttcatatcatgacgagtccaagacttgaagaaagatgtaaagggaaaaaagctgtagattggcccagaattgctcacattcctatgatacggattaacaagaaattgttacagtgggaacaaacataatattctggaattgcctatcttattgtcaggtatctgctctaaaattccctatattttctgcaacgcaacatagttggtttatatttggcttatcttctgtttatt

SEQ ID NO: 4255 - DNA, 451 bp, Glycine max
  unsure (1)..(451): unsure at all n locations
agcttgtgtattgctgcattctactaatatatggaattgtccactgctttggctaagaataacaattgtctgaccataacaacgctggaggcggtaagggacaatggtctttcaaataaacctgttgtacatgaacaaagattatatcatgcggtgaccgtgtcaaatgaaccagcgaagtcattgcataattgttatactaactatattcaatgtacctgaacaaaatgatttccaaacaagtgaccgacacatatcatgcggtgcccagaagaatcaggtggtggttgacttctaagaggaaaaaatgtcatgctttgttgtcgggatagtaatacaaggattacgttataccgtgatgcaatcacatatcccatctccgttatatccatccactttgccacactaacctgaatcaaccaaacatacacanntgtagtaattaaaagtt

SEQ ID NO: 4256 - DNA, 423 bp, Glycine max
  unsure (1)..(423): unsure at all n locations
agcttttcgcccaatagtggtatcaataattcataggcgtatttatatgattatcacacatgacaaacaatagtattattttattgccaaattcttcagcagtcccaatacaaaggtaataagctattctaagtcaattttgttctttcaatattgaactactgtggtccctgtagcggctntttgcgtgatacagtggtgctactatgacagacttcaaaaattcatttttacccccaaaaagatagactaatgtttttttttttgggtaaaattgtggtttctttcccattttctaatgcattgtgtgcttcaataacataatatggcttgaaggctttcttccttgaccattccacaaaaaaattcatctggttttctccccatcatatcccgtgttaaggaaacctaaattaaagtcat

SEQ ID NO: 4257 - DNA, 214 bp, Glycine max
agcttgtttaatttgataatattcaatttcatagtatattagagtaattgagaaaattttaacctttcacttttttcttattattacatcgtatctagtagttttcaagtacattaatttatacttgtgatgtttcttttgctcatgaacaatatggtttgcagaagacaatgttgctaaaagatcagatgttataaaccaggtaagtgtggaa

SEQ ID NO: 4258 - DNA, 452 bp, Glycine max
agcttgtgtgtccctgaaattccttctctggaaggatgctccacaacccaattcatggatttcctgattgcacaaagtaatttcctcaaattcaatgatggcaacatctacaacacaatcagggaaatcgaaggtgcttacattgacttcatggatcgcatcagtggtgacgaaaacttgggcactggggtcattcaacacttcaaccattgagaagctatgaagcacggacacttcagccctttgtcgtgttcggtgtccgacacgcgtccgtgtcagtgtccgacacgcgtccgtgtcagcgtccgacaccgacacaacacccgtattacgttctatattttggacattacaggtgtccacgtgtccgtatccgtgtcgtgtccggtgtccgtgtcggtgtctgtgcttcatagttgagaagaaaaactccaaaggaaggcacatatgca

SEQ ID NO: 4259 - DNA, 434 bp, Glycine max
  unsure (1)..(434): unsure at all n locations
agcttctatataagctgaaccattttatctataaacacaagttgtgttttattcagaaaattagaatttatctcttttatcttagtaagagtgattcttctaagttcttgagtgattcaagaacaccctggctatatcaaatgactttcacaacctttgtgtgtttccctcgccgaaaagagtgattctttccttcctttcttcttcaaccttgttctttcaaaccataattccagaaaatccacttctacccagaattatctcgtggccataactcccattttagtgctaaaactaagtgattcttgagcctaaattgaatttcaaaacgagatctttcacctcantttggaatcacctcatttagagccttgtagcttgagttattgtcatttctatanttttggctctcaccacttaacctatcgtttttt

SEQ ID NO: 4260 - DNA, 440 bp, Glycine max
  unsure (1)..(440): unsure at all n locations
agcttatcctaaatgacactccttgtaccaccaagttcctaactcagtcacttttaaagtcctactgagcgagcacaaagtgacttgtagcagtttggtgagtaattaagtactcctttctctgcaaattttaaaatcatcttcatatctaatatgaacttaatgttaattttaggatgtgttgagtaccatgtactcatttatgaaagctacaggattcacccatctaaattcggtagggattacggagtgcaagactatttataatcattggaggaagactgtaaaattggaaatagatggaggacttttgcacaatcataaaatttgcagactggaactcaaattatatttgagttctcagatgcaacttctaactntgttttattgtggaattttttttgtaattaaagtacattacattatactattatcaatct

SEQ ID NO: 4261 - DNA, 439 bp, Glycine max
  unsure (1)..(439): unsure at all n locations
agcttagggaagtctctgttaacaagagagactctgcccaaaattccctaaaacttttggacaaagttgtgttgtgaaatttgaagctaaaccctgagaggtagtggctatctttcgattttattgtgaacatgttctattgtctcaaagtttttgtaaaatctaacagttggatttttgtgaaatttgtcttgaattaaactaaacacaacattcaacaacttttatgttgaggtaaaaaatatttgagcttaaatttgaggccatctgtggccttaaagttgacctctcttttctagagtttgagactaacaatgctatgtttttctcaaatttgaaactttgtgtttatgattntgaanatatgatgatttatccttgaaatagacaaaataatattttaaccatttacgttatgtaaattaaagagggtaccttc

SEQ ID NO: 4262 - DNA, 437 bp, Glycine max
  unsure (1)..(437): unsure at all n locations
agcgtagtgganagaatcattgctccacttggcatgactaagaaactcttggcatctaaagttgccagtcatgaatagagtcttgtcatttaatgttttgtccatttcgctcttcagccataacccgttttgtaatttactgctgtagaatctatgctacagatggggagcaagattgacaccatcacaagcggctgaaaaagtaaaacacttcttcaaggattattctatcaatcgacacaaaatgactgtcttgacgccttcctaccatgctgaggtatgtatgtgaagacagagttgaatccttctggataactccttgattgggcttattatattctttgttggctaatgaaagttaatctttcgatcatcctgcaaagttattcaccacaggataatatgtttgatcttctccagcttctctataatgcaag

SEQ ID NO: 4263 - DNA, 431 bp, Glycine max
  unsure (1)..(431): unsure at all n locations
agcttctaaatacaataatatcataatgcattactatagaaaaggtgaaacttttataagttcaactagataagacattttattaagctttcaattcttctattttcacttcctatcaatgtactcaaccaatcagaaaccaactttggtgtaaagtcaacaaacattgaatgacggtgtaaaaaatctttataccgtcaatgtatatatattatttattcctttttttttaatgttctaccctttaaagttggtgagtagcgatcaagttagaaaataatgcatcaataacttgaagtggtaagagagctataccttccctagtaaattgtggtgccaaggaaaatttgcgacaggaaggcagacaatgcangttgaagtggattgtaaagggcaaccaaagctggccccaagatcttattgctccatgt

SEQ ID NO: 4264 - DNA, 419 bp, Glycine max
  unsure (1)..(419): unsure at all n locations
agctntgagccaaaatcctgactcaccatataccttgacccaaggtgagaatgccaatccttatcctcggaagcaaaaaaagaggagaagaaaatttccaatcaaaggaaaaaggagaagaaaatttccaatcaaagaacaagagaaagaaaatttccaatcaaaggaaaaaaaggaagcaaagaaattcccaatcaaagagtgggagaaagaaaaaaagaaaagaaaggaaattcccaaccaaagaatgggagaaagtaaaaaagaagaaagctcctgatcgaaagaaaacagaagaaatgtgcagagaggtctttggaccggacaatatctgaacaatacagaattgtcaccaaatgaacgaaaaaggaaggaaaggaaaccacgacctataatggtcttctccctttaattaccaa

SEQ ID NO: 4265 - DNA, 437 bp, Glycine max
  unsure (1)..(437): unsure at all n locations
agcttgccattgtatacacagaagacgaattatgaagacgaacctttttggaaggaaggagaagaacgaaaccaaggaagaagaagcttgcggggaggttgctgggtgcacgggagaagaaggaaaccacggaagaaaacgttttttgaaacggaagaagaagaaaatgtttttttttttataaatatattaacttttattttttaaatgaaggacattttaggaagttcattcaattgctgggtgcaccaacaattttgctgggtgcacctagtaacagcaaaaaatcatatgcccaaatactatgcgggttacatggactgttcacgggcccatatccaaatgtctggacctagatacaattcccccattatatttgcagtttcggtaattnttcgtcttttcattntaaaataaaaatatttagtcattttatt

SEQ ID NO: 4266 - DNA, 441 bp, Glycine max
agcttggagatgatccaggagaaaataatctcagagatgaaaaaatcttctgatttacttattaagagccggatttgagaaatcttacaagcatttgtaattatactgctatattactgtacaattgctgaattaggatgctaacaaaccgattgatcctacccaactgtaactgaataattgaggagttagatacccacacgtgatcatgaagtagttcatacgggaactgtatacagtatcatatacatcatctgattcttcttcataaatatatatatatatatatatattataatttttgggtacaacttttcctactagctagttacaagaacatactcctcattgtcgtaattcaactcttaaatatgttttgcattgacggtgaagctggtataaattgttgatcaccctccttgtttaaccgtacctgcatgc

SEQ ID NO: 4267 - DNA, 398 bp, Glycine max
agcttcttgcgtagccgctcttggtgctcttaatatcccataaacaaatccctcttattactagctattttgaattctttagttcctgaatgtacaaccttcaaattgttgcttgttcccctctttctgttctgcaaaaaagaaaatcaaatgttgtcaaaacattgatgaagtcctaagaaaatcaatatcaaagaaaacatggatgaaatcacaattaaaaagcacaactacctatctttcaaagtcctttggttaatttgttttgtcttcttatgtggtggggttttgtttaataatcttatacttttgccttccaaaaaaaactaatcactaatcctcttttcattaatccaattttgtatgttattgtataaaagatcatgggttctccacct

SEQ ID NO: 4268 - DNA, 450 bp, Glycine max
agcttgtttgaataatgaactgattgattatgatattcagtggtgtgatttcttatgaatgagtgtttgtgaatgacttgaatgagcaaatgtatgaattgaatggattggaatgtttagattttgctctaatcaagcttgcagccatttgaagagaagagaaagaacatgtgattagatgtatgactgaaaatgctagtcagtttgtcagattgattgtgaaggaatgcattgaccgtatcccagtgagcgtgtgatccttaaattttaagagaaatgactatcatttaatactgatttttgcaagaatctctgaagtatggactgaatgcatgaattaaggatgatgaaggccatgtttgattgtgatagccacttatccaaatagctgaccacgtgcttgaatgatttatcccttgcacccagtttgagctgaatgaattactaatt

SEQ ID NO: 4269 - DNA, 434 bp, Glycine max
agcttctacttatatggcagggcgggctttcttcactttcttgtctccaacgcgagctttgaccaccgctcttccttcccgcgatgcttctctttatatccgcttgagtgggtttatagcctaaaccatatttcccacgatttcctttggcatttatcaagctagttatgccaccgttgtctttgcctaaacccattccgggttcataaccgttccccaacataacacgggccatcattactgctgcatcggataggcaagcttgcccagagaaggagtccacggaggaaatgcttaccacctcaaaagactggaaagcggtttctagtgactcctctgcggcctccacataaggcatagaggatgggcagctcaccaagatgtcttcctcgcctgacacgatgaccaaatgaccctccactacgaatttcaac

SEQ ID NO: 4270 - DNA, 436 bp, Glycine max
agcttcctcgggccattcctgcgaaggcttacatttggaaagttagttttaccaagaaatgctacccttaaaacaaaaatggcatacaaacccctccaataaatacaaacatcaatgtaaatttagagcaagcttatgcgcatacttctttacgaacgttcacttgcacaagacattctattaactaagaaaaatgcacccatatacaatcaaggcaccttcgttacctagattatttacatgtacttccaaggtgtatttgttacctacatcacacgcatttcctttgctaaatttacatacatgcatactcaaagcactttggctatcaaaaattgcatacgtgcacattctggtatttctaatacctatacatacacaaacttcatgatgaatcttgactatctacacaataagggcgtacatttcatgctct

SEQ ID NO: 4271 - DNA, 453 bp, Glycine max
  unsure (1)..(453): unsure at all n locations
ctcgaccgggatccttaagtcacctgcggcatgcaagcttgttgacagatttgtttcacgattattcagtagaagtgtaggattgattctcggtaaatgaataccaaacttagatctagtttgcataagatgagtgtttggaggtccttgaggagatgtgggattaataattgaggaggtggcttctgaactgattgttggaacagaagtaacagtaacagggagagattgattgtgggttcagtactaaatgactgaactagactagacgttggactagatgcttaaatatgtgttagtgtcagaatgagcagaaatagatttagactgtacaacatcaggaggatttaaatgatctgaaatagaagaggtatgtgtttgagtgggttgagatgaattanaagtagggtgtaaggggattggagactgaataatacgaatggaagagaactg

SEQ ID NO: 4272 - DNA, 351 bp, Glycine max
agctttgcccaaaaagttattgtctccatctttaagaaccatgtttcctgattctaacaactccgccgcaaccggcttgtttggagtgtgtgatgcacttgagaaccatatttttgctcctgtgccatccttgatactaagaatgccttgatcagtgtctacttctaagactccagagtggtctttaagtggtttttctttgttggctacccaaacaactgttcttggaaatatatttgcgtaccaaattccgatgtaacggctgtcgaagtttgctgggctgaagaatcctgcttcaaaggctccatttgttgaaaccagagtttcattctcattcttaccatctctgat

SEQ ID NO: 4273 - DNA, 432 bp, Glycine max
  unsure (1)..(432): unsure at all n locations
agcttatccagtttggtcttgcaagcgaatgatctcatcacgaccaacacgcttacactgcagcaagatgtttgtacctggtattttttttttctcaataaattntagttattaatttttattagcaagaagaagtcgaattcattacttctctcttattatgatccaataaatattaacattaatgatgacattatttatatgtagtgttaaaaaaaattgtcatgtcggtattaccgatgaaaaaaataatttctgttactaaacttcttactaatacattaatatttagtaatacgtatttgattgtataccgaattagaagtgatcatatatatatgtattgtgttgtgttatactggccgggatgtaggatttggagaagcatcaccagaagcaaaggctgctgaaaacctccacaatttcttcacc

SEQ ID NO: 4274 - DNA, 441 bp, Glycine max
  unsure (1)..(441): unsure at all n locations
agcttttaccaaaagtttggtcataccttattgaaattctacagatgtgagttcttgattaccctatttaattggcatcatctaatttctgtcttttcaattatataatgataatctcgaacgctctgtcagatgtttaattctttgtcacttaattatgtgagatctaatctatatcatgtagattcctcttcaaatactctttgctctgtctgtaaagggacttggtagctttgctccattgatgtttttctgctgctttactttgcattttcttttgctaagggagatcaattatccttcatattcctcatctccttgtacttttctttccatcatgatgaattttgttacccctctganatctgatatgaagaggaatggaaagaaggaaattaatatagaactganaatgcagcactaaatgcggaaagaattgat

SEQ ID NO: 4275 - DNA, 441 bp, Glycine max
tgcttgccacccagctcgcctaggcgagccatgtttcctagaaggcccaagtgcgcttggtttctatttgcaccccccatttactaaatacaccacttcctttttttgctgattcttttttcgtaacgttatgaaactttacgaattttgtaacgatacttgttttctttccgtaatgtcacggaaccttatgtattatgtattcatccctttttgggcttccggaaagttacgaaacctcacgaattgtgcaacaatgcttccttttgacttccggcatgttacagaacttcacggattgtgcaacaatgcttccttttgacttccggcatgtcacggaacttcatagatagtgcaacaatgttttcttttgacttccggcatgtcacggaacttcacggattgtgcaacaatgctttcttttgacttctgccatgtcac

SEQ ID NO: 4276 - DNA, 413 bp, Glycine max
  unsure (1)..(413): unsure at all n locations
agctngagctgttataagaatctgagatatttagacttgcttgtcgattgagaaaagaaaaatgacagaaagcattgggtgatgcagaatatgctacacaaactcttatggttgaggcagaagatgatctatcanaggtccaatcaatntcaatatctcttgtaatggatgaaagacctaatgaccaaagcatgaccaaaaagaactaggaagcctttccaaagcttagtcatgcaaatgcccaaaccaagaattgtctcatttctacaacttgaagagcaaacttaaagacaattatttgaagagcaaaatgagcccatgagattatattcaagatgcaactgtggcctagagtttatgtggatgattacatagctgttgggctaaagaactaattaaagcaccatttctaa

SEQ ID NO: 4277 - DNA, 416 bp, Glycine max
agctttgagcatattgaaatgacaataactttatacacggatgtccggttgagtcccgtaagatatcgagacgctcaaaatttagatccgaagctctgagaaaattgaattgacaataactttatacacggatgtccggttgagtcctgtaatatatcgagacgctgcaaattgaaaacggaagctcgtaggaaattcaaacgacaataactttttactcggatgtccgattgaatcgggtaatatatcgagacgatcaaaattgagactagaagctttgagcaaattgaaatgacaataactttatacacggatgtccggttgagtcccgtaatatatcgagacgctcaaaatttagatccgaagctctgagaaaattgaattgacaataactttatacacggatgtgcaactga

SEQ ID NO: 4278 - DNA, 444 bp, Glycine max
  unsure (1)..(444): unsure at all n locations
agcttcaggctgctcaattgctctaggttgttgcatggaagggcaaaggtctgtatggtggtcagcagaggagcacaaaccacagacccttgcaacaggtacagatttctggttcaaggccagctgggttaccaagttaaccaatgcatccaatttgccttcaagcttcttagtttcagatgatgcagctgagtttgtagctacctcatgcactcctctaatgactatagcatcatttctggcgctaaactgctgggagttggaagccatcttctcaattaaatttctggcttcagtaggagtcatgtctccaagggctccaccactggcagcatctatcatacttctctccatattactaagtccttcataaaaatattggagaagcagctgctctgaaatctgatggtgagggcaactggcacatagtnttttaaatctctc

SEQ ID NO: 4279 - DNA, 467 bp, Glycine max
  unsure (1)..(467): unsure at all n locations
atcctcagagacacctgcggcatgccaagcttggtttcccccccattattgggtgtttttacttcttagttagcttataaagntatcacagcctgttaggcctggtgtttatctgtgaatgctgccattcattgatggttgtcaacttgattgtacagctgtatgactgtgatacagacattaatgatgggttctgctaattttatttcagtctgtgattaagaagaaatatggtcaagatgcactaaatgttggtgacgaaggtggctttgcccctaacatccaggtcaatattttaattcatttctttttatgcatggaactccggtacctgctcatctttttggcctgtaactgataatctctattgagtgttcatgaaaacaaagaaggtttggaattgctgaaaactgccattgccaaagctggttacacaagcaaagatagtattttccctcgtcaaaatt

SEQ ID NO: 4280 - DNA, 447 bp, Glycine max
agcttgagactggcgctaagcccaatttcactgatgcaatcctacctcccaagggcattggatagaagactgcaagaagattgggaaaaagatgcaagagaaggccctagggttctcatgagccttagggtagatttcgggcccatgggctaagtataagcccacttatctttgaacatattagattaaggtttcattaattttggtccttgtatttagggctccataatgtaggtagggtaccctagaaatataggatttttcagcccttgtattttagggcacctagactagtttttgtattaggggtagttttgtaatttcacatgcagtaagtgaatatttgatgtgtggtggtggaaataaatttaattgagtatttgcttaccacaccccattgccacatcatatactcacactttgtgcatgtccttcatgctttacatg

SEQ ID NO: 4281 - DNA, 453 bp, Glycine max
agcttagccctagatgatgtaaatgcaaacatcatgttatagatcctaatgtgttgttgataatttctactatcattagcattgttatcaaatagaagacgctggagtagaggagttggatctttcaaaagagggagttgaactttgccatcaccacaacaaagataaaatttggggattgtagtgtgtttgtgtgttcgtgttctttcttgataccacatataagcttggcaatgtgtacattagattattggatctccaatatcaaaatatcctacaatgaataaaattgatattagatactaagactcaagttaaattgataaccaatatacaatatacaataccttctagtaagtcgtcaacaaaaattgttgtgggattggtaaataggtcatcttcctcagaatcaaaattattttcataaattaagtttgcattatgaagaatttt

SEQ ID NO: 4282 - DNA, 447 bp, Glycine max
  unsure (1)..(447): unsure at all n locations
agcttcagctctttctactgcacaaggctcttaatatttgtagagtatccttgtggaaccttcacccgatgaagacactgacaaaaacttatcttctcctttttggacaaagtatgacaagttgggggcaagtaaattttcttcccatcagaccttggatgcaactgtgatcgtatccacatctctgctagattttgacgagtattcaagccatccttcgtcttgccctaaatgttaaggagcgtcccaatcacactgtcacatacatttttctcgacatgcataacatcaatacaatgtctaacatctagatcagaccactacggtagatcaaagaaagttgacctgttcttccatatgcagagctgactgttatccttctttngggtctttccaaatacagtattcaggtgttgaacccgctggtatacctgctcactagtcaac

SEQ ID NO: 4283 - DNA, 435 bp, Glycine max
agcttatgctgcaaacatctatcaatagacctcctcaaactcagcagcaaaatccaccaccagaacaattatgacctctccagcaatagatacaatcccgggtggaggaatatgatggaagcttgcttgtggggcttctatggaggctggatctttgagcttcaatgaggtcctttaatggtgattttccaccatggagatgcagtggaagacaaaggagaagaggtgagaggaggcgccatccactatggaataagccatggaagaaggagcttcaccaccgagatgagccttggataagaagcttggagaggatgcttcaatggaggaaaagaagaagggagggaaagagagaggggggagcacgatattgaaggaagaaaaaagggagagaagttgaactttgagttgtgtctcacaagactctcattcatc

SEQ ID NO: 4284 - DNA, 443 bp, Glycine max
  unsure (1)..(443): unsure at all n locations
agctntatgagaactaaaattatatattatgctagttnttttcctcaaaattaggggaagcctcaaatcggggccttccatcatgtaataaatgttcaacggggttgcgctgctgttacactcatagttatcacatttaattcagtcatcgacttgatcaaagtattgagtcattgggttaggagtggacccaatgagtcattagttgactaacatggttcaatgtaataataataataataaaaaaaataattatacatataggatatatatatatatattgattcccacttttatttatcaaatagttgtgatagcttagtggtataatggtacctatatttttcaaggttaaaggtttagtctagctccagccaagggatgatttttttatattntctttaagtgacttanataaatgtgagggactgttgactaaaatt

SEQ ID NO: 4285 - DNA, 444 bp, Glycine max
  unsure (1)..(444): unsure at all n locations
agcttcagctctcagcccatactcctctcacaaaatctgatttcaggcttaaataggtggccttgttcgtgctcgtgcgctaagcgcaactttgaaccgcttagcgcacattagtgaatttcggcttagcgcgtgcctttctcgctcagcggatggaatgaagcgctgtgcttagtgagatgaagtggtgggctcagtgaacctgaatagctcatcttcttccatattcttcctcgcgcttagccaatgagtgctgcgcttagcggacgctcgctaagccaatagattggcttagcgagaaggtgaaaaacaacacttcaaaacttacctaattaacctgaaattgagagaaaatgattattgcacacacaaaatagaattactaagtatttattacctatctttaactaanataacttataacactacaaaataaccataaat

SEQ ID NO: 4286 - DNA, 441 bp, Glycine max
agcttaaagaaggaatttgaaatgacagacttgggaatcctatcatattttttgggattaaagtttgcttatactgaaaagggaatctttatgcaccagaagaagtacatttcagaggtactaaagaagtttaatacaatggagtgtaatcctacagaaactccagctgaattaaatgtgaagcttgtaagaagtgagaatgaggcttcagttgatgggaccttgtttaggcagattgttggtagcctgaggtttatctgtcatagtagactagaaattgccttcaatgttggacttgtgaatgaccctagagaaccacatttgttagctgctaatagaatcttgagatatctaaagggaactctgggatatggaatcatttttccccatcaaatcaagaaggatgggagtctacaccttgaagcctattttgattctgat

SEQ ID NO: 4287 - DNA, 431 bp, Glycine max
  unsure (1)..(431): unsure at all n locations
agcttatgattggatatttggtgtttttaatttatcattttttgtatgtgcagttcgaccttaaaatttgaataatcactctcatattttacatacatctagtggaagatgcgccttttatgattggtgctcctttttattttattcatttggcattgaatagagtaacgttccaaattttgatcagcctaatatttttttcgagtcatttggcattggtgctccttttcttatctgacatatcaagcgaaaaagaaaagggccttatcatagctaagaatacccccacaacccccctgggttacttgtgttatctcacttattntttggactttntttgttatcggtttcagttttgcttaagcctttgaagcaagggtgtctggtttaatttacgagtttggtaattttaacaaatcatataaaatatc

SEQ ID NO: 4288 - DNA, 438 bp, Glycine max
  unsure (1)..(438): unsure at all n locations
agcttcagaccacaacaacacataatctatgtatccaaaacccctcaatttaatggattttcaaggtttgagaagtgaaattgagaatgggataaatttgaagcaaactctcacttcgcacaagtctataacatcaatttaaacttgttcaaactggatttacacctaaaatttcaccgaatcaaaatttgactcctaaacacccaaatttaccctagaaatggctctttgttcactttggtcatttgtttttctctctagcacagcccaaactttctcataagtcctaaatggcatttcaagctaggattaactcactctaacctccaaataccactaaatccagatttggccttccaactctcanagtctcactctttttccactcacaacaccatactctcaccttctaaccctaggttaactctacccttcatc

SEQ ID NO: 4289 - DNA, 439 bp, Glycine max
agcttcctcggtgccatttcctacgaaggcaaacatttggaaagttagttttaccagtgggacactactcttaaaacaaaaatgacatacaacctcctcccataaatacaaacatcaatgtaaatttagagcaagcttatgcgcatatttccctacgaacgttcacttgcacaagacatcctattaactaagaaaaatgcacccatatacaatcaaggtagcttcattacctagattatttacatgtacttccaaggtgtatttgttatttacatcacacacgcctccttggctaaatttacatacatgcatactcaaagcatttcggggtaccaaaaattgcacatgcgctcatcttggtatttctaatacctatacatatacaaacttcatgatgaatcttgactacctacgcaataaggtgctacatttcatgctt

SEQ ID NO: 4290 - DNA, 388 bp, Glycine max
  unsure (1)..(388): unsure at all n locations
agctnttccttgagcttcaagcagcatttatgttgatcatcatgttgctcccttatctctaacaaatgaagcgttgggcttgtcatttggtcttcaaaatggtaataaaggagtgagtacttcatcccttttggaaccacagtaacggacattaagtcccacacctaacgtaacaaccgccacgtgtggttgattaacaaacatgactcacaacatcctatgttgcattctaccaatttttatttttgtttacactgctcgcgcctctttgcctgcgctcactcattttcacttcaaaggttctagattgagagagtacagaggaaaagccatacaaaggttgaacttctctctccgatcccaaagccacctgtggaggagggaggaa

SEQ ID NO: 4291 - DNA, 451 bp, Glycine max
agcttctagtgtaagtaggggcactttctatttgtcatgatttgacaacacttaaaaccattatgaggaacctttacaatgggcattctaaagaaccataagaataaccattctaatgtttgctgagaatgattccacacttggatgaattcccttgatgaagttcggattgatatctcattttgatgtagtgcaacttcatcattcttaacactttttcacaaatcaaaagcattctgaagttgattacttcaaaaggatctagtggaagttcagttgttggtgtgttagtgttttgtccaaggttagactgagtagtattctttagtctttcattatgatgctcttcatcaatatttttcatggataacttcttcattcaacaatgtttcatcttcttatgtagttggttctttctttctgatgtgcctacaatgattgacaacatatg

SEQ ID NO: 4292 - DNA, 447 bp, Glycine max
agcttgtgtagtgattatgacattgttcttattagaagtaggagcaatagaaacttcttaaaagggcatgcatcaccacctcaaacattatccgtactatgcaagcttgtataaaagaatatatatttatatatcaacagaagtaggagtatataacaggaaagaatgataatttaaaagagtaatgttatgaattatgatttaattaccattatgacatttgattcgttgcagtcaagaacttgttgtataacaggataaaacgaaagtaacagctatttgctcaccttttttttttccgggtcaacagtacagtaggaggcccaaaagcaaaagcaaagaccccgtggcccagtaataaacacaaatggcaattactttctgcgggtccataattatttcatgcacctttttaaacttctgccctgaattaatcatttagaaaat

SEQ ID NO: 4293 - DNA, 468 bp, Glycine max
  unsure (1)..(468): unsure at all n locations
acctgcaagcatgcatgcttatactgagaatttaataccttcacttctccattatattataaccaaataccatttgatttggcacctttcttgtacagtgtcaaaccacgcaatttcatcatttccttggtccaacttgcaagtgattcactaactgatgatgggagagcacccaacattggatggatactacttattttaggaagcgtaaccaaaggaggatntcttactagattctttatatcactctgaaacataaataaatcaattaatagatgaacacccaattataattcatattatatcaaaccatctgataacagatatactgaaagaatgaatatcacatcatacctgaacagcatcatggagttgcaacatctctgtctcttccaatatcccagtcttctcaaggctttcaacatattcaatttaatgattcagcactgcatatgttgcttgccttgt

SEQ ID NO: 4294 - DNA, 401 bp, Glycine max
  unsure (1)..(401): unsure at all n locations
agctttatgctatatacattgagcaaaactatttgcacattnttatataaagcagcttgcagcaaagtgaccaccatttacctcaatgaaaatcaaaccttttgagcacgactgagttcttgcagtgagcaccccaaatggaatgcaaactaaaatgaacctaggtaagctccttgcagcagaaacaagcaaagagtcgttgcagtgagtgcacgagttcgtaactaggtattcaataaaaaaaaaagaaacactcgcgaaacgtgcctaggtattcaatagtagtaaggtggcagcgcagcttcagcggcaatgctagcttcaacgacaatgctagcttcaatgaacccaggtaagctcctttgcggtagttgtatcttcagcgacaatgctagcttcaa

SEQ ID NO: 4295 - DNA, 429 bp, Glycine max
agctttgcatcctataatttccatgaattttttgcatcccaacctcattacaagcctagaaaagtccttttgattcatgttgtgtttatttttgtatggcatgagatgacttgcaaatgttgagacttttgttagttgttgatggttgagtaagcctaaacacttgtgcttgagtgaaacaatgaccgtgaggctttggttagtgatccttccttgatatctgtcattcttactagcttatttgaattgcgaggcctaataaatatgttcctatctctgaaagctgcatgttttgtgaagggctattgattgaagcattatttgacattcattccatgtgattgaatttttctttggaacaaacacaatcttgaataaccactgtagttttgtcacttgaggacatgtgaatttgtctttctttgcttg

SEQ ID NO: 4296 - DNA, 441 bp, Glycine max
  unsure (1)..(441): unsure at all n locations
agcttctcgcatccttgcctttattattcttatagtttcttggaatgtacaacaatttctaacacaaacagccaagaaatatgcttctataagttatttcagcattagaattactaactttgttctttattgtttgttccaatgtaattcactagcatatatagccatatatatatggtgatgaaatatattaattaggctatgttttttaggtttaaattagacttaatgaactaaatcaactatgggcggagtgaactgcagtgtttgtgtatgtgtatacaagtccaaacctcatattaattatttcagacattatacagtgtttgtgtatgtgtgtacaaaacatagaattagtatgattnttcagcaatacatgcaccacatgcatgacacgtgagaacaacatatatacacggtagtgctatatagacagataat

SEQ ID NO: 4297 - DNA, 425 bp, Glycine max
  unsure (1)..(425): unsure at all n locations
agcttgcaaaagaaacatgttcaatttgtctccatcaccaccaaagctacccataattggcaatcttcatcagctaggaacactaccacatcgctccttccatgcactctcacgcaaatatggccctctcatgttgctgcaattgggccaaattccaaccctagtggtctcatcagctgaagtggcaagagaaataatcaaaaaacatgatattgccttttccaaccgcccacaatctacagctgctaaaatattactttgtggatgatgcaatgatataaaaaacaaaaatattgaacatgttgaaaaccataagtaatacactcagatcaaacagggaagagaaaaaaaataattttcacaggtatctttctcttattatttccactagctcanatttgattggtgtgttttatgtaaaggga

SEQ ID NO: 4298 - DNA, 438 bp, Glycine max
  unsure (1)..(438): unsure at all n locations
agcttgctctaaatttacattgatgtttgtatttatggtgggaggttatatgccatttttgctttaagagtaatgtcccactaaaactaactttccaaatgtttgccttcgcaggaatggccccgaggaagcttgcctcaaagaggtccaggaaggacaaggtggccgaatgaactagttccgccccggagtacgacagtcaccgctttatgagcgttgtacaccagcagcgcttcgaagccattaagggatggtcgtttctccgggagcgacgcgtccagctcaaggacgacgagtatactgatttccaggaagaaatagggcgccggcggtgggcaccactggttactcccatggccaagtttgatccagaaatagtccttgaatnttatgccaatgctaggccaacagaggagggcgtgcgtgacatgagatcct

SEQ ID NO: 4299 - DNA, 436 bp, Glycine max
  unsure (1)..(436): unsure at all n locations
agcttcttcctccactntctcctcttacctttatggaggtgctagcctcaaatccaactttctgcttaacagtatatttatgttaattgacaagtatttgataaaaatatcccctactatctcaatatctctaaatttgttggagcagcaaagtcatgactagactctctaaatttacaataatttcattttactagccaactacatttgtcaagtgtgcgacagcctacaaggcaatttccatatacatcaagtctgctaaacaaatattttagtaattattatatatacaacaaaacattctacacagattctaatgattctaatggccgtgacctaaacccatcttaatgatgggctgattaatgggaatgtgacacataagattcgtgatgcgtaaatgaaatgtgaaaatattttatttagatntattttg

SEQ ID NO: 4300 - DNA, 434 bp, Glycine max
agcttgatgatatggtcttctccgacgaatggatcaaagtgggtctaaaaagaggcaaatctgatcatcatgatttgataaatgccaaaaaaaaatatggcaaatgaagagggtgagaatgagggagaagcccatgctgtgactgccattcctatacagccaagtttcccaccaacccaacaatgtcattactcagccaataacaaaccttctccttacccaccgcccagttgtccccaaaggccatccctaaatcaaccacaaagtttgtctaccgcacttccaatgacgaacaccacctttagcacaaaccgaaaacaccaaccaagaaatgaattttgcagcgagaaagcctgtagaattcaccccaattctagtgtcctatgctaacttgctcccatatctacttgataattcaatggtagccataaccc

SEQ ID NO: 4301 - DNA, 437 bp, Glycine max
  unsure (1)..(437): unsure at all n locations
agctntgccaaataaacaagttccctgtgttcgatactcgtatcattttgttttaattntaaaatacttgatgatccagtgtgcttgtcggtaacatacgcgaccccacttctatatttcgaaaagaaaaggaaagaagaagtgaactgtgggtggcgcgaacaagtatttttggcaccgttgctgaggaacttagttcattagaagagcttagttcagttttaaggcattgattcatttttttctttgattctttctgttaatagtagatactgtagattttttgttctttggaatttgataatttttgttccgcttgttttgtatgcaaaaaagatcttctgcaagtgctttgattcccatagatttggagattaacgctacttgcaggagaagaattgcagaaagaaatagaatatttttgcaggacattgagg

SEQ ID NO: 4302 - DNA, 325 bp, Glycine max
  unsure (1)..(325): unsure at all n locations
gcatgcaagctctctgaggaaatacaccttacatttttcagcccccgngaccagccgggggcatttcaaaagaacgacgttctcttctgaaaatccaccaaaaacggggcttgaatttacactagaaaaaaacacacggggtggaaacctaaaccaacggttaaacaaaagaaaaggagacctggcacctcccaaccccccgcagtaatctcaagcctcccaaaaatgaaaaagatgccccacccgtatcgcctcacatagaataggggccgaccggcggccgaacaaagaacgcatcaaaccacgaaaagggaaaaacagcaca

SEQ ID NO: 4303 - DNA, 270 bp, Glycine max
atctacccttgtttggtagaaacttttttagtgttgaaatcaaatttactcttccattgtgtcgtaaaatcattattatgtctatttatcatcatcaggcttctaaaagacaaaagtgtgagccttcaactacccagccggaatgatataatacgctttgcattttgcttgttggatggtaacataattatgaaattggaattaattaccttaaattaatgatggagataaatgctcaaacttaattgatgaatatggttcttaattttt

SEQ ID NO: 4304 - DNA, 268 bp, Glycine max
aggagaggtcctgcgttcttagggcacaatgcacaaagaatgtgcctggaactatcctcgcgcaccttactaactagaaaacgagctcggagtcccaaccgaacctgaaaacgctaaccaaggtggtcgagtgaaaaagttccaaggatcaaaaccctaggaacgctcacggattacaacacgagaacccaaagctcacctcccgctattcacgtaaaacacacccacgcttgcgaccctaggagcgctccctatatgacccttaggg

SEQ ID NO: 4305 - DNA, 360 bp, Glycine max
  unsure (1)..(360): unsure at all n locations
cacccggatcttttgaacanccgctgcagcttgtgaagaatctgatgattttttgatttagggatgaaactcattgacagcgttctggatgagatgtaatgcgagcttcgggttcaattcacatatgatgtgtttggaactatcctcccacaccttacaaaaaaaaaaaaaatcttcatcctcctagacgaaactgataaccctaagcaagatggtcgaggaattaagttcgaaggataaaaacccttatgtaaggacttggattatagcacttgaactcaaagcttaactcctgcttttaatgtaaaaaaatctcaagtatgcttacctaggagcgctatatatattaaccttactggc

SEQ ID NO: 4306 - DNA, 315 bp, Glycine max
  unsure (1)..(315): unsure at all n locations
atgcaagcttcnctcatggnncncggttngaataaacagaaagggacaacaggtgcatcttgcagaccagccaaataagcatcgacaagatagactctggataagcgaagtgtacaagaattcgcatcaaacacattatgaaattctgccatagagctatgctgttgcaaacgcctcaaaatctggaaggagatctatatggcatgtatggcggggcccttctctgaagccatgtccaagaatcatggaggcataataccctttgcacgctagcggatgcagctgattagaaacaccctccaccatggtctgaaa

SEQ ID NO: 4307 - DNA, 76 bp, Glycine max
  unsure (1)..(76): unsure at all n locations
ttaacaacataagnaaaaacctgagaagagtaaatttttaattagttaaggtttaggaataattaattcaaccccc

SEQ ID NO: 4308 - DNA, 345 bp, Glycine max
caggcatgcaagcttataagaacgaaattgcctaaattttttccaaatatgcatgtgaattagcaagcaatcaatggggcaaaacacaccaaaagattatgatgatggatggctcgaattctcacaaaaggtaaacttatcactttcaaattgagctttcaaaactatcatgacatgtaaaggaaaaacaaggatttcaagtcacaaaatgtcaagagacttttattttcagaacaattacccattacttgaacatatcctataattcaaagacaaacatgcaaatttaacacaacaaaactaacaaaattaaactagaacccaacaaaactaacaaaattaaac

SEQ ID NO: 4309 - DNA, 334 bp, Glycine max
agcttcttctgtggaggttgttcatccttcaatggaagtttgatttcaaatcccttcggcaagaaaacattaaatccaaaaattagatctctatgccctttaagcagctccttcacttcttctatgccactaacaaggttgaatctgcagatgaacagtataattctttcacataccatctcgcaagaaatggcaactataaagtataactatatgactacatcatgatgaaacctatcagcagtgaaatttttcatgagttccaaaaatttatcaaatttttctctatcatctttaaatgcatccttgactgtggagagatatgctaaggcac

SEQ ID NO: 4310 - DNA, 301 bp, Glycine max
agcttgttatctttagtattcctttcaaatttttgaagatagacctaagtagtagtggtgtaataatgacttggtccaaaagaaataattgggtaatagattagttatcaatttaatatgtcattagttgatctgatttatatttaaaaaattaaaattttataacctactttaaaagagttaaaaaaatcatatcatataataatataatttcactctaaaacatattgggttaattttttattaatactcttcttttggttattatattatatggtttggtttaattcatttattttac

SEQ ID NO: 4311 - DNA, 327 bp, Glycine max
  unsure (1)..(327): unsure at all n locations
ccggaaggcagccaacctggaaaccaatactccttttattgaaaccaanggccaaaccaaatgtcaaaaaaatatcctcaccagtcaccatcttttattggggtcttggattggtattcaaaggcctatttatatgtgacttgaaacaccaattttgcttagagttttttcagacaaaaaagtcttatcctcttataaaaaaaaattgtttatcccttccaaattcttggccaaatacttgtgattcataaggaattttgagtgctcaattgttcaattatctctttcagaaagaaatctctttcttcttctcattctgaaaaggat

SEQ ID NO: 4312 - DNA, 324 bp, Glycine max
agcttgagggtttagtgcatattttccatgccacttacatcatagatgagtcattaacatgccttcctagccttaaaccaagacctttcttctgatggaaatctttaatttttaatccttatataagtttttctttattctttatgcggaagcctagattcacaagtatacaacctagaacaattaccaaaggtcctaagatctacaacatgtttgactattaaggattagatcgataaaatacttggatctatagttggtttctggtctaagtattctttgagagttgttataagatctttgcggctatccatcacaaatata

SEQ ID NO: 4313 - DNA, 311 bp, Glycine max
gccgcatgcaagcttgtacccaaagaacccattttttttcttttgtggaaaataaaatcgggtacatacatgatgagctaatggtatggcatggttatggtacgagaaaaataaaaataaagtttctgtccttaacgtaaactatgtgaagccccctcctagtcccacttaaagaatccgaattgaagccctacacgtaggtacaaaatgaaatattaatgttcaaatgcactcgctgcgcccatctattgttaggggcactcacgtagccaccttttttattatactaccaactcctcttttgtattttt

SEQ ID NO: 4314 - DNA, 355 bp, Glycine max
  unsure (1)..(355): unsure at all n locations
naagcttctctcacggctactcggtcttgttataatttgactgggtcacacatatttatgcttgcaggaccagcacaaatacagcctcgaacatgactacgtatgatggatatagcgatagtctacaacgaactacgcatcaacacactattattgatattcttgacaagggagctattgctgtttgcaacacgcctacaaaatcatggaatgccgagtctatgatggcatgtagtggagtgtgcctcttctaatgatagccatgtctcaagaattcaatgagaggcataagtacgcttattgcactgctatgcgtgaagcaagctgattatgaaacagccctgtcacccatgtc

SEQ ID NO: 4315 - DNA, 337 bp, Glycine max
agctttttgataaacaagggtattatctaatatgctcatgagtttaaaatcaaagttttaacatacaataatggcatatgaaacactttaatgaaatttaataaacaaattttataaaaacataatcacaacttgtcaaagtcattaatagataaggcagaaagagcaagactgcaaagattttatactggacaatttctaccattgagactatgtccaattctgcctcttacaaaaagctttcccaagcttacaccttgagtattttttttttccttatcaagccatttctaactctgaaaaatcaaaaaatttggttatgctaaaatgcacatag

SEQ ID NO: 4316 - DNA, 203 bp, Glycine max
  unsure (1)..(203): unsure at all n locations
agcttgagaatagcactactattataatttctattnnccaacatatttactgtaggaagatctagcatttaacgcataanaaattgtgaattaattggaaaataataaaatcttactactttaatggatatatatcatattctttaatacatagtatggagcagttaaaaaaaatcatcaagtatgcattctaataatgtttt

SEQ ID NO: 4317 - DNA, 239 bp, Glycine max
ttacatcatatatgagttataaacatgcctgcctagtcttaaaccaatacctttcatctgatggaaaacctaaatccgtaatcctcatttaagtatctctgcataccttatgcggaagcctacactcacaagtatacaacctagaacaattaccgaaggtcctaagatctacatcatgttagactgttaaggaatagatcgataaaataccgggatctataggaggttgctggtctaag

SEQ ID NO: 4318 - DNA, 117 bp, Glycine max
  unsure (1)..(117): unsure at all n locations
agcttgtaacgccactggcaattgcaggtatggcgacgccgncatcggcagcggggggtctagggccgataacggcttgttagagaggagagagaccccccactggcactggcagga

SEQ ID NO: 4319 - DNA, 329 bp, Glycine max
agcttgtgtgttacattatttttattttttttgaaagattgatttgtaactatgaacaaaattcgtttaaggcattggaccttgaaatgatcttttgatttttgaaaagaggagagagtcatttaaggcgttgggccttgagacgatcttttgttttttttgtaaagaggagaaaatcgttaaggcgtttgaccttgaaacgatctcaagtgatatttgataaaaagaagttaattatgagttggctttatcttggttttgcttattaacctttaaccctttttttaagataacttgcggcactaatgatcagttaaaacttactttac

SEQ ID NO: 4320 - DNA, 243 bp, Glycine max
tctttctttacccactcctcacatttggttttttagggaaaaacaccataactaaacgcgccacaaggcatccctattgcaccagatccaaatctagaacgatgggtgatccagaagagacacacgaatatatgaaagcccacatgttggctctgaaagaacaaatggcctccatgatggaggccctgttatgaataaggcagctcatggaaaaaaaagcggaccccgttttttctccccccc

SEQ ID NO: 4321 - DNA, 339 bp, Glycine max
agcttcgaagggaagagagagatcattcacgatcacatagcatggtcttgaaagaggagttaaccgcttgctcaaggtccaaaagaaatttgtctcagcgtttatgcgagacagagaccaacatgttagccattgtcagcaagtaccaagaagaactaaatctagccacgacccacgagcataaagtggcggacgagtatgcccaagtgtacgcggaaaaggaggttagaggaagggtaatcgattcgttacatcaagaggcaacaatgtggatggaccgatttgctcttaccttgaacgggagtcaagaacttcctcgattgctagccaaggccaaag

SEQ ID NO: 4322 - DNA, 248 bp, Glycine max
gaagggcggcttaatacgaacaaggaggggagccctctcatgaaccaacagatgaatggacaggcccagagcagagctcgcctcaccttgcctatggaagatcacactcaagcccactaacagtccataattcccaaacattaagcataaggaatggccgcccttaagacatgattagaagtcatggcatcaaatcccactaccgtacatgtacagaagggcaagacaccagccgtcttatcatgaac

SEQ ID NO: 4323 - DNA, 336 bp, Glycine max
agcttaagtcttagcaaatgcttattttgattctagaacgattagaactcgacaaaatatcttactagcgttttacttatcaatacgtttaaaatgaggaaagctcttataaaccaacacatgcatatcgaggccaaaagcagtagcctcctcacattaacttgttcagtcacattcaaaagcgacaaagtgtccctcatttcacaaacttaaaggataaggtaattaaaactctcgagacagcattagaaatcatcacagaaatttaccctaaggcactttgtttagtattgcaattcaccatccatcttatcatgaacaatacatcttttgttg

SEQ ID NO: 4324 - DNA, 369 bp, Glycine max
  unsure (1)..(369): unsure at all n locations
ccaagctttatacagcgcgggtncggttttatcaanatgtcannagcgttcgacgatagtgcgatagatgatatatccgagtagctttggtgatttggtaccgagccatgcacctcctggatttccagtctggtgaaattgggcgaagtggagggaaccgccccggctatttaccgcaacatagcatatatgtgaaacctttacgggttttaaaagcatctatagttggcgcctagggctttagagtattttccttttgttaagggctttgcgtcttttgtttttgaatttataatacaaggatctttcttcatgtgttcctggtctctacccattctcaatcacttgcatgtttacttctttttctga

SEQ ID NO: 4325 - DNA, 334 bp, Glycine max
agcttgcctcaaagaggtttcattaaggacaaggcagcagaaggaactagttccgctccggagtatgatagtcaccgctttaggagcgcggtacaccagcagcgcttcgaagccatcaaggggtggtcgtttctccgggagcgacgcgtccagctcagggacgacgagtatactgatttccaagaggaaatagggcgccggcggtgggcaccactggttactcccatggccaagtttgatccagaaatagtccttgagttttatgccaatgcttggccaacagaggagggcgtgcgtgacatgaaatcctgggttaggggtcagtggatcccgt

SEQ ID NO: 4326 - DNA, 319 bp, Glycine max
  unsure (1)..(319): unsure at all n locations
agctggttacagaactnaggaataatctataacaagctngntcgcacatcgttcgcgtgtacgatatccactcgacaaggtttgaagtagaggagaccttcaatcctataacgcaacgtggcggacaaaaatgggcagttaacttgaatggccattattgtcaatgcggaaggtattctgcgcttcactatccatgttcacacattattgcagcttgtggttacgtgagcatgaactactaccaatatatagatgttgtttacaccaatgaacacatcttataagcatactccgcacagtggtggcctcttgggaatga

SEQ ID NO: 4327 - DNA, 291 bp, Glycine max
caagtccatagccaccaaaggccgaagagagtatgaagaaccaagggacgtcaatatggccaccgatgaagccttggaatgagaaaaccagaaggcccgaaaggaagaacacgaccaaaacaagttgtgaggggccctatagggcagcaatagtgagcccaagctccgaagaggtgaaaggaatcatcacgggccaaaggcatgatcttgaaggaccagccaaaggtttgcctcagggccaaaagaaatttgggccaacagctaagcgagaccgaagggaatatgtgggcc

SEQ ID NO: 4328 - DNA, 325 bp, Glycine max
agcttctaagtttcagctgatgtagattttttcgtggctacttcatgcattccttgaatgacaatagcatcatttttggtactaaattgttgggagttggaagccatcttctcaattatattcctggcttcagcaggggtcatgtctccaagggctccaccactggcagcatcaatcatacttctctccatgttactgagtccttcataaaaatattggagaagaagctgctcataaatatggtggtgagggcagctggcgcatagttttttaaatctctcccagtattcatataggctctctccactaagttgcctaatgcctg

SEQ ID NO: 4329 - DNA, 348 bp, Glycine max
  unsure (1)..(348): unsure at all n locations
gacccggcaggcatgcaagcttangcatgncnactagttttttataaacaacatgatggatagggttggtaatccacctataagctctggaagtatcttacgaaacacattcttaaaaaaatttatgtgttacaaatatatggtttagtgtagtgctttgtaccaggaaaaaaatggctacattagttctctatttattgattttgcaccctaaccgtcgaatatatattcattgagtgtacatattaaccaaattttaatacaattctcttacatttgtcttttatcttttgatttattcccttttcatttaggaggcatttgatacaagataaatttttggaaata

SEQ ID NO: 4330 - DNA, 325 bp, Glycine max
agctttgaatgcacactaatttttcctaagatcttttaaccttatgaactcttaattgcattattgcaatgcacaccatacacaaagactaataagccagaacaacatccaacttttgtcaatactaaggatcacagctatatgaagttgtcagtcccctcatcaaacaggtataagcctaagttaaataaaattaagtccaaggaattaatattttaacaagttcttcaagagtcatatatgtttgcacagattgttggttgaatctcattaaaagggaaactagacttttagtctacaataaagattaaatatttcgtagaca

SEQ ID NO: 4331 - DNA, 341 bp, Glycine max
gcatgcaagcttggaacatataaaccgaattctagttctctcttaagacttagtcaaaatgtctgctggttgatcattagaattgatgaactcagtggtaatctccttggacaatgatttttctcaaatgaagtgacaatcaatctctatgtgcttggtcctctcatgaaagactggattggacgcaatgtggagggctacctgattgtcacaaaataactttattcgtgcaacttcacaaaacttcaattcttgaagaaggtgcttaatccatataagttcacatgtgaccaaagccatagatcggtacttagcctctgcgctggatcgagcaacaacat

SEQ ID NO: 4332 - DNA, 269 bp, Glycine max
tgcttctcccccaatattctatttattctgggagaagtgacgtacacaagggcatagccttcttgtcagtcaaacctctatccaaattcgaagcgacacataattccagcaagaaacttcaagcgtaaagcctgtcgtgccgattgcgtgaactaactcacaataattgcctaccgctcttgacagttatcgatcggtcaaacctgtcctgccacctgaacggatgaatccgtcaacgcgaagcttttacttcattctatgtactcgtg

SEQ ID NO: 4333 - DNA, 277 bp, Glycine max
aacaaagggggaacatagggccaatactgaaatctaaaaaattctatagacgataacaagactattaagtatactgtcaaaaaacagacgatagctagtaggatatgcttgatacatcgattgaggcatttgattattttttctttggcggcccatccttatatgttagccataaataaaatgaatatgacgccttaaaccaggtcaactagtcatgcctacacatgcacaatggggccattacgcttaattactgaacaatctttcatgcccccaa

SEQ ID NO: 4334 - DNA, 337 bp, Glycine max
  unsure (1)..(337): unsure at all n locations
tgcaagccttcccattgnattanttttttcatgttgtgtgagcttnnagctattggagagnngtgtgagtaatcccaccgtctagcttctcaagagaagctttcntttctttaggcttcccaagggaaagctaccttcctttgcnttctcaaaggaagacttctccatggtgctaaggctataaaacaggaagcaatgtgtaaccactaagtcataaacttttgatgaaatgagaattacttgtggagacacancttcaaaagcttcaacgttctctcccctaaatctccttaaattccccatgcccccaactctttctctcttctcattcctcttc

SEQ ID NO: 4335 - DNA, 328 bp, Glycine max
agcttggaaggatgctttttgtttgaaaagaaagagggagagaaagagagaggggggagcacgaaattgaaggaataaaagagggggagaagtagaactttgaagtgtgtctcataagactttcattcatcaaagttacaacaagtgttacacatgcttctatttatagactaggtagcttccttgagaagctttcttgagaaaacttccttgagaagcttctttgagaaaacttccttgagaagctagagcttagctacacacacccctctcataactaagctcacctccttgagaagcttccttaagaagattcctaaagaagcta

SEQ ID NO: 4336 - DNA, 325 bp, Glycine max
  unsure (1)..(325): unsure at all n locations
agcttctcaaggaagctacctattctatttatatgaagcatgngtaacacttgggggaactttgatgaatcaaagtcttatgagatacacttcaaagttccacttctctccctcttttatccttcaatttcgtgctccccccttctctctttcttttcctccattaaagcatccttttcaagcttcttatccaaggcaattcttggtggtgaagctccttcttcctttgcttattccctagtggatggtgcctcccctctcttcttctcctttgccttccgctgcatcttcatggtgaaaaatcaccattgaaggacctcattga

SEQ ID NO: 4337 - DNA, 148 bp, Glycine max
tgcatgcaagctagcttcacgagaataaataagcttcatctaatttgctaggcgcaatcatgggcatagctgaaatcagggcgaaatggtcatcccatatgagattccactacataaatactgagctccgacatccatgtagtggtat

SEQ ID NO: 4338 - DNA, 318 bp, Glycine max
agcttcacggaaggaatgagcatgattagtttcttccggagagggggggatttttataattttttgttaaagggcaaaattgcccattcataaaaattgctggatgcacctgcaatattgcagggtgcacctagcatttccccaacaaatggcatgcccaattgtcaggtcaaccctcctcgtctttaatcaattgcttggcacacctaccaatattatagtgtcgtcaataatgcactgcatgccattcaagcataccatttcaacaaactttgcgcttagtatccatagctaaaggcctaaatcttgctatatggc

SEQ ID NO: 4339 - DNA, 328 bp, Glycine max
agcttcacaaaataaaataagctaaacatattctactattgactgtggactgcaacattcaagtgaagtcttcatgttcatcccatatgggcttcttcctaaagatgatctcccacacatgttcgttaggccggtaatagaagacgacctcgtctccacccatcaaatcattgtccgttaagaatctattccaaggttcatccacatattgattatgcatggagatggtccatatgtcaccaacgccactgctatgttgcatggtcatacatggtcttgaagcatcaacaaaatcgacagcctcggtaggcaacaactacaggacaac

SEQ ID NO: 4340 - DNA, 332 bp, Glycine max
agcttcacaaaataaaataagcataaacatattcgactattgactgtggactgcaacattcaagtgaagtcttcatgttcatcccatatgggcttcttcctaaagatgatctcccacacatgttcgttaggccggtaatagaagacgacctcgtctccacccatcaaatcattgtccgttaagaatctattccaaggttcatccacatattgattatgcatggagatggtccatatgtcaccaacgccactgctatgttgcatggtcatacatggtcttgaagcatcaacaaaatcgacagcctcggtaggcaacaactacaggacaacaaa

SEQ ID NO: 4341 - DNA, 280 bp, Glycine max
agcttccattgttcaattacgtgtcgtttcgatatattaggccccggaatcggtccttcgagttaaaagttatgaccatttgaattagacgagagctttcgttgttcaatttccagcgaatcggtatattaatgcgcctgaatcggacctccaaaagtaaaattttgtccccctcttttgatgaagagctatcatcgtaccatgaataggcgttatttcacttttacacctataggggacattcgaggtaaaacccctccctatggtgaatttcttaaga

SEQ ID NO: 4342 - DNA, 228 bp, Glycine max
tatgaccaaactagttctttctttcccacaaatttttcaaatacaactcaaattttaagaaaacttttaatctatttatggcaacaggctccatggaatgcaagcattatcacatcagtgaaagccctcctagctcatgcatttggcaatttcacaaagatacttataactgaacatatccaacagtaaatttaagttatgtacctatgcaaggcttgtccatctgaa

SEQ ID NO: 4343 - DNA, 331 bp, Glycine max
catgcactcttcaccccttacttcatcttcactttctctagaggaagggcaagaagtagtctcctcttgactactataaatgtcttgacccctcatgatcatggttttctttgtggggcattgagaggcaatgtgacctctcccaagacatttgaagcatttaatgttgctagtcctttcttgggaactagtcttaggggtgtatttctctatggtcttacccttatcttccttgggttttgaaggtgcagcccctaaaattccatgggcttggtccttccttggataagagtgagagccataagattttgaagaatgctttcttttaagt

SEQ ID NO: 4344 - DNA, 327 bp, Glycine max
agcttgagatgaggaagtgtatattggtgaaacttcctgcttttattcgttgaccacagagtggtacctggagatatgtcgcgggggtcaggagaccttggggacgtcaggtaaggtgctattgcccaaaatcaagcttgaccaatcccgacccaacccgggcatagtcagtcagtgagaacctgtgatgtacctaagcaggcaagctcctggcagtcaacagataaaaggaacaaagaccacaaagcaaggaggcttgtgtggtggctggccagctgtgaatcttgtgtgatatatgggttatggcctctcgtaatcgattactaa

SEQ ID NO: 4345 - DNA, 329 bp, Glycine max
agcttgaataaacaaacatttaataaaatcattttggttagagagagagagtaatctgaatctgaaaaattaatactgttatgaattattggcagaaacataaaaagtgccaataaactcacgaggattcttattttcagtgcgtatttagccaaggattcataagctatatcaaaatttattgtagttaagatgtcattttcatgactttaaaagaatacatgaaaatgattgactttccggttttttttcttttttcttttcaacaattagtagtattatgtatatataataactcaacccattgcttaaaaaaaaaagctcaaccc

SEQ ID NO: 4346 - DNA, 326 bp, Glycine max
agcttgtggtttttagcgtttctcaccattattgtgtaacacaagctccacatgaagttgatcatgtcctagaagatccagttgaacaacatcaaacacaaaatgttgagcaactttttgaacaacatcaaacacaagatgttgaacaacctgttgaacaacaaccaaaaggtgtggatgtaacattgagaagatcaacttgaataaagaaacctgttattcctagtgattatcatgtgtattcacaagagtctcaatatgactttggagttgaaaatgatcctgagtcatttttgcaagcaaattacagttgtgattctaagcta

SEQ ID NO: 4347 - DNA, 305 bp, Glycine max
agcttcagcttcatcccttggatatcaaatgaaatcagagatgctatgcttcttttttgctaaaaaaaggttattggtttgaagccatcatgaaagttaatcaatagagttaggagtcactatcaatataaatcttagtttagggcatgtcattatacattaattggggacagcggaatgcgcattttaaaccatctcccatctctcctttgagttggtcatactttttttggtgtcatgaactgggtatactaacatggtaatgtttcaagtttgcgacattccagaaatagaaatgctttggc

SEQ ID NO: 4348 - DNA, 336 bp, Glycine max
  unsure (1)..(336): unsure at all n locations
agcttgctgaaatagaaaattgtgtttgttctantccacttatctgaaacaagcaatgactttaaagttcagcacactagtgaacaatctacatttgtactaaaactactaaagatattatcttgttctttccaaggaagaaaataatctcaccgagttactatcagtgaatattatggcaccagatttagtccttccaaactcaatcatacatgcaaagttgttgaaataacaaagatgtttggccttaggaaggcgatcgaaggatctgccagattccaacagttgttttggatgtaggccaagttgatcacggtgcacataaactcaaaggtc

SEQ ID NO: 4349 - DNA, 338 bp, Glycine max
agcttgaagatgatgctttaatggattaaatgaaagagagaaggggggagcacgaaattgaaggaataaaagagggagagaagtggaactttgaagtatgtctcataagactttcattcatcaaagttacaacaagtgttacacatgcttctatttatagactaggtagcttccttgagaagctttcttgagaaaacttccttgagaagcttctttgagaaaacttccttgagaagctagagcttagctacacacacccttctaataactaagctcacctccttgagaagcttccttgagaagattcctaaagaagctagagcttagctacacacacc

SEQ ID NO: 4350 - DNA, 326 bp, Glycine max
agcttgaagagagactcacaagtggtttcaactggaatatgaacctcgctatgtagttcatacatcctaagaagcctcagacctgcttttcggcgtgtggctcatgcatttcgaggatggccttcaccttgtctcaggccacctttaccgatttttggcttatgataaaactgaacaactttaccaacttgacgccaaaagtgcactttgcgggattcaaccttaatcgatacttacacagtctctccaacaacttctgtaagtagataaggagtaccttcttggttttggacttggcaatcatatcatccacgtagacctcaatt

SEQ ID NO: 4351 - DNA, 340 bp, Glycine max
ctgcacgcatgcaagcttgaatagagactcacacgtggttatcaactggaatatgaacctcgcaatgtagttcacacatgctgagaagcctcaaacctgcttttcggtgtgtggctccatgcatatcgaggatggacttcaccttgtctcagtcaacctctacccctttatggcttatgatgaaactgaacatcttttaccaacttgacgccgcaaagagcacttcgcgggatgcaaccttaatctgtacatacacaaactgtcgaacaactgacgtaagttgattacgtgtgcctccatgattctggacgtcgcaatcatgtcacccacctggacccca

SEQ ID NO: 4352 - DNA, 331 bp, Glycine max
agcttttgaaaaggagtttaattaaaatattaataatataaagatatgtaaatcatcatttaattataaattattatgcgtaataatatatttttattgttatttaaaagtcacatacaaaatatgcttcaattaattattagtataataattcttaaactacaacatattaaaattaaactctcttcaaaatatttgttattgatagtacatattttttatccattaaaatcaaagtagtataaaaaaaataataatataataattcatccatgttcaattaattaagttacacatttcttgataattaacgatacatataatacacact

SEQ ID NO: 4353 - DNA, 328 bp, Glycine max
agcttgccacccagctcgcccattcgagcaaggttgcttcctccagaagcaacagccttctggaggaatcttctggagggcccaagtgggcctggttgctatttgcacccccatttttactaaatacaccccctgcctttttttggtgattcttttttcgtaaagttacggaaacttatgaatttcgtaaggatacttgttttctttccgtaatgttacggaaccttgcggattacataatcatcccttttttgacttacggaatgttacagaacctcactaattgtgcaacgatgcttccttttgatttccggtgtgtcacggaacc

SEQ ID NO: 4354 - DNA, 104 bp, Glycine max
gccccaaaagtgaccatttttgccactcttttgaatattttgcacatttcattctgaaacatcaccaaaccttgggaattgtggggcattatggtagtagctca

SEQ ID NO: 4355 - DNA, 262 bp, Glycine max
caacaattttagtttctgacgaagcacaaacataggacaacccaaaatgggttttccctaaacttccttgaccaaccacaaaaaatccttatgcccagtccatattttatgaaatttaaacatggaaggaaaagactttacttaatcaaacaccgaaaaaggagaggatggtgatccaaatagttacgagttaaagtgcaataggataacttcttccaagaggatagccagatatcattacatatcattctaccaagacgaa

SEQ ID NO: 4356 - DNA, 288 bp, Glycine max
cactcgacaaggtgggaagtttaggagacctgcaattttataacgcaacgtggcggacaaaaatgggcagttaacttgaatgaccattattgtcaatgcagaaggtattttgcgcttcactatccatgttcacacattattgcagcttgtggttacgtgagcatgaactactaccaatatatagatgttgtttacacgaatgagcacatcttaaaagcatacctccgacagtggtggcctgatgggaatgaagcggcaatacctccttctgactgaggcatggacact

SEQ ID NO: 4357 - DNA, 297 bp, Glycine max
caggcatgcaagcttagcgcacaggcgcgctttgtctaactactaaagcttaaaaacagggagagagttgagcatagcgcatcagggcacttagctcaacacatgacaaaggcttagcgcacagacacgcttagccttattcaaaggaaaacttacaaaagcatagtggcgcttagcctgataggccaggctttgcgctgaacaaaaattctcaaaatcttaatgtctgaacactagttctgcttagcgcatagacactcttagcgggctcatcacttacgttcatcagtatggatg

SEQ ID NO: 4358 - DNA, 234 bp, Glycine max
  unsure (1)..(234): unsure at all n locations
cacaaagacnaanaagccagaacaacanccaacgagagacaacactaaggatcacagctatatgatgttgtcagtcccctcatcaaacaggtataagcctaagttaaataaaattaagtccaaggaattagtatttaaacaagttcttcaagagtcatatatgtttgcacagattgtcggttgaatctcatcaaaagggaaactagacttttagtctacaataaagattaaata

SEQ ID NO: 4359 - DNA, 394 bp, Glycine max
  unsure (1)..(394): unsure at all n locations
agagagnnnnggggngccacttcctgtgtctcgtatgccccnttttgnnanatcangcaagcaaaagccaacaaaaangacaaactanttttcatccccacaccaaaagggacggaggagatgcaccggttcagcaagatcatctagccgaaagctgcaaaggagcactgaacgggaattgggaagattttaaatagcactggggaaaactcgttaacagaggcagacagcgactcgaacaagcgacatggactgccgactacttgatgtaggatcaaaaatgaaaaataagggaacgaataaataagaaactccgtatcaggttcagactaaagacagaaaaataatctcactcgaaactaaaaatgctcaaaacaccgaataggtaaacccg

SEQ ID NO: 4360 - DNA, 308 bp, Glycine max
agcatgcaagcatccaaaacatacgtcattttattttcactccccaaaccagaagggactgaagatttacccttgataacaagcttttctagccttttggtagaaaaagcggtatgtaggggttctgggtctattataacaaaaaagggggagaacggatcatgggatgcgtctatcccacaaccaggtgaaatgtaagaccacctacataacctaggccaaaatagtgtaagcgagggattgaatacctaggagatcacttataaagtcaagtagaaaatattattctattttctacccaacatgca

SEQ ID NO: 4361 - DNA, 269 bp, Glycine max
  unsure (1)..(269): unsure at all n locations
tttcaacaaanaaaccgccaggggcgtatctccgagcgaagggctttaaccatatgaaannccccaaaaccttccatagtaacaactcaaccgcaccaaaatattaagcgcccagaatccgacacaacaaaaaaaaaggcccaacccctttaattcctaaaaaaccctcctctcgcaaaagtctaaccaactcctaaactcttgccccagaaacccacactcccataaaaaagctcttaaaccattgaacaacgctaaaaacctccccc

SEQ ID NO: 4362 - DNA, 329 bp, Glycine max
agcttctacaacatcagccatgtgcaaaggcactttccaaacctgaatctacagaagatagaacctaaataagaagccaagcaggccttttggtagaaaaaaggtatgtaggggttctgggtctattataacaaaaaagggggagaacggattttgggatgtgtctatcccacaacctggtgaaatgtaagaccacctacataacctagcccaaaagagtgtaagcgagggattaaaaacctagttgatcacttataaagtcaagtagaaaatattattctattttgattcccaacatgcaaaagtacaaaaccaattaacatagaaat

SEQ ID NO: 4363 - DNA, 255 bp, Glycine max
aaacgagaggaagaaagggagctttcaaagcaagaaggaattgaaagcctcaaaatcaaaaactaaccgggtgaagaccaaaaaacgagcgaagaacgaatgaagaacggcgaagaacctccacggagaacacaatggaaacgtctagaaagcgggagagaaacacctgggatgggaggaaggacctaagcacacatcattgaactgaaaacaccaaagaaacgcagaatgaaggccaggggtccctgaaactca

SEQ ID NO: 4364 - DNA, 200 bp, Glycine max
  unsure (1)..(200): unsure at all n locations
caagntgtntagtttcacaatttttgttttttttgnagngannnnngggaagaaatnttatntatgggtaangttgttntttaaaaatttnaattggaattaatgatgaaatatgtgnattttaaggtgaaaaagaggttaagtttggaattggaaaatgtagtatttgggttaagtttagtagttggggtaaatgtata

SEQ ID NO: 4365 - DNA, 161 bp, Glycine max
agctttgatcaaattcaaacgtttatatattttgacttggatgaccgattgtgtcctgtattatatcgagagccaattaaaacgacaatactttataactagggcgtcgaattggttcttcatactatgcctgaatctttgaatttaaaacagtaatctct

SEQ ID NO: 4366 - DNA, 324 bp, Glycine max
  unsure (1)..(324): unsure at all n locations
agcttgtaaatatttattggttttattcgcctgnnccactaggctcttgatgtctttagaggttacttcttcgttgacatcttttgtcttgaatgggattggcatgacagggttattggtactggccttgataattgggtagttgatattgtgttgcgggaggtaattccgattggattaactcaccatccttaacttgccaatttgttatgacatttgttgttggatcacctatgacgtcttgtttccaagggtaatctatatcctttctgatggcataagcatgaaaccaatcaaagaaaaggacattatgttttgacttgt

SEQ ID NO: 4367 - DNA, 400 bp, Glycine max
  unsure (1)..(400): unsure at all n locations
ngctataccncacccccgtacattcttagnnctcnaatccannnnatangggaaacacgcaagcatgcaagctattgatgaaatggttctctttcgacttaacgaacaaaacgagtcctaaatgaggcaaaactgagatcctacctttgaaaaaagccacaaaaacttggggcaatgaatagggtgagaatgagggagaagcccatgttgtgactggcatttctatacagccaagtgtctcaccaacccaacaatgtcgttactcagtcaataaccaaccttatgttacccaccgtccaattatctacaaagggccttccttaaacaccctccaaagtttgtcatcgcatttcagtggtcaacattaccttttgcctatccaaaaacacaaccctaaacg

SEQ ID NO: 4368 - DNA, 319 bp, Glycine max
  unsure (1)..(319): unsure at all n locations
agcttgacctatttggaatggtataagtncaatagtgcaagtctaaggcctcatcctaacactatgtggttcacacataatcaaaactacaagccaaaatatctaactctagaaaaatgaaatgctcacagtcatgatgtcgcctgcatacataacccaaggactatttttcttttcacctgcaaaatgccaaagcaacgaaacaattagcactggacgcacctaagagccataaagcaaaaccaaaaaatgtatatgcttaccaattttataaaccactgaaagaacctgcggggaaatcaaaatgtcattttgattg

SEQ ID NO: 4369 - DNA, 330 bp, Glycine max
  unsure (1)..(330): unsure at all n locations
ggcaggcaagcatgncattaaccatttccttgtccggaggaagaacatatgatacttaatttatgctcactttctatgttctaaaatcaagatgttaaaagtgtcatcacataatttggcttactaatatagattttcatgaagcataattggagtttcaacttttctgtgacaaactatactaatttggaagactaaaaatactcaagtcattcaataatattggagtgctaaattgagaagaaatgacaaaatagttagtaccaccccaaaattgctcaatataaagacaccaaaaagaccatgttattttcaatcttttgaccgctt

SEQ ID NO: 4370 - DNA, 285 bp, Glycine max
  unsure (1)..(285): unsure at all n locations
actatatgttgacttcaccaacgctgttattggaatgctgcgacaatctttcaacaccttattcacacattctgataagttggttgtcatgtgaccatatcgtcgtccaaatgtatcgtaagccatgctccatttttcctttgagattcgatcaatccatcttgctataactggactcaattgacgaaaaattttctaagtttgatcaaacacatgcttgtcaggagtgtacgctgcatcaaatntgttatcatcaacagttgtacgtagacatgaaactcaaat

SEQ ID NO: 4371 - DNA, 410 bp, Glycine max
  unsure (1)..(410): unsure at all n locations
gacgttggtgcaaccaagtggtttgctatacttcaagaagaaatgttcttggacagtcgacgttccttttgcagtcgacctgctccaatttcttcttccaattccttaccatctacttcatctttttcaccatcacctttatccttactgtcaaacccttcaaaaccaccttccactntgcctatcaagagactttcacctgaggaattagtttcaagacgcgaacatggtttttgcttcaattgcgatgagaaattccatcgcaaccacaaatgtgcctccaaggtatttctcctaattgcaaatgacgatgagggttttctagaggataaccatatcgtggatccactacctaacccacaaatgtgccaccaaggtatntcttaagtttacatatgttttcgagtcat

SEQ ID NO: 4372 - DNA, 414 bp, Glycine max
  unsure (1)..(414): unsure at all n locations
gtgagacgcaatgtatctccatggggagcaccagtgttgttagtaaagaagaaagattggaccatgaggttgtgtgtagactatcgccagttgaataaggtgacgattaagaatacgtaccctttgcctaatagacgaccttatggaccagttggtagaagcttgtgtgtttatcaagatataccttaggtcaggttaccatcagattcgagtgaagtctgacgatattccgaagactacttttacgacccgttatggtcactacgagtatctagtcatgccctttggtgtgactaatgctccaggtgtgtttatggactacatgaataaagtctttcacccttactttgatnagtttgtggtagtattcatagatgatatnttggtatattcacagactagagaggaacatga

SEQ ID NO: 4373 - DNA, 284 bp, Glycine max
  unsure (1)..(284): unsure at all n locations
atcaaaatgcataatgatggccctaggctgcaactcgcaatcccgtgggtatggcttttgaaagggggaaaagaagtttttgaatgttataacgccccccctttcgtcattcttataatttggtgcatgggtggctcgcccaagcgagctaacctgcgcattatttntttttntttttttttgaggggaacattaaccatgttcccttccttctcattgatcagcatcttgcctaacttgcacttacttatgttagaattacgcgttgattacttattttttac

SEQ ID NO: 4374 - DNA, 415 bp, Glycine max
  unsure (1)..(415): unsure at all n locations
cacatttgaaggatgttataagaagaaatccatttggtctatatgctcaggtacgtacaccgattatggtataatcctatcagtacctttatatgattggtttttcctacagagcttttttgaattatcaattgccaagatgaaatatgacaaggtaatctcttgcactgaataaacgtttcagagggaggagacaatttcagtgttggacagaggcaactgctaagtctagctagagcattgctacgaagatcaaaggttcttggcctggatgaagctactgctgctgtagaagttagaactgatgcccttatacagaaaactatcagacaagaattcagtcctgcacaatgctcatcattgcacacagactanatacaatcattgatctgcatcggattcagctgctcaatgc

SEQ ID NO: 4375 - DNA, 413 bp, Glycine max
  unsure (1)..(413): unsure at all n locations
ataatggagacacatgaacagcgctaggcaatgacattcatggtgctccgaacaaaggtggagtatggaggattgccttgagggtccgcacttatgcaatcatgaaactcagctccaaactcgaaagtggaggacacatgaacagtcctaagcaataacattcatgtggctctggaaaaggatgagaatggaggattgccttgagagtcctctcttaggcaatcatgaaacacagctccaaactcaaaagtggaggacacatgaacagccctaagcaataacattcacgtggctccggaaaaggacgagaatggaggattgccttgagggtcctctcttatgcaatcatggaacacagctccagactcgaaaatggaggacacatgaacagccctanacaagaacattcatgt

SEQ ID NO: 4376 - DNA, 411 bp, Glycine max
atacgagaatgaagctctgataccatgtgttagacaagtggcctcagatatcttaagaaggggggtggaattaagatattgcaaactatttccccaattaaaaattctatttcaatttcaatgcaagttgcaagttaccttaaaaattaacttttaaataatgattcaaatagaacaatctgaatataaatataaatcaataataaataaacgagtttaagggaagagaaagtacaaactcagatttatactggttcggtcacacccttgtgcctacgtccagtccccaagcaactcgcttgagagttccactatcttgtaaaatccttttacaagttctgaacacacaaggacaatccttcctttgtgtttagatttctttacaacaagagatactcggtctctcaatcc

SEQ ID NO: 4377 - DNA, 371 bp, Glycine max
tcggtggtttggttgtaaagaagtgtcgatgctcttgatgcctcaatggttatgtatgtctgtgtgttgatctggttgctccaacaaactgtaattacacttttgtagttaacttgacatgaaatattgttcgttttgttcattggtaggtgcactttgcatattgaatgcggaaaggttgacaatttacattaacaaaggatttgacactatgctttttgtcctttggatgaaactaagttgaaatgttttctagtactggccttgtccttcgatacttgtggctttaggatgctaatctcttgttgcttaaatgaatctcactagacgctatttagtgcttatatgtatgctatcacaatatgttcaat

SEQ ID NO: 4378 - DNA, 309 bp, Glycine max
aaattaaacaatggaagcactcgagatattcaaatggtcataacttattacatggaagtccgattcaaattcataatatatcgagaagcttgaaattgaacaacggaagctctcgagaaattcaaatggtcataacttatcacacggatgtccgattccggaggatagtatatcagaagctcggaatatatcaacaatagctctcgagaaattcaaatggtcataacttatcacacggaagtccgatgtaggtgcataatatatcgagaagcatcaaattgaacaatcgaagcctctcagaaattcaaa

SEQ ID NO: 4379 - DNA, 436 bp, Glycine max
  unsure (1)..(436): unsure at all n locations
tcgatatatatgcgcctgaatcggacttccgtgtgacttgttatgaccatntgaatttgtcgagagcttccattgttcaatttcaagcttctcgatatattatgcgcctgaatcggatttacatttgaaaagttatgaccatttgaatttctcgagagcttccgttgttccatttcgagcatctccatatattatgcgcctgaatcggactttcgtgtgaaaagttatgaccaattgaatttctcgagagctttcgttgctcaatttcgagagtctcgatatattatgcgcctgaatcgctgttccgtgtganaagttatgaccatttgaatttctcgagagcttccgttggtcaatttcgagcgtctcggtatattatgcgcctgaatcggacctccgtgtgataagttatgaccatntgaatttctcgagagct

SEQ ID NO: 4380 - DNA, 271 bp, Glycine max
atttttatttgtggccagttgggttaccaggttaaccaaggcatctaatttaccttcaagcttcttagtctcggctgatgaagatgaatttgtgctacttcatgcactcctctaatgacaatagcatcacttctggcactaaattgctaggagttggaagccattttctcaattaaatttctggcttcagtacgggtcatgtctccaagggctccaccattggcagcatctaccatacttctctccatgttactgagtccttcataaaaat

SEQ ID NO: 4381 - DNA, 280 bp, Glycine max
  unsure (1)..(280): unsure at all n locations
tctaaaaagtcgatttaacgattcatgtagtcctacagctttgattttgtagtccatgtgggttatcaagtagactgaaacaatcattatttcttcaacaattaaaagttctagaacactcgtgaatctcctaatccatcccctttcttcacataagtacagatattccatgtantaattagctttcaccccaattcaacatttaaaaattctgtctagtcctatatttatgttatgacgaaatcttctctctaaattatgacacaagtgtgatgctcat

SEQ ID NO: 4382 - DNA, 377 bp, Glycine max
  unsure (1)..(377): unsure at all n locations
attcatcaaacttactttcaatttatttcttcaaacttttcacttatctcttgtcttggnatcctatgtttctcttcttctttttttttaatttgctttctcgtcttaccaacccacccaatatcaagattgttcaaaaattaattaccatttaataaaatgatatgatttttcataaaacagagtataaataaactgcaatttcattttcggtcatcttacaatttatgtatgcaagtgcagagataaggacaccaatcaatttatgaacttcgttaaaaaaaaaaanaaacaaaatgttatgaaccagaatatattatatatgtcccattntcattgagccacatattggcatattctcattattccttcctaaa

SEQ ID NO: 4383 - DNA, 420 bp, Glycine max
  unsure (1)..(420): unsure at all n locations
tactttacttgcttcgtgatgactctnttgtgatattgctggaaggaaatcacccagcccatcaaggtatatntacttttacttttctctttttctgttcatacaattagtttatatcttcattgatcttgggactcatgcttaacatcaaactcaaggatgacatcggtgacaagtctgttttcatgttcaattctcttcctggtgacgagaggaaagccttgcttgagaaattagaacagcaaaaaattcagaattaagatggattgctttaactggatgtgggaaaattntgaaaggaccatctcacgctctgtgagcaattatcccatgtaaaaggaaatattttcagcccctcccctagaaataaangatgataccacagtactaaaccactttcccatgtcttncttgatctct

SEQ ID NO: 4384 - DNA, 423 bp, Glycine max
  unsure (1)..(423): unsure at all n locations
agctntcgcacggtacgatagttcttagactccgtcacaagggccccaattntgattnttgacacctccccatgatttccattcgtaacatccaaataaataaagaatactatttttcattgtttttaatcaaactattaccatggatatattatatgtaaggtattttaccaataataattgttaccaagtaataataattaattaattaaaatttaaaatttaattaattcttatatatgaaatagatcatattaaaaaaaatattcacataatatatatttatagtttccaataaaatntaatcactcttctaactagacaactntatactaatatcataataatcctataattggctagaattcttagatgagattatctgaccattgagaactaactaaagaatngataaagaagtga

SEQ ID NO: 4385 - DNA, 326 bp, Glycine max
  unsure (1)..(326): unsure at all n locations
agtcgacatcatggtgcaattaaaaaccttagcatatctcacaaactcctcttgatctacattgattcccacctagagtagatgagtagaattacccatctactctaacaccatcaaactacttttggagaagttcacttttaaccccgatgccaactcaaagctccaaagaattgctntcaaagtgatggattccttcatgtcctctttgaagaagaatatggtgcatccgcanatngaaggagtgggatcttcaagttctcattccccatgtcaacaccaggaaagaatcctttatctttggttctctaatcaacccacttaat

SEQ ID NO: 4386 - DNA, 436 bp, Glycine max
  unsure (1)..(436): unsure at all n locations
agcttcttcagaaagatgtagattcgtgcttgaccaaccttacaaataggaattcgacgagctgaggaggaggcttaccacctctcccattatgcaaccactagattgggagcttccatttaagctcatgtgtgatgcctccaattatgcacttagggttgttntgtcacagagagttgataaattaacacatgtcattgcttacgcctcacacactctagatgcagcccaagtcaattacaccactactgaaaatgagcttttacatattgcttttgcattatataaatttagatcttatttgctctgctcccatattactgtctatgtgacaccctctacctcgacatacatataaataagacaaacattaatgtattcatttagactttcagagaccaacataatcatttaatttttttacatcaccattaaa

SEQ ID NO: 4387 - DNA, 347 bp, Glycine max
tatggcggatcaagttgatccgtattaagtatacagatcatgttgatccgtatgcttattgcggatcaacttgatctgcaagaagcttacagatcaacttgatccgtatgcagcttctttcatgcgtaatctttgcggatcatctctaacactattgcggatcatctcagtcctaacatttgtctactgcggatcaactcaaaggctatgcggatcatctacacctaacctatgtctagtgcggatcaactcaaaggctatgcggatcaaaagatgccatataaaatgtacaccaaccacaatggaaacagaaacgcaaaggacaccacggtgagggagaacacaac

SEQ ID NO: 4388 - DNA, 230 bp, Glycine max
agcttggttcgaggtacttacccgttgaagatcgaagaacgatgaagaacgaatgaagaacgtcgaagaacggttgaaacctttgcgagattcctcacggaaaacgttacggaaacgtttcggaagcgcctcggcttagattttcttcacggaaacaaatttcccaagcaaattcgaaagagagagaagtgccaaaggggctgaacccctttcttcttcacttcctcccc

SEQ ID NO: 4389 - DNA, 344 bp, Glycine max
  unsure (1)..(344): unsure at all n locations
ttttgaagaagttttgcttntacatgccccaactccttaagtgacattngtattggttgctatcttggntggtgcatcttaatacacttgatatttgtgttgcatcatgaatcatcatggntagtgtgaaaaaaagtttcttcataggaaaaaactctatgtttaatcgattacagagttgtcataatcgattacaacaagatgtctgaatcttaaagaattgagtctcgtatcagtttaatcgattacagtagtctcataattttattacatcgttgtttgagacaatgaatgaattattcaagagtctttgtttaatcgatatcaagtggataatcgatact

SEQ ID NO: 4390 - DNA, 180 bp, Glycine max
gctcacagaaacgtcttggaaacacctcagctgggattctcttcatggaaacaattctttttcacccaaaacagctgaaatgcatagccaaaggggttagggatattatgaacaacctcccttcgcctatttataggaaaaagggggaggacgtttgccgccagctcgcccaggcgatct

SEQ ID NO: 4391 - DNA, 385 bp, Glycine max
  unsure (1)..(385): unsure at all n locations
tatttaaaaaggaagtcgtatctagtcaaggtctgagagaccatacaagtttcctaacgatttctaattatgtgggccattaagtctatcatatgctgacaatagccgagaagcccatgaatctcttcgggggcggagtaggtgtctgccatcgccttggccttggctaacaatcggggaagttcttgactcccgttcaaggtaagagcaaaccgatccatccacatagttgcctcttggtgtaaagagtcgatcacccttcctctagcctctttntccacgtatacttgggcatattcgtccgcaatcctatgctcgtgggccgcggctagacctaactcttcttggtacttggcgatgatagctagcatgttggtctccgtct

SEQ ID NO: 4392 - DNA, 416 bp, Glycine max
cctttaagaaagttatttaatatagttagtagcattttattgttaactatttgtattatttctgtcaaaattattcttaaaattatcggaactcataatttttctcttttcacttaattactttcccacctaattaattaatgggtgctagtcttcctatctaatccttataagataggtaatgcatttatctttttagtatataacatttattgtaaaataattatgggtatttgggtcaaaaaataattaatacaaaagataacttgagaagactcttataagaagggaacaaataaaattgaaaaaagattattatatctagggatagagtgagtatgtccgagcactaagccccttgttgaaactaatggcatgctgacccctctgaatacgacacccttctctctcatctt

SEQ ID NO: 4393 - DNA, 431 bp, Glycine max
gattctgctccgatagaagggttcctctcggtgtggggtttcaacggagaactacggtagttcatggtggctactattggttgtgggtggtgaagaagaagcttgggacgttgcaaatggttttggaagaaagaaggagaaaggaatggttgttttccaaggctacacgaaaaataagacttgaaacactcacgtgtttctgctctctggaaaagaagcatttctcacacaccagattacatatcgcagatcgcaacggtcagatcgtgtaaatctgtccttttaacctcctaaccaaatttcaagaagatccaacggtttactaatgcaggaggatacttttaccaatacagcttcaggtagctttcttgataagcttcctcgtgaggcttctttgagtgttagagtttaactacccacaccctctataa

SEQ ID NO: 4394 - DNA, 321 bp, Glycine max
  unsure (1)..(321): unsure at all n locations
taactttggacactataaaataggtgcttatctattacaatcatctattaaacttattgctgttatgattcacaatgactcattctaggttttgctatcaaacaaaagcgttaaccaatgatatatcttgattttgacagtttaatgatttatgacattatcaaagaatctgatgaaataagcatgtatgacttttttagaatcaccacttaaatatgtaaatttatattagcacttaaatttttcttaagactaaaagtatttttatagaatataggattaaaaaatattaaatcttatatntttttattcgtaaaaata

SEQ ID NO: 4395 - DNA, 436 bp, Glycine max
gtaattcaacatctaatcatcacaaactaacacagtcaatagaacagggcgaaggcgaaaaactctgcccaaaacacaaaccaatatcacagtttttcacattcaaataccccagtaacattctcttcattcctattcgttaaccgttggatcgactcgaaaattttactggaagtctctagtacacaattctacattttgaccgttgggatctgctagcaaatgtccagaaccccatatgtactacccttttcacaaccaaccatacgcaagcattgttctgcacttatacaaaattctgctgcacatttcaacagcaaaattctgcataaagtgcagatttcgaaaaccactcttgccttcatccaattttgccaaaatcgaatcctacaagtcccacatcatgtatcaatcatgtctaaaccaaggacaaact

SEQ ID NO: 4396 - DNA, 328 bp, Glycine max
ttcctaatttctctacaattgcatcatctctcaatgagctggttatgaagaatgtggcatttacctgcgatgaaaaacaagagcaagcctctgtttgatcttctcgaaggcctcttggcagccactgttccacacgaccgcctagttcttacgtaatagcttaaaaatgggttcacatgtacgggtgagttgcgagataaatctcgcgatataattcaacctgcccaaaaatccccgaacctgcttctccgtgcgtggttctggcatttcaaggatggccttcactttctcgggatctatctctatccctttctgacttacgataaat

SEQ ID NO: 4397 - DNA, 539 bp, Glycine max
  unsure (1)..(539): unsure at all n locations
cacccaccgcgcaactcgagacgagaacgccccgcgccgccagctgcacaatagantaaggagatgatccctgannacgnnntagggcaagnacaccgctgnattgagacctggcaaacccacgacncttataaaccgatgacggcagctattaccccagaacaaaaccagattctacgagggcaacacccgccacacgaacggggagaacacagcaaccacaccgccatgaccggcgatgaacgcaaggaaactctcaccatgcgggatccaggcacgcacaacgccgcggctgggaccgggatcaccgctctcggagagccggaacccgaggaattcatcaaggcggccccagcaaaggaaccacaggaaaccaagcgtaaagacgcaagagaaacccaagaacaaggtgacgcacaccaccacggccggagcgagcacaaagaagagcgcaaggcaaantgtgaccacgcactgcgtgagaccgacaaacctggcgggcgcaccatgaacacaaacgcgaggggagaccaacacgc

SEQ ID NO: 4398 - DNA, 283 bp, Glycine max
  unsure (1)..(283): unsure at all n locations
gattagataacactataacaatcatgaagctctcataataaaattacctctttgattatggcagatactttactagtcagcaaacaagataaataaaattagatagagacccgtgagagatgaagaaacactggagaattttcattctaggaacataattgttagaagatttgtaatgctagatcttcccacaaccaatctttgctgagaaaccattaatgatgtaccattcttaattcaaaaatattaatggtaactnttatgaaccataatcatggatcat

SEQ ID NO: 4399 - DNA, 189 bp, Glycine max
tttttttttggtatggcatagctttcagttcatatctcccccttttttttctacgatgataggtattacaaaagaatgtagttctgattctctatgtgtttgttactcatattcctggaacataatttacccaaaacactctcccaaattaggacaaattttgtctgatccataataatgctctcctat

SEQ ID NO: 4400 - DNA, 245 bp, Glycine max
gaaacacgaaacactgtttcactggcctccacagtgacaaaccctagttcaataaaaagtgaaattggaaaacattgaaaatcagaaactcacgttccgccgacgcctccggtggtttcggaggagatagtggagaaaggaagctcgcagatggcgacggaagcgccgtagttggcagcgaagcgagcggctcggacgccgccgctgccggcgccgatggtgaagaggtcgaagtcgtagtgtgc

SEQ ID NO: 4401 - DNA, 277 bp, Glycine max
  unsure (1)..(277): unsure at all n locations
ttttatttatttatcngtaaaatgatttttttttccaatttttntcaaaatttgtgattttaccctttctaatttttaattaattgacacatctcatttattttaaaaaaatttacaattataattccctttggtattttaaatttgttgatgggtaatttttaataaattaagtttgtaaataattaaataatttaaaaaaatatttattatatggataatanacaaacctcaataaaaaatttaaaacaaaaataaaaggataaaaattaagttt

SEQ ID NO: 4402 - DNA, 432 bp, Glycine max
  unsure (1)..(432): unsure at all n locations
agcttgtatgattatggngtacccatcacatgtggtactaggtggcggtcgggcaatggtgcacaacaagttttccacatccacaaatcgcgcataaacccaccatcccctgttgcccacctccaactgagctcacgtactcccacgtagcccatatcctcgtttctctcaacaccgggtccccatcaatcctcccaatctttccccaacatccaagtaactcaacattcaaacaacacaaaccatcacagccaagaaaacagggcagaggcagataattctgcccaaaacaccaaccaaaatcacagcttttctcacttaaaggccccagtaacaattccttcgttccaattctttaaccgttggatcgactccaaacttttactggaagtctctagtacataagcctacattttgaccgttgggatctac

SEQ ID NO: 4403 - DNA, 386 bp, Glycine max
  unsure (1)..(386): unsure at all n locations
ctgtagaatggctagacatgatacatgtcangggttggtttggttcaaagataaaaagggatgccccacattatttncatgacacanaatgcaaaaaatgatgatttggaaactttatgcanaactggtcatgcatgcacctatgcggacactcaagtgtcnaaattttatggtcatgtgatgctagggctcaggattcatttcctctattttaatcaacccaatgtttccaaaatatgttcttttatcaatttgtgcattcatccgagtccatttcgggcgtccgggtgaaattcacagcattcacccttcaggtgtagacacattntccaaaaattgttatgatcaatgaactttttttggaaatcgtctcttttaaaagcatg

SEQ ID NO: 4404 - DNA, 395 bp, Glycine max
  unsure (1)..(395): unsure at all n locations
agctntgatccanaatcctgactcaccatataccttgacccagggtgagaatgtcaatccttaccctcggaagcaaaaaaaaaaagaagaaaaggaaaatttccaatcaaaggaaaaaatagaggaaaggaaattcccaatcaaagagtgggagaaagcaaaaagaaaagaaagaaaattcccaatcaaagaatgggagaaagaaaataagagaaaaggagaagaaggaaagaaagctcctgatcaaggatcgaaagaaaacagaagaaatgtgcagagaggtctttggaccagacaatatctgaacaatacggaattgtcaccaaatgaacaaaagaaagaaaaggagaccataacctanaagtggtcttcttaccaaccaaaatcctgtgcgt

SEQ ID NO: 4405 - DNA, 394 bp, Glycine max
  unsure (1)..(394): unsure at all n locations
ntgtatatgttgagcttgatctttgattngtttgagtgctcacatgagatggatatgatcaagacattgttgtgtaatttgaattaattagcccaaaagtcaatcttatgtgtatgaatgatgaatcccttgtcatccctttgagtcgaatgtagtgaatgaatntatttttgaacccttgagttgagaagaaaaatagcatccaccttaccttaaggaatatgagagcatatttttttggtttgtttgacgcanatttgttccgaatttgggggaggatgattgtgtaaataccttgtgcatggattaaatgaaaataacaacacacatagaagacaaatgttaaatgtaaaanaatataagaaaatcaaagtaaaaaataaaaagaaaatta

SEQ ID NO: 4406 - DNA, 428 bp, Glycine max
  unsure (1)..(428): unsure at all n locations
agcttgatccanaaccagtgagagtgtgaccttactctgtgagtgaacgactagctgtgagtaataatctttgcctaaatctctgaattttagaatgaaatgtataaatgaggacatgatgaaggccatgattgtacatacacaagctcttttgaccaaatagcttaccttgaatgataattgcatcctttgctccctttttgagctgaatgatattgtcaaaaatttgaaccctgaacttaaacaattatctcttgataccttgtttagattttaggagagcatatggttcaaggcaaatttactctaaatttgggggagagaagtcaattagaatgaaaagaaaatggttaagcatcagcacacacaacanataaatggtatgttaaaaaaaagtgaaagaaaagaataaatngtnngtgtacaat

SEQ ID NO: 4407 - DNA, 433 bp, Glycine max
  unsure (1)..(433): unsure at all n locations
tctccttccatggcttattccctattggatggcacctcctctaacctcttctcctttatcgtctgctacatctccatagtggaaaatcaccattgaaggacatcattgaagctcanagatccagcctccatagaagcttttcaagcaagcttccatcacaacataccttcacaaaccaaattcaatctcaattctatgacattctngggagaaaaaagcacttagaccatngctaacttgaaattagcattcattnttccaaatggatcaataaaaaacaacccaaatggtgtttattttcaatgtcctactccaataccaatgcgagttcttaatgagtgttcttttgagacacttaagagtagaatgcacaacacccttcgactaactaatgaccagtttgtacatgaaatctataccaatagtcatctat

SEQ ID NO: 4408 - DNA, 402 bp, Glycine max
  unsure (1)..(402): unsure at all n locations
tactgcctcatgaagttcatcaattagttcatcaacagtgggaataagaaagctatctttgattgtgatggcattcaaagccctgtaatttgtgccaaatctccaagngccatccttcttcttgacaagaatgattggaggtgaaanagggcttctgctangggcaataatcccttccttgagcatgtcaactatcattaattacttcaatctgatccttccggctgtgaggatacctatatggcttgactnttactggtccagcaccttcaaccaatgggattgaatgattgtgagttctgctagggggtagtcctgatggcacatcaaagactgttctatcagtgtaaagtatcatggccagttctggttccatatcaaccggtatatctaataactggt

SEQ ID NO: 4409 - DNA, 465 bp, Glycine max
  unsure (1)..(465): unsure at all n locations
nttgancccctgaannnctttganccttggattgaacccattgcattacccgcactatgatactangcctaaagtattctgaccaccatactttgcactatattcttgcactanggtgaagatttgctgtattcacgatgtctatgtctctaactagaacactagtcacatatgggtttcttgctcaagctccaactattaagctagttgtagcgattgaaacttaactcatgacaagaatcttaagaatcctacccatctcttctacctcagattcaactcttaaggttctcacaatgtatcaaactaactataatgcctccaaaacatgaaggcaacaccatgggttccactctagatatgcgtacgacanatcgttcatgaatangagctgtcgagaaacataagcactgtttgcctcttgctaagcatccttaaactaaagctactctaatcttttataan

SEQ ID NO: 4410 - DNA, 350 bp, Glycine max
  unsure (1)..(350): unsure at all n locations
agcttcacatttctctccggaagaatatntttgctgagaatggtgtcagtgtatctattccaagcttccaaagattaaaatcacctactatcatactgagctgtgggcctagaagcagggctcttcctcttcttggatgtcatctacaataaacagaacccattattttattagaccagaagttatcaaaactgaaacagaaaataaaaactgaaattggcaacatgcgcttagcgagacacaactcgcttagcgcgcctcagaaagaacaacacactggcttagcataacaagggtgtgcttagccaaatatgacataaaaattttctctgcataattggctaacgaga

SEQ ID NO: 4411 - DNA, 556 bp, Glycine max
  unsure (1)..(556): unsure at all n locations
gttaagcccctttggaannncttttaannccttgggatttgcancccctttgctatttacgncgacacctatagaantacctcaagccttttgtatggtatgaaaaggtgtanggggacaccctcctattgttggggntagatgctcgngnagaanggacnntcgnctctatagacaccagaaagtgggtacaancaaaacccacttgagaaaagnttaagnttaattccnggaaaagggattaagaaccttgcttcagaggtagggcttgaaaaagttattcatgattaagaagaggaaaagatcangaattcgagggtggtgatcatgtattcttgagagtcactctgtggactgnnngtggtcgagcattganatcccganactcacatctcgctttattggtcctttccaaattcttaagaaaagtggccctgtggcatgccaaatngcactacccncgtctctttctaatcttcacaatgtctntcatgtgtctcaactccgtaagtgtatctgtgatccatcccatgtgattgaatnggatgatgtacan

SEQ ID NO: 4412 - DNA, 479 bp, Glycine max
  unsure (1)..(479): unsure at all n locations
natgatacccatgaanaccctgacaccttagaatgacgcccattgcangaccnancngnntnnacngttaatccaccgncatgtcttaatganccgctntttttatgactatttattgtacgnggggcgtaatcacataatgattgccttatgttaaattccctcagcaataaaaattaaggttggattaactggttgaactgcataatgataaattctcgtaacctatgataagaaacttgcttgtgaatctaagggaaacaacatgttttaattatgttattttctaattcaaatttgcttgctagtttatttacaaaaacaaacaaccccacccccaccgccaacatcattatttgtctattactatctgngacgaaccttagggtgaccattactcttgggagataaccaagaacacttcctaaaaccgcttttaaaggttattgatacgggacccctccacacaccatttcaag

SEQ ID NO: 4413 - DNA, 402 bp, Glycine max
gctttattctctgtctactttttcacaattggactttgttgttgatgtggtggtggtaataaggccatgacaacttgagagaaaagcttatcttgttcataattttgatgacttgttctactacctttcgattttggtttgtatgtctcttattgtcttccttttttctttgttcaattcagaagagcagcgaatcaatccctaattattttaagtcgtaagaaaataatcaaggtctgtttaaatcaaagataattatggattttcttttaaacgcctagtatgtggaaatcatattgaatataatctcattcatgttgatttggaaagaaccacttaactctcctctataatgtgtgattattttagagaagataacattctcaatttggcctattccta

SEQ ID NO: 4414 - DNA, 249 bp, Glycine max
  unsure (1)..(249): unsure at all n locations
ataaacgtgtaccccggttaaacagtaacagtgaggatatatgttngtatttttaatttgtaccatgaaaagaaataaagttactgggaacgttcttcatattattatacaatcagagcagaagtttaaagttctatacactgtacattctcacagngagaatagcataactaacatgataagattatccaataagtttaaatacaagaaatagtgcatgcaaaagatctaaaatgtgagcaaaatttc

SEQ ID NO: 4415 - DNA, 281 bp, Glycine max
acacctatgcgctaagccaattgtcttttggtatcccagctgtgggcttagtgtgctccctgcgctaagccctaatgcccttcatatctctggagtatcatgcttggtgcgagaggcgcgctaagccaactcatacataaatgttgttacacctatgcttatcatgcacgctcatgctaatcatctattactctgagcaattatgtggagcgcctgtgctaagcatttatcatgcgctaagcccaaaaacggcattgtcacacttttgtcactaattgggc

SEQ ID NO: 4416 - DNA, 395 bp, Glycine max
  unsure (1)..(395): unsure at all n locations
tatttcctaaaaaaatgacaaaaatgatgataatccttaaaaaattagaaagaagttagaaaaaaatagaataataagggcagaaaataaataggtgccataagtgctcttagaacaataaattgaggttgaataagtagaagtttttctaggataaatgctctcttataaccctaatttttgaaatcccaaaaaaaaccataatttctttgattacccaggccacattacaagccaataaaagtcgttagtgatccaccaagtgtaagcaggataactntaactgagatgaagtgcaaaactaggaacattaattgcaggtcgtagaaatttaaacactcacccaagacacttatgcgcagagacaaacactanagtcttgtgaggaaaagtga

SEQ ID NO: 4417 - DNA, 457 bp, Glycine max
ctgccgcatgcaagcttgaaggacatgcacaaagtgtgactatatgatgtggcaatggggtgtatctagcaaatgctcacctccccctctaaaatttatttggattgggcttctcccaattcaattaaatttatttcccaacacacacatcaaatattcacttaatgcatgtgaaattacaaaactacccctaatacaaaaacttgtctaggtgccctaaaatacaagggctgaaaaatcctacatttctagggtaccctacgtacattatggagccctaaatacaaggccaaaaaataatgaaaccttaatctaatatgtacaaagataagtgggctcatacttagcccatgggcctgaaatctaccctaaggtttgtgagaaccctatggccttctcttgcatctctggcccaatgttcttggagtcttctatccaatgcccttggggagtagga

SEQ ID NO: 4418 - DNA, 442 bp, Glycine max
  unsure (1)..(442): unsure at all n locations
cttatgcacatatttccttacgaacgttcacttgcacaagacatcctatcaactaagaataatgcacccatatacaatcaaggtagcttcattacctagattatttacatgtacttccaaggtgtatttgttatttacatcacacacgcctncttggctgaatttacatacatgcatactcaaagcattttggggtaccaaaaactgcacatgcgctcatcttggtatttctaatacccatacatatacaaacttcacgatgaatcttgactacctacacaataaggtgctacatttcatgctttttttcaagtttttgctacctaaagccacatgcaaattcaagcatattttcctttgctgactaannatgtattcaaattagaaggtatatattntntggaatatgttttcttcacataacatgcaacatatttatata

SEQ ID NO: 4419 - DNA, 436 bp, Glycine max
gaaactgcaatctgtaagttacttcatgtaaagcataaatgctattattttatctaacgagttactactgtctaagaaaacatagtccttattacgagttagatttttatgtatttcatatttcgctcatttttctttcattgaaaaccatgactttttataacatagtattaattgttatcttttatcttgaatatatatatatctttttctattgttccaaaactactctatgattgagagcacacttgtgaatgtgatttacacgattatttttataatagtatattttttattttgtatattatttttactttgtaattaaatttattcagtaatattcttattttgtgatttttataacattacttttatgatttattatttcaatattattttaaactctaatttaattatttatatgaatattatctat

SEQ ID NO: 4420 - DNA, 368 bp, Glycine max
  unsure (1)..(368): unsure at all n locations
gcttcttcttcgagtcatggctcgtagtcgttcaagtagctgtgtcttgatgctgttcgtttgagccttgtttctgcaagtttcggcccagtgttggtaactcaaggtgattcctatcaataccctctcccgcgaagaccacctttgcctcaaggtggtaaaggtcgcgaacttctgaccattgtacccangtggtgtcttcaggaggttgaccttcccattgcactagcacgagtcgtattggaggagatgacgaggtgtcaagcttagaatccaaaatgcacaagggtcgagtgacgggcttctgggcgatgaatngtaatggtaagttgtcattcggggtgggtggggaaccgtgatgttctcgt

SEQ ID NO: 4421 - DNA, 382 bp, Glycine max
  unsure (1)..(382): unsure at all n locations
agctntcttcatattntaataatgaccctctaacttagaattaaaataacttaatgccattaatctanggaattaaaaaaacttaatggctgagtgtaactgaaattgtggcaaccaaaagtcaccctcaacagccaacaagtcagccaccatttggtctcccaaaaggctgatgcctangatgccaattgggcccttattacaacttgaactaaacctactaaagcccttttagttgattaacccaaaacatacctttggtcagtcaactttacaaggattgngccattatntagacaaactaaacactctaaaattgagacaaagaggagccatttagtcctcatccatttgggccatgatacaactcacaaccttggac

SEQ ID NO: 4422 - DNA, 197 bp, Glycine max
ggatagacttggatactgcaagttggagttgatcattatctgggtttgtcaacctttaatagcaaaaaattttgtggtcttgaagtacatctcctcaaccaacaatgacacaagcaaatacattatacttttgaacatggaatttaccaacttagacaaatttgtagtcatatgtccccaacatttcccctcgtcga

SEQ ID NO: 4423 - DNA, 419 bp, Glycine max
  unsure (1)..(419): unsure at all n locations
gatgctgagttgtngttgtggcatagtactggtgagttctccattggacaatggagttcgaggatgccttcaaggagagatcatntgcttctcttttcctcccacaccatctcatttcgtgtatatatgttaataataataaattggtatgttaatccattatggtgaatatatgtattgtaatatttgtaggaagttatacaaaacaaattgtcacatgtggataaatctcaagtatgaatatgctaagactttgactatttaaatatgttactatattcatanttatttttgtttattggataatnaattatgataaatcattattatgttataataataataatattgataaaaaaatttatgatcattatntctcattaattacatgaagtatatattatgaagatagtaatgat

SEQ ID NO: 4424 - DNA, 416 bp, Glycine max
  unsure (1)..(416): unsure at all n locations
tcatgataatgttgggttaattacaaagattangggtttgataactaattgtagtttaattatgggaaacactttttatttttgctgttgaaccaatattattagaattcanagagataccttcaacttgtgattcagcctatgttttcatttgaactttttggaaagaaaaaaacaaccaagttttgattattcgagtgttttttacaagcattacgtagttactcttcataatggacgtttttcagagtaattggatattgtcaacatgtatgaataaattaatctccttcctgttttcttttcactcctagtataaatcttttagttcaattatatttctgtttttagaatttagtttcattttagaaaaatggaggatgtgtanacatnttttcactggtcatcctatttat

SEQ ID NO: 4425 - DNA, 424 bp, Glycine max
  unsure (1)..(424): unsure at all n locations
agcttcattaaagagtgagtagactccctttatatataatagatattgttgaatagaatggtaataagctcgtagcctagccagaattttaaatagatcagaccaagcctaaaaaaaatcctatgccaaattttatatttctaattcaagcctaaccaaggctgacctgattcatccccaattaccagatatttatggttgactacaatagtgagtggataccattcaattttcggtaatatattattggtccactaattattcaattaataatttaaatattaatgaatataaataattatattattatttcanaaatacccaaatttaatattatttaaaaaatttaacaaaatataacataaacttgaaactcaaaatgagaaattaaacgattcaacaattgcttaagatgttatatatt

SEQ ID NO: 4426 - DNA, 353 bp, Glycine max
  unsure (1)..(353): unsure at all n locations
nggatttcttttagtagggatctatccttcctagatggatgccaacccagtcactgtcattaagaactagctcttttcttcctctattgcctttagttgaatacacctnttgttggntctctatttggttcttaaccctctcatgcaacttctttacaaactctgacctagattccccttctntatgtataaaagaagtgtccagtgggaagggaatgaggtctaacggtgttaggggattgaacccatagacaacctcaaaaggggattgcttggtggttctatgaacccccctgttgtaggcaaattctacatgaggaagatactcatcccaagactttatcactacctct

SEQ ID NO: 4427 - DNA, 429 bp, Glycine max
  unsure (1)..(429): unsure at all n locations
agcttatctctagaggggatggagcctttctttgtttggagaggataaataacattgcctataggttggacctcctagaagagtatagagtcaacaccacttttaacatttctgatttaattcctttcgcaggtggagttgatattgaggaggaggaactaacagatttgaggtcaaatcctcttcaaggggaaggggatgatgcaatcctccctaggaagggaccagtcactagagccatgagcaagagactccaagaggattgtgctagagctgctgaagaaggccctatggttctcatgaacctcagggtagatttctgagcccatagaccaaggttgggtccaattgtctttgtacatattagactaggatgtcattatatntgatccttgtatctagggctccataatgtatgtagggtaccct

SEQ ID NO: 4428 - DNA, 349 bp, Glycine max
  unsure (1)..(349): unsure at all n locations
gatcatgtgngttgaatgtcttttaatcactgctgaagcaaaattgaaccgattatacacactgtaaccttagctaaatggaaaaataggcaaaataataataaaataatcatgatatcgtaccaaaatatgaacatgctctaatacaatcaatcggacgttctctctttgatagtttccttgaatgaattgactgattaccaaagcgaaactgaggctaaaattaactcacaaaccaagctttggtcgcataagtcacttagcaccgttgtaagttccaacgccttaaaactgtcctctttgcttttatcgattaacatggactgttcaagagaataaaatcaacaca

SEQ ID NO: 4429 - DNA, 394 bp, Glycine max
  unsure (1)..(394): unsure at all n locations
agcttgatatgaggaagtgttgaagggtgattacttcctgctttattgntgaccacagagtggtacctggagatatgtcgcgggggtcaggagaccttgnggacgtcaggtggggtgctattgcccaaaaccaagcttgaccaatcccgacccaacccgggcatagtctgtcagtgagaacctgtgatgtacctaagcaggcgagctcctgtcagtcaacagataaaaggaaaacaagaccacaaagcaaggaggctngtggtggctggccagctgtgaattttgtgtaatatgtggatagtggcctctggtaatcgattaccaaaggtgagtaatcgattacaaggcttaaaattgaggacaggaggctaagatggtctctggtaatcgatta

SEQ ID NO: 4430 - DNA, 377 bp, Glycine max
  unsure (1)..(377): unsure at all n locations
gctttacttgcttggaattatccagtctatctttcttattttttcgcctacattcttcttcaagaatagcttaagcaacatcattaaagggtagacaagtgacattattatttattgttatgttgataatgaagttatcatataaatctggtagactctaaagtagaagctctacccgtttgttttcttctatgttaaaatttgatgacggaaattgggaaaataaagtattcaggttttcatgtggtatgtcacccaaatggactcactcgttcgaagagtgcagagtttcctcttcaaaaatattctagtctgaagtgactngatctcatacaatttgtggaaagtatcccaaatatccttcacgttttccattg

SEQ ID NO: 4431 - DNA, 311 bp, Glycine max
  unsure (1)..(311): unsure at all n locations
tcaagaagtattgacacattaacatgagaagttctactgatactaggcaacctcattgacaaagtgtttgccattttctttggatgcattctatcattacagccacagggcaactgctgtgtagctctccttagtatacaacaccanaaccacctttacccaatttactttgaaggataggtcatttcttgcttcgaaaatttgctctttgtagagctcatgaaactaattagtttgagacattaatgataatagtcttgaaaaataattattgtcaatgattctgacatacacttatgataaatggctac

SEQ ID NO: 4432 - DNA, 249 bp, Glycine max
caagccaacttacaacagctagccccaagagactcaacataatgatgcacaggtcaaagttgagtatgtgaaaagattgtatgaccaagtgaaggtgcaaatcgcaaagaagaatgaaagttatactaagcaagccaacaagaaaaggaaggaagtggtacttgaacctggtgacgatcctggacatttgagggcaaatggtttccaagaaggagggaatggatgagaatcccgaattggccaaataca

SEQ ID NO: 4433 - DNA, 275 bp, Glycine max
  unsure (1)..(275): unsure at all n locations
tcatgatggatttaaattgagtattcacattttttttgcaattcacagacatgatatgatatgatttatcacacggattgtgacgtggtggcatatcaaaccccatcttttgctgtgatgatatctagttggaatgagtcacgatacctaaataatattccgttgcaatgactgatccactgtcatatggggggaatgnggagtagtggaaggtaaaacactctgctaagcttgtatatcacatacccacattgaagtcatgcttctaagatgta

SEQ ID NO: 4434 - DNA, 348 bp, Glycine max
  unsure (1)..(348): unsure at all n locations
atcggatcttattctacaatatctaacatagtttttcaatatcattatgtaaggagactttgagcttttctttatgagattattgggaatctttagagcaattttgtttctagaaaaggtatttttggtaatgttatcatcctttaattgggaagtcctctactcgatgctccaacaaaaagactaaaaaaaataaacattatttataaaattatctagaaaaggcttatcataaagttgactagtctctccgtcgctgcttgaaggatattnggttctaggatctcactatcaagctaatcctgttttgttttatctttgccatcttatcccttnttggtatgggaa

SEQ ID NO: 4435 - DNA, 276 bp, Glycine max
  unsure (1)..(276): unsure at all n locations
attatgcaaaaatcanatataaatcatctcttacaagtttaacatgtgttatcaatccatatatatatggagattaagaacaattcttttataataattaagattagttatntattataatcattagatcttaaaaaatgaataatatgaataaagagttatttttaaaataggtgaatgccnntctttatatatatatatatatataaaaatatataattatataacggcaaaaaataaatatatgctgatcagaaatatgtaacgttatactat

SEQ ID NO: 4436 - DNA, 413 bp, Glycine max
  unsure (1)..(413): unsure at all n locations
tcccgacccaacccgggcatattctgtcagtgagaacctgtgtagtacctaagcaggcgagctcctggcagtcaacagataaaaggaaaacaagaccacaaagcaaggaggcttgtggtggctggccagctgtgaattntgtgtaatatgtggattgtggcctctggtaatcgattaccaagggtgggtaatcgattacaaggcttaaaattgaggacaggaggctaagatggtctctggtaatcgattaccaatgggtgttatcgattaccatgcttgaaaacaaagtcaggaaacttagggagcctctggtactcgattaccagcctgtgtaatccattacacagaggaatgggtcactggtaatcaattaccaagcctgtgtaatcgagtacacaangcattatngcata

SEQ ID NO: 4437 - DNA, 254 bp, Glycine max
  unsure (1)..(254): unsure at all n locations
tagtaaaatgcttatttttctcattttccttctccacactccagatgtgagatgactaaagtttcatatgattttttggaagaatgggggatngagtgngaattttttccattaactttggataatgcttcttctaatgataaaatacaagactatttgaatgaaagacttcttttgcataataatggtttagtaagtggtggtngaatttttcatatccgatgttgtgctcacattttaaaccttaatgttca

SEQ ID NO: 4438 - DNA, 436 bp, Glycine max
tgcggcacccaccattctctatttagaatactgctaatgtgtctactatcattgtcatcatttttcgtcattgaggtgccacttgagctgccaggttctccacctttgggcgtattctttgaaagatctgtgccccctttttttgcacatgttttgtagttgcatcctatccgaagccattatgccgacactgcctaacgaaggcaaccattaggtcctcccgggaatggactcgggaaggttccaagttagtgtaccaggtaacaactaccccagtaagactttcttggaaggaatgtatcaacaattcctcatcttttgcgtatgcccccatcttccgacaatacatctttagatggttcttggggcaagtagtccccttgtacttgtcaaagtccatcaccttcaacttgggaggggtgatgatattgggtac

SEQ ID NO: 4439 - DNA, 355 bp, Glycine max
atgagaagttctagactcattacgttatctaaaaacctttttgtggatccaagtgctccgatcatccatttgcatactcatgttttggtggcatactcaccgctgtttatttcaacgggaatttcatcataactaagaaaacaccaaggcacccctataacactcgatccagaaaaatggataatgaagagggcgtgcatgaacagatgaaggccgatctatcggccttaaaagatcaaatggcttccatctcggaggtcatgttaaaactccataaaaccatagaggataaagccacggcaaccgcctccagtacggttagggaaatggagccggtgctgtagcccgccttgaa

SEQ ID NO: 4440 - DNA, 442 bp, Glycine max
  unsure (1)..(442): unsure at all n locations
tgcaagctataggtttgatggccccaatgacgtctattcctcacatggaaaaaggcttaggggcggacataacattcagaggatgtggcagaacattgacattgtccgcgtacgcttgacatttatgacatttccttacatgggtgcagcaatcgcttttcatagtgagccagtaataaccggccctaaggatcttcctggccatagcatgcccattggcatatgtcccaaataaacactcgtggatttccttaatcatgtagttcgcctctttggcatctacgcatcgtaaaagggtcatgtcatggttttgtttgtactggatagtaccactcacaaagaaaccagtagccaatctccttaacgttcttttgtcattgtcggaaatccctggtggatattctttgttctcaacatattgttngatgtcgaagtaccatgg

SEQ ID NO: 4441 - DNA, 357 bp, Glycine max
  unsure (1)..(357): unsure at all n locations
ctgccacatgtccctattngattggagcanaagggcccactttctctttttgactgtgacccatactcagtcacaaaagtgagaaaaatctgacctttgaaacgctaaagtcctgcctcggtttgcgtgtcgtttctctgattccagtttctcgcgtttctctgcgtccgccggggccagttttcgaaagcaagcaatatatatatcaaaacgctcagaatgaaaccccgagccgtggttagaggttggtttcgttaaattntaagtcgcacgcaaaacgatgattttaactaattaattaggaataacccataacctccagttatgatttctctcccttaatagcctacccgcata

SEQ ID NO: 4442 - DNA, 440 bp, Glycine max
agcttgcctcatagaggtccaggaaggacattgtctgccgaaggaactagttccgccccggagtacgacagtcaccgctttaggagcgttgtacaccagcagcgcttcgaagccatcaagggatggtcgtttctccgggagcgacgcgtccagctcagggacgacgagtatactgatttccaggaggaaatagggcgccggcggtgggcaccactggttactcctatggccaagtttgatccagaaatagtccttgagttttatgccaatgcttggccaacagaggagggcgtgcgtgacatgaggtcctgcgttaggggtcagtggatcccgttcgatgccgacgctatcagccagctcctgggatatccgatggtgttggaagagggccaggaatgcgagtatggccagaggaggaaccggtctgatggtgtcgatga

SEQ ID NO: 4443 - DNA, 391 bp, Glycine max
gagccatgttctcagtatgaaaattagtagtggaatgctcaaaatcagaatactcagaatcaccctcaacaaaatgctcagaatggtcaaaatgctcaaaatgcacagaatgaccaggatgcacactatatctaactaatctatgaaaggttctatctatttcaggatcaaagggttataaatcacctggattgcccctagtcatgaactatatgtagcaaataatgtgtttctcaacaagcacctaacaagggggtaaaactacagctatactcaaacgatatcaaaatgagctgaaattttgtgaggaacaccctaaaatcatgaaaagatagcacaaaaaatttcaaattctaactatgaaaactacctaagcaaagtttagaaaaat

SEQ ID NO: 4444 - DNA, 365 bp, Glycine max
  unsure (1)..(365): unsure at all n locations
agctttgatggtgtcgagaagaaatcacatgtttgtcatcatcaaaaagggggagaatgtgaatgtatgtatacatggatttgaagatgtcaatagaagaatcaaacatagttgcttcagaggataagcatggcttcaagattaatacaagatggcttcaacaaacaaagcctggtttcaagattcactaaagaccaagccttgcctctaaacanagtgttttccagacatgcaaggctctggtaatcgattaccaggaagtgtaatcgattaccagaagacagggttgagaaatagctgttgaanaggaatttgaatttgaaatttcaacatgtaatcgcataccatatgtatgtaatcgatta

SEQ ID NO: 4445 - DNA, 129 bp, Glycine max
tacatttctgttaagcagttacgcagctacgtgataacatatgtataatacgcatgaaaaaatgctcgagaataatatcagaaaacgcattctttacatccgcccttgatctctctatctctctaccct

SEQ ID NO: 4446 - DNA, 419 bp, Glycine max
  unsure (1)..(419): unsure at all n locations
agcttctatttctgtgtatccatagctagctaatagtattntcaatgtgatacaataatagtgcgttcactgtctatctacattgagaccaaatagaagaataacaatcacgaacattctaatagggtattatctaacaaccagctaaatgacaagtatatagacaaaaaggcattctccttcaagctaatcggcatcagatctttagctacaaatctaagaattatcatctaaacggggatgctcttttaaaatgttgagaggttatgaattttgacaactttcgaaacactgtaatgtgcactcacatgtttttagcaaacagagaaatacttattcgctcccgngttaagatgaggaannatatggatacccataaaggggaaaagganacaatggaagaaaggatatanatttgt

SEQ ID NO: 4447 - DNA, 388 bp, Glycine max
  unsure (1)..(388): unsure at all n locations
acaaaaaagcatgtagatatatcagtgaactgagccagaccaaggaaaaatacatcaaagaaaataaataatctagtatagctaattttataatcagataaagcatctgagacctgctgccatgtggtatcaacaggaagctgccgccgagcatcgccagcatcaaaatccagtacaccataatccctcaaccgaatctacacagcaataactaaaatcagaagtctntttgaggattaaatgcatggcattatctataagacacatttntctaaatgagacaaacccgaaggaagcacggattctttgcaattccaacaccccaccaagagcagctaccattagataaaaagcagcagaaataagtgtgataacaatacaaatcatg

SEQ ID NO: 4448 - DNA, 411 bp, Glycine max
agcttttttattcattctatgtacaccggagttgtccacattgagttttgtgtatttctattcttggatcatttacttattatacccccttctgacgtgcttaagccattttatataagtcatttctcgcttaacctaaaaataaaataaatttccaccgaacgtttgaatcgtattatccgttaacttcggataaaatgaatttcgaccgttccgtcgtgccgtatccacgttggaaatcaaaaagagattagatattactatactaacaaagaaatacaccttgttgtaaaataaagcggaaaatcaatcggacattttctctctgggatttctcattcataattgaattgactaatatgtaaggcgaaactaaggctaaaatcaactcgcctagtcaagctcgtccac

SEQ ID NO: 4449 - DNA, 397 bp, Glycine max
  unsure (1)..(397): unsure at all n locations
actcaagctgaagcaactggtgcgttggtcaactggaacccatctgccttgaatcagaaatctgtacctgtcgcaaggggttgtggtttgtgctcctctgctgaccaccatacagacctttgcccttccatgcagcaacctggagcaattgagcaacctgaagcttatgctgcaaatatttataatagacctcctcaacctcagcagaaaaatcaaccacagcagagcaattatgacctttccagcaacagatacaaccctggatggaggaatcaccctaacctcagatggtccagccctcagcaacaacaacagcagcctgctcttcctttcaaaatgctgctggcccaagcagaccatacattcctncaccaatccaacaacagcaacaacccca

SEQ ID NO: 4450 - DNA, 422 bp, Glycine max
  unsure (1)..(422): unsure at all n locations
agctttttctgctggaatcatttatcctatctccgacagccaatgggtgagtcccgtccaggtagttccgaagaaaatcggcctcatcgtgatcaaaaatgagaaggaggagttgattcctactcgggtgcagaacagttggagagtctgcatcgactataggaggctgaaccaggttaccaaaaaggaccattttcccttgccattcattgactagatgcttgaacgcctggcaggtaaatctcactactgtttccttgatggtttttctggttatatgcaaatcactattgctcctgaggatcaggaaaagaccacattcacctgccccttcggcacttttgcctataggaggaatgccttcggcctgtgcaatgcccctggtaccttccagcggtgcatgatcnagtattttagtgatt

SEQ ID NO: 4451 - DNA, 432 bp, Glycine max
  unsure (1)..(432): unsure at all n locations
tatgcgcatatttccttacgaacgttctcttgcacaagacattctattaactattaaaatgcacccatatacaatcaaggcagcttcgttacctagattatttacacgtacttccaaggtgtanttgttacttacatcacacacatctncttggctaaatttacatacatgcatactcaaagcattttgggatatcaaaaattgcacatgtgcacatcttggtatttctaatacctatacatacacaagcttcatgatgaatcttgactatctacacaataaggtgctacattccatgctctnttcaagtttttgctacctaaagccgcatgccaattcaagtatattttcctttgctgactaanattgtattcaaattaaagggtatacanttttttgtaatgtattttctttacataacatgcaacatat

SEQ ID NO: 4452 - DNA, 410 bp, Glycine max
  unsure (1)..(410): unsure at all n locations
catagacctcctcattgtgtcggtccaacaaacgttgcatctgtgcattcatcgcatccagtaacagacgttgagctccatccaactgatgatcctcgtcaccaccaccacctgctccagtcataattcaacaggaaataaatgtgcaattaaaattattaaggtttcaggacctcacaacactctactcacgtgtttaactcttagatggtagtacactcgtgtttaatgctctcaataggcttttgtataatgaattccctcttgccttttaccactcatgtttcctcttaagttcctggatggaccaaattagacacacaatgtantataaaactaaaggaaagacaatataatgatcataaacagatttgatttgggataacaacttggacttgatttggataata

SEQ ID NO: 4453 - DNA, 412 bp, Glycine max
  unsure (1)..(412): unsure at all n locations
tctatagaaggtgcgttcctaatttctctacaattgcatcatctctcaatgagctggtgaagaagaatgtggcatttacctgcggtgaaaaacaagacaagcctttgctttgctcacagaaaagcttactaaggcacctgttctagctcttcttgacttttctaaaacttttgagctagaatgtgatgcctctggagtgggagttggagctgtattgttacaaggtaggcaccctattgcttattttagtgaaaaacttcatagtgccaccctcaactaccccacctatgataaagagctntatgccttaatatgagccctccatacttgggaacatttaccttgttccaaggagattttcattcatagtaatcatcaatcacttaagtacattagaagggaaaagcaagta

SEQ ID NO: 4454 - DNA, 229 bp, Glycine max
gaccttatttcatctgaagctgcaacttgtttaataacattgagagtgttatatgaggaggtgaatgccttttgtttaaagcaggcccctgataaatacttttcaaattttgcttcacggaacggccacgagagctgcctcaagagttcatatgacaggccccgaagaactattccctcgagttgaattaccgttaggacctgacccacacgcttcagcctcaagatgg

SEQ ID NO: 4455 - DNA, 377 bp, Glycine max
  unsure (1)..(377): unsure at all n locations
agcttgtgactctnggcaatttcttttaaatactagtcacttaaaaagttgtgacttttgaaaaaatctttagaaacaagtcacttgaagaattgtgacttttggaaatgtatttttcgaaatcagtcactggtaatcgattaccattaaggtataatcgattacacatcaacaaatgtgacttttcatttttgaatttgaaaattaaaatgtttagaagctctggtaatcaattacaagtgttgtgtaatcgattacaagtgttgtgtaattgattacactagtttaaaataatttaaaactattaaacacaagttgtactcttgaaattgaaatctaacgtntaaaacattgtaatcgatactacctttgtaatc

SEQ ID NO: 4456 - DNA, 378 bp, Glycine max
  unsure (1)..(378): unsure at all n locations
tgactaggcgagttgantttagccttagtttcactttagttattagtccattcgattaagaatgagaaatcccaaagagaaaacgtccgattgatttttacgctttattttactaaaagggattttntgattattatattaatattttacctcattttttgatttccaacatggttacngcacgaccgaacggttggaattcattntaactgaaattaacggatattaaaaatcaaatgatcggtggaaatttattntatttttggattangcgataaatgactgaagcatgtcanaaggaggtacggaaagtaaatganaacgagaataaaaatacatgaaacaaaatgtggaccaccacgggtacatagaatgaat

SEQ ID NO: 4457 - DNA, 404 bp, Glycine max
gtgcagaactggaagctccaattcatggaaagttaattcattcctacgcgagcaagacccctgcctcgtctaatgtatttgtaaacagtgctttaatatatatgtattcaaaatgtggatatgttgctgatgcttttcaagtttttgacaacatgccggagaggaatgtggtttcttgggaatccatgatattggcttatgcaaggaatgggcatgctagagaggctctgaagctcatgcatagaatgcaagctgaaggttttgtggtggatgattatatccatacaacagttattagtgcatgtggaggcgttgagcatggagacattcatcaggatagtgagtattcttcacattacttgcattcctagtaatcttctacaagataggagcatcaatgaaca

SEQ ID NO: 4458 - DNA, 307 bp, Glycine max
  unsure (1)..(307): unsure at all n locations
tctggtgaagaatatctgcatcatgggaaacttaatgcatatgaagttgctcttggtggaagattcaataacatcaatattggggacctgaagctntttgaaaggatgaatatgggtaagaaggtgggacctcaatcatactatgaccatccttatactccaacttcaccaatcgtcgaactaaattggctntattacgaggtgttttcttttgaatcatggactcaagctttgtccataattcataagcatttgtgtaagtagaaacatgctcgaagagagttttgtcaatgtacttacggatcat

SEQ ID NO: 4459 - DNA, 229 bp, Glycine max
  unsure (1)..(229): unsure at all n locations
acctgcacgcatgcaagcttgtcgaagtagcggngaagctttatgttgtcgtcgtcgagggattggtgtaagggcttattcttcgacttagagtagtagcagatgttctggaactcgatggaaagggggggggggggtaagtgttctccaaccactttgtttccttcatgcactctaatttgtccaatgcctcgacgcggaattcttacatcctctttaactccccttt

SEQ ID NO: 4460 - DNA, 280 bp, Glycine max
  unsure (1)..(280): unsure at all n locations
gatgggctggaatcacttgacaaactngcttaatttgtaatggaattatgtttgtanagtaccattaaaatcttgtacatgctcattantttggcgcttttctctattcaaaattattggtttggactattttttttccccataagctaatccaattcattggattcccattaggcaaatttccccagatggggcactnttaaaaactaattccccaaatggggtagttttgaaagaaattacccaaggggactgtttttcacgtaccatgcatgcagta

SEQ ID NO: 4461 - DNA, 392 bp, Glycine max
  unsure (1)..(392): unsure at all n locations
agcttcaaacataaagttagctntaaaaagatttaaaatctagttatttaatattgatcacctttcttttgtgaaagaatgatgacatgattatggaatgaaggaaatgaaaatagaataagacctaaaataaaaggcatggccttccatcctcctggcttcttattggatgatgatcttgaactattcctgcttagttcttcactggttttttccctttctgctgctgaagtagttgttgaagagataccatttctacagcatagtagggaccaagaagagtgagagaatttttttcccttatcctctgaagcagacattatctcacaacaatcaaaatttctccactgtatgtattgctatagcaacctctattctacggntctataaat

SEQ ID NO: 4462 - DNA, 330 bp, Glycine max
  unsure (1)..(330): unsure at all n locations
cttgctctatggaactggctntgtgttcatatcagcaggattgtacagagtactattcttatgaactntgattcttctttctggtcgaatgaaatgatatctaacatttatatgcttagttctatcatgatgaacctgagccttggccaagcatatagcactaatgttgtcacagtagatgttagcatattcttgattaattgcgagatcatatattaaacctttcagccggattccttcctttgcatgttcaataagagccatgtattcagccttagtangcaagagggcaacagaacgttgaagtgttgccttccgaatcaccaagct

SEQ ID NO: 4463 - DNA, 508 bp, Glycine max
  unsure (1)..(508): unsure at all n locations
ggattgaaaccatcgtagacccgngattctatagcgttgacctgcacgcatgcaagctntgagataaaccataggccaacctatgtctactctgatgaaagaatgatatccaagtccaaccaatctactagccattttccatatacatggttcatgttactttgtttcaattttgtttttcttaaggatttccatgatcaaaaccttgaggacaaggttgttgtggaggttggagtaatgttatagcccgattctaattgataagcctaaaagaattgttgttagtctctattattatatataggaaataataataggaaaaatgtctagaatgagtttgttcggattgttaggaatttgtttaaacttattattagtgtgcataacagctaggtgtgtgcagngcttctatatatatatatatatatatatatatatatatatatatatatatatatatatatatatatatatatatatatatacatacacacacacacactttttn

SEQ ID NO: 4464 - DNA, 429 bp, Glycine max
  unsure (1)..(429): unsure at all n locations
gagaaagatgtccanaanatggaaaaatatattataaaaaatcaactccctcttgttgtgtgtaacccttggccacaagcctagctttgtaactntggatggcgccattaacacaatgtttgatgtgataaacccacctataaccaattgaaacttatcttgnggaaaatcagttagatacgaagtatgatttgcttcaagagtatgtaattcatccttcatagctnttcttaatacagtttcatacttaacagcttatgcatatgttttgggttcagaaatntttgaaatggctaaggtatatanttgagatgactaggagacaaatgatgataggacagaacagtggataaggaatataaagcagtacctgaagtagaagaaaggaacctgctgagttgagaaattgcatgtagtgaaaaatgaaaa

SEQ ID NO: 4465 - DNA, 432 bp, Glycine max
  unsure (1)..(432): unsure at all n locations
agattctggtttaagagtaattaaagccattgtgattcttagatataaatatgtacgtaggcattatatttatagaacaagtcatcttcatgattttcctctgatctctcgcggtgtttatttgacattatctacaactattcgtttgaattgcttgaaaatgacataatattaaattaccaaatgaaacaccaaggttacacactgtcataagaatttaatgccattaggaatttaagagtctgttgattggaatgaatntaagaaaagtaaaggaagaggaaataaaaagaaaaatatgcagaatgtcctgaagcgcacacacacccatntttctttaatagtaaactcactaaaaatttaagagatagataaaaaggggaaaacagataacgcaatatgttagaatngaagtatgaagatgaagtttta

SEQ ID NO: 4466 - DNA, 408 bp, Glycine max
  unsure (1)..(408): unsure at all n locations
ctatcggaacttactaatgacactattgttgtggtgcctttntggtttatcctanaactgcccctagatcgaaatacaaaaaaatcatgtctccgtttcatatatgggagctgaaaaaacaatcaaaaatgaaatgtaatttcattgtagatttattcaatgaaattgtattttcgttgtacacccgtaaaaaaataaaaataatgaaaatatgattttattatttaaaatagaaataatgaaaataaaattttgttgtatacttttcaacaatccttcctcccccctccctccacgccttgtgtacctcatctctggctctgccgctgcccttgtccgcaactcctcccnctcccttgtatgcaccctctatgtgggtgggatgtgcatgacaaatttggaaatggg

SEQ ID NO: 4467 - DNA, 415 bp, Glycine max
  unsure (1)..(415): unsure at all n locations
aggtacttacccgttgacgactgacgagaacgatgaacgaacgatgaatcttgaagaacggtcgagaatcttcgcgtaattactcacggaaacgttacggaagcgtctcggctaggatttttctcacggaactaattttcctcaactatttcgaaagagagagaagtgcctaaggggctgaaccctgttcttcttcacttgatccgctatttatagcaaaataggggagaagcttgccgcccagctcgcccaggcgagcaaggttgcttcctccagaagcaacagccttctggaggaatctattggatggcccaagtgggcctagttgctttttgcacccccnctttntactaaatgcaccccttctattattntggtaattctttttccgtaacgttacgaaactttatgaatt

SEQ ID NO: 4468 - DNA, 415 bp, Glycine max
  unsure (1)..(415): unsure at all n locations
tagtcgaattcaatcgaattgtatttagcttagcgcatgaacagagatgcgcttggcgcgatgcttgcgcttancgaaaggactatntttcataaaaaagttntctaagttatatttcagtcctctttccaaaaaatagaaacccttatgttaaacattcaaagataggctgatatactcctatgtacggattatatagcaagttccaaatgattaaatgcatganaaacaaagataacggaaattaaaactgggttgcctcccaagaagcgcttctttaacgtcattagctggacgcatagcttaatacctttaaagtggcgtgaaagtcacaaagaacacatcttccttgaagtttcgccttttagcgagaaatccatgaacttatatagtctggaggacattcacatcattt

SEQ ID NO: 4469 - DNA, 493 bp, Glycine max
  unsure (1)..(493): unsure at all n locations
atgacaccatcgagacccgngatttgaaacttacatgaccgcnacactcanagcaatctgcggccagccatcatgtttgtttcatcaacggatcattttacggctacctacagaatacgactcatacgtatgtaactcactggaaaaggagtgggtgagctaattgtcttaatcatcctggttggtttaagctacatagtgctcaatcactgatcctgagctctgtcatacattgctgatgcaataactgtattcaccattttctaattgaaagttggtagtaatatctacaacatttacctataaactattccttattctttcaacaactttacttgattttgacacgcaaagatggtattttgatgcacatgattcatgatactcctttgtctcataaagaacaaccaattcatgcaagtattccccaaccctctgaactacccgacctcatacttttattgacgctatcattagaagacaatccacctcg

SEQ ID NO: 4470 - DNA, 384 bp, Glycine max
tagctacattaattgtcctacatatcatgagttctgataggttgacagtataatttgttttaacagtgcatagaaattaaactctttcatcatactatgataaaacaaactttgaagttaaatttttctttcttattttgggtgatatctcacgtaggaaaattcatacaatatgtggcatgtatttttggaggtacagtcatagcattcatcaagggttggcttctaagccttgctcttatatcttctcttccacttcttggcctctctggtaccgaatgagctttgcttttgccaagatggcatcccgaggacaaacagcttattctgaagcaactactgtagtggagcggacaattggttcaattcgaactgtatgccaac

SEQ ID NO: 4471 - DNA, 327 bp, Glycine max
ctattagaaaatgacaatgtcaaaaacgaaattacacgtgacttcatgtgagagaagaacagtgtggtagatgggctttggtcttcccttgttccccagatttcaccgtcctcaaattgagcaaaagggggtgcatgagttcacaattggttatttctaccattcacaagtcacaacgaatttgggggttgcaaaattaccacatgggtaccgacggtagagcagatcatagagaaaacgaaagctacgaatatgacagaaatggaagacgtgaccttgataacgaatacttatctctcatgaaagggagacattatgacgcgagag

SEQ ID NO: 4472 - DNA, 430 bp, Glycine max
  unsure (1)..(430): unsure at all n locations
agcttaatctcccagctcgcctaagcgagtttggcggcaagctcctcctccattttccctataaaatggcattggaggctgaggggaaagggtttagcccctttggcaatcagatttcacttaaaattagtgaggagaagaagaaagaaggagaaaatccaagtcgaggtgcttccgtaatgcttctatgatgttttcgtgatcaattctgctaacgttcttcgccattcttcgccattcttcgtttgttattcatcgttcatcgatcttcgaccaattagttttcaatttcgaagctttgaattcattctacgcacccttaggggtccattcttgctttgtatgttttcatcttcaccttgtctactttcggtattctntttctttattntaaacgagttccgaatgatcgttcaagccgtaacctcac

SEQ ID NO: 4473 - DNA, 348 bp, Glycine max
  unsure (1)..(348): unsure at all n locations
tgggcaaatcanatcactcctacatttcatttctagcatgcattttctttctttacccactcctcacgnttggttttttagggaaaaacaccataactaaacgcgccgcaagggatccctatcgcaccagatccaaatctagaacgatgggtgatcaagaggagacgcaggaatagatgaaagccgacatgtcggctctgaaggaacaaatggcctccatgatggaggccatgttaagtatgaagcagctcatagagaagaacgcggccaccgccgccgctgtcagttcggctgccgaagcaaacccgactctcttggaactacgcaccatcctccctcaaacatagt

SEQ ID NO: 4474 - DNA, 436 bp, Glycine max
  unsure (1)..(436): unsure at all n locations
agcttatgttgcanacatttataatagactttctcagcagcaaaaccaacaaccgcataataattatgacctttcaagcaacagatacaatctaggttggaggaatcacccaaatcttagatggacaagtcctccacaacaacatcagcctgtccctcatttccagaatgttgttggtccaagcaagccatatgttcctcctccaatgcaacagcaacaacagcagtcacaacaaagacaacaagcaaccgaggctcctcctcaaccttccttataagagttagtgaggcaaatgaccatctagaatatgcaatttcaacanaagacaagagcctccattcagagtttgacaaatcagatggngcagatggctactcagttgaaccaagctcanacccaaaattctgacaaattgccttcacaaactatgcagaat

SEQ ID NO: 4475 - DNA, 411 bp, Glycine max
  unsure (1)..(411): unsure at all n locations
tgatgatatggtctnttccagtttaaggatcgatgcgggtatgaacaaaggtttatntagtcatccttcttggacgaatgaganaactggggcaaatgaagaggaggaggatgaatgagaagccggtgctgtgactgccattccaatacagccaagtttcccaccaacccaacaatgtcattactcagccaataacaaaccttctccttacccaccgcccagttatccacaaaggccatccctaaaatcaaccacaaagcctacctaccgcacttncaatgacaaacaccacctttagcgtaaaccaaaacaccaaccaagaaatgtaatttgcagcgagaaagccttagaattcaccccaattccagtgtcctatgctgacttgctcccatatctacttgataattcaat

SEQ ID NO: 4476 - DNA, 266 bp, Glycine max
aaagctcgaaattgaatgttgaagctctgagcaaattcaaacgacaataactttttactcggatgtctgattgagtcccgtaatatatcgaaaagcttgaaattgaatgttgaagctctgatcaaattcaaacgacaataacattttactcaaatgtctgattgagtcctgtaatatatcgaaaagctccaaatggaatgtggatgttctgagcaaattcaacgacaataaccttctacttcgatgtctgattgagtcccgtaatg

SEQ ID NO: 4477 - DNA, 365 bp, Glycine max
  unsure (1)..(365): unsure at all n locations
agctttgtncncctttgtttattaattagtgatgatttgtgaactacagggactgcaagacaagatcgaattggttcctattgatcttaaaaacaggcctgcttggtataaggaaaaagtttatcccacgaataatgtaaagataccgtacgtggtcatatattaagtggtgaaagctatttgatttgcttgattgatcatatcacgttcttcttcttatgctataggtaccttcgttggagcacaatagcaatggtttaggagaaagtcttgatttgataagatatatagatgccaactttgaaggggcacctctattccccactgtaagaactatatattaatattaattattccatacatta

SEQ ID NO: 4478 - DNA, 413 bp, Glycine max
  unsure (1)..(413): unsure at all n locations
tacaaatctttatcttcttgagtggagcaatcaagaactctatcaaaatcattggaagaacttgtgagtgaacttcacgctgatttgcttagcaatgctaacaaaagtatgttacgtccaactccaaccaatgaaaatgaaccttctcagganaatgaggaaataaaccagctcaaagccgagcttatctctgcaaaagctgaagtggggcagttgaagtccgtattggatatttcggaggtaagataccaggaagagtatatccagagcacattacagattagatgtgcttttgaacaactggaacgcgcatagtcagaatctagtcagagagaggttgagttatatgaggaattgaggagagctaaagctgatactgacgagctaanggcaaacctgatggacaatgaatc

SEQ ID NO: 4479 - DNA, 434 bp, Glycine max
  unsure (1)..(434): unsure at all n locations
acctgcacgcatgcaagctntactatgcaaggaatatccaaggaaatattcttcatctgacttagcatcaaattttcctaagttttctttaccattgtttaatacaaagcatttgcaaccaaaaacatgaagatgtgaaatgttgggttttctaccattaaacagttcatatggagttttctttaaaataggtcttattaaagccctattcatgatataacatgcagtattaacggcttcagcccaaaaatatcttggaagaggagtatcattcaataaggttctagcaatctcttccattttgttgaggggttctaggtgcagaaaaattatgttcaatgtcatgcttttcacaaaataaatcanattctttattttcaaactcacccccatgatcactcctaatagatataaattcccaaaggaaactcaat

SEQ ID NO: 4480 - DNA, 304 bp, Glycine max
  unsure (1)..(304): unsure at all n locations
ttcttggattgcaacacataacataacttgcacagtgcgattctgattatgcaaagtgagtactaggtgacaagcatcaagtttccatcaagctttntattttcagtagatgaagatgaatctgtggccacctcatggactcctctaaggacaatagcatcatttctagcactgaatngttgggagttggaagccatcttctcaatcaaattcctagcctcaacaggagtcatatcaccaagagctccaccactggcagcatcaatcatactcctctccattgtgctaagtccctaatagaaat

SEQ ID NO: 4481 - DNA, 427 bp, Glycine max
acctatttattagagttagttttcgatatatcttcattctatgtttgtataatattcattaattcgacaatactttaagtattattcaaaatatttattataaaaattaataattattaataatatgtcaatttaagattaattattaatatgacttttttacattatcaatatatttagctgaactttatatattaattattcaaaaaattaagagactaatataaaaagtacacaactttaacaagccaaggctaagaaagaccatacttgaggagtcaggatttcaatagtatttaaggaatatgcataggaaatgtaatatatatatatatactatcgttcaattaaaaatttctatcgatatatctcttatgataatttttataaacctcattttatccataacaacgcaaagatacattac

SEQ ID NO: 4482 - DNA, 311 bp, Glycine max
ctacccaacagggttttatcctttagtttgctagggactttttcaattgtattcctcgtggctttgagttgttcaatcctgctaaaaaaagtttacttttgttagaatattttataaaaactgtgcagtatgcctcctctttcttttttagtagtaggcataatttgtctatttgatataagatttggttgaataaatactgcaatgactttactgtcagcttgacaaaaagtctttaaatgtcctatatgtaatacgacagctttgtatctattcttaactaacttaacaatgacatatctattatgatc

SEQ ID NO: 4483 - DNA, 260 bp, Glycine max
tctattatctgaccgacagtgattctgctaaatgcttgactgacttgaagaacaccctgcctgtatcaaatgacgctaacaaccttagtgtgttgccctcgctggaaagagtgcttatatcctctctatcatctacacacttgctctttcaggccacacatccagagaatccacctctgtccaaaacctattgtgaccatgtctgccatgaacacactcaaattcagtgattcttgagcctaaattcaatttcacaacta

SEQ ID NO: 4484 - DNA, 379 bp, Glycine max
  unsure (1)..(379): unsure at all n locations
attgatggngacccggtgttgagagtgacgacgttatgggccacgtgggaatacgtgagctcatatggaggtgggcaacacgggatggtgggtttatgcgcactttgcggatgtggaaaacttgttgtgcaccatcgctcgaccggcacctagtaccacatgtgatgggtaccccataatcctacaagcttgagatgaggaagtgttgaagggtgaaactctctgcttctattgctgaccacagagtggcacctggagatatgtcgcggggtcaggacaccttgaggacgtcaggtggtgtgctattgcccagaaccaagcttgaccaatcccgaccctacccgggcatagtcggncagtgagaacctgtgatgtacct

SEQ ID NO: 4485 - DNA, 410 bp, Glycine max
cccatcacatgtgtgactaggtggcggacgggtgatggtgcacaacaagatctccacatccacaatgcgcgcataaacccaccatcccctgttgcctacctccaactgagctcacgtactcccgacgagcccatatccttgtttctctcaacaccgggtccccatcaatcctcccaagctggcccaacatcaaagtaatacaacattcacacagcacacactgtcacagccaagaaaacagagcaaaggcagaaaactctgccaaaacaccaaccaaaatcacagcttttgtcacttagagaccccagcaacaattccttcgttgcaatacgataaccgtgggatcgactccaaatatttactggaagtgtctagtacataatcctacatttcgaccgttgcgatctact

SEQ ID NO: 4486 - DNA, 422 bp, Glycine max
  unsure (1)..(422): unsure at all n locations
cactaagcaatcactacgcatagctctaaactcgaaggtggttgacacatgaacganaacacaattcatggngctccgaaaaaggggttgagaatggagaattacactaagcaatcactacgcatagctccaaactcgaaggtggaggacacatgaacgataacgcaattcatggggctccgaanagattgagaatggagaattgcactaagaaatcactacgcgtagctccaaactcaaaggtggaggacacatgaacgataacgcaattcatggggctacgaaaagattgagaatggagaattgcactaagcaatcactacgcatagctccaaactcgatggtggaggacacatgaacgataacgcaattcatggtgctccgaanagatagagaatggagaattgcactagcaatcacta

SEQ ID NO: 4487 - DNA, 431 bp, Glycine max
  unsure (1)..(431): unsure at all n locations
gatgattttttggtacaatgcatttctatttgttctctgagtgcatacttgattgttgaggagttaatctcactgctttcatgtcgngtacttggagatcaatgcaaaatgctaccgaaatttcttgaaatttaacaaaagagacttaaccttgacgtatgaatctaccataaaaatatgtcttcttgaatgggatagggccacacctttaataagaaaagtgagattttcatgcatcgaataactttgtgagtatcacggagttattatttagatggatcaacattggatgaacaaaagtcacatgagccctgtatacgagtgattgaggccgtacccgaatcanataaacattagaattcaataactaggaagtgatcctaggtcattttccaacaagcaatgactaaccaaatgttcataatatgctt

SEQ ID NO: 4488 - DNA, 394 bp, Glycine max
attcagagtaattagtacagttgataaactgaacagaatttaacagtaataatagaacctcacagagaattgtgcttgatcctcaagagaaaacaacgctgcggacttagcctttcattaatcaaatagagaatgaaattttattgataaactaaaagtctaaactggaattgtaaaaaatgaaaaatagaagagagagagagagagagctaaactagaaccttggtgctgttatatagtttttcagccccaaagcttacaaatctattttaaatccaagcccataagtaaagtcaaatcaaatctagataagataagatctagatgaaataatatcaagatgagatcaaatctcaataatatctagataagacaagataagaaaagatctaat

SEQ ID NO: 4489 - DNA, 377 bp, Glycine max
  unsure (1)..(377): unsure at all n locations
agctntatctctagatttagtaatgacccactaacctagaattanataacttaatgccattaacctacggaattaatacaaacttaatggctgaatgtaactgatattgtggcaaccaaaagtcacccccaacagccaacaagtcagccaccatttggtctcccaaaaggctgatgcctangttgccaattgggcccttattacaacttgaactaaagcccttttagttgattaacccacaacatatttttggtcagccaactttacaaggattgggccattatttagacaaactatacactctaaaattgatataaagtggtgtcatttagtcctcctccatttgggccatgatacaactcacaaccttggacttt

SEQ ID NO: 4490 - DNA, 298 bp, Glycine max
  unsure (1)..(298): unsure at all n locations
atttttttttttctgagaatactctcttgaggtcatcccagctcgtgatggaccttaaagcaaggtaatatagccagtcctttgccactccctctaaagaatgaagaaaggccttcagaaatatgtgatcctcctggacatctggtggcttcatggtggagtagacaatatgaaattctttcagatgcttgtgtgggtcttcacctgcaaggcccatgaaacttgaaacaaatggatcagtccagttttagaacatatgggacatcctcatcanggtattggatgcacaagctttcat

SEQ ID NO: 4491 - DNA, 424 bp, Glycine max
  unsure (1)..(424): unsure at all n locations
agcttgcactnnattgaatttagttatagtcattggtgtttgttgttatgtcttagtagtttcctcatgacatcttgaatntttcataggatgttttttgaagactgttctccaagaagccttctagtgatgattatgataattgcatttcttttgcatcaattntcttatcttttggttgctttgattgaatgaggacttgattcttccataagtttgtggttttgaactcttgcaagtattatctagagctagttgtttttggtccaatgcttttgaacactggagcatgactttctgacattgatcttcttgtgtgtgcttctaaatagtggagacttcattgtcttaattcttctattatgcaatgcatctatngatgatctctagtcatactcaatttttgatacctacactttgatct

SEQ ID NO: 4492 - DNA, 373 bp, Glycine max
  unsure (1)..(373): unsure at all n locations
gagaagaaagaagaggaagaaggtgagaagaaagctcaattttattnttggttttatagctctcttgcgatgctagtgttttgtcttgaacattgattcagtagtgttttattatttgtaatcttatccaggagatgagtcctgatactcccaattttttctcctgtcaccttacacctgactaaactattacacccataatggagagtttcgtattcatgataaattactctcattttttccctaggctaacaaacacaagtcaattagtaaagcatttctcccttanagactaacccctaattcgtctntaatcatgcttatccttagagtaaattactctcaccttgcctatattttacccttcttacat

SEQ ID NO: 4493 - DNA, 433 bp, Glycine max
  unsure (1)..(433): unsure at all n locations
agcttcaataaaaagatggcctcagcaaattttttatttccagaagggaattctatcaatagacctccaatctttaatggagaaggttaccactactggaaaacccgaatgcaaatttttattgaggcaatagatctaaatgtctgggaagccatagaaatagggccttatatacccaccacagtagaaagaattacaatagatggtagttcatcaagtgaaagcataactatagaaaaacctagagatagatggtctgaagaggatagaaaacgagtacaatacaacttanaagccaaaaacataataacatctgccctgngaatggatgaatatttcagggtttcaaattgtaagagtgctaaggaaatgtgggacactcttcgattaacacatgaaggaactacagatgttaaaagatctaggataaatg

SEQ ID NO: 4494 - DNA, 427 bp, Glycine max
  unsure (1)..(427): unsure at all n locations
catattttcaagcattggacaattctcatgaagaattatacatgaaagacaataaagtgttttaggactaacaatggcttggaattatgttctaccgaattcaatcaattctattgagatgaagacacaacaaggcagcgtattgtacgctatactctacaataaggtaggtccatatttctcgatcatctcacatatctttaaaaatgcaggatttttaatagcattgaatggaatgacacttttgtaaaaaaattcagcaacttgagcatcaactaaaggtttatcatttttcatcaactgattcaaagttacttgaacaacgacactcccactacttgcactaccttcttttccttttgaaccanaacccttttgtccctacaagttagttgcctccaccccatcaacactttcttcatcttca

SEQ ID NO: 4495 - DNA, 434 bp, Glycine max
  unsure (1)..(434): unsure at all n locations
agctntcataagtgtgcataatcatcatcattatcttcgttatcctccctccacaagttctgaaatggagaccatgttggccaagccgatttcttcaaacaattctgagcctttgcaagtgaaggaagaagcagtggcctctgtttcacagccaccacaacagcacaatggttactcctatgggtcttcacctcagatgatgtaccaaactcagcaaattcaaggcttgcctatgccaaatggttctttagggaatgcttttgatggctcattcagtgcagtgaattcccttgcttcacagaattccacacaacctagactgggtgcttccaccaattgcaacaatctcattaggcaaaagagttcccctgctgggtttttctccaattactcagttgataatggtatgcccctttgtctaagtaactggcatg

SEQ ID NO: 4496 - DNA, 423 bp, Glycine max
  unsure (1)..(423): unsure at all n locations
tattgttcccactaagtctatgcctcacgctgagagcctgtatgagctaagcatgcctcttcagatntctaantttgctcttttggactttattttactcattaagcatcataaattcatcaactnttaatgttttctacgcaaaaacttaaatgatattaaaataacaattatttgcacaaaanagaagaaataggagagaaaaattacaaatataatttaaccccaaaatacactcataatttaaccccaaaatacactcataattagcagttatcaacttctttcaggcaagagagtcatagggtgcaaatgagtgtacaagaggaaacttcctttattaaaaaataagcgagaaaatcaaggatcgcctagtagcgaaggggtagtcacaacataatgaatagaatttcttttcaatca

SEQ ID NO: 4497 - DNA, 406 bp, Glycine max
  unsure (1)..(406): unsure at all n locations
agcnttgtgcaaattcaaacgacaataactttttactcggatgtctgattgagtcccgtaatatatcgacacgctcgaaattgaatgtcgaagctctgaggaaattcaaacgacaataaatatttactcggatgtctgatatagtcccgtaacatatcgaggcgctcgaaattgaatgttgaagctctcacccaattcaaacgacaataactttttacacggatgcctgattgagtcccgtcatatatcgagacgctcgaaattgaatgttgaagctctgagacaattcaaacgacagtaacattttactcggatgtctgattgagtcccgtaatatatcgacacgctcgaaattgaatgttgaagctctgagctaattcaaacgacaataactttttactcggat

SEQ ID NO: 4498 - DNA, 436 bp, Glycine max
  unsure (1)..(436): unsure at all n locations
tcaacattcaacttcgagcatctttttatattatacgactcaattagacatccgagtaaaaagttattgttgtttgaatttgctcagagcttcaacattcaatttcgagcgtctcgatatatgacgggactcaatcagacatctgagtaaaaagatattgtcgtcttaattggctgagagcttctacattcaatttcgagcgtctcgatatatgacgggactcaatcaggcatccgagtaaaaagttattgtcgtttgaattggctgagagcttcaacattcaatttcgagcgtctcgatatgttacgggactcaattagacatccgagtaaaaagttattgtcgtttgagttggctcagagcttcaacattcaatntcaagcgtctcgatatatgacgagactcaatcagacatccgagtaaaaagttattgtcg

SEQ ID NO: 4499 - DNA, 271 bp, Glycine max
tccacataatccttcttgcacatttacacttagttgaaaaacctttgattctatgcaagcttttgttgtaaattacacccatctgttggcattgattctatgaattgaaggattaactcttggatgtacctaataagcacgggttatgttaatctaaatagaatggacacaaaagtttactcctggtgcaaacagcatacctattcctataagaaaatcttctgttacaccttcatgagcttgctgactaattgctgactcatcattcata

SEQ ID NO: 4500 - DNA, 287 bp, Glycine max
  unsure (1)..(287): unsure at all n locations
ggaactctcatctctaccatgcacaccaatagttgccatatgcttctgtttgccttcttgaaaaagtgcaacttctgaaaattataataattcgtatacaatcaatanatgtaaataatagaaaaatctttactttcaacagattagcacaatagaataaaaaataatattgatttctcaccctcaactatatttctcaataaaccgccagcagttgatgccgaactaattagaaattgatcagaatcatccgagacatcacttcctgatataacctttgcaccact

SEQ ID NO: 4501 - DNA, 370 bp, Glycine max
agcttcattctgatcgctaagcgacagcttattcgtggctaagcatgacctattgtcgccaagcgcaattccttacagccataatagaggtccatgatgctaagcgccagtcatggcagctaagcgagattcattgcagcaatatgagcactaagcgagtccctctcagctaagcgcatgctcctctgtacttaagatgcatccttttagctaagctggccagagccaggcttagtgagagttgcagcttttctaatctgtagacctcgctaagcggacccaccctcgcgctaagccaaatctttgtaaagaaaagaactgattttgatttgaaatgtcggctaagcgcatgggttcgctaagtgagcct

SEQ ID NO: 4502 - DNA, 379 bp, Glycine max
  unsure (1)..(379): unsure at all n locations
ttctcggagtcatttcctgcggggactttcatttggaaagttatgttacaagaaaacgcttattttaaagcaaaaatggcatgctaatcttttcgatttagaacaaacttatgcacacatttccttaatgtaaaacatttatgaacgcgcatatgcgtaaaatatcctactatttatatcaacatacaaggatattcaaaacattctagttaccacacatatatattgtttttgaaaagaatacgtatacgcatgctcaaggtattgtgccacaattacacatgttcatatcctaagtatttagctaccacaaactacctacgcacacttgggagtatttataacatatacannttttgtgtttcatatnttatatatg

SEQ ID NO: 4503 - DNA, 448 bp, Glycine max
  unsure (1)..(448): unsure at all n locations
agcttgtctgtccaatgcagccgtaatgatggctcgagttatgttggggaacggttacgaacccggaatgggtttaggcaaagatagcggcgacataactagcctgataaatgccaaaggaaatcgtgggaagtatgggttaggctataagcccactcaggcagatataaagagaagcatcgcgggaaggaagaacggtagtcaaagctcgcggttgagacaagaaggtgaaggaagcccaccctgccacataagtagaagctntataaacgcgggtctgggggacgaaggtcaagtggtcgcgatatacgaagatgatgttccaagtacattggaattggtacgaccatgcnctcctganttccagctgggaaattggcgagtggaggaatgccccgacatttacgcaacgagcataatgtaaacctttactgttttaaaagctcta

SEQ ID NO: 4504 - DNA, 389 bp, Glycine max
  unsure (1)..(389): unsure at all n locations
ttaacttaatacccatttttctctacttttaaacgtaacaagatgctggccacaaatctttttttatgagagatgctngccacattctaaaacacagaaagccaagaaaagatgtataaaagaaaataaatgtaattagggtatctcatttcaaagtagagtttgtcggtgtaaagaaactaaactactttattacaaggcccacatatcttaattattagtatgaatatgaaaactctgggaagacaattgcagtctatggagaggcaaggtaattgaaaaaacaaatcttcttacatttaanacaaggaaactggattgatattatcatatattcccacacataagcatgagtcagtcactaattagcagacataagcatcatgtga

SEQ ID NO: 4505 - DNA, 418 bp, Glycine max
  unsure (1)..(418): unsure at all n locations
tctcgaatattgtgtaataatatacgaagcttttcactcccacgcccttaagtgctctgtccatatgagctacatcctctctcttcctgcagaaataatagttgaagtgtatgccaaaaagatgcaggcaacaaaataaattatcactaacctgcagagctctgctaatagctcaaaaagcctatgaggcctgcgcagatcaaatgcgatttggattgctttactatagtcagcatgtgagacagcattctctagctctggacctttcacaactgcctcttcctgtatcaacattagacattacaacattnttaacacacagggcacttgtgatttggaagataagagtctataagaaaatcctaanattacacatatggaacaggtcatggctttgcttgaaatactccatgtcact

SEQ ID NO: 4506 - DNA, 430 bp, Glycine max
  unsure (1)..(430): unsure at all n locations
gctggcttcagagcagcaaacacctccctctccatctttggaggataacatgctactgcaatcactgacctcaatggcctgatgagcctagttgtttggatcagcacttcttttgttcaactnttagattatttttttttatcattcagaaagagaaatcatttaaatttgtttctaataggttttgctatgtgattgaaaattttaattataaactctcgttgagatttgaataaatatgtctccagcagcaatccacttatacaactaaagggttatggatttggtgaaattgcttacgttgatttccttaatgcctcttaagtcttatcacatcagatttgaagtttttggattngcaacatccattagtaaaaaacgggtgcacgttctagttaagcatatatttccctttcattcactcaatatc

SEQ ID NO: 4507 - DNA, 346 bp, Glycine max
taagctttatgaggtccttcaatggtgattttccaccatggagatgcagcgtatgataaacgagaagacgtgagaagaggcgtcatccactatggaataagccatggaaggagaagcttcaccaccaagatagtgtcttggataagaagcttatagaggaagcttcaatggaggaacagactgagagatagagagagggagagagagattgatagagagagagagagagaaagagaatgtggcatggaaaattgaaggaagaaagggagagaagttgaactttgaagcgtgtctcacaagactctcatttatcacacgtgtgactagcgctacacatgtctctatt

SEQ ID NO: 4508 - DNA, 359 bp, Glycine max
gccctatgtgcgtgcttggcttattactcccatggggttcaatcaccctcatttgacaaaagacgatcttttccttatctatcttatgtaagggaagctaaagattaattaggtctgaattattgttgataacatgttgacgaccaagtggattgtgtcttttaagtgtccctatgcaatatttatctctaggataattgaatacttcatagttgatacccaagaagtctttcgttttgttgaagttgaatttgaagtgaagaccaaagtcttgaagcaaatggcgtacatcaaatctgaagaaattggagttggatggattgagaaaagcaaagaggatcaaacaaaacaacaagatg

SEQ ID NO: 4509 - DNA, 449 bp, Glycine max
  unsure (1)..(449): unsure at all n locations
agcttctagcaccctccagacatcttctcatagatcccaacggtcagatcatgtaacagtgtcttgtgaagttgcagacaaattttcgagaagatccaacggttaacgaaggctgggcagcatttttaccgaggcagctacatgtagctttctctagaagcttcattaagaggcttcctcgtggcttctttgaaaagctttctcaagaggcttctttgataagatagatccttatctatccacacccctctattaactaaattaacctccttaaaaataattacagataaaaataacacaacaaataatcaaacatcaaacataattactaataatatatagatatatatatcagggtggtacacttggcgaattctttttgganagggagaagagaatgaaaagatgaatagcacaagttntcaagggttagaaaaccagaaaacttc

SEQ ID NO: 4510 - DNA, 449 bp, Glycine max
  unsure (1)..(449): unsure at all n locations
ctaagctttaatccaggctcatcttggtggtgaagctccttcttccatggcttattccttaatggatggngcctcctctcacctcttctcctttgtcttccgctgcatctccatggtgaaaaatcaccattaaaggaccccattgaagctcaaagatccagcctccatagaagccccataagcaagcttctatcaggggtgacgggaactctgtagaactgacaaaggcccgtaatcagagctggaaaccccagggccctgttggacttctccgggtccactgagtgtcttgtgggcacgatcgctgcaaacagtagatggcattagaaataagttgagccacgtgcatacttacatatgtcctgatggcataaaccagcagacacttcaacagggggggagatcggagttgtggtcactgggcagaatgctactaagtagcaacatca

SEQ ID NO: 4511 - DNA, 389 bp, Glycine max
actagtgctatgcatcttttcttctcttttccctttgccaaaaagaattcaccaaggaataaccgcctgaattctttttgtgtctgtcttctcccttttccaaaagaataaaggactaactgcctgaattcttctgtgtctcccttctcccttgtcaaagaattcaaaatgacacactctgagaatacttttgattcttccctttcccttatacaaaagagttcaaaggactaactgcctgagaattcttttgtatccccattcacatagtatcaaaggttgaacagcctgagatctttgtcccaaaccattggagggtacttccttgctggtacaagtagaggggacatctttatgtgtttgactgaaaacaatagacggtacatctc

SEQ ID NO: 4512 - DNA, 357 bp, Glycine max
  unsure (1)..(357): unsure at all n locations
ttacgaacattcacttgcacaagactttctatctactaagatttatgcacccatatacaatcaaggtagcttcattacctagattatttacatgtacttccaaggtgtatttgttatttacatcacacacgcctccttggctgaatttacatacatgcatactcatagcattttggggtaccaaaaactgcacatgcgctcatcttggtatttctaatacccatacatatacaaacttcacgatgaatcttgactacctacacaataaggtgctacatttcatgctttnttttcaagtttttgctacctaaaaccacatgcaaattcaacatattttccttttgtgactaaattgga

SEQ ID NO: 4513 - DNA, 393 bp, Glycine max
agctagtttagctgcattgaggcttaccatgtacagaccttgtgtttgacgagcctttggagaatcaactagagacgtatccgtcctggattttggtgagactcactaagggtggaccatgggtttgatgagcctggtgtgtgtagtgcatgtgtcgtgctcttgcatacttgtcactcacatagtgacacatactggagacgtggtgtcatgctctcgcatatgtgtcactcgtggagtggcacgtactacaaacatggtggcgtgctattgcatacgtgtcactcatggagtggtggcatgctcttccatatgtgtaactcatggagtggcatgtagtggagacatggtagcgtgctcttgcatacatgccactcacgaagtggcacatac

SEQ ID NO: 4514 - DNA, 420 bp, Glycine max
  unsure (1)..(420): unsure at all n locations
ggcatnntggaatgcgaaagccctactccatcgataggattattacctgacatctcaaacaaacagatcaaacgtaacaagacaattataagtgctgttngaatacctcacccactcaagtgtatcacacaattatggcttttctctaatgaaacactcttgcctttacactctatttcccttgagttttaggcaattcaagagaatatggccacaacaaagaacaattcaccaatatgtgttaggtaaggctagagagacaaggaanaggttaaccaagaaaaaggctaacaatgtttttaggcacanatgaaggaaataaaattcagaatntaggaaatcaagtaacaatccttcatgccaaccaatatataccttaaagagatnntntntaaaaaaaaatcttaagcatgaaccatc

SEQ ID NO: 4515 - DNA, 340 bp, Glycine max
  unsure (1)..(340): unsure at all n locations
agcttctcaaggaagttttcttaagaaagcttctcatggaagctacctagtctataaatataagcatgtgtaacactcgttgtaactctgatgaatgagagtcttgtgagacacaactcanagttcaacttctctccctttttcttccttcaatttcatgctcccctctctctttctctccctctttcttttcctccattgaagcatcatctccaagcttcttatccaaggctcatcttggtggtgaagctccttcttccatggcttattcccttgtggatggcgcctcttctcacctcttcttctttgtcttcccgtgcatctccatggtggaaaatca

SEQ ID NO: 4516 - DNA, 59 bp, Glycine max
tgagacgattctactctttgctatcacaagatatgcatgtgcatgtatgaatgtttctg

SEQ ID NO: 4517 - DNA, 430 bp, Glycine max
  unsure (1)..(430): unsure at all n locations
agcttcatgataagttgggaatttggctcatggcttgtagaacgattggtcacgatatatgtcagggtttggccagcggttcggggataaaggggatgtcccacattatttccatgatatacatgcaacaatgatgataaggaaattttatgcaaaactggtcatgctggcatctacgtggacgctcaagtgtcaaatttttatggtcatgtgatgctagggctcaggattcatttcctctatttttagtcaacccagcgtttccaaaaatatgttcttttatcaatttgtgcattcatccgagtccattttgggcgtccgggaaaattntcacagcattcacccttaaggtgtatacacattttttcaaaaactagtcatgatcagtgaattttttcanagaaaagttggaagtcatctctttttaaaa

SEQ ID NO: 4518 - DNA, 380 bp, Glycine max
  unsure (1)..(380): unsure at all n locations
nntgatgcaacattggagaggttatcgatacaacgagatgatgcgcctcatgagagggtggatcanatggagaatagagatcataatgaagaagaaagaggagaagagggatgatgatgttcctagacaaaaccgaatngatggtattaaactcaacattctccatttaaggaaagaatgatccggaggcctacttggagtgggcgatgaaaatagagcatgtnttctcatgcaacaactatgaggaggaccagaaggtgaagcttgccgccacggangtttccgactatgctcttgtgtggtggaacaagctacaaaaggggagagcaagatatgaagagccaatggttgatacatggacggagatgaaaaagatcatg

SEQ ID NO: 4519 - DNA, 415 bp, Glycine max
  unsure (1)..(415): unsure at all n locations
gcaagctntactatacttagttcggcttgagttttatacccaagacttgagtntggcttattacctatatgttatttgtaaagtctcgactagtcttacatganagcctaacttagcctacaagcctatttagaagcttgcttaaaggtctttgatcaattaattattttaaaacctaatgaaatactaattaaaaaaaaaagaaacttataaaatttcatataagtaatgtacaaattgaaaaataattgataaacaaaatcatattgaattcaagtcgttaaaacacacagtatatataaaaatgaaaaaaaaacataatattaaaaaatacacggacatgcttaggggtgaaatgcgtataggttacaatataactttaaaagtacttgtattttctatttattattctata

SEQ ID NO: 4520 - DNA, 212 bp, Glycine max
aaaaattttggggctggaaagatgtaccatggaacagtgacttcacggtgaaattcccactgaagaggcatgaactataacctctttctttaaccccatagtcgtcattgattatgggggaagggatttctgtgatatggccaaaaaagcgttacaaaattcagtaccaaaagattgatgactttatagagtaactacatggtggatcacat

SEQ ID NO: 4521 - DNA, 413 bp, Glycine max
  unsure (1)..(413): unsure at all n locations
agcttccatcacaaacactntatggttagattgttggtagaaataatatcccattgtttcttcaggataaccaatgaatctacacttatcagaccttgcctcaagtttatctgtttgcaatcttttaacataatcagggcaaccccataccttgatgtgtttaagacttggtttctttcctttccatatctcatatggagttgtagagactgcctttgtaggaactttatttagcaagttggttgttgcttctaaagcatatccccataagtttaatggaagatcggtgaaccccatcatggatcttaccatatctagtaaggttcgatttcttctttcagatacaccattgtgttgtggtgttcccgaatgtgtccactgagagagaatctcattctcctttagataatcaa

SEQ ID NO: 4522 - DNA, 424 bp, Glycine max
tctcgtgatcttgtgtcatggtcatattgagacatgtgtgtggtccaccccattgtgtgactttccatgaataagtttttttagataaaattgcccttatatagaacgagcaaggacactctgcgcttttattcaagcaacaaacaatatacttgttcgatttgctttcaacaactttgaaagtttgatgcaccttcataacatattgtttcagtgcattttttaccgcatctttactatcgaaatccatgccaacatataattcttgtccaacattaaaactcgatggcatctccaaaccacaaatgtcttcctcatcaggatgactccagttgatattgttataatgcaaagcatcattccaaaatggattttcaattccttgtacacctaatagttaaaaataaattcaaatcatagttat

SEQ ID NO: 4523 - DNA, 132 bp, Glycine max
  unsure (1)..(132): unsure at all n locations
tctagnttgcaccctgcaaaatcaaaatctgaaaagccggtttgggataccacaaaccaacattggttgtgcccttaaagtacttaatgattcttttaacagatgtcaagtgagattgatgcaatcctaccc

SEQ ID NO: 4524 - DNA, 309 bp, Glycine max
  unsure (1)..(309): unsure at all n locations
caaacagtctcaagctctaaaacataaataggtagtggatntcaaatgtcttaagtatagactccaacatcttatttatagactcctaaagatagttaatttaataggcacactacanaatatatatattatgattagatccctaaagataattactttaattaggcacaatatagataaatattatgattagatctctaaagataattactttaattaggcacacacaaatacatatccaccatgactgttgttggaatcttggcactgaagcttgagatgtcctaactatgccatggtccatatgag

SEQ ID NO: 4525 - DNA, 326 bp, Glycine max
agcttgtgcccttaccactatgtagtaattcattaccctgaccaagagctcctgtggatgtgggaatggaaacaaccatgggagaagcagaacgaaatcattaatttgcaaaattaattatgaagaacttgaggtacttactcttttaaccctggggagaaggggaaagaaatccccacatatgtgcatttattgacagatgcctctttatgccctttaaatacaactactgatactcgatttagaagtctccaaacacaagttgtacaatcattatgggatacaagtaacacaataataatgataagtatagtgaaaacactaat

SEQ ID NO: 4526 - DNA, 244 bp, Glycine max
  unsure (1)..(244): unsure at all n locations
gcgagattcattgcgacaatgtaagcactaagtgagtccttatcagctaagcgcacactcctctgtacttaagatgcatcattttagctaagccagccagagcctgacttagtgagaagttgaagctttcggatctgcaaacctcactaagcggtctgatcctcgtgctaagccaagcctgtgttaaanaaaaaactgattttgaatttgaaacgtcggctaagcgcgcgtatccgttaagtga

SEQ ID NO: 4527 - DNA, 335 bp, Glycine max
gatttttctaccttctactccaagatcagtttcaattctagtagagaaaggagaaaacaataactcttgttttttattgggaaataccgattgattctcttcctgcccgtgatatagttcagagtttttattttcttagctcattttgtttagttaacaattcgatgtgatgctttgatcgtgggtggtgcttgtattgctcccaaactatgctgaactggccgtagttttaaatgcgagctttagttaattttaagtaaaaaggtgtgagagaagaggtactgcatatgtttctcgtggacatatagcttacaagagttaacatcttgaagcat

SEQ ID NO: 4528 - DNA, 403 bp, Glycine max
  unsure (1)..(403): unsure at all n locations
gccctatcatccttgtctccgtcgccttgaatgtcctcgccagattccttatcgtctntatgcacggaatcaaaagctccgaatccgctttctctattatcttcaccacttgatcaacaacggctttgcaagcaggagagttgggcttaaacgcggatttccttaattcagcatctttctctgccactgctgtaatctccatcaccgccatagccgaattgtactgcacagcctccgttcctttttcaagaagaacagcgaaacagagcagtgctcttgattcagtaatgctacgacaaattggcgagtttcctttcgctaattgccagagagccctcgctgccatttccttcatgttagccttagtcctaggatcctcatgatcccttcctttcatgttatc

SEQ ID NO: 4529 - DNA, 328 bp, Glycine max
gattggttagaattgatcactcgtatgaattgagtgaattgaaatgcatagatcatatgccttgaatgagcatgcagtcattaaaagagaaagaacatggaattagaatcatgattgaaaatgtttgttggtttgttaggttgattgtgaaggaacacattatccgctacccggtgagagtgtgatctttaattgtgagagaacgactaacattgagtaatgatttttgcatgaatgtctgagtattgaatgaatgcgtgaaattgaagatgatgaatgccatgttttgattgaagataagcacttagccaaaaagcttaccttgtgc

SEQ ID NO: 4530 - DNA, 383 bp, Glycine max
tgctctattcaaccggagtgacaagaatatcttcttactgatcaacacttgctcatggccaaagatgcgtgggagatcctgaaaaccactcatgaaagaacctccaaggtaaagatgtccagactgcaactattggctacaaaattcgaaaatctgaagatgaaggaggaagagtgtattcatgacttccacatgaacattcttgaaattgccaatgcttgcactgccttgggagagaagatgacagatggaaagctggtgagaaagatcctcagatccttgcctaagagatttgacatgaaagtcactgcaatagaggaggcccaagacatttgcaacatgagagtggatgaactcattggttcccttcaaacctttgagct

SEQ ID NO: 4531 - DNA, 388 bp, Glycine max
  unsure (1)..(388): unsure at all n locations
cctgcacgcgtgctagcttgcctcaaggaggtccaggaaggacattgcggccgaaggaactagttcctctcctgagtatgacagtcaccgctttaagagcgctgtacaccagcagcgcttcgaggccatcatgggatggtcatttctccgggagcgacgcgtccagctcagggatgacgagtatactgatttccaggaggagataggtcgccggcggtaggcatcactggttacccccatggccaagttcgatccaaaagtagtccttgagttatatgccaatgcttggccaacagaggagggcgtgcgtgacatgacgtcctgggtgaggggtcagtggatcccgtntgatgcagatgctatcggccagctcctgtgatatccattg

SEQ ID NO: 4532 - DNA, 436 bp, Glycine max
  unsure (1)..(436): unsure at all n locations
tatccttatggcctgcctccggacttcaccccccgtgccactccggaagaattaagcctagcccctacttttgaagggcaactcccaccttatgaagagtatcccgggcaagacgatggggaaggagatacccaccttggccccctgctccacctcaaagatcgatccccgcatgaactaccccacctgaacatagtccgtcatatcccggcctcacccacacccgtaaaagaatctgttccctttgcggaagataagggaaagattgaggcgcttgaagagaggttaagagcagtcgagggcctcggtaattaccctttctcggatttggcagatttatgtcttgtgcccaacatcgtcatccctcccaaattcaaagtaccagactttgataagtacaaagggacgacatgtcaanagggcatctccggatgta

SEQ ID NO: 4533 - DNA, 447 bp, Glycine max
  unsure (1)..(447): unsure at all n locations
agtttatctatacgcattgctagggaaagaatataagatgaaaaaaatgaaatgagtttctccatatactcaaattaatttatagtagctctcttctttgatagaagctatatgagagaacttctacaaaataacttaatttatgcataagctaattttagcttatggagaagtttatttcattttttcttcatattttcttttcgtagaagtacttttggataaacttacccaaacagaccctttgagacttctcagacaatgcaaatactctgaactgtatattatattttttttttaacttttatttttaaaactttaatatcaacacaaatgggaatatcacaattcataatatntaaaataattagataaattatagtattntattatgttactcactctcacttttaaaacaatgattttcatgttgtattatgattctat

SEQ ID NO: 4534 - DNA, 441 bp, Glycine max
  unsure (1)..(441): unsure at all n locations
aatgatcaacgctcggactggagacccttcgttcacactcatgacttatgtaccaccactcattgtgaggtgaggccttgcaggctccctggtgggaggataaagtgccacttttaagcttttagcataacactatcgtgcctgcttttggtcttccttgacaatcatgatatctttcgtctaggtggggaacttcatcttaagatgcgatgtggagacaatagctctgagctcgttcaacgttttcctaccaatgaaagcaaagtaaaaggtatatacatcaacgattaagtacctggttgtaaagatccaagagagctagccttgaccaaaagcggtcattatgtcgacatagcctctggtcgctactctntctcctgcanagcaaggagtggacatgagtgagtctgaatagtatcaggcgaaacttcaagcctctgg

SEQ ID NO: 4535 - DNA, 356 bp, Glycine max
  unsure (1)..(356): unsure at all n locations
agcttttacttgagtcatcaaaagattattaatatgtgaccatggcatgaatattaaaagaagagatcaatcatctatctttcaatcttctctcaacatcattcaatatctttcaactgtttctatagaattttctgattctttntctcttcatctttctaaaagattatgttcaaaactttctcttccaagaaaagttctttgttaaaaaacttgngttattcatttgnttcattctcttctccccttgccaaaagaacgaangactaaccgcctgaattcntttgtctctctcttctcccttacaaaagattcaaaggactaaccgcctgagaattcttttnggtcttcccttt

SEQ ID NO: 4536 - DNA, 344 bp, Glycine max
  unsure (1)..(344): unsure at all n locations
tcttcacacagcgaaatctctcanaactctctggaacttggacttttctctntctagaatcactagacatgcaaagcttcagctctcagcccaaactcccttcacaaaatctgatttcaggcttaaataggtggccttgttcgtgcttgtgcgcttagcgaagttctgaaccgcttagcgcacattagtgaatttcagcttagcgcgtgcttttctcggtcagcggatggactgaagcggtgcgcttagtgagatgaagcggtgctctcagcaaacctatacaactcatcttcttccaaattcttcctcgagcttagccaatgagtgttgcgcttagcggacac

SEQ ID NO: 4537 - DNA, 401 bp, Glycine max
  unsure (1)..(401): unsure at all n locations
agcttcatatataagaagaatctataaaaatcatcttgaacaccttcttttatagacggttcttcaacataaaaaatattagtcaattattggttcataaaataaaatagtaaacaaaatgaaaaattatttaaaatgaatttttgtaaccatttttctggcaatttaattttttttaaccgacttgacttgttcatcatcaatttcttttttttagttttttcttcttgggttttcttgacctatgacatggacaattcatgtgttttccaaaaaataaaattatgggtttcatcagttttcaattgaattgactanttatttttaatttttcctatatattaatcagaatatgctagactcattagaaaatcatnatttataagaaagggtacttttaa

SEQ ID NO: 4538 - DNA, 289 bp, Glycine max
  unsure (1)..(289): unsure at all n locations
atacaaataagaagatatgttgnttgatttgctaactgattaaatcttaatcatcttacaaacaaatgtgaaatctaagcatttagttttttgtcttagagtattcaagatgttttgagagcttttcaaactttataagaatatacaaagagttttctacataaagaatttgaatgatagcgtgtaggttcgttactcatttcttcaaagcatctagtatttataggttttcattttcaagtgtttggtgtttctaaacgattataattttcctttgagctngcatctg

SEQ ID NO: 4539 - DNA, 429 bp, Glycine max
  unsure (1)..(429): unsure at all n locations
agctnacttttntggtcctgctcatagttgttgcatgagagaacatgctctattttcatctcccactccaagtaggcctgcggatcattctttcctttaaatggaggaatgttgagtataataccatcaattcggttttgtctaggaacaccatcattccctcttctcctcctttcttcttcattatgatctctattctccatttgatccaacctctcatggagcgcatcatctcgttgtttcattaacctctccatatgttgcatcaaagcttgcatttggaattgcgaaagtccccatccatcattaggaattgttcctgccatctcaaacaaacaaatcaaacgtaacaagacaattatagttgttgtntgaatacctcacccactcaagtgtatcacacaattatggcttttctctaatgaaaca

SEQ ID NO: 4540 - DNA, 341 bp, Glycine max
  unsure (1)..(341): unsure at all n locations
tatacaatgagtatntatgaactcgcttagcgcaacattctcgcttagcgatttcatcgcgttttccagaaaacgtagaaaacacagctcgttttctcgcactttccaagcctccaaaaggcatattggacatgcaatgtgtgtgccatactcaattcagtatacaagcttacatagccctcatcttaaactaattataacaaaacataaaaaccctaaaaatctaaagctacagttatagtcttctaccctaaagttaagacaagaaaaagagaanaggaccaaggaacttacttggacagtgtatgattgatgcttcaaaagtcgaaatgcacaaagag

SEQ ID NO: 4541 - DNA, 434 bp, Glycine max
  unsure (1)..(434): unsure at all n locations
agcttcataacagctntaatactctctcgtgagatngcaccctctggccagtccaacctaccccttcgaacatacttctctgcatgtcggctacatgggcagagtaaaagatacactcggttatgttcaagttcaatcatttgataaatttgataataatagaaaattcacaaggtaaatcacttactcaactctctttaacatctgctgtggtataggaccaagcaccctctccatcatagccagatgctctaaattttcatgagtctgaaacaaagcttcaccctgcaatagaagcccataagctgatttaaacaaacaaaactggataaaattggcctaaaagtatccagagagccaaacttacagtgcataattcaaccaatatacagcccacactccatatatcacatggatagctccacccaagtcct

SEQ ID NO: 4542 - DNA, 317 bp, Glycine max
  unsure (1)..(317): unsure at all n locations
tttttgtgcgtagaaactatatgtttggctgctatgtatctttattttttgggatcaaaaccctaatatataacatatgaacactgtctgaacacgtnttaatgaaattgaacagtgagaccatatcaattgagctcaagaatggcactattgttcatgacaccattacaaagttcttttctttctcaatattatattttttggtggcataaaagtgttgaaccatttataaataacatatattaaagttggattggaatagtgagggcgttaatatttgcaaggtactctactccttctgaaaatttcatttttgg

SEQ ID NO: 4543 - DNA, 370 bp, Glycine max
  unsure (1)..(370): unsure at all n locations
atcatgcagtcatactnttggccttgaatagctagtctccttagtcctgtattatgatgtagtcatacttttgtacccgttntctaattataatgaaactctcgatgtttttcagtcacttaaatattttcttgctctttaatgttaatttggaattgatcactctgaatcttgatctattgcattacagtgaccatctggatgtaactgattgacttaggaagagactacttctacgtaacttgcatgatcaaaatggttatgagaaattctggtaaaataataaatcgatcaccctcgctttgatcgtaatccttcgacctagcacgatgtntccataatcaattgagtattgatgagggcaaagagt

SEQ ID NO: 4544 - DNA, 426 bp, Glycine max
  unsure (1)..(426): unsure at all n locations
cgtagcccaccatcttttatagtagagtatctataatgtgtctaccttcacgatcatcgtctccctttccatcattgggggtaccacctangccgccagatccctccaccttttgggcgtgttctttgaaagatccgtccccctttttgcaaatgttctgtagttgtatcctatctggaaccatatcanaattgtactgatactgcctaacaaaggcaaccattaggtccttccaagaatggactcgggaagattccaagttagtgtaccaggtaacagctaccccagtaagactttcttggaaggaatgtatcaacaatttctcatcttttgcgtattcccccatcttctgataatacatctttagatggttcttgggacaagtagtccccttgtacttgtcanagtccagcaccttgaacttgg

SEQ ID NO: 4545 - DNA, 289 bp, Glycine max
  unsure (1)..(289): unsure at all n locations
agcttattatggtgatgaagcacatcccacataagctntccaagaaattccacattctggaaatgagcccttcttactcccagacaaccatctttcttcttcctggngataatatgccagattacaagatgaactcttcgctcttgattatcactccaaataaattgcatgcttaatcaagggtattgcagatccgttgaggcacccattgaatgtgcatggtgtaagtggggaatgatgcaaccactaaattcacatgggttactctccctacccgattcaataatct

SEQ ID NO: 4546 - DNA, 399 bp, Glycine max
  unsure (1)..(399): unsure at all n locations
tcttatccttagctcatcttnggggngaagctccttcttccatggcttattccctagtggatggcgcctcctctcacctcttctcctttgtcttccgctgcatttccatggtggaaaatcaccattaaaggacttcattgaagctcaaagatccaacctccatagaagccccacaagcaagcttccatcaaccactgttcaaggcttgtcagaaccatttgcattgtgagaaattgcttagttaatgaaattcgtgtgatgatgttaagttagacagttcatataatttctttgatttaacttgaacttagagatgaattaaaggaatttataccacagtaattgattgtaataacaatgtataaaggaaagaanaataaagcttctggttaataagta

SEQ ID NO: 4547 - DNA, 386 bp, Glycine max
  unsure (1)..(386): unsure at all n locations
tggtttgtctcgcatcatcaaaggcttacaaaacccaagatccgcctttggtgagtctcgatntccaaaggctcgcaaaacccaaggtccacccttaatgagtcttgcatcgccaaaggcttgcaaaacccaaggcctgcccttggtgagtctcgcattgacaaaggctctcaaaacccatggttcacccttggtgagtctcgcttctctaaaggctcataatacctaatgtccgcccttgctgagtctcgcttctccaaatgctcgcaaaacctataggttcgcctttgtgagtctcgcatcacaaaaggctcacaaaacccaaggtcatccttggtgagtctcgcattgcttaaggctcacaaaaccccagcccccattttgtg

SEQ ID NO: 4548 - DNA, 290 bp, Glycine max
  unsure (1)..(290): unsure at all n locations
ntgagttcactcatggatgatagagctgagtatgtgtatgtttgtcaagccgaggacatcgtcgtggtgtctatgcaagtgtggtggactcgatgtcatacgtcagggtggtgtataagcataccgattatatgacaaccttgggaagtattcaaatgtttaaacaattggatgacacgattcttgatcaatgtaatggcacgtgtcttgatcactgtggttgatcataatgacccttgagtgtcttgtcgcttcgagaatcacaatggagcacatgtaacgacgcgatg

SEQ ID NO: 4549 - DNA, 382 bp, Glycine max
agctttcctcgaagagatctaggaaggaagtcgcggccgcagggactagtgccgctcccgagttcgatagccatcgtttgaggagcgctgagcaccagcagcgtttcgaagccatcaagggatggtccttccatcgagagagacgcgtccagttcagggacgacgagtacacggatttccaggaggagatagctcgccagtgttagacgtcgctggtcactcccatggccaagtttgatccggatatagttatcgagttttatgccaatgcttggcctacagaggagggcgtatgagacctgcggtcatgggtgaggggccagtggattcctttcgatgcagatgccctcagtaagttcctgggatatccgctagtattgga

SEQ ID NO: 4550 - DNA, 185 bp, Glycine max
  unsure (1)..(185): unsure at all n locations
atctttcaatcttttttcatcatctctcaacatcttagaactctttctacagaagtttctgattcatttctcttcatctttcttaaaggttttgttcaatactttttctatgaagaacagttctttgatcaaaaacttgcgttattcatctttttcattctcttctcccnttgccaaaagaacag

SEQ ID NO: 4551 - DNA, 224 bp, Glycine max
atccttatagctacctgcggcctgcagcttgaccttaccttattcgggagatgctctatctatatataggagtgtgcgccggcattgatgctgctcagcaacctacatccttcatgctgaatcctattgtgtggggtgaatctaagcttctgcatacaacattgtctgctgagaatgtatatgacatcatgcctacatccagcgtctctgcttgaccctctata

SEQ ID NO: 4552 - DNA, 357 bp, Glycine max
gagcaacacacacactcatctaataagtttcagtatataaacaaaactataagtataacaggaaagtgtgtgtgctgctatttaagaaaaagaaaagctaagtgcggaaaggcaagtaatagagatggaatacaaagaaaaaggttgatctatggatgaatgctctcttacaacctacgcttttgcatcctagaaacatcatgaattgattgcagcccagcctcgttacaagcctagtaaagtcctttggtttcagtttgcgtgttcttaactgtatggcatgagatgaattgcaaagattgagacttatgttacttgttggttgttgaataaccctaaacacttgtatttgagtga

SEQ ID NO: 4553 - DNA, 471 bp, Glycine max
  unsure (1)..(471): unsure at all n locations
gcttcctaggcacaataacatcagtatatgtttcccaatctctctcgtgaagcgaatctggatctgtcaaatctggcttgggtaggtgtatagggtgtcattcttttcctagaagccatctgcaaaatatgagacaaaacacaagagactagtacaagtttatcctcaagaaagcagaaaaataaaactgaaatcagagttgggcgcttagcgcagcatgctgaggttagcacgccttatgaaattaacacaagcgctaagcaccaggggcgcttagcctaagtctacaattntataaatagtagacgattggggcttagcgccgcatgctggcgcttagctcagcctcaacaaacagacactgaggattagcacacaggagcgcttagccttattacanaggttaaagaaacagaacctaagtggcgcttagctcaacaagctgggcttagagcctgaactactttgagt

SEQ ID NO: 4554 - DNA, 412 bp, Glycine max
  unsure (1)..(412): unsure at all n locations
ctgtaggattatggggtacccatcacatgtggtactaggtggcggtcgggcgatggtgcacaacaagttttccacatccacaatgcgcgcataaacccaccatcccctgttgcccacctccaactgagctcacgtactcccacatagcccatatcctcgtttctctcaacaccgggtccccatcaatcctcccaagcttccacaacatccaagcaaaacaacattcaaacagcacagctatcacagtcaagcaaaacagagcaaaggcagaaaactctgccaaaacaccaaccaaatcacagtttttctcacttaaagaccccagtaacaattcattcgatccaattcgttaaccgttggatcaactcccacaatttactggaagnctatagtacataagcctacactttga

SEQ ID NO: 4555 - DNA, 453 bp, Glycine max
agcttcataggccttgtatggtctgaaacatgctcccagagcttggaacaagagaatagacacctttctcttgcaaattggattcatgagatgcactattgaatatggtgtgtatgttaaaggagaaagtctttcatatatcctcatagtgtgtttatatgtggatgatttactaataacatgaaaggattgcagtgttatctcgacattcacgcaagagatgaagtctgagttcgaaatgtcagatcttggagaattatcatattttctgggcatagagttcaagatgacaaaggctggaatttctatgcaccaaagcaaatacacaattgatgtcctaaagaggtttcagatgcttgactgccactcagtttcaacttctgttgaaactagtgctgtgctggatcaatctgggcttgaacaattggtagataagactgtgttcacaccaat

SEQ ID NO: 4556 - DNA, 459 bp, Glycine max
  unsure (1)..(459): unsure at all n locations
tttacccatntatgtgagtgaganattatataaatgtaaaatttactcacactattgttatgattacttttagaaccattattatgattatatgctataaaactatactcatatttcttatgatttcaaagttaagttaattattttatattctactctttttacttatttaaatattaataaatatgaaatatacagattataagaaaatatatgataagctactataataaatcataatatgtgatatattctattttatgaggataaccgcatgaaaactcaatatgtttaatcttaaaagatattcataatacttactaattgtattgataatgaattatggataataaattatcaaataataacaaatntatttcataatgcacaagttgaatgaatttcaatttaaataattataaatttatatttactatactctttctaatctatacacat

SEQ ID NO: 4557 - DNA, 434 bp, Glycine max
agcttgactagttggtgacttgcgtgtgtgagccatgttaaattaactaaggagttcaaaatagtagggtcgatatatcggattcacagctaatattgtgttaactcgatagtgtaaaaaggtgggggattgagctagatttttttagtttctttcctcaccaaccacaagggatatataattaattctatgtcaaaaagctctaaagaagcaacaaacttttctaacttctctcatgttttcaaatagatcatcatggttctgaaatgaaccatccttttttcttgcacaaatcaaaaccaaaattactaattcaagcatacaatataagagaaaggtataaccgaaagcatatccaacctcgcaagaaaatctcaaatattcatattctcccttaacttcccttgcggaaaccaactccacctgtttccaac

SEQ ID NO: 4558 - DNA, 478 bp, Glycine max
  unsure (1)..(478): unsure at all n locations
gcttacacatatgtngttttacttcttttttaagaaacacaacaattgaattaagatattgttgtaaatatttttttatttcaacggaatcatgattctatacgttgttgtatttgggacaaaaaaaatatatcagaatcttgatttcatggaatcgtgattctgcgacgaagatgtttttgtaataaaaaaagtcccaatctcttcataggggtcaaaaacaattatcatgagagtaatagtaactctcaaaataaaaaggaatgaaaaaaaaaaagcaacaaacaaaaggaaaacatgggcagtgatcccaaacacccacttggcctgngaatcctcactaagatctcagcagggtggtgaaaggttgtcaagaattaatactacttggagaatgtgtctttcttcccatgtgtacaagactgactttcttaacaattattattggaacatgctcttgtctcactttaactttatt

SEQ ID NO: 4559 - DNA, 468 bp, Glycine max
  unsure (1)..(468): unsure at all n locations
agcttgtagaatggctagacatgatacatgtcatggcttggtttggttcaagggtaaaagggatgccccacattatttccatgacacaaatgcaaaaatgatgatttggaaattttatgcaaaactggtcatgcatgcacctatgcggacactcaagtgtcaaatttttatggtcatgtgatgctagggcttangatttatttcctctattttaaatcaacccaatgtttccaaaatatgttcttttatcaatttgtgcattcattcgagtccatttcgggcgtccggggaaatttcacagcattcacccttcaggtgtagacacgttttttttctcttcaaaaatcggtcatgatcnaatgaattttttttcgaaaagagttggaaatcatctcttttcaaaagcatgctcggttttagctagacaacttattttctcttttccacctttttccttacttgccttct

SEQ ID NO: 4560 - DNA, 450 bp, Glycine max
  unsure (1)..(450): unsure at all n locations
cgagatgaggaagtgttgaagggtgaaacttcctgctnttattgttgaccacagagtggtacctggagatatgtcgcggnggtcaggagaccttggggacgtcaggtggggtgctattgcccaaaaccaagcttgaccaatcccgacccaacccgggcatagtcggtcagtgagaacatgtgacgtacctaagcaggcgagctcctggcagtcaacagataaaaggaaaacaagaccacagagcaaggaggcttgtggtggctggccagctgtgaattttgtgtaatatgtggattgtggcctctggtaatcgattaccaagggtgggtaatcgattacaaggcttaaaattgaagacagggggctaagatggtctctggtaatcgattaccaaggggtgtaatcgattaccaggcttgaaaacgaggtcaggaagctagggaagcctct

SEQ ID NO: 4561 - DNA, 323 bp, Glycine max
agcgttgatattccttgttccggatacctctctcttctcatgtgcacccaaacccaatctccgggttcgaagacaaccttctttctcccttcgatggcgttggtagcatagcttttactgtttctctcaatgtgagctttgactctataatgaagcttgttcacatagtccgcctctgcttgaccttctttatgcttaaaaacagacacattaggcataggcaaaagatcaagaggagttagtggattaaaaccatcaacaacttcaaggtttaagacagaagactcatacgatgacgccgatcgaacattacctaatagaca

SEQ ID NO: 4562 - DNA, 476 bp, Glycine max
  unsure (1)..(476): unsure at all n locations
ntgagcanattcaaacgacaataactntttactcggatgtgtgattgagtcccgtaataaatcgagacgctcaaaattgaatgttgaagctctgagccaattcaaacgacaataacgttttactcggatgattgattgagtcccgtaatataacgagacgctcgaaattgaatgttgaagctctgagccaattcaaacgacaataactttttactcggatgtctgattgagttccgtcatatatcgagacgctcgaaattgaatgttgaacctctgagccaattcaaacgacaataactttttactcggatgtctgagtgagtcccataatatatcgagacgctcgaaattgaatgttgaacctttgagccaattcaaacgacaataactntntactcggatgtcctattcagtgacgtaatatatcgggacgctgganattgaatgttgcacctctgagcaaattaaacgacaat

SEQ ID NO: 4563 - DNA, 189 bp, Glycine max
ttgagctcctctgctgaccaccatacacaccttttgccttccatgccgcgaccctgagcaattaagcagcttgaaacttatgctgcaaacatttacaatagaccttctgcagctcagcagcgaaatcgaccacagcacaataattatgacctctccaaccacagatacaaccctgcatggaggaatcac

SEQ ID NO: 4564 - DNA, 468 bp, Glycine max
  unsure (1)..(468): unsure at all n locations
cttgtaatcatccatattaagagaagtagaagcacaaacacaactggtggctntatagctcgaaacaagttnttcattttcttgtctcaatttatccagctcactttgtgttgaagccaatttagtgatatgaaattttagatcgcttcttggcttgttgttcgaagcaacaagccttagcgcttcttcatgcatttcattaaatgcttccaaaaattcttcaaattcaaaatttacctcagtttattcaatggttgaggagtcattattgaatttgtcatcaagcacacatttgcaacttcttcttcactagaagagtcgaaggatgtggatgcattgtcttcctaacctatgtaggcctttttctgttttctatccttctttcctttcttttcagcaagttggtttctaaggtagatgggacattcaagtttgatgtgaccttgcttcccacattcgaagcatgtg

SEQ ID NO: 4565 - DNA, 410 bp, Glycine max
agcttgccgcccagctcgcccaggcgagcaaggttgcttcctccagaagcaacaaccttctggaggaatctgctggggcccaagtgggcctggttgctatttacacccccctttttactaaatgcacccccttttctattttttttttgtaattctttttccgtaacgtttcgaaactttacgaatttcgtaacgatacttattttccttctgctaggttacgaatccttacggattatgtatttactcttttttggctttcaaagaagttacggaaactcacggattgcgcaaaaacacctcttttcgatttccaccacattacggaatttcaaggattacgcaagcctgcttccttttggatttctgagacgtctcgggacttcatttattgcatgtcatcaagtaat

SEQ ID NO: 4566 - DNA, 467 bp, Glycine max
  unsure (1)..(467): unsure at all n locations
tgacaagccagctggtttaactaacaataataataataataattataataataataataataataataataataataataataataattttattttatcaaatcttatcttatccagattttattctatgtagattttattttatccagattttattccatctaaattttatttcgtccaaattttatttcatccaatcttattttatcttgttcagattttattttatttcggacttggacttaaaatagatttgtgagctttgaggctgaggacctatataatagcaccaatattttagtttagggatttttttttcggagaggagaataattctaggattttagaattccagtttttattattgttcatgcacacttttcacgtagaataaaatntattttctgcaattntgtttcggcttcaatctacagtttcgtttctactgattaatggaaggctaagtc

SEQ ID NO: 4567 - DNA, 436 bp, Glycine max
  unsure (1)..(436): unsure at all n locations
agctntaagagtttcaatctgcactattaagtgtattctatcctttatatgatttcttttcttcaaggttaatcttggttgggttaccaagcatagagttgatagtgtttcaactgttagggtttccacttgtagggttcaagttggaagggagtttttgaatttctttgtgtgtgcatagcctttgtaatacattgaaattcataattgaaacatccaactagggttgacgggtataactggatataggtccataatgactgaaccactataaatcttgttgtgattctctctttctcttatccttagtttgcaatcaatgatgttaattggaatcgtaataagtttttattctcaatgctgctttttaaaggttntgtgttaactggttttctcggtcataaactattttgagagaacattgattcacacaaag

SEQ ID NO: 4568 - DNA, 419 bp, Glycine max
cgagcatgaccacacttaagtgtaggtcgaggcaagtttaagcgtgaccaagcttaagggtaggttgagccaggctagcttaagtgtgaatccttgcaaaatatgtatgaatgacttctaaatggatttctattggaactttcttagtttataagaattatgaaatgcataaataggtttttaaggttatgttaagagaatatacttttactaagtatctatgagttgagagttgaatggatttaagtatgaattccttgcactttaattaatattattgaattgttattgactaaattagagattgggaagacttgcgatcctcgaacaaatgttgtgctgaaaacattgaatgacatgtgcttgtatgatgactttgaaaattattggtgtgataactaaggattataaaatccctg

SEQ ID NO: 4569 - DNA, 326 bp, Glycine max
  unsure (1)..(326): unsure at all n locations
agcttggcgtacgattcgttnctccggcaacaacgttttcaacgcgctctctgatttgtacatcttcatgttaccgatcccattcatcaacgctcccccctctctatagaagctttttttctttttacaacaaaagcgtaaccaaattgtgtcgacaaattgatttaacctctcaagaaaaattaagaacgctgctctcttgctaaataaatattgccgagtgatggatttatatatacacgatacaagaatatataacttttttttatttaattccggtctgggattctattcggaaagcgactcttcgatgaaaaccaggattc

SEQ ID NO: 4570 - DNA, 418 bp, Glycine max
actctgctctctgttctttgtagcatttcccacatcacttgtacacatcgtgatatccacaagtctatgaagcttgaacagtcctgctcctgcagctaaaaaaacaggttcatgttactatgttagcgcaccttattatagaaaaacaggctcaataatgtctttgagatgcatgtatgatgtatactattataaattgaccagcacttcaatacgattttctgagaggccagatacaacttgacatgcatttcatttatatcaagtattgtcagtgaagcctatgatgttacaactagctgatattggttctgtccctagactttggctgaggatcacaagacactttgtctatggcatttcttgatgaaagatagtggtcactatacatactaataacttatttaaagtggacaat

SEQ ID NO: 4571 - DNA, 475 bp, Glycine max
  unsure (1)..(475): unsure at all n locations
ntgagtaaagaaaactaatacaagtagaagtactcttaccttgtgttccttgaggcgagtgttgataatttaactagtgatatgatgtttaagcggtcaacccgaaatgctcttagggtcaatcatggatgttgagtaaaggccatactcaaatttttgttaaatcaagcaagaatgctagattggccaaaccaaaatgccaaaaggtcaaattaagttggatgaatggtcaaatcgacaactgggtaggtctagtcaaaatgtcgagttgtatttttacttgtttgtgtgcatgctntattcagctaagtgtcatataaaatcttctaatttaattggttaggaatgattggttgagctaagcggttaacaaatcctttttggtctattgagtaattgcaattatatcaagcctaggggtccatagaccctctgtggtcatcgagtaatattagtcctcaactggtttagttgg

SEQ ID NO: 4572 - DNA, 437 bp, Glycine max
  unsure (1)..(437): unsure at all n locations
agcttaagctccttgaactacacaaggctcttaatatttgaagagtatccttgtggaaccttcacccgacaaagacacttgttagtgcttagctctacggagctttaaaagattggctaagattttgttaaaacatgagcacttagacaatgaaggaaagctggagttgctgcacatgatgtccaacgttatgtcaaggaataagatcgggctgcacattgtacaaggcaagataaaatgtcaaatgaagaattgaagttgcaggatccacgatgtcggatacaatgtcctgacatcctgcccgagaatactggagttgctgtacaatgcaagataaaagtcaagtaaagaagtgaagctgcaggattcacgatgtcngacacgatgtcctgacatcttngcccgatatactggacatataanatctgtatatcttt

SEQ ID NO: 4573 - DNA, 441 bp, Glycine max
  unsure (1)..(441): unsure at all n locations
tccatcactatatgcttccgtaaggcttccgtaatgcttccgtaaaattcccataaccctaaataagcatatttcacctagtatgggtgagaaggaagagaaaaaaataagaaagtcaagtcctatatgcttccgtaacttttccgtaaattacgaaagatggggggtgcaaatagaaattgtaaaaattttcgaatttgggccttccaaaacattttggaagcggggttgcttatggaggaagcaacccagctcgcctgggcgagctgggcggcaacctcctcccccattttcctataaataggcgaaaggaggctgatccaaatatccctacccaccttggctatgcattttagctgttttgggtgaaaaaaaatgnttcagtgaagaaactcctagccgaggtgcttccgtaacgcttctgagatgttntcgtgagca

SEQ ID NO: 4574 - DNA, 419 bp, Glycine max
  unsure (1)..(419): unsure at all n locations
agcttacttagtttgatgatgtcaaatgggatataattccatgaggaacaaacttatttatttcctcttgatgcaacctacccttttacgggcgagcgaggcggggctcacgggtgcatcttccaaagaaggaaaatgcgcggagtcgccaccaaggtttatttgtggaaaacgtcagaaaaaccaaaggaaaccggtcatgaagaatattccagattcgggagttgtatttacgtttgaggaaggtattagcacctctcacgtttttcccaaaggacaacagtcttagattagaattgtgtgaaattatgtatctaaacttttatttctttntatttttgaggtcgacaaaagcgaggctcttgctcctacgtaccctccatcgaagaggaaaccagacctacgtagttctttcaaaa

SEQ ID NO: 4575 - DNA, 486 bp, Glycine max
ctgaatgctctattcaatggagttgacaagaatatcttcagactgatcaacacatgtacagtggccaaggatgcttgggagatcctgaaaaccactcatgaaggaacctccaaactgaagatgtccagattgcaactattggccacaaaattcgaaaatctgaagatgaaggaggaagaatgtattcatgacttccacatgaacattcttgaaattgccaatgcttgcactgccttgggagagaggatgacagatgaaaagctggtgagaaagatcctcagatccttgcctaagagatttgacatgaaagtcactgcaatagaggaggcccaagacatttgcaacatgagagtagatgaactcattggttcccttcaaacctttgagctaggactctcggatagggctgaaaagaagagcaagaatctggctttcgtgtccaatgatgaaggagaagaagatgagtatgacctggatactgatgaa

SEQ ID NO: 4576 - DNA, 430 bp, Glycine max
  unsure (1)..(430): unsure at all n locations
agcttgagcanattcaaacgacaataactntttactctgatgtctgattgagtcccgtaacatatcgagacgctcgaaattgaatgctgaagctctgagcaaattcaaacgacaataacattttactcggatgtctgattgagtcccgtaatatatcgacacgctcgaaattgaatgttgaagctctgagcaaattcaaacgacaataactttttactcggatgtctgattgagtcccgtaacatatcgagacgctcgaaattgaatgctgaagctctgagcaaattcaaacgacaataactttttactcggatgtctgattgagtcccgtaatatatcgacacgcctcgaaatgaatgttgaagctctgagcanattcaaacgaacaataacttttactcgggatgtctgatgagtcccgtaacatatc

SEQ ID NO: 4577 - DNA, 442 bp, Glycine max
gtgccaattcgtcttcttctttagtccagtcttcttctggcttcaatccatcagtgggctttccttctgtgtccagcatcttgggatgttcccagcctttgatgacagctttccaggttctgctatccagtgatttgaggaaggccaccatccttgctttccagtattcatagttggttccatccagaattggtggtctgttcactggtcctccttctttctccatgttcatcagaatttatctccctaggtctcactcagtgatttcgagtgcctgctctgataccaattgaaattctgataccaatgccagatgtcgtacaggatgtcacgacatcacgcttcagaacatgcagattatctctgagtgtatgaacagattaaacaagtaaataacacaagagaattgtaacccagttcggtgcaacctcacctacatctg

SEQ ID NO: 4578 - DNA, 469 bp, Glycine max
  unsure (1)..(469): unsure at all n locations
agcttcttatccaaggctcatcttggtggcgaagctccttcttccatggcttattccgtagtggatggcgcctcctctcacctcttctcctttgtcttccgctgcatctccatggtggaaaatcaccattgaaggacctcattgaagctcaaagatccagcctccatagaagctccataagcaagcttccatcaagtggtaatcagagcataagagcttcaagtaggtgctccttaaacctccattaattttttgctttaccttctcttccattgttgtttcttcattttttctccatgtatcttctcacatgtcttgtgataaatgtatttaacatggttctttagagtttccaccgattaaacatccgagtaaaaagttattgtcgtttgaatntgctcagagcttctattntcaattttgagcttttcgatatattacgggactgaatcagacatccgtgtaaaat

SEQ ID NO: 4579 - DNA, 457 bp, Glycine max
  unsure (1)..(457): unsure at all n locations
gaggtccaggaaggacaaggcggccgaaggaagtagttccgctccggagtatgatagtcaccgctttaggagcgctgtacaccagcagcgcttcgaggccatcaagggatggtcgtttctccgggagcgacgcgtccagcttagggatgacgagtatacagatttccaggaggaaatagggcgccgacggtggacatcactggttactcccatggccaagttcgatcaagaaatagtccttgagttttatgccaatgcttggccaacagaggagggcgtgcgtgacatgagatcctgngtaaggggtcagtggatcccgtttgatgccgacgctatcggccagctcctgngatatccgttggtgttggaagagggccaggaatgtgagtatggccagaggaggaaccggtcggatgggttcgatgaggaggccatcgcccagctgctatgtataccg

SEQ ID NO: 4580 - DNA, 467 bp, Glycine max
  unsure (1)..(467): unsure at all n locations
agctngcaccaacattcattagtccaatacacactcaacaaatagtcatcatccatccacaactccaatcattcatgctcaatatgatgcatgcacctaacctcaactctcatatgcaatgtggtaccatccccaaggaaatagcctaagcgtgtccacatgacactctcacttaggaaaactaggcagtaagtgtcgaggtcaccctctcgtgcataggcaactcccccccccctcccccaccgatgtgatcagcttgagtctcaagggatttccaaaccaagtgacatgtcccctagtacaagtattcctcctcacgagaaactacaagtacttactaacaaattttatactatttcaatgtcatatgaagtatgaaacatgggcaccatcaaatggcactgaccatggataataatgantctaagtcatccccctccagagatgcttaaaactctttaaccact

SEQ ID NO: 4581 - DNA, 438 bp, Glycine max
  unsure (1)..(438): unsure at all n locations
catctacttgngttgttgtaactgagaacaagatatggtacatctcttatggatcagttcaagtggagggtacatccacttggttgttcaaagagaacaagggaaggtacatcccttgtggatctttgcttgtaaaggtttttacaaggttgaaaagaaatttcaaggaccgcatgttgcttggagactggatataggcacgggttgttgccgaaccactataaaattctagagtttctcttcttctttcctacactctttaatttccgctttgcactttaattatcacttttactttttgttaagtttctatttctgttctttactttctttacattatagtaaaagcctaattgaatctagtaacattaagaacgatagttgtttaattagtaaaggttcatttataattaattcaacccccccttcttaattatt

SEQ ID NO: 4582 - DNA, 433 bp, Glycine max
  unsure (1)..(433): unsure at all n locations
agcttgaaggtgcgtagcccaccatcttttcatagtatagtatcgataatgtgtctaccatcacgatcatcgtctccctttttgcacatgttctgtagttgcatcctatccggaaccatatcagaatagtactgatactgcctaacgaacgcaaccattaggtccttccaagtatggactcgggaaggttccaagttagtgtaccatgtaacagctaccccagtaagactttcttggaagaaatgtattagcaattcctcatctctgcgtatgcccttatcttcctacaatacatctttagatggttcttgtgacaagtagtccccttgtacttgtcaaagtccagcaccttgaacttgggaggggtgatgatattgagtactacgaacaactcttctatgttagcanaggcataatcttcacctacttcaat

SEQ ID NO: 4583 - DNA, 367 bp, Glycine max
  unsure (1)..(367): unsure at all n locations
acactgctgataataagaatgatgaggtagaagatgagaggagtcactggagagaaaaaccaatcattgtcgaaaggaaagaaatacaagacaatgaagctgaaatacagggagaaaaaatcaagatacagacaaatctgaaaaacatatggaagaggaaaaaagtaagagtgaaaaatcaagagataagagaaaagaaactgcttcagatgacggaaaggaagtgccataccttttggtaccttccaagagagataaagaacgccacctggcgagattcctacacatatttgtgaaatcggagataacaatgccctctggagaagctctacttcagatgccactgtgctccaagtnttaaaagaca

SEQ ID NO: 4584 - DNA, 379 bp, Glycine max
  unsure (1)..(379): unsure at all n locations
agctngcatatccataagcaatgatatatgtagctgtagcagtcaaattcaagagttactacatatacaaaacaattgatactttgaaacaactgacctttcaactttcttgtgagaaactggatgcaactcatatgtcgataaactagtctgaccccttttgtagaattcagaaccaagttctcttgctgcaatcacaaatgctgcttcatctggggattcagcctcatatgagacatttcctgtgccttcatccacttcgggtatggctgtatgacagactgccaatacgcgaacaaacttctggataacatctgcatgaggctcattaacccaatttccatttgttattctttcgtcagacagttaaaaccttaat

SEQ ID NO: 4585 - DNA, 493 bp, Glycine max
  unsure (1)..(493): unsure at all n locations
acactatgatactcagctgttagataattggtcgttgacatgatatcaggcttctatgatcaagtgcaagtgctagattcttgccacatccattcttctacatgaaagttgaatttcagcacaagatgggccagtgcaatgtgcattgcctatttgtctgtgctttaaaactcaaagaggacttgcataaagaggcacattagagatattagagccattcaggagtcgccataaaactctacgaaaagttggctattcagggggttcactacaaataatggtttgcttaaacataagactttcctaattatataacaatattttatatttctcaaaagaattttcgaaacaaaaagagaagaaggaaaaccatcaaagagtgagaaatgcaagcaacacccactttaacacatccttntaaacagactcttanttggttgaaattattagaaattataaaagttaatggtgtgacattatttaatgactcatg

SEQ ID NO: 4586 - DNA, 470 bp, Glycine max
  unsure (1)..(470): unsure at all n locations
agcttctgcttaagtcctttgcaactggtttaccaggtggngcttgataatttcttagttcatatcgcaagcaagcatttatccaccgcagatataccaattcttcaagatctgaacatcgatcagactgaaattgctcaatttccttcatcaagcgcacattttcttgtttaagacactcactttcttgcttcacagcacctgcctgcaccccaaaagcataagataaaaatttactgttaacaagcagtgactaaactaaaggaaaagagtacgtgactataatcttcctacctctgggtcttccagaaatgcatttgcaaggatctgggtagaatccaatcttcgagctaagtcagaattntctatctgcaatcttaaaatagatttcctcaactcttctgcttcagactcaagatactttagctnttgcatctntatttgaatatcttgatcataagcagcatctt

SEQ ID NO: 4587 - DNA, 473 bp, Glycine max
  unsure (1)..(473): unsure at all n locations
gcttgcgaatataagggtttggctctccacagaacaactccctacagaaagtctcatcgctttcatcattgcgtcaagaagaccctgaagtacaaacagaaaaaaaatcaccattactacttggattgtctatttagttgcatgtaaataataaatagtacaggattttaactatactcataaaataattaaggaatacatgtgggtcacagctatataaacctttccctcgaatggggtactcaaatccatgcaatttccagcttgactccaaatgtccacagcaaattgcatcacaaagtcctctgaacctccattttcatggatcctacacagattcaattatattggtaacaattgataagctgaaagagctattaggctgtccttcctcatttctaatacaatatatcaggtattttcatatcttaatgaagacaattcanatagtcacagcataagcaaagtgaata

SEQ ID NO: 4588 - DNA, 361 bp, Glycine max
  unsure (1)..(361): unsure at all n locations
agctntacagcaaatgccactctactctcaagttttaaaggatatgttaacaaggaagcacaagtatattcaccaggaaaacattgttgtggaaggaaattgtagtgctgtgattcaaaagatccttccacccaagcataaacaccctgngagtgtaaccattccttgttcaattggagaagtcactgtggaaaaggcacttatttatttgggagccagtattaatttaatgccactctccatgtgcagaaggttgggagagttggagaacatgcccactaagatgactttacaacttgctgaccactccatttccagaccatatagagtaattgaagatgtgctggtcagagtaaaacat

SEQ ID NO: 4589 - DNA, 477 bp, Glycine max
  unsure (1)..(477): unsure at all n locations
tcagctttccttgttcttggtaagaactcgatactgttggttctactggcaggttgcaattagagtcaagtttggtattagagtttcgactcttgaaattaggtgttatctactctttgtgttttctttcttcttgtgtgtttcctcctttgtttgctttttcctttttgtttaactctatattattattttatcttcctttgttctatttctttgagtctatctttcataattcaatgtaaaaaatagagaatcatgtacataaaccagatctagaatgatgaccaattaattacctgtaggaaaaaagtgaaaaaaggaaaccatttttataaatataaggattacagtctagtggcattaaataatgagcaacatcgaccaccataaaataaagattgcttgagtttcacatgcaagattntaaattattgtcaaaccatatacttttcaaactgaatattcatatgcttgtca

SEQ ID NO: 4590 - DNA, 450 bp, Glycine max
  unsure (1)..(450): unsure at all n locations
agctntaatattactggtccatacatgaaatggtatttcaaaatccttttccatgtttttcagccacaaccaacaaaagaaaaccacctcctccagcactttctgaccatcaaattcttcattggagaaaaccaacctgttcctataatgccatatacgccatgtcaaagctacccacagtgtttgccacctattctgaatcacaccttccatacagcagtatgagtgctgtaagaagtgttcctttggtgtttgtggcaatactgtagacactcctaccacattggtatgatcctattagagttaaagaataaatgtgaatcttcatccatcgacaaacatgacggacatctggaatcctgtagatccacatttcttcttaatagattcaccctttgtggaattctgtccctcatcaatcccatcaggccctcaaccacgatcttaaac

SEQ ID NO: 4591 - DNA, 476 bp, Glycine max
  unsure (1)..(476): unsure at all n locations
ntaggaatatacccaattgaacaaactaaanaaatagtgcatcgtattggcaaccaaagaaagccagattgaacaggatttaagaagtaacaattaaaaataaaataaaataatgaaacttctttttcaggacagatcttgctccttgtaattttagcccctttccaggaaactagttataaagggcatttacctataaggtgtaaacactattgtacaaagcataccattcagaaataatactttcagattattgatgtctgctacatctatcatacaatatgatattgtgctcttaggactggaaggattgtcatctaggcagagccacaatgcttgctagttgctatcttaccttccatgttaattgaatttgtatcaactagtgcagcatagataatgttatttaaaaaccaaacatctgaagcataataccatgatatcccaagcaaatataagttataataacctaatca

SEQ ID NO: 4592 - DNA, 440 bp, Glycine max
  unsure (1)..(440): unsure at all n locations
agcttgtgagatcaatggttattacatacctatcaaaagcaaggtcataatcaatgcatgggcaattggaagagatccaaatcattggagtgaagctgagagattttatcctgagaggttcattggaagttctgttgactaccaaggcaatagttttgagtacataccatttggtgctggaagaagaatatgccctggcctcacatttgggttgaccaatgttgagtttccacttgcattgctaatgtattattttgattggaaacttcccaatgaaatgaagaatgaagatttggacatgactgaggcttttggagtatcagctcgtagaaaagatgaattgtgcctcattcctatcactttccatctttagcctacacaagctctacaataattagtaaaagtaaaagagctgagaataaagaanactctatatctat

SEQ ID NO: 4593 - DNA, 464 bp, Glycine max
  unsure (1)..(464): unsure at all n locations
tagccatatntntaggagaacatccaacataacacagaattaaacccgaaatagaggaacctatgtcagaaacaaggtttgtaattggcaataaaacattctttccatagactacaaagtcaataacaaggcaagaacaagaaacaaatgcttagggccagcaccaaattctcaacaaacatgggaaactcgggtcctgtgcctcagagttcctagaatgtaaataagcacaaatagcaccccaaacaactgtttttagagccaaatcagaaactgtgatatgctcctgtaagccatcatgtttagacaaagtaaagtaacttagtaagcccaacacaaggtngaacacagaaataacttagctaccaaccaggctatgcttttagtacaagaaagcagaattatggaatctaattttttcactcttttatctatgggtcactcgcactttaatttcttcaata

SEQ ID NO: 4594 - DNA, 165 bp, Glycine max
  unsure (1)..(165): unsure at all n locations
agctcatgcgatcgatttctttttgggaggatgccngngaacacagggaggcatatcactcccacggatttattcggcgtatatctacaacagtcggctattaatctcgcgaatcagactcgtgacctgtcaacttgcatcgtcttcgcaccacacttttgtgta

SEQ ID NO: 4595 - DNA, 326 bp, Glycine max
gcagccaatgatgactggccggagcaataagcattaatatctatctatactatcttccttttcttcttattctttcacgccggcaaggcgttcttggctacattttgcatgcttcttctactgcgatgctaagcggactagtgtacatatagttgattatttgcaacgcctctgactacaaaagggtagggaatttatttgatactacctaccgtatgatctcgttcaaaaataaaagaactaccatatgatattaaactacatttattgagtaatcctcgcactattttgatatgaatacacattcgtgtatatgcatatgttta

SEQ ID NO: 4596 - DNA, 420 bp, Glycine max
  unsure (1)..(420): unsure at all n locations
agnccttgcggattggtcttcgccagtgaaaggatcgatgtgggtccgaaaagaggcaaatttgatcatcctactaggacgactgagaaaactggggcaaatgaagagggtgagaaagagggagaaacccatgctgtgactgccattcctatacgtccaagtttcccaccaaacccaacaatgtcattactcagtcaataacaaacctcctccttacccaccacccagttatccacaaaggccatccttaaatcaaccacaaagcctgtctaccgcacttccaatgacgaagaccacctttagcacaaaccaaaaaaacaccaacaaaaaggaattttgcagcaaanagcctgtagggttcaccccaaattccgttgtcatatgctaaacttgatcccatatccactcaataattcaatg

SEQ ID NO: 4597 - DNA, 463 bp, Glycine max
  unsure (1)..(463): unsure at all n locations
tctacttgcttcggttagcttctntntgtccgttacaggcctcagatgtgacccattcctgaactcgtgggcttgactcctggtcattacccaatggatctttgttgcgattttgcccttcagtccgtcgcacctccgtgtctcgtcttctttggtcgtcgccgtctgtgctcggaggaaaatcctcctccgacgggtctgtttctagtggactaccttcaatcgccatttgcatccttgttcactgtcactatcgtcggaacttatttccagattgtagcatgtttcttcagctatatgcacattgtattcaaccccattaatccatgcagagaccttgtgctgaattaatggctgtcatggtgtcttcactaatatccacgccctgtccagcctatggagttcatccatttcgtcatccaccttcaccacttctcctaccgctgtcataatatgtctaata

SEQ ID NO: 4598 - DNA, 459 bp, Glycine max
  unsure (1)..(459): unsure at all n locations
agctntaggaataattaattcaacccccctcttcttaattattctgaggccactcgatccaacataaagtatggcgcgcgggtgcgagtagggatatataggtatccaacgggtatgagaatgaggattaaaattgttacctgcatgggtatgggggcaaggtagagatattatttttaaacgtgagtataaggaaaagtattacaagacccgacccagacctacccattgccatcattagttgacaacactttactttccacatgctgccacgcacactgagggcacatcataaagtgaaggctaactgcataagaagatngaaaattgttaaaagctgaatntgtccatgagaagcatcaaaatagaagactaaagatactacacagtttgaccatggacaaaacactaacacaccaacatttgaacctttacttaatanttatgaagcagtctact

SEQ ID NO: 4599 - DNA, 446 bp, Glycine max
  unsure (1)..(446): unsure at all n locations
agctntagtgaagcttatcaatacatcaattattggtgtttcccaggcaatgcagatggcagcgaatatggctgtcttggagcgtgcttgtgatttcttctttcgccatgctgcacagctttcaggtgttcccttgagaatggtggagagaagcagaaggaacttccctctaagaaaagctcgtgatgctgctgaagagatgctctctgggctactcaaagccaaagttgatggatttatgacattgatcgagaatgtaaattggatgggtgacgaggcacctcagagtggaaatgaatatgtaaacgaggtcataatttatttggaaatnttggtttcaactgctcaacagatattgccttctcaagtccttaagagagtattacaggaagtttttgctcacatatcggagaagatagttgggactttagttagtgattctgtta

SEQ ID NO: 4600 - DNA, 473 bp, Glycine max
  unsure (1)..(473): unsure at all n locations
gctcaaacttgagatgatnggttaaagcagtacaaaacttgattttcctaaagtgattacataaattatcaaagcaatctagaaagttgtactgattacctagaaaatcatcacataatattgatactccatacaaatgaatcaagtgttgtgtattttggataaacaaaaagggttatgagccatctaaatccaacacatctcaacccatgccgtggtgaaaaataaaactaactaaacaaaaaatgctcctccggcattgagccatctaagttatcgactcagtgtgctctttgttagtaggggtgatgacggtttttcttgtgagttcttnctgccttcatagtcaatgtgcttgaaatccaagattgatttgattcagaggaatcatcatagagccaacaacatagccgaccatcttccccacccgtccaaccgagaatgccttggctaggactattagtacgtccact

SEQ ID NO: 4601 - DNA, 476 bp, Glycine max
  unsure (1)..(476): unsure at all n locations
agctntcatgactgtatgctcaagaagcagatctgtgacaactcattctcatgattaaatttccacagttaagaacaacctctgctttatgaatccttcaaagggggaaaaatcaccttcattggttgcatcaacttgaacaaccatgcatgctctgaagaaggaagaactgccggaatcttcattttcttccagtccatgctaactaaatcagttgatgctgaataatccctgataagcacatcaatattttgtactctattcttaacatttcttatcttctgagtttggtcaatcacttcctcctttgcattatttttcaatgtaatcctcttatcaagactcaatcgtttggccttcttattctggtttctaaccacaatatcacaattttcatcatcatgttcattaccaaccttcctcctcctccacaagactctctcgactntactatcaatatcttccatattacaggg

SEQ ID NO: 4602 - DNA, 483 bp, Glycine max
  unsure (1)..(483): unsure at all n locations
tatcagaaggggaatggtaaaataccacctcaagctgatattaagaaggtggcaaagtgtttcttttgcaagaagaagggacacatgaaaaagaattgccccgggttccagaaatggcttgagaagaaaggtaaatcaatctcattagtatgttatgaatctaatatggttagtgttaatattaacacctggtggattgattctggatctactattcatattgcaaattctttacagggtatgcaaaacctaaggaaaccagtgggaagtgagcaaagcattttatcaggcaataagctaggctcacatgtggaggccattggaacttgcattttgactttaagtagtggctttatttcaaaattagaaaggactttntatgtaccaagtttttcccgaaacttgatttctatttcaaggcttgtaccgtttggatattcctttaatttcaaagacacatcatnntgagttatttataattct

SEQ ID NO: 4603 - DNA, 476 bp, Glycine max
  unsure (1)..(476): unsure at all n locations
agcttgttgattaggatgttttgactgacttctactcatagatccattccagtgctcatggtgatcctcctcatcattaccttctgaagagaaagaagtgatcatcaagtcttaaaagtggattgaaagagtatcaaagatatctttgaggatataacagtgacaaggcgtagtctagaagaacaaatcatatagaaaaatcttcagctaatcatgtaaagacattgtgagtgcattaatagaacaataaatggatgaccatttcacttgcagtgtatcatcaaatactatagtgtatctatattagtctaactcacaccaaggtttaaaatactttgtagtatctacaatctattttcatgccggaagaaaactttccatttgaaaaagcagattctgttgcctcatcatatgaaaccttttgcaaaacattccgaggaaacatataaaatagacctcanagcttttaccacacg

SEQ ID NO: 4604 - DNA, 495 bp, Glycine max
  unsure (1)..(495): unsure at all n locations
acactatgatactaagcttatataatagaagaaatataacaataaaagatataaaacaagatagatntagcttaaaagtgaacttaaataaatcataaatcaaatacaacaatacaatctcaattcatacttcaatctcatgcaattgaatcatgtaatgttatgctgactcaactccatggagatttctacaacttttgggtagtccctataggcctcatcccctatcatggtttcacttttttaccactcaaggtattccttgagctgaccctgtggacaaagtatgattntatcgaatatagacaaatatgagtattagtttacttctataaggttntaagaccttacatacaacaacaacaacaacaacaacgccttatcccactaggtggggtcggctacatggatcaacttccgccataatgttctatcaagtaccatacttctatccaaaccattaatttcgagatccttgtttataacctctcttat

SEQ ID NO: 4605 - DNA, 482 bp, Glycine max
  unsure (1)..(482): unsure at all n locations
agcttcttgaatgtgattagtatattcattggcacagaataaaggatgaagacgtggtttgtggtatcttttggtgtcaccctgatgcagtgaagttagtcaacacatgtaatttggtgtttatgatagacaacacctacaaaacaaaccggtacagactcccactgttcgattntgttggggtgacaccgactgggatgacattctctatctgttttgcatatgtggagggtgaacgcgttaataatttgttctgggcttgacaacgctttcgaggccttttttttaaagtgtgatgccctccttggagttagtgttactgacagagaccaagcattgatgaatgcagtgaaggctatattccccgaatgtaccaaattgttgtgcagctttcacgtaaacaagaatgtgaaggccaaatgtaaatcactaattgtgcaaaannaatgttgggatatgtcatggattgctgggatgtctga

SEQ ID NO: 4606 - DNA, 429 bp, Glycine max
tcggaagaaagtgatgaggtacaagccttaaaggcaaagcttgaaagagcccgggttgtcaaagagaagctcaagtccatagccatcaaagtctgaagagagtatgatgaactaagggatgtcaatatggccatcgatgaagccttggaatgagaaaccaagaaggctcgaaaggaagaacacgaccaaaacaagttttgaggggctttatagggcagcaatagtgagctcaagctccgaagaggtgaaaggaatcatcacgggtcaaaggcatgatcttgaaggacgagctaaaggcttgccttatgtcgaaaagaaatttgtcccaacagttaagcgagactgaagggaatatgtgggccatcatcgatgagtgcaaagagaagctaaatctagcggcgactcacgagcaaaggctagaggatgagt

SEQ ID NO: 4607 - DNA, 408 bp, Glycine max
  unsure (1)..(408): unsure at all n locations
agcttgtccacanaaaatcattattaaaggatttgaaagtttattatctcaatttttcttaccaagtaaatggatcatttttaaggtccaacgccttaaaatgatcaccttccaagtaaaaagaatcgcttgattcacccttaaagaagaactacgtaggtctgatttcctctttgatggagggcacgtaggagcaagagccccacttttgtcgacctcaaaaaataaaaagaaataaaagttaaggtaacacaatttccacaattctaaaaaataaggttgttgtcctttgagacaaacgtgagaggtgctaataccttcctcanacataaatacaactcccgaacttggaattntctttnntgaccggttccttcggttnttccgacgttttccacaaataaacgt

SEQ ID NO: 4608 - DNA, 189 bp, Glycine max
  unsure (1)..(189): unsure at all n locations
agctngaactcactgntactgccccacaacgctccacggaattagtcacggccatgttcttccttgcgagccctattggtttcttgttcaaggagctttgcggtagctgcattttcttcgtgcaacccggaacactctttttggacgtctgtggcgaccaacttgaacttttctttggccagactcgct

SEQ ID NO: 4609 - DNA, 432 bp, Glycine max
  unsure (1)..(432): unsure at all n locations
gagaggcgggagcacactattgaaggaagataaagggagagaagttgaactttgagttgtgtctcacaagactctcattcatcaaagttacaacaagtgttacacatgtttctatttatagactaggtagcttccttgagaagctttcttgagaaaacttccttgagaaacttctttgagaaaaattccttgagaagctagagcttagctacacacacccctctaataactaagctcacctccttgagaagcttccttgaaaatattcctaaagaagctagagcttagctacacacacctctctaatagctaagctcacctccttgagatgagaagctagaacttagctacacacccnctataatagctaagctcacccccatgacaaaatacatganaatacaaaatagagtccctactacaaagactact

SEQ ID NO: 4610 - DNA, 435 bp, Glycine max
  unsure (1)..(435): unsure at all n locations
agcttgtaagtaactctatggacttaaactagctagccgcaaatggtatgagaagttgaatttcttgcttctccaacttgggtttcaacattctatagttgatcactccttttttatccatcacacagttgattcccttactactcgtgtatgtagatgacatagtcattgttggaaattctatggatatgataacttcattcaagcagattttagataatcaatttgggcattcttaagttctttcttggtgctggtgttctcagtgccaaacctgcaagcaccccttctgaacctacctttgagacttcgccaagatgtcgctcctatacctgactntcacacgcncagatatatcccatgttgaccaacaacttagtcaattntcagccctcccaacagtgagtcattatcaataagcccaacgcgtacttt

SEQ ID NO: 4611 - DNA, 470 bp, Glycine max
  unsure (1)..(470): unsure at all n locations
gacactatgaaactaagcttagganatacatatntcactgcattcatcaaggctaatatttctactgcattcatcaattctaaaaaaaagccctttgagcttctaaagtgcccaaacaaagttatccttttgttcaacctccatatacacaaaaagttgtagaaaatttcatttcaatatgagtcacaccaacaacctcaagtaatgatagtatatatctattagttttctaggtattgtccatcaagaacactatgttaaatggattaatcattttcatagcatcaagatgtgtccaaaaaatatctcacacaacttttgatgtatcattcattatatgtcaatgaatatacatatctcgttcaagtaagttcatcaaatgctgcatttccgttctaaagcctctnttagacgaacgatacacaatccttgcattatatacttgttttattggagtcacatttctttca

SEQ ID NO: 4612 - DNA, 461 bp, Glycine max
  unsure (1)..(461): unsure at all n locations
agctcttcatactntgatgttatttcagctctttccaagttagcttccttcagctgctctttgagtttctccacctcagcctctaatgcttgttccctttcgggtttgttactaagtccagagttgagattagtagtatcaaattcagcaacaaaagtgttaaaagcctggttttgaaagttagttgtactctcacgtacgcgatctttatccttaaacaaatttatttcaaaatccttggagggtacagtatcaggcttgtgtaattttccatgtgtactgcttttcacggtatgagtntgtgtgttaaccactttgttaggaccaacatttntgggtaactgttcgttntcaggaagaatcctatcatgtntcggtgaaatatggtggctagatggttcttcatcaaaaattggtttactcttatcctcagcaacaagtgattcctttgcatgctgagt

SEQ ID NO: 4613 - DNA, 479 bp, Glycine max
  unsure (1)..(479): unsure at all n locations
cttggaagatggttggttgatctaagaattgtaatctatcgatttatcaaattaaatggaagcctacagatttagcgtaagaaaggttgggttgtgcccttgccaattcttcctggatggtgagatggaatgaaacatgggtctgaaacttgactagacatagatcgtattacaactatccctatacttgtttgagtttagggataaaaaaaggacaaaagaaaaaaggagacaagtttaatcattttgaacaagtgtggccggataatgaggaaaagtggtattgtaaaaaatgaatgggcatttaagcgaagtgttgaaactaaattttgtgtgttgacatcatactagaagagtaggaagtaattgttttggttagttgccaaagaaaatcaaagaaccacaaaggataatgaatgatttgtagaatatganaaatgagttaggcaacacacttgatacataagtaaggagagaat

SEQ ID NO: 4614 - DNA, 398 bp, Glycine max
  unsure (1)..(398): unsure at all n locations
agcttctcattngatccagcagaggaggagcatacaacctatttcactcaagtcacacccacggaattcaagcacaagagacttggtcattgtcatcttgaaagaatgctaaacatgaaaaaaaggaaatatgcaaaagaaaatttgaagaagtttcaaatggaggaatgcaaatctgttagcacaccaatgaatcaaaaggtgaagttcaacaaggaagaaggtggtgataacattgatgaaggatattgtgggagcttgattggatgtctaatgtatctcacttcaacaaggtcaaacattctattttctaaaaagaacaaaactggaatttttgttgacaatcaagtagccattgctattgcaaacaatcccgtgtgtcatgggaagattaaaca

SEQ ID NO: 4615 - DNA, 487 bp, Glycine max
  unsure (1)..(487): unsure at all n locations
tccttaagaagattcctaaagaagctaaagcttagctacacatacctctctaatagctaagctcacctccttgagatgagaagctagagcttagctacacaccccctataatagctaagctcacccccatgaggaaaaacatgaaaataacaaaaaaagtccttattacaaagacaactcaaaatgccccaaaatacaaggctaaaaccctatactactataatggccaaaatacaaggcctagacgaaggaaaaacctattctaatatttacaaagataagcgggctcatacttagcccatgggctcgaaatctaccctaaggctcatgagaaccctagggcctttccttggatctctagcccaatctacttggagtcttctagccaatgcccttgcggngtaggattgcatcattccctccaccttggaaaggatttgacctcaaatcccgaggttcttcatactctgngctccttccctcaaca

SEQ ID NO: 4616 - DNA, 521 bp, Glycine max
  unsure (1)..(521): unsure at all n locations
ttgaacctatcacnctcagagccctctgagacccgctgtacgctgcaagcacctgtggcgtgcaaacatgggaccagcgtattgtgtttatataacgaagtcacctctagtctgcgacttagagaccatacacgatatctaacgatgactaattaggtgggccatttattctagcatatgctgacaataccctttaagcgcttgattctcttcaggggcggattacgtgtctgccatcaccttgtgcctggataagaatcggagaagttcttgactcccctgtgatgctagaccaagacgaaccatacacatggttggctatcggtgtagagagtcgatcgcccttcgtctagcatatttatacgatctgcttgggcatataagatctcaatcctaggcccgcgggccacggttgaagcacactctacatagaacttggcgatgataaaatgcatgatggctgcctcgctctattacacttatacaagctcttttgaccttgacatgaacgaactcatctc

SEQ ID NO: 4617 - DNA, 446 bp, Glycine max
ttgatgtaagcttatgcaaaatacaaggcaatgactgcttaaggttgatgactagttgtttccaaccatgatattaccttcactatatgtagtcctgcccaccaatgtccaattcgaacctattagccgataattaagaggggggagagaaaagtgaagcgtaaaattagtcatcaagagctagttggcaatcgaaaaggatggcgttttttatgctagaaggagaatgagagattgtccacaacaagtgccttcctatttgatctctaacaaaccagtcctatgataaagggagtccagaaaagatagtcgtgcctaaaggattagaaaccaaattggatcggagacaatattatacttagtccggtcgtcttcaagattgttgagaagctggaaaatgcctctaaacagtgtggagagaagcaagggacccaaagccaaaacat

SEQ ID NO: 4618 - DNA, 390 bp, Glycine max
agcttgtagggttaaagtctcacgattgtcacgtgctcatgcaacaattgttagccgtggctatacgagacagcttgccaaacaaagtcaggttaacgataactcgcctatgctttttcttccattctatatgtagcaaagtcattgatccagtcatgtttgatgagtttgaaaatgaggccgcaattatactatgccagttggagatgtattttccccctgctttctttgacatcatgattcacttgattgtgcatctggtaagagaaatcaaatgttgtggtcctgtttatctacggtggatgtacccgattgagcgatacatgaagatcttataagggtatacaaagaatctatatcgtccataagcatctattgttgagaggtaca

SEQ ID NO: 4619 - DNA, 427 bp, Glycine max
  unsure (1)..(427): unsure at all n locations
ngtagggttaaagtctcacgaatgtcacgtgctcatgcaacaattgttagccgtggctatacgagacatcttgccaaacaaagtcaggttagcgataactcgcttgtgctttttcttccatgctatatgtagcaaagtcattgatccagtcatgtttgatgagttggaaaatgaggcagcaattatactgtgccagtaggagatgtatcttccccctactttctttgacatcatgattcacttgattgtgcatctggtcagagaaatcaaatgttgtggtcctatttatctacggtggatgtacccggctgagcgatacatgaagatcttagaagggtatacaaagaatctatatcgtgcaatagcatctattgatgagaggtacattgctgaagaagtcattggaatttgttcagaatacttagag

SEQ ID NO: 4620 - DNA, 462 bp, Glycine max
  unsure (1)..(462): unsure at all n locations
agctttgtggagtagaaacatgggaccaactcattntatttcaaaaaggaagtcgtatctagtcaaggtcttagagaccatacaagtttcctaacgatttctaattatgtgggccattaagtctatcatatgctgacaatagccgagaagcccatgaatctcttcgggggcggagtaggtgtctgccatcgccttggccttggctaacaatcggggaagttcttgactcccgttcaaggtaagagcaaaccgatccatccacatggttgcctcttggtgtaaagagtcgatcacccttcctctagcctctctttccgcgtatacttgggcatattcgtccgcaatcctatgctcgtgggccgcggctagacctaactcttcttggtacttggcgatgatagctagcatgttggtctccgtctcgcataaacgctgagacaagcttcttttggaccttgaaca

SEQ ID NO: 4621 - DNA, 121 bp, Glycine max
agatgaggaagtgttgaagggtgaaacttcctgcttgtattgttgaccacatagtggtacctggagatatgtcgcgggggtcaagataccttgaggacgtcatgtggggtgctatttccca

SEQ ID NO: 4622 - DNA, 423 bp, Glycine max
agcttagtgacataagccaaacacatggtattgtctaatgcccctatgaaagcccatccatgtcccaggttccaagcaaacacagccattccccaccaccacacctgctctccaaagtaatttggatgccgagaataataccacaaccctttgtcaagaatagggacctccttgttctttctactcacaaagttgtaaagctgagtatcagcaatgtatgccgtgacaatgccagatacacacacaactatggctaccaagtcccacatgctcagaggctggttcaccgagtggatgacatagaacggaagagacaatccaatcagaaacacctgcaaggttgtcttgatgtaaattaaaagtaaaagcaagggaaaatgatgactaagagtaaccttaattacctgctgagggacgtagatg

SEQ ID NO: 4623 - DNA, 487 bp, Glycine max
  unsure (1)..(487): unsure at all n locations
ctaagcctgcaatgtccctngatgtgtgttatgtgttggtgtaatttaaacatagttgatctcttatatttttattaaaggttttgggtggaataaggaggcttangcttgttgacaatgtgcagttttgtcagtcttgtggtttgtttatttgggtaacaatgcttgtatattcaagggtgtctctttgatcttagacttgctatggaataagtgcatgtttggaactattttttgagaaaatgcttacttgttttacaaaagctctcttagaaagttggaaaaaataagcaagtatttttgcaaaataagttgaaccaaacacacaaagattggttctggcttctaattggctttctgcgtntggttgtntgaaggaaatttctttgactgataaaggaaaaatacggaaaaaatcgtattatggtatgaacaactatcatggggaacttggagcatactangtattatgaacaactatcatggg

SEQ ID NO: 4624 - DNA, 482 bp, Glycine max
  unsure (1)..(482): unsure at all n locations
tcagtttaattntaaaaatggtctaactatcatggtgcatgcatgttgattgaggaatgttgggatccaacacctgttgtgaggccaacattttctcaggtcattgtacggttggacaaaattgttgcaaattgctcaaaacaaggatggtggaaagatacttttaaactcccttggtatggttccttgacggatatccttataaaattttagattctttggttgaattcaaaacggtgaagtgtaataccttgaaatgctaaaatcaaccatcccttgtggtttgtgtctgggatagggatgttttacctcgggccattttagtccgatttgagcaatgctagttgcaaaaagactgatattactgttctacttgttgatgaaacttctttgctgttttctaaacttggctttaccatgattcatttcaatgtgtgtaggaaataaataacaaggtacataccacgtggcaaggaagacat

SEQ ID NO: 4625 - DNA, 474 bp, Glycine max
  unsure (1)..(474): unsure at all n locations
agctntnggtacanagaagaagaagaagttcatagagattcaaggcttgtaaaggattgtatgaaataggtgttcaagattgtagttcgaaagattgattgaaaatgcaaaacaaagccttgcttttatagactcttcatgtctggtcaagaaggccatttagaagagttataacttttagaaaaacttaaaacccatttgaaaaagtcaaaaccttttcgaagagttacatctttagatttttcagaaacaaacactggtaatcgattaccaaataagtgtaatcgattacacaaagcttttgagtgaaacaatgtgactcttcacatttaaatttgaatttcaacgttcaaggacactggtaatcaattaccaaaacattgtaatcgattacagccttttgaaaatatttggaacgttgtaaattcagtttgaaaactttttcannactcatttgctactggtaatcgatac

SEQ ID NO: 4626 - DNA, 470 bp, Glycine max
  unsure (1)..(470): unsure at all n locations
tgcttcaatggagganaagaaagagggagagaaagagaaaggggggagcacgaaattgaaggaataaaaaagggagagaagttgaactttgagttgtgtctcacaagactctcattcatcaaagttacaacaagtgttacacatgtttctatttatagactaggtagcttccttgagaagatttcttgagaaaacttccttgagaagcttctttgagaaaacttccttgagaagctagagcttagctacacacacccgtctaataactaagctcacctccttgagaagcttccttgaaaagattcctaaagaagctagagcttagatacacacacctctctaatagctaagctcacctccttgagatgagaagctagaacttagctacacaccccctataatagctaagctcacccccatgacaaaatacatganaatacaaaanaaagtccctactacaaagactactc

SEQ ID NO: 4627 - DNA, 383 bp, Glycine max
  unsure (1)..(383): unsure at all n locations
agctnntgacggactataccaagctctaggaaccagggacggagaaagatctatatataggcttgctaagggtagagagaggaagactagagatttggatcaagtaaagtgtgttaaggatgaagaaggcaaagtcttagtgcatgaaaaagatatcaaggaaaggtggaaggcgtatttccacaacttatttaatgatggatatggatatgactctagcagtctagacacaagagaagaggaccggaactataagtactatcgtcggattcagaaacaggaagtaaaggaagcgttgaaaagaatgagtaatggtaaggcggtggggccagacaacatacctattgaagtgtggaaaactcttggagatagaggtcttgagt

SEQ ID NO: 4628 - DNA, 455 bp, Glycine max
  unsure (1)..(455): unsure at all n locations
gaatcggacatccgtgtcanaagttatgaccattcaaatatgtcgagagtttccgttgtgcaatttcgagggtctcgatatattatgtcccaaattcgaacatccgtgtgaaatgttatgaccatttgaaattctagagagcttccgttgttcaatttcgagcgtctcgatatattatgtaccaaattcggacatccgtgtgaaaagttatgaccattcgaatttctcgtgagcttccgttgttcaattntgagagtctagatgagttatatacgcgaatcgaacattcgtgtgaaaagttatgaccattcaaatatcttgagtgcttccgttgtgcaatttcgagcgtctcgatatattatgtcccccatttggacattcgcgtgagaagttatgaccacttcaatttgtcgagagcttccgttgttcaatttcgagcgtctagatgagttatg

SEQ ID NO: 4629 - DNA, 403 bp, Glycine max
aaaggaagtcgcatctagtcaaggtcttatagaccatacacgattcctaacgattgctaattatgtgggccattaagtctatcatatgctgacaatagccgagaagcccatgaatctcttcgggggcggagtaagtgtctgccatcgccttggccttggctaacaatcggggaagttcttgactcccgttcaaggtaagagcaagaccgatccatccacatggttgcctcttggtgtaaagagtcgatcacccttgctatagcctcttgatccgcgtatacttgcgcatattcgtccgcaatcctatgctcgcgggccgcggctagacctaactcttcttggtacttggcgatgatagctagcatgttggtctccgtctcgcataaacgctgagacaagcttc

SEQ ID NO: 4630 - DNA, 471 bp, Glycine max
  unsure (1)..(471): unsure at all n locations
agcttctagccaaatggacttaccttgaattaattcctttgantagccctttgagccttgtttccctttccttgttttgaagctcactacaagccttaagtgaaaaaccatgatattaccatatccttaaggaattttggagctttggaattgttttgggaataagtgtggggggtttttgtttcattggacaacttgttttgttggctatgcttcatgatgtattttgggccatacttgatgtacattgtatattggttaaatgttggacatgctgaatgaaatgttgtttctcaaaggctaaagagtaaaaaaaaaaaaaaaaaattcgaaaaaaaaaaaaattcgaaaaaaaaaattcgaaaaaaaaaagaaaaagaaaagaaataaagttgagtgaataagatcttaaatggcataagaatgatgaaactcttggntctactcttcatgtttaattntatctttact

SEQ ID NO: 4631 - DNA, 468 bp, Glycine max
gagaagcaagtcaaaaactcttttcaaagtaaaaatgttatttctacttcaaaaccccttgaactacttcacattgatttatttgatccctctagaattatgagtttgggtggtaattactatgtcttagttatagtggatgattactcaaggttcacatggacatttgtttttgaaaaccaaaaatgaagcttttgatgcttttcacaaacttgccaagatgattcaaaaatgaaaatggtctttatattgtttcacttagaagtgatcatcgaggtgaatttcaaaaatgagtcttttgaaagcttttgtgaagaaaatggaattcaccacaatttttcttccctaagaacacctcaacagaatggtgttgtgtggagaggaaaaatagatcccttgaagaaggtgcaagaacccttttaaatggaacaaagctacctaagtacttttgggctaacgttgtagaca

SEQ ID NO: 4632 - DNA, 253 bp, Glycine max
  unsure (1)..(253): unsure at all n locations
agcttgccacccagctcgcccaggcgagcatggttgcttcctccagaagcaacagccttctggaggaatcttctggagggcccaagtgggcctggttgctatttgcacccccatttttactaagtacaccccctgcctttntttggtgattcttttttcgtaaagttacggaaacttacgaatttcgtaacgatacttgttttctttcgtaatggtaccgaaccttggggaatacataatctttccctttttg

SEQ ID NO: 4633 - DNA, 467 bp, Glycine max
ggcttgtggggcttctatggaggctggatctttgagcttcaatgaggtcctttaatggtgattgtccaccatggagatgcagtggaagacaaaggagaagaggagagaggaggcgccatccactagggaataagccttggaagaaggagcttcaccaccaagatgagccttggataagaagcttggagaggatgcttcaatggaggaaaataaagagggagagaaagagagaggggggagcacgaaattgaaggaagaaaaagggagagaagttgaactttgtgttgtgtctcacaagactctcattcatcaaagttacaacaagtgttacacatgcttctatttatagactaggtagcttccttgagaagctttcttgagaagcttctttgagaaaacttccttgagaagctagagcttagctactcacacccctctcataactaagctcacctccttgagaagct

SEQ ID NO: 4634 - DNA, 467 bp, Glycine max
  unsure (1)..(467): unsure at all n locations
agcttataataagacataccagcattntattgaaccagtccaaggaccacaatattgggcccagacacaatatacgcaccctgtcccaccacataaaagggtccaaagaggaaggccaaagaaaaatagaaggagatctgtagatgaggacaatgtcacaggacataagctaaagaggaaattggctgagtttacatgtggaaggtgtggccaaaccaatcataacattagaagctgtaaaaatagtggagttcctgttaggccaaagaaatatgttgcaccatcaacttcaaatgaggatgaccacctattatctcaagatgaacaagctttgaatgaggctaaagaagctgttgctcatgttcaataagatccggtggagaattaattatctcagcctcatttgtcacaagatagtgacatggagttgatggtaaatatttgtcacaacaaagtagttttatctc

SEQ ID NO: 4635 - DNA, 475 bp, Glycine max
  unsure (1)..(475): unsure at all n locations
cgcatcaatataaccctntaattgtaactcagaatctctccataagtgaggaactcgtctttagttcttctcaagtacttaagaatggtctgaagtacttttcaatgttcctcaccgaggtttactggatattgactagctgcacttagtgaataagcaacattaggacgtgtacaaatcatgatatacatgatagctcccactgcgctggcatatggtactctagtcatgcattctttctcttcatgagtntaatataattntgtaagatgacccttgtgttgaatgtcttcttatgacctttgttgcttgtttgataattgggagtaatatagagatgatttatgatgaatacctatgaaaaataggcatgttaagcttcaaaaattgcggttactccttttttaattcatttcatagtttaaggaactaattaaaatagaaggacacatgtgtaggggactctgttattatt

SEQ ID NO: 4636 - DNA, 334 bp, Glycine max
  unsure (1)..(334): unsure at all n locations
agcttgtacgaatgtaagaaacatcttcttcgaccttggtgatccttgactccatctcattgaatcgcatgtccacttgtaactccaaggtatcaaacctttcaccaacaaaggtttgaaaaccatcaaacctgtccaaaatcttttgaagaagagaggaatcttctccaccatgtaagtgtccttcttcattgatgggttgagcaccctttttcacccaagagccatcatgctctntatggtaaccaaaggatgcaatcactgcagcacctattagaaaggatctcnttgatggaacataaggttcagaatcaagagggatgttgaagtgttg

SEQ ID NO: 4637 - DNA, 466 bp, Glycine max
  unsure (1)..(466): unsure at all n locations
gcttaagaaagagcctngagggtaatgttctcaacaatagttgaattctccaaactgtttattaatatatctccattctgatttataatttattgattcagttctcttgactttcatgtgaacaggtgattgcagagtatttgtccttagaagaagctgctggaataaaagagggattccagctgatggatacaagcaataaaggcaagattagcgtcgatgagctgcgtgtagggttgcataaactaggtcaccaaattcctgatggggatatccaaatacttatggatgctgtgagtatttttcactttatctggaaacttttcttttctgtttgttctacaattgatgtgtgaagaaataagtagtttggtctcttgtttttcaaaattntatgttcattgtaatatatcanactaattaattgcaaacttggtaggagttattagtttataaatgctaacac

SEQ ID NO: 4638 - DNA, 429 bp, Glycine max
  unsure (1)..(429): unsure at all n locations
agctnntgagcttgagcacccacgagtgtttcagcaccctagtaccaagagtgtatgtaaagtttcttcgagccacacttccaagagcagtgtagggggttctgtnggttcgagcgaggggtttccggcagtattgaaaacaatgtgggacaatgtgggtgtcgagggagcggtttctggcagatttcaggcgggaggagaaagagaacagcgactgcaaggttttcgagcgcacgggttgtgaaatgccaatgttttaacttataaacataacaacatcggttntttaaggataaccgatgttaactaaatatagttaacatcggttntggaaatcatataggttatatcggttnttaaaaaatcgatattaagatcaattccttaacatcggttttcaacatcgattttgagaaaaccgatgtttac

SEQ ID NO: 4639 - DNA, 439 bp, Glycine max
  unsure (1)..(439): unsure at all n locations
atgatccaaagattattcaaattgttgttacaaggcttttcatagaggaactaattcagttattttgttacaacatcagcattcattgcagtaaatccttattcttcaacaaatgatccttttcactttgaaccttcatgtctttggatactctttcaccatagcatacacacatcgttgtagcaaatgtaactcgtgatccaggtcctagacttgccgatttgctttggcgagacataaatatggttttgcacactttggcgcttcacttctgatcctcgttcgatgtggtgaacattccattcgttgtggcaagttgagataattagttccacttttgactntcccttgaaaatgctntgtgacctgcaaaatattcacaaaaacacaaggaattatatntntgagtcctaaaatgaattttcatagttntattaac

SEQ ID NO: 4640 - DNA, 469 bp, Glycine max
  unsure (1)..(469): unsure at all n locations
agctntanagcattgttcctctacatgaaattgaattaaattttaccattctaattcttttctgattttaaatttttaatatggaaaatgacagtagataatccaaaaccaaacttttagattgaacagcgtaactgtatatcgacagaaacagaaaattctctatctaatgaacaaagttacactctactattaaataaatcaaaaacatatttaaatcttaaataaatgaatcaagcttgagctatccattttttttaaaagccaagccaaaaactctagtgttcagctcatcttgactcatttatatcctatgtacttatgtataggtatctcacatccgctaagtctcctatcgttgagattgggtatttttgtaaaggattntaactatagatgccatggaatgtataagatctaacatcttgatgatcccttcactttanacaaaaacaaaattcttcaacac

SEQ ID NO: 4641 - DNA, 478 bp, Glycine max
  unsure (1)..(478): unsure at all n locations
tgctatgatgcaggtgttactgttaaggcgtgtggcgactgttaaggatagcaatatagttgatacacttccatttagcatactgtcatctcattgaaagttgcatccccgacaaccaagatttccttactatcatcgttcgaggtatgtatgtgattctcacacttatgtgcttaagtattataggcaatggttaacatgttactattcttttgtagtacattgtatttcattgagtgagccatagttccccgtttgagattgaatacaacgattaatacggatagtttggattaattgttgtattcaaacttgaattgtccgtttggacagtttgggaagacaaattgtttttacttcattttgacttataagttaagtatgttgtgttatttttgactaaatntcgagcaatgcatcttgctntgttctctgggtgcatacatgatangcgtgaattgatgtcacccctntcatg

SEQ ID NO: 4642 - DNA, 444 bp, Glycine max
  unsure (1)..(444): unsure at all n locations
agcnttctcccttatttgctataaatagggggagaagtgaagaagaaaagggttcatcctcttaggcacttctctctctctcgaaattgctgaggaaaattatttctgtgaagaaaatccaagccgaggcgcttccgtagcgtttccgtgagtagttacgcaaagattctcgaccgttcttcaagattcatcgttcgttcttcattttcttcagtcttcaacgggtaagtacctcaaaccaagcttttcaattcattctatgtacccgtggtggtccacattttgtttcatgtatttttttctcgttttcatttactttttatacccccttttgacgtgcttaagccatttatttaagtcatttctcgcttaatctaaaaataaaataaatttccaccgatcatttgaattgtattcatccattaatttggttaaaatgaattc

SEQ ID NO: 4643 - DNA, 479 bp, Glycine max
  unsure (1)..(479): unsure at all n locations
tcagctctcagcccanactcncttcacanaatctgatttcaggcctaaataggtgaccttgttcgtgctcgtgtgcttagcacaattatgaaccgcttagcgcacattagtgaatttcggcttagcgcgtgcatttttcgctcagcagatggactgaagtggtgcgcttagtgagatgaagtggtgcgctcagtgaacatgtacaactcatcttcttccagattcttcctcgtgcttagccaaagagttttgcgcatagcggacgctcgctaagccaacagattggcttagcgagaaggtgaaaaacaacacttttcaaagtcgcctaattaagctgaaattgagagaaaatgattattaaacacacaaaatggaagtactaagtatttattacctatacttaataaaaagtacttataacactacaaaataaacataaactggggaagtttgaacaattacacaggtttatacataaa

SEQ ID NO: 4644 - DNA, 437 bp, Glycine max
  unsure (1)..(437): unsure at all n locations
agctcttactntcanaatattaagaacctattataagagttagctcttgatatattctcattctattgttttataatattcattaattcgacaatactttaagtataattgaaaataattattataaaaatcaataattattaataatatggcaatttaagattaattattaatatgatttttttacattatcaatatatttagttgaactttatatattaattattaaaaaaattaaaagactaatataaaaagtacacaactttaacaagccaaggctaaaaaagaccatacttgaggagtcaggatctcaatagtatttaaggaatatgcatagcaaatgtaatatatatatatatattatcattcaattaacaatctctattgatatatctgttatgataacttttataaaactcaattntatccataacaat

SEQ ID NO: 4645 - DNA, 477 bp, Glycine max
acatctaaacatccttcaatttacaccacaatatgaaatgttatcatcatatgcacagcaactaaattattaagaaaaatagaagtgcaggctaaagagatgtccaataaaagctaaataataaataaaatacattaagaatatcttaacacacgagttgttataaatcttgtagtgcatatctttgaattttaccgatgaaaaaatttattgacaaattcaaaattcttaaatttaatttagatatcatgaataattgaaggccagtcatgtctttgtatataataaatcttatttcttttatttttcttttcaaataaaaaatatatatataactttctttatccccaaataaataaaatataattattcttttacctcagaaataattttttaacttaaattccgttttcatctctataaatgtgttagtttttggtctagtgtctattagttaattatagctcggacccatat

SEQ ID NO: 4646 - DNA, 464 bp, Glycine max
  unsure (1)..(464): unsure at all n locations
agcttgtatcaaattcaaacgacaataacgttntactcggatgtttgattgcgtctcgtaatatatcgagacgctcgaaattgaaaacggatgctcgtagcaaatgcaaaccgcaataacttttaactcggatgtatgattgagtaccataatagatcgagacgctcgaaattgaaaaaagaagttctgagcaaattcaaacgactataactttttactcggatgtctgattgagtcccgtaatatattgaggagcacgaaattgagaacagaagctctgaccataatcaaaccaaaataactttatattcggatttgcgattgagtcccgtaatatatgaagacgctccaaattgaaaacagaagctctgaacaaattcaaacgacaataactttntactcggatgtccgattgagtcccgtaatatatcgagacgctcggaattgagaacagaagctctgag

SEQ ID NO: 4647 - DNA, 473 bp, Glycine max
  unsure (1)..(473): unsure at all n locations
ttcaaacgacaataactgtntactcggatgtctgattgagtcccgtcatatatcgagacgctcaaaattgaatattgaagctctaagccaattcaaacgacaataactttttactcggatgtctgattgagtcacgtaatatatcgagacgctcgaaattgaatgttgaagctctgagctaattcaaacgacaataacttttttctaggatgtctgattgagtcccgtaacatatcgagaccctcgaaattgaatgttgaatctctgagccaattcaaacggcaataacttttttcttagatgtttgattgagtctcgtaacatatcgagacgctcgaaattgaatgttgaagctctaagccaattcaaacgacaataactttttactcggatgtctaattgagtcctgtaacatatcgagacgctcgaaattgaatgttgaagctctgacccaattcaaacgacaataactt

SEQ ID NO: 4648 - DNA, 483 bp, Glycine max
  unsure (1)..(483): unsure at all n locations
agctntagaatttntaaacaagtcaagttcagtcttttaactatgctcgtttaaataattgaatcaaacatataagtcattgtatttttttttacaagttaaatatttaaaaaagaaattattatacataatgatgttatttgattcaaacctgattcaaacatgattatctttaataaaaataaaaattagtagacatcggatatgaaacaaaatccatacccaaatatttgcatgtaaaaacccactacacagaaaatttagaacataacgagagtactcgtgaataaaataaatcaattntttttccttggctacttaataatagggtgcggccaggtagtaatgtacctgtgtttgcaaaatacgtatgacattaattcaatatctctaatctttatataaagtaagattctacacatntttaggtanatatatanntttaaaatatatatatatatatatatatatatatatatatat

SEQ ID NO: 4649 - DNA, 453 bp, Glycine max
ctaagcttaagaatattgttatcatgagatctcccttgacaaattcctccaaagtccatcttggctctctcttctccttttcactagactaaagaccaggcggcctactcttctcattggtgcctcccatggccttctttttacgtgtctaaaccaccttaattttctgtcatcttttcctcaattgatactacaccaatttttcttatatataattattttgtatcttgtcctttcttgtgtaaccacacttccatcttaacatcactcttgcatttctctctcatcctttaaagcttagcattcactattattggaaaaaattcaagtcctacattagctagagataaggccaagatagagtatataagtgggggcaatcctcatcatatgagctagtttttggggtcgaggcccaaactcacattctaagatggtatcagagtctatcat

SEQ ID NO: 4650 - DNA, 467 bp, Glycine max
  unsure (1)..(467): unsure at all n locations
agctngcttctacaatctcnccctttntgatgatgataattctgaaatcaagaaacacatacacacacttttttctagtcgatcagtcacttaattttccattctccccctttgtttttgagtttatgcttctcttgaaattaagttaattacttatgtgagttcttgatttgatccctatttctctccccctttggcatcaacaaaaagccaaagtgcgtaacaagtataaaacattcaataactattaatcattcacaagacattcattgaaaaatataaaccaatcatgaagcaagaaacatgaatagatcaaatatataaaaaccacatagtcatataacataattcataattgttcaatcataccatgcaaagaaagaaatactaaattgttcaaatgtcataataatatagatcattgtgataggtcactatcatctaacattcctaattctcttctaatg

SEQ ID NO: 4651 - DNA, 410 bp, Glycine max
  unsure (1)..(410): unsure at all n locations
tattgctcattgttatcattgtcatcccgagaaagctgaagaagtttgcatgcagtagcttgcaatctatttggctgtctttgtatatagttctcttcaaaggattttgtgtcaagattttcatcacataatgtaatttagatgagagttgtggcatgattattggtgtcacatgagcaagaattcttccttgtgctagcctttcttttccaagtaaaaggagaaaatctggatccgggttccatgcagtcggaaaaagctcacatcagacggttcatatatcatatcaataaattcaacttgaaaaatagatttaaaatatcaatagtctaaaagttcaaatccatgactgcctgattatgtgaatgcaaagaatccaacttcttattcttccatgtgtntgcgtattc

SEQ ID NO: 4652 - DNA, 351 bp, Glycine max
  unsure (1)..(351): unsure at all n locations
agctnttagacttaaagaactacgtaggtctgaattcctcatcacacctgaggatatgtaggagcaagggcaacacccttgtcaacccaaaaaaataaagaaacataaaaagggaaaatgcattattttgaagtcacattgtgcacactcgatcgaaggaggccgtcccttgttacggacgcatggggtgctaataccttccccatgtgtaaataactcacaaacccttattttcaaaattcacagaccttttttttttttatttttctagcgttttcctcgaataaacgttggtggcgactccatgcgttttcttcatgagaagacacactttntctttttgcctcaccc

SEQ ID NO: 4653 - DNA, 460 bp, Glycine max
ggtggaaggggtctcccatatctcattgtgtttgcaaatgattttctcttgtttggggaagcatctgtaaagcagatggatattattaatagatgcttggattcttttttgatatgtctagttagaaagtttcaatatctaaaactagaatgttggtctccaagaatgtcaattcttcttgggttgtggagttgagtgagctatctgggttatctcctatgttagacttggggaagtacctcggtgttatgtttttgcattgtaggaagagtaaggaccattattttttatctcctagaccataccaaaaagaggctttcctcttggaaagctaattctttgtcattctctggtaggcttaccttgacccaggcagtgattgagacattaccaacatacacaatgcatgtgactcttcttcctatgagtgtgtgtactaagttggaacgaatggccaaag

SEQ ID NO: 4654 - DNA, 406 bp, Glycine max
agctatcgtgacattgatatggtcataacccttcacacggatgtccgattcaggcgcataatatatcgagaagctcgaaattgaacaacggaagctctcgagaaattaaaattgtcataactttccactcggatgtccgattcaagcacatcacatatggagacgctcgaaattgaagcacggaagctcttgagaaattgaaattgtcataacttttcactcggatgtccgattcaggcacatcatatattgagatgctcgaaattgaacaacggaagctctcgagaaattgaaatggtcataacttttcactcggatgtccgattcaggcacatcacatatcgagactgctcgaaatgaacaacagaagctctccagaaattcaaatggttataacttttcacat

SEQ ID NO: 4655 - DNA, 429 bp, Glycine max
ctacagcagattctagtaatgacccactaacctagaattaaaataacttaatgccattaacctaaggaattaaaataacttaatggctgtgtgtaactgaaattgtggcaaccaaaagtcacccccaacagccaacaagtcagccaccatttggtctcccaaaaggctgatgcctaggttgccaattgggcccttattacaacttgaactaaacctaactaaagcccttttagttgattaacccaaaacatatttttggtcagccaactttacaaggattgggccattatttagacaaactaaacactctaaaattgaaacaaagtggtgtcatttagtcctcctccatttgggccatgatacaactcacaaccttggacttttctccttgaaacttgggcttgtattcaaatagtatggacaacactt

SEQ ID NO: 4656 - DNA, 616 bp, Glycine max
  unsure (1)..(616): unsure at all n locations
cctcctccgccccncnttattcgcncatattgttgtngcgacgagtttcgcctctcctaatctntnnnnnnnaaggcnnngaaggaggggatgaattgattgcaattgcagacaccaannanactnaatctnngagccaatcccaacgacaanaaccccgcactgagatggacgatagattctcgtcacacanccagacgctcggaatggaatgttgaagctctaagccaatccatacgacaataacttcttactcggatgtctgattgagtcccgtaacatatcgagacgctcgaaatagaatgtcgaagctctgagctaatgcgaacgacaataacttctctctaggatgtctgatggactcccgcaacataccgagacactcgcgactgaatgtcgaatctctgagccaattcatacggcaataacttctttcttagatgtctgattgagtctcgtagcatatctagacgctccacattgaatgttgaatctctaacccaatcaaaccacaataactttctactaggatgtcgaattgagcccttgaaaatatcgagacgctcgaaagtgaacgttgaagctctaccacaatctaaaccacatatactttccc

SEQ ID NO: 4657 - DNA, 431 bp, Glycine max
agcttgtctcgctaagccgctagtgttagtattagtcaatcccactaagcacccactggtgctaagcctagatagtttgtcagctaagcgccattagctctctatcttagaataaggcttagtgagtcactctcgcttagccacagttgtgttccagctaagtgagagggtctctcttagccattgttagtgtttttttgttgtcgtgctaagcgcgccctgcgcgctaagggcatgtctgttatttctgtaggcgcgctaagcgagatgggctcgcttagcgcccaacccaatttactgtttgtttttcttaggtctgtttttcaataaaacctatctaacttcattcttttgttgtgttttggtgtagatggcctcaaagaagagacgcgcctcatcctgtagacctcaggagccatatgatacatcta

SEQ ID NO: 4658 - DNA, 432 bp, Glycine max
  unsure (1)..(432): unsure at all n locations
ngtgtcacaattcactgtgacagtcaaagttccattcacttagcaaatcaccaaatgtaccatgagaggacaaagcacatagatgtgattgaatctgagaaggtgaaggtggagaaggtttcaacaaaagaaaactcggctgatatgttcacaaagtccgtctctagtgtcaagttcaagcacttcctggacttgataaattttgaagatgcctaaagcatattggtagaagtgcagccctgaatcgcaagatagacactcgctgatttggagtcaaggtggagatttgtggtgtgtgactcaaaatcacaaaaggcacaagtggaaaggctttaagaggtgttgtcataactgaattcagttatcataactgaattggttttggcaccaaagcatagttagagtgtatatatactcttgatcatgtaatgc

SEQ ID NO: 4659 - DNA, 364 bp, Glycine max
  unsure (1)..(364): unsure at all n locations
agcttgtacccctgaatattacaaaanaattgaatattaagagagatgatctaataggagatgtttgtatgttgcattaaaataattatttagtcttccacacacatataggggctaactgtttgatccactttattgcaatcaaagatacagatttatacaagtgtctatgataaaacattttcttaccaaaagcattctatactcccaaaattttacaactggaagtgccaaattgtaaactcatactgcaaacttgttaatttttgggattattatttaccagagtcaatatatcagctcaatatctccttacctgtgtcactattgcagtgtaagagctagcaacaacaataacaagtct

SEQ ID NO: 4660 - DNA, 464 bp, Glycine max
cgtaactcatattcgcacatcctaactgtaggaattatcgaaataatatgtgagataaatgtccttcgcacgtagctgtctttttcctacatacatccaaacccatcccagtaaatctatgattgtggactcatttaccattggatcattgtgtaatttgaacaccactttagtaaagaattttctaacatcctaaccatcggatgtgtgaaataatgtctacgctgagagaaatgtccctcacacgaagacaatgaaatgaaggctccaatcccttttgcttctccctaatgctgggaaatcctagcagagcaaccaaaggataagcttgagaaatcttagaaaactactagagatgccgctatcactttcggattagacatgtgagcccacttaaaggtaaaggatgggttattcacagcttgcgagtggcgagaacatgtgtaaggatccttagaagatca

SEQ ID NO: 4661 - DNA, 431 bp, Glycine max
  unsure (1)..(431): unsure at all n locations
agcttgtagcanattcgaacaacaataactnttcactcggaagtctgattgagtcgtgtaatatatcgtgacgctcgaattttaaaaccgaagctcgtagcaaattcgaacgacaataacatttcactcggaagtcctattgagtcccgtaatatatcgagacgctcgaattttaaaaccgaagctcgtagcaaattcgaacgacaataacatttcactcggaagtctgattgagtcccgtaatatatcgtgacgctcgaattttaaaaccgaagctcgtagcaaagtcgaacgacaataacatttcactcggaagtccgattgagtcccgtaatatatcgagaacgctcgaatttaaaaccgaagctcgtagcaaattcgaacgacaataacatttcactcggaagtctgattgagtccccgtatatatc

SEQ ID NO: 4662 - DNA, 459 bp, Glycine max
ttcgagcgtctcgatatattacgggactcaaccggacttccgaacgaaatgttattgtcgttataatttgcagagagcttcggttttaaatttcgagcgtctcgatatattacgggactcaatcggacttccgagtgaaatgttattgtcgttcaaatttgctacgagcttcgattttaaatttcgagcgtcacgatatattacgggactcaatcggacttccgagtgaaatgttattgtcgttcgaatttgctacgagctttggttttaaatttcgagcgtctcgatatattacgggactcaatcggacttccgagtgaaatgttattgtcgttagcatttgctgcgagcttcggttttaaattttgagcgtctggatatattacgggactcaatcagacttccgagtgaaatgttattgtcgttcgaatttgctacgagcttcgggtttaaatttga

SEQ ID NO: 4663 - DNA, 473 bp, Glycine max
  unsure (1)..(473): unsure at all n locations
agcttgtcatcgaagacttgtagtctaggactaatatttctatcatcaaagcaagtntgtagtttgttgtgtttggttattcagttctttaggctacatatttttattttctaaaaaatggaaaactatcaatgatattattaagtcccattgaattagttattagcagcaccctctctcgccagcctatagatgattgaacaaatatttagctcggccagttgaagtatgactatcggattgatctatgagctgcaaattgtgcagatgggtgtattcttagttttgttaatggctacatttgtcactagtgttctttgtttatttaattctgatacacttcagacttntttgatagaaaatggtttatgcttctntnttcgtttcacttctctggttttgtagaacgtgtactcttacaccttngcctagctgactcttccttaaacacctctctttagtatgggatgaat

SEQ ID NO: 4664 - DNA, 462 bp, Glycine max
ctcgctctgtggaactggcattgtgaacatatcagcatgatcgggcagagtgctgatcttatgaactctgattcttctttctgaccgaatgaagtgatatctaacatctatatgcttggttctatcatgatgaacctgatccttggacaagcatataacactaaggctatcacagtagatgttagcatattcttgattaatttcgagatcatttatcagacctcttagccaaattctttcctttgcagcttcagtaagagccatatattcagtctcaatagttgagagggcaacagaaggttgaagtgttgccttccaactcaccaagcagccaccaagggtgtaagcataccctgttagggaccttcttttgacaagatcagcagcagaatctgcatcataatagccagtgaggcaacaatctgagtgagatccatatatcagacctacatctacagtccc

SEQ ID NO: 4665 - DNA, 453 bp, Glycine max
  unsure (1)..(453): unsure at all n locations
agctngctcggtgtctctataagggtctctatttgcttggctaggagcttgttttgggctaataatgtgtcttgtgatgtgatctcaagaaggctcttctttgtaggcgtgtaagcttaatcacaaaggatggcatggtcactggctgccatattttcaatcagctccatagcttcatcaggtgtcttcagtttgatcttcccaccagtggaggcatcaagtaactacttcgaatggggtcgcaagccatcaatgaatatgttgagctgaaccggctcgttgaacccatgggtgggagtcttccggagtaaaccgtggaagcggtcaagagctctccacctttccctcggcagtcttggactctggaaaatatntcttcaanaatttctccaccacctcttcccatgtctgcaaactatttcccttgacgagtgcatgccattttttgcttca

SEQ ID NO: 4666 - DNA, 475 bp, Glycine max
  unsure (1)..(475): unsure at all n locations
tcatgatgatgaatcaagttgattcaagtagttntgatgataacaaagatgatgacaaaaagcccaagagaatgatttcaagattgactcaacaagtttcaagaatcaagagaagtttgatttcaagattcaagagaagatgaattcaagattcaagagaagaaatcaagaagacttcacaagggaagtattgaaaagatttttcaaaaaacaaacatagcacagttttttttttcaaaacagtttttctcaaaattttctaagctaccagagtttttactctctggtaatcgattactagtttcctgtaatcgattaccagtggcaaagtttgatttcaaaagttttcaactgaatttgcaatgttccaattaatttcaaaatggtgtaatcgattacaagatattggtaatcgattactagtatatctgaacattggaattcaaattcaattgtgaagagtcacatcctttca

SEQ ID NO: 4667 - DNA, 475 bp, Glycine max
  unsure (1)..(475): unsure at all n locations
agcttgagcttagctacacatacctctctaatagctaagctcacctccttgagatgagaagctagagcttagctacacaccccctataatagctaagctcacccccatgacaaaaaaacatgaaaatacaaaaaaaaaaagtccttactacaaagactacttaaaatgccccgaaatacaaggctaaaaccctatactactagaatggccaaaatacaaggcccagacgaaggaaatacctattctaatatttacaaagataatcgggctcatacttagcccatgggctcgaaatctaccctaaggctcatgagaaccctagggccttcccttggatctctagcccaatctacttggagtcttctacccaatgcccttgcggggtaggattgcatcagtaagtatcccagcattacaattatattcttgtgctnnttgcaatcaaaacattatgctctattcctagcaacgtaat

SEQ ID NO: 4668 - DNA, 462 bp, Glycine max
  unsure (1)..(462): unsure at all n locations
cattcttctganactaatcaactcttcttgcattgctttaacctagtactcatcagatataacatcatctatgtgttttggctcaatctctgagagtaatgtgttatgcttgagagaattccttgtctggactttgcccttaggatcaccaatgatttgagactctggatgatgttttctcaagaatcgtcctgttggttctctaacttctttaggtttatcgtccactggtgagttggacacatgtttgtcttgactggatgcaacaatagatttcacgatattttctattttcatctctccaaaagactcatctaggtctaacattgtagtgtcagacttgttgttaaattttacatgaatagccttttccatatcaaggttctagacttgtacactctatatgccttggacgattcagagtatccaagtacgattccaaaatcacatttggagtcaaac

SEQ ID NO: 4669 - DNA, 472 bp, Glycine max
  unsure (1)..(472): unsure at all n locations
agcttataagaacaaaattgccttaatcatttccaaatatgcatgtgaattaggacgcatcaacaagaatcaagccaaggctattgtgcaagcaatcaatggggcaaaacacaccaaatgattataatgatggatggctcaaattctcacaaaggtaaaatcatcactttcaaattgagctttcaaaactatcatgacatgtagagaagaatcaaggatttcaagtcacaaaatgtcaagaacttttattttcaaaacaattacccatttcttgaacatatcctataattcaaagaaaaacatgcaaagtcgtacgtgcacacgaatttgacccanaatattaaactaaaaatccgacgaaactaacaacattaacaaattaacacaactaacaaattaacaaaaccaacaaaactagcanaaccaaagaacactccccccccatacttaaacaacacattgtcctcaatgt

SEQ ID NO: 4670 - DNA, 481 bp, Glycine max
  unsure (1)..(481): unsure at all n locations
ttcattctatgtacccgtggtggcccacacttggtttcatgtanttttattctcgtttcatttattttttatacccccttttgacgtgcttaagccattttatttaagtcatttctcgcttaaactaaaaataaaataaatttccaccgatcggttgaattgtattatccgttaactttggttgaaatgaattccgactgatcggtcgtgccgcaaccacgttggaaataaaaaaaaaaggtaaaataataatataataatcaaaaaaatgtcttttagtaaaataaagcggaaaatcaatcggacgttttctctttgggatttctcattcttaattgattgactaataactaaagtgaaactaaggctaaaatcaactcgcctagtcaagctcgtccataaaaataggttnttgaagtttatcatttcaaatttttactaagtaaaatggatcattttcaaggtccaacgccttaaaatg

SEQ ID NO: 4671 - DNA, 338 bp, Glycine max
  unsure (1)..(338): unsure at all n locations
agagncacctgaggcacgcaagcttcgggaaatggcctaccctgagctaaactctatgtgtgatcctctagaaaatgcgaaaacagagggtactcataagataatgatgacctaacatcaaagatcaacaaagcgtgatctgtcttactggaagtatgttgatgcattacattgtgagcaaaatagtaattctccagtcggacgtagggcatcgatatctgatcgagataaacctagagggaccatgctgaggttataacaatgtcatgcatgcattcatgattccattgaaaacatcggtgatgtcaaagtcgatggcaattgtggatatcatgcaa

SEQ ID NO: 4672 - DNA, 397 bp, Glycine max
tgctggtaatcgattactatatatgtgtaagcggtaacacaatgcgaatcgtgaattcaaattgcaatacctgatgtaaatcgttgtcggccactggtaatccattacatcctctggtaatcgatcaccagagagtgaatctgttgtaaaaacctttttaacttaaatgtcttggccaaaccttttgctacttcatttaggaatacccttcctatttaatataccgttcctaagactcttatagactgtcttgatcatccatcttgaatatctttaatatacatgtcttggataaatcttagacacgcatgtgagccatgtgatccttaggcataaccaaaacattcagttggatcctgtcatcaaaacacttatcttgaccctttgtctacaatgt

SEQ ID NO: 4673 - DNA, 467 bp, Glycine max
  unsure (1)..(467): unsure at all n locations
agctngaagatgttntgaagaagttttggcttttacatgcccaattcccttgagtggcatttctattgggtgttatcttggttgttacatcttagtacatttgatttttgtgttgcatcatgcatcatcatggttagtgtgaagaaaagtttttaagttagaaatttctcttcaaaggcaaaaactctattttaatcgattatagcctcatcataatcgattaaaacaagttgtctgcagcttgtagagttgagtctcatatcggtttaatcgattacagctgtcttataatcgattacacagttatttgagacaatgacttatttatttaggagactctgctttaatagattaccaactagataaatngattacttctctctcgtttagttgttcaaaggtgaacaagaacactttaattgattacttagagcatctaattgattacatctgtcttgagtatttat

SEQ ID NO: 4674 - DNA, 439 bp, Glycine max
  unsure (1)..(439): unsure at all n locations
ngaaatgaagacgtgtggaagggtgagactatctactctaattcgnggaccacagagtggtacctggagatatgtctcgggggtcacgagaccttggagacatcaggtgaggtgctatttcccaaaaccaagcttgaccaatcccgacccaacccgggcatagtcagtcagtgagaacctgtgatgtacctaaacatgcgagctcctggcagtcaaccgataaaagaacaaagaccacatagcaaggaggcttgtgtggtggctggccagcaatgagtcttgagtgagatttgggatatggcctctggtaatcgattaccaagggtaggtaatcgattacaaggcttaaaagtgaagacaggaagctaagatggcctctggtaatcgattaccanaggagtgtaatcgattaccaggcttgaaacgagatcacgaagct

SEQ ID NO: 4675 - DNA, 440 bp, Glycine max
  unsure (1)..(440): unsure at all n locations
agctngcacaggaaacagatacaggaaataaagtgaaaacagagtaacatttttaaaaataaagacaaaaataaaaaatgttttcgcaaaccaatagcccaaatattttctaacattttcgtgaaaacggaaaaagaagccctttactccactccaacaccatcagcagcaccaccaacaagaaaacacctgaagatctatcaaggacatgtttgggtaaacttcgccagagcacttatgagtgagaaaaatgaaataagtttctccaaaattagcttacggagaagctctttttttttctccttctcttataagtacttctttttttccatagcacttattaagtacttattaaaagttcacccaaacaagccctaacaaccataccaactaaacagatatgcatagaagaataattntctctaataaaatcaaatcag

SEQ ID NO: 4676 - DNA, 477 bp, Glycine max
  unsure (1)..(477): unsure at all n locations
ctgctgttaatactgccttacgactattagtactcaccaacttgatactcttctccccaaccatatcagagagtatggtttcctgaagctctactaagccatgctttgattnttctctgatatcaccaaggaaacactgaccttcaaattgatcagcaatcaaattgtacactgcacaagcaatagcggacttccctattaccacaattccataaatccccaccatgcttactccttgattggatccaacatccaaaagtgagttcacctcttgcactctagactccaatccaattggataattagccacatgtaaagggctacgatttatctatctggacacctcttcaaaaattttctgaataacttcatgttcatacctacccaaatacaaaatacatataaagttaaatcaaatgcatcaaatccatgccccagttcattcacaaattcaaatctcattatatctttgtcatg

SEQ ID NO: 4677 - DNA, 414 bp, Glycine max
agcttctgcatgtctagagagttctaaagagagaaaggtcaaagtttgagagtgtttgagagattttgttgtgtgaagatctgcagagaccaaagcttgaagaggaagccatcctgagagcttgagatgagtttgtgagtgattgtgaggtcctaaaggtggaggagacatccccactacttgtatttctgcaatcttgcatctttctcttttctttattgtaaaggaagcttcccagttatggaaagctaaatcctctattggatcttccttgtaggtacttgatgtaaatatctttttatctatctgatgatgctttgtgtgttctctgtgctatcggtatttcattttagtatgcttttaccttgatcacgtagatgcatgttttgttagggtcattcaacagtggaaact

SEQ ID NO: 4678 - DNA, 545 bp, Glycine max
  unsure (1)..(545): unsure at all n locations
aggcncnatgaggnaatgatatgcctcgcttcgctgcnctgacactatctaatactcaagctctgatcacatgtctcattccagacacacttctgattcttatgagtcagattatcaggggtagtgccgatttagaaaatccctcactgaatttcctataatagccagccaaccccaagaaactttgaacttctgttggagttgtcggttgttgccactccataaccgactccactttaattggatccacagcaaccccatctttagaaatcacgtgccctacgaactgcactatctctaaccagaaattcacatttcgacaatttggcgaacaatttcctatccctcaggatatgcaacacaattctcaagtgcttttcatgctcctccttattccttgaatacactaggatatcatcaatgaacacaaccatgaactgaactaagcaatcatggaatatacggttcatatagtccatgaagatagccggagcattagtcactccaaatggcatgactaaatacccataatgaccataccgagt

SEQ ID NO: 4679 - DNA, 431 bp, Glycine max
agcttctacttatgtggcagggcgggcttccttcactttcttgtctccaacgcgagctctgaccactgtttttccttcccgcgatgcttcttttcatgttcgcctgagtgggcttatagcctaaaccatacttcccacgatttccttgggtttttatcaggctagttatgccgccattgtctttgcctaaacccatcccgggttcataaccgttccccaacataactcgggccatcattaccgccgcatcggacaggcaaggttgcccaaagagggagtccacggaggaaatgctgaccacctcaaaagactggaaagcggtttctaacgattcttctgcggcttccacataaggcatggaggatgggcagcttaccaagatatcttcctcgcctgacacgatgaccaagtgcccctccactacgaacttc

SEQ ID NO: 4680 - DNA, 462 bp, Glycine max
aatacagagaaaaatagaacataagcaaccataaactaaacagtatcccttgcagttacctgcagctacgtcattcttggcatttttagtgactcttacagtttcttgtagctcctccaacttatggacccttgatttgtcagccccaaagctccatctacataggtaaagacaaatgcaaacaataatatttaacattaatcataaagattaagaataagagaaacattccttgtttcactcatatccatgctattcatggtccttggctccagatccatgagcactgcccttggcacaaaatatctactggtttggatagctcaactactttagaaagtgttaattcactcaagcaatgtgttcacattcttaaaggaaccgcaaccatctcattcctacagccagcactagacacttacaatcttttttatgacattattctactctctgatagtcaca

SEQ ID NO: 4681 - DNA, 348 bp, Glycine max
  unsure (1)..(348): unsure at all n locations
caagcttttctctgtacacctacattcctatacatgaaaaacnttttttgtatacacacgtattattaaaaaccctttctctttatatcaacacggtctatataaaacatctattccttttcaaagatttctttttcctttttcaacatacactcgttgttttataaaaaaattttctttatatacactcattgctcacacaccagaatttcttttcacacattatttatacacacaaaatcttttcatacactctttatatacaaaaactcttttcttttctttatataagatatgacatttgttcacaacgcctctttctttttctattcttggtggtatcatgat

SEQ ID NO: 4682 - DNA, 484 bp, Glycine max
  unsure (1)..(484): unsure at all n locations
tatgcgcatatntccttacgaacgttcactagcacaagacattctatttaactaagaaaagtgcacccatatacagtcaaggcagcttcgttacctagattatttacatgtacttccaaggtgtatttgttacttacatcatacacacctccttggctgaatttacatacatgcatactcaaagcattttggggtaccaaaaattgtacatgtgcacatcttggtatttctaatacctatacatacacaaacttcatgatgaatcttgactacctacacaataaggtgctacatttcatgcccttttcaagtttttgctacctaaagccgcatgcaaattcaagtatattttcctttgctgactaaaattgtattcaaattaaaaggtatatatttntttgtaatgtaatttctttacataacatgcaacatatttatatatatttttttgtgagacattntgactaccaaaaaatatatgtac

SEQ ID NO: 4683 - DNA, 343 bp, Glycine max
agcttcgacattcaatttcaagcgtctcgatatatgacgggactcaatcagacatccgagtaaaaagatattgtcgtttgaattggctcagagcttctacattcaatttcgagcgtctcgatatgttacgggactcaatcagacatccgagtaaaaagttattgttgtttgagttggctcagagcttcgacattcaatttcaagcgtctcgatatatgacgggactcaatcagacatccgagtaaaaagatattgtcgtcttaattggctcagagcttcgacattcaatttcaagcgtctcgatatatgacgggactcaatcagacatccgagtaaaaagata

SEQ ID NO: 4684 - DNA, 303 bp, Glycine max
atgtctaattgagtcccggaatatatcgagacgctcgcaaatgaatgtagaacctatgagccaattcaaaacacaataaccttttactcggatggttgaatgaatcccataatatatcgagacgctcgaaattgaatgttgaacctctgaggcaattcatacgacaataactttttactcggatgtccgaatgagcggtgttatatattcggacgctcgaaattgaatggtgaacttctgagccaattcaaacgacaataactctttactcggatgtatgattgagtcccgaaatatatcgag

SEQ ID NO: 4685 - DNA, 354 bp, Glycine max
  unsure (1)..(354): unsure at all n locations
agcttccaagttntgaatctgaacatgtcttttatgaatgtctagtaacaatctccatgaaaatacaagtaccttggagtgcgattcgctttcccagaatttactgagttctgagtggagagtcttgcagtataaaacatgtaattcagactaaattaagcaaaataaattttcacaacaagtattcaatctttgcaaaaataaaatgaatctatgttgaaaatctcaatatttttaaaattggaccgattaaatcaatgaagtcattggttcagcattaataaatataaaactctaactctataacactaaaaactaataaaatataataaaaacatcatttcattgttcata

SEQ ID NO: 4686 - DNA, 479 bp, Glycine max
  unsure (1)..(479): unsure at all n locations
taatgaagaaataaaaataaaagtttaacaattgactattntataaagaaacaacgaanatgaaataatatatcttgtgtatgcgtagctaggtatgtatatttgaattaatcaaattggattttatttcatgaagataagtatgtgcgtagagccatagtgaaagaaaaagacatatgaagcttcgtagaaaaccaagtttcctagagatcgtagggccatagtaaaaaaaaaaaaaaagacatgaagcttcacagaaacgctataagcttaaggctataagtttgctttgttttattactatggagacccaacactcctccatctacagtcatacaaacctttattctaagttctgatggctgtgcgatcattctcttacgatgtgttccttagcttccgaggggaagatactcgttatggtttcactggcaatctctacaatgttcaccgggaaaggggagttcacaccttcattg

SEQ ID NO: 4687 - DNA, 471 bp, Glycine max
  unsure (1)..(471): unsure at all n locations
agcttgcaagttggagaccaattgtgcgagtccatcaaggctcccatttcagaccaaatcgacaacctttgttagctgttttgaggcataactaaaactgtgagtcatgttagggcttgctttctctctgtttgaaggcaactctattctctcccttggaaggcacggttctctgttcaacggtaacaaaaaaaatccctgttttgccatcattttgtttgaccatatttcagatttctctggcaattttttaaatttcatatattttccctacatcagaatgaaaaatgggttcaaaaccctttagtcattcaaagaatgacacagatggttgctgctctgctccttagcaccacttctctctgaatgatgacttattntccagcagagccttgcttttccattagcccagcatgtttttaagcagcccttgcatgcattctggaagacccttaactattgcaagtctac

SEQ ID NO: 4688 - DNA, 344 bp, Glycine max
acggagactgatctatatataggcttgctaagggtagagagaggactactagatatatggatcacctatagtgcgttaaggatgaagaaagctaagtcttagggcatgaaaaagatatcaatgaaatgtggaacgcgtatttacacaacttatttactgagggatatggatatcactctagccttctacacacaatatacgaggaccggaactataattactatacgctgattcagaaacaggaagcttatgaagcgttgaaaacaacgattactggttacgcggaggggccagacaacacacctatagatgtgtgcactactcttggagatagaggtcttgag

SEQ ID NO: 4689 - DNA, 464 bp, Glycine max
  unsure (1)..(464): unsure at all n locations
agcttgtagccattagaagagaaagaacatgtgattagtagtatgactgaaaatgttagttagttgtcaaattgattgtgaaggaatgcattaactgtatcccggtgagagtctgatccttaaattttgagagaaatgactatcatttagtactgaattttgcatgaatctctgaagtatggaatgaatgcatgaaattgaggatgatgaaggccattttttattatgacagccacttagccaaaaagctgatcacgtgcttgaatgatttatcccttgcacccagttttgagctaaatgaatgtttcattgatggaaccttgagcctatacagttttatctcctgctaccttcactactaagaaagggctttctacatcgccttattaacatcggctattgctaanactgatgtcaacganagcgcgatggcatctntgtaattaaatggagttacttaacat

SEQ ID NO: 4690 - DNA, 473 bp, Glycine max
  unsure (1)..(473): unsure at all n locations
tccctcatctcctacgttgcntttctcttcttcttgctctccattgaagcctccattaaagctccaaactttgctcaccatttctactccaaattgcaaaaggaagccattttcggagtcgtgaagcgcacctctacgttgtgggacttcgaatttcaggtatgggtggacttcttctcacatgaaattcgtgggtattgggtttttgggagatatggtgggtagttctactaggtttatgccttatggtagttatttgtgaaggaatttgttgaaagcatgctaaacttgacatgtttgatgtgagtaaagctacccattctgttttagggttttatgatgatgctttgtgatgtttgtgtgctgaaattgttaatagaaaactggtagagatgatggggaaagttaatttacggttaaatgtgagaatgacaatgtggtaggtagaaaagtgtgagattttgagggttaga

SEQ ID NO: 4691 - DNA, 476 bp, Glycine max
  unsure (1)..(476): unsure at all n locations
agcttcgcgagtgggcttacttgcatgtctagttctaattgcgaacatgcatctatatcttctagtagaattttaaatttcactattttagttaattaaatatcttgtaaaaatgccaaaatttcataaaaaaatgttttgctctgtaaaagtgacccatccaaacattgggtgtaggaaattcaattgaaagtcattcaaatatcatatttttctttcaaattctaattgcccatctaaacgtaggataaagttgttctgcttaagctttaagagcctattatttcttgaggaattgtcgtagtaccttgagacataaatccataacgacataaatctttaacgacaatgtcatttgatacgtcttttactatacatttctcattttccaacacatcgcactgatttccagtgaaggcttgattccactctgctngtttgagaccttcaacatctccttcaccactatcttgctg

SEQ ID NO: 4692 - DNA, 478 bp, Glycine max
  unsure (1)..(478): unsure at all n locations
tcagagatctgctagaatatagcttcagcctctctcttgttgttgaggttcttatcnaggtgccacttcatggctagccttcgatatgctttcttgagatcctcatctttggcgcttctatctacctgaagaatcttgtagaagtccacgcccatgctttctctgtttttttcttcactgctatgaaacaagataaaggaggaattgtgaattatctcatatctctctctctttacagcatcatgatatcacgttccttctgatacaatacaggtaccgggaggaatagatgtcgatgctgctgctagtccaatcccaaatgtggtataaatatatcatttatttataatcttatgttaatttaacctagctaatagttgaataataataatcataataataactataataataatagggtaggtatatattccttgacattcttttaacttgtagactcttatgtgatataattctt

SEQ ID NO: 4693 - DNA, 465 bp, Glycine max
agcttgtaatgttcaggaatgtgtgaaagttgcctcttctcttttgctaccatcaacaaatccaatgctgaaacttacaggttattggtgggtaaattaggggagggatctgtgaccagattcgatcaggatccattacttggtgaaaattcaaagtgctgttcttgttgtaatgagcaatgggttttaaaaggttatgatcgaaggttggtaattaccaagtcaattgggtctggcaatgctgattttgatgaatcaaacgttgttggaaacaaatttcacaagacaagaagagctaaaccatttgtatcatccagagctacacaccttagaaataaacaggcagatcctttgtctcatgtcggttacactgagctaaagattacttcggatactgagtctgaaccggatgtttccttatctgatgatgatggtacgagcataccagttcacggtacatatgac

SEQ ID NO: 4694 - DNA, 464 bp, Glycine max
  unsure (1)..(464): unsure at all n locations
ccatctatgcaatcaaggggttcacaatcacaatggaaatttaattttcatcttttattacttacttgaccaaattcactcacattctataacatactacatatatgctacatctgatctgatcatatcttactgatatttttatactagaaaattatatatatgtatatatatatatatatatggcatctttttaaatcaatacacacgagatgctggagtttttgtttccgtagtcagaactcatgcacgtagagagacagtatagtcaattaatatgttaattaggtaccctacacccacctgtttccaagaattccatgtagctntaagatggtatgtacttcttctatgctgaatttccctcgtttaatatcaggcctcaagtaatttatccaacgaagcctacaactcttgccacaccttaacaaacctaaacaatcatatcatatcatatagataag

SEQ ID NO: 4695 - DNA, 514 bp, Glycine max
  unsure (1)..(514): unsure at all n locations
atcctgagagtcacctgcggcatgcaagctatgatcaaatgactaatattaattggcaaaaaagatatttagcacatagccaaaccaacttcactattcctagatagaaattccaatattctatattacctgctcattagctgtaggaggaaggcctccaacatacacccgcctagcatgtcatgtagcctgtaaattcagtacatcaaagataggccataatcagggaaagtcatgctaaacttaaaatgaaacttatataagactgtagtcagtctcagcaagcctccatactcggaaagactaaacttataatgttgtgttgacgaagttagtgtgtttctactctttttctataatgactctttttcttctcaatgaaagagaatattttctcccagcagcacagtgatactaaacaaacaaatgcgcaatanaaagatacacatgtataaagaagacagaacacacctttcacctacagcagcacatgatactgtgatatctgtatttt

SEQ ID NO: 4696 - DNA, 354 bp, Glycine max
  unsure (1)..(354): unsure at all n locations
tactcaagcttaacctcatcgtctctcacagtctntagagttgggagccaatccaatccttgtgttcggactctcagccacttatgatagccgccgatgatcccattactgcttcccctaagctctctgtcctttcttcacgccgcatcccatgccttgcgaactccttggagtaccctcaggttgtggtcactgaaaccccgtgcgatgaaaggcgtgatgctttcgtctgatggcactcctctcatggggtagccaagctgtcttatggcgaggacgggattataattaatacaaccccttgttcccatcaagagaacatttggacatccttcgcatgaagatagaatcctg

SEQ ID NO: 4697 - DNA, 448 bp, Glycine max
  unsure (1)..(448): unsure at all n locations
agcttgcagatggtttattcttggaatcttgtcgagaggttgctacaaagtaccctggaataaagtataacgaaattattgtggataactgctgtatgcagcttgtttcaaagcctgaacagtttgatgtcatggtatgtgtatttacattctattctggtttgctgctgtttatgcacttatgtaattttgtctaatgtatttatgcagtaagcacacacacccttgagttaataacttgtacaagagaaattagctgagaaatgagtagttgcacgaaagagagtgaaaagttataacaaaagctaagttgctctacgataaatcatgttggtccaatcaaagaatatcttaaggttaattagaacatataaaacgtaggaattgagacctttccaaatctggctgttatgttctntaagattgttagcagtgggaaaatggatag

SEQ ID NO: 4698 - DNA, 476 bp, Glycine max
  unsure (1)..(476): unsure at all n locations
tctacttgtgctgtcttcatgcgattctntntactccctccaagaatattatgtcgtaaatcacaacggttaaagtgtgcgcaattgaatttcgaacaacatatccaaatttcatgaaaatccaacggttaacgaaaccgggatcgtagttttactgagaccattttgggtttctgcgggaaaagagaaagctacggtacaaagggtattagctctgacatgtttttacaattcccaacggtgaaaatgttangaattgggttgcgaacatggtgctcaaatttcatgacgatccaacggtgaataaatccgagatcattgtttttctgagataggtttggttggctgcgggaaaaagaaaaggttttgggaggagaaggagaaaaacgaatatgagagaaataagaggtaccgtcagtgtaaaaactgacctagcgctatntatagctagggctaatctatntatgtatttatta

SEQ ID NO: 4699 - DNA, 453 bp, Glycine max
  unsure (1)..(453): unsure at all n locations
agctnttaacatcggttactaaccaatgttgaaagtaccaacgttgaaagtattattgttaacatcggttatttaacatcagttaacgttttaacatcgggtttttaaaaaaccaatgttgttattaggaattttttttaatatattgtctattttttcaataaatccaaaaattaatttgcaaattttaaatcataccacacagcataacatatataatttgaattatattttgaaacagtttttagtagaaaaactccatgacaaatttattaataactatgaataaaaaatgttcaatgttaaaaggagacatggattgtaaaaaatntaaagcaaactagtaaactaagtaaactaaaattacaaatttgcctaacatcctaagtttcatttctagctttcagataaaacataagttaataatataataccaatcataacaaaatcaaa

SEQ ID NO: 4700 - DNA, 461 bp, Glycine max
  unsure (1)..(461): unsure at all n locations
ngagccctcttcgctcggtgtatggggtgccccaaacgcttatttaaaattgaatctaaccagccgccactaaaagaaagtcatcgcattaggaacattcatacatgcacatgcatatgcatatcttatgatagcaaggagcagaatcatctcaggccataatcaaaagtcaagacaagtcaatggcagaaatcgaccaaggtaagacgatgaccggtcacgattggtcgcatatcatttggctcttacttgcaggtacttagggatggaagcgaatgaaggataggatcatgatcgaccaagcgccaccccttcccggcgctaaacaagcagagaacgtcgctgcaaggcagcccagtatcatttccgttcgcagtttcttttactattgtttgttttaaataagtaatcgacacctaattctagtctaagtaggttcaagaaggcaaacgctagcccgt

SEQ ID NO: 4701 - DNA, 470 bp, Glycine max
  unsure (1)..(470): unsure at all n locations
agcttatgcgcatatttccttacgaacgttcacttgcacaagacattctatcaactaagaaaaatgcacccatatacaatcaaggcagcttcgttacctagattatttacatgtacttccaaggtgtatttgttacttacatcacacacatctccttggctaaatttacatacatgcatactcaaagcattttggggtaccaaaaattgcacatgtgcacatcttggtatttctaacacctatacatacacaaacttcatgatgaatcttgactatctacacaataaggtgctacatttcatgcccttttcaagtttttgctacctaaagccgcatgcaaattcaagtatatttttctttgctgactaagattgtattcaaattaaaaggtatatatatatatatatngtttggaatggattttctctacataacatgcaacatanttatatatatatatatatatatat

SEQ ID NO: 4702 - DNA, 490 bp, Glycine max
actcagcttcaagaaaagatggcctcagcaaattccttgtgtccagaagggaattctataaatagacctccaatctttaatggagagggttaccactactggaaaacccgaatgcaaatttttatcgaggcgatagatctaaatatctgggaagccattgaaatagggccttatatacccaccacagtagaaagagtttcaatagatggtagttcatcaagtgaaagcataaccatagaaaaacctatagatagatggtctgaagaggatagaaaacgtgtacaatacaacctaaaagccaaaaacataataacatctgccctaggaatggatgaatatttcagagtttcaaattgcaagagtgctaaggaaatgtgggacactcttcgattaacacatgaaggaactacagatgttaaaagatcaaggataaatgcactaactcatgagtatgaattatttacaatgaatacaaatgagaatattcaga

SEQ ID NO: 4703 - DNA, 466 bp, Glycine max
  unsure (1)..(466): unsure at all n locations
agcttgtgtcacaattcattgtgacagtcaaagtgccattcacttagcaaatcaccaaatgtaccatgagaggacaaagcacatagatgtgaaactacacttcatcagagatgtgattgaatctgagaaggtgaaggtagagaaggtttcaacagaagaaaacccgactaatatgttcacaaagtccctctctagtgtcaagttcaagcactgcttggacttgataaattttgaagatgcctaaagcagattggtagaagtgcagccttgaatcacaaggtagacacttgctgatttagagtcaaggtggagatttgtggtgtgtgactcanaatcacaaatgacacaagtgagaagactttaaagtaatgatgtcataactgttttcagttattataactgaattggttttggcaccaaagcatagctagagtgtacatatatattctngatcatgtaatgcaat

SEQ ID NO: 4704 - DNA, 413 bp, Glycine max
tggagaagtcctctatgattcgctgatagaagcctgcatgtccaaagaaactcctgatgcctttcacattgactagtggagggagcttttcaatgacatcaatttatgctttgtccacctctatcccccgagcggagatcttgtggcctaacactattgcttccttgaccataaagtggcatttctcccagttcagcaccagatttactttaagcaatcagtagcatttattaaggccttctccaatggggagtgaatggctaggtaatgcataacgagatcgacttcttgctctattgcctgcaccttgaagcgtgtgatactatcactgggatgttattttgcttcaataagttgaagagactttctattctcccactcatttctaagttccattcctatgtcctaacaca

SEQ ID NO: 4705 - DNA, 459 bp, Glycine max
  unsure (1)..(459): unsure at all n locations
agctntccaaagttttctgtttttccaaaccttgaaaacttgtactattcattcttttcattcccttctccctttgtcaaaaagaattcgccaaggactaaccacctgaattctttttgtgtctctcttctcccttttccaaaagaacaaaggactaaccgcttgaattcttttgtgtctcccttctcccttgtcaaagaattcaaaacgacacagtctgagaattcttttgattcttccctttcccatatacaaaagatttcaaaggactaaccgcctgagaattcttttgtatccccattcacaaagtttcaaaggtttaaccgcctgagaactntgtcttaacacattggagggtacatcctttgtggtacaagtagagggtacatctactctggtttgactgagaacaagagagggtacatctcttgtggatcagttctagtggagggacatcca

SEQ ID NO: 4706 - DNA, 468 bp, Glycine max
  unsure (1)..(468): unsure at all n locations
ctatttcatttnttggttcttatttttgaataagcttacccaaacaggacttagtttttgtagcagtgtttatggttgaagaggaggaatctagaattntttaggacacttgtttgactctagacttcatttgggataaaggtatttttcagcttccctgtggtattcttctcgtggtcttttgtaacaatatatggtaaatatcaaataaacctccataattttaacaatcttttaagcgacatttccttgtcaagtgttcttatcggcatgatttatgttctcccaggttctagtttttcatttttttttgtaaattctcttccaaaaatggatggtgacaggggtcaatgacatcaaatcatttaaatggtgttgttagattggtgtagctcgcctccaaagtcctaagagttataacgagtctgtttgtagggcagctagaggtgatatatcttctgatgtatg

SEQ ID NO: 4707 - DNA, 386 bp, Glycine max
agcttgctctccaagatacttcttccatttcagacccattatctacaaaaagatgagataaattactataaagtagccaagatatctaaatatgatactagaattcataaactaataaaaacaatacaattagagtcaaaacaaccctctaagtctaagaaaagataaagaaaatgccttaattagtacattaaaagtacacatatttggcacttaacatggctgagcttagttgtccagtcacttttgtgaaggaggtggctgatatcatcaatgaggggctgcaactgcttggacatagaaatcctggtgttaaccaattgaacggccaacaaagagtccatctctaaatgaaaatgcataggtgagatgcaagttccttacta

SEQ ID NO: 4708 - DNA, 464 bp, Glycine max
  unsure (1)..(464): unsure at all n locations
ctgatggtgtcgagaagaaatcacatgtttgtcatcatcaaaaagggggagaatgttaatgtatgtatacatgattntgatgatgtcaaagaagaatctaacaaggctgcttcaaatgataagtatttgcttcaagaataattcaagattgcttcaacaaacaaagccttgtttcaagattcactaaagaccaagccttgccttaaaacaaagtgctttcaagacatgcaaggctctggtaatcgattaccaggaagtgtaatcgattaccagaagacagggttgagaaatagctgttgaaaaatgttttgaatttgaattttcaacatgtaatcgattaccatatgtctgtaatcgattaccagcaatggaactttggaaattcaaattcaaaagtcataacctttcanattataactgtgaaattgattacacaaacattgtaatcgattatcagtggaaag

SEQ ID NO: 4709 - DNA, 391 bp, Glycine max
  unsure (1)..(391): unsure at all n locations
agctnntacaacagatttagtaatgacccactaacctagaattaaaataacttaatgccattaaccttgggaattaaaaaaaaaacttaatggctgagtgtaactaaaattgtggcaaccaaaagtcacccccaacagccaacaagtcagccaccatttggtctcccaaaaggctgatgcctaggttgccaattgggcccttattacaacttgaactaaacctactaaaaagcccttttagttgattaacccaaaacatatttttggtcagccaactttacaaggattgngccattatttagacaaactaaacactctanaaatgagacaaagtggtgtcatttagtccttctccatttgggccatgatacaactcacaaccttggacttt

SEQ ID NO: 4710 - DNA, 349 bp, Glycine max
tcattgcctaataggccaacttccaacagcaaaccccaagagactcagcataaggatgcacagaccaaagttgcgtatgtaaaaaaattgtatgaccaagtgaaggtgcaaattgcaaagaagaatgaaagctatgctaagcaagcccactagaaacggcacggagtgacacctgtacaacattatcatcttgaacgtttaaaggcaacagcttctcacaacggacggagatgatgacactactgatattcttctgtcgacattgcacagtctcttttacaaacgctaaccgataatgttgtctatggtaaaggaagtcatttgttttggtgttgcatactatctttac

SEQ ID NO: 4711 - DNA, 450 bp, Glycine max
  unsure (1)..(450): unsure at all n locations
agctngctacaaactaggaaggccttttaaagttactgaatcactcagaaacagagcctaccaactgaagcatttattcaacaaggcgattctgagaacttggaatgtcactcatctcaaattctattatagttgagcttgtaagtggtgatgtactctttttcctactctaacatttattcctatgatattttttgttaaagaagttttaatgaggcacactcgaattttgcattgaataaaagcattattttcatcaaaattattggctttatagaattgagaagaataactcatttctttgactaaagacccaaatcagggcataaataagactaaataaagatttggcttactaatagaccgacaactgcagtcgactaaagatagactgcaattaacttaagctattgggctaaaagaagaccaaanaagctanggtactcaact

SEQ ID NO: 4712 - DNA, 459 bp, Glycine max
tccttattcaattcaattatctatttctaattttatatactctataaaaaggggagtggtcatgtaaaaaaatgttctcaaaatttatgtaaaaacaaaatttgtaataatatattctaattaaataaaatgacaactctaaaacaagataataaatctaaattcaaagctaagacagaacgtgtgtaatcatttaaataaattcataaatatataatctcgaagtgttgtaataaaatactaaaattacagcaataatggcatttatgtagataatgaaatttagtaaatataaaataatttttgaataacttcaaatgtaaccataatcattaggtgtgttaaataaaaaaaaaacctaatttatgtaattactctaaagaacctaatttatcatggcagtataaacactatagaaacatccaacacgttccataatctatattatgataagtattt

SEQ ID NO: 4713 - DNA, 473 bp, Glycine max
  unsure (1)..(473): unsure at all n locations
agctntaanaattgaattaaaacgttcaaaaactgctggtaatcaattaccatatatgtgtaatcgattacacagtacaaactttgaattcaaattttaatagctgttgtaaatcagttttggccactggtaatcaattacatcctctggtaatcgattaccaaagagtaaatttgttgaaaaagactttttaacttaaaattcttggccaaaccttttgctacttcaattggaattcccttcctatttaatataccctttctaagactctagagactgtcttgatcatccatcttgaatatctttaatttctttgtcttgaataaagctttgagacgcatgtgaaactttggcatcatcaaaacattcagcttgatcctttgtctacaatctccccctctttgatgatgacaatccctgaaatcaagacaagctatatacaagatgatagcacgttcacacaacccttactc

SEQ ID NO: 4714 - DNA, 448 bp, Glycine max
  unsure (1)..(448): unsure at all n locations
agttattacaaaaagttttaacttctggtaatcgatatagcattntatcttagatataacactttatataagaagcatggtctattatctcgaacatctacaacactgttggatcaagtgacctcataataattaagaagagagggttgaattaattatgaacgggtcttgactaattaaaaaatttatccttcttaatgttgctagattcaatttggctttactactaagttatgagaaagtaaagaacagaaacaataacttagacaaaagtaaagcagaaataaaaagtacacaacggaaagataaaaagcgtaggaaagaagaagacaaacacaagatttatactggttcggcaacaacccgtgcctacatccagtccccaagcaaccaccggttcttgagatttccaataaccttgtaaaatcctttacaagcaaagatccac

SEQ ID NO: 4715 - DNA, 474 bp, Glycine max
  unsure (1)..(474): unsure at all n locations
agctntaggagggttggtccttgacatgatattagagcctccgtgattaagtggtcaaaagtttgatccttgcaatccattcctctaaataaaagctgaattccaacaactggtaaaataggcttgtgcattgactatgcttcaaactcaaagtgctcttgcatgagtaggccagttacttgaccttgacatctatcatgtgcactttattggatgctgatacgttccttaattgtttacagaagggaaatcggtgcaagaaatggtgaatgaagctcttagacatgttcccaatactgatggtttgtactatttttttcagctttgcataaaatttactttttccacagcatggttttccgtttgttttaaagcatatgatctgatggaaggctttgtttactatntaatgcagggaacaaaaatattgatgtggtattttatcttctaacaatcacattccaattatcagta

SEQ ID NO: 4716 - DNA, 484 bp, Glycine max
  unsure (1)..(484): unsure at all n locations
cgggaccggctatgataccagaggcagagtttaattntctcagttgaatacttgaatccttgcattctttatgtattntaatttgcttcatgctggtccttcctatacacatcactgactgagcatataggttgtacagaaggattagttgaagctaattaaatgtacaaggaggatgtaattgagagacttagaaatggaaagatgacattaagaaacctttttatttttcaaggaccagcacacaagttttttgctcaaaaattcaaattataatacgttagaaaccagtgagtagtgagtattgatagcttatcttccaaaacaaaaatatagaaagaaattcatccagaaataaattgttaacaaaagttgacaatatttctcaatctgaaaacacgcaaagttcacagtgctttgcagataaggagacacatgngaggctcactgtctaaagtctatcgtgctttcccagactgctctg

SEQ ID NO: 4717 - DNA, 477 bp, Glycine max
  unsure (1)..(477): unsure at all n locations
gcttatatagcatagganaaatgagtgttactttaaatttaattacaatgtattttataaagattgtacattaaaaaaaatcagttatgtatattgcagtttatataaagatagagtataaaaatgatgggaatatattagacactaacttaaaagcaactcataacattaagccattataaattcaacataccgtacattgataattcaacatagtagcctctcatattttatattatcttcataatgtgctcaacattttcaaatgccgtacaatgtataggagataaattgaataaaaatagaagaatcagataggttgcagtgaaaaggtcttttcttgaagttattgttggagtattatacctagcaaattgctatacgtacaatgaatcatgaagtcaaatgtgcaatagaggataaccaccatctgtatgtagaatcatgttaaatattatatatggatttctgagagat

SEQ ID NO: 4718 - DNA, 457 bp, Glycine max
  unsure (1)..(457): unsure at all n locations
gatgttctcaaatgtaatattggaacatttgcttggagcttagatatcgtgctaggtatagatactaatttcctctatcacaaattggctttagacccctcggtaaagccaatcatctagaaaaggagaaagttaagggaggaaaaaatgaaaacaaatgctgacaaaacaaaaaagttgatattacatttcagagaaattcagtatccgacctagctggcgaatgtggtgatggtgaagaaatcaagagggagtggagaatgtaggtcgacttaacaaatttaaacaaagcttgccctaaggatttgtatcccctaccaaacatcaattgtctagccaatagggcctcgggttaccaattacttaatttcatggatgcctacttggggtataatcgaatcaagatgcatcccatggatgaggacaaaacaactnttcatcgtggacaatccaatta

SEQ ID NO: 4719 - DNA, 280 bp, Glycine max
  unsure (1)..(280): unsure at all n locations
naagcttgagccanaatcctgactcaccataaaccttgacccagggtgagaatgccaatccttaccctcggaagcaaaaaaagaatagaggggaaatttccgatcaaagaataagagaaggaaaattttcaatgaaagcaaaaaagaaatgaaggaaaattccccaatcaaagagtgggagaaagcaaaaaaaggaaaagaaggaaaattccccaatcaaagagtgggagaaagcaaaaagaaaagacaggaaaattcccaatcaaagaatgggagaaag

SEQ ID NO: 4720 - DNA, 308 bp, Glycine max
  unsure (1)..(308): unsure at all n locations
ngatgtgaganagcgtggaagagtcagtcttcctacttttgtttgtttaccacagagtggtacctggagatatgtcgcgggggtcaggagaccttggggacatcatgtggggtgctattgcccaaaactaagcttgaccaatcctgacccaacccgggcatattcagtcagtgagaacctgtgatgtacctaaacaggcgagctcctgacagtcaatcaattaaagaacaaagaccacaaagcaaggaggcttgtgtggtggctggccacctatggatcttgagtgatatctggaattcggcctctga

SEQ ID NO: 4721 - DNA, 286 bp, Glycine max
  unsure (1)..(286): unsure at all n locations
agctngattgtggcatgttgcatgttgctcttcatcaggacgacaccaagaagccggtcgctcttgctgacgaaagtattgcggattactgcgtgactcaattcagtgccataccacctcagtgagatgtgttagtatatggatgtgatgtacctacagaattgctgatgtgcatgcactaatatgatttgggattaggtgtacctgcagaatggtgtgtgacacttgaacaacatacactatccgtacattgttacgaatgattgagtattgatatcatggatac

SEQ ID NO: 4722 - DNA, 228 bp, Glycine max
tacagattcatatatcatattacatcttctgttatcgaatccagaagcgtacatgtctgataccattgtgcgataccgactaaactatacaacttaccgtcatgcgttactatctttcacatgtaatgtccaactccagaggtgacaaatattggacgagatttgataacataggactcgtataatatgacaatcctgcggtgattgtatcctatatcatagaagtta

SEQ ID NO: 4723 - DNA, 439 bp, Glycine max
  unsure (1)..(439): unsure at all n locations
agctngagtttatgaaaatggacacaaatagtgggatgttgagttagtttttgggggatttcaatttcaaatatgaaatgtgttcattttattttgtgaaggtttttggtccttctacacagcaaatggatctttatgaacaagttgttactccaatagttaatgaagttctagagggatttaattacactatattcgcgtatggtcaaactggtacgggaaaaatctacacaatggaagggaaatgtaaaaaggccaaggtatgctttagtgttttgatgttatccacacgcagattaatgagttaggttagtgacttcatttgagtattgtactacagagtggtcctaatggaaagttgcctctaggagctggagttattcctagggttgtcaagtagattcttgacacacttgagagccagaatgttgtgtacaat

SEQ ID NO: 4724 - DNA, 459 bp, Glycine max
  unsure (1)..(459): unsure at all n locations
ctcagcttatcttgatatgagtatgtgccanatgggaattatcgtacacatctgtcaggtttgtgtggcctactataatagtttgcatattattaagtgcataaatttcaaaaattatttgcctccctatctattactagtaggcttcatgaatagtttctgttattaattgtcactaatatataaagaagacctcataggatgtgtcttcataaacgagtctaggttgaatttttggatttagttgctattgaagaaggaaaggtgtctccaaatcaaaatagcatggagaaattttcctcttcatttagaaacagttgcattcgattttgctgctgaacaatagtcatacattaaatttgataaaactagaagccaaggtagtactctcctggtctcaaatataaagaaaaaaatgctaactaaaaaagttagttaatcatatntaattgtattaat

SEQ ID NO: 4725 - DNA, 430 bp, Glycine max
  unsure (1)..(430): unsure at all n locations
agcttcctctgcaccaaatggcttctcctataaatagccatgcangggaagggttaaggggggctggcaattgaaggaacaaaaagaaaaacgcagagaagaagaaaaaaagcaaagttgaggcgccgccaaattaaaacatggatcatttcctacatcatttctcttgctagccttgtaccctgtgcaacagtcgacttgtttttcttaagattttgatgtcatctatgtacccttatcgttggtaatttcattttatttataaggcttaattctagtcgatcactaatgttatgaaaattggtttttttagtgagattggaaggtaataaacacaacaaaaaatgaaaaataatcaattcacaacccaacttctttttatcaaatatcacttgaaatcatgtcaagatccagcgccttaacgattctc

SEQ ID NO: 4726 - DNA, 465 bp, Glycine max
agcacgaagagtctagtaatgaagtttcaaaatggattattaaattgttattatatgatacaattactataaaataaattgggtagaaattctaagtcaagataaaaaaaaaccttatgaaatgcatatagtgctatgaaaattcacttgtgcatttttctagaagaggttttacaatagtaagaaagtaaaggaaaaatgagataagtattccttgcacttctatatatactagtgtgtgccctggagcaagatggagcacaaacatactttttgatgtcctcaagaactgtttttgcacttctatatatctgcaaataaacagatatagcgagtcaagtacttgaaacacaactattataatttataacatgtaaaacaatagagtaaattacagcaacctcctttcaggtttacactatttacacatatatctcctcctttttaatcatatatttggcacct

SEQ ID NO: 4727 - DNA, 471 bp, Glycine max
  unsure (1)..(471): unsure at all n locations
catgcaagcttgagcttagctacacacactcctctaataactaagctcacctccttgagaagcttccttgagaagattcctaaagaagctagagcttagctacacacaccccctataatagctaagctcaccccatgccaaaatacatgaaaatataaaaaaaagttcctattacaaagactactcaaaatatcctgaaatacaaggttaaaaccctatactactagaatggccaaaatacaaggcctaaaagaaggaaagaccaattctaacatttacaaagaagagtgaatccaaccttgacccatgggctcaaaaatctaccctaaggttcatgagaaccctagggtcttctntagtagctctagcccaatcctctgggagtgttctatccaatatccttgggggggaggattgcatcagaattaacttaaacttacccaaaacatatcatcataacaaacatgagat

SEQ ID NO: 4728 - DNA, 453 bp, Glycine max
gcttaagccaggccagactctcgtgcatgtagtggcttcttcaagataaatgtcagactccagcaaataatctgatttcaagcttaaataggtgggtcggttcgtgctcatgcgcttagcgcaaatctggatcgcttagcgcgcataagtggatcgtggcttaacacgcttctcttgcttataggatgagctaaagcagtgcgcttgatgacctgcagcggagcgctcaatgaacctgacagctcatattcttctggattctttctcgcacttagccactgagtgtcgcacttagcgaatgctcgctaagccagcacattggcttatcgagaaggtgaaaatagaatttgtgccactttgcctaattaacctgagattgagagaaattgattattaaacacacacatcacatgtatgaatgatctattacctatatctaacataaagtactta

SEQ ID NO: 4729 - DNA, 431 bp, Glycine max
  unsure (1)..(431): unsure at all n locations
agctntgtgaactgatttcttaagcacaacgtgattnntgaacctttggacgaaacccattgtccattgatatttgtttgagaaaaattttcataagttttttagagactaaccttttatccatcacaccattccaaccctcttttagtatgtttcaagtactttagttgttattagagcttggcctctaggttgagctcttaacaaagtaaaagaaagaaaattcctgaaatgatggaagaaggatatgttatgagcaagcctctcatgttcaagggagccaactatgactactggaaggaaaaaaacaattgcctttnttgaatccactcacattgatatgtgggatatcgtagaaaagggcaatcatatcctttagatgctcagaagaatgagatttccaaagacaaatggacanatgaacataagtc

SEQ ID NO: 4730 - DNA, 444 bp, Glycine max
  unsure (1)..(444): unsure at all n locations
cttgtgtcatgagtntcttttatcanatcaaacatcacgtttttctcttctgagaagaaacattgatagccctganattgtgccctcataaggctatattggtattgtgtatcgccttgtacatcccagctttcgtattcatcattgaataggcagggataatctctatgatcctctggtaagagtttcataacatggcaaggataattctgagtagtgaaattgctcgggcaggtcgttatcttgatggcaatgtagtccatcatttatgcttggattaagtttatggcctcattgattgagggattaaatccctcacatctatcagatggaggaatcaagattgattccaaacatccatagtccaatagactntntgcggaaattgttaagttttcatatccgaaggacttaactggtccatgtctagtctggcttttctaa

SEQ ID NO: 4731 - DNA, 411 bp, Glycine max
  unsure (1)..(411): unsure at all n locations
agctngaaggtaaactagatgccttggttaacctggtaacccaactggccatgaatcaaaaatatgcacgtgtcgctagactctgtggtttaggctcctctgccgaccaccacacagacctttgcccttctgtgcaacaatctgaagcaattgaacagcctgaagcttatgttgcaaacatctacaacagacctcctcaacctcaacagcaaaatcagccacaacaaaataattatgacctctccagcaacaggtacaatcccggatggaggaatcatcccattcttagatggtcgaatccttcacaacaacaacaacaacaacaacagacttattttcaaaattctactggcccaagcagaccatacgttccttcaccaatccagcaacaacaacaatagcaacagcccc

SEQ ID NO: 4732 - DNA, 403 bp, Glycine max
  unsure (1)..(403): unsure at all n locations
tttgtaacttgacttgtagagttgactcgtaaactnttacataataganaaaatcataataataagcctattaatgacatatacgcttaacaaaatactcttacaccaacaatatttaacatttcaacttcaaaataaagccaaataaaaaatcacaatagtaaagtgtaacaatacattagtactgagatcaaaatatgaccaaatatatgagttaaatgtttatactctgacaatttaaaacttttgacactgtcagtgtatagtattttttacactgtcagtgtataaattcataaaaatacaagttattaaagtgaaaacatttaaaaaaggagttcctttgttcaaactatttgagtcatgggaaaacattgtcattgtggggtcggngggggggggg

SEQ ID NO: 4733 - DNA, 392 bp, Glycine max
  unsure (1)..(392): unsure at all n locations
agcttaataaatctatatatggtttgaaacaagccttcagatagtggtaccctaagtttcatgggataatttcttcatttggttttgacgaaaaccccatggatcaatgcatataccacaaggtcaatgagaataaaatatgtttttttgttttatatgtagatgatattttacttgcagccaatgatcagggtttgctacatgaggtgaaacaacttatctctaagaattttgacatgaaggatatgggtgatccatcttatgtcatcggcattaagattcatagagatagagttcaaggtattntaggtctatcacagganacctatattaacaaaattttatagagatttcagataanagattngtcatcaagtgttgctcccattatg

SEQ ID NO: 4734 - DNA, 301 bp, Glycine max
ttcacccgacggagacactagcaaaaactgatcttctgcttcttggacaaacgcttgcaggctgggggcaactaaattctctctcccatcagaccttggatgcaactgcgatcgtatacccatatcagatcgatcttgacgggcattgaaaccatgcttcgtgttgccttgagatgctaaaaagcataccaatacagtgtcacaaacatttctctccacatgcatgacatcattacaatgtgtaacgtcaagatcacaccagtgctaacgatcaaagaaaatggacctcttcttccatatg

SEQ ID NO: 4735 - DNA, 127 bp, Glycine max
accagtttttacccctaactcccacctttttgtaatattatttgtaaaaaccgtcgcatatcctcatggtaatttactcctaactacaaaaactttctttttttctaggtaatctgattaaaaggac

SEQ ID NO: 4736 - DNA, 338 bp, Glycine max
agctttcaacaaatgtcttcacaaataatcatcacacagcagaaaactaacaaaactacccctcatatctcccaaaaccccatacccacgaaaatcaagagggaaagaagtccacccaaacctgaattttcgaagtcccactcgtagccacgcacttcacgactccgaaaatgctctcctttcgcgatttggagcagaaatgagcaccaaaggttgaagctttgttgggcaacaatggtggatgggagaaaagaagaagaaggctgcgtgagatagagagagagatagagaaaaggcttctgaatttctgctctggctgaacgaggagagagaaaagc

SEQ ID NO: 4737 - DNA, 146 bp, Glycine max
gctgaaccattttatcaataaacagcaagttgatttttatttataaaattagagtttatctcttttatcttagcgagagtgattcctctaaattcttgagtgattcaagatcaccctggctgcatcaatagactttcacaaccttt

SEQ ID NO: 4738 - DNA, 377 bp, Glycine max
agcttgaagaaaatactcttaaccagagcatccaactgttaaaagcaaattttcacagagagagtttcaataaaatcttatgcatccaaagataagatagaagcaactaaaaataaacaagttataatagaaattagagtaaaaacacaatgtttatactagttcactcaacttgagctacatctagttctcctttatgacaccatcaagtgttccactaatcaaattgattacaaatgagtttttactttgccactcttggttacaacaagtattttctatgccacttctagcttacccttaatctcttcccgagattaagaacacccaagtattctttgatcactaaagagcttcttgactttgttggctttagg

SEQ ID NO: 4739 - DNA, 287 bp, Glycine max
tagataccaccagcatcaaggaattagggcggttgatggaacctctccaaatgcaagctttccgcaagacttatggaaagatcttagagttgaccttattagaggtgtccatagaagccattgcatcactcacccaatactacgaccagcctttgagatgctttacattcggagactctcatatatgtccaaccattgaagattttgaggagattctatgatgaacccgttgggtgtaaaaacgatgtgatagcctttggagaatcggccattacttcaaaaatgcc

SEQ ID NO: 4740 - DNA, 179 bp, Glycine max
agcttttaaggagacagtttcgaataatgctcttctttgtaatgacaattaataagtctcaagggcaatcactatccactgttggactttacttacataaaccattgtttagccatggccaattatatgttgcaatatccagagtcatattaaatattgatgtaaacgctaatatatga

SEQ ID NO: 4741 - DNA, 112 bp, Glycine max
ttatatgataaaaacatataaataagtttatctacgtcttcttgtcttgcatttaattgattttggacgaacagacgatgctcacggtatacactcgagcgtcctgggaaag

SEQ ID NO: 4742 - DNA, 1020 bp, Glycine max
  unsure (1)..(1020): unsure at all n locations
agaactaaccgaaatggttatancgaacaacgctcacggcaaaagtgaannggacaagggaanaggcaaacccaacaacgtcataccagntcncnnccaagcacgaggttggatgcgatccttcgtacgnggaccccntagagnnaaacagcaagcacgccagctataccagaaacgaccaccagcgagggagattgttattttagcgccgcaacgagagagagacagcatgcgaacaaacaacccggcatcgcacggagggccagcaaacccagaataccgcaaaaaagcgaccgcctgcaccacacacaaaccaacggaaacactcggggcgcgccacggacgaaccaacagcacggccagccataccaaacaaagacgagcggtcaataacgcgaacaacaacgataccaaccgggcacagcaaacgaaacgcagagggcggcgcgcaaccaacgacacggggggaacactcccaagacacggagagcggcacggcccatcacagagagggcaacaagcgcacgccaccacaggaccacggcgatgcacgcacccgggcaaacaaaccgagcaaccgcacggaaggggacgcaaaacaagcgacgccacggaagaggagaacggaaacgaagggaacagcacgaaggcatccacagaacacgaagcaacaggaagaccgcacagctaccaaacggccgaccgcgacggccgagacgaacaccgagggaagggagacgacggagggagggggacacgcccgcacaagcacggcaatggagcgcaacgacacaacaggagagccaacccatcgcaacgaacaacgcacgcatcacggacgaatcgcaagaaacagagtacacgacggaaacggcaacgcaagcgacacgtaacgaaacggaaaggcaccgcgaagcaccgcgcacgagacggccaaagcgcgggcaacgacagcgcaagcgaacatgaaagcgcacgctacgggaaacggtacacgcaccccaaggacagacgccaggc

SEQ ID NO: 4743 - DNA, 272 bp, Glycine max
atggattctatccacacagcagtcaatgccaaaattgattctagttttgtaacggtccaccacaatgatggtgactccgttttctgcattttgttttcagccgccttctccactgcgagtcatcaacctcacatgaagctggaggttccaccattcgatggccacgatccccttggctggatatttaaaatatctcagttctttgatatcaggccattctagagcacgaacgcctcaccatcgccgacttttacatggacggtcccgccttg

SEQ ID NO: 4744 - DNA, 246 bp, Glycine max
tatggttcgacttggtgcccgacttatacgagtaagatgatggctgtggatccttggcgtgaggattccttatatcgaaagtcttcttggcggatggtccaggcggcagcgtgaggatcccttgtatcaaaatccttcttggtagaaagttcatgcaacatgtcccatgggtggagcggtggtgcaagtattttgaacatgtgggctttaatggccaccttggaaatactcatggatgaaaatggc

SEQ ID NO: 4745 - DNA, 482 bp, Glycine max
agcttgatttatgagttaattttagccttagcttcactttggttattagtcaatacattcaaggaaactttcaaagaaaaatgtccgactgatttttttgatttattttattattatttttttccaagatattttgattattttgttattttttttcttttttggtttaaccgaggttacagtgtgaacaatcagttagattttgctttaacaatgattaaacaagagtacaacgcaaatgattggttgaaattcattttatcatttattaggcgcgataatggcttaaataaaacggttaaagcacgttaaaatggaaggaaaaaaaatcaaaagtgaacgagatgaagatgaaagcaaacaaaacaagaaatgaattgaaagtctcagattcgaacatttaccggttgaagaacgaagaaaaaatgaagatcggacgaagaacggaggaaaatcttcacagatttgctcacggaaacgtc

SEQ ID NO: 4746 - DNA, 498 bp, Glycine max
ttgcagatttggtcttcgccagtgaaaggatcgatgtgggtctgaaaaaaaaggcaaatttgatcatcctactaagacgactgagaaaactggggcaaataaagagggtgaggataagggagaaacccatgttgtgactgccattcctgtacgaccaagtttcccaccaacccaacaatatctttactcagccaataacaaaccttctccttacccaccacccaggtatccacaaaggccatccctaaatctaccacaaagtctgtctaccgcacttccaatgacgaacaccacctttagcacaaaccaaaaacaccaaccaagaagtgaattttgcagcgagaaagcctgtagaattcaccccaattccagtgtcctatgctgacttgctcccatatctacttgataattcaatggtagccataaccctagccaaggttcatcaacctccatttctccgagaatacgactcgaacgcaacgtgtgcttgtcacggag

SEQ ID NO: 4747 - DNA, 490 bp, Glycine max
agcttatcatcatgatcctgccggactatctttttgaggcctatttgccgcttcatgtgggcaggtatcactttgttcacaagctctggagaagcttcggataactggaaacagagagaattacaatatagtagtccatcatttatgatttttagctaggatgtttataaggatcataaaaaggaacacagtgcatgtatattatttttcaatgcattgctttgtgtactcaaatagacaaacacacaaagacagacacttaaaatcaaccagacagatataaagctaagaaaatggatctggggacctttctcaggcctctagacttatttagacctttttaaaaacagtatcaattttattcctaattttgaaattctgtacaaatagtttactgccaaagcacaaatttgatgaagaaagataatttaaggacttacttcctgcttgaagtaaataaaggaggaaagggcgaccatttgcaggcgag

SEQ ID NO: 4748 - DNA, 385 bp, Glycine max
tcttctttcttctgctctctggagaattttcttttattctcctcattcaacagcgccccagagtactggtaatcctctggcttcataaacggcaacccaccgggtgcttccttgggaacatcaaactgctgcccgcgaatctcctcaagaatttgataaagaggagtccccaaaggcgcatgagtggcaagaagcttcctcgctggagtcctaatgggcacatatgatgcggggggatccaaaaccttatacccctcttgaggaaacatagcatcaagctcctcatcagtcaaggggcgattcctctcttcaaatccctctcccacctcaacaaattgtattgttcccgagtaatggagccttgtaaagccccaagggttggagt

SEQ ID NO: 4749 - DNA, 444 bp, Glycine max
agctttggctggaggtggattaattctcttttagtcctcaaggcttttaatgttatcaatgtggctccttaggatttaagaaatgtttggatgaatactttattctattgtggcccaaatggagtttcgtgtctcccatattttccgagatagtaatgtatgcgctaatcatttggctaactatggtgtagaattactctattatgtgggaagataaactttgaatttggatgaggtgtacaaggggagatacttggtgttgcaagggtagaaaaataaaggtaacctttgctatttggatggacaagccttgaagagaaaccatgattgcaaagtgaagaagaaaatgaagttttctaatattgtagaagtgttgggagatactttcgttggacgaggagtttgttcattttaagcccaaaagatatagtgcattttatgcct

SEQ ID NO: 4750 - DNA, 455 bp, Glycine max
  unsure (1)..(455): unsure at all n locations
tgccccaacctttggaatgagctatagaaatagccaatacaactccctttagttcaattgaaaagaaagaaagatacccccatataaaacatattctcctaagaaagcaccagagtaatcacaaaataacctaccatagctaagggaaccaggaaatgattttaccaaccttgggtgatgaatattgatgttaaaagttttgatgacctgaaactcactcaaagaggatttcgtacaacttgaagtaagataaccggcccacaagcaaaatatgagcaaacataaggatcattgcttgctgctatgagacaaaaagattatgaaagtaggcttgattatggcgattaagatcgcccaatccacatagatgagaccatcaagaacaacatctgtagcttacgggcgaacaactaattnttcaacatccaggataagatccataggagacgcaagat

SEQ ID NO: 4751 - DNA, 986 bp, Glycine max
  unsure (1)..(986): unsure at all n locations
aaaggcacaggaaaccggacggagatctagcaatggagaaccaaaacgggaaggcgatcagagaaggaaaaagaaaccacccnnnnncaggcgaggtggatgcatcctcgacannccccnnanaannnnancggcacccaccgccaaaacagcaccggaccggagacgaactaatttaaggaacgaaccgacagaacgacggaggcaaacgagacacgaccgaagcccagaagacaccgcaccaacggcacgacaagcaagcaaggaaagggaccgaagccagagcagcggacacacaacacggcaagacaaccacacgaacgaacggaaccgcaacaacgacacggtccgcaacaccgaacaagccacccagaagacaaaagacgagacgacacaacaacgcagcgacacacaggccgacacacgcgcggaccacaccagaaaatacggggaaggacagacaaaagcagatgagccaaaaccagcaacaaccgcccgcagacggnagagaccagagcgaacgaacggacgacacacaccgacggcacgggacacgcggaaagcaacggcaaagcggcgaacacgaggagcacacggcagggaacacgaagcacaaaacaccgaaagacaggaaggcgagcccagggaggatccgaacaagaagggagagaagagacggacacgacagcaacgaaagccgacgaacggaaacgacgcaaccgcaccgaacggaggcaccggagcggacggccggacgagcaacccacggaacgcaacgacaggaacgcgctgcgacgcaacgcacgcaacggcgagcagccgaacacagcaacagacacaaccgacacgccacaacaacgacacagaccggaagcccaccgacagccaaccgcaagcgacgaccaggaacaccccacgtaatcacagcgacgcgccagcgacgcgaaccaaagcggacgcggagcccgcgcaatgaacatgcgacc

SEQ ID NO: 4752 - DNA, 576 bp, Glycine max
agcttatggagggcccaagtgggcctttgtgctatttgcacccccatttttactaagtacacccccctctgctgtatttttggtgattcttttttctgtaaagttacggaaacttacgaatttcgtaacgatacttgatttctttccgtaatgttacggaaccttgcggattacataatcatcccctttttgacttacagaatgttacggaaccccacttaattatgcaacgatgcttccatttgatttccggtgtgtcacggaaacttacggattgtgcatcaatattttttttggtttttcggcatgtcctggaatttcacaaattgcctaatgatgggtgccaagcacctcacgaggaccaaagaatggtcgcacgtcatcgagcaaaggtccccggacgagattagggtatgacagcgcgtttagttatggtgtttttccctaaaaaaccaaacatgaggagtgggtaaagaaagaatgcatcttaagataaaatgctcgagtgatttgtatctcacaacctttttggatagaaacatgggaccaactcattttatttcagaaagtcgtatt

SEQ ID NO: 4753 - DNA, 485 bp, Glycine max
atgaagacaatcctatttagatgtggttcttaaacaccaagtacttcctgctggacaattggcagagaacctaagcattgctactgtggattggcgtgatgttaggtctatttgcctacaaatttgcgcagtataggagaaaagctgcatatgaggtgatgggccattgtgtatgcatggccaaaggtgctgcccaaacacttaaattaaaggtgactaaaaaggaacatatgtatctactttgttctaatgtttgttgagacttagtagctttcataggtcaataaggtaatgaaagttgaagtcgtaagaacataatgagagtattttttttcagtgtatagctgtggcagtaacaattgaagttggtatacatggcatctaccatcttgcttgtgactttcctcgccttcttgatgcaagtagtgaacaatacaagctcatggaaccttttttggagaacaaccctcatgttattggttttt

SEQ ID NO: 4754 - DNA, 415 bp, Glycine max
  unsure (1)..(415): unsure at all n locations
aacggctggtcatgatatatgtcacggtttacccagcggttcaaggataaaggggttgtcctacattatttccatgatacacatgcaacaatgatgattaggaaattttatgcaaaactggtcatgcatgcacccatgtggacactcaagcatcaagtttttatggtcatgtgacactagggctcaagattcattttccctatttaagtcaacccagtgtttccaaaatatgttattttaccaattcatgcattcatctgagtccattttgggtgttcgggaaaattntcacagcattcacccttcaggtgtattacacacattttctttcaaaaattggttatgatcagtgaatttttttcaaagaaaaactagaagttatctcttctcaaaagcatgttggcttttcaactga

SEQ ID NO: 4755 - DNA, 593 bp, Glycine max
ttgtctaacagctggtatcgagcaaagtatagatccaaataccattcagagcatatgcaatggcacaaaatgggagagcctcaagttccttggcagacaaagctgctgttccaagcctgtgggcactgtgaaaaataaatatttagtcgaaagagtaagtaaataatcacttattcatgctttgtatatttgttgagaaaataatcacttttttttcaaaaattccctcatgatgggaaaaataagcaattgcttcttcaaaataagtaaaaccgaaccatgaaagtcataaaaaatccccactctgttcatgagtacagaacttaaaaaaatgtaggtgacctttaacttatggtggtaatggaagtgtggagtacagtgaaaatgggattttggttagtgaactattatctattgatcacagaatatacctagaagcagttgctattccccgagcaattggatctcgaaaactgagtttatcgagtggtgcttgcacaaaatttgctccaaccagaccagttatacaaccacagctggtgtgagagatgaattggacctgcatacaacgggaatttttcaaagataaaacg

SEQ ID NO: 4756 - DNA, 566 bp, Glycine max
  unsure (1)..(566): unsure at all n locations
agctttacagcagattttagtaatgacccacttacctagaattaaaataacttaatgccattaacctagggaattaaaacaaactaaatggctgagtgtaactgaaattgttggcaaccaaaagtcacccccaacagccaacaagtcagccaccatttggtctcccaaaaggctgatgcctaggttgccaattgggcccttattacaacttgaactaaagcccttttagttgattaacccaaaacatatttttggtcagccaactttacaaggattgggccattatttagacaaactaaacactctaaaattgaaataaagtggtgtcatttagtcctccatttgggccatgatacaactcacaaccttggacttttctccttgaaacttgggcttgtattcaaatagtatggacagcacttgttgaagagcgtccttggctttccttgctctagcccttgtcataagtnctccaagtccttcaagtggatcctttgcccttgctcttggtcatgtcctcatcacattgcgcangctnttttacaaacgttggccgtaatattttt

SEQ ID NO: 4757 - DNA, 311 bp, Glycine max
tactaagcttgagcaaattaaacgacaataactttttactcggatgttctattgagtcccgtaatatatcgagacgctcgtaattgaaaacagaagctctgagcaaattcaaacgacaataacttttgactcaaatgtccgattgggtcccgtaatacatcgagacgctcgtaattgaaaagggaagctcttagaaaattcaacgaccattacctataacctcgatgtgtggtataggcccgttaaattatcagacgccccaaattgtgaaacaggagcgtcttggaaatattaaccacaattagttttga

SEQ ID NO: 4758 - DNA, 637 bp, Glycine max
agcttgcttgtggggcttctatggaggctggatctttgagcttcaatggggtcctttaatggtgattttccaccatggagatgcagcagaagacaaaggagaagaggtgagaggaggcgccatccattaaggaataagccatggaagaaggagcttcaccaccaagatgagccttggataagaagcttggagaggatgcttcaatggaggaaaagaaagagagaaggggggagcacgaaattgaaggaataaaagagggagagaagtagaactttgaagtgtgtctcataagactttcattcatcaaagctacaacaagtgttacacatgcttctatttatagactaggtagcttcgttgagaagctttcttaagaaaacttccttgagaagcttctttgagaaaacttccttgagaagctacagcttagctacacacagccatctaaaaactaagctcacctccttgagaagcttccttgagaagctagagcttagctacacacacccctcaaataactaagctcacctccttgagaagagaagctagaggctagctacaactccctataatagctaagctcacccccatgacaaaaatacatgaaaataccaaaaattccctaatacaaagacta

SEQ ID NO: 4759 - DNA, 551 bp, Glycine max
tgaaattggaattttaaacacatattccattgaaagtaactgattttaaaaggagagggtgaaattgatggtaaaattgtgatcttgataatcctaaacaactaataatgcaaataatcctaactaaaatgcttactaattaaagactaaatgcagcacatcaaacaacccaaaacttagaaatttgcttgtcctcaagcaattaccataaacaaaagattttaatcaaaagcttcatcagatcaaaactcaagtataggcacgagtagtagataaccattaacatgcaattaatcaaatcaagtccaattagaggcttatcctccaaaactaattataactaagacaggttcaatcatcccacttcactcaagtgtttaggaggttcgcgcggctcacttcacttaagtgtttttggataaaatcttgttcactaaacttctcaatgcaaagtgtcctaccataggcttggaagggacctcaatctcacttgtaaccaaataaaaaacaagcaagtcacaatgtctttaaaggggatgtactgggcatgg

SEQ ID NO: 4760 - DNA, 453 bp, Glycine max
agcttgtgcttttctacaatggagcgtttcttttaataggttccgcatgtgcacaacatttgtctcttctttgcactggatgatgcttgtacgtgctaataaatcaatttgcatttcctaagcgatcatttcttatataatatgtggagaatctcttggatttaagcatctctaatcatattaccattaaagatggccttaactgcccaaggggattggcttttataactaatatcaaacctatttaatcggttataaatacttttcaacatcaaatattttcattaaaaacttccttatttattatatcatacgacgtgataatgatttagtatttttttaatacgccatgacagacatctatgaattatgatatgaataatgacatatttttgttgagtgcgactctaattaaagagagggggcagttgcactacctgtttagttttaatc

SEQ ID NO: 4761 - DNA, 473 bp, Glycine max
tgaggcagcagcttcagtacttgctggaatgccacaggtgatttattagcaagttcacacagattagttggataaatgcactacaagcaaacagagatatagaatcgaacagttattccatcagatttgagtctagtaaagaaaacagatgtgtgaagtgaccaagtaaaggtatatcaaccatcgatttaaagtgggttaggtatatgaggtgctctttttcaaatccacagcttgtatgttttactttttcactgtacacatctgatttacaggatccaaatgctacatccatgacctttagggaagaaagagaataatgagattgtataaaataggataaggagagggcaaattttatcatccaaaaagggaaaatgatatccattaaatcatccaaagagggaaaatgatatccatcttccaacatttccagagaatgaaaataaatatattaaggagtagcttgtata

SEQ ID NO: 4762 - DNA, 511 bp, Glycine max
agcttatgctgcaaacatctacaacagacctcctcaacctcagcagcaaaaacaaccacaacagaacaattatgacctctccagcaacaggtacaatcccgggtggaggaatcatcccaaccttagatggtcgaatccttcacgacagtagcaacaacaaccttattttcaaaatgttgctggcccaagcagaccatacgtccctccaccaatccagctgcaacaacagcaacagccccagaaacagcaaacagttgaggcccctccgcaaccttcccttgaagaacttgtgaggcaaatgactatgcaaaacatgcagtttcaacaagagaccagagcctccattcagagcttaaccaatcagatgggacaattggctacacagttaaatcaacaacagtcctagaattctgacagattaccttctcaatctgtccagaatcccaaaaatgtgagtgtcattacattgaggtcgggaaagcagtgtcaaggacctcaaccagtagcacct

SEQ ID NO: 4763 - DNA, 534 bp, Glycine max
tcatgctgaagtatgtatggcaaaacttcattactgttgttgaacacatacaagtgagcttgtaaaaaatcttctacacttggagtgataacatgcagtcctcttgtacccttaccggctactctgtcgtcatggcgatactcaggaaggccaacaggtttagccttttcaatgtagtctgaacaaaattcaatggcttcttctacaatgtatctttcaacaatagatgcttccgggcgatgtagattcttcgtatacccttttaagatcttcatgtatcgctcaaccgagtacatccacctcaaataaacaggaccacaacatttgatttctctgactagatgaacaattaagtgaattatgatgtcaaagaaagtagggggaaaatacatctccaactggcacagtattattgcggcctcatttccaggtgatcaaacttgacaggatcaaggactttgctacatatgtcatggaagaaaatgcacaagcgagttatgggtaaccttactttgtaggcaaaatgtctcgtat

SEQ ID NO: 4764 - DNA, 561 bp, Glycine max
  unsure (1)..(561): unsure at all n locations
agcttgtagaattcactccaattccagtgtcttatgctgacttgctcccatgtctacttgataattcaatggtagccataacctcaaccaaggtttatcaacctccatttctccgagaatacgactcgaacgcaacgtgtgcttgtcacggagaagcctcggggcgttccattaagcattgtagggctctgaagcgtaaggtgcaaggtctaattgatatgggctggctgaaatttgaggagaatcgcgtgtaaatcctgacattgacaatagatgccacacatggggcaattttgaaagctgttgttagatgtctctgatgactcatcaggattntcaactttcaccggaagtgggtgcatgccattggtcagtttgctcaaacgacctatgctcctgagtttgggacttccaagaccgttggtgggggtgccgtaaaacaacgagttaagttcaaaaccaataagtttcaaaataaaaaaaaaaggagttaaaaaaaacatttgattgactgtggtttcaaaatgtcatgtgacctcatttcagaaaggttggcttttt

SEQ ID NO: 4765 - DNA, 306 bp, Glycine max
tattttgtcacaggcagttcctccctacaaatccttccttctttggacgatcctccatacgaaagttccaacttatgaaaatctgaggcgaacaagttgcactttggcttaaattgtctctctctgcggccaacatgactaagactcataacacctttttctttcttgcaattttgctaagagaatttaggggtaattacaatctaagattaaaaaatttaatcatccttggtgactttcattatgctttgcatatcttcgatagaagatggagcaaccagggcaaggatgttgtattatgtaaca

SEQ ID NO: 4766 - DNA, 298 bp, Glycine max
agctttaaaatgccaaagatttcacaatttattgtttcatgatgacacatgatgttagttaaaaattaagagcattatttacattccacaaaatttgagaattaggaatgattagtgaggtatatatacatatatatatatcgtatgttaacatacttcgaacatgacgttccttgtgaggatattccacaggatcgttatctctattaaatgaaaaatcagaacgggggagcacgcaatttgaagaattatcgagggagagaattcaaaatttgaagtgtgtctcataagactttca

SEQ ID NO: 4767 - DNA, 243 bp, Glycine max
  unsure (1)..(243): unsure at all n locations
tggcctcaaacttcctgatgataggctgccacacactccatcttttagaactcgtccctactggaattccaagataagagaaaggaatatccagctggctatagntaagaaattgagctgcatccctacaccaaccctctgattttcctatgcaaccgaagtgacttttagcataatttatcttgaggccagaaaccatctcaaaacacctcagtatagattttaggactctatcattatccg

SEQ ID NO: 4768 - DNA, 392 bp, Glycine max
agcttttcgattcattctatgtacccgtagtggtccacattgtgtttcgtgcatttttattctcgttttgtttactttttataccccctgttgacgtgcttaagccattttacttaagtcgtttctcgcttaacttaaaaataaaataaatttccaccgaacgtttgaattgtattatccattaacttcggttaaaataaatttcgaccgttcggtcatgccgtaaccacgttggaaatcaaaaaagaggtaaaaaataatataaataatcaaaaaaaaaaacatcttttagtaaaataaagcggaaaatcaatcggacgttttctctttgggatttctcattcttaatcgaattgattaataacctaagcgaaacctaggcgtaaattttc

SEQ ID NO: 4769 - DNA, 433 bp, Glycine max
ttaacctcattgtctctcacagtctttagatttgggagccaatccaatccttgtgtccggactctcagccacttatgatagccgccgatggtcccattactgcttcccctaagctctctgtcctttcttcacgccgcatcccatgccttgcgaactccttggagtacctttgcattggggtcactgaaaccccgtgtaatgaaaggcgtgatgctttcgtctaatggcattcctctcatggggtagccaagctgtcttatggcgaggacgggattataattaatacaaccccatgttctcatccagggaacatttggacatccttcgcatgaagaaacaatcctgattcttccttccttctagcgagggaaccaattaagagacgccccttcatgctagccaagagttggtggcaataacctctttcctttta

SEQ ID NO: 4770 - DNA, 72 bp, Glycine max
tagctttataagcccacccatccctcctttttatgctcaaacttgctctctatcaagacaatattttgttgg

SEQ ID NO: 4771 - DNA, 144 bp, Glycine max
gaaagcaaggattggactttggcatgctcaaggttattttttttttcctagtgagcttgaaaaaaaggggtttctcttgaagagataacaagcaatcttatttgaccatgtcctacatcagatggaggtcattgcaaaaaataa

SEQ ID NO: 4772 - DNA, 774 bp, Glycine max
ctttcagcggctcatacatttatgaggatcctcatacctttggtgatgattgatgatctcttcaatcaagcgttacatatccgggatggagatatccttgcctcctttattggttgtattcttccttaaagcggaacaatcaccttactttgtaaagggggacgcggccacccatacaaatggttcatacatcaattctggttgtttcacatgggccattccccttgaactaggaaggactgaggcgcactcgtcgacttctttcgaaaacttgggaggaccatagcttagcataaaatgccgctgcaacaaatagaaccagagcacttatttaacaccttatcgaatgaagggaggcatatggcttccccggttaaataactcaccggccttgaatgtgtagatgtgaccctatctaacgtgggtcagaattctatatgatgtggggggtcctttgattgatggcgtggaaagcaatgattactgacctttcatcagtaggcctcttacctttgaggaatatgaaatctgaccgtacataacttcctctatgtatagcatgttactaacagcttcgaaagtaagtacctctccatttttatggcagggaaattatggacgatcaacatatgcctctcctcttccgttttgatagcaacaccccttattgaacggttatgcgagacatggtactgctgcggacttctaaaaatagttagagtaaatctcacctatctgggtgtcatacgtaacagtcacgtaagtgtgctctcc

SEQ ID NO: 4773 - DNA, 814 bp, Glycine max
tgccacggagttttccgactatgctcttgtggggtggtatcttctacgaagcgagagaaaaagactgtacgcatgataggataaacctgcaaccctgctgtacccctaacatgattacttaagttgtaatagaaaaatttatcgaacgcctctaagatcatatcctattaaagactaataccctacgtcatctctctggcgttctcatgcgttgtcaaatatttactagtaattccatacacgaaggagaagatggtcacgaacaactatccgtaacatcatcaacgataactttacacactacatccatctaataaatgtcgtactcaaatataatgggttaacgctaccaacatcatctaatacgtgcctataaatgtcaacatagattttccgaaatactacatcttatgacttgacttattttaacgttcgtatcaatcatgaagcgcatcacacattaaagttacacaaacgatcactatcttcttaatgacaccaatcgtaacacatatatgaacaacatctgaatattagaatggataatgatcattctgagagaatggactcatattgcttgatactattgaatataatggcataaaatcatatctcacccaatgtattgatagtaactgcgtcctcacggtttatgaatcgaacaaacaatatcggtatgaacaggactaacaacaaaacctatgggaaaaattgtacactaacattgtcatgtaccacgcatgttatgtatattgtaacatgaatagtatccatataccataattacatctgtatctctcatactgtgtcatct

SEQ ID NO: 4774 - DNA, 538 bp, Glycine max
atgcaagcttggcttccttgttagtcgatattactaacttttgtgtataaaacctgtgtatattgtatcaaactttcctaatttatggttgttttgtaatactataagtactttttgttaaatataggtaataaataatttatacttttgttttgtgcgtttaataatcaatttctctcaatttcaggttaaataggcaactttggcaaagttctatttttcactctttcgctaagccaagctgctggcttagcaagaattcgctaagcgcaaccttcagtggctaagcgcgaggaagaatccagaacaagatgagctgtcaagttcgctaagcgcaccgctctatgtcatcaagcgcaccgcttcagctcattcgctaagcgaaacaagcgcgctaagcccaaatccacttatgcgcgctaagcccagattcacttatgcgcgctaagcgatccacatctgcgctaagcccacgagcacgaacaaggccacttatttaagcctgaaaacagattttgcaaaggagtttggacacttt

SEQ ID NO: 4775 - DNA, 592 bp, Glycine max
gcttgattgtgtaagagtaaaaagtgattcttaacaatacttgtaacttgtgtgaagttagtgaaatttgatgattttccaagaattggacgtactctcaatggtagagatgaaccagtataaaactttttgcatttgatctttcttgctttcctttaagttttatctaaccaaagggtgtgaatttgtttttagatttaaatagatatctcgtgttttctaaaaacatttttacatcatctaatagtttttttgaaaaatctataatatgctctttacaaagttttatcagatgaaaactttgttttaagtgaaaaaagattttaaaatgtataaaatcagaattcaatccccatttgtgatagttgcctttacattaaataaaaagtatgaaaattttagatagataataaaagctgtagtttaacattttgttttcaaaattcatttaccttttaatggttataaatatgaataatagtacaattaaccatggaaccgattggtgttttttttagtaagcgtttttccatttccaattaccctcttacctttgagaactttaacccttggagaaaaaaagcccaaactt

SEQ ID NO: 4776 - DNA, 474 bp, Glycine max
agcttgccgcccagctcgcccaggcgagcatgttgcttcctccagaaggaacggcccaagtgggcctggttgctatttacacccccatttttactaaatgcaccccctttctatttttttgtaattctttttccgtaacgttacgaaactttacgaattccgtaacgatacttattttccttctgcaaggttatgaatccttacggattatgtatttactcttttttagctttcgaagaagttacggaaacccccggattgcgcaaaaacacctcttttcgacttccgccacattacggaatttcacggatcgcgcaagcctgcttccttttaatttctgagacgtctcaggacttcatttactgtgcaacaaaggatgccaagtatctcaaagcggctaaccaaaggttacatgtcatcaagtaataatcccggacgaaattagggtatgacagttgcccctttttacttacc

SEQ ID NO: 4777 - DNA, 475 bp, Glycine max
tcaagaattatggcctcatcaaactacttgtttcccgagggaaattctataaatagacctcccatctttaatggagtgggttaccactactggaaaacccgcatgcaaatctttatagaggcaatagatttaaatatttgggaagccatagaacaaggaccttatgttccctctataatagccggaagtgcaacaatagaaaaacctatagcagattggactgaggaagaaagaagattagtacaatataatttaaaggccaaaaatattattacatctgccttaggaatagatgaatactttagggtttcaaattgtaaaagtgctaaggatatgtgggatacactacaggtaacacatgaaggcacaacagatgttaaaagatctaggatacacactttaactcgtgaatatgaactttttaagatgaatgtaaatgaaggtataccatacatgcaaaagaggttcacacaca

SEQ ID NO: 4778 - DNA, 597 bp, Glycine max
atttggatttatttactcttaccttgcttgtaagtaaggcctttcccccgaagtgttgctctcacccggactaagcccggctcactacagaggtgaattgttatctaaaggtggcggtcgaagccaaaaacgatccacccatgcacacggtaagaccaaatgcgcataagcatgctactcacatgttaccaacgtgccccaaagaagaaaacttttctcctttcatgaaacgtatagtgggactattgccctgatcttttaaactcaagaaactgattgaaaaggcgggaaactgctgaagctttcactcgggaaggactaattatggaggaaagaaccagatatcagtgtgcgagaaaaggacgaggaggctgggtcctatgggctggggggtgaaaacacttggccatggggcatgataattcgaacaatttgttttaggaggttgagtttaaaaccgagctttaggcgaccaagcaggggaccaaataatagtacgagcgtgactcattgacatttagtaacccgtggtcaatacgacgcacgatgcagctacgaataaacttggttgctacctcacgcacgatgtttgtagcg

SEQ ID NO: 4779 - DNA, 241 bp, Glycine max
agaataattccatgctcatgggtgattacattaattgcaaccataataatcatcaactagaatgtcatggattgagcaaatgttacaatgagtaccatagttggtatgattttttttttcaaccatttttttatactttacatttgctatttaataagcaaatgcgtgttttccttttcattatgacagaatgttctaataatattatggatggctttgtaggaggggatggggatgttta

SEQ ID NO: 4780 - DNA, 465 bp, Glycine max
  unsure (1)..(465): unsure at all n locations
agcttgnactcaggctgctctcgtatcgagactatgtttgggctgtgtcagtgttgtaaaggaaacactagcttcttatcataacgcgattgcggcacgggttatgtgtgaataatatgcagccctggccatacggggacctctattgcagatgttggggcttaccgctatggacatggtgatggtagagcgaaggaatcatccactctatatgaactactctcggtgctcacggaaaccgatggtgaccaagtgtgtgcatttgtactcagtcttgttctcgcgagctggccatgtctaactattatctcaacacaagagtttgcacaattttgcacaaactagtattcatcattgattctcacgagatgagggatgccacacactattctcactcaacccgtgagtttaacagcgagacgagttactgatcgagttcccacctctttcaacttggaaatgatc

SEQ ID NO: 4781 - DNA, 414 bp, Glycine max
tgacgccttggaggggtactacaatcccacgaccacaatagtgctgagaagtctggagagaaagagaacacttctctcaaggcttattgaatctcagaaaaaatgacaattctcctccacaaaaacacataagctgcatacgatgtggggaatgggaaaacatcacacatgcactttgtttgtattttaaccgcgcattatgaaaatattgcccccaattgagcctgcctctagttttacaatcatgaagtcaaagctgcaacaattttaaagaaaagctgtcatgaaccagaaccacctatagatcctgggctctgtatcacacataaacttgtttgggtttaagggtaattgtcgcctgcacacacaaaaccattggattcgacttgattcacagcatcatattaagcatac

SEQ ID NO: 4782 - DNA, 496 bp, Glycine max
agcttaagctccttcaactgcacaaggctcttaatatttgaagagtatccttgtggaaccttcacccgacgaagacactgacaaaaacttatcttctccttcttggacaaagtatggcaggctgggggcaagtaaattttcttcccatcagaccttggatgcaactgtgatcgtatacccatatcagctagatcttgacgggtattcaagccatccttcatcttgccttgaatgttaaggagcgtcccaatgacactatcacagacatttttctccacatgcataacatcaatacaatgtctaacgtcaagatcacaccagtacggaagatcaaagaaaatggacctcttcttccatatgcaactttgacttttatccttcttttgggtcttcccaaatacagtattcaggtgttcaacccgctgatatacctgctcaccagtcaacggtatcggcgcaatataatgctcttgacttccattaaaagcttttctca

SEQ ID NO: 4783 - DNA, 364 bp, Glycine max
tgtcaaataatgtctaacactatttatcaaaaaggattgtcatctcttacgctcccacagccttacatcttatatttttgcgtggtgtcaaagttaacatctaattagtttatcttttgttatttattgtatcgctgctgagaaaaatttgaattagaatagaataattctatttcctccacatacgtattgtctctcttctctcctctgttttttataatttcctcctcaaaaccaacaattggtatcgagagccttattcttacgggacctgtaccatggaaggtgatggagagaattatgatctttgggaagagaaagtgctatcctacatggattctttggatttgtgggatggtgcacc

SEQ ID NO: 4784 - DNA, 413 bp, Glycine max
  unsure (1)..(413): unsure at all n locations
agctngtagggttaaagtctcacgattgtcatgtgctcattcaacaattgttagccgtggctatacgagacatcttgccaaacaaagtctagttcaccataactcacctgtgctttttcttccatgctatatgtagcagagtgattgatccagtaattgttgatgagttggaaaatgaggcctgaattatactgtgccagttggagatgtattttccccctgctttctttgacatcatgattcacttgattgtgcatctggtcacacaaatcaaatgttgtggtcctgtttatctacggtggatgtacccgattgagcgatacatgaagatcttaaaagggtttactacaaatttatatcgtgcggaaacatctattgtgaagaggtacatttgcaaaagaaatcattgaatt

SEQ ID NO: 4785 - DNA, 441 bp, Glycine max
tgtgctaagaatgtcatgatccaacacatcatattttaagaatattgaatgtcatgatccatcacttctctgcatatatatttagtattaagatgtgtaccaacaatcctaaaatgttctgtgcaaatattttccattgaaagacactacacaagattagagactccgaaattaattttgttttatgccaattgctattatgctttgttggggcttgctaaatgcatatttaatttgaagcaacttcattatttttgtgttatctggtaatggtttaattggataatactctacaagccaggttatatataatttagatatatgtgcagagatgtaatattgtcatgtaaattttaatatttaattattggtatgtaagaggatgtgcatgcaattgttttaaagagggctggggataagtgaagctagctcacaaacaat

SEQ ID NO: 4786 - DNA, 434 bp, Glycine max
agcttgtggtgcaaaagattacatctatacaaatgtttttttgatggggcagcctccaagactccattaagattccttgggtgaggtgggacatagtctgcctacctaagagtaaaggtgggttagggatcaaagatttgattaaattcaacgaggctttgcttgctaaatgggggtgggagttggcaaataatcagaatcagttgtgggccacaattctattgtgtagatatggtggttggagggatttgatttctcataggaactgcagtttatactcttcttggtggaaagacctcaacgctattttcaagcagcaacatagcaaccacaatgtgtaaaaatagctttattttgcccataggtaaagacggtccatggaatacaaaccaagttcttattggcttgacaaccaaaaaaacactcattggaaa

SEQ ID NO: 4787 - DNA, 557 bp, Glycine max
taacttaacataattcacatcattttaccaatcattgtgtatcatcacttgtcctaaggatttaatcacaaaatcatattctataccttcacattaatcacatgttcataacaaaacatctcaagtacaacacaacatctctcacacacaattcattacccacaatcacgtatcaagtcacaatgatcattacacagacgttatgcaacatatatactaagactcaatcctatattgaatgtggtatcttgtcagtgaaaaataacactagggcacctaggagtacataataaaatacaccacacaatgggtaagcaggtcactcttattaaaagaaatcataaggtgattaattaaggttattctgtttagtgtgaatgctctaaccatatgagatcaacatagaattaaaggagcactcaaaccgagtgtatttaccctcaaggcctagactctgagaatccattagggtctcatttttcttattcaagtccaattccctaaaacttttacatgcagccactgcacatgaattatacaatacctatgacttcaca

SEQ ID NO: 4788 - DNA, 362 bp, Glycine max
agcttccgtagcagcatttcttatgcaccttctagctgtcaaacctattctaaagtccaacttcttctaaaaccccattatttgtttgtcctcaaattgtcctttcaaaccacttctctctccatgcaatcgttcatatctctctctactttatctcacccatcatcatggccatgatcatcagattccaacatctactaagcttcattctttggctcttcctcttcttggtactctttcatggctggtttggttccaaatccaacaatgataaggccatcataagcaacaaccaacttcagttctctctgtctagaaatagaagaatcttagcagctggccgaggatttgacttcacccca

SEQ ID NO: 4789 - DNA, 563 bp, Glycine max
ttgaaaggcctaggaaattttcccttctttatatcatttcattaacttcctttccatgtgactttcaaaaacataaaaatacctaaaatagttatttataactttatgcaaaaatgatcacaaaagaacccaatagtaagtataaaaataattaactgattcataactagtgccaaaaatactaaaatactaagcatgatttggatatatcacaatgcatgcatggtttgcgattaatgagtaataaaattatgtaacttatgcaaaaattgcattatgataattggaatttaaacggaggttaaactaaactttggccagtaaatgaaataaaacacggcattgtttaaaaaaaacaacttgataattcttcaaaattaaatttttttactattcacattgaatataaaattttaattttaattttttttaaattaattgttcttaacaataactattttaaaaaagaggttaatttctactgcaaataataaaaatattatattgataatttctgggataattattataaatatcaagaaaattttcatatattttgaaat

SEQ ID NO: 4790 - DNA, 562 bp, Glycine max
agctttaagtatatttactacctcaatttttacttatttttccgaatcccttcttcaccaagtttgcttcttaaccaagtttggaagaaaaaggaaaaaattaatatatatatatatatatatatatatatatatatatatatatatatatatatataagaagaaaaataagaattaaaagaacataataatgttatatataagttaaagtagaattttggtctttttatatatatttttttatcaatttggtcccttaattaagttttaaaaattttcactttaatctcatacagggtctttggcaaactaaattggtcatttcatcagcttttttattctaacacgtccattttgacttacttgatatctcgtaatttgttacttatcagtaagctcaccaagttagtgtgataattgaaccaaataatcaatttagtctaataaaatactctttaaggagacaaaataaaactttttaaacttaagagacttcatttacacaagagaattctagataagagacaaaattttattttaaacttttatataccatttaact

SEQ ID NO: 4791 - DNA, 581 bp, Glycine max
tcacatggagctacgtcatgtggtgtcaaaagcatcttcgtctatgtgatgttcttttgcttcctctatctttttgttcggtcatttcactttagttccttgttgttcatcttattctccatgtatatcctccattgtcttgtggtttgatgctgtttatagtagatccaaaaaaataaatcgattaaatcttagatctacacttgctcttgcatttctatggttcaaattttatagatctactcttgaatcatgtttttatgttgattttaggttctatcatttttgagtcataatcttcttgtgctgaacctttagatctcaattttcttgcaaaatattgattagaaaaaaaaaacagaaaaatctaagtgtaaatcacttaatccatgttgtcttaaagtcatgtttaatcataataattgtcacattatgttctaagtttgcgttgaaatttgattttggttgattgaatactagatacatttggtcatgtattcttggcattcttaacctatcttttgaaatttgagtctaattcctgcttgttatttaattcataacatgttctaaatcaattc

SEQ ID NO: 4792 - DNA, 402 bp, Glycine max
agcttgcctgcccggtgcagcagtaatgatggtccgagttatgttggggaacggttacgaacccggaatgggtttaggcaaagacaacggcggcataactagcctgataaatgccaaaggaaatcgtgggaagtatgggttaggctataagcccactcaggcagatatcaagagaagcatcgcgggaaggaagagcggtagtcaaagctcgcggttgagacaagaaggtgaaggaagcccaccctgccacataagtaggagctttataagcgcaggtctgggggaccaaggtcaagtggtcgctatatacaaagatgatggtccgcattggatttggtacaaccatgccctcctgaatttcaactgtggaaattgggcagtggaagactgccctggcattta

SEQ ID NO: 4793 - DNA, 379 bp, Glycine max
tcatgatgaatcaagattgattcaaagagtgttgatgataacaaagatgacgacaaaaagctcaaaagtcaagaacacttaatgataacaaagatgatgatctcaagaataaaagaatgagttcaagattgaatcacatacacttcaaggatcaagaggaaagttgaattcaagaatcaagtttcaagattcaagttccaagaatcaagatcaagattcaagaatcaagagaagactcaatcaagataagtgttaaaaagtttttttaaaaattgagtagcacatgaattgtttctcaaaaccttttaccaaagagtttttactctctggtaatcgattaccagattattgtgatcgattaccaggagcataattggtt

SEQ ID NO: 4794 - DNA, 392 bp, Glycine max
agcttgttaaagaactgaggaaaaattatgatttatcttgtacgcacatcgttcgcgtgtatgatatccactccacaaggtttgaagtaaaggagagcttcaaccctataacgcaacgtggcggacaaaagtgggcagtaaacttgaatgatcgtcattgtcaatgcggaaggtattctgcgcttcactatccatgttcacacattattgcagcttgtggttacgtgagcatgaactactaccaatatatagatgttgtttatacaaacgagcacatcttaaaagcttactccgcacaatggtggcctcttgggaatgaagcggctttttctccttttgatgacgcatggacacttatccctgaccccaactcaattcgtgcgaaaggtccg

SEQ ID NO: 4795 - DNA, 203 bp, Glycine max
tctccctccttttcctataaacaggggaaggagggattatactaaagttcaaccctcctggtatctgagatttacttaaaattaatgagaaaaattgattccatgaagaaaatccaagtcgaggcgcttccgtaacgcttctgtgacattttcgtgggtgatttctcgaaaattttcaaccgttcttcgacggtcttcgttgg

SEQ ID NO: 4796 - DNA, 470 bp, Glycine max
agctttgaagggctgaaagggacgagtcaagggtggaaggcatgatattagaggacaagttgaaggcttgtcaaaggtcgaagagaagtttgactgaacagctgagtaggacggaagagaatatgttgacaatcattgaccagtataaagagaagctaaacctagctgctagccatgagcaaaggctagaggacaagcatgcgaaggtatcggctctgcacgtggaaaaagaagcaagagagagagtgatagaatcattgcatggaaaagctatgaaatggttggataggttcgctcacactctgaatgggagtcaagagctttcaagcttgttagccaaagccaaggcaatggcggatgtataaacagctcccgaggaagttcatagtcttttcgattattgtcaacatatgattgagttgatgtcccacataattaggaatcgcttaggccgttgtattgtgctttca

SEQ ID NO: 4797 - DNA, 516 bp, Glycine max
tgtgcatccaataccttgctgaggatgtcccatatgttcttaaaactggactgattcatttgcttccaaagtttcatggccttgcaggtgaagacccgcacaaacatttgaaggaatttcatattgtctgctccaccatgaaacccccagatgtccaagaggatcacatatttctgaaggcttttcctcattcattagagggagtggcaaaggactggttgtattaccttgctccaaggtccatcacgagctgggatgaccttaagagagtattcttagaaaaaaatttccctgcttccaggaccacagccatcaggaaagatatctcaggtattagacaactcagtggagagagcctgtatgagtactgggagcgatttaagaaactatgtgccagttgccctcaccatcagatttcagaacagcttcttctccaatatttttatgaaggactcagtaatatggagagaagtatgatagatgctgccagtggtgggacccttggagacatgactc

SEQ ID NO: 4798 - DNA, 332 bp, Glycine max
ctttcatcatgaagtgggtcacgcttatttttctatacagataccactccctgatctaaatactctactcgaagctggtttctgcaaaatagttagtggaaagctattaaaatagggaaaaagtagcataacgattactgaaacaacagtctgcacacttaacggggaaggaaattatatgcctactttgtgaggacttcagtcagaagattcaacttcctgagattattaatggcaggcttgtcctgtctattaaactcagcatcctcctcagctgtaacctacagctcaaccatgacagcctcagctaaataccctatttctgctggact

SEQ ID NO: 4799 - DNA, 312 bp, Glycine max
cttaatataatacactgcagagtccagacataagaggtgttttttttcattctaacataaaaaatgataaattggaacatttgcagaatttattaaaaaacgggcatttaatatggttaatgaccttgatatttatctattttgagaatttatgtggcaactatgtgctttcttaaatttcttttttaaataatgactgtattgtcctgaataaacgttatatgttaattgcatgtatgagtaataagattatgtaaaatagacaaaaatggctatatacaatgttgattattgactcatgataaaatagac

SEQ ID NO: 4800 - DNA, 459 bp, Glycine max
agcttgtacttatgtggcagggcggtctttcctcactttcttggctccaacgcgagctttgaccactgctcttccttcccgcgatgcttcttttcatatcctcctgagtgggcttatagcctaaaccatacttcccacgatttcctttggcatttatcaggctaggtatgccgccgctgtccttgcctaaacctattccgggttcgtaaccgacccctaacataactcgggccatcattactgctgcatcggacaggcaaggctgcctatagaacgagtccacggaggaaatgctgaccacctcataagactataaagcggtttctaacgattcttctgcggcttccacataatgcatagaagatgggcagctcaccaagatgtcttcctcgcctgacacgatgaccaagcgcccctccactacgaatttcaacttttggtggagtgtagagggcacaa

SEQ ID NO: 4801 - DNA, 428 bp, Glycine max
tgctatagttgagcgcgctgcaaagtctgaagcacaattgaaagtaataatctggttcttatctattgacttaggtgattagttctcccattattcaaggtgaacttttaaatattttcaggaaaaatatcatttacgacttaaagtgctagaggagagtttgagaggaaattctaacagtagtaatcgcggtaccccagagggaagaagtatgagcaacggcccttctcgtcgtcaatccctaggcggagctgataacttctcaaaactaacctctaatgggtttttatctaaaagatcaccatcctctcaactgaggtcatccctatcctctagcacagttttgaagcatgctaaaggaacatctaaatcttttgatggtggtacaagatcactggaaaggagtaaaatgctgctgaatggaacac

SEQ ID NO: 4802 - DNA, 527 bp, Glycine max
agcttatgagaccaaaacatgacaaagaacgtttccaacaatctaattctcacactaatctaggatatcttgtcctattctttatatagctttatgattacccaattgattcaagaactaagggcaaccctgcatattcgcgtggtaccatggactattatataaaaatatttctgatcatcatcaataagaaaaatacagatattgttgataattaattgaacaatagtatattaaaatcaaataaatatcttgtgtcacaaatatactgaaagcgcactcaattcataataataaagcaatcaaacgtacaatttattggtacaagagataagagaaagacacacattataatcatagataaatttttacagcatgaaacaagggaatagaacacatcaatttcacaatttcacatcggaatatcaattggtctggcaaaaacagggctttccaaaattaaaagccagagaacataattgaattttataaaacatccaaaaataaatccaaattgatccctatag

SEQ ID NO: 4803 - DNA, 1064 bp, Glycine max
  unsure (1)..(1064): unsure at all n locations
tcgcgcaacgcagaatcgcacgantcagaacatttnactacacctgtaacngatgntctaacacancgtgttcgtgggtaaaactatatnttnttntnntnnnnnnaataggaagagggttgttgatcgcatacntatgcacncaccaaaatataatcaataacgcaggcaggctncatatgtgataagaatagggtggagacaagaaggatctttatttctcggactcggagcacgacggcggaacacaagttattatggcacttgctaagaggaataaaccccgacgcaatagcctctcagagagagtgataggtccatgataagcaatggcgctccaccacatggataccccccacaacaatgattctaagaagggaacgccaaagtattcctaaaaggacttatgcgctccagacaataaaaacggaagggcgtaataggagcttggcaagaaattaaccctggctccaaggaccaatacgacgaggctggagatagaccgccaatgagagccattcttgaaaatgacaaagtacccatggctaccacgtaaccatgcgcacataaccgggagaatgatggcccttgtgaacaaaccccgtcataggaaaaagccccgtatgaagtactggagagacaaccaaaaaaacaattggggcgaagtggccgtccaaccatccgaatttcagaattacgcgacatgccaccaaaaccttgatggaagggggtccacgagaaatcgaaaggaaaacacgagctaatggctggcctggggcggagggcactgggaaacaagaacaccgagcgaagccggaacatcttgatgcagaaaatgggccgcaacatctaaacagttatggtcccgaacgaatgccctcaacaatagagaagatacgggaggtgatgcaagcgccacccccatgatccatgaaccaggacagctgaggacaaccgggcttcccaattgaagaagggcacacgtactggaactgaatatacaaatatcaacaatagaaaaggtgagggagtattaacaataatttccgtcaatcatactaccg

SEQ ID NO: 4804 - DNA, 516 bp, Glycine max
agcttgtagaatggctagacacgatacatgtcttggtttggtttggttcaaggataaaagggatgccccacattatttccatgacacaaatgcaaaaatgatgatttggaaattttatgcaaaactggtcatgcatgcacctatgtggacgctcaagtgtcaaatttttatggtcatgtgatgctagggctcaggattcatttcctctattttaaatcaacccaatgtttccaaaatatgttcttttatcaatttgtgcattcattcgagtccattttgggcgtctgggaaaatcttcacagcattcacccttcaggtgtatacacattttttcaaaaactagttatgatcagtgaatttttccaaagaaaagttggaagtcatctcttttcaaaagcatgttggtttttcagcttgacaacttatttttctttttctccttctttttttttttatcattatcatttgtttatttccttttcttggttggcttctttttcttcttttttttttcat

SEQ ID NO: 4805 - DNA, 474 bp, Glycine max
tgtagtgaggtttggctacaaaaattcattggtttttctatgattcaaaggattagattctaagagagcacaactcctaaacttatccaagtggtcattttaatacaattagcttgctcactagcttttcacttccatttgcttttgaccttattacatcagcacacattttctttgattgtttttttaacacaatttatttatcgtgtgtgtgcttatgcttttacctctttctttacatcccaattaactccactcccccaaatttggggtaaatttgccttgaaccatatgctctcctaaattctaaacaaggtatctggagataatcatttaggttcagggtttaattattgacaaatcattcaactcataaagagtgcaaagggtacagttatcattaaaggtaagctttttggtcaaaggctgtgtatgcacaatcatggcctccatcatgtccttaattatacattt

SEQ ID NO: 4806 - DNA, 484 bp, Glycine max
  unsure (1)..(484): unsure at all n locations
ccttagagaaganccgcggcatgcaagcttctatataagctgaaccattttantcaattgtttcaagttgagttttattcagaaaattagagtttatctcttttatcttactgagagcgattctcctaaattcttgagtgattcaagaacaccctggctgtatcaaaggactttcacaacctttgtgtgttgccctcgctggaaagagtgattctttccttcctatcatctccacccttgttctttcaaaccacaattccagaaaatccacctctgcccataattatctcgtggccataactcccattttatgcactcaaattaagtgattcttgagcctaaattgactttcaaaacgagacctttcacctcgttctgaaatcacctcatttggagccctgtagcttcagttattgccatttctatatttctgtccagccaccacttaacctacattgtaccatcccattcatccttttatgcc

SEQ ID NO: 4807 - DNA, 588 bp, Glycine max
agctttagatgaggatgaattgaaaaaatattgtatttatcttgaaaagtttttaaggtttaatgaatactctgatattgatggtcttgatttattttcagaattgaaagtactaagagaagtgttaagagaagaaattagcacaccaatagaagtattgagttatattaaaactttagattcttttccaaatgtttaaattgcatatagaattttattgacaatccctgtaacaggtgctattgctgaaagaagtttttcaaaattaaaattgcttaaatcatatctaaaatcaacaatgttacaagatagattgaatgagttagctattttatctattgaaagtgaagtggtagaattgcttgattataaaactctgataaatgattttgagcttaaaaaactaaatattaatataaaaattgatattttatattatatactaagtctcttttaaaatcttataagaaaaagacccctttaacatttcttcctaggccctaaaaatttggacatggcctgtgggttcgatcgacttgaaaaattttcaattttttttttaaagaattcggttttatttatttgggt

SEQ ID NO: 4808 - DNA, 486 bp, Glycine max
ctcagcttgaagtggccccttatcttcccatcagatagccacgcaagtcctattccacctctggtggcaaggacagtcaagtcatgagcatggatgaaaaatccccaatgaaagtcctaactgtttgcaaagcaactaggggaaattaagatgatgtattcgacatagacctgggcaatgacactattaacaagggcccaaaaccaatcaaggagcttgttaagttgcagctcaaacctaatgacactacgaaggaatatggatttattcgcattgtaaccatctgatatgccaggtatccatcctagcctcatatgccataaattggccatctgcccttaggctaaactggtctcatagaagaaaagaaagataggagaagaacaacgaaagacgaatagagaaaagattgaccaattactatctcaggttatcagagaggtcaaatacttgagttggttggccaatgtattcatggaaaaaaag

SEQ ID NO: 4809 - DNA, 403 bp, Glycine max
agcttgagcttagctacacatacctctctaatagctaagctcacctccttgagatgagaagctagagcttagctacacaccccctataatagctaagctcacccccatgacaaaaaacatgaaaatacaaaaaaagtccttactacaaagactactcaaaatgccccaaaatacaaggctaaaaccctatactactagaatggccaaaatacaaggcccagacgaaggaaatacctattctaatatttacaaagataagcgggctcatacttagcccatgggcttgaaatctaccctaaggctcatgagaaccctagggccttcccttggatcgctagccaatctacttggagtcttctacccaatgcccttgcggggtaggattgcatcatacaccttatgc

SEQ ID NO: 4810 - DNA, 373 bp, Glycine max
tgtgctattctattcttttcctcgcctccattcttacaaatttcttttcaagagacttactcttggtgattgttttcaagagaaagtcttcttggttttaaacactgaacacaagggaccaacgttccttgagttcattgcaaaaagcaagatttgcttcttggtggatcactggacacaaaagaccaatgtctttggggttcattgcaagaagttggtataacttcttggttgttatcactggacacaagggtccaatgttccttggggttcatggcaagaagtgggaataacttttatgttgtaatcactgaacacaaaggagggaagtccttctgggttcatttgctataaaggattttacaatgatagt

SEQ ID NO: 4811 - DNA, 441 bp, Glycine max
agcttattaggataagttaaatcgagaaagttccaagttgtatgaattattgcaaagtaatgttatttgtgaaaacctttgtttttaacgtaacatatatagatcaagtgtttgctttttgcttgttaagagatacatatattacactagaactagaactagaatgctcgagagcaacaggcgtccctcgtgacaatatttatgaaagataaaaaatgggaatgcgtagaattatttgcaaaaattccaataacagaagtttaacctttcattcaagttggctaaactagtgaaacctcgttctacatcaaccaataaagcatcctcttgaaaggaatcttgttccgtgacgattcatgctaaccaaatctaagtgctaattaaattaagtacatataggataattactcaatccacacacgttcatgttttaattataga

SEQ ID NO: 4812 - DNA, 244 bp, Glycine max
tgaacacctattagtatttatattttttaaaaaaaatatgtatgacatcaactcgccattggctcccaggttagcggattaggcaaaatagaccaatacaaactcacgggttaagtcacctaacccattgatccaaaggttacattgacacctctacattagtgactttttgttgcctttgtttcctttaagctttttgtgtataaaaatatattttttcttgtgtgaaaaatttgatggtaag

SEQ ID NO: 4813 - DNA, 475 bp, Glycine max
agcttcttatccaaggcacatctcttgttttgtgaaacttctccttccatggcttattctctagtggatggcgcctcctctcacctcctttcctttatcttctgctgcaactccatggctaaaaatcaacattgtacgaccttattgaagttcaaagatccaacctccatagaggcttctcaagcaagcttcgatcatgtttagtatgtgacctatagcgccctctataatagacgctaagttcttcacttaaactcttgcaaaagtcatgactattacaggaggcatgtttttctcttttcatttctttcattatgtttcttctttcttcctctctttcatcttgacttatttcttccactcttttttcctttttcttttctctcttttttttatttccacaaattaagggatatcaactcatctaatatcttatacaacgggtccttaagagtagaaccctcaacattaacac

SEQ ID NO: 4814 - DNA, 508 bp, Glycine max
  unsure (1)..(508): unsure at all n locations
actctattaatactcagctttgccgagtggtctccagcattacatttaagctcgatccattgtcgataagnacctttgcgacaacgtggtccatacatctcaccgacacatgtagagccttgttgtgtcctctcccctcaacgggaatctcttcttccgcaaacgcgatataattgttggtggttatatgattaacgaagccttcgaaaccctccactgagatatcatgtgctacatgggcatcgttaaggaccttcatcaacagcgcacgatgaggctcggagtttatgagtagttcaagcaaggagatccttgctggagttttattcagttgctcgactaccttaaactcgctttgttggatgaggcggaggaactcatgggcctcttgcaaagtcactatggttccttgaagtccctctgtcttttcggcccctcttaccactggaggatctgcttctttcgagggggtgggctatatatgggggctcttggaccatgggcgctt

SEQ ID NO: 4815 - DNA, 203 bp, Glycine max
agcttgtgaaacatagttgacacagaattgatatcttctctagatagaagcataatatcatctgcaaaagccaaatgagatagctgaatacttgcacagttgggatgaaatttaaaattggcatcatccttgaggctgcttatatctctggaaaagtactccaaacagagcacaaacagataatgggagagaggatccccttg

SEQ ID NO: 4816 - DNA, 463 bp, Glycine max
gagcactaaaacccggagacccccaaggcctatactccgaatagtccgtgagagcctcttgctgctgattcatgtccaacccctaaaatcattttagcacacagacactgctcgtgaattatacaatacccatgacctcacactcgtgtgttaaacacgtacaacatattgcgctacaatttaacattggttcctaaataggaaacctacactttctctttaacactgcgcatttacactattgtcaagataacactggtcggattattgtacaattcacagatcacgacataaataatgtcgcatcaagagtgaatcacacacttatttacaagcaaaactcattcacaatgtgacatcttataatgtcacaatccaccatcacatgttttcacgtatctcacaatttaacacatgttctactttacactttacttcatctcaataacaagattataatctc

SEQ ID NO: 4817 - DNA, 961 bp, Glycine max
  unsure (1)..(961): unsure at all n locations
gagcagaggtgtagagcagagagcacgcgcntcctacanggtaacagaaccntagaacgtaanntgantttccaaaacccccacnnncccaggacgaggatgatggcatcccatggacaggcgcaccnaaanagaaaaaaccgcagcggcacgcgaagccaagaccggcaacgacaagccgaccggaaaccaagtattgtttctactcaccacacaccatccgaagcggaatggaaaagaggcacccccacgacgcgcccgcaggaaagaaaaggacgacgctaggaaaggaaacaagagaggacgacaagacggcttcctccaaccaccactcaaggggcccaaaagacaaggcaggaacgcctacacgagtggaaatgggcaaaaacacacggccccgaacaaaggaaagacctcagcacaatatgtacagagagaagccgcgccagaccaagcacgagggcaagaaaacaacccatacgcgcgacgagaacgcaagggcccgacccaagatcccaacccaaggaaaagggagcgcacaaacccaggcccatgcgcgagcaggaaaggactaacgcccctaagcgacacgacaaacacggcagggcccagaggaccgacaagagccccctcagagccaaacaggcaaagaatcaacctacccacgcggcatacggaaaacaagccgagaaaaacaaagacacgaacgaggccaagcagaaaaacaaaaaacggcagacgaacaccaacggcgtcgggagaaacccgatacacagcgggggcgaagcgaacaacacaacgagacggcccagaaccgcagtctggaagcgaggaacaagacccccgccgacgccatcagaacactcacacacacaccgaggacgggcaaaacgcagaaaacaaggagcaactcgcatcaagacactagcgaacgaacaaaccgtggcacgaccggacagcc

SEQ ID NO: 4818 - DNA, 779 bp, Glycine max
  unsure (1)..(779): unsure at all n locations
ggagctggactcgaccggtcgaacnccacttttattattacgctgcacgcggcctcttatagtgtcccatagctggccagctctttcttttttcaactctggcggccaagaatgtgcgcgtcatgaacaagggataaaaatcccctgcgcagggcctatctggtttgcaaagtatatcacgggaaaataagatgtcgtgttcgcagttcaccctgggtaaaggacactcttgacagggggccaaatacccaatcaagagctggtataatttgctgctcatacgatattgaccctaccaaggaagtgtgatttatatgtagtgggaccattccgatatgccacgcatacattctgatcattatatgccctaaattgggcatactgcccttaggctgaaccgggctcatagaacaaatcaaaagattgggataaccaaccatcaacgcattcagaagagaatgcctcatactttttccgttattaaacaggtaatactttaatgggtggccatgtatcctcgttcaaaggctaccgtaaaaggcacacgtctctgcgtccttacttccaaagggatgtccaggacgcgattcactgcccaatagaagactgggacggtgccccccacccatcttgatattgttgatgaacatctacggtactcacctagatgttctattgaacagtatacaccctctcctcatttaaaacaactgctcttcacggacattccttacgtcttcatcgcatgatctactaattaaagtgtatgtgatgttatc

SEQ ID NO: 4819 - DNA, 174 bp, Glycine max
agctttacatttcaaacttggaatatggtgttttctatgatgatattaaggtaataatcatctctttgtttttcttgtactttgcatttgtttttttatttggcatgaccttgaattttcacgctgaattttaatatgagacatggcagtgatatttgggagtttgtaataaat

SEQ ID NO: 4820 - DNA, 360 bp, Glycine max
tatgcatggaaatatatttctctaatcaatcgtgctcttgtgttctatgttgtagcctaaattactaaaacatcaatcccttgtcacgctgaatatccaagctttgtccgcagatccctcatgtaagactagactcagctcaagtagcttacgaaagtttagcctaatttagcctaagcttcatccgcagatccctcatgtaagactaggcctaaactaaatagcactattgtaacagcataattaaaaccaaaacttaacccgcagatccctcatgtaagattaagtttcgatcctgcttcaatcaagttctaaggcaacaggacatttcccagtgcttaagtaacctaactgtgcata

SEQ ID NO: 4821 - DNA, 405 bp, Glycine max
ccctcgccgctgcaagcttccatcactttgtggatgagttatggttgactctggaggtgggggcggtgcgtctgttgcccgttgctggcagtccctaagctgttgtggtgcctcaccctacgcttgcctaagagcacagtacttcttgatgaaagccctgctaatagggggcctgatgaccttgctgggggtgacgggcactccgtagaactgatagaggcccataatcagagctggaaaccccaggaccctattggacttctccgagtgcactgggtgtcttgtgggcgcgatccactttggcagggggagatcagagttgtggtcattgcgaagaatgttgctaagtaacaacgtcattcatatctgggtaagagtggtcttgtttgtgcgcatgaaccacac

SEQ ID NO: 4822 - DNA, 335 bp, Glycine max
  unsure (1)..(335): unsure at all n locations
atttacattgatggggggaggttgtctgccatttttgttttaagagtagtgtcccactggtaaaactaacttttcaaatgtttgccttcccaggaaatggccccgaggaagcttgcctcaaagaagtccaggaaggacaaggcagccgaaggaactatttccgctccggagtatgacagtcaccgctttaggagcgctgtacaccagcaacgcttcgaggccaataagggatggtcgnttctccgggagcgacgcgtccagcttagggacgacgagtatactgatctccatgaagaaataaggcgccggcggtgggcaccaccggttactcccat

SEQ ID NO: 4823 - DNA, 381 bp, Glycine max
ccttagagaagacccacgcatgcaagcttgttcttggtttagacatgatttattctttatgtaagactggtatgattcaatttgggcataataggacgaggccacttgtgatttcaaatatctgcactattatgcacaattgtgctattgaaatgtgcagcataattttgggtttgagcagagaatgatgtgtctttggtggtagtggaaagaggaatacagattgggatctggacgtgttctggcagatcccaacggtcacaatgtacatttatgtacttgggaccttcattaaaatatttgagtcgatccgaccgataacgaattggaaaaaagagaatgttactggggtatatgagtaaggaaagcggcggcgttgat

SEQ ID NO: 4824 - DNA, 810 bp, Glycine max
  unsure (1)..(810): unsure at all n locations
nggttgtccagtacagtacntcgatnnnctngntatnaaccatnngncctgtgaggattgattgggacactgtgttgatatattttatgatatgggctacgtgttgagtacggggagctaatgtttgatgttaagtccaccgcagatggcgtggataatatctcacatatgaggatgtgtgaaaaaatcgtggtgcaggatcaaaccgagcaggcacctagtgccacaatgtgatgggttcgccatatatctaaattctagagatgaagaagagtttaaaggggaagaacatatgttttaatgttgacgacaataagctaacatgtagaaaagtggcaggaggtaagagactgcggctgcggttggtgctatgcttgttcattaaagtacaacagctgaacagctggcgcagatggtgtgggtaaatcaagaatgggcgctagggatgggtattggatctggtttgtaaaaacattctatattgagcactggtgctgaaaaattcccttcttgggatagcgatggctatggcttaatgtgtcgcttttcataaagaggaatggtgagacggatccacatcatagattatgtgtgattaacaattgtaaaactgtaggagaccggataaaagataatgtttgaattctggagtatgtttacttttaagggagggattggtacgttgtgtgtgaatattatgaaaatatcatattattataactgcattgattgaatagatacgtatctattgtatctgtatctttagatttgatcaagatgtattgatggacacgaatggagttgatttgc

SEQ ID NO: 4825 - DNA, 470 bp, Glycine max
agctttccaatgatgcaaacaaaacctccaattaacaactataactcaagatatgacgtggtctttctagggttgtcatcataaaactaacactagacttagacaatttttcaagcattttaactattagaagttaatctaatgttcttttcacaccaaatataatataataaagacaacaacaacaataatatacacaaaatacacatgtgtataggaacacacacacacactatcacaacacaagtacatgtttaggacaaaaccaataatatacaaataataataacaaatatttacagaaaatataatagaacggtctatataagagttctcctaatggtatattcctaggactcaaaacttagggtgttacatgaggcatgctccctgacttgctattcttgggatttgggaatgagtttgaattctcattttccacagtaccgacccttgcaatccaaaaaaat

SEQ ID NO: 4826 - DNA, 384 bp, Glycine max
cctctccagcaacagatacaaatcctggatggatgaatcaccctcacctcagatggtccatcccttatcaacaacaacagcagctgctccttcttcaaaatgctgctggccccaagctgaccatactttcctccaccaatccagcaacagcaacaacctcaaaaacagacaacagttgaggcccctccacaacctttcctcgaagaacttgtgaggcaaatgactatgcagaacatgcagttttagcatgagaccagaaccttcattcagagcttaaccaatcagatgggacaattggctacccaattgaatcatcaacagtcccaaaattctgacaagcttgccttttcaagctgtccaaaattccaaaaatgtcagtggcat

SEQ ID NO: 4827 - DNA, 550 bp, Glycine max
agcttatcattatctatggtaatttgtttactttttgttgtttcttatttttctttagatttgaaagagagttggtttgcatacatatatcctatcagttgtacgcttgtttagtttacgagcatcagaatgaagcttgatccttcatatactactctatgggcaggtcatcacttatgtgtttgatgtcatgatggatttaaattaagtggagaactattttcaaaaggtaaatcccagtatgtggaggctggatttcccatgctgcttgaatccttgaatttctgcaaggttgagcagtatttgaaatgcccaaagtggcctatacatgttaagagaatgtcatttcacactgctaatttgaacttgaccctaaggcaatgaataggaaagaactagaagaaaaaggaaccttgtgttaaaagcttttagtgcacagtactaaagtagaggtggtggtttcattaatgtggaagggtttcatgatattttgagacaaatatcaagcatccataagaaagattgagcacctttgtggataagcttaatt

SEQ ID NO: 4828 - DNA, 791 bp, Glycine max
  unsure (1)..(791): unsure at all n locations
ggtaggtacatgattcgnatganacncnncnnnnctnngnnaagnnnaaccngccnnncccgttntggttgtttttntaaaatatagtgaaaagttttttttatataagggggaattgtaacaggggggggtggttttaatgattatcgcatcgccaatccataaattgcgacatttaaggaagaactggagtaaatgaatgtattcgttattcggatcgacctcataatcatataatggaagtgactcaaatttatgaacaatgatgtgtggatgtgaggatgaaagggaggaagaatcggttatcagaagttagaaagaatgattgacggatggatgtattaagtgtaaattgaatatagttatgtatgaacgatttgcttacttgatagaattatagaccataaaaactggaggataatagaatgatataaatatgtatagataaaaggtagcaagtatgtatggattataggatggacattagattgacgtgtgatggaagattagatcgtttaagagagtagttaagttagggtgatcgtagaatagaagtaaggaattaatagtattaataacgttaatattggtggattgatgaaacgtttgaaggatgaatgaaagaattgtattgatgaagtgtaataaggatgagcagaactaatgatggaatgtgaggatggattcgagtatcgtatatgatgaatgggactggtctgtaatgtagtgtttgtagggatgatctattcaccgtaatgtatagttatgtagtgtagagaatgatatgagag

SEQ ID NO: 4829 - DNA, 920 bp, Glycine max
  unsure (1)..(920): unsure at all n locations
cgacgctggccttcgagacggatgtaacngacactatntaataaataagcctcacatttctatttctagaccaaaagccgaatatttacatcctctatctattaatgagctcgatcgttatttgggcgcgatgaatttggtaggcaaatgacacctcacacgactacttgagtggtattgatcgttgacaacatcctctgtctgtacgtaatgctagatacaggcccggtgcgatattttacgatcaggaataatactgtggagttcactctacaacgtcgatcttcattgtatagtcttcatgaacacgattgactcataatactatcttcgtcatggaacggcccggagggtggttggtccgcgttgctgaactaatttattgaacactgtcttgttatcgcccctatagaaatttctacgcacctacgatgtgggtatctctcatacctacagctttgagaagttaagaccagcgggccagtgaggcgtgttctggaaaataataaccattggagggaattatatatcgcaacgtccgattccatcgttgcgaatctaccctacgtcgtataaactgtgaaccatcactcggcgcaaacttactacaaccttaaatacggttcgaatatattacactgtgtgcatttcggactctaatggttaacattatcgctgaattgatcgggagatgagcatatagtcggtcgatgaggtaacctctcattgtagaattgagtatcgaaactgatctgatagtgttggtaattgcatggtgttaattagcaaactgtacgaatccgagtctcaactagtccatatttcacatgtaatggtctacgactagatagatatacgatcgagtttctatatccgaatgtctctgtaacttatccaattactgtggacatccgtggcct

SEQ ID NO: 4830 - DNA, 1453 bp, Glycine max
  unsure (1)..(1453): unsure at all n locations
atcgcgatacgcgtatntnacgaatctaacatacactgaacacaacactacgtagcggcgatacaatgaagcgggatatacataatcctttcaantntctcccacaccncccagcatgaggattgatagacgatcnatcataccggngcancctnnnagannannanaacaggccgacccggcaggccangccaacgcatatacacaaggaacgcacgagcacaaatctcntcttactgttacaaaccgagcatcatcagacacgatgaccggtgtggcctatctcacggagctgtcaatccacaaatacgcaaacacataagtaacttaacaaaccaactgtctctctaaagacctttactcatacctactttaggaaagcatacgactactacgattgtgttctctctctcaaccaccccaacactaatacagtaatagacccgaaaagagctaacgcaagccacctaacgtaaacgtatttccaactatacaacgacgagccatcggtggtaatacgggcataccactagcacccaaccacgacacttattgtatccaacaccacnacatgtctacatctacgtttctcagacgaaccatacacanctcnacaccataatgtaactagccagacactgatagtcacacancacaacacactactatatacttcacgcaagcagagagacatgactcaaaatcacgaagtcccgcggcgcagcataaatcatacgattggactcctcaccngacaacagcggtantcgatctacatccttacgcanacactgcactgaagatcatctaagcggtggctgtgatgatcacattcgtatgagccaataagctacntcnccctgcacgctctacgcataatacatcacagtgcggcgactttngcggcaactcataaggtatagggtacatctcctccagactctctcccaacaaggtagcctcaacgccatctgctaaatgcacacaacaacatagggagaaggcgcactangacacacaacatgcgcgaaattagacatcggccactctaaccatctacgagtngtgaaccaacgtgaccgctctctgatatagctacaaaggacacaagggggagaaagctaaacgctatgtacacatattcacgcaacgtaatacaaaatacataatacacgcgcactcgctacaaatataacaacggcgtgctacaacangcacgatgtacacactgcgaagctcaacatactatactacatagggtcggcgtacaacacaactgtatgacacacacacacgaagaacttgtgcatgtgagcactaactactgaacgntatgcacgagtaaggagaccgcagacaggctgatacgccggcatcgctgatacgcataatatgacggagtcactatctactcgatagcgcataaccgacatacatggtgccantcatcgcc

SEQ ID NO: 4831 - DNA, 392 bp, Glycine max
agcttgaatctaattcacgtaatgataatcttcatttctttatacatgtctcacaagcatcacatccccaagagtcataagggtaactactctgattcttgtggagtaaaattcttgtcaatacgcataacagaaatagaccttggtccgatgatttatacataaaggacatgaaaaatagacaataccatctttaacttatatattttgattgattaatatcttacatagggaatagaaagaaaaaatagacgactttttcctggaaatccgcataggaaaaatacacacttccctttttttctatcaaaacaatcacaattccttcccttcccacattccaacacattgaacatggatcccaattcattgcatttacacagtttttaatc

SEQ ID NO: 4832 - DNA, 288 bp, Glycine max
gcttcattaaacttcatgaacatagatagttgagtttcaaagatactatctaacaacccaatattttatcttgctttcgaagttctacttattgaaggtatcagtttcgtcttttggtgaaaaaaatgacaataatattagctgcaccaactttaacaaattcgtggtaaaagaaaatactgggataggatatactttatgaacaatgcaagatttatgtaaatcatgacacaaaattttgtacatgctccaaacttttgcttccattttgttaactcttaattgaaa

SEQ ID NO: 4833 - DNA, 830 bp, Glycine max
  unsure (1)..(830): unsure at all n locations
gcacgtgatgatgcatcgtacacgggcaccctnttatttagttgccccgtggcatgtcagttacattactttgtggaggagcttttttgtgtttttgcaggcgagggcggcgcagctagctgctccttgctaacaaacccttagtgctgtagtggtgcatcaacctacgctagcctaacacgccagtacttaatgacgaaagcactgatgatagggggcctgatgaacttgctggaggtgccaggcactctgcaaaactgctaaatgcccacatcatgactggatacactcaatatcctattgaacttcccccattgcactggtagtcatgtcggtacgatacacttcggccggtgcaaatcaaatttgagggcctcgggaataaaaccttgctccgctcacacacggtcatcacaactgggtaagagcggatatgtcgtagcctaaatatcactcatctcacctaccaggtgttcattgaagaacttgaccaacaatggcataaaggttcgatatacctaaagtcgtgttcgacgtaagtacaatcatgttcaaagcgacgatgcaaacggagagcttttaacgaaagtctgtaacgtgcgaaacatacgtgccgacctcactttatctaccacacactaagatatatctctaaccattcgtacgtagcaaatgactcttccttatcacatcgattgctttgcagactatcgtcgcgaaatcttccgtaccaatccatacgacactggcactacctctcctgacccctaaccgtctccaccagaagggaagcgtacctacagttacgtcaacgaactgtacgtacaccc

SEQ ID NO: 4834 - DNA, 897 bp, Glycine max
  unsure (1)..(897): unsure at all n locations
gaataggatcgtgactttcctctttattctattcaccatattgtttattaannnnnnnnnaagtgtgtgtgctctatacgacctataaatataacttactaggaaagatgatttcttgcaaaacacttttttctctgctcaccaaccccagcgcgggggtactcactcgccacagcttaaatacaagactgggcatggcacagccctccccacgttatgacagcgtgtgtctccccccaacggcctcaacgctccttaatatcatcatccttctaacacactcatttgagtgttatccacacacacattgcactttagctctaagcgtaaatcacatccccacaggtcccaaacaaccgcggaagtggtttaaagctactactccacgatacagagcggacaaacgcatgaccccaatcgaattgatccctttccgcatcacttatacgcgcacccagtattcagtttcatctgttatttatacgccgctataccggcttaaggaaccccaacaacaaactcgtctaaatcagcgggcgacaggactctcatgtctatgaaaatattctccattcgaggcaagaaacgccagacgagtgagaactactccgctcacgaggccgtaacgacaatatgatagcctgtggtaaccctctctgatcaattgtcaacaacatatgacactactatctatggtcccatgataacggcaaaattactgaaattctcacgtgtaccgagtgaacacaaatcgatctaccgaagattactgatatacttccacttgacaacaccaatcctatatagaacaaacgagcacttatactcacaaccctcatctgtgatcacactactaatacgtctcgaccaatatatccgttactattcgactagacg

SEQ ID NO: 4835 - DNA, 225 bp, Glycine max
agctttatcatcgtcaccttttaaacattgttgtgcaatctttcaacataaccatgcaagcagctgcatacctatgcaacttgtctaatgtgaaaaaataattgggattaattcatccctttcgcaactgttaaatgtatgttatgagtcatgacaagattctattcaacatccttcttagagtttaatgttcgtctttttcaaaagaggttgtcttttttctct

SEQ ID NO: 4836 - DNA, 305 bp, Glycine max
gaggatttggtctttgccagtgaattgatcgatgtgtgtttttaaataacgcaaatttaatcatccggcgtggactattgataaaactggggcaaatgaagaaggtgataaagagtgagaaacccatgctgtgactgacattcctatacggccatgttttccaccaacccatcaatgtcattactgtgccaatatcaaacgtcttcttacccaccacccaattatccactcaggccatccctcaattaaccactaaacctgtttacacgtactttccatgatcaaaaccactctttgcacaatcc

SEQ ID NO: 4837 - DNA, 466 bp, Glycine max
agcttcaacatcagaccacttccagggtgctggaactacttcacatggatttgatggggcctatgcaggttgaaagccttggaggaaagaggtatgcctatgttgttgtggatgatttctccagatttacctgggtcaactttatcaaagagaaatcagaaacctttgaagtattcaaagaattgagtctaagacttcaaagagaaaaggactgtgtcatcaagagaatcaggagtgaccatggcagagaatttgaaaacagcaggttcactgaattctgcacatctgaaggcatcactcatgagttctctgcagccattacaccacaacagaatggcatagttgaaaggaaaaacaggactttgcaagaggctgctaaggtcatgcttcatgccaaagaacttccctataatctctgggctgaagccatgaacacagcatgctacatccacaacagagtcacact

SEQ ID NO: 4838 - DNA, 436 bp, Glycine max
tgagatgaggaagtgttgaagggtgaaacttcctgcttttattgttgaccacagagtggtaactggagatatgtcgcgggggtcaggagaccttggggacgtcaagtggggtgctattgcccaaaaccaagcttgaccaatcccgacccagcccgggcatagtcggtcagtgagaacctgtgatgtacctaagcaggcgagctcctggcagtcaacagataaaaggaacaaagaccacaaagcaaggaggcttgtggtggctggccagctgtgaactttgattgatatgtgggttatggcctctggtaatcgattaccaagagtgggtaatcgattacaaggcttaaaaatgaagacaggaggctaaaatggtctctggtaatcgattaccacggtgtgtaatctattaccaggcttgaaaacgatgtcaggaagc

SEQ ID NO: 4839 - DNA, 175 bp, Glycine max
agcttcacatttaattcagctggagcttctgtatgattacactccattgtattaaacttctttagtacctctgaaatgtacttcttctggagcataaagattccctttttcgtataagcagactttaattccgtaaaatatgataggattcccaagtctgtcatttcagattcct

SEQ ID NO: 4840 - DNA, 129 bp, Glycine max
cacctctactgtccacatgaaaactttcatcaaatataacttctgtcaaaaacttaaatgttattcaactggatctacttataacagactatataggatccgccaaatcaaattatatatccttaactg

SEQ ID NO: 4841 - DNA, 270 bp, Glycine max
agcttatcctttttggagcgtacccttttttcttgcaccactattcgctaacatcagctggacacgtttcctaacttcccatggctaacatgactgctgaacttaatgcgtgggtttcttattaacaaaactttggatataacgtgccttcatgctggatccaccatctttccttatcctgcaaaggcatgcctcgggccatcattgactatagacccctttgcagaaaatacactggggctaacactacccctctctccttctttaagt

SEQ ID NO: 4842 - DNA, 813 bp, Glycine max
gagtgactagatgcgtcatcagcgacctataatactaagcttaaattatgagagcgacaaaaattggaagaaaatgatgatttctatgtggagtcaagctatccgtaagaattattacaatcttattattacgattatgacagataatgatgaaattaaggaatagtaacattgttgattatatgataactgtattttaccaaatatgtaatatatatatatatatatatatatatatatatatatatatatatatatatatatatatacatattgaaaacactatttaaaaagcaagtacacagaatgggtaaaatattaacctgctcattaattacagattacttgcagaaataaacaaattttatattggaagattttattcataaaagacacagaccacacttggcttggaggtcttttttcgtgctatttttaggacatgagagatacactcctcgcacaaagggtgtatctatgtgtggagatgggttcctttacactagacacctagattttaatttggccaaacatggttctacttgtgaaggggaagtggtgttcagaacacctctacttattttaccccttaaaattaactctaagtgttattttttccgcgcgcatcaaatgtaaatatttttgggcatttaattaattatatcttatagggggggtgaatttagtcgttcacttctatcccaccctttggagtgacttttgacttcggtcacttttctctatgatatcactatgagggggaagcccttcacaattatataatcaccacttgagtgtttttttgtggattcg

SEQ ID NO: 4843 - DNA, 952 bp, Glycine max
  unsure (1)..(952): unsure at all n locations
aatcggtaacacggtatatccgacccaactctcctagccaatacgatanggtaaatctacatataanttaaatcaacacctcacnncnaaggagagttgatgtatcaatcttcaaaccancganactatatatacgaacagccagcacgcatgctagcgtgacgcacaacaccacatcatctcttttggacaacacctacaatcccctttcaccccttcaacctaacctgcacaatataatggcctcacagacacttcttctatgctattccgtgagccgccccccccaagggaaatacctaaacctgtgcacaatacactatcagttgggaaaaccagggggctgagggcacactcaccatattccgtcacagaaaaggccgcccccccccactacagtgagcagggatgctcaaaaggagcatacggcatgcttaaactcgaaccgcgacaaaatattcccccctctgaaatacttcaatggcccactaagacagcccaccccatttcacggtcgtaagaacgggaaacacgggcgactgtaaatgctaagaacgcgggaaaaaaaacaccattaactgtccaattcgcaaagaacccttataatacagtaaacagcatatactcccaccccaggactacccacaaaggaaatgcacccccaaagttgtgtagcccaattctacatacctctgcatatatatcggaccccagtaatacatcccgcaaacacgactgcaacccaaatacataaagccattcttaatggcgcactactaacgacggacactacacctcacttctcaaattcgaacgaatcgtgacaacaccaacctaaacatttgattagaccaagtaacacaactaaacaaatccgtctatcaactattaatgatgtaaatatacactacacgctaccatcttagtcacctacacgtgcaatagcctacac

SEQ ID NO: 4844 - DNA, 783 bp, Glycine max
  unsure (1)..(783): unsure at all n locations
cgagtggcatgacgtgttcaccccnntanaaatcagcggaggacttgagacggtgagtaaccatcaatttcttttttttgaccatgaccttcggggcgtggggtttcctatataatatcaacgcctaaaacatattctcacttacccctgtggttgcactgtacaatgcacaccacttcccaactggcccaaagataaacttatcccattgctcgactactcgaatcccctgaaggggccaatctctcgtgtgattgtacgaattttaacccccgactcattgcgtacaacatttctatgtccatgtctatcacaggtggaatacgtgctttatttctcggattctctcataacggaaggcgctctccccatactaatgtgatctggtttcccatgctatggatcgtgtgtgatttaccctcgaacgatccaattcaagcatctcaacatgattcttatagaaagtctcactggtgctcccaaaatggattctacacgaccgttattcgtggggggttgccattggtgaaccatcgcactatacggcttagttcgtataggacataataatgagtggattggatggatagaacgtaccatgccgcatcacatcatggaccctttcaattggccgatctcgagaactgtagtaattacctttgtatacattctagtgacgattcatactcccctataatatctaccatatttctctgacgtatatataatccatcctctatacatccataaccctgtctggtgccttagtcgaccaccggaacc

SEQ ID NO: 4845 - DNA, 374 bp, Glycine max
aacttggcataatacattcagataccacttttcttgacatcataataggaagtgacctttgcccatacaagatttgattgcgctactctcacagccaaccgagccattgctttggggtctaacaccgcctttgatgggttgctcaccaatggcacaagcacctcccgtcacatcaacaaaagtgtgagctgtaacagcaacatcagcaatgtgaatctgcaaaaggccaacaaatatgccgtcgtgccactataccactaacacacctatcaacttttgatgttaataaacgcttttaacaaacagacggataactcaataccctttttatggaatctatcacaaaaatcccaaggggcaatattaagtgggtc

SEQ ID NO: 4846 - DNA, 952 bp, Glycine max
  unsure (1)..(952): unsure at all n locations
ctcagaagttggattctaacatcttatctcaatttctactcatatcaaacttatttaattaatattnattnnnnnnaaggtgttgtgtgactacatcgacnnccgaannataaacagcagcgatatgatatgaaacagatagcaatccacatgttttttgcacctatagagccactcaatagaccttatagattgtaagagcttaaagccaaacggtttaacactggtgtgaaatccaaacaacaaattatggacaattgtgaaaaatcgctgttgaaatcgggagtctaaaaataattgtgtacctaaccattgctgaggcacctcatgatgaacgtcatatgaaaatctatctccatgttcgctgttggtgggaacgagcctcgctaggaccctgaatggtattagatctatggcagggacaacgttgaccgcacccattgacactgaaggctaaacaaagtgggatgactaggcgaccctgtaaaaagagcccactttgaaattgcaaagacataaccgtttttaccaagggccacgaccaactcctcagaagaattctctgggagctggttcccttaaagaggcgcgcaaagtagtataacggtcctctaaaattaaacaaaccccgacccgctaagaactcttctctctatgcaatggactaacaaacattaagatgttttcaaatcggtattgggagtaaggctcacattgatctctctaattcgccctagtgactaaaatccatgatatctgggaagtcagtaacattctataatgagtgatagaaaaatatcgaatattactccatccgtctcttgtgagtggcgaaatcagtcattgatcgcgctggtggtgacacactctctactacagtgcactaccacctctccttaacaacaatgggggcgcctcctcaactcgtcataatacgtactctcgtggagcg

SEQ ID NO: 4847 - DNA, 520 bp, Glycine max
agcttcccctcaagtgtgagcctcttttatatgtgtgtctcccccttaaacaaaagtcattttcaatccacaagtattcaatggtgacccttaaagcttaattaattgtgggtgccttgactcgcctaacgattgttgtcaacatgctctagtgtcttgcaccaccacgctccacctcttcacaaccacgatgtatgtcgactggcctcccctgttagaaagactttcgatacaagagagatcctcatgcttgagatccaccactaactctattaaactccttggagccagtcacctagtcgaatcatcgactttgaaactaattgattgagaaatttgaggggactaaagcactgggaagattttcaccaatagaagttgaacaatcacacaagtgaatctaacgtcacactttaaccaaaaatcttaattaaatctcaagcttatggggtttctcttcacttatatggtattcaacttttctatttctcccaatatgagaatttacttcacacttatg

SEQ ID NO: 4848 - DNA, 811 bp, Glycine max
  unsure (1)..(811): unsure at all n locations
cccgctgtttgatgctganctacatcgaaccnccnanaattttaagctttgaacacctgatcttggggcataattttactgaccctgggctttgtaatcatcctcacaaaatcttaccacagtatgtagttcatataacattgctgtggcggaatgatgggacaaacctctaaaaccttagtgaatccctcggagaggctccctgacctgagatcagctgatacgttcttccctatccataggccctttaattcatgaataccctattgactgcgccctagtacattttgctttggcgtggactgaactgacaacaatttttttaaatcttgtcaaaacatatgagccatctaggattggatgcttgcataaattaactttgaaatgccgttcaacggatcaaggaacgacaaatgctcgtggccatcagatataaaattttagccgataactttcgcagtccatacagtttgggcctatcgaatattcgactgaggttgctcgctttgtgggactcaccaaacacaattatagcgttgtgagtgtgtccaccaattctctgtttgctacaccgactttattctctcgggctgtctattttccaacagtaccatttctcttttgtacctgtcacccccgtgtccacaaaaccataccactctgtcgatggtttaaccttccccacctgttattcttgtggaagggcacctcctctttctctttgtggggggcccttttaaggaccccttggttttctccctacaggtgtgcccaactctttgtaattacttacattcctcgtaaaccgtct

SEQ ID NO: 4849 - DNA, 510 bp, Glycine max
agcttgtccaattgaaataagctgaaaagagcttattctaataagcttttccatcgagtttattgaaacaagttgttcaatagactgcaaaacctttttttttttgtctttattaggattgaataatgcaccaagtttattgttattgctgatgtgcatagatgttgacagggctgatatttggtcttttgggattacggcacttgagttggctcatggccatgcaccattttcaaaatatcctccaatgaaggtatttacatcccgtggttgttcagagacaatgtctagacacatgttaacattggaccgattgaagttcatgtgatataatttgtaataaaagaaaaagagagttcactttttatttcatgtataggttcttctaatgacaatgcagaatgcccctcctggacttgatgatcgagataaaaagttctctaaggtattgctgttctttctttatgcactgttacacaagagtcatcattatgatacttatagttttat

SEQ ID NO: 4850 - DNA, 482 bp, Glycine max
tgtaatcgattaccagagagaaatatatatttttcaaagatgtaattaccacttaaaacctttataagagattttgaaaatgtaagcttttaaggccaaacctttgaaatcttttaagagattcttttaacaaataatggattattgtgaatcgtttctcttgatctcttgatcttgacttgaatcttgtagtaaactttgaattgcttcaatctttttgcatcatcaaaatcttcatacagcatatgcacttatagaaagaacaagcatagttaggttccttagtgggcttaatatggaagtgagggacaaggttgaactccttccatatagggacctagatgagctagtccaaatttgtataagagtggagcaacaacttaaaagaaagccctctttaaaatcttatggctttcacttttatccagggaagaccaagcacaaggaaatttgggggctgcaccttcaaaacccaggaagat

SEQ ID NO: 4851 - DNA, 519 bp, Glycine max
  unsure (1)..(519): unsure at all n locations
agctttgagccaaaatcctgactcaccataaaccttgacccagggtgagaatgtcaatccttaccctcggaagcggaaagaatagaagggaaatttccaatcaaagaaaaggaaagaaggaagatttccaatcaaagagaaagcaaaaaaagaaaagaaggaaaattccccaatcaaagagtgggagaaagcaaaaagaaaagaaagaaaattcccaatcaaagaatgggagaaagtaaaaaaggaagaagaagaaggaaagaaagctcctgatcagggatcgaaggaaaacagaagaaatgtgcagaaaggtctttggaccggacaatatctgaacaatacagaattgtcaccaaatgaacaaaaagaaggaaaggaaaccacgacctataatggtcttctccctttgattaccaaccaaaaacccgtgcgctagcgactntttcgccccgcactaaacaaaaacagaanaagaaaaagccaacataaaaatcaaaacccaaaacacaccaaagccga

SEQ ID NO: 4852 - DNA, 519 bp, Glycine max
tgatgcttgagtgtccacatgggtgcatgcatgaccagttttgcataaaatttcctaatcatcattgttgcatgtgtttcatggaaataatgtaggacatcccctttatccccgaaccgctggccaaatcctgacatgtatcatgaccagccgttctacaagccttgagccaaaatcctaactcaccataatccttaccctcggaagaaaacacaaagagaaggaaaattcccaatccaagaaagggagaagacacaaaaaaaggaagagagaattcccaatccaagaaagggagaagacacaaaacagaaagaaaattcccgatgaaagagtgggagaaagcaaaaaaaaaaaagaaagaaaaattctcgatcaaggatcggaagaaaacagaagaaacatgcagaaaggtctttagaccagacaatatctgaacaatacagaattgtcaccaaataaactaaaaaaaaaaagacaagagaaaggaaaccacgacctaaaggtgtcctcttcctttga

SEQ ID NO: 4853 - DNA, 411 bp, Glycine max
agctttccttcaccaggtcgtggcagtattcttccctcatagctgcatagaaccttcatcttcattggtgtgctttcagaaacactagaagaggcagtaccatgaagtactcgggaactgtcttgattagatgaagctctaggagtggatcgagctgaaccataattacttctgtcctggtgttgagaagagctccttgtgtcaaactcttttggacccttttcaacctttgtgagcacagaaatatctgatccactctcaaatcctggatggcccaaaatgcctttcaattccatatagcctgttgaataattgggatcacccacaacatttggaaaggcatgctttgctgagattcaccctatctctcattaactcatgagcgtattcctcaccactctgtgtggagta

SEQ ID NO: 4854 - DNA, 489 bp, Glycine max
ttgaacaatatacttggccttcatttaactgtctttgggcttggcagccatactcaacaaagtactttcgacacctattgtacgttgatttcaccaatgctgttatgggaatgttgcgacaatcctttaaaaccttattgatacattctgaaaggttcgttgtcatgtggccatatcgacgtccttctctatcgtaagccatcatccatttttcttttgagatgcgatcaatccatgttgctatggctggactcagttcacaaaatttttctaaattttgataaaaaaaatgtgcttgcaaggagtgtaagctgcataaaattagttatgaataacaatttaaagtataaatgaaagtaaaataaacgtggccatcaaatatgaaattttacccaatttcttcaacatttctttttgtttggcattattgaattttcgactgaagttgcttgctttgtgtcgcacgcaatagacatgataaccgtgggg

SEQ ID NO: 4855 - DNA, 516 bp, Glycine max
agcttgcattttctgtgttttagcaaaatgacacatgatatttattggtcttagttctaagtagacttttgttagtatgatatcaatcctagaatgatttagaaatactctaacgtgcaacttaagtatgttttggaagagaggaaagaaaatgaaaaagggtaaaaaaggtttaaaatttgaatttaaaaaattagaaggaaagaaaatttaattgaaagaaagtaatcacatattttcatcactctcctttttatttttcttcttttatacaccttacacctatttttatctttgaggaagactaacaatactcttttctgttatttattaaaatttttaaaaaatcacaaattttagttaatgatttcacatcaaaaattaagaaatatatataatcattaaataagaaatagaactcaccaatttaaatttataatttctaacaaattttaattactttataaccaaaaaaaagtactagacagtgtcactaacgatatttctcttctttta

SEQ ID NO: 4856 - DNA, 536 bp, Glycine max
attatgaaaatctacaatgcgggggcatatgcttttgttcatatgtacccttggtttttacaccttatttaccttacgttttttacatcacgaatattttgttacttttttttttttaccaaaattaatgaaatattattgaacacctaattttttcttaaataaagtttaaaaatattttttataaggtttaccttaagtgatttcaatcaataaaatttttatcattttgatcttgaaggataataatacattgatgtttactcaattcaagttaataaatctatttaatcaataatcaatagtatctgatttctttaaaattgaaaaacacacacacacatatatacatatatatatatatatatatatatatatatatatatatatatatatatatatatatatcaaataataaattagtggatcaatacatttaaattttaaaacctctatcttaaatgaaagctcacaaaatttaatttagtttaaatttggccccaaaacaaaaaaaatatcaatttaaaactatttta

SEQ ID NO: 4857 - DNA, 81 bp, Glycine max
agctttttcgaaaaaaaaatgacatttttaatgaataaagatggtacgagcaattttggcatttaatacgtttgctgggcc

SEQ ID NO: 4858 - DNA, 456 bp, Glycine max
tactaagcttgtaattcctttacaagcaaagatccacaagggatgtaccctcccttgttctctttgaacaacctagtggatgtgctctccactaaaactgatccacatgacatgtccctctatgttgttactatgaacacaacatcacactttttgcatttgatctttcttgctttcctattaggattatctaaccaaagggtgtgaatttggtcttagagttaaataaatttctcgtgttttctaaaaacatttttacatcatctaatagttttcttgaaaaatctattatatgctctttacaaagttttatcagatgaaaacttcgctttaagtgaaaaaagattttaaaattgttaaaatcagaattcaatccccatttgtgatagttgcctttccattaaataaaaaagttgaaaattttagatagattataaaagctgacgttaacatttt

SEQ ID NO: 4859 - DNA, 354 bp, Glycine max
agcttgtccttggtttagacatgatttatacatgatttaggacttgtaggattcaatttgggcaaaattggacgaggtcaagtgtgatttcgaaaatctgcactattatgcagaattttgctattgaaatgtgcagcagaattttggctttgtgcagaaaatgatgtgtatttgctggttgtggaaagagtagtacagattgggttttggacgttttctggcagatcccaacggtcacaatgtagatttatgtacttgggaccttcattaaaatttttgagtcgatccaacggttaacgaattggaaaaaagagaatgttactggggtatttgagtaaagaaagcggcggtgtt

SEQ ID NO: 4860 - DNA, 509 bp, Glycine max
tgggaggattgatggggacccggtgttgagagaaacgattgtatatgggctacgtgggagtacgtgagctcagttggaggtaggcaacaggggatggtgggtttatgcgcgcattgtggatgtggaaaacttgttgtgctccatcgacctaccgtcacctagtaccacatgtgatgggtaccccataatcctacatcttgagatgatgaaattttgaaaggttaaacttcctgcttttattggtgcactcctatgaaaaccggcatatttctgcccctttgagccttttatggaataagggactgctttactccttcttttgggcctacatagctttttcaaatttcattgaatgttgcatcctctttacaaaaaacctctttacattcttatgtttcccttttttctctagatgacccatccctggattttgtggctccccttaatcccttgaaaattctttatactttatatccccctccttaaatttttcaatcatggctcaactt

SEQ ID NO: 4861 - DNA, 111 bp, Glycine max
agcttgatcctctgggctgtatatattagcatataactcattcaccatagctacatctatgcttccatcttggaggttggcaaggcgtttgtgtaaattattgtttgaact

SEQ ID NO: 4862 - DNA, 214 bp, Glycine max
cctattaatactcagctttccatatcaaaaaaaaaattaggaatgagattccgaatatgggttgcaaaaagtattattgggcatacggaagcccattccaaaatcattaagtgcactttggaacttatattcttgttcccaaaatggccatgtctgaaaaccttttccgcaacactccttgtaaaagcatacttatttgccctaaaatttaccc

SEQ ID NO: 4863 - DNA, 705 bp, Glycine max
ttctttcttcttctagaggaaaactcgtagcactcgatggtctattccgaacccaagcaaatgatgctcgctggtatttacggctgcagcttttgactaccgacgagtttaacttgatctatcctaaccttattcctctctacttttcttttagactacttccttccgtctaactctgttctgcgccttatctccctcatatctttcaaaccccctttcctctatcaacttttggtcacccaaaactctttcctttctcgcaactacgttaataaccggtttcccctctaccacagattatgcacgttccctcatacttccattttttctcagtctatgtcttaattcttacactccccactggttcacttctctcccctccctttccttcaactgtgaacctcgtttcctgtctttattaccctctcctacaccatggaattgggcaatcactccgagtcttcgatatttctctatcactcggtcgtacatgctcgtagtgtgaccctactctatttaatcgaggcctgcgtatcccctctttcttcacactaatcctcatcatgtgtaacgactgacccatcaccgtttatacacgctctatacatgttcctagtcttgctccctgtcacacctctctctttagtaagcattgtccgcgtaggcttgcttatttactttggtctcactacatgcacgcttacc

SEQ ID NO: 4864 - DNA, 360 bp, Glycine max
actcacaaaatacttttgacacctattgttcgttgatttcaccaacgcctttacgggaatggtgcgacaatccttttaaaccttattgatacattctgagaggttcgttgtcatttggccatatcaacgatccttctctatcgggagccatcattcatttttcttttgagatgcgatcaatccatgttgctatggctggactcacctcacaaaacttttctaaatttgtgataaaaaaaaggtgcttgcaaggaatgtaagctgcttaataatatgtatgaatcaccaatttaatgtattaatgaaagttaaatataccgtggccatcaaatatgaaattttactcaatttcttcaacat

SEQ ID NO: 4865 - DNA, 378 bp, Glycine max
agctttcagcagggaagctaagtgtgaattattctattctgcacaggattggagctgctaactgggttcccaccaatcatacttacaatgttgccacatgctcgggtgaactatataaagactaatggaccgctttcaaagattaagcggggagatcgccgtaaacaggctatagcgcaacttgcaaccttgtgtcggaggcctgaagctacacatcaacgtaccaaattacgaacgttagaacgagtcacgaccacaattaagactatggctcgaaacgaggagaggcggtggaacacaggtaaacattgcaccatggcaaaatcacaaggtatcttctatgtcctataaaaagccctactcacaagcccacgaccc

SEQ ID NO: 4866 - DNA, 766 bp, Glycine max
cgagtgactgatatggtacacacggacctatgaaactcagcttgccgccggattgagaaggtcgagaagaagacctcttttatgtgtgccataggttttcggctgatttgttcgaaaagttatcccgcagaccgctaggtatttatgtacgtctgccggaattataggattttttgaattatggattactactgtaaaatggataaatatcgagtggaactcgttaggaggctcgatatagtaattgactcatgttacattgtaggtgtaatgatgtagttgtaggtgtatgactcatgatagggatgttgttgctattggcggtgcaggagttgaacttcttattaccggaatatagatcgatggaggtatacaggtttttttgaattcgatgatgtaggcggttaatattgattttattaaggtaataggacttgtttaaaatgtgaggggctatcactattcaggttttatttgtacgtattgcatgaacgtataattgtagagtttgcctcaagatacagttggtcgatatgcaatgtaattgcgtacggcacgcggttttaaaaagttgacatgtttgtataatggatcgttgactgggatatgttgaatatattgatacgtatgtagtagtgactctttttatatttggtagatattgtatgtgttgtataggatgtgactgaatcagattgcatggaagaatgttttttgagattagtactgtgttatataaagataattttacaatcggaagctttcg

SEQ ID NO: 4867 - DNA, 187 bp, Glycine max
gctgcagttttatccaccatttttttttgtaaatgtactgttgaatatttcctgatttacccgtttggtatttttagcattggcactatattcttattgcaagaatcaaagaccagcgagagcttgattcttccctctatacaaatatcaaggctctgctaaatcttacttcccaacttattcgaga

SEQ ID NO: 4868 - DNA, 538 bp, Glycine max
agcttcaacaatttcaagggagaaattcctaatgagctagcacatcttccagaccttcgctatctatatctccatgaaaaccgtttagctggaagaataccaccggaattgggcacactgcaaaatcttcggcacttgtaattaatcaaatcattttgttaatctcctattgcagagtacactatttatcttactcaattgttcctcattataattataatactgttatgcttatagggatgctggtaacaatcatttagtgggtaccataagggaactcattcgtattgaaggttgctttcctgcactacgcaatctgtaagttattgctggtgaattattttcctccatatagttcatttgatcttaaataaaatgcattggtctctaaatattaatgagttttgttctgtaaccaggtatctaaacaataattatttactggaggaatacctgcacaacttgctaaccaaccagtcttgagatcttgggagtgtttttttttttctttccttgggaccacttatcattctcctcc

SEQ ID NO: 4869 - DNA, 471 bp, Glycine max
aacttgggagctctagatttcaataaccctttcagctgatggaatacgagcgacgaaccgacgaacacctcgactagtctgacaaaggaaccagccggagcatatgatgtcaaactgcatcgatggcctcacactcatgaaagcaaatataaagaatatatatatatatatatactgaaaaaaaaatataaaacgagttgtttaaaagtttgccacttttcttttgtctcaagaaaatattaattattactaacggtagttaattcaggtattatatatttgatttcttttaaataaaattttaagttggagttttacatgtttaaaaattcagaaaatagtttatggattattatttaatcataaatatattggattttataataattatcttaaaaaattagattaataataatttatggtattttatacataaataatatattatcaactgacattgtaaaaaattcc

SEQ ID NO: 4870 - DNA, 517 bp, Glycine max
agcttctacttcaccagattcctatataatgttaacgagatggacctatggggcatctttggagagtagggacaagttctagagatattcatccctacgcgtaggaacaaagaaggaagaaggtacggcttcgagagatttagcggggtgatcgccgtaaacaggctagagcggcaacttgacaaccttgtgatcggaggcctgaagctacacatcaacgtaccaaagtacgaacgtcagaacgagtcacgaccacaattaagactagggctcgaaacgaggagaggcggtggaacacaggtaaacattgcaccatggcagaatcacagggtatcttcgatgtcctataagaatgccctactcacaacgccaacgaccctttgctattggcaaggctcagctagcgcgaggcttacccaccgcgagtcgcattcttcagtccaccttgacattccggcgggagccaaacatttggtttccgatgcgtgggttgggccaccttgagctcatgaaaaca

SEQ ID NO: 4871 - DNA, 754 bp, Glycine max
  unsure (1)..(754): unsure at all n locations
tgagcggtgtgctactactcaacnnccattataatcttctgctcgcattttgaggttaccagaaatactttttctattttcactttaacatttgtcgaatgattggggcactaactgttcttcacccttaccttgatttgacaccctccactgaatcttctcttaaatgtacctcaggcgctttgataacttatattgctttacgatgatctatctatagcttcttagaccaagaattggacatgtatgcatgggattgtaaaccattggttttgcgcttgtgctatctatagaccctgcatcttcaactgattgctgtccatcagtggaaacttcttccactcgatcacacatctgaaggaggtgaacggcggaacatataacgagatcaataaacggggcgactttttcatgctctaaaaccactcttgtttgtttctagttcagcactgctacaaaaaaccacttatttgagacacagcatgtttatcgggaaaatgtgtctttgaaaatgttaccactttaacagttgacttattggattgacatatcttagaaattattgggaaaagttttccaaaggtttctctatccctggattaaatgagatttacctgactttcaatgttatcctatatgatatcatatgctctcagcctcttttcacccatgtcccctgtatctattattttttccgatctgtctctaactttatatcgtggaattgcatcacactgcatctccatcacttgcc

SEQ ID NO: 4872 - DNA, 80 bp, Glycine max
agctttgtgagcatatcgactatattctcctttgtatcaactttttgaactataatcctcttctcagtatggatggagtg

SEQ ID NO: 4873 - DNA, 857 bp, Glycine max
  unsure (1)..(857): unsure at all n locations
tggttatggactaagtccaggtactatctgacactatanaattactcaagcctttgctagggtgatcaaaccttggggaatcctcttagatttccgcatatacccacttcttcatgtttgaatgagaaataactcaacggtatgaatgtcggaccgtaccactccttgtagttaagatttgaccacttgggaggatctaatccggctagctttggaacgggcccatgggtacaaagcattcattattgcacgccatcgtatggacgactaataataaactgtttattataaaatgacttgacacataaaagcatacttagctacctgtatgaactaaaattgctcctgactctcattaattaaaacaaaacaaaattttaacatcctgctcatcctatggctgatcttcatttaaattcaccactggagcaggtggtgcatgccgataaaaggactaatatggctccaaggctggtactgatggcatggtggctctaaaagtagcctccggagaaaaaagaaccggaaaagtaagctcctgagctgctgcttccttctagacacaggaacatctacaaaaaaaaaggtcaagaagaaccgctcaacctctgaatatgccttggcacacttgttggcccagactctaggcagaggaggcccaccccctctaaagagaagttggaatctggcctacctcgatgacagaattctccctctcttagttggtgggggcagactctgaactttgttaattataatttggccacttgcaggacctttaactggcaaccatgctttttaaaaaaagattagttcttataatagactggtaaaggaaagtggctcaacctcttccg

SEQ ID NO: 4874 - DNA, 444 bp, Glycine max
agcttcaacatcagaccacttccagggtgctggaactacttcacatggacttgatggggcctatgcaagttgaaagccttggaggaaagaggtatgcctatgttgttgtggatgatttctccagatttacctgggtcaactttatcagagagaaatcagacacctttgaagtattcaaagagttgagtctaagacttcaaagagaaaaagactgtgtcatcaagagaattaagagtgaccatggcagagagtttgaaaacagcaagtttactgaattctgcacatctgaaggcatcactcatgagttctctgcagccattacaccacaacaaaatggcatagttgaaaggaaaaacaggactttgcaagaagctgctatggtcatgcttcatgccaaagaacttccctataatctctggggttgagccatgaacacagcatgct

SEQ ID NO: 4875 - DNA, 497 bp, Glycine max
tctcagcttgatgttagacctcgatcggtcatctttcctggccgacgccgactgtcatttttttcgatcaatatcggtgaataatatttttttgccgaggtgggctaatgttttcctggccgaataaatgggaacatgccagtttcggccgaaacgaaacatcggttgagctcgcacgaaaaaacctagccgacctacattgtaagttttttatgcaacaccgaaaaaaacaaaatttcccctgccgtaagaaaaaacattatcggccagcgagcgcgggacttgaaattcaagctccaaaaactaacccaaggcaacaagggggttgaggagtatttcaaggaaatggatgtgctcatgattcaagcaaatattgaagaagatgaggaggttactatggctcgatttcttaatgggttgactcatgatatccatgatattgttgagctgcaggaagttgttgaaaggatgaattgcttcacaaagcaatccaagtt

SEQ ID NO: 4876 - DNA, 570 bp, Glycine max
agcttgttcaaatttcggtttaccaattatacattatgaaaactcatttattgaccattataaatatagtacaagtttatctagcaataacttcaaaagctccatttaaacaattatatggacaacaaaacacaaaacgaacaagctgtaacacaatcataattgctatttgttaatcacacttaaacaaaagaatagctaggcaaactaaaatcaccaacaatcacggacaactaacacctaccatttggtaaacaataaataatcttgcatttttattcaataaataaacacttaaaattttttcctgaatttgaataaataaattcactaaggtaatgttgtcatatttatatcggtcatcgactcgattaagatactaagttactaaatcatgcatcaacccaatgaatcactaattgactcccatgattcaacctatattaaaaaattctaaataatttcataacctgcaaacatgtatacttaaagtttatcaaaaatcaagacaaagtttgattttgttaaaaatcttgacaacatatttttttcaaaattcaacatacattg

SEQ ID NO: 4877 - DNA, 545 bp, Glycine max
tcaacgcgcccaatattctttgctctaccaagtcactattggctctatataaatcaaaagatttgttgtttgatttgctcactaactaaatcttaatcgtcttacagatgaatatgaaatctaagcacttagtcttttctctaaatgtattctcaaggtgttttgaaactttttataactttacaataatatatagagagctttttagacaaagaatttgaataatagtgcatgggtttgtaaaccatttctttaaagcttctactatttataggcccttcatcttcaagtgtttgttgtctctaaatggataagtttttcactcgatctcacatctgaagtttttgatcgttggaacatttaatgatttcattaaatgtgcgtgcttcttcatgctcgaaaaccactattgtttgctttcgtgtaaagcactacaacaaaaaaccacttattttgagacaaagcaagtctatcacgggtaagggtgtcttttgatgttgtgtgacaacttttaaaaattgatcttcataggattcgacttatcc

SEQ ID NO: 4878 - DNA, 448 bp, Glycine max
agcttgtagaacaccaaagatgtaagacaaaattttgaaagaagtgtaaattttgaaacaataagagctaatatacaatcagatacctgaaagtgataatttatgttgctatgatccctaacaatgtataattagtccctgttagattacatttatctttacatgatcttgtatatattattacacaaaaacttatgattctgattgatatgtaattacctaataatcagtaattgattgatatgtaatcaatattgattctgatttctccattataaataaagatgagatgtggtcatctaagacacaaaattacagtaaaactaaaacactgctatatggtatcaaagcttaggttattcttgacagaggaataacaaaattcgtcctccacaacctactgttccagatggacctctctgcttgtcatcctatccagcaacctatt

SEQ ID NO: 4879 - DNA, 483 bp, Glycine max
  unsure (1)..(483): unsure at all n locations
ntaggtacgcctgaaggttcataccatctatcataatccataggaaataatttgcaatcagctgctagtattccaagaaatcctgtaagcaaggcttgtgcttcaccaattgcttggccttggtcatcaaaattcacaatgatgcgtaactccctaggaaaactattgactcccctaactttcaccttaatcttcttgatcgtttcttcagagtctttaacaataaaagaatttctcaatatgaaaatgtaatatacttcatatggtgataattacaaaaataaaaataaaatacaatacttgtatacctattgcctcaacagtccaacagtgtgtagactcacgcccaacatgacgtctagttgtttcatcttcttgtggatcttcagatgttgatacatgagaaagagggacattaccagttgggacttcaagagcttgtgtggaatcacttggtggggaagaaatttcaggattcattgc

SEQ ID NO: 4880 - DNA, 455 bp, Glycine max
agcttgttaaagaacttagaaaaaatcaagattaagcttgttcgcacatcgttcccgtgtatgatatccactccacaaggtttgaagtagaggagaccttcaatcctattacgcaacatggtagacaaaagtgggcagttaacttgaatggtcattattgccaatgcggaaggtattctgtgcttcactatccatgttcacacattattgcagcttgtggttatgtgagcatgaactactaccagtatatagatgttgtttacacaaatgagcacatcttaaaagcttactccacacaatggtggcctcttggaaatgaagcgactattcctccttctaatgacgcatggacactaatccctgacccaactacaatttgtgcgaaaggtcggccaaaatcaacaaggataaggaatgaaatggattgggtcgaaccatctgaacactgacaaaaa

SEQ ID NO: 4881 - DNA, 520 bp, Glycine max
tgtaactcatacccaacagcgaatcaacattgcagaaagtgtatatgtgatccaaagaaatgttgggtgagacgaggtggaaggcaacgccgacaccaacatggccgaggggggaaccgatggagctaaagaaagagacatcacaggagaacttgtggttgccacaccgacgcttaacaaacaacagtcaccactgcaaaaataccctacaacgacggttctaaaccactttcaaagataattttgaaccgtctttgaaaccaacatcattgaaagtcaagacttttgacgacggttccatagaaaatcgtcttagaaaagggtatctttctaagactatttttatctaaaaaatgtcttagaaaagtaaccttcaaagacggttcttagaaaaatcgtcttagaatgatacccttctaagacaagtcttaactaagaatcgtcttagaaggacttctaagatgattttttttgctaagaatcgtcttagaatatacattttctaaacaatattttaaat

SEQ ID NO: 4882 - DNA, 515 bp, Glycine max
  unsure (1)..(515): unsure at all n locations
agcttgctgatatgacatgtcgacaatggcttattgaagtggctaaaatgtaagtagcctgattattggctatagtttttgtagtttttataatattcttaaatcgagattttcctatgctgtattttgaatgtattgttatgtctctttatataccaattgtttttttaatcagctaaagaaaatatattactgatggtacaaggagtaccatgtctcgtatacaattgtgtgtatgatgcccttcaacccaaaacaatgcagcctccctaatgcagagaaaaatttacatcccatttaaaccaaaacatatctcagcaactgcaattgaaacccgcagccagcaaaacaacaaatcaaagctgtccaactaactaaactaaaactaataaagttntacaacaatacaaaagtaaaccagcactaactacaaccacattgtatcagctgaaatataccaatcacagaagctgcatgcgcagcctaccatcctgcgtgttgaccaaatccagtac

SEQ ID NO: 4883 - DNA, 447 bp, Glycine max
tgatcaaaacaaacatctaatcattcctgtccactcaatttatacatttgctcattcaagtcattcacaaacactcattcataagaaatcacaccactgaatatcataatcaattagttcactgttcaaacatgcttttgtacaagcaatcaacactaaaataactgtaattaaaatgactgaaacataaagcaactaaataactaataactaaattgctcatgattttcaaaaattaaaacaaaacaaaatttaaacatcctgctcatcctatggctgatcttcatttaaattcagcactggagcagttggtgcatcctgaagaatggactaatctggctccatggctggtactgatggcatggtgtcttcagatgtagctactggagagatatgaactggagaagtaggctcctgagctgctgcttcctcctgagcgactggatc

SEQ ID NO: 4884 - DNA, 446 bp, Glycine max
agcttgcttatgccagttagggttctctcttttcatattaaaaatcaatattgattctcttaatttttaacatcacttctgcaccttagtatttgataagagcatactcttccaggttttaccaaatggcatgctcgagtttctggatgcacctgtcccctacatagtgagtattctagtcctgctttactatcaagagtaatatctgctttatgtcagaaaatgattatttatttgtttggaatttgaatttacctgttcttttaaatccatgttcacggcttgctcttgtacacgccccattattattacttataatgatattgaatatagcgtgttggagcttgtaaagcccatttaatattatctttcacaaattggcacattaatattagagtggcacttgtgtgtttagttctaaatttagcttctactgtttttatctt

SEQ ID NO: 4885 - DNA, 500 bp, Glycine max
tggacaaaacaatagctactctgactaacagaagctacattttctccctagattcaagagaataactagaggtatatatagcccacggtggaggcgcaagtagcactcgttctaacatctgatcctctatggaagagactctatataacacaaatattgactgagcacattaataagaaacaccacctccacattttgtgaaccatctgcagccacccctttgagaattctcacaagtattgatcatgtattctggcacggttctcttcccaccacagtctagcatgcatctcaccaaacttttgtcgactgcatgatatatgaggaaacaccgaaagaaataaatttcatacagttccacatgagaattattacatgctaatgacaatgagaacagaatggctaacagcagacaaatcaaataccacatattaagcatcagagttgtaatttgactttgatgtcagtttgactttaactgactctatctgatggaaaac

SEQ ID NO: 4886 - DNA, 449 bp, Glycine max
agcttccccaagatctttcatttcaaaatttttcgttagaaatctcttggtctcctgtaagaagcctatatctatgctaggaggcagtatatcatcgatatataataccaaaaatatgtatttactcatactgaacttatgatatacacaatcttcaactacatttgccttgaaaccatatgaggtaatgacttgatggaacttgtaataccattgacgggaagcctatttgagaccatagatgaatttcttcagtttgcataccatggactttgagtcacctaacacaaatttttttggttgcaccatataaatcgtttcttcaatgtcaccatttagaaacatagtcttgacatccatctgatgtagctctaagtcaaaatgagctaccagtgccattatatttctaaaagaattctttgaagatactggagaaaaaggttttttta

SEQ ID NO: 4887 - DNA, 610 bp, Glycine max
tgtaggattatggggtacccatcacatgtggtactatgtggcggtcgggcgatggtgcacaacaagttttccacatccacaatgcgcgcataaacccaccatcccctgttgcccacctccaactgagctcacgtactcccacgtagcccatatcctcgtttctctcaacaccgggtccccatcaatcctcccaagcttccacaacatccaagcaaaacaacattcacacagcacaagctatcacagccaagcaaaacaaagcaaaggcagaaaactctgccaaaacaccaaccaaaaatcacagcttttcccactcaaagaccccagtaacaattccttcgatccaatttgttaaccgttggatcgactccaaaattttactggaagtctatagtacataagcctacattttgaccgttgggatctactagcaaacatccagaactcattttacattactctttccacaaccagcaaaaacatgggattttctgcacttgtgcagaattctgctgcaccattttacagcaaaaactgcacaaagagtatatttcgaaaaccacactttccctcatccaatcttggccaaaataatttctacaagttccaa

SEQ ID NO: 4888 - DNA, 419 bp, Glycine max
agctttgacttgagtcatcaagagattataaatatttggccatggcatgagtttcaatcgtcaatcatcaatcatctttgaatcatctatctttcaatctttacaacatcatctctcaacatctttcattatccctgtacaaaaacatctgactcatcacgatccatctttctaaaagacacatatcaacactatctcttccagagaaaaggtctttattcaaaaacttgtgttattcatctttttcattctcttctccctttgcccaaagaacgaaggactaatcgcttgaattcttttgtgtctctcttctcccttacaaaagattcataggactaaccgcctgagaattcttttgattattcccttccccttaagcaaaagatctcaaaagactaaccgcctgagatatcttttgt

SEQ ID NO: 4889 - DNA, 454 bp, Glycine max
tgtttacttgaatctggaatcctgcagcatgctcaagagtcttacaagcaaaattcacttaaaatctcttcaaaaactcagtctgagagattgttcaagtcttgaggagttttctgtgacttctgagaacatgggatgcttgaatttgagagggacatcaataaaagaattgccaacatcactttggcgcaataacaagctttttactttggttcttcattcctgtaaaaaacttgtgaattttcctgacagaccaaaacttgaggatctgcctctcattttcaatggggtatcctcctctgaaagtccaaatacggatgaaccatggactttgtcatccttagcagatttatctctaaaaggaagcagtattgagaatttacctgtaagcatcaaagatcttcctagtcttaaaaagcttaccttgactgagtgcaagaaacttcggtcttta

SEQ ID NO: 4890 - DNA, 496 bp, Glycine max
  unsure (1)..(496): unsure at all n locations
gctttgcagatttggtcttcgccagtgaaaggatcgatgtgggtctgaaaaaaggcaaatttgatcatcctactaggacgactgagaaaactggggcaaataaagagggtgaggatgagggaaaaacccatgctgtgactgccattcctgtacggccaaatttcccaccaacccaacaatatctttactcagccaataacaaaccacctccttacccaccacccagttatccacaaaggccatccctaaatcaaccacaaagcctgtctaccgcacttccaatgacgaagaccacctttagcacaaaccaaaaaaaaacaccaaccaagaaatgatatttgcagcgaaaagcctatatgattcaccccanattccggtgtcatatgctaacttgctcccatatctacttgataacgcaatggtagccataacccctgctaagttccctcatacccccatttttctgaggatattactccaaacccacatgtgcata

SEQ ID NO: 4891 - DNA, 338 bp, Glycine max
tataatatatcgatacgctcgaaattaaacatcggaaactctcgggatattcaaatagtcataactattcacacggttgtccgattcgggcgcataatatgtcgagaggctcggaattgaacaacggaagctcttgagaaattcaattggtataacttttcactcggatgtccgattcaggcaaatcacatatcgagacgctcaaaattgaacaacggaagctcctgaaaaattcaaatggtcataacttttcacacggatgtccgattcaggcctataatatatcgatacgcttgaaattaaacatcggaaactctcgggaaatgcaaatagtcata

SEQ ID NO: 4892 - DNA, 407 bp, Glycine max
agctttttataaattaaacaccaatttgttgaaccttttccatattttccataagtttgaaaaatcttgtgaaacaaataggcataatcagttgataacatgacccttattcaattgctataaagcagaaagggttgaaaaggtgaaagttacacgttgcaattgaaatgaagcataactacataatacatgtttcaatgtcagtattgtttacccgctatggtaactgcatttttttattagcataatatagtgcatctgataactttattaatttgggtattatgataattttatattagtttatttgtgtgatttgttgtctatcaaacaatgtacatggtaaaaatgacaatgtaacttgaacatttattttgtactattttgcttctcatgtgccataaggt

SEQ ID NO: 4893 - DNA, 367 bp, Glycine max
tgcaaaatggaagcaaatatatctctctatgggtggcataataaccctcattaattatgttttaacagccttacgcatttacttgctgtcttttttcagaatccttaaaaaagtggttcacaagatagtctccattcagagaaactttctttggggaggtggcaatgaggcaacaaagatcccttgggtcaagtgggatacagtctgtctatttatgaataaaggggggttaaggattaaagacttgaacaagtttaatgaagccttggttggcaaatggggctgggagttcgtgaataaccagaaccagctatgggctagaatcttgatgtctaactatggtggatggaatgctttattctatggc

SEQ ID NO: 4894 - DNA, 358 bp, Glycine max
agcttgaaatgcagacaagtttggaggaatctttacattaaatttaaccactgaaatagaacagatgtaagccctttttggccactatttcccactatttggatgcgtcttggtgcataggactctccgtcccttggcgcgtcgtcgccttaaaacagctcttccacctggtgtgctcattcttttgcggaaaccatgagtgcgtgccaatgattttcttgatctgcttctcttagtcaggcaaagagcagccttgcctgccctcacaacaaggccagaaccttttcctcttctggtcccaaaattagatgtcaaatccaatccaagggacaagccctaacattgaaaattttattga

SEQ ID NO: 4895 - DNA, 759 bp, Glycine max
ctctccagcttctaggaaggctgacactggctgcgagtttaatttttttatcacgggcaggatattattacagcggtgcaggcaccatactcccatgaacaattcattacactcatactggctgttgagaattcagaccaaatttctatatcatgctctggctggtgctgagaaatacacaatagcgacagtttactggtactgaatcaaggacttttctttggcttgataccccacgacatagaattacttatattttcacaacataccttatttatttgataactctataaagataaattcggtcggtcttgtcgtgagacctctcatcaagaacatacatggacggtgtcatgcacaagttagagtgatagtttaaggagtactatattgaatcgaccaatactctttttctgtccgattaaaggaacaatacgactcatattgctagacatcaaaggccaatttggcaaaaacttttggtgcaccatagcctacatttccttataaaatgaggcaccctcactaaggcccggcccccccattcgttgttgtaataaatatccttttcttattctgttgtgccccttaaaaagaacaactctagttaaaggaggggtggtaaacacaaataacacccggttgaaaaccaactcttgttacccgaacaccccctccagattggaaaaccggggtaatgccccttctttgggccccatctgttcagaaggctttgacccccccctttttgggctatcc

SEQ ID NO: 4896 - DNA, 512 bp, Glycine max
gagcttgcttgtggagcttctatggaggctggatcttttagcttcaatgaagtccttcaatggtgattttccaccatggagatgcagtggaagacaaaggagaataggtgagaggaggcgccctccactaaggaataaaccatggaagaaggagctttgccaccaagagagtgccttggataagacgcttggagagggtgcttcaatggaggaaaagaaagagagagagagagaaagagagaggggggagcatgaaattgaaggaagaaaagaggaatagaagttggactttgaagtttgtctcacaagactctcattcatcaaagttacaacaagtgttacaaatgcttctatttatagactacgtagtttccttgagaagctttcttgagaaaacctccttgagaagcttctttgagaaaactttcttaagaagctagagcttagctacacacactcctttaataactaagctcacctccttgagaaacttcttgagaagattcctaaag

SEQ ID NO: 4897 - DNA, 504 bp, Glycine max
tctacttatgtggcagggtgggcttccttcaccttcttgtcttcaacgcgaactttgaccattgttcttccttcccgcaatgcttcttttcatgtctgcctgagtgggcttataacctaaaccatacttcccacgatttccttgagtatttatcaagctagttatgccgccgttgttttttcctaaacccatcccgggttcaaaaccgttccccaacataactcgggccatcattaccgctgcatcggacagacaaggttgcccaaagagggagtccacggaagaaatgctgaccacttcaaaagactggaaagcagtctctaatgattcttctgcggcttccacataaggcatggaggatgggcagcttaccaagatatcttcctcgcctgacacgatgaccaagtgcccctccactacgaatttcaacttttggtggagtgtagacggcacgactcccactgagtggatccacgggcgccccaacaagcagctgtagggggg

SEQ ID NO: 4898 - DNA, 567 bp, Glycine max
agcttgaaggtaggagaagatgagtggagagagaattgggcacgaaatttatgcctcaaatgaggtctgaactgtgaagtgtaatttctcaaataatcaaagttaaaaacatacacacacaaggcctctatttatagcttaagagtcacacaaaattggaaggaaatttgaattacaatttaaatttcacttgaatttgaatttgtggagccaaatttggagccaaaatttcactaattatgattagtgaatttcagctatggttcagcccactaatccaagatcaagtccaagattcttcactaagtgtgcttagatgtcatgagatatgtaaagcatgaaggatatgcacaaagtgtgactatatgatgtgacaatagaatgtaacaagcaaatgctcacctcccccttaagatggtccataatttaattggattgagcttctcctaattcaattaaaattctctctcaacacacacattcaatagtgcacttaatgcatgtgaaattacaaaattactcctaataccaaaactaattttagtgccctaaatacaagggctgaaa

SEQ ID NO: 4899 - DNA, 531 bp, Glycine max
  unsure (1)..(531): unsure at all n locations
ntaccgtaaagcttggcacaatattttttttttttgccgacattgtgcaatttttttcttatttttcaccaacgccaggcaataattgttttagtacgatcaagctaattttccttgttgatttcgctctatgataggtttaccatcgaggtcgcctttggtatttcatgggaactcaaccgccgttgtgtttcggtcgacattggcctgcgctggtagaagaggcaaagaaaaatatagcagaccttggcagcaaaaaaaaaatacctcgacaaacttggataaaaaacaattctagccgacatcggccaagaaagattaccggtcgctgtatcccaaaaagaatcaccggatgaagccaatcgaacatttccttatcgacatcatccgaaaattattcagggattgaacagaaaaacaatagcccaaaacggtcgtatactacacccgactgatatttgngcacagaccttaccaaaaatcctggcagaagaatgtttgtttttcggccgacatcttgcaatgtttttt

SEQ ID NO: 4900 - DNA, 55 bp, Glycine max
agcttctaaggaggcgagcttaacacttagaaggttttgtttaactaacctctag

SEQ ID NO: 4901 - DNA, 434 bp, Glycine max
taatagaatctggtaatattaataaggactatgaattaattattttgaacacgttgataagtaaattaaccacccttgttacttattacgaggccactcggtccaaccaacttactataggctataaaacgaactcctgcttggagctggggcctatgctgagctttacacagcaaaatctctcaaaagtataatggaacgcggacctttctctctctagaaaccctagacatgagaagctctaaatccgaatccaaactccctttctaaaatctgatatgacgcttaaatagggggccttgaacgtgctcgagcgcttagcacacttatggactgctcagcgcacatgagtgaattatggcttaacgcgtgccttactggattaacggatgaactgatgccgcgcacttagcgagatgaaacggtgcacttag

SEQ ID NO: 4902 - DNA, 237 bp, Glycine max
agcttgtaagacatggatttagaaaacaagccataacttgagtggaatcatattgaaatgcaaaccacatagtcatatatcacaacctataaatattcagtcatactaaccaaatattaagggaaatactaagtgttctaatgtcataataatatagtcaaatacatggctagaaatcaaaatactaataataataatgtctaaactgatggtggtggaggtaaatcatagcacctt

SEQ ID NO: 4903 - DNA, 181 bp, Glycine max
ctaagcttgcctaaagaggtccaggaaggacaaggcagccgaaggaactatttccgctccggagtatgacagtcaccgctttaggagcgctgtacaccagcagcgctttgaagccatcaaaggatggtcatttctccgggagcgactcgctccacttaaggacgacgagtttactgatttc

SEQ ID NO: 4904 - DNA, 408 bp, Glycine max
agcttttatctaccaccaccatcgtcaccatcatcttagctttctattatgtttaacattattagtactttgatttttagccgcgtatttggctatattattatgacatttgaacaatttattatttcttttattgtcaaagaattcaaaatgacacagtctgagaatgcttttgattcttccctttcctataaacaaaagatttcaaatgactaactgcctaagaattcttttgtttcccccttcacaaagtttcgaaggactaaccgcctgagaactttgtcttaacacattggagggtacatcctttgtggtaaaagtagagggtacatctacttgggttgttgtgactgagaacaagagagggtacatctcttgtggatcagttctagtggagggtacatccac

SEQ ID NO: 4905 - DNA, 572 bp, Glycine max
tcctttgtgcaccttttgtttcgtttttttgcattcctttcatctcacacaagtaagtgacatctccatccaattttaccttttccttggggtattttggtgctttatttgttattttctttgcaatgtttgtgagataaattgtttgtgaatccaagactggaatgctttggttgggggctgtaatggatggccctaggcctatcgttgatcctattgcagatttgcatgtcatgttgttctccatgactcatatttacatgcttaaacatgcgcccaccaaccgtttgataaaatgtcgtaatcaccatttcatgtgttgttttggaatttgaatgtgaaatgagctttatgcatgtccagccatcatttataacgtatgagcaacttatattgatagattaaaatgcccagagtttgagataggattagaaatctctattttgtcttacatgtgaaatacatgaattacataaacatgtaaaattgattgggtggattagtcttaatattaaccttgctacactatgatgggcacattgcattccaatagctgttgaaagtttttaaaa

SEQ ID NO: 4906 - DNA, 445 bp, Glycine max
agcttgaatagcactatagatatccagggcctcattgccatcacgaatgctacggactccatatgcttgccctttcgcgacaacaccatcacctatacataaacaggtaacccagtacacaataagcctttagatattgcaagacaatggtaaagattttagactaaatggaagaaatggacaaaatgaaaggaaaattacttggaatctgatatgaaatgggtgtgctgatagctcatccattgtttcggcatataaaaataactggggcctccaaaactgttgcaaaatttaaggcagcatggaaatgtccctatcattacacaatgcattagaatataacaagcaaattttttttcttaagttatcaaagatctttgaaaatgattgctgatgaaaggaaaaaacattgtattgcatccatttaaaaggatgtggccactgg

SEQ ID NO: 4907 - DNA, 363 bp, Glycine max
tctatgagataaaaaactgatgacaaagagcaagtggttgaccaacctgtacgttgctccagttgaagagactattgtcgaacagcctgaaactatgaaagttaatcctcctcatcctgatgttaatttgataaaagtccaacaagaaaatgtggttttcgacaatgcccaatcaatctaaccaaatgtcactgtgccttcgacaaaacacaataaatcttcagatttctaaagctcaaggagaaaaagaaagctctcaaaatgataggtgagcaacacctttggaatacagcaacatgttccagtttgatgatgaggattacacgattttgcttcgatggaaaagttatgaatgtcagactg

SEQ ID NO: 4908 - DNA, 398 bp, Glycine max
agcttgaaggtgcgtaccccaccatttttcatattaaaacactggtaatgtgtctactattattgtgatcatctctttctccatcattgtaggtgccacttgagttgccaagtctctccatctttgggcgtattctttgaaagatccgtaccccctttttgcacatgttctgtagttgcatcctattcggagccatatcagaattgtactgacactgccaaacgaaggcaaccattagttccttccaagaatggactcaagaaggttcctaagttagtataccagatgacagttgtcccagtaagactttcttggggaaaatgtatcagcagtttctcatcttttgcgtatgcccccatctttcgacaacacatctttagatgggtcgtagggcaagt

SEQ ID NO: 4909 - DNA, 343 bp, Glycine max
tgatagcacgcatagactaatgtcgtcttctgcgcccttcgtcaatcgcggtcgacaagcccattgacacgcggagatttacgtcatcttccacgctcacaagatctgtcatactgacttttgagtcacgctgacgggcggaaatacccgagcggttatccatataaactatttgatggctgtaagacgaaaaccctgatagcacgcagagactaatgtcgtcttctgcgcccttcgacaatcgcggtcgacacacccgttgacacgcggagatttacgtatcttccgtgctcacaagaactggcctactgacttttgaggcacgctgaccggcggaaaaacc

SEQ ID NO: 4910 - DNA, 97 bp, Glycine max
agcttcacatttgaagttcaacaaggatgttttttgtaataagcttgggaacacatgtatcaggtctccattctaacgagcgcctcatccatttttc

SEQ ID NO: 4911 - DNA, 89 bp, Glycine max
tgttcttctccatcgcgctctcgaccctgacagctcttctttttacataggtacgcttcgagagacctcctctatttataatataccct

SEQ ID NO: 4912 - DNA, 848 bp, Glycine max
  unsure (1)..(848): unsure at all n locations
cggagagtncggggagtcagatacgatctaacngacactatanaatactatagcttgctccctatcttgtttgatacttgcagtggcacaactttattatttttcataatatatctccctcacatgagagggtgctcttttaaacactcgcttccaacgatgtcatatagaaaaagggctctcctccttatcatcgatatataagcttaattgctacactaataatggtggaaaattatgcatcttaattcctacattcactttgactacgaaattgaacttctggaccctaataaaaaaaggcgaattcctccaaagcaggatggagtatatctcatcaaatattaatatcactatatctaattaccgtgttggataaaagacatcttatacttctacggctgtagtgtatttaactgccgactcgctctaaagaatgatcatattaactcttgtgccgttccatagtctattatagtatggagaggaacttaattaacatccaccgtcttaataaattgaagaaacatagtattaaccttgaccttggtgcacacttgcgttgattgtggggaattgatactaccccaattaatgcctcacttgtgtgacatctttaggctttatttttacgcccaatctgaaaataccaagttattattgtaaggccgccacggaccgacatcgtaccatatttctgaatcgaaataaaacttttgggcgagctgttttttctctctatattgtcgtgtgactaccattccaggatagtgccatcaatacggtgatcataacatttctattagtgcgattaaagaatttttctcgcagacactatcgttgtgacc

SEQ ID NO: 4913 - DNA, 555 bp, Glycine max
agcttgtaccaacattcattagtccagtacacactcaacaaatagtcatcatccatccacaattccaatcattcatgctcaatatgatgcatgcacctgacctcaactatcatatgcaatgtggtaccatccccaaggaaatagcctaagcgtgtccacacgacactctcacttgggaaaactaagcagtaagtgtcgaggtcaccctatcgtgcacaggcaactccaccccccccccttcacagtgatcagcctgagtctcaagggagttccaaaccgagtgacatgcccccaagtacaagtattcctcctcatgagaaactacaagtacttactaataaagtttatactatttccatgtcatatgaagtatgaaacatgggcactatcaaatgcattaaccgtggataattaaagattctaagctatccttttccagagatgcttaaaactctttaatcactctatttttccccttcaaggacatccaacaaggttagtgcaccccccatgttcatacaccatattacatatcacagtgtattttcaacatca

SEQ ID NO: 4914 - DNA, 483 bp, Glycine max
agcttggccctgggagaggcgactgatttctcttctccagcttgtcagtcgtaacttgtctggtgtggtgctccagcatgataggggtggcaggtcggaccagtgttagctattggaactagtaagaagagaaagagaaaactaattgagataagtgttctgatatttcattagttccacttctttacatatttataatacttcccttctaacaaaatataatgttataacagaatttgttaacagcctgctcagctaatttggggaattgttataactacctaaggtagtggatgctgcaaccaattagtgctttatgctttggcacctcaaacgtatcattgggcttctttgttattctccttggcctgttaatctgagtgctagctggtatgaggcctgttgtgttgtattgctatcatgatgtgagtgatggtagataataaagtgttttaaatttgataacttcttgttttatggaaa

SEQ ID NO: 4915 - DNA, 454 bp, Glycine max
tgcaccacaattcgaacctcacgtcagagtgaaggatgtgactaccaagcttgcgacaacgttcaaggctagggtttccagataatgactttcctatgtgaagagaacttgtacgtacgtacactagcagtgagcttagaaagtgaaaaattgatttaaaatatcagcacttcaaagatgatgatagcaaaaaacgtagtggtctgcttacattcaaaagcggttttattaaaaaccgttgttaacgccttaaaaaaattggtcaaaatttcaaaaatgccaccgcatggtaatctacatcggtttttaaataactgatgtagattaaacgatgttgattcattattttgtagtagtggaagaaacatcaacctttcaacttggtcttaaggaaaggcaggtcacttatttggggagccaacttttcaatgacaaccaaagtcgtataaaaaaa

SEQ ID NO: 4916 - DNA, 976 bp, Glycine max
  unsure (1)..(976): unsure at all n locations
acgaatgaatgaacttaccctcccagcaaaacattcaaacaagggataaanccntaanccaagcgaggtgtgtgcgtcatacacccccggatttataaagaccccgcaggaagccagctcgaacgcgcaaacgcgaaatttttattgctgccaaggaagcgaagggatggaagacactaaaccatttcccggagggacaaagaactgtctaacaaagaacggccctacccacccagatccaaacccagtcggcgtcggcaaaggcgaataaaccgccgaggctaccggaccacagcagataaagaccgcccgtaaccattccgtcccacgaccactgaccatgtccctcaccaccgcccacggaaatggaaagggggaggaggggaatcgccacggtatcctgagcggcaccgcctgctcacgatacgctaagccaaaagagggacacgccctcaccagcataggggcgaacaaggagccgcccccaccataacaacaacggcaagccccgtatcccatcttataagaacgagaaggactccgtatggtgggagggccccaccaacggcaggaccctcaggagaaacgaaccccgcgaacggagaggagcctctctgcgccaatgaaaagacagcacaacaccgacccccaacaaagcacttggcacgctacgcacgcaactcaaggtccgacccggaaacaatcacctccgggcagtagggaaggacccgtaaaaaacgcaagaaaaggtgaacaaacgatacactgcgacacgcaagattccctacatgcaggcgacacaacgcaatcccagtaacgaaatgcacgccgcaactaaacgggtacctcccatcaagaggacacacacactatccacccaaccgcgcgacgtcaggagacgggcaccgaaagcgaacggcaccgaccacgacatctgagcgaaggacgacagaacccacaacctagcacaacagcc

SEQ ID NO: 4917 - DNA, 461 bp, Glycine max
tactcaagcttgaaggttggaaaagatgagtggagggagagggtgataatgttctctaaattttgggcctcccatgagagtctgaacttttaaagtggaattctcaaatgatcaaagttgaaaaaatgtacacacatgacctctatttataaaccaagtgtcacacaaaattggaggaaaatttgaatttctattcaaatttcacttgaatttgaaactgaaatttgtggagccaaataagattggcgtatttctccagagcaggttggtgtatttctctgcaaattcaattagcaataaattcaattagtgtgttggataaatgacaattgaaactccaaagcagttagtgtatttctctgcagatttgcttataagagtgatcatatgaactcttggaccgttacacaatcttctcaagtatggggagtaatttattttacatgtacagtttaaaaaaa

SEQ ID NO: 4918 - DNA, 419 bp, Glycine max
  unsure (1)..(419): unsure at all n locations
gcttcaagaaaaagatggcctcagcaaatttcttattttcagaatggaattctatcaatagacctccaatctttaatggagagggttaccacgactggaaaacccgaatgcaaatttttattgaggcaatagatctaaatatttgggaagccatagaaatagggccttgtatacccaccacagtagaaagaattacaatagatggtagttcatcaagtgaaagcataactatagaaaaacctatagatacatggtctgaagaggatagaaaacgagttcaatacaacttagaagccaanaacataataacatctgccctgagaatggatgaatacttcanggtttcaaatcgtaagagtgctaangaaatgtgggacactcttctattacaaatgaaggactacagatgttaaagatct

SEQ ID NO: 4919 - DNA, 178 bp, Glycine max
  unsure (1)..(178): unsure at all n locations
aagaggaagccgtcctgagagcttgagatgattntgtgtgtgattgcgatttcctacaagtggaggagacatgcccactacttgtattttagaaatcttccatctgtcttgtttctttgtatgaaaggaagctgtccatttatcgaaagctcaaatcggttgtggatctatcttgtat

SEQ ID NO: 4920 - DNA, 371 bp, Glycine max
gcttatgctgcatacatctacaacagaccttctcattctcagcagcaaaaacaaccacaacagaacaattatgacctctccagcaacaggtacaatcccgggtggaggaatcatcccaaccttagatggtcgaatccttcacgacagtagcaacaacaaccttattttcaaaatgttgctggcccaagcagaccatacgtccctccaccaatccagctgcaacaacagcaacagccccagaaacagcaaacagttgaggcccctccgcaaccttcccttgaagaacttgtgaggcaaatgactatgcaaaacatgcagtttcaacaagagaccagagcctccattcagagcttaaccaatcagatgggaca

SEQ ID NO: 4921 - DNA, 453 bp, Glycine max
tcatgctgaagtatgtatggcaaaacttcattactgttgttgaacacatactagtgagcttgtaaaaaatcttctacacttggagtgataacatgcagtcctcttgtacccttaccgcctactctgtcgtcatggcgatactcaggaaggccaacaggtttagccttttcaatgtagtctgaacaaaattcaatggcttcttctacaatgtatctttcaacaatagatgcttccgggcgatgtagattcttcgtatacccttttaagatcttcatgtatcgctcaaccgagtacatccacctcaaataaacaggaccacaacatttgatttctctgactagatgaacaattaagtgaattatgatgtcaaagaaagtagggggaaaatacatctccaactggcacagtattattgcggcctcattttccaggtgatcaaacttgacaggatca

SEQ ID NO: 4922 - DNA, 381 bp, Glycine max
actagcaatgaattcatattatgatgttgcccaagttaacatcataatatgaattcatattggaagaactttcctcatctcacgattaccttttcaaaacttcaattccagaagcattaggcaagggtctgaaatttggtgtactggatctctcacacaaccaattctcttatgattccagacggtttggaaaattcgattagactaaattctttgttctcaacaataaccttctcttaggaacaatacctcccataaatgggacgaatatgcactaaattgatcaagcttgacttgtccaatataatagattaacaggaagcatcccagtggaaattggccggcttgggagaattgatcaattttctcaatttatcattt

SEQ ID NO: 4923 - DNA, 453 bp, Glycine max
  unsure (1)..(453): unsure at all n locations
tgtagctgaatactgttccagctgcagcaggaactctntattaagacattntaggactntgtcctcatcctaaggtcctccacccctccctcttagtctttttgcagtatgcaagcttacctttgtagttgcttgtagccgtatatctttagttgagacaaaagaaaaagaatgtttataaagaaaatgaatattcaataagctttaatctgaaggatatagccaaatgggcagaaattgattattcacagcatactctagctagcatgattnttaaatgggtatgattcataatcattcaaacacaatgtagatagaaccaacaaaagtgtttcacgatctgtgaattttgtatacagccaacaacagctgctagaaatctctgtctgtcctagtattaggcctcgccagattatgtgtctgatggctaatatttaccagagccagcttgat

SEQ ID NO: 4924 - DNA, 322 bp, Glycine max
atcgggtatcaacaccatcatcttaaactccctacaccttccttattgagagagagagagagagagacagagttttaagtgagtgcttctctaaaattttctcttctcaattacgaacatgttggggtttggtgtataggaccaacaaagcttatttccaatggatagcaaggtttttttcctggttgatgtgctttaaattatatttatgcaatcatagtaacacaattgtggattctgtaagtcaatttagattattgttaattacctaagtttttgtgtaattcatacataattaactttgtcttaacaacaacaggca

SEQ ID NO: 4925 - DNA, 460 bp, Glycine max
  unsure (1)..(460): unsure at all n locations
ntnttgaggtccncttattgtgtgctgttntatcttcctgatacaatatttaccctagccctccctcaaattaggggcatatcatgactaaaacccttatgctctcttaaaccctaaaacaaggtaggaaatacttaaaataggcttaggggttttacaaagaaaatatgattatcattttcagctcaaataaggtgcaagggataaatttttatccaaggttgactttttggctaagtgactaaaaataagtgactaaaaataaggtgcaagggccttgatcatttccacctcatgtaattaatctaatagtctaagaatgatgcaaaatcaagaagttaaaaacaaatcttctctcacaaggtatgtaatcgattactagaagttgaacctatntttaacagctattagaaatntgaattcaaactgtaaagcctataatcgattacaacatttgtat

SEQ ID NO: 4926 - DNA, 386 bp, Glycine max
  unsure (1)..(386): unsure at all n locations
agcttatcatagaagaatcttttccctcgactatggccactaccacctcatttcgtgcttgatcatggcttaactggtggatcgtgtgagcaatcattggaaggtggttatagaaaggaaagaataaagaaacagtttgaggaagtgggtagttttttttcacgtaacaattagttctctctgaattcttatgttttttcaatttttaaaattatttatctccaaattcttatgtttgtgatattcaagtgaatctatttaaaaaaaaaacaaatgaaaaatatatttgtttcttatcttacaaatcagttttaacttcagtaccaataagagttaatttgttaacgaatgaagagatacnngatanaaaacaataaaaaaaaagc

SEQ ID NO: 4927 - DNA, 392 bp, Glycine max
  unsure (1)..(392): unsure at all n locations
ttctntgctttcttatcattgaaggttntcctcttagatctttccattattttcttgaaactcgggcaatcaactcttagatgtcatggttgattacattcataacactttggaacagaagatgaatcttctcctcttttctttgatttcctttgtttcttaggaatttattgaatctctttatgaagaaactaaaatcatcatcttcttttatttcattcaagtcttctttaccactttcttcttgaattaaagatgaagctttatgttgtgattcctttctttttcttgtcattntcttcatgttgatttagtctcatgagttccattttgtgttcctgaagcctttccaaaagagttgcaagagacatgttagtaaggtctcttgatcc

SEQ ID NO: 4928 - DNA, 307 bp, Glycine max
  unsure (1)..(307): unsure at all n locations
taacagacttaacactattgacaacaatgtcaatgagttcttacaccctggatacaaaggtttctttgaatcattttccaatgtatcataaaaaagggcatatgcttgatgaaaaaactcttgtccaagatcacgaatcatatcctctaatctatctcccatttctatatcaaccaatttagtttggaaccccctttgcatgtcagtcagttcaccatgctctcatatgtgtcgtctactacttgccatctcctattcaaatagttaatacaaggataanaatatntctcatcctcatttgatcgac

SEQ ID NO: 4929 - DNA, 445 bp, Glycine max
  unsure (1)..(445): unsure at all n locations
tgtcaaagaatccaacctctcatggtagaagcacacacatattatcacgatttcactatcttacggatcaagtgaacaaagagaaactgaaagtggagtactgctacacatttgatcaacttgctgatattttaaccaaacccctcaaaggggagaggtttaaaatgttaaggggcataattggcttgatgaacttaggagatcagaattaagggagggtgtgagagtttaattttgttttgtgtggggtagatttgtttgtgctctgaatataagagagagtaacagaattttaaaattctgttataagtactagcctaagtgtgaagggttattactctgtttttgcttgtataaaagggcatacatacatcttaataaagaggatttattcattctatcantttcagtctctagtgctattcctagtangtgtgcaattctg

SEQ ID NO: 4930 - DNA, 308 bp, Glycine max
agcttgagatgaagaagtgttgaatggtgtatcttcctgcttttattgttgaccacagagtggtacctggagatatgtcgcgggggtcaagagaccttggggacgtcaggtggggtgctattgcccaaaaccaagcttgaccaatcccgacccaacccgggcatagtcggtcagtgagaacctgtgatgtacctaagcaagcgagctcctggcagtcaacatataaaaggaaaacaagaccacaaagcaaggaggcttgtggtggctggccaactgtgaattttgtgtaatatgtggaatgtggcctc

SEQ ID NO: 4931 - DNA, 383 bp, Glycine max
cgagcgtctcaatatattatcggcctgaatcagacatccgaatcaaaagttgtggctggtcaaatatgccatgtgcttccatgttcaaggttgaacatctcgatatattatgcacctgaatcgggcatctgagtgaaaagttatgccatatgagttagccgagagcttcgttggtcgattgcgagcgtctcgacatattattggcctgaatcggacatccgagtcaaaagttatggcagcttaaactctccatgtgcttccatgtttaattttgagcatctcgatatattatgcacctgaataggacatgtgagagaaacgatatggcgtatgagagatctgagagccttcgttgcttattttcgagcgactccatatattat

SEQ ID NO: 4932 - DNA, 273 bp, Glycine max
  unsure (1)..(273): unsure at all n locations
gcttctagagaaagctacatgaagctgtcttttaaaaacgctgcccacccttcatcaattgttggatcttctcgaaattcggtcttaaacttcacaagacacttgtcaatcatctgatcattgggatctttgagaagatgtctggagtgtgctacaagcctcttaatgaatcttctagagaaaacttcatgaagctgcctgggttgaaacgctgcccagccttctttaaccagtggatcttctcgtaatttggnttgcaacttcacaagacac

SEQ ID NO: 4933 - DNA, 436 bp, Glycine max
  unsure (1)..(436): unsure at all n locations
tccattgttcaatttcgagcgtcacgatatattatgcccctgaatcggacctccgagtgaaaagttatgaccatttgaattgctcaagagcttccattgttcaatttcgagcgtctcgatatattatgcgccataatccgacctgcgagttagaatttatgaccatttgaatttctcgagagcttccgttgttcaatttcgagcgtctcgatatattatgtgcctgaatcggacctccgagttggaaggtatgaccatttgaatttctcgagagcttccattactcaatttcgagcatctcgatatattatgtgctctaatcggacatccgagtgaaacgttttgaccatttgaatgtctcgggagcttccattngtcaatttcgagcgtctcgatatattatgcgcctgattcggacatccgagtgaaaagttat

SEQ ID NO: 4934 - DNA, 297 bp, Glycine max
agcttgtacacctctgtttctctacctttcatcacaaaccctggtggttgagtgacaaaaacttcttcttctagtgagccattaagaaatgcagattttacatccatttggtgtatttcccagcaatcgtagctagccattgctattacaagtctcactgtttccaacctagcaacaggggcaaatagttcatcataatccagaccttgcttctgcagaaatccctttgcaaccagtctggctttgaactttgttacttctcctctagaattcaacttagttttgtagacccattta

SEQ ID NO: 4935 - DNA, 420 bp, Glycine max
  unsure (1)..(420): unsure at all n locations
tgtaaactataatatctactagatagagaataaacattcctaagtggaatccctcttagaggtaaagatctctaatttgtgtagtaaaatacacaaatacccatttctgttgtaagcctagtagtggctgacaaagatgaaatccagtggtgtaattgttctagttgatgcaaggttggaagtcaagtgggagtactagcagtttgttgaaatccagtgatttttagtccagtaatgggtgattatgttagtgaaatctcatctagaaggatgatgactggatgtagcccaaggttggggtaaactagtataaaaagctttgaataaacaactctttntgaaactaaacatgctttcatacaaagtctttacataatcaattattttttaaacaaacgctttagattgctaaaaaaaccc

SEQ ID NO: 4936 - DNA, 334 bp, Glycine max
  unsure (1)..(334): unsure at all n locations
agcttatcataatcgattacatagttatttttgagacaatgactgatttattcaggagtctctgccttaatcaattaccatgtgatataatcgattacttctctttctataagtgtttcagaagtaaacaagaacactttaatcgattactttgagtatctaatcaattatattgctcttgagctgattctagtttcttggaagaacactttaatcgattaaaaagataatctaatcgattaccttgtagatntaatcgattacaagcggttataaatgttgtctctataaataaccacctcgtgttctctctaataacaccacattttgagct

SEQ ID NO: 4937 - DNA, 423 bp, Glycine max
tgtgatcaattaaaccgatacgagacataactctgtaagcttaaacaacttgtgtaattgattacggtaagattgtaatcaattaaaacagagagctttgccttctaaagaagttttctaactttagaaattttcttctcactcactcatgataatgcatgatgcataaatgatatgttaaagactaaggtgcaacattcaatataacaaccaatacaaatgccattcaagagagttgggcatgtaaaagacaaaacttcttcaagatcttctccaatcttcaagcttaactcttcatgttgctcatgttgctccccatatctctaacaatctccccctttttggctatgatgatgctaaactcgaatatgtcattgagtacatttggagggtctgagtgttgagagtagagacttgcttttc

SEQ ID NO: 4938 - DNA, 331 bp, Glycine max
agcttgtgccttttcacgtctggaatgtgaatgttgcctatacatccaaagacccttaggtgctttgttgatggcttcttaccgttccaagcatcaattggagtcttgtcttttacagacttatttagacatctgttgagtatgtaaacagcactgtagactgcttcagcccaaaatgcgttaggtagtcccttatgcttgagcatcgatctagccatttctataactgggcgattctttctcttggacactccattttcgtgaggagaatacgcgactgtaagttgtcgctcaataccatcatcctcacaaaatctttcaaactagcgag

SEQ ID NO: 4939 - DNA, 190 bp, Glycine max
tatcaggttgcttaatatctccaacagaattactgcaattaatccataatatttattattagctgacagtcggatcatgctgtatatatcaataagttaaattgatagtgatactggtgtatatattaaactccatgaaattttggcaaaaccaaaaagcattaaaccatggcctggggtggcatcctca

SEQ ID NO: 4940 - DNA, 401 bp, Glycine max
acaatggcagtgcaatcttactaatatcctgtatgaatctcctataaaaacctacatgtccaagaaaagaacgcatttcctgcataaaagcgaggtaaggtagagaagtaataacatcaatcttggccttatcgacctcaatacctctaatagataccaaatgccctaagattatatgtaaccacatggtacaaaaactattgttaagagtaaagacccttcccgtggcctttggacgtctagtttggtcattcagacccccaccattctgcttcttcttgggatataggcaatctctttgaatatgccttttctgtctgcaattgaaataggtcatgtcttcatcgacataatttgaggagatgtgccttggcttaccacacttgtaacaagtgatctga

SEQ ID NO: 4941 - DNA, 239 bp, Glycine max
  unsure (1)..(239): unsure at all n locations
gcttttatggtttcttattccaggttcaacactagcgtctntaatgtagtcatcctctgtagtgccaaatntcttattcttctgactggaatcttcactggcatttatggcagacttagaatcagataatctatttaaagcatcacttctgctatgctcaacttcaatgaaggttttgtctggccaattttgtggcttaataagcagcggtgtctctataccaattccattaatttgat

SEQ ID NO: 4942 - DNA, 406 bp, Glycine max
gcagcttaacattaatttcagcgtctcgttaaatactggactcaatcagacatcggagtaaaaagttattgtcgtttgaattgcctcagaggttcaacattcaatttcgagcgtctcgatatatttcgggactcaatcagacatccgagtaaaaagttattgtcgtttcaattggctcagaggttcaacattcaattttgaccgtcccgatatattacgtcactgaatcggacatccaagtaaaaagttattgtcgtttgaatttgctcaaagcttaaacattcaatttcgagcgtctggatatattacgggactcaatcaaacatacgagaaaaatgttattgtcgtttgaatttgctctcagcttcaacattcaatttcgagcgtcccgattattacgagagtc

SEQ ID NO: 4943 - DNA, 453 bp, Glycine max
  unsure (1)..(453): unsure at all n locations
cccacacttgtagcgtcaatgcaaggaaacatgcttatggctaggaatccaaaatttggttttagagttagaaaaacatgaaaattaggatttgcttgtgagagtttttgctcgaatttgggctgccccatgtttgatactttacatagaggtagcgtggaaaacaccttgcaatagtgtgtatacataggtaaatataaggagcatgaaattcctagcaaagtatgaataattgttttcttaaatgaatgtatgatagtgtggaatgcccttttaaatgcaaatatgtgcaggatgtaattagctttccaatatgcatataaataaataggagtgaaacagtaaaaatntgtatggtgtacttcatatgtacgtaagtagtttgtgatagcaaatgtttaggatataaattaggtgtaaagttngacgcaacactctgagcatgaaagtgtg

SEQ ID NO: 4944 - DNA, 350 bp, Glycine max
gcttctacttatgtggcatggcgggctttctttactttcttgtctccaacgcgagctctgaccactggttttccttcccgcggtgcttcttttcatgtccgcctgagtgggcttatagcctaaaccatacttcccacgaattccttgggtttttatcaagctagttatgccgccattgtctttgcctaaacccatcccgggttcataaccgttccccaacataactcgggccatcattacccccgcatcagacagacaaggttgcccaaagagggagtccacggaggacatgctgaccacctcgaaagactggaagccgtttctaacgattcttctgccgcttccacata

SEQ ID NO: 4945 - DNA, 457 bp, Glycine max
  unsure (1)..(457): unsure at all n locations
ttgccggcgctccataaacgttattgcttacgcctgttcgtgggtcctccactttcgagtttggagctgtgatccatgattgcctaagagaagaccctcaagcaaatcctccattcttaccctttttcggagccccatgaatgaattgcgttgtcattcatgtgtcttccatttttgagtttggagctgtgttccatgattgcctaagagaggaccctcaaggcaatcctccattctcatccttttccggagccacatgaatgaattgcattgtcattcatgtgtcctccactttngagtttggagttgtgttccctganttcctaagagaggaccctcaaggcaatcctccattctcatccttttccggagccacatgaatgaattgcgttgtcattcatgtgtcctccactnttgagtttggaagtgtgttccatgatttcctaagagaggaccc

SEQ ID NO: 4946 - DNA, 59 bp, Glycine max
  unsure (1)..(59): unsure at all n locations
tcttataccacttgtttgacaaatggcctcaaatatcttaaagagagnggggggggggt

SEQ ID NO: 4947 - DNA, 461 bp, Glycine max
  unsure (1)..(461): unsure at all n locations
tggccaaatcctgactcaccataaaccttgacccagggtgagaatttcaatccttaccctcggaagcaaaaaagaacagaaggaaaatttccaatcaaaggaaaaaggagaaggaaaatttccaatcaaagaggaagcaaaaaaaggagagaaggaaaatttccaatcaaaggaaaaaaaagaggaaaggaaattcccaatcaaagagtgggagaaagcaaaaaagaaaagaaagaaaattcccaatcaaagaatgggagaaagaaaaaaagagaaaaaaagaaggaaagaaagctcctgatcaaggatcgaaagaaaacagaagaaatgtgcagagaggtctttggaccagacaatatctgaacaatacggaattgtcaccaaatgaacaaaagaaagaaaaggaaaccataacctanaagtggtcttctccctttgattaccaaccaaaatcctgtgcg

SEQ ID NO: 4948 - DNA, 426 bp, Glycine max
agcttgtcacctacaacgagatgaattaatgttcatatattctttgagagatctccatatttagtatccgattatgtctggaggatggttaccttcgaaggagaagacttgtgggaaaccaaaaaaaaaatggctacacattaacattagattatacattttttacatttaatgtataattaactaaaattatatttctaaattatacatttgttaaatatatgactttttttttgtcaccataacattgatatagagtaactacaaactaaccacaaaattctaacaaccacgtcatgaatatttcattgtattttacctcataatttgaccaagctccaaattcataagccataacacaatattgaacatatatttttcatatatcaactaccaactaagcaacaatcttctccactctaacat

SEQ ID NO: 4949 - DNA, 418 bp, Glycine max
  unsure (1)..(418): unsure at all n locations
tgaccctcctagaggaggaaggatgtaaacaaagaataacttggaaatataactcgaagctcaagaaatgtagctttaagcccaataacttggtttggaggctccaaggagatgccgggaaggatagctcagaaggaaagctctcaccaaactgagaaggcccattccgcatcaccgagtccatgcaaaacgatgcgtataggcttgaagatgtcacaggaaaggtcatccctaggacctgaaatacgactcatttaagaccatattacagttaaaatcgggtagtgtactctttntcctacttcatatnttctcccacttgtaaaaaaataagggtttttgctaaagagattntaacgagtcacacccgagtactcatgtaaaagaggagtgcttcatgaatcacattatcaataca

SEQ ID NO: 4950 - DNA, 290 bp, Glycine max
ctttagacccgtcgttgatcaagctttcgataataacggaaatgccatggtgtcacattctaaggcgattatttatcaccgccttacaatgtacgacatgaaaaccaatttctattcccttaatttgaaaaatcgtaccgcgtcatgtactacatcggttttttaataaccgatgtacatagcacgatgtggaagcctacttttgagtagcgatatgtgtttcctgctgacttaaggagaataagtccaatgaacaatgatacgttaattgatataaactgacaagtttg

SEQ ID NO: 4951 - DNA, 444 bp, Glycine max
cgtgaacttgccaaatctcctttctttatactaactctcttggtttcatccaaaggcaggtccaaccaatacgtaacatcatcatcatcattggaaccaccttgtggaaggttagagccatttggttctattgaactctcccttatgacaccctttcttttctcaattagtactgctccattagtgaaaaaccaatccacagaggaagggaggtactcctccataggatgcaagtacatatatggggaatatgccttgatcattgccttaatttgggataaattgggcatgtaagaaaagctacccttggtatttttcaaacaagaaataggtaaagctttggaattagtccctcctccactctgagctacgaaagttcctacactaaccccttgagcttcaatgcctctcttgattggcctaacatcatacacattgaacctc

SEQ ID NO: 4952 - DNA, 277 bp, Glycine max
  unsure (1)..(277): unsure at all n locations
cttctgatcgcatgttcgttggacactaatgatcggagacttatatctacttttgcggagaggtaacataaggaaactagtagtttccatcttccagtaagaaaagtgaccatcaccctggatgatgtggcatcgttgctacatttgcccattataagcgcattcccatagcttgaggattntcttgtggatgaagtcgttttcctgttagtggaatttcttgaagttagttcagaagaagctagagctgagacagtacaatgtcatgggacatatg

SEQ ID NO: 4953 - DNA, 445 bp, Glycine max
  unsure (1)..(445): unsure at all n locations
tctggtgggacatcttgacttgctttccaatctgacattctccacagattctgccttcttctattttcagattggggatgcctctaacagcacctttgtcaatgattttcttcatgcctcttaagtgcagatgtccaaatctttgatgccatattctgacttcatcttctttggaggatagacatgtggaggagtagctggtttcttgaggtgtccataggtagcagttgtcctttgatctgctgcccttcattagaacttcactcttctcatttgtcaccaagcattatgactntgtgaagtttacattgaatccttcatcacacagctgactgatgctgatcaagtttgcagtcagtcccttcaccagcagtactttgttcagactangaagtccatcatgaactagctttcccattccaatgatctttcctttagagccatc

SEQ ID NO: 4954 - DNA, 445 bp, Glycine max
tcttctcctgttagaagagtcaattcttcttcactgcacatgtgtggtatttagcgtgcgctatattaagtaattattccctccatgatcttcttttcacagtttgagctattgatctaatattttgccaagctcttcaaattgaaatcaggactctacgtaaagctgatgagctggaaggcctacatattattcatgtatgattcatttggtatggaaaaaattggaaatgatggcgattctccaatggataataaatgaaaaatatgcttaattctatatagcagaaccatttatatctatgctaaaaagcaattagggcaagagcctcatgaaagtcttaatgctatataaaaatatctagattgtagagctcgcaggctaatgtttatgacttaatggctatgcttgcggagaaagatctgagattcttatttctttgtgt

SEQ ID NO: 4955 - DNA, 160 bp, Glycine max
ctcccgtgcccgtcaccaaatataaagtaagagagctgatcatgtaaatttaggaattgattcgctcatttcccatatttgagcatctaaacaggcgtacaaagacactatacttgcataacaatttcatacagacgtgccttcataagaagactttgat

SEQ ID NO: 4956 - DNA, 395 bp, Glycine max
  unsure (1)..(395): unsure at all n locations
agcttctaagttagtcctgttcagttaaattaattggggtttcataatttgctgtactaagttcctatatttaatataatacataatttgctgttaaaaaaaattaaacctcaacgttagtttttagaaaggctcacacattattaacttttagctttcaattcatggtatgtatggataatttgctatgtgatgaggtgtggctntcaaagtctgcaaatacttttgaagaagttattagtgaccctgttgcactaaagagttatgaaaatgaagagtttgaagagggttttgcagtgtgtctagagaaggaggtcttgtgcttgcccgaacctgactatacanagtacttacactacaacaatttcatttttcctagctgtagagttattcaa

SEQ ID NO: 4957 - DNA, 414 bp, Glycine max
  unsure (1)..(414): unsure at all n locations
tatggttgtccncaagtcccataattgttgggcctcttccaacagctgattgttacaaacaattttgctttttaatctcccttctgcttccattttttttatcagcaaaggtaatctatatattaattggagtacccgaggtacttaatagtacataaaggaccatacaaatggttccacaatcagacattgatattctgaaagggaactagagtatggatatatatttgctatgaaatttacattaaataggctcgtaacaatgtaggctactactgatacaaaaagctntgtgtaaagctgcttgcccattgattgaaatggactgtgaaacctttctcanaaagattgtaagtcattttcaactaaccattacaattatgtnntgaatatttgagaatgccatgtaccact

SEQ ID NO: 4958 - DNA, 181 bp, Glycine max
tgtaccacatgtccttcgagtgccccaacatatcacagtgtgcacatgtgggactttctttcttgacgcatttgcctttagtgttgtcatatcggttctttgatgcagaattcacaaaataagctctatagtttgaagcatttgtgggtgagtgaatgaccacaatttccctttgagcttc

SEQ ID NO: 4959 - DNA, 323 bp, Glycine max
  unsure (1)..(323): unsure at all n locations
agccgtggctatacgagacatcttgccaaacaaagtcaggttagcgataactcacctgtgctttttcttccatgctatatgtagcaaagtcattgatctagtcaagtttgatgaagtggaaaatgaggccgcaattatactatgccagttggagatgcattttccccctgctttctttgacatcatgattcacttgatggtgcatcttgtcagagaaatcaaatgttgtggtcctgtntatctacgatggatgtacccggttgagcgatacatgaagatcttaaagggttacaaagaatctatgtcgttcagaacatctatta

SEQ ID NO: 4960 - DNA, 256 bp, Glycine max
tgtgcaaatcaaatcactcctacatttcatctctagcatgcatattctctctttaccccctcctcacgtttggttttttagggaaaaacaccataactaaacgcgccgcaaggtatccctatcgcaccagatccaaatctagaacgatgggtgatcaagaggagacgcatgaacagatgaaagccgacatgtctgctctgatagaacagatagcctccatgatggaggccatgttaagtatgaagcagctcatata

SEQ ID NO: 4961 - DNA, 403 bp, Glycine max
  unsure (1)..(403): unsure at all n locations
agcttatggaacgttgtcatgtcaatgatctacaaacaagtgacaaattacattctaaacaagaaatggcttagcaaaaagtgtagtcatgaaaaattcattgaggcaatgggtcacattttgttagcttatatatttatatacctcctcttataacaaatgattgagtagcatgtgggccaaaagaatataaaatttattgatgaaacagagcatcccataatttattaaaagatttaaggggggaaccaacatgagaacaaaaattttagggaagcatcccatcccttaatttttatctaagggtgattagagaatgttctcatttctcacaatcatcaagaattctcacttaatatgcccacatatgtaaagaatcaagggaaatatattatntacctga

SEQ ID NO: 4962 - DNA, 436 bp, Glycine max
  unsure (1)..(436): unsure at all n locations
tgtaagtctgattgctggaatcttgctatgaaatctgagttagatgctcttgcatcctcaaacacttggtctattgttgatctgcctgaaggtaagcaaccaattggttgcaaatgggtttacaagatcaagcatcatgctgatggatccattgaacgatacaaggcccgtttggtggcaaagggatacactcaactagagggtgtggattattttgacactttntcaccagttgctaagcttaccacaattcgcacccttctatctgtggctgctattaaggactggcacttagaacaacttgacgtcaacaatgctttccttcatggtgatctgcatgaggaagtatatatggatctgcctcctgngttcttactgcctggttcttcttctaataaagtctgcanattacataagtccttatatggactgaaac

SEQ ID NO: 4963 - DNA, 402 bp, Glycine max
ttaagtcaccgcagctgcagctttgaaaatattgtatatccttcggctcttactctagccaacattctttcatcccttgcaaatgatatttgaatctattacagcttcatagatgtatatcatatagagttgaagtgttggacaatatgttgctgaatcatctatttacttgctatttgagtatatggcgtatgactagaacgatatttttgcttcgctgcctaataagaggacttgttttaaaaagcacgatctgcaaatgggaaagttacatatgaatttaggtatatcccttgatgttcgtcggtcttgccgagctaatcgcttctaaatcagacattataaaagataaatactcttcctagtcatttgtcatatttcatattggctcacgtgttgaca

SEQ ID NO: 4964 - DNA, 431 bp, Glycine max
  unsure (1)..(431): unsure at all n locations
tgtacacgacaacaccaacaaagtccaagaatccctccatatcaatgatgctcaataccaacacgctctttcccaccttctctctgtctctcaggtatatttgcaattcatgcatattgatatgctcatatgcaaaaactagtttcaaattttattcttgcgtatggtgtttgtttattatatgcatagtttgtcaatcttccttaaaactttattttaatattaatggtatgtattgaatgtttttaatggttgagatatgtagcactgacacagaagtgctgaanttattgcagttgaaaggagaagagatacttgagcaattcgaagcttctagttcttctgagccggtcgcttctataactcatgaaacagatagtgaaaatgaggatgctggggaaagtaagggaagtgaaaatgatgagataatc

SEQ ID NO: 4965 - DNA, 341 bp, Glycine max
agcttcaacattcaatttgagcgtctcgattatgacgagactcaatcagacatccgagtaaaaagttattttcgttttaattggctcagaggttcaacattcaatttcgagcgtctcgctatattacgggactcaatctaacatccgagtaaaaagttattgtcgtttgaattggctcagagcttcaacattcaattttgagcgtctcgatatatgacgagactcaatcagacatccgagtaaaaagttattgtcgtttgaattgtctcagaggttaaacattcaatttcgagcgtctcgatatgttacgggactcaatcagacatccgaagaaaaagcta

SEQ ID NO: 4966 - DNA, 374 bp, Glycine max
ttgaatgcactattcaatggagttgacaagaacatcttcagactgatcaacacttgcacagtggccaaagatgcatgggagatcctgaaaatcactcatgaaggaacctccaaagtgaagatttccagattgcaactcttggctacaaaattcgaaaatctgaagatgaaggaggaagagtgtattcatgacttccacatgaacattcttgaaattgccaatgcctgcactgccttgggagagaggataacagatgataagctggtgagaaagatcctcagatccttgcctaagagatttgacatgaaagtcactgcaatagaggaggcccaagacatttgcaacatgagagtagatgaactcattggttctct

SEQ ID NO: 4967 - DNA, 350 bp, Glycine max
  unsure (1)..(350): unsure at all n locations
gcttgacgtagtaggcaaacaaaaaagtatggccaatttggggtacacgcacgtcaatttacacgtgtcacactttggtgcacatggtgccaatatatagaccagatatcacatccatcaactttgatcactttcgacattgctatgttccttggggattaacatctcacctgcaactggagtggttcaaagacaataatttttatctgggcatggaagggccgcatgacgctcaagaaattatagtgaccccaatgaagtttgatgtgagaggtaatgtgttgagttggagattcaagttagtacgttccatgcaggtcatagaggatcggngagatcacaccaatatg

SEQ ID NO: 4968 - DNA, 455 bp, Glycine max
  unsure (1)..(455): unsure at all n locations
ctaagcttgaatccctccatgtttcacaaagcagttcatcagacccttgtgaaaaagtagcaatggaagagtttacactgatgaatctagatgggggaaagaaccttgcaatgaatttttcctccacctcttcccaagtgttgaggcttttgtttggatgtgattaaagccatgtttttaccttacctgccaaggagaatgggaaatctctaaggtagacaactttagcatcttcgttagaagctcccatggtactgcaaaattccatgaaggtagacagaggtgtgtatggatcttcatgatccattttagcaaaacggtgtgagccaatcagactgagaagtgttggcttcaattccacaaccttgttgctgaaaggaggaatgactctggtgttgtaatgctttggtccttgttgataagcatagtcaccaagagtcctncatggtgatcta

SEQ ID NO: 4969 - DNA, 333 bp, Glycine max
agcttcattcctcattcagaatatattaatgttacaacttcaactaccattttctttaaacactatctcaaccaacaatatgttaatttcaaatggactctttaatgtccaaagatctaacgataagaacccagatcctaaatttcaccattcttttcagttccttaacagaaagcctgattcctgtagaggctataatattgctagtcaactgcaagcatgctttagtctcactctcacacaatatgtaagaatcctgatcaacatagaggtttatattttcaccacatgggcaagtgtaatcataacggcctaaacatatcaagagaatat

SEQ ID NO: 4970 - DNA, 329 bp, Glycine max
  unsure (1)..(329): unsure at all n locations
tgagctcggcttgagttgaatacgtaaagcttgagttgacatatgctttgtttaaggctctgctcgacttacataaaagtctgacttacgagcctatttaaaagcttgcttaaagacgtcttttattaattaattattttaaaacctagtgaaatactaactaaaaaaagaaacttataaaatttcgtataaataatgtacaaatctaaaaataattgataaacaaaattatattgaattcaagtcgttaaagcacaaagtatataaaaaaaataaaaatagcataatattaaaaaatgtatggattagagatgatntacactaatata

SEQ ID NO: 4971 - DNA, 251 bp, Glycine max
ctaaaacactaagtgagttgtcatctcaagctcatgccagtcaacctttaccttcgtctgttttgcaggttacaggttgcacactttgtggtggatctcatgggtcaggcttgcaaaatcccactagaaaaaacatcttatgaagttaattacatgggaaagcaacctacacaaaaattgaatgcgggtggagtctctggatttcaacatggtcaaccttaccatcatcgtaatgatggagaactcaccct

SEQ ID NO: 4972 - DNA, 280 bp, Glycine max
  unsure (1)..(280): unsure at all n locations
aatcatcgtgatttcaaaattcctgttgaagatgaactgtccttctgctctgcttgatgtatgggcaagattcatagattttcttctaagctttctcaaactgtatacaattctcctttggaattaatatacagtgatctgtacggtcctgctcctataaattctcattgccaatttcgctattatatgtcacttgntgatgcttattcaaggttgactgggatatattttctagagaatacatgtgatgctttatcttgttttaaacaattcaagtcac

SEQ ID NO: 4973 - DNA, 320 bp, Glycine max
ctgcagctttatataagctgaaccattttatcaattaacacaagttgagttttattcagaaaattagagtttatctcttttatcctagtgagagtgattctcctaagttcttgagtgattcaagaacaccctggctatatcaaaggactttcacaacctttgtgtgttgcccttgtcggaaagagagattctttccttcctttcatcttcaaccttgttctttcaaaccacaaatccataaaatctatttctgcccaaaattatctcgtggccataactccccttttacgcgctcaaagtaagtgattcttgagcctaaa

SEQ ID NO: 4974 - DNA, 445 bp, Glycine max
  unsure (1)..(445): unsure at all n locations
tcttatccaaggctcatcttggtggtgaagctccttcttccatggcttattccctagtggatggcaccgcctcttaccttttctcctttgtcttctgctgcatctccatggtggaaaatcaccattaaaggacctcattgaagctcaaagttccagcctccatagaagctccacaagcaagctttcatcactctatagaagcttctcaagcaagcttccatcacattgataccttcctaaagaggtataacatggaaacttagaagtgactatttgccaataggaattggagtcactctaaatatggaggattttcgtaaaactcatgaagtgagagagtacataactagagtatcatatgctagcatagtaggagctattgtatatgacacgattttcacatgttctaatatcatttatgcactangtgtaacaagttgatatc

SEQ ID NO: 4975 - DNA, 150 bp, Glycine max
  unsure (1)..(150): unsure at all n locations
ctcatactcgcacaagtacatatgaacgaatatacttggtatgcactagacaattntctcgctatttggctttagagtggagctttatcatattttacacttgcatctaaaaaatacatagcatcatcggtcatgtgagatggacattca

SEQ ID NO: 4976 - DNA, 383 bp, Glycine max
  unsure (1)..(383): unsure at all n locations
tattcatgatatgggatgtcactctacaaatgtttgggaatggaagcttgaatggagagaagacacctttttgataatgaggtgcaagcgacagccaatttcttggatgatatctcacagngtcatattgatcgttagacatcaaactgctgggtttggaaaccaaaacctaatggccagatttctacaaggagcgcatactgtatgctactacaaggagcagcagatcagactgtggatgaggctttataggacctatggcaactcanaatccctttaaaaccaacaacatttgcttggcgattgatcaaagatagaatcccaactaaagggaatgtgcggagaagacaactggagaaaggctttgcccagtcctacaacta

SEQ ID NO: 4977 - DNA, 347 bp, Glycine max
  unsure (1)..(347): unsure at all n locations
taaggcccggccatatntctaattaacatttgaagtcgaaattggttcaggattgaaaaagacgacattttttacataaaagatatgctcagaaggttatgatttattcgtacataatgaaatcatagttgctttctatcaggattaagttttagaaatcgttctgcaactcaagtctattataaacgtagcctctatctgtatacatccgtacgtcactttttcattgctaactttgtttctgcgattattaattacgtttgatttagtgaagacgtatatgagctatatatgtggcatgtcagattaaaaatataaacattgcatggccatgttcatctttacca

SEQ ID NO: 4978 - DNA, 425 bp, Glycine max
  unsure (1)..(425): unsure at all n locations
atcctcatagtcgcctgcggcatgcaagcttcattcctcattcagaatatattaatgttacaacttcaactaccattttctgtaaacactatctcaaccaacaatatgttaatttcaaatggactctttaatgtccaaagatctaacgataagaacccagatcctaaatttcaccattcttttcagttccttaacagacagcctgattcctgtagaggctataatattgctagtcaactgcaagcatgctttattctcactctcacacaatatgtaagaatcctgatcaacatagaggttnatattctcacccacatgggcaagtgtaatcataacggcctaaacatatcaagagaatatagagttgttagatacctgcttgcttaccgaagacaaagtctggaatcagaatggaggtagaggag

SEQ ID NO: 4979 - DNA, 301 bp, Glycine max
tgcccgttagaaagccaccgctcatgcacagagaaaggaggggcaaattgggaccgactcttatcaaacaaagaaggagtgtctgtcaactggttcccttgatggaaagaaggaagaaccggggttcttatttcgtgcggaggatttctgaatgttcccttgatggggacaaggggttgcatcacttacaatcccgttcttgctataaggcaacttggctaccccatgagaggggcaccactaaaggaagagctcgcgcctgtcatttcacaaggtttaaataagaccaacatggagacac

SEQ ID NO: 4980 - DNA, 262 bp, Glycine max
acaattgtgcacgttaacggacttttacaagagggggtaattatacgtggatggcgcttcatatggagatgattgtgcaaacctggacctatcgtgttatgcatcttggaaactctaaagctagtaagggcacttgtctaattaccttattgcttcacacatagtgtgttatgtatacttgggcgacattacactaaagtacttttcatggtggaaggttcgcatgcacgactaaagagattgttttgtgataacgtcgctc

SEQ ID NO: 4981 - DNA, 123 bp, Glycine max
tgttttttaaatatgtcgcgaattacatatatggaccgcgtgattcgttgacaactcttatttctctttatggctgccatttcactgtgaaaaatatcattcagcccgaccgtaatttatcac

SEQ ID NO: 4982 - DNA, 382 bp, Glycine max
  unsure (1)..(382): unsure at all n locations
taacttctcttttagaaccatgctatgtgctcgcgactggtccctctcttcccttcgcaacttgagttcactattgctaccccatagagcttcgcgaaatttatttcggccgtactctttcttgcgagccctcttggtctcttggtcaaaggctcttgcggtaattgcattctcttcccgaaccccgcacaactctttccaatgtgtgttgcggccaacttggacttcttcttgggcaaattccgcctttctaactcgcttttgagaggctggacttcttcgtcctctttcggtggctctaaaactctcttcgctgacgacttttaacttggcagccaacttaacctcgatattaaactttaagccttcatggtagcaccan

SEQ ID NO: 4983 - DNA, 412 bp, Glycine max
  unsure (1)..(412): unsure at all n locations
tgtaactactgaattgaagggaaggggtgtgttatgctatgtatgattgtgcattcttgtatatagtaacttttcaccacaatttacaagtttccattcaactgtaccccattccaccatattcttgtggctatgattgtggattagatgatagtattctgagaaattaccgtacttttgaaataatacaccttaacaaaacacgaaaatgagagaataaagcattttgtgccaaaagaaaatacagattttgcatgggccacacaatttatttacgtgattttttacaaaatgacatatggagctgctgtttcagcatatggcctattctatctatgcttatggttntgcacttcagtcaatacaataatgaaccanaatacacagaaggccaaatggagttttcttacta

SEQ ID NO: 4984 - DNA, 436 bp, Glycine max
  unsure (1)..(436): unsure at all n locations
gcttattacattggacaatcagttcgcagcaacatatccaatgttagtatatttcaggctgtatcaattttatgaaagcctagtgctggctaaaacggtgtaatactaatactctttttttattaaaaaaaaaaaccttcaggttagtagtgaaactggtagagtaacactctcgctaaagcagactgcttgttcttcaactgatgcatcatttattcaggactactttctcatggatgacaaggtataaacaattatcatgtaactcaaatattattgacacttagtgttgcattttattattctacttattaaattggttattttatgcatgctaacacacgcggatgtctatccttgtgctgtttcaactatgaacttcatatgcacgcanacatgctngttgtcttactcaatttctttccaactgttattt

SEQ ID NO: 4985 - DNA, 460 bp, Glycine max
  unsure (1)..(460): unsure at all n locations
agctttaaaacgattntctgtcctcaaaggcgcgcttagtgcatgttagtgaatatccgctgagcgagctggacgcactttgcgcaggaagagacaaacgcctcgttgagcgagctgatgacgcgctgagtgcacagatgcttctcagattctcccaactcgctaagcgagctaagtgcctcgcttagcgcatgactctcgctaagcgcacaagcctcgcttagcgagataccagctgctagccttcacaaatttcatcctttttacttgaaattgaagttgaaacacattaaattcacattgttgggcatttctactgaacaaaattaagctaaacctaaaaatatgtacaaacctacaaaaagaaccataaattggggaaaagacaaacattttataacactnttctatacaaaagttagtcataaatgacgactaacagtaatcaattacaaagtta

SEQ ID NO: 4986 - DNA, 340 bp, Glycine max
  unsure (1)..(340): unsure at all n locations
gagaaagagaggggggagcacgaaattgaaggaataaaagagagagagaagtggaactttgaagtatgtctcacaagactctcattcatcaaagttacaacaagtgttacacatgcttctatttatagactaggtagcttccttgagaagctttcttaagaaaacttccttgagaagcttctttgagaaaacttccttgagaagctaaagcttagctacacacacccatctaaaaactaagctcacctccttgacaaaatacatgaaaatacaaaaaaaagtccctactacaaagactactcanaatgccctgaaatacaaggctaaaaccctatactac

SEQ ID NO: 4987 - DNA, 337 bp, Glycine max
aagaatctaagcatttctgagggtatgcttaggtgctttaattggtccatggtctttgtcacttgctttgggccacgttcatacgtcgtatgtagtgtatgttcatgggggtggagtgcactgaccttgtcggatggcccattcgtgggggacaagcgtggttagagaatctaagcatttctgaggggatgcttaggcactttacgtggttagagaatctaagcatttctgatacaggaaatagaataattgtggtagagtgtactttgtattgagggggcttgttccctggtaagcaacttctcttggcctcatgcagatcacctatggagggggg

SEQ ID NO: 4988 - DNA, 338 bp, Glycine max
  unsure (1)..(338): unsure at all n locations
cagaacaagccagacatgtgttttacgtccaagatctgtgtgactcaagatggttagtggttctacgacgaataacaagtggtatcaatcaccataatgatgcttcaacacttgatattaatgagacacatgttttctgccaacatatgcctttcataaatgcagaacatgatgatgatgatgtacatgcttatngttatgatcacaatgaaggtttattggagagtatccgttcataactacagtataccaaaattatgtatatcatatcaccttaattgcaataaaattttataatgtacatattctttatttcatacttatatgaagaatcaatt

SEQ ID NO: 4989 - DNA, 408 bp, Glycine max
tatgctgcatacatttatcatagacctcctcagcagcaaaaccaacaatagcagaataattatgacctttcaagcaacagatacaatccaggttggaggaatcatccaaatctaagatggacaagtcctccacaacaacaacagcctgtccctccttaccagaatgttgctggtccaagcaagccacatgttcctcctccaatacagcaacagcagcaacaatcacaacaaagacaaccaacaattgaggctcctcctcaaccttccttagaagagttagtgagggaaatgaccatccagaatatgcaatttcagaaagagacaagagcctctattcagaagttgacaaatcagatggagcagatggctactcagttgaaccaagctcagtcccaaaattctgacaaa

SEQ ID NO: 4990 - DNA, 391 bp, Glycine max
agcttaaatatgagcagatgttatcagaccttacaaagaatcacctgctaagaaaagttgtcgcatgtaagttgatgctaattcctttttctgctactaacagataagttacttattggaaattatgttttctttaatacctttctattaatgatatttggttacaactacagacatgtacacagtggaattccaaaaacgaggacttcctcatgtccatttatttttatttttacatgccaacaacaaatatccatctccaaacgatattgatcatattatatcagcagaaataccttcacagaaagatgatccagaactctataaattagtgcaaaatcacatggttcatggtccatgtggaaatttgaggcccgcatctctatgcatg

SEQ ID NO: 4991 - DNA, 424 bp, Glycine max
gtacttacccgttgaagactgaagaacgatgatgaacgaatgaagaacgtcgaagaacggtcgaaaaccttcgcgaaatcactcacggaaacgttacggaagcgcctcagcttggattttcttcacggaaacaatttttctaagcaaattcgaaagagagagaagggcctaaggggctgaacccttttatacttcacttctccccctatttatagaaaattgggggagaagcttgccacccagctcgcccaggcgagcagggttgcttcctctagaagcaacagccttctggaggaatcttctggagggcccaagtgggcctggttgctatttgaacccccatttttactaaatacacccccctgccttttttggtgattctttcttcgtaaagttacggaaacttacgaatttcgtaacgata

SEQ ID NO: 4992 - DNA, 437 bp, Glycine max
  unsure (1)..(437): unsure at all n locations
tgtacctcctaacttatcacttacaagctntcaactaactcataagctaattntatcaaatattatatgcacttccaaaaaacatcttatgatattttcatgaagctcaaaagtattttgttataaaatcaatttttctaaaagtgtcagtagttataattatttttatatgagaagaccaactttgataactgataattttgttttgattactcaaaatgatttttgaattaaattataataaaaacggaaaataataggcttcaaaatcaattaaagagatatatttcattttggctgatgatgaattccaatgttttttaattcatagcatgacctctctcgtctaatggcatggttgatttnaaaagaaatgatggaaagaaaactatttgaaaagcgacaaagataaanatggatggtaatttataataagt

SEQ ID NO: 4993 - DNA, 157 bp, Glycine max
gataccttgaaccctataacgcaacgtggcggacaaaagcgggcaattaacttgaatggtcattattgtcaatgcggaagggattttgcgcctcactatccatgaacacacattattgctggtagtggttacgtgaacatgaactactaccaatata

SEQ ID NO: 4994 - DNA, 448 bp, Glycine max
  unsure (1)..(448): unsure at all n locations
ntgaatgctctattcaatggagttgacaagaatatcttcaaactaatcaacacatgcacagtggccaaagatgcatgggagatcctgaaaaccactcatgaaggaacctccaaagtgaagatgtccaggttgcaactattggctacaaaattcgaaaatctgaagatgaaggaggaagagtgtattcatgacttccacatgaacattcttgaaattgccaatgcttgcactgccttgggagagaggataacagatgaaaagctggtgagaaagatcctcagatccttgcctaagagatttgacatgaaagtcactgcaatagaggaggcccaagacatttgcaacatgagagtggatgaactcattggttcccttcaaacctttgagctatgactctcggatggagctgannagaagagcaagaacgtggcgttcgtgtccaatgatg

SEQ ID NO: 4995 - DNA, 289 bp, Glycine max
catgccttagcagtacaaatctggaatatccacaaagtgattacccttcttccacaacaacaagggtcttcaaaaatgtgttaagagtatccacatcaaacttaatcaaatgacctctcaccctcaactacttaggtgatttgtcctaagggtcatagaggtttgcatagaattcttttacaatggaaacatcaatatttgtgtccacaaagtcagtcaactcctcatccaaatggtgtctctcgagttccttcttgagctcatcaaactctgtatagtaaactaccac

SEQ ID NO: 4996 - DNA, 450 bp, Glycine max
ggcttctacaatcttcccctttttgatgatgacaaacctgttatcaagaaatgcatacaagctctatcttctaatcgatcactcagataattctccccctttgtttttgagtttaagctttacttgaaattaagttatttaattatatgagttcttgatttaatcccaactttctctccccctttggcatcaacaaaaagccaaagtgcgtatagagacataaaatcatacattcactcataatcattcaagcaaggaagacaataatgcatacataaactaagcaaggatgataataattcattcataaactataatataatgtcagatactttagagagtcatccaagataaccaaattaaaaacaactaaattagaaagtaacatactaataagtgtttcaaaacatagcccaatacacgactagaaatcaaaatagtaataacaat

SEQ ID NO: 4997 - DNA, 304 bp, Glycine max
agcttatataatagagagtcaaatctagaattaaataaccaatgtgagagttaatcttataatattttatttaaagacagagagaaataaatcattaagatacttgcactatttagttagtattataaacatctatcattgctcaagagtttttttttaaatattgaattatgaaaaatatatgaattaaaataaaatgtttatatctaattctacatgtattgtttcatgataaaattttattttaatataaattaataaaatattatatatagaaattattcatattttattataattttaa

SEQ ID NO: 4998 - DNA, 449 bp, Glycine max
  unsure (1)..(449): unsure at all n locations
tgtaacctatgtattttgcctttagttgttccttnttgtatgaacaattggttatggaattcaaccaataggtcattgagttccatattctagagtgaaacccaccattttgcatgtttccttttgtgctttcttcaaccattatatcaatgaaatttttcactgcagtctcacgacaaagttttgattccatacatattgttaacattagttgtcatcatctcctaaaataatatagtgagtatacatagtaaaacaattatatgtagcaaagttgaacagtgcatgcttaatgagccctctctaatgatattgatagaaagaaaattgtgtatatacttaaggaataaaactgaatttagttttttgggacatcttaaaatcatatcttaacatactaatttnagcttgatttctatcttagccttttgggtcttaaatcatatttt

SEQ ID NO: 4999 - DNA, 331 bp, Glycine max
  unsure (1)..(331): unsure at all n locations
agcttgaaacacaatactttgaaaggcaagttaaaagttggttaattgaatgggagggggagaataaaagcttaaatttaattataaaataattgaacttcaatagttataaacgacaccgggaactatatatagtgtgccaacctgaatgtacagaacaacccataatagagcaacgaactattcaaaaagaaaagatgcatgcatgtgataaacaaccaagatatttcatccacatgcatgactaatcgtttgatggatagatgcatgaagattataaggatcatgtgtgtgtggactgaggtgggagaacatgactaanacataaaat

SEQ ID NO: 5000 - DNA, 424 bp, Glycine max
tccatcattaaatttgggagtcaaaattggtaatgttaatcaacaaaaatatatggatgcatgtactcaatatgtcatctataatagataataagcttttaatccatgtgtagaatagcagaggacaaaaaaaaccttgcttgtagccgaggatgaatgtgaagtcatgcttctctgggttgagttgaaatgtgagtaagactggggttagtgctataacttgtttaaaatattaacctacttgattaaagtttctctggatggcaaatataagtgagtaaaaacgattggacgtggatgtgtggaagatgtaactgacggaatggttttttgtgggaattttgtagcattattgacggctggcttcgaggattggatgtgaagagtcatatattataataaaaatgatacatatatgagatga

SEQ ID NO: 5001 - DNA, 269 bp, Glycine max
agcttcaacattcaatatcgagcgtttcgatatattacgggactgaatcacacatccgagtaaaaagttattgttgtttgaagttgctcagagcttcaacattcaatatcgagcgtttcgatatattacgggactgaatcacacatcacagtaaaacgctgttgtcgtttgaattatctccgagcttcggtattccagttcgagcgtctcgatatattacgggactcaatcatacatccgagtaaaaagttactgtcctctgaatttgc

SEQ ID NO: 5002 - DNA, 352 bp, Glycine max
  unsure (1)..(352): unsure at all n locations
ntgagcaaattcaaacaacaataactntntactcggatgtctgattgagtcccgtaatatgtcgagacgctagaaattgaataccgaagctctgaacaaattcaaacgacaataactttttactcggatgtgtgactgagtcgcgtaatatattgagacactcgaaattgattatcgaagctctgagcaaattcaaacgacagtaactttttactcggatgtctgattgactcccgtaatatatcgagaccctcgaaatggaataccgaagctctgagataattcaaacgacattaactttttactctgatgtctgattcagtcccgtaatatatcgaaacgctcgatattg

SEQ ID NO: 5003 - DNA, 327 bp, Glycine max
  unsure (1)..(327): unsure at all n locations
agctntataagcgcatgttcgggagacaaaggtcaagcgttcgcgatatgcgaagatgatattccgagtactttggatttggtacgaccatgccctcctgatttccagctgggaaattggcgagtggaggaacgccccggcatttacgcaacaagcataatgtaaacctttacggttttaaaagctctatagttgggcctaggctttagagttgttccttttgctaaggctctgtgtcttttgcttttgaatttataatacaaagatctttcttcatctgttcctgggctctacccattctcattcatttgcatgtttacttctttt

SEQ ID NO: 5004 - DNA, 303 bp, Glycine max
ttcttacccatggaaactcctaatatctcccacactctttgtggtgggccattcttggatggccttgattttctcagggtccacttggaccccatttctaccaactacaatacctaagaaaactatattatctacacaaaaggtacacttctctatatttgcatagagggtgtttttcctaaagactgaaagaacttgcctgagatgtcctaagtgatcatctaggctcctactgtacactaaaatatcatcataataaacaactacaaatctacctatgagatcccttaagacatgatgcat

SEQ ID NO: 5005 - DNA, 297 bp, Glycine max
gaacgagtgtgaatatggaagagcgagagctatagagtgcaagaatgagcgcgggttgcatcgcaagggtttgtgagtgaaagtaaagggtgcctccatgagagtgagcaagtgacgatgtccacgacaggttcgattccgtgaaagcaaatgggaattttagaatttcctctctttagatagaatttacaattttaagattttagttaattaataatcatatattaaaatactggtatttgaaatttctataggacatccaaacaagatataagagtgagacatttaaatcctctc

SEQ ID NO: 5006 - DNA, 343 bp, Glycine max
  unsure (1)..(343): unsure at all n locations
ctcagcttctattaagctgtaaccatttatcaataaacacaagttgtagtttattcagaaaattagagtttatctcttttatcttagtgagagtgattctcctaaattcttgagtgattcaagaacaccctggctgtatcaaaggactttcacaacctttgtgtgttgccctcgctggaaagagtgattctttccttcctttcatcttcaccctggttctttcaaaccacaattccagaaaatccacctctgcccagaattatctcgtggccataactcccatttacgcactcaanataagtgattcttgagcctaaattgactttcanaacgagacctttca

SEQ ID NO: 5007 - DNA, 444 bp, Glycine max
  unsure (1)..(444): unsure at all n locations
tgtgcatccaataccctgatgaggatgtcccatatgttctttcttgtgaagacccacacaaacatctgaaagaattctcatattgtctgctccaccatgaaacccccagatgtccaggaggatcacatatttatgaaggcctttcctcatcttttatagggagtggcaaaggactggctttattaccttgctccacggtccatcacgagctaagatgacctcaagagagtattcttagaaaaaatattccctgctttcaggaccacgaccatcaaaaaagatatttcatgcattagacaactcagtggagagagcttatatgaatactgggagagatttaagaaactatgtgctagttgccatcaccaccagatttatgagcagcttttcctccaatatntttatgatggacttagcaacatggagagaagtatgatagatgct

SEQ ID NO: 5008 - DNA, 343 bp, Glycine max
ctgcagctgggatctctagtttccattcgcctctcagctaatggattaccaatgctgagtcgccgtacaccttgagtagtttgacattggagtcaattgctgcctggacggctagggcacatgcttcatattaggccatgttgaaggtgcagtcaaatcctatcctggttgtgaaaggtacacattgattgtccggagagacgaatgctgcctcaacgccatggtctacaatgtttgacgctccgtcaaaccatacggtccatttgtcccgatcttctgccaatttattctcaaacaaggccatgatgtcctcatacgggaattcaagatgcatgggctgata

SEQ ID NO: 5009 - DNA, 454 bp, Glycine max
  unsure (1)..(454): unsure at all n locations
ctccttcaactgcacaaggctcttaatatttgaagagtatccttgtggaaccttcacccgacgaagacactgacaaaaacttatcttctcctttttggacaaagtatggcaggctggtggcaagtaaattttcatcccatcagaccttggatgcaactgtgatcgtatgcccatatcagctagatcttaacgggtattcaagccatccttcgtcttgccttgaatgttaaggagcgtcccaatcacactgtcacaaacatttttctccacatgcataacatcaatacaatgtctaacgtcaagatcagaccagtacggaagatcaaagaatatggacctcttcttccatatgcaactcttacttttatccttcttttgggtctttccaaatatagtatttaagtgtngaacctgctgatataccagctcaccaatcaacggtatcggtgcaata

SEQ ID NO: 5010 - DNA, 277 bp, Glycine max
agcttcttagtctcaactgatgaagatgaattcgtgacaacttcatgcactcctctaatgacaataacatcatttctggcactaaattgccgggagtcggaagccatcttctcaattaaattattggcttcagcaggggtcatgtctccaaaggctccaccactggcagcatctatcatacttctctccatgttactgagtccttcataaaaatattggaggggaagctgctcagaaatctggtggtgagggcaactggcgcatagttttttaaatc

SEQ ID NO: 5011 - DNA, 458 bp, Glycine max
  unsure (1)..(458): unsure at all n locations
ttgaaggtgtgtagcctaccattntccatagtagaatactggtaatgtgtctactatcattgtcatcgttgtttcgtcattgaggtgccactttgagctgccaggttctccacctttgggcgtattctttgaaagatttgtgccccctttttacacatgttctgtagttgcatcctatccgaagacattatattgacactgcctaacgaaggcaaccactaggtccttcaaagaatggactcgggaaggttccaagttagtgtaccaggtaacagctacccagtaagactttcttggaatgaatgtatcagtaattccttatcttttgcgcatgcccccatcttccgataatacatctttagatggttcttggggcaagtagtccccttgtacttgtcaaagtccagcaccttgaacttgggaggggtgatgatattgggttctaggaacaactcttt

SEQ ID NO: 5012 - DNA, 396 bp, Glycine max
agcttcaagaaaaagatggcctcagcaaactccttatttccagaagggaattctatcaatagacctccaatctttaatggagagggttaccattactggaaaacccgaatgcaaatttttattgaggcaatagatctaaatatttgggaagccataaaaatagggccttatatacccaccacagtggaaagagtttcaatagatggtagttcatcaagtgaaagaataactatagaaaaacctagagatagatggtctgaagaggatagaaaacgagtactatacaacttagaagccaaaaatataataacatctgccctgagaatggatgaatatttcacggtttcaaattgtaagagtgctaaagaaatgtggaacactcttcgataacacatg

SEQ ID NO: 5013 - DNA, 402 bp, Glycine max
  unsure (1)..(402): unsure at all n locations
tgtaggattatggggtacccatcacatgtggtactaggtggcggtcgggcgatggtgcacaacaagttttccacatccacaatgcgcgcataaacccaccatcccctgttgcccacctccatctgagctcacgtactcccacgtagcccatatccttttttctctcaacaccgggtccccatcaatcctcccaagtttcctccaacatcaaagtaatacaacattcacacagcacaagctatcgcagccaagcaaaacagggcaaaggcagaaaactctgcccaataacaccaaccaaaatcacagcttttctcacttaaagaccccagntaacaattcttcgatccaattcngtaaccgttggatcgactccaaaatcttattggaagtctatagtgtata

SEQ ID NO: 5014 - DNA, 308 bp, Glycine max
agcttgacttggatatacaagcgtctagtcgcaaatgctgcagccattgctggtacaccacgctcaagagcaaactgaatctgattttcatgaacatccttgggagcaacagacatggtgacgacattccgtgacagtaagtacgcaccaaaactagcaacaccacagccaacatcaagaaccacccttatatgcttaccaaaagtaatatcaggaatcatctacaatcacaaatgtccaacatcagattcctataagatgcacctacattctcctaacaaaaaggtgaaaccaaaaccaaagcatac

SEQ ID NO: 5015 - DNA, 454 bp, Glycine max
  unsure (1)..(454): unsure at all n locations
gctgaactaactnnggggtaataaaataaaagcaaattatgtgaccatatggatcacctgactatttatctcttcaacttgatgttatttgcttatgttcgtttgatgtgatttcaagtttttggtttttaaatgtaagtgggagaatggacttcttaatggtctatgggtaaacaccatgtgttccaattctccccttaaattggaacaattcaaatgagttcactttaaccttgcatatatatatactctntttcatataaatcaactagtttaaagctgaaaaattaataaatagttaaaaaattcatttattaaattataagtgttgataaaattaatagaaaataataaaattatgatttatttaaaaagaataatttagaaattaaataaatatattaaggataaaattgaaaaaaaatataaaaactataaattagttgtttaaaaa

SEQ ID NO: 5016 - DNA, 402 bp, Glycine max
ctcgacccgggatccttaagtcacctgcagctgcagcttgtacaagcccaaagttgctcacgatcatagcctccaggtcttttgtttcttcgatgatggtgacaatatattcacaatttagatctaacgatctaagaattttctccataatgtttacatcatcaagcttttcaccacttctcttaagatgattggtgattgctaagactctagagaaatagtcggagatgacttcaccttctctcatatgcaaggtttgaaacttaactcttacactatgaagacgtaccttcttgatcggatctgctcccttatacgagggttgaagcttctcccaggcttctttcaccgactttgcttctgaaaccttcttgaaagcatcatcatctaatccttgataga

SEQ ID NO: 5017 - DNA, 449 bp, Glycine max
  unsure (1)..(449): unsure at all n locations
tgtgacgatcatccaagagattntcacgtctntattgaagctgtagtgacaaatgttgctgcccaggttgtataacactagagccactgagctgctacaaggatacaacgtgaacaagtattaccttaaacagataaatagacagaaagtgaaaggataagcaaataacttgtctattataaagacagaacataatcttgttattctgctataaccttatcaagtgacaagtattaataataggattctttccctacaattagcacagaaaaacaaataccactgcaataggtctccactgaataatcattaacaacctacataaaaggatagtcacacataaatgggaaacaaaaacacctcanagctatctagttggatatacaaataatggatatacaattatacttcgaaagctatggtcacaccaatcttacctaatgctcaag

SEQ ID NO: 5018 - DNA, 295 bp, Glycine max
gagcttgagttgcttaacggagcacttatggagtgggcctaatgggccaccacacttaatacataaccctcttttgcgcctatacaacaagtgctggtaggctaaatgcataccttccctattacgaggcctattaaaatttatttctacaccccctctttcgcatatggaccatgctgattattgtccacataaaggcccacaccttttaatccttcatggtccgtggttgatccactatgctgggatttcggcacaaataccaaaccttcttctactcgagtgtcaacacacg

SEQ ID NO: 5019 - DNA, 448 bp, Glycine max
atgcaacttaagatgctacctgatagcttgaccgtgtcattcaacttgatcggaggagctcgatgtcaggctaaatgacataataatatatttgtattattagtttaatatgattttaattatttgtttcaattatgtgtttttatttttaatattgtaagatcttagtgatttgtgtattaaatataatttataatatatacgttagataagtaacggtttgtctaaaaaatattgacaaacaagaacttattaagcatgaaatttgaaataactttattttacttgaagaaattttcaagtaaaatgttcaaacaactatgaatttatttttaatggtttaaatctaattctaaattctatgtcattaaattttacaataaaagaagaacatactaaaaattaatataaaactattaattataaagtcaacacccatccaagacac

SEQ ID NO: 5020 - DNA, 338 bp, Glycine max
gcttctggtctgcgatgaagctctttggagttctccaatctccgccgcgctttcgacgaggttaactcccgactccaaaccgagtttagccaggtaccttttttcctctccaacgagctgtctctctctatgtttcttataaattggatttacgatgcgaatttccctctctgttgttcatagatgtcacagcgattcgattttaaggctgatttacaccattttccgatatattccggtgttggctttgattataagctgttttccacgcaataagctgatctaaacacgcgcctagagtgtcttcttatgaatagtcttagaactgattgtcggat

SEQ ID NO: 5021 - DNA, 410 bp, Glycine max
  unsure (1)..(410): unsure at all n locations
nngtgtttatttaagatagtgatgattgtatagttctttcttttggcgaaaataagattgggatgatatgatgcacgaggaaataaaagaaaaattgtgatgaaattacttttataagccacatactttgtttagaaatgagtccaattctaaggagaaataagcaaccgctattgttataactatttatgtagccaatgggagcatatcttggcttttcactataaagggtttttctatgacaaatcgaaaaagggtagaaaaaattatgccttgaaaaaaaattatacaatcatttaatcatagtttatctataataaacttattaattcttatcataattatttctagtaattaaaacaataatttatattatcaatacataatcatttagactcaaaaacttatgc

SEQ ID NO: 5022 - DNA, 172 bp, Glycine max
ctaactacaatcgtacccctttaatatatatgccaaaaaccccacgatctagtactcagcgcaatttattgttctttcacagagcgctagaaatgctatatatgccctattttaatgagtatgtcagagtttctactagattactgaccacctttgcggcccgcaaccttat

SEQ ID NO: 5023 - DNA, 444 bp, Glycine max
  unsure (1)..(444): unsure at all n locations
ggagatatacaatgaatagattataattatggtatcctacgtgcaaaagcataaattaatagtatagtttttcacggcctttattctatgacacgataaagaaagcaagacacgcaaattacaagaaagcacacgacacagtctgcagactgcagttgaataaccatctgttacaagcaaccataaggttggaccaacttatgcttcgctgtgctctcctcaaatatatgtttattatttaaacttaaatatgtatttgtttcatgataaatcaatgaattctattttacatttttaataatttgttatatatcgagagtttaataaaataaaataatgtctgtaatatttgttattttgttctaatccttttaatatatctacttnttattataatccttagtatatttaatatatttttaattaatttctttaaaaaagtat

SEQ ID NO: 5024 - DNA, 370 bp, Glycine max
agcttatcagtcgaatggagaatatgagaatatattccctcagcctgaatattaagactataatatagcaaattaacgaaatatatttggcagatacgagctaaataatctcttaaaggattggttgttctacacgtgtattctctactttcttttttgtttttgtttatttatagtttgcagagcatagagtgttttcggatttttggccgtatatacgtgcttaaatgatattctccccaagagattaattggatttttgtgttttcgaaggaaagggcagcattgagattggaagagcctgtcgtgagagtgagagtggagcacttaattaggaaaattaagaataaagtagtctttaatgaaacat

SEQ ID NO: 5025 - DNA, 374 bp, Glycine max
  unsure (1)..(374): unsure at all n locations
tctagaggttgtgcttatctaccccatctctgacagtgcgtgggtaagcccagtacaggtagttccaaagaaaagaggaatgacagttgtccaaaacaagaagaatgacttgatacccactcggactgtcactggctggtgaatatgcatcaactaccgcaagctgaatgaagccacaaggaaagaccactttcctctgcccttcatggatcagatgctggaaaggcttgtgggacaggcatactattgtttcttggatggatactcatgttaactaaattgtggtggaccccagggatcaagagaagatgacctctacatgcccttttggtgtctntgcctacagaaagatgccatttgngttatgtaatgca

SEQ ID NO: 5026 - DNA, 326 bp, Glycine max
aacaaatttttctttctagggaattatacatgtttggttgacatagttaacaaacattggccatggtgaacatgcaatttcaaacttcttaagacaatcatcgaactgatccttggaaagacaataaaccaaactcccccaggcatccataacataatcttaggcattttgtgaccaaccagggatttacatccttgacattctttgtaatgtgaaacctacacaacaagtgggtacactcaggaaatatagttttcactgcattcattaatgctagatttttatcggtagcaataactccaaagagggcatcatgtctaagaaaa

SEQ ID NO: 5027 - DNA, 106 bp, Glycine max
tcttatccaaagctcatcttggaggcgaagctccttcttttctggcttaatccctaaaggatggcgccatctctcaacgattctccttgtctacactgcatctcct

SEQ ID NO: 5028 - DNA, 326 bp, Glycine max
  unsure (1)..(326): unsure at all n locations
agctngctcggatgccttgagttattntatatcatgtcncgacttgcgttgaacatttaattatcaatgaattgccataagcatttttctataaaaccggcttatgttttaatcgaaaccgataattgaaaatagtattatccaattcgtatacaatgtacatatctattatttccactataataataaaaataattcactattccattttcaaaaaataaaaaagtcctatccactaatccaaatttcaggatcagtcgctggctgctatcccaaattcgatattatgatttaatataatccaatcatggctatcttaacaaaac

SEQ ID NO: 5029 - DNA, 413 bp, Glycine max
tagtagcaacagaattaaaattcttcgaattcgaagcagataccccatcctgtttcgaagtagtctcactctgacctaaaatgtggaatatcttccactcccaaacctgctggagctaccagatacttgttcagctgaattaaaactatgttccatcccatcaacatgtctaagaaaatcaggctccttagtggtaaccatgaagtccatcaagttgcggctgaaccccaaatcagaatacaccctcaaggcatcctagatatgaaaatagatactactagatatagcagtggcagaacattaaaaaaactgatatattgaataatatcacaataaagcacccatatatatgcacatatgctctactgtcaaatcagacaaagaactcatatgactgtgtctcattccttatg

SEQ ID NO: 5030 - DNA, 415 bp, Glycine max
agcttctacttatgtggcagggcaggcttccttcactttcttgtctccaacgcgagctttgaccactgctcttccttcccgcgatgcttcttttcatgtccgcctgagtgggcttatagcctaaaccatacttcccacgatttcctttggcatttatcaggctagttatgccgccgttgtctttgcctaaacccatttcgggttcataaccgttccccaacataactccggccatcattactgctgcattggacaggcaaggctgcccagagaaggagtccacggaggaaatgctgaccacctcaaaagactggaaagcggtttctaatgactcctctgcggcctccacataaggcatagaggatgggcagctcaccaagatgtcttcctcgcctgacacgatgaccaaatgccc

SEQ ID NO: 5031 - DNA, 276 bp, Glycine max
gaaatggcatgatggggctatatatctgtgtctaacatacataagaatatgtacagattccataaacttaactctatcgacaaatgaccttcctactactatggccaagcacctgcaaatctttttacaatattgctatgatcgtaacttgggatcatgcactctcaaggagaggaatctgactattaatctcttataatcagtcgtgatcaatagactgggtgtctctcagattctaagaatcttgaacacaatggtaaaggatcccaatgtgtg

SEQ ID NO: 5032 - DNA, 383 bp, Glycine max
  unsure (1)..(383): unsure at all n locations
ttcttaccaagtaaaaaggatcattnttaaggtccaacgccttaaaaatgatcacaaattcaagtaaaaagaatcgcttgattcactcttaagaaagaactacgtaagtctgatttcctctccaaaggagggtacgtatgagcaaaagccccgcttttgtcgacctcaaaaaataaaaagaaataaaagttaaggcaatacaattatcacaattctaaaaaataggttgttgtcctttgagacaaacgtgagaggtgctaataccttcctcaaacgtaaatacaactcccgaacctaaaattttcattttgaccggttttcttcggttttcccgacagtttccacaaataaaccgttgtggcaattccgcacatctttcctcc

SEQ ID NO: 5033 - DNA, 430 bp, Glycine max
  unsure (1)..(430): unsure at all n locations
tcaccggcaaaggattgaagtgggtctgaaaaaaagacaaatttgatcatcattctttgataaatgcaaaaataattggggcaaatgaagagggtgagaatgagggagaagcccatgctgtgactaccattcctatacgaccaagtttcccaccaacccaacaatgtcattactcagccaataacaaaccttctccttacccatcacccagctatccacaaaggccatccctaaatcaaccacaaagcctgtctaccgcacttccaatgacgaacaccacctttagcacgaaccataacatcaaccaatgaatgaattntgcagcatagagcctgtagaactcaccccaattctggtgtcttatgctaactngctcccttatctacttgataatgcaatggtagccataacccctgctaagtttcctcaa

SEQ ID NO: 5034 - DNA, 302 bp, Glycine max
acccatcacatgttgtactatgtggctgtcgggcgatggtgccaaaggattcttcacatccacaaatcacgtacaaacccaccatcccctgttgcccacctccaactgagctcacgtactcccacgtagcccttatcctcgttgctctcgacgccgagtccccatcaatcctcccaaactcccacaacatccaagtaattccacatccaatcgtcatggactaacaaaaccaatcaaaacagggcaaaggcagaaaactctgcccaaaacacaacccataatcacagcttttcacatacaaa

SEQ ID NO: 5035 - DNA, 406 bp, Glycine max
tctaaggcggaacaacaattgaagagaaagagtgccatgatgaggagttcatctaattttcactcccctggttggaaggacaaaaataagaacgaaggagggtcatcaacaagaaatcccaatgttactactaaaaaatcaaaataagttctatgaggcacttaagaaagcaaggagtagtgagattaagtgcttcaagtgtttgggaagaggtcatatagcttctcaatgtccaactaagaggactatgttacttaaggaggatggagaaataattagtgaatcttcttcagaatctgccccatctagcgatgaagaggaaatagagtcagaaggagaattgttcatggttagaacgatgttgggtagccaagcagttgaattggatgactgtcaaagagaaaat

SEQ ID NO: 5036 - DNA, 308 bp, Glycine max
  unsure (1)..(308): unsure at all n locations
agcttaagtgagccaccatagaatgagtcaattntgttaacacatccttgtaaccctactatcattttgtatagtggaagaatctccatattggagaattataatcgtgtgctcccattactacctttaattactaagtgtctatcttaacttcaagaagcgggaaagtctgagttttcccgataaagacttaccaagtttgagtagtatacggttttgtttaaaatataaaaaatgaaatgtgagttatatgtgcgatgatattttttggttttctaacgttatttaatggtttattaaaatcgtat

SEQ ID NO: 5037 - DNA, 450 bp, Glycine max
  unsure (1)..(450): unsure at all n locations
gcatcgcatttaaacaatccacaaacaatatttaacctagatatctttatattatagcacatattaaacagtaatcaacaagactacatgagccttaaaaaatataggacctagtcctatccaaattacttcaggattacaaattttgaaaatcttctaataaatattgctgaggtgagtgaagtcactttaaataaatttattcttcttcaggaaatccatagaaaaataagtgacaactgaagagattatgacatttcagagatcagaagctgcctctcaaaatatcttgaagacatgctggtatgggaattgtactactcggcatccattgaacagagtcattaaaaacataataatgaanaagatgaatatcgtccataaacttacccggcgatcaaaaaaccgtacagcccttggatcctgtagcagaaacatgaaaataaacat

SEQ ID NO: 5038 - DNA, 292 bp, Glycine max
  unsure (1)..(292): unsure at all n locations
agcttgtgtgaattcgtcaaaattcaatgtctctagggtttaactgtaataccaataaagtattgatgataaagtggtgaacattagtcactgcagtacattttggactgccttcaacttcaagaacgtgatgagtaatgtcgatctgagaaccacaccaatcatcgatcatatgaaacgttggtgaaaanttgggtgtaaacctaaatntttgttggtgatcatatcgtccactccattttaaagtagcttatggtggaaggacgaaatttatgagaagaaaaaagaaaag

SEQ ID NO: 5039 - DNA, 455 bp, Glycine max
  unsure (1)..(455): unsure at all n locations
tatttgttagttgaaaaccacgtgaataatttgtattacatctctaatagataaaatagaaaatataaaatagcaccaaaagtcacacaaagccttcacaaagttataaattagtagcttgaaatgtttcaatgtatgcgaagtaacaagacaacttttaggattgcttgttatgattacaaaaccatcatactactacttgatccaaactattttttcagatatctcgcctagctaggctaattntatttcttctcatggtcacatttcctggactctatttctntttttcttttggatggngtggggggataagatactgcatacagaaacaaatcanagtttacctgtaagccctcagagacaaaacactcacagaacggctaagagcataggactcagactaccatgggaaatatcccttcacctttctttgctcanaggagtactcctac

SEQ ID NO: 5040 - DNA, 422 bp, Glycine max
agcttgtcaagcagtgtggcttgattcttttttacaggaactgaagatcaaagaagaaggtccagttgagctatatgtagataacaaatatgcaatcaagttagccaaacattcaattgcacatggaagatcaaagcacattgaaaccaaatttcatttcataagagaccaagttgcgaaggggaaattcaagttgaagttctgcagatcaaaagatcagcttgccgatatatttaccaagtccttgaaatctgaaaccttcaaaaacagagaagcatgctgaatattggtgatagcacgacactagcttaagggggtgtgttaaacattaagaataaataagctaggtattgaatgatatagatattgccacgtgtaataagtactctcctatatgctgaaccatattgagtattaactat

SEQ ID NO: 5041 - DNA, 425 bp, Glycine max
  unsure (1)..(425): unsure at all n locations
cgaagctcaaggaaaagcttgaagaagttttggctnttacatgcccaactaccttgagtggcatatgtattggatgttaacttggttgctgcatcttagtagatttgatatttgtattgcatcatgtatcatcatggctagtgtgaagaaaagtttctaagttacaaaagtttcttcacaggcaaaaactctattttaatcgattacagagttgttgtaatcgattacaacaagctgcctgaagcttaaagagctaagtctcgtatgggcttaatcgaatacaaccgtattgtaatcaattatactattgtttgagacaatgactgatttattcaagagtctctgcttcatcgattacctacttctctcttagctagttgtccagaggtgaacaagaacgacttattcgattgcctatagcatct

SEQ ID NO: 5042 - DNA, 229 bp, Glycine max
ctgcagcttcagaatcaatttcgagcgtcttatttattacgggactccatcagacatccgagcaaaaagttgttgtcggttgaattagctcacagcttcacaattcaatttcgatcctctcgatatattacgggactcaatccgacatttgagtaaaaaatttattggcggttgaatttgctgaaagcttcaacattcaattttgagcgtctcgatgtattacgggact

SEQ ID NO: 5043 - DNA, 300 bp, Glycine max
  unsure (1)..(300): unsure at all n locations
ttcagcanattcaaacgacaataactgtgtactcggatgtctgattaagtcccgtaatacatcgagacgctcgaaattgaatgttgaagctctcagcagattcaaacgacaataactttttactcggatgtctgattgagtcccgtaatatatcgagacgctcgaaattgaatgccgaagctctgaggattttcaaacgacgataactttttactcggatgtctgattgagtcccgtaatatatcgagaagctcaaaattgaatgacgaagctctgaggatattcaaacgacaataactt

SEQ ID NO: 5044 - DNA, 353 bp, Glycine max
  unsure (1)..(353): unsure at all n locations
agcttctggagggcccaagtgggcctgggttctatttgcacccccatttttactaagtacacccccctctgctgtttttttggtgattcttttttcgtaaagctacggaaacttacgaatttcgtaacgatacttgttttctttccgtaatgttacggaaccttgcggattacataatcatcccctttntgacttacggaatgttacggaaccccacttaattatgcaacgatgcttccatttgatttccggtgtgtcacggaaacttacggattgtgcatcaatattttttatggctttctgcatgtcctggaattcacaaaatgcctaatgaatggtgccaagcacctcac

SEQ ID NO: 5045 - DNA, 400 bp, Glycine max
taagcctatagatgaagacaatcctattattaggtggtacataaacaccaagtacttcctgcaggacaattggcagagaacctaggtattgctactgtggattggcgtgatgttaggtctatttgcctacaaatttgtgcagtataggagaaaagctgcatatgaagtgatgggccattgtgtatgcatggccaaaggtgcagccaaaacacttatattaaaggtgactaaaaaggaacatatgtatctactttgttctaatgattgttgagacttagtagctttcataagtcaataaggtaatgaaagttgaagtagtaagaacataatgagaagtatttttttacagtgtataactgtggcagtaacaattgaagttggtatacatggcatctaccat

SEQ ID NO: 5046 - DNA, 565 bp, Glycine max
  unsure (1)..(565): unsure at all n locations
tcgcacactcagatctacctataagntatcactacctctctacgcanttatttatttctacttcnacaacannncatccagaaaggggntttgattgattccgttgtagacccgtggatatctatcagtcaccttcngcatgcaagcttgcacaagtcaaaggaccatcttctttttctaccttatattaaacgagccataatcttcgccataaggtaattgaagagtaatgaatcaccatttctcttgtgccccttcttcatcatacattaaatatagtgacactaacacatgtggactctcaatatacactgatgtccaaacagagactatcaaaatagactgtgcaacagatgatcgacacaatagaaaagatggtggagcatcccttggtcacagatactattcaccttgtatacgtgcatgaggtgtgaatacaacatgtgaacaggcataangcaatatataaagccccacccacgctcgaaacctgaagaagatccgcctatctaaaccaaaataaagtgaacacgggatatatgaattaaacctacgacactggctg

SEQ ID NO: 5047 - DNA, 275 bp, Glycine max
aataccaatgaagttccatatgggaggtttatatttatatatatattaaactagaattcgctttctatacaaatatatcaaatccgaattagatctctatcttatgtgtagccaaatgctgtacgtaaacaaatatataaagctggactatacaacctgaagtccataatgactctatgctcgtctttacagtccagtatagatatgaattccttcaaactttataattatgcttgacattagacactcgtttatatataatcgaccaatatata

SEQ ID NO: 5048 - DNA, 362 bp, Glycine max
  unsure (1)..(362): unsure at all n locations
agcttgttaagtttcttcctgtcgatcaaagaataatatgatgtgtttgcatcaacaagtagatatcttatggtgaggctcttggagagcttgcattaactgaaggttgtcattaagtccatgtagtctttggtctctacttcatcacctgcaaagccgatgagtggaccggcgtgagggtggacagtgtcgagggagacctcaagtctctagaaagttttctaatacaggatatcaatggaacttccctggtcgatgaggacattggacacgatgaagtttgcaatgatgatggagacaaccacaacgtcattctggttcatggngttgatacccttgaagtccctatctgtgaaagtgat

SEQ ID NO: 5049 - DNA, 429 bp, Glycine max
  unsure (1)..(429): unsure at all n locations
tgtctatattcagaaataatattgtcccaaacactagcaatgctaatacgtccatgaatgatacccactctccttggcttgctagagtttccgccttctcctccaagcacttcctcagtattcctgctacttcattcctactttgtttcactcgatctaattctcattatgagatcttgaccactcctgctattctcaccatagaaggatagtacccagaaaagaggtatggcttccttcctcctatcgagcatcctaagatcccatcaaactcctctatggttagtgctaacggaaagtccccaaaagtaaagcatctaagaaattggtcatagcattgagtgagagatgtaatggcctcaattgacacttctatcnatttcagatcctagatctntccatataccttgctaaaaaattacgttgaac

SEQ ID NO: 5050 - DNA, 378 bp, Glycine max
  unsure (1)..(378): unsure at all n locations
agcttagcttgttaacatgtaagtataaactatttactatggaggaagatgagaacatacaatgtttgtttggatgcttccaaataacactaaatgagctctgatctctttgtagaaattatgataactacaataacattgacaaaatcatgagatgcctatccataaagtggagactgtaggtcacaactctgagagcaacaaagaatattgattcaatgtccatagaagaattggttggaaaattgaaagttcatgaacaaaaactacaataggatgatggaagaaaatggatctgataaagaagatgatggaagtctctagtgatggatctgantaagaagaatcagacaaagattatcaactagccttcatatt

SEQ ID NO: 5051 - DNA, 103 bp, Glycine max
ttgtgggcataaccgacaccccatagaactggcagagactcatgatcaaggccggaaacctcaatgctctgttggactttcttgggttcactaaatgtctggg

SEQ ID NO: 5052 - DNA, 340 bp, Glycine max
agcttcgagcacactctagacatcttctcaactatcccaacggttagatcgtggacaagtgtcttgtgaagctacagacaaaatttcgagaagatccaacggttaacgaaggctaggcaacatttttaccaaggtagcttcatgtagcttcctcaagaagcttcattaagaggcttcctcaagaagcttccccgtggcttctttgagaagctttctcaagaggcttctttgagaagctagatccttatttacccacacccttctattaattaaattaacctccttgaaaaaattacggataaaataacccacaaattatcaacatcaacatattactata

SEQ ID NO: 5053 - DNA, 299 bp, Glycine max
  unsure (1)..(299): unsure at all n locations
tttatccatgtcttcctatggtggcgagcttcttcgttactcatcttctccttgaagtggcatctctaatcatatttcttccttctccattctacttccattcatcttcaggaagccaaggattcctttgatgaaccaaaggactccagtggagctccatcacctgtgaaacatataggaaaggatgttgagtcctaagacaacataaagcanaagacgttgagtcctatgaaacaaataggcgaggacgttgagccctatgaaaacataaagcaaatgacgttgagtcctatgaaaca

SEQ ID NO: 5054 - DNA, 410 bp, Glycine max
  unsure (1)..(410): unsure at all n locations
agcttgtaggattatggngtacccatcacatgtggtactaggtggcggtcgggcgatggtgcacaacaagttttctacatccacaaagcgcgcataaacccaccatcccctgttgcccacctccatctgagctcacgtactcccacgtagcccatatcctcgtttctctcaacaccgggtccccatcaatcctcccaagcttccacaacatccaagaaaaacaacattcaaacagcacaagctatcacagccaagcaaaacagggcaaaggcagaaaactctgcccaaaacaccaaccaaatcacagcttttctcacttaaagaccccagtaacaattccttcgatccaattcgttaaccgttggatcgaactccaaaatttactggaagtctatagtacgtaagcctac

SEQ ID NO: 5055 - DNA, 467 bp, Glycine max
acactataaatctaagcttgtatctccttacagatggcgcatgcatgatgacccctgtcactgtaaccgtttagatttccatacgctagaaagtcattagtggtacagaaaagcattgcacgcatttcaaaagtctccttgcaaaatccatcaaacactaaaaccccctcgtcccacaactttctcaggtcttcaatcaacggacttagataaacatcaatgtcatttgctggctgtcttgggcccaatatcatcatagaaaacatcatgtatttttgtttcatgcacaaccaaggaggcaaattgtaaattactagtagaattggccatgaactatgttgagtgcttaaatttccatatgggttcattccaccactaggtagtccaagcctaagattacttgcctctgtgccaaaatctagatacaaaccatcaatcttctatcagtgggagcaatcagccggatg

SEQ ID NO: 5056 - DNA, 390 bp, Glycine max
agctttatgatttaagtcaaagataatcaatatattatttcatgactaatctaagttactagtcacagatttaatcttaatcttaatatgtaccaatagaatcttattcttgatctgaggataatttatatatttacaaaacaatattatttatttatataaattatattcttggtgctagtcaagaatacaataatatttcactatttttttattaaattaaattttctaatttaactatcaaataaatttatttcttatgccaaaactgaaacactcatttgtgtgatctgatcggttcaatccttaattgacggtaaattaaatcaatcatagataatgtactaatcaaagtggacgtgtaacgacattatttaaagtccagataac

SEQ ID NO: 5057 - DNA, 452 bp, Glycine max
  unsure (1)..(452): unsure at all n locations
tccacaaaagtccttatgaagtacaacttgaaggcaagatattaacttaaattataattatttacaaagaaaanttgttatctcgtcattaggtattgttaaatgcttatatttattattttattaattattattattattggaataaattaagaagcatttgactaggaaaaactaaattttacttcttttttgttttaaaggtaacttaagattcaaagggatctttgagttataagaagagttaaaaaaaaaaaacatttgaacatgcactttgacacacaggtaagtgataaaagatatacttatttgtgtttttttttttcaaattctcaataaaattatttatcatctttaggaggatgaacttgaaaaactatgaaaatattgaaaggatgaatattcactcggaataatatactcaattgacaataaggttagatctaatttac

SEQ ID NO: 5058 - DNA, 439 bp, Glycine max
  unsure (1)..(439): unsure at all n locations
ttaagtcacctgccgcatgcaagctntacaagggagtatttggccatatttctatttaatgtggaacatcttaacaactttatacctgctttaagtatatgctaattttacaaaaaaatgtacatggtttaaactgggttcctcttttcacttgtaattctgatatggttaacactgaatttgattgtattagaccacttaagattcgatgtgtgaaaatcgcatagtgtaagtctccaagttgaaaccacactaaatttatgagtcttcttcaactctctgctatttatttgttgttcttggttgaatattatccatcttgagggaacaaaattacaaaatagaaaaattaaaaggatcaataaccattgagcttctgtttcattgcaaaaattttggacaatatacagagagacaccttttgaagaccacttactag

SEQ ID NO: 5059 - DNA, 442 bp, Glycine max
  unsure (1)..(442): unsure at all n locations
ntaactctntggatgaattcttagacaattgaaattctaattgtctcttcttcactttgtggcctttatttgctaattgagtttctttttgttgtgcaagttttctaatgacttatcacttcttcacttttggactgttacatgaccttgtttgcacaattagtcttgttgggtaaacatagtttgctaggtgagacatcatgaatgacattttcaattggtactccaaaaccttgaaaaaaaatagtagaaactaggagaaaatgattaaaattttatttacaacctaaaattctataaaactatatnttctaactaaattgaagctaaactaaagcaaaaattcaagaagagtagataatgaatgtgttacttgtaattcaaaggaaggtatggacaacaatctgtaacaacacaacatgatattcggataccatggaat

SEQ ID NO: 5060 - DNA, 357 bp, Glycine max
  unsure (1)..(357): unsure at all n locations
cgtcccggatccttaagtcaccgcngctgcagcttatagcgcggttcgggagacaaatgtcaagcgttcgcgatatgcgaagatgatattccgagtactttggatttggtacgaccatgccctcctgatttccagctgggaaattggcgagtggaggaacgccccggcatttacgcaacaagcataatgtaaacctttacgggtttaaaagctctatagttgggcctaggctttagagnttttccttttgtaaggctttgtgtcttttgcttttgaatttataatacaaggatctttcttcatctgttcctggtctttacccattctcattcaattgcatgtttacttctttttctg

SEQ ID NO: 5061 - DNA, 439 bp, Glycine max
  unsure (1)..(439): unsure at all n locations
ngctaacccatggaaactcctaatatctcccacactntntgttgtgggccattcttggatggccttgattttctcagggtccacttggaccccatttctaccaactacaatacctaagaaaactatattatctacacaaaaggtacacttctctatatttgcatagagggtgtttttcctaaggactgaaagaacttgcctgagatgtcctaagtgatcatctaggctcctactgtacactaaaatatcatcaaaataaacaactacaaatctacctatgaaatcccttaagacatgatgcataagcctcataaaggtgctnggtgcattagtgagcccaaaaggcatcactagccattcatacaaaccaaacttggtcttgaaagcgattntccactcatcancccttttagtcctgaattggtgataaccactttta

SEQ ID NO: 5062 - DNA, 323 bp, Glycine max
agcttccttaagaagattcctaaagaagctagagcttagctacatatacctctctaatagctaaggtcacctccttgagatgagaagctagagcttagctacacaccccctataatagctaagctcacccccatgaaaaaatacatgaaaatacaaaaaaaaatccttactacaaagactactcaaaatccctcgaaatacaaggctaaaagcttatactattgaatggccaaaatacaaggcccaaacgaagaaaaaacctattctaatatttacaaagataagcgggctcatacttagcccatgggctcgaaatctaccct

SEQ ID NO: 5063 - DNA, 507 bp, Glycine max
  unsure (1)..(507): unsure at all n locations
tgaagtnnannnttgaacgcatgttgttangcgatcactatagcatagctcaagcttatatatatatatatatatatatatatatatatatatatatatatatatatatatatatatattttatgtgtgtgcacactaatttggagttaacgtttaatatctaaatttcattatatatttagagtaatagacaaaaaggaaacactcagtgtggctattacgtgatgcactggatgtccactataatcttaggaagttttacgaataatagggagacggtccttgtttattgcaaagatatctgattttattatgagagtgcttacattattaacatatgtnttatgttatcagacagcgtgttaatgactgtagaccattgtgagcagagagattgtacgcgcttctcatacagggtgcacactattatctcacagttataaatacacttacgatgtgngggactctgcattttacttactaaattagtgacaacttcttacattt

SEQ ID NO: 5064 - DNA, 427 bp, Glycine max
cgacccggatccttaagtcaccgcggctgcaactgaccaatgtagaacatcttcttcttcctttgtcattcttgactccatttcattgaagcgcatatccacttgcaattccaaagtatcaaacctctcaccaacaaaggtttgaagaccatcaaacctttccaaaatcttcgaaagaagagatgaatcttctccctcatgtccttcttcaccaacatttctagcacccttctttacccaagagtcatcatgctccttaatataaccaaaggatgctatgactgaagcgcctataaagaatgatctcttgattggaacatagggttcagaatcaagagggatgttgaagtgttgaaggaaaagggtataagatgaggataatgcaaggggcattcaatcgcaatgccttatgcatgcgatatctaac

SEQ ID NO: 5065 - DNA, 455 bp, Glycine max
  unsure (1)..(455): unsure at all n locations
cgcttgcttccacagactgtgtcataaggggacttcatgaaggcatttgcggtatgcattcgaggggaagatcaatggcaacccaagtggtaagggtctgatactactagtcaactctaaaaacaaattatgtggagttcatcactataaccttttaagttacacccaaactcacaagaaaatgcccaccacaaatgcctaactcttgaaaacctatcaagaactaaaacaaacatgtagaaaacccactacatgcacaccattgagaaacttactcaatgaaaacaaaaataaaaaatgtagattaaggaaagatttcacctaatatgtgaaagatgtgaaagtttcaaaacactgtgtagaagacaataacacgagaaggggggttgaattgtgtttntagaaattaaaaacttttctaacactgaanaacatgtntattgtctgataaatat

SEQ ID NO: 5066 - DNA, 308 bp, Glycine max
agcttatacatttaattaaacttcatagaattctttaaacattatggcatataagatgatttttaaatatctttcttggaataccatcttacttaaaatgtataaaactattatagaagataaaattctctctttataaaataatacagtattgggattcattactaactagcatcagtattattcggaaccaatttcactctttatggagtgaaaaaaattatgtaaaatgagaacgaattatggatgggtctattattaatttgaaaacaaggtacttctcgcttttatctgtatatttataaatt

SEQ ID NO: 5067 - DNA, 493 bp, Glycine max
  unsure (1)..(493): unsure at all n locations
ntgaccctgtganaccgtgctattcggaacacataggctcggctcgaggctcgtcaggacctaatactcagttgatcgggcttttctaacgcagatattctattcacgtagaatgcgagcggattgatgactcggatgatgataggggctagtcgatacatgggggcttcatctgggatgaaactatctcaccattgagtgatgacgatcactcttcactattgtcgagccattggcctgacagtaactctcaccatacatagactttactgaaaggatgagactctatatgtactgatgaatggcatgctgctcatgcctcaacctgatgtgtttgaagaacaagatcatacggacctagcatgtggtgtagggctgaccttatgaggcctgatctttaccacagaagcttggttccaccggattacgcctttgacctccaaccttgggaatggtgatagcaatgtcttccactcactatttatctatgtag

SEQ ID NO: 5068 - DNA, 224 bp, Glycine max
  unsure (1)..(224): unsure at all n locations
agctggcttaagaagattcctaaagaagcttgagcttanctacacacacctctctaatagctaagctcaccttcttgagatgagaagctagagcttatctccncaccccctattgtaactaagctcacccctatgcctatagaaaacatggaaatactaaagaagtccttactacaaggactacttgaaatgccccgaaatactaggctaataccctttgctac

SEQ ID NO: 5069 - DNA, 442 bp, Glycine max
tctacttatgtggcagggcgggtttcctttattttcttgtttccaacgcgagctctgaccactgttcttccttcccgcgatgcttcttttcatgtccgcctgagtgggcttatatcccaaaccatacttcccacgattcccatgggtttttatcagactagttatgccgccattgtctttgcctaaacccatcccgggttcataaccgttccccaacataactcggtccatcattaccgccgcctcggacagacaaggttgcccaaagagggagtccacggaggaaatgctgaccacctcaaaagactggaaagcggtttctaacgactcttctgcggcttccacataaggcatggaggatgggcagcttaccaagatatcttcctcgcctgacacgatgaccaagtgcccctccactacgaatttcagcttttggtggagt

SEQ ID NO: 5070 - DNA, 462 bp, Glycine max
  unsure (1)..(462): unsure at all n locations
tgcaagcanntttgtttcgattcgagctcgtagcccgggatactctacagtcgagctgcacgcctgcaagcttgctggatagtacacatgtttttctccatattgcgatatgatatacggtgcgaggattttgaccaccatgcgctatgactaccacctggaagttggagagtggacgaacaccccatctttttcgctacaggcctattgcacacgcgttcagaatgaaaagctatatgagacggcctaagatttcaaagttttccttttgaaaaagctgtgtgtcctncgatttagaatttttattacaagatatctcttatttgttctggcccttggcacattaaaactagcatgataaatttgataagaagcggcgatcgttgactgttcgcaagaagtgtactccggggaccgccatctctttataataaggatcaacggacataaccatttcgatcc

SEQ ID NO: 5071 - DNA, 425 bp, Glycine max
  unsure (1)..(425): unsure at all n locations
tctactgatgtggcagggcggggccccttctgcttgctgtcccaaccacgggctttggcctttgttcttcctttccgagatacttttccttatgtcagcttgcgtaggtctatagcctaaccaaaacttcccgcggattcctctggtgcttaccaggctggttctgtagctgttgttcttgcccaaacccattctaggctcgtagccgtaccccaacattacccgggccaccatcattgtcgtatcagacaagataggctgcccagagagggaatctacgaaggcaatgcttactaccttaaacgagtggaaatccatttccaatgactcctccgcggcttccacatatggcgtagaggaagggaaacttaccaagacgtctntctcacctgatactattaccacatgtccctgcactatgaact

SEQ ID NO: 5072 - DNA, 54 bp, Glycine max
ctctactcctattgaaaatgggttactagtagaatgactaaagcatatcttatt

SEQ ID NO: 5073 - DNA, 421 bp, Glycine max
ctgggttcgatggccccaatgacatctattccccacatggtataaggccaaggggcggacataacattcataggatgtggtggaacattgacattgtccgcgtatgcctgacatttatgacatttccttacatgggcacaactatcgctttccatagtaagccagtaataaccgactctaaggatcttcctggccatagcatgcccattggcatgtgtcccatatgaacccacgtggatttcctcaatcatgaagttcgcctctttggcatctacgcatcgtaggagggtcatgtcgtggtttcgtttgtacaggatggtaccactcacaaagaaaccagtagccaatctccttaacgttcttttgtcattgtcagaaatccccggtggatattcttttgtctcaacatattgcttgatgt

SEQ ID NO: 5074 - DNA, 307 bp, Glycine max
agcttagagcttgattatttgtctctacggttaatttacgctcatgcttaatgatccgttttgctcatgattatcttatgcatgtggtgcttaatcacataatgattgccttatggtaaatttcgcttagtaatttaatttaggggtggattaagtggttgaactgatcaaggataaattctcctaacctaagataagagacttgcttgtgaatcaaggggaaacaacatgtttctaattatgttatttctaatccaaaattgcttgctatttaatttaccaaaacaaacaaccccccccccccccc

SEQ ID NO: 5075 - DNA, 305 bp, Glycine max
tctagccaaatggacttaccttgaattaattcctttgatatgccctttgagccttgtttccctttccttgtgttgaagctcactacaagccttaagtgaaaaaccatgatattaccatatccttaaggaattttggagctttggaattgttttgggaataagtgtggggggtttttgtttcattggacaacttgttttgttgactatgcttcatgaacgaaattcatggggctccgaaataagctgagaatggaaaattgcactaagcaataactacacatggctccaaactcgaaagtggagga

SEQ ID NO: 5076 - DNA, 210 bp, Glycine max
aagctcacccccatgccagaatacatgaaggaagaaagctttcttgagaagcttccttgggaagtaagtgttacacctttccaatagctaagcccaccctccagggaacacacacccctccgatagttaatctcaccccccccccctctatacatgagaattcgaaaagagaccctactacaaaggctactcaaaatgccgtgaaataca

SEQ ID NO: 5077 - DNA, 345 bp, Glycine max
aataatttggtattggtttccacaaatatgttggatgcttgtttatttacaacatattggatgctacatatggctttaaacaaaaacaagttccactttgtggttgcttaaagagttataacatatgagtttagagtttaccatacgttcaagcaacagtgtattccagtaacacttggctaaaaccattagttcatacaaaatttaatgtttttgttatcataaaaaaaccttagattttgagggacgtgacattgttcaatgtcttgacgtgggtgccgtttcacgcatttacataatacaaaaaatcaaaatttttaaatgaaaattagatgactgaaatct

SEQ ID NO: 5078 - DNA, 405 bp, Glycine max
  unsure (1)..(405): unsure at all n locations
gcttgtctcaacggttatgctagaccgagactcaacaagttagccatcatcatcaagtaccaagaagaattaaatctagccacggcccacgagcacaaagtggtggacaaatatgcccaagtgtacgcggaaaaggaggctagaggaagggtgattgactcgttacatcaagaggcaacgatgtggatggaccgatttgctcttactttgaacgagagtcaagaacttccccgattgctggccaaggccaaagcaatggcagacgactacttcgcccccgaggagatccatggactcctcagctattgtcagcatatgatagacttaatggcccatataattaggaaccgctaanggagttgtattgtcactcagatcttgattagttataactttctgaataaa

SEQ ID NO: 5079 - DNA, 456 bp, Glycine max
  unsure (1)..(456): unsure at all n locations
tgagatgaggaagcgttgaagggtgaaacttcctgcttttattgttgaccacagagtggtacctgaagatatgtcgctggggtcaggagaccttggggacgtcaagaggggtgctattgcccaaaaccaagcttgaccaatcccgacccaacccgggcatagtctgtcagtgagaacctgtgatgtacctaagcaggcgagctcctggcagtctacagataaaacgaaaacaagaccacacagcactgaggctagtggtggctggccagctgagaattctgcgtaatatgtggattgtggcctctggtaatcgattaccaaacgtgagtaatctattacaaggcttaaaattgacgacaggaggctaagatggtctctggtaatcgattgccaaggtgtgtaatcgattaccangcttgagaacgaagtcaggaaacttagggagcctctggtaat

SEQ ID NO: 5080 - DNA, 238 bp, Glycine max
agcttgagatgaggaagtgtagaagggtgaaatcttctgcttttattcgttgaccacagagtggtacctggatatatgtcgcgggggtcatctaggactgacttgtaggtttactcttttgtttttgtatgggtagacctgatgtatatgaatttgatgattgtatatatgtggcttgaagccccactgtggacacctttgctctggatgacactatgtattttgtaaaactcccata

SEQ ID NO: 5081 - DNA, 446 bp, Glycine max
  unsure (1)..(446): unsure at all n locations
tgagctaaaatcctgactcaccataaaccttgacccagggtgagaatgtcaatccttaccctcggaagcaaaaaagaatagaagggaaatttccaatcaaaaaaaaaaaaaaagagaaggaaaattcccaatgaaagagaaaaaagaaaagaaaggaaattcccaatcaaagagtgggagaaagcaaaaagaaaagaaagaaaattcccaaccaaagaatgggaaaagtaaaaaagaaaagaagaaagctcccggtcaaagaaactagaagaaatgtgcagaaaggtcttttgaccagacaatatctgaacaatacagaattgtcaccaaatgaacaaaaaaggaaggaaaggaaaccacgacctanaatggtcttctccctttaattaccaaccaaaattccgtgcgctagcgacccttttttctcgccccgcactaaacaaaaa

SEQ ID NO: 5082 - DNA, 349 bp, Glycine max
agcttgtctcagcgtttatgcgagacggagaccaacatgctagctatcatcgccaagtaccaagaagagttaggtctagccgcggcccacgagcatatgattgcgggcgaatatgcccaagtatacgcggaaaaagaggctagaggaagggtgatcgactctttacaccaagaggcaaccatgtggatggatcggtttgctcttaccttgaacgggagtcaagaacttccccgattgttagccaaggccaaggcgatggcagacacctactccgcccccgaagagattcatgggcttctcggctattgtcagcatatgataaacttaatggcccacataattagaaatc

SEQ ID NO: 5083 - DNA, 354 bp, Glycine max
  unsure (1)..(354): unsure at all n locations
tctagtatntataggtcttcttcttcaagtgttctttgtctctaaatgaatataattcttctcttgagctaatgtctaatgtttatggtcgttggagcatttaatgcttacattaaatgcatgtattttttcatgttgaaacaccattctggttggcttttgtgttgagcactatagtagaaaccacttcctttgactaaaggaaaatatcacaagaaggggtatngaattgtgattttatatttttttttttttaaatccttttcacaatcaaaccaagttttcctccgaaagaaaaactttgtaaaatagataacaaaattttaaaaacacaatcaaatgatgaaagatgat

SEQ ID NO: 5084 - DNA, 379 bp, Glycine max
  unsure (1)..(379): unsure at all n locations
agcttggactcaaggagaaacttagaatggctctagtttagagtaaaaaaaaaaactatataaaaaaagactcaacaaacctctagctttggcccttgtttttcacactaattttcaattgaaatttaggaactaagattggtataaaataggaaccaattatagaataaatttttaagccaaaacaacaagcacacttccctttcaccttttttttcctggatactgatttttctgccaaattgtgtgatttttagtatttttccttttatccaaatcacttggttctttttgtattactctnttccagaattctagacaattcagtaaaattttcagctcaaaattcgaagtaaccaattctcagtaattttacaag

SEQ ID NO: 5085 - DNA, 142 bp, Glycine max
aagctctcgacatattcatatggccggagctttccacacggatgtccgagtctggcgcattatatgtcgcgaggctcggacttgaacagcagaagctcttgccatattcaattggtcatgactctccacactgatgtccgat

SEQ ID NO: 5086 - DNA, 230 bp, Glycine max
  unsure (1)..(230): unsure at all n locations
aagtttcttcctgtcgatcaaagaanaatatgatgtgtttgcatcaacaagtatatatcttatggtgaggctcttggagagcttgcattaactgaaagatgtcattaacaccatgtagtctttgagatctagtagatcaccttctaatcccatgagtgtacagaatttaagatgcacatggtgtaaggaaacgctactaaaaattactgtatattattcaaaagccaatc

SEQ ID NO: 5087 - DNA, 422 bp, Glycine max
  unsure (1)..(422): unsure at all n locations
cttagcaataactatgaaaaaaaatcaatcttcaatagtcccatgtagaggacctactacggngatttggggttcaaaatgctaaaatttatgtctgagtgtggtttctttttttttttttttcagtttgatggtttttaaaaatcagaaaaaaaatcacaaatatgtttatagacatttttgtgatgttcttccaatttttacatattcttttcatttattttagattttttgatacttatatcaaatatgattaacaattcaacacaaatttactatgcattgtgaattaatccattatgaacatgaaattaaatacaaacagtattaaattgcaaaataaaaaccatttcacccattacaagttaaacatagtcttaaaatcaaaatgaaaaaacacttcattcattacaaagtaacat

SEQ ID NO: 5088 - DNA, 462 bp, Glycine max
acactataaaactcagcttgtgtgacccttaatgggccttcccagttgggaccaagcgttggggaatcttttctagcttcgcctcaaactcacagtacgaggtcactgggttgaaaggctcgtggttgaacctttgtattatatctctttatcactcagagcttcgtagtttattctctgatcctggccatctcttagacttcatctattgtcttgagttctacctttatgttttcttcattttgttgttgttggaacaatagtctccttgtccacagttcccctacttcgatggggatcatggcatttgtgccatatgtgaatcaataaggattttcattagccattgtttggggtgaacgatggtaggctcaaagtattctaagttcctctttccatagacccttagacttgtcaacttggttctcatggccctaaggataactctattggctgcctctg

SEQ ID NO: 5089 - DNA, 383 bp, Glycine max
agcttcagtgtgtccaagaaaatgtacaatgcacatatatccaggacaaaagaggaatactacctctgttcgtccaggcattataggcttcccaacaaacaactctgccagaatacatccagcactccacaaatccacagtaactccataatctgtagctccaagcaaaagttcaggtggtcggtaccacaaggttacgacacgactagttaaaggctgcccatgagatggctgaaacaaagctgcaagcccaaaatcaccaatcttcagattgccattactgtcaagcagaagaattgagcccttgatgtcacggtgcataacaccacgactgtgacaatgctcaagaccacgaagaaagctgtgcatgtaacacttgatct

SEQ ID NO: 5090 - DNA, 415 bp, Glycine max
  unsure (1)..(415): unsure at all n locations
ngtgattcctcaatacatccttattaattgtttaattcttacttcttaaatgtacgttatatacttgttataggaaccttataattctaagtatatatagttgtagtatggtgttctgccttaattgcataagtagtatggttgtttgtgatttcttgttcatagtgatgctaatactctatagttggatgactcatatcaagttatatttcataaggaatactcttttgatcgtaccttctaattctagtgcaacctatttttttttgtgttgcgtgcttaagtcaaataaattgatttcacttgaaagcctgagtataattaattctttgtgttatgagactacatcaaacaattggattactgatgtttctatcacaatcaagtgattggtaatgtcttcatatgagtgtac

SEQ ID NO: 5091 - DNA, 209 bp, Glycine max
actaataacaataatggtaataagttcacattcgcaaggctggctgatttgctgaatcctcgtcgtacagctgggatttcctatgtatctccactcatttcaagagtgactggagcaattttaatttaagataaccaccctggctctggttctctgtcactttctaattcatcattttataatgcctataatcaataacaaaaatctta

SEQ ID NO: 5092 - DNA, 434 bp, Glycine max
  unsure (1)..(434): unsure at all n locations
taagagtgttgttaagttaatcactcccttcagtggatgtcttgctgggtgtggatgaataatttgcgtgtttcatgactactactactactactccattcaatgtctaatgccatctcatcaatacctaaactgttcgtttttttttttctccctatactcacaatttattgnttggctatgcaatgttactgtgttgatgcaatggaaattttatcagaattttgtcccaattgattgcattttgaaagggtgaaaaagacctcctcaatgtatttctatctaaatgcaagtatattctttcacgaaattgataatttgtttcctttgaacacaagcaatatgacttcttttgaatgcatcgacaatattgatttgataacaatgaattccatttcttnttggtacatcatagtcatcctaattaaaaacat

SEQ ID NO: 5093 - DNA, 299 bp, Glycine max
agcttgaccaagaaattactcacagtccatcatcgcatgaaggagactatggataagcagaggagggaagtgcagttcactcaaggacactgggtcctcattaaacttcgttcatgtcgccagtcaacagcttcaggtggtcaatactccaagttatcaaaaaggttctacgacccatttcaaattgttcaaaggatcggacctgtagcatataaacttgacttaccttcaacctcaagaatccaccctgtcttccattggttcttactcaagccttatcactcttcactgaccacaac

SEQ ID NO: 5094 - DNA, 427 bp, Glycine max
  unsure (1)..(427): unsure at all n locations
gtggtatcagagcacaagagcttcaagtaggtgctccttaaaccgccaattttcagctttaccttctcctccattgttttttcttcatttttctccatgtatctcctcacatgtcttgtgctgaatgttgttaacatgattttttagaatttccaccaattaaacttgctatagaagctgatttgattttctatggttcanattccttgttcttgttcttgaaccatgaattgtgttgagtttaggttcctttgagttttgtattgccacttttttggctgaaacctaaaccataaaattttacaaaaacattaaagtagaagaaaatctcanaaaactagagtgacatgttcacctattngtagtnttgtcatagaagtcatgtcgagtcatgaaacttgcacgtaatgatgtagctccatgtgga

SEQ ID NO: 5095 - DNA, 247 bp, Glycine max
agctttctcaagaggattctttgggaagctgccttcttatatattcacccctatatcaactaaattaactttcttgcaaataatttctgatgaaaattacgataccaatgatgatacctcatacattattactacaaatatataatatatatcaaggtgttacagtaaccgtcttctgtctgaacattctagagagaccaagtgggtgtggtttctatatgcacccccattttttcttaatacaccc

SEQ ID NO: 5096 - DNA, 407 bp, Glycine max
  unsure (1)..(407): unsure at all n locations
agcttctaagcaccctctcagaaatgcttatattctntaaccactttagtttcccacacaagggatgtctgacaaggtcaatgcaccccccatggacatacacaacatacaatgtatgaacgtgggcaccatcaagtacaatgaccatggatgaattaaggctcctaagcatcccctcggaaatgcttagattctttaaccactctattttcccacaaaagggacatccgacaaggccaatgcaccccccccccccccacgaacatacacaacatgcacttgtcaatgcattttcaacatcatcaacattccattttaatggcatcaccaataaccacaacaacctcattccatattgacataaccatcaataataacatcgattcatgttgacatgatcaccatta

SEQ ID NO: 5097 - DNA, 295 bp, Glycine max
  unsure (1)..(295): unsure at all n locations
acccattgaagctactaatatcttccacactttttggggtggggcattcttggatggacttgattatctcacggtccacttgggccccatttctgccaactacaaaccctcagaaaactgtattgtctacacaaaaagtacacttctctatattngcatagaaggcgtttttcctaaggactgaaagaacttgcctgagatgtcctcagtgatcatctaggctcctactgtacactaaaatatcatcaaaatagacaactaccaatctatctatgaaatcccttaagacatgatg

SEQ ID NO: 5098 - DNA, 442 bp, Glycine max
  unsure (1)..(442): unsure at all n locations
gacactatgaaactcagctnntttgacccttggcttgcctagcctctggcttgcctggcccccaaatagcttaggggtgaagtaactagcttgcctgngcgagcaaggttacttcaggttgaagaaacagctcgtccaggcgagctgcagatcaaccaagtccccttatttcctataaataggcgtgatggggctaaaggaaggggttcaaccttcatatattgaaaggatttagttcaattaaggagaagaaggagaaagaagaagaaaaaatgaggccaaagcgcttccgaattgccaccgtgatcgattcctacatcgntcttcattcgttcttcgttcgtcaaccgattagtannttattcaaggttttcaatttgctctatgcaccccttanggggtctcttgttgcttgcacatcttcatctcattctttaccatc

SEQ ID NO: 5099 - DNA, 448 bp, Glycine max
  unsure (1)..(448): unsure at all n locations
gcttattagatgttctctttcactttctaatgtacgaactctgaaacctaatcattttttattttatttttttaaaggtgagaatgtgagatgaatattattaggaaaaaaagcttaagtgagactaagaagtctcattccaaactcttaatcaacaagttgagtctggtcacacgctacacttacttcaagttctatctcacttaatagatgcatgactcaatcacgcagattaattacgagactccaaatattataggtggatggatggttcttgtgggctacttctcatatctcataatatttctttttttatattattaattacacaaatcatgataaaatacttatatatctntaacaaaaaaataatttgatgaaaagaattagaatataattggtaatctatctaaatattcgatatatatatatatatatatatattaat

SEQ ID NO: 5100 - DNA, 469 bp, Glycine max
tgtcctaactaaccgctaactcagcatatatctaacagaatgagctatactagaactttataacactatcatctactgatcatactaggtgaatctttcaccagtcactaaacattaagacacttttctctgtttagtagctatcctttctataacattaggatgaaaacagtgtataattgcagcttaagcaagtctgccaagtgaatcaggaatttattcaacagaaaaaacaagaaaacatgagacaccacacctacactacaatatcaaaacatgcccaaaccaaacccctattatactacaagtagtcatctaaaattgatgcaaatcatgtcaaatatggcctgcagcacaaaggaataaacatattaggtaattatactaattagtaacataaaccttcaagcacttatgtttgtaacagcgtacttgttcaccttcatagtaccattgcacccacacatac

SEQ ID NO: 5101 - DNA, 279 bp, Glycine max
  unsure (1)..(279): unsure at all n locations
ctggaactacttcacatggatttgatggggcctatgcangttgaaagccttggaggaaagaggtatgcctatgttgttgtggatgatatctccagatttacctgggtcaactttatcagagagaaatcagagacctttgaagtattcgaggagttgagtctaagacttcaaagagaaaaggactgtgtcatcaagagaatcaggagtgaccatggcagagagtttgaaaatagcaggttcactgaattctgcacatctgaaggcatcactcatgagttc

SEQ ID NO: 5102 - DNA, 401 bp, Glycine max
  unsure (1)..(401): unsure at all n locations
ctatgatcctgagcagctaggtgtgtcaaaggtgatcaaataacaagcagagatttaaaaggtactaggttccctcctagtagcgcttctttaacgtcttgagctggacaccttatgacttgtcggtcacgggcctagtactttgcttacctttggctttggacttggtcgcctattggttgaccatgtgtcataggcaacgctctaaccttattgtggatgagctgaggtgaactctagaggtggtggcggtgcgtctgttgctcgttgccggccatccttaggctgccgtggtgtctcgccctgcgcctgcctgngggtgcagtacttcttgatgaaagcccgattaatagggagcctgatgaacttggtgggggtgacgggtgcttcgtagaactgac

SEQ ID NO: 5103 - DNA, 420 bp, Glycine max
agcttctatagaaggttcattcctaatttctctacaattgcatcacttctcaatgagctggtgaagaataatgtggcatttacctagggtgaaaaacaagagcaagcctttgctttgctcaaagaaaagcttactaaggcacctgttctagctcttcctgacttttctaaaacttttgagctagaatgtgatgcctctagagtgggagttggagctgtattgttacaaggttggcaccctattgcttattttagtgaaaaacttcattgtgcgaccctcaactaccctacctatgataaagagctttatgccttaataagagccctccaaacttgggaacattaccttgtttctaaagaatgtgtcattcatagtgatcatcaatcacttaagtacattagagggaaaatcaagttaaac

SEQ ID NO: 5104 - DNA, 467 bp, Glycine max
tcgaagttctcctcgttgataattctcaacttggagagccaatctaaccctcgtgtatgaactttcagccattcatgataaccaccgatgatgccattacggatgcccctaagttctttatctttccttaacgggcgttcccacgccttgtggactctttgtacaattttgaaactttgtgcgccgaaatctctcacaaggaaaggcgagaggctctctttcgtcggtgctcccctcatggggtaccctaactgtcttatagcaagtgcgagattgtagttaatacaacccctcgtccctatcaacggaatttttgggtagtccccacatgagaagagaactccctcctttccttccttccatcgaggaaaccagatgattgttcggcctcctatcccagccaagtattggtcccaatctactcttctcttttcgaaacacgagcgataactttggagtggacatgg

SEQ ID NO: 5105 - DNA, 437 bp, Glycine max
agcttgctatgcacaataacatcagtatatctttcccaagcctcttgggaagtgaatctggatctgtcaaatctggctggggtaggagtagagggtgtcattcttttactagaagccatctgcaaaatatgagacacaacacaagagactagtccaagtctatcctcaagaaagcataaaaataaaactgaaatcagagttgggcgcttaacgcagcatgctgatgttagcacgccttatgaaattaacacaagcgctaagcaccacgggcgcttagcctaagtctacaatgttagaaatagtagaggattggggcttagcgccgcatgctggcgcttagctcaacctcaacatacatacactgaggattagcacacaagagcgcttacccttattacagaggttaaagaaacagaacctaagtggcgcttatctca

SEQ ID NO: 5106 - DNA, 459 bp, Glycine max
cccatcacatgtggtactaggtggctgtcgggcgatggtgcacaacaagttatccacatccacaatgcgcgcataaacccaccataccctgttgcccacctccaactgagctcacgtactcccacatatcccatatcctcgtttctctcaacaccgagtccccatcaatcctcccaagcttccacaacatccaagcataacaacattcaaacagcacagctatcacagtcaagcaaaacagagcaaaggcagaaaactctgtcaaaacaccaaccaaatcacagtttttctcacttaaagaccccagtaacaattcattcgatccaattcgctaaccggtggatcaactccaaaattttactggaagtctataggacataagcctacactatgaccgctgggatctactaagatacattcagaactcattatgcactactctttccacagccaaccaca

SEQ ID NO: 5107 - DNA, 430 bp, Glycine max
  unsure (1)..(430): unsure at all n locations
agcttacattatagtatcaatgaaacctattattgaaacagaccaatcaattcgacatggctttatgagatggaaatcatgggatacactaattaaatcaaccagcctcgtacaatcttaaactaacagataaaaacaggaattgtttatccaataatatcttaagcaagcaaacaaaaaaaggcaagacattttctgcggttcataatctcaaacaacaggcagatagtgccacgagtaagtggatacaaaatgccatccgttcaataaaatactaccaatttgttttctgaaatattttctaagcaatttgaacaaagataaacattttccaaaaagtggtgaacgattggaaatgattcataggtgaacagaanatgagttacctgaaagagggtgtgattgatactgaagaagataaccatttgga

SEQ ID NO: 5108 - DNA, 330 bp, Glycine max
  unsure (1)..(330): unsure at all n locations
attctctatccttgactggatccatgtggattctattgcagccacaataattaagtgaagggtctgacttacctgccatacattaatcagtactttcgcttatggtggttatgtaggattttccatcaaatttagaagccaaatagttgatacaagaagtgaagaatttgtttcttacctctttcaatttattccaaacatgcttgcatggttgcatcccctcccttctttgcttcatgttatcagcatttaagaacttcatgtatgtataatgggagaagcataagttgctgcgacgcanagtctgaccatataaaattctaactaatg

SEQ ID NO: 5109 - DNA, 390 bp, Glycine max
  unsure (1)..(390): unsure at all n locations
gcttcacaaagagaatcatctcgatatgatagctttggaagtcctcttacatggctctgattntgaaactttaagattaacctcaagttagcatgaccaatcttcttatgccatatctagtgatgctctttaactgaaagtgagcatgacatgttttgactggacagatcaccaagtttaatcttataaagatttccttgtctcttagcagagaagaataaagaggttttcttgttctggatgatacacatatccttgttaaaggtgacattatatccactgtcacataattgatttatgcttagcaaattatgcttcaaccttttaacaagtaaaacattatctatagaaggatagggaggaatgcanactttacctacaccagttatc

SEQ ID NO: 5110 - DNA, 433 bp, Glycine max
  unsure (1)..(433): unsure at all n locations
agctnggtaccactgagttcaaatagctccctccagaacttactcacgaacaatgggtctctatctgatatgatgctacggggcaaaccgtgaagacaagtcaccatagctgtgaacagctccgccaccttccttgtagagtgcttagtgggtaacatcccagatgaagccccttcggagagcaatccactactacgaaaattcatgtatagcctttatacgaaggtaagcccataatgaagtccatgcttaaatcttcccacggccgatatggtaccggaagagggcacaatagccctgctggtttgcggttgtcgtacttagtaagttgacacgtgacgcaggctgcgacgaaagtgcgtacatcactccgcatggaggccacgtgaagttctcctgcaacctctgaaacgtcttctgagtcccatagtga

SEQ ID NO: 5111 - DNA, 458 bp, Glycine max
tcaagaaagaaaataactcaatcaatcatataagcacatagcaatcaatcaagacaaacaaataagattttgttagtcatcatataaacaagttaattgaaagaaaaaattcaatcaactaaatttaaaagagaatggttttgatgttacctttttcatgattcaagtgactagatctttgaaggtagaagtcagacttttgcttttttcttaatcttattgagaaatgttcttatcactttcatagtctttggatagaaggttgatctccttttccaaaccatcagaagagtcattgtcatcccaagcaatatatgccttcttggatcttctttctttatagcttttcttctcattcttctcgggccatgactcatttgagggacaatttgcctttatgtgaccgggttgattacacttgtagcatttaagtgtaggagaaacttcttatgatcttt

SEQ ID NO: 5112 - DNA, 343 bp, Glycine max
agcttaacataaatgattaatttacataattatagtttaggcaaaatatgttcattagccaatcaatgtgtttaatgctatgattagtgacatgaagaatgttaaacacatttaattacatattgaaagaaacatggaggttgctgatcctttgtcataccctttcgtcagaaggctgtgaatctgtgatccttgcctcatcacatccttttgtgtgtacctagtaacttaagacttgcaacaatgccaatttccctagatactgtatcctttcttaacctggagtaaccaaataggcgtgagttacatacatctcagtcatagaacataaaattccaacagt

SEQ ID NO: 5113 - DNA, 421 bp, Glycine max
gtaattgtgaaatgtaggcttgcaacacatcattgatcttatcactaggctcttccagactttccttgatggggatgggaacacgatccagaagctttgctagctccatcttctcatcttgccttactgttacatacttgaattcttcactcaaagagaacaatcgacaaagctctatgtcccccattgtaggcttcaaatgctcgttatatgtggatatggatccgtgtgttatgtagtagtagctggcaatacgacccaagtcagtgacctgaaaatatccactcttcctatcatacttcaccaaattatttctatccaagatggttgcagccgtatgaatctgcaaaatttcagcaagatataaagatcaaaatcagcctatacataaaaaaagacaggatgaaccggctagaaaaaa

SEQ ID NO: 5114 - DNA, 448 bp, Glycine max
agcttgccttgccccttgatatatttgagggactcatggtcactatgaatgacaaattccttgggataaaggtagtgttgccatgttttcaaagcccgtactaaggcatacaactccttatcataagttgaatagttaagggtaggaccacttaacttttcactaaaataagcaattggatggccttcttgcatcaacacagccccaatcccaacatttgaagcatcacactgaatttcaaaatatttttgaaagtttggcaacgcaagtatggggcattagttagcttttgcttaagaacattgaaagcttcttcttgtttctctccccatttgaaaccagcatttttcttgagcacttcattgagaggtgctgccaatgtgctaaaatccttcacaaatcgtctataaaaacttgctaagccatgaaaactcctcacctcggtcac

SEQ ID NO: 5115 - DNA, 429 bp, Glycine max
  unsure (1)..(429): unsure at all n locations
gtgaccaaattcaaacgatgataactntntactcggatgtctgattgagtcccgtaatatatcgagacgctcgaaattgaatgttgaagctctgaccaaattcaaacgatgataactttttactcggatgtctgattgagtcccgtaatatatcgagacgctcgaaattgaatgttgaagctctcagcaaattcaaacgataataaatttttactcggatgtctgattaagtcccgtaatacatcgagacgctcgaaattgaatgttgaagctctcagcaaattcaaacgacaataatttttttagtcagatgtctgattgagacccgtaatatatcgagacgatcgaaattgaattctgaagctctgagctaattcaaacgacaataacgttttgctcggatgtctgattgagtcctgtaatctattg

SEQ ID NO: 5116 - DNA, 416 bp, Glycine max
agcttcttgtattatgcactccctggctatctcttcatggtcttaacattcttctcatggatatgttgggcatggccacatagcatcactgcacagcaaattggctcaggttatcacggacttgggattggtgccttcacacttgattgggcaaggatttcagcttatcatggcagtccccttgtttcaccatggtcttccattgttaatgtgggaattggatttatcatgttcatctacatcattctacctctctgttactggaagttcaacacttttgatgcacacaagtttcctatattttctaaccagttgttcacggccagtggacataaatatgacaccaccaagatcttaacccctgagtatgtccttaatgttgatgcatacaacaagtacagcaagttataccttac

SEQ ID NO: 5117 - DNA, 350 bp, Glycine max
tataagctgtttgagtgtgctatcgaagagtgtcgaaatgattgtcgaggtaattaatgatgacctcatcgcatgaactggtctctggaatgtccacgctggctgaagatcgaagcacagaatgcggaatgggaccagattcttcaccaggatatgcattctcttttaaacatctaccttatgcacgtctcattttaaacattttcgctgttgtatgaaaacctttatttattgtatagaatgatacattactcaaaaactattttacaagtttggtcatagaaattataatctctgtttgagatagataaaacttatcaaagagttctattcgtacgagcaataaatgt

SEQ ID NO: 5118 - DNA, 391 bp, Glycine max
  unsure (1)..(391): unsure at all n locations
agcttgtcagcattggatttgggtttaattttttcggtgggagtcttccctcgtctcttcttaaactcccatatctgcgagaaattaagctaccttttaatcaattcaatggttccttggatgagtttgtgattgcctcccctgtactggagatgcttgatttaggtagcaataatttgcatgggcctattcctntgtccatttttaatctcagaacccttggtgtcattcaacttaagtcaaacaaatttaatggcacaatacaattggacatgattcgcaggctgagtaatttaactaccgtttgcctctcacataacaatttgtcagttgatatatacactagagatggtcaggacctgtcaccctttccagctctaagaaatctaat

SEQ ID NO: 5119 - DNA, 374 bp, Glycine max
  unsure (1)..(374): unsure at all n locations
tatcccatgcctccttagcttgaaagatgaggaaganagctttcttgtttctctttcttgaatcctttaaagtcttcttttgtgcttaggaaagtgaagtctcatcttgtcactccgtatagcctttttcaaccatttcctaaacatcatgtgtgatgcaatccgaccccccaagggcattggatagaagactccaagaagattaggctagagatgtaagagaaggtcctagggttctcatgagccttagggtagatttcaggcccacgggttaagtatgagtccacttatctttgtacatattagattaaggtttcattatttttgggccttgtatttagggctccataatgtaggtagggtaccctagaaat

SEQ ID NO: 5120 - DNA, 340 bp, Glycine max
agcttcatattttgagagaggaagataactcttctaaacatatgagcacaaactcattatagcaatcaaacaagacaaacaaataaaattttgttagtcatcatatagacaagttaagataaagagaatatttcaccaacttaattttaaaagataatgggtttgatgttacctctttcatgattcaagtgcttagatctttaaagaatgaagtcagacttttgtttttcttacttaaacgtcttgagagatgttctcatcactttcatagtccttgggataaaggttgatctctttctccaaacatcggatgagtcattgtcattccaagcaatatatg

SEQ ID NO: 5121 - DNA, 413 bp, Glycine max
  unsure (1)..(413): unsure at all n locations
tgtaggattatggngtacccatcacatgtggtactangtggcggtcgggcgatggtgcacaacaagttttccacatccacaatgcgcgcataaacccaccatccactgttgcccacctccaactgagctcatgtactcccacgtagcccatattctcgattctctcaacactgggtccccatcaattctaccaagcttccccaacatcaaactaatacaacattcaaacagcacaagctatcacagccaagcaaaacagggcaaaggcagaacactctgcccaaaacaccaaccaaatcacagcttttctcacttaaagaccccagtaacaattccttcgttctggttcattaaccgctggatcgactcgaaaattttactggaagtctctagtacataagcctacattttga

SEQ ID NO: 5122 - DNA, 458 bp, Glycine max
  unsure (1)..(458): unsure at all n locations
tgaagcctgcgagctntcgcgccatagttgccatggttcgcaatgattgtagcatcaacattacactntcttaagccagcattagctcttgtccatctcgagatgatagttatatatgaacaggaccgtgtctacgcgtttttttaaggcctttgccgagtatatttaaagactaatttaatataagttgtcaaatctcattttattttatcgattacaaaattgctcaccggagttatataattaagtatttctaaactcttaccatcaataatatataaaaaaaaacattcaatttatcttttaacatagtttatataaaaaaaaaattgagtagtttgaattttacaaaattactttcaacaataataaaaattacaagtattatcaataacactttgaaatataatgtatatanttngaattttaaataattaatattnttagtaaaatatgaa

SEQ ID NO: 5123 - DNA, 475 bp, Glycine max
  unsure (1)..(475): unsure at all n locations
ctaagcttataaatntatagctaaactcgcattttaataatagctatgattggcttcataataataataataacagctatgttttattgtaaaaaaaatntattatacaataacgacaataagacttcatcttggaccgtgtattttttttttcaccaaaaatatctatatcaataaaaaaaataaatctttttgaatgtaaagattattaaagtgaattttatctgtcctccaatctaatatggtaatacctcatatatagtacataatttctctaatcactagacgaatcctaatataattacctagtacactttttgggacattagttaaagaaataaaaattagaaatatttattaaaagctatatttaaaaaaataaatatatatatatatataattattcaatacttatttgtgtatataattcaaggcatttaatttcatagaaaagatgatatacatatacattgat

SEQ ID NO: 5124 - DNA, 361 bp, Glycine max
gcaagcttcatgatgacaaaatgcccaaagaatgatttcaagatggagtcttcaagttcaggatcaagtttaatttcaagtttcaagagaagaaatcaagaagattcaagaatcaagagaagtttgatttcaagattcaagagaagatgaattcaagtttcaagagaagaaatcaagaagacttcacaagggaagtatttaaaagatttttcaaaaaaacaaacatagcacaattttgtttttcaaaagagtttttctcagaattttctaagttaccagagttttcactctctggtaatcgattaccagtttcctgtaatcgattaccagtggcaaagtttgatttcaaaagctttcaact

SEQ ID NO: 5125 - DNA, 310 bp, Glycine max
acacactcaacaaatagtcatcatccatccacaactccaatcattcatgctcaatatgatgcatgcacctaacctcaactctcatatgcaatgtggtaccatccccaaggaaatagcctaagcgtgtccacatgacactctcacttaggaaaactacgcagtaagtgtcgaggtcaccctctcgtgcataggcaactccccccccccaccatcattgatggatcaactagaggatcaaaggatgtccgaaccaagtgacatgtccaataatacaggtttgcctcctacgacaaactaccaggtcttacta

SEQ ID NO: 5126 - DNA, 470 bp, Glycine max
  unsure (1)..(470): unsure at all n locations
agctntgagccaaaatcctgactcaccataaactcttaccctcgaaagcaaaaaaaggaaagaaggaaaggaaatttcccatcaaagagaaagcaaaaaaggaaggaaaggaaattcccaatcaaagagaaagcaaaaaaggaaggaaaggaaattcccaatcaaagagtgggagaaagagaaaaaaagaaacgaaaggaaattcccaatcaaagagtgggagaaagaaaaaagaaaagaaagaaaattcctaaccaaagaatgggagaaagtaaaaaagaaggaaaccatgacctanaagtggtcttctccctttgattaccaaccaaaatcctgtgcgctagcgactttttgccccacactaaacaaaaacagaanaggaaaaaagccaaccaaaaatcaaaagccaaaaacacacaaaagccaaaaaaaaaccatcaaaagaacccattcccaagggaagtcttatt

SEQ ID NO: 5127 - DNA, 473 bp, Glycine max
  unsure (1)..(473): unsure at all n locations
actcaagctttatccaggaaattcttggtggtgaagctccttcttccttggcttattccctagtggatggtgcctcccctctcctcttctcctttgccttccgctgcatctccatggtgtaaaatcaccattggagctcaaagatccagcctccatagaagctccacaagcaagcttccatcactttgtggatgagttatggtggactctggaggtgggggcggtgcgtctgttgcccgttgctggcagtccctaggctgttgtggtgcctcaccctacgcttgcctaagagcacagtacttcttgatgaaagccctgctaatagggggcctgatgaccttgctgggggtgacgggcactccgtagaactgatagaggcccataatcagagctggaaaccccangaccctattggacttctccgagtgcactgtgtgtcttgtgggcgcgatccactntggcagggggagatc

SEQ ID NO: 5128 - DNA, 358 bp, Glycine max
agtcacctgcggcatgcaagcttgttagagtatcttaccacactctttacttctgattcttgtgatattcgagttgaggaaacaatgcttagtgtcccagtcccactatatgtgtgggttttatgttttaattcgaactttgtcgtcaaatccttcagacatttaaaaaagtaagaatcaatatctactcagatttctaaatttaacaatcctacttgagagaccatttgtccgagacaattcggctattggtatttttaatctttttctgatcttattattctgcagacagttgcatctctcttcagtcaagatatggctaagattggaggaaacactgctggcccaagtacataat

SEQ ID NO: 5129 - DNA, 428 bp, Glycine max
gcagttcagtgtctaattgattaatccatgcagacaagtaacgttataatattatgtcatttagcaaagcaatgaaaacaatgtcaacaaatgtgtgaaactagagataaagagaaatttctgaattgggttgagtgagagaatcacccaacaaatttttaatttataggcatgaggatgacatgattttacaaccaaaggcactgtaagagaacaaacattgaaacagtttcatggttcacttcagactgttgatgttggatttctaagaatctattaagaatatagactctttatttcattttcctggcttgtgttggggaaggatatctatcagttacatacggaaagtaataacaaacaggtaaagggaagaaagatagaacgtacagatgacaggagaaacagaggttgggaggaaatggcag

SEQ ID NO: 5130 - DNA, 452 bp, Glycine max
agcttaaagtatgcccgagtcattcatccctatgagatgttgttgaagtattggcgatcagaattgccattccttggattatagggttgaaccaagctcacgcttttacaaaaaggttcatcaagtcaagttgaaatatggaagtaaccgtcttgcaaaattggggcaaaagatgaatcgagtcacatcactgcttcgtctactgccaaacatatttaggattgttgaggtccttgttacttccagtttcaccttgacaaagatgtcatggaccatgttgaaaatctaaattgattcaaccccatatcctacgtaaaaattcgcaatacttcgattgtacatcattcgcatgcatccatgcttttcattggttgcgttgctcattgcattctttccttgaaaaataaaataaaataaaataaaatgaacttatcaaaaaaggacatgcttta

SEQ ID NO: 5131 - DNA, 400 bp, Glycine max
ctcttgaggatcaggcctcaggagtgcaaatctagaatatgtacacaagttttccccctcttccagcactataggggtcttaaaaaatgtgatgaaggtatcctcatcaaacttcactaaatgacctctcaccctcacctgcttaggtgatttatcatcggggtcatagaggttctcataaaactcctttacaatggcgatgtctatgctgctgtcagaaaaatcagccagcttctcatcccaatggcgtctctcgagttcctccttgaactcatcaaactctatataataaactaccacattcctttctggtaaaagcttgcgaggcaccacaatgtctgtatatctctcccaagcctctagggatgtgaacctagatctatcaaatctagcttggata

SEQ ID NO: 5132 - DNA, 384 bp, Glycine max
  unsure (1)..(384): unsure at all n locations
ctagtaagcantttggccactagtaatcgattacagttactggtaatcgattaccagagagtaaatatctcttttaaaagctttggagaaaaacctttggccataacttatgcatcatcaatttggaaacttctttttaagactctaaagactaacttcatcatttatcttggatttcttggagtcttgatttggatcaaacttgagaaacgcgtttctttagcatcatcaaaacatcatgatatctttgcttctaaaacattatcacatcttgactgtatctgttcatttaaattatcggttatctgtctgggtatctttttcttttccctttacccttaatttcacactataaatcatttctctctacttctcttttacaaa

SEQ ID NO: 5133 - DNA, 368 bp, Glycine max
  unsure (1)..(368): unsure at all n locations
acatatggttggataaaacgggtcccataatattatgcatacaagtattgagaatctgactcttgcagaccatttcttttttgatagctgtcttgcaaaccatgtctttnttgatagctgtccatgattacgaaacatggtgaatcatgaatctacaaatttgaatgcgctattataaattaggctttcatagatgactatttcacattcttcacgatagttnttaatcatctttgaatcttggtttctacatcggttgttntagaaatcgctgtaaaattttattttttgttttacatataaaaacagaataaatctaggacaatttctaaaatcatgtacattaaattttattttttaatgttatg

SEQ ID NO: 5134 - DNA, 425 bp, Glycine max
  unsure (1)..(425): unsure at all n locations
agctnttcattatatatcaggacttctccgcctataattgtttcctcattgggtgcaaaaattcttgataaagtacagtttaaaatatcttgtagttntcagaatcagattcatagatatttatctatacaggtacaatttctaaggcaagttcatggtctgagcaacattttgataggtttggtctctagattcttctgagttacttcaccagtggataaatattcctacaagtatttctgcaataatgtatataaaatttttattaatttttggttatttatttatataaatgccatatgtttcttatcctttctgaatatgaataatatctagcttctgcttcaatcactttatttntcaagataaagagaatttatcaacaaacaattaaatcacataaatatccatacatgtgcaaatgt

SEQ ID NO: 5135 - DNA, 443 bp, Glycine max
tcaagaaaaatggcctcagcaaacttcttatttccagaaggaaattctatcaatagacctccaatctttaatggagagggttaccactactggaaaacccgaatgcaaatttttattgaggcaatagacttaagtatttgggaagccatagaaatagggccttatatacccaccacagtagaaagaattacaatagatggaagcacatcaagtgaaagcataacaatagaaaaacctagagatagatggtctgaagaggatagaagacgagtacaatacaatttaaaagccaaaaacataataacatctgccctgggaatggatgaatatttcagggtttcaaattgtaagagtgctaaggaaatgtgggacactctacaattaacacatgaaggaactacagatgttaaaagatctaggataaacacactaactcatgagta

SEQ ID NO: 5136 - DNA, 213 bp, Glycine max
agcttagaacaagatgtttatggaatcctctctctcccttgatgagctcgtgcgaatggagaatgacgggtgtgaatctgatttggggagaaacgagattatcaagcttagagcttgctccaaatgaaacttgggtaagcctaactctgagatgttagattgacacatgaatgactatttgtagttctgctcaacgagccgactgattacata

SEQ ID NO: 5137 - DNA, 333 bp, Glycine max
  unsure (1)..(333): unsure at all n locations
ntnggcagaaggaggaggaagaagttccttagactcataaatcaagcggcggacgttgtcgtctatagaatgaattgacaagatgatgatgacaagctggtgaaacccttgctttgatacactcttcatgtctggtcatgagaaccattagaagagtcatcctctttatatgaacttagataccattgggaaaagttataactttcagaacaactggagaactattgaaagagttacatcttttgattgtggtcaaaaactatcactggtcatcgactaccaactcagtgatgtcaaccacgcaaagctgttttgtgataagatgtgactctt

SEQ ID NO: 5138 - DNA, 236 bp, Glycine max
agcttgttgtattatgttatcgctggctatgtgattatggtcttaacattcttctcatggatacgacgggcagggtcacataacattactgcacacaaaattggctcacggtattacggacttgcgatgggagcctatacactagaacgggccgggacttgaactcatcatgggggacccgatgttacaccatggtattccattgttaatgtgggaatcggatgtatgatgtacat

SEQ ID NO: 5139 - DNA, 494 bp, Glycine max
  unsure (1)..(494): unsure at all n locations
atgaccatgtgaagcgtgctatcactggaccctgaaactcagctataagctgtaagactgcgcaccgcctaattgntcagacgcttgtcgatgttatcaatgacgtactggtgccgtgaactgggcttctggtatgctctgctctacgctagagtgataatagcacagatagctggatgggacctaattgcttaccgtgatagacactctctacaaatcatctaccttttgcgctgacgatgacatgcatttacctcctaaagcgcgagcattagatcaatccttgaaatagtatcattggtcactgcagactgtacgtgttggttataaacatattgtcccaattgagacctacatcacactcttctgagttgtgtgctacatgcatctatgattacgcacggtaagtttatcacatggatatgttcagataagagctgctgactattgtatttagggttgcgagtctggtttaattctgaatgtgtatgtcg

SEQ ID NO: 5140 - DNA, 202 bp, Glycine max
  unsure (1)..(202): unsure at all n locations
tcggctggcacctgaacacttgtcatgattgacagctcatgatctcagttatgcaattcctacactgattaacacgatatatcacgcttaaaaaccaagactggaagggcaccttgtctcttgttaataatatcccgcgggcgtctgccaatcctngcttgttactgaagtcagaagctattcagaccttcggaatccttct

SEQ ID NO: 5141 - DNA, 351 bp, Glycine max
  unsure (1)..(351): unsure at all n locations
agcttgccactcagctcgcccaggcgagcatggttgcttcctccagaagcaacaaccttttggaggaatcttctggagggcccaagtgggcctggtttgctattgcacccccacctttactaaatacacccncttgcccttttttggagattctttttttgtaaagttacgaaaacttacggatttcgcaatgatacttgttntctttccgtaatgttacggaaccttgcgaattacataatcatccccttttttgacttatggaatggtacggaaccttactaatngtgcaacgatgcttcattttgatttctggtggttcacggaaccttacggatngtgcatcaatac

SEQ ID NO: 5142 - DNA, 363 bp, Glycine max
gtacgctcaatgactccgatcaaatatatgtgccatagagagaatggccaaggtgctaccaagacattcaatggtatgggtggagcgttaacattatcagtgaaggcttggcatttacagcatttcttcacatggatgcaacaatcgctctccacagtgagccagtaataccctactcttagaatcttctgagccatggcatgtctattggcatgtgttccaaaggatccttcatgcacctctaccagcatatgctcagtctctctggcatccacacatcaaagcaataccatgtcgtggttgcatttatataagatattcccgcttaggaagaagccggctgccaaccttcgtaacattctc

SEQ ID NO: 5143 - DNA, 172 bp, Glycine max
ttatgcaagcttcactgatattgtctcggccatgatctttcttgcgagccctcttggctacttggtcaaaggctctagcggaaactgcattttcttctcgaactcggcacactccttccggacgtctgtagtgactaacattaatatttctttggcaaggcttgcttttcct

SEQ ID NO: 5144 - DNA, 351 bp, Glycine max
  unsure (1)..(351): unsure at all n locations
nnttggagtaganacatgggtctctactcattntatttcanattaagaaatcatatctagtcaaggtctgagagaccatacaagtttcctaacgatttctaattatgtgggccattaagtctatcatatgctgacaatagccgagaagcccatgaatctcttcgggggcggagtaagtgtctgccatcgccttggccttggctaataatcggggaagttcttgactcccgttcaaggtaagagcaaaccgatccatccacatggttgcctcttggtgtaaagagtcgatcacccttcctctagcctctttttccgcatatacttgggcatactcatccgcgattctatgct

SEQ ID NO: 5145 - DNA, 473 bp, Glycine max
taagcacgttagcttacgctaagtttagcctacaatcctcagtctgatggccagatggtacggaccattcagtcgttggaggatcttttgagggcgtgtgtcatcgaacaaaagaggagttgggagagttttctgtcattgatagaattcacctataacaatagttttcattctaccattggcatggctccctacaaggctctgtatggtaaaaggtgtaggacacccctgtgctggctagaacccagagaaaacctcaccttaggacctaaagtggtacaacaaaccactaagaaggtcaagttaatccaagagaggatgatgactgctcaaagcatttataaaagttatcaggacaagaggaggaaagactaggaattcaaggttgatgattatgtattcttaagattcactccgtcgactagggttggtcaagcattgaaatctcagaaactcaccttcgtttatcgatc

SEQ ID NO: 5146 - DNA, 517 bp, Glycine max
  unsure (1)..(517): unsure at all n locations
aaagaacccatctattacgcgtcgctatcgattactcatgcgtcattaagaggcttcctctagaagcttcctcgtggcttctttgagaagctttctcaagaggcttctttgagaatctagatccttatctatccacccctctattaactaaattaacttccttaaaaataattacggatgaaaataacgcaacaaataatcaaacatcaaacataattactaataatatatagatatatatatcagggtgttacaggtcctgctgatacaagaatttgacatcatcatcaaggacaagaaaggatccgagaatgtggtagccgatcatttatcccaattaaagaataaagaagtcaccaaggaagaaccagaggtaaaaggagaatttcatgatgagtntcttttgtaggttaccaccagaccttggtttgtagacatggctaactacaaagccaaatgagtcattccagaggagtttaattggagtcaaaggaagaaattcttgcatgatgcatgn

SEQ ID NO: 5147 - DNA, 465 bp, Glycine max
aagtcacctgcggcatgcaagcttctccttcttttccctataataggggattgagggaagaacaaaaatgtttaaccctcctggtatctgagaatcacttaaaattagtgaggaaaattgtttccgtgaagaaaatccatgccgaggcacttcggtaacacttccgagacgtttccgtgagtaatttcgcgaagattttccgccgttcttcgacgatcttcgttcgttcttcgtcgttcttcggtcttcaaccggtaagttcccgaaattgaacatttcaattcattctatgtacccttagaggtccacatttgtttcgcgtgcttttatttttatttcatttactttccgtacccccttttgacgtgctttagtcatttatttaagtcattttcttgcctagtcaaaaataaaataaatttccaccgatcattcgtattgaacatcttttaattctggtaaatg

SEQ ID NO: 5148 - DNA, 434 bp, Glycine max
gataatgctgcggtggattcctagcatgtcagatggcttccaagcatacaagtccgcattcctatgtaggacgtcaatgatgcatctatgctcatggatggtgaggttcctgcttagttgcatgcattgcccgagtttgcgtctaagcagcatcttaacgagctcttcaataggctttgggcctctgtcaaaagtatcatcacgcagatctacatcaagttcgttgtctaggctttcttggtagacagtcagggcttggactgaagaccctcatccacactcatgacttgagtaccttcgaccactgtggggtgaggcttgacaggctatctggtttctactagctcccctacaaagctgaggagtggactagcatgaggttggaaggtattaggaaaacttcaagtctttggaatgtcttccgacataaaata

SEQ ID NO: 5149 - DNA, 434 bp, Glycine max
  unsure (1)..(434): unsure at all n locations
tcttatanatacggagttcactgccaccagcataaccgttcatggcgcggttgcggcttcggctatagcacccgccaactggtttgagaatgatgatcagaagtgttaactgcatggcttaggtggcgctgnacagagattacgtcaggatatatgtatatgtatatgtatggaagacccgatccataccttcccttggccataataagatgacgactctcaacttatgacaggctgacaagcacgctgagcgctcgcactctcgctaaagctcactgtctaggaacatgaaacaatgtaacaagctgatatctccgctgagagcaacaggtgcctaaacttacacttctacactagcggagcgtggactaatctctaacactctatctatttgaccttgactaagctttgacgatgcctaccactctccaatg

SEQ ID NO: 5150 - DNA, 370 bp, Glycine max
aagagatgtctggtagtatatttgatgatttgaagtgatgtactgtcactagcgatgcgatgtgggagttacctggagaagggaggaaagccgaactaatgagatccacagctacttcaaattaaccatcgtctttcgttaccattgctctctactgggaatgctatcgattattaaaggtttggtgatcgtagttctctactgttcacacagtggttgcgtgctattgctatcttgtagatactagcattactgcacacaattctattgcacccatatcacccagttcattcagcttataagatgtggttcttctatacttgagaaagaaagcatttttattgattgtgaaagaatataaacaaatgat

SEQ ID NO: 5151 - DNA, 455 bp, Glycine max
  unsure (1)..(455): unsure at all n locations
agcttatctttctctaggctcaaactgatcgattctcactaaacactataaacataagcaaaacaccataacatcaatcattaattaattattgacacttaaatataaatttagttactcttgcaatttaattaaaaccacttaatcatacgttttttattatggtttttcataattaaaatcaaggatgtggattcaacaatctcccattttttgatgatgacaaattcttaggagcaaatttaaagggtgtgacaatacacatatgagcttttcaattnttaactcccctaggagtgtgcatcaattttgtttctttttaacaaaaaagaagctccccctcaattcatgcattattaatcttgcatagcacaacataatgcataaggaaagaaacaaatgaacacaaaaaggagtaatcatttaatcagaatcagtttattattaataataat

SEQ ID NO: 5152 - DNA, 477 bp, Glycine max
cttcttgaggaagcctcttaatgaagcttctcaaggaagctacatgaagctgtctcggtaaaaacgcttcccagtcttttttaaccgttggatcttctcgaaatttggttttcagctttacaagacacttttccacgatcggaccgttgggatctttgagaagatgtctggagtgtgcgcgaagtttccgttcccgagagcattactcccttgtgcgttttgagccttgtagtccaagtagcttaggaaaaatgccatttcttctcctttctttcttccaaaaccatttccaacattccaaactctttcttcatcacccacaaccaccattagccaccacaaaccgccgttgttctctgttgaaaccccacaccgagaggaacccttcaaccgaagcgaaatcttccaacttgcctcgcgatttcggtagagaacaaagccttaatctgacctttcattttccttcgaggtaaacat

SEQ ID NO: 5153 - DNA, 386 bp, Glycine max
gctttcaaggaattcattaaaagactctcacttgaggcagatggtctcatatttcaggtgggttgtgatcaatgatccctttcaatacctcataggtcaggcacatggttcattccttcttccaaatccttgttaatgaacatagtgtttttttctgctttcttttgatattgaacccaatggaggttgttactgacaatattgattaccatgggtgggatgatccttatatacctcgtactcatgaaggactattgaagtggaaatatgcttatctgaattcagttgattttctcttcgaggtattatcatcaatcatcaccttatttcatatggtggcgggatatcacttgtgatgtctcttggcaattatagtttgttgtttg

SEQ ID NO: 5154 - DNA, 462 bp, Glycine max
gcttgtgtctcattagtgttatatatagagacaccttgtaagcttttatgtgcaagtaataaaaagttctcctagtatagccgtggacgtagacacatgcattgtgtgttgaaccacgttaaactttgtgtctttttctttcttccctttatttctttctcttcttttattgctctatactaacaagattagacttggtactgcagcattatatattattcacttgtcaagcatcaaagcaaagcgatattatgttaatttctaactaacccattgtttaagtaaccacaattacctgtaatttatgtgagcgccagcaccattccaatcaccctgttttgtaagaacataaccaaaatgacactaatcaatttcatcacaccaaattcaatattcatatatatatatatatatatatatatatatatatatatatatggtgtccaatattaatttatttac

SEQ ID NO: 5155 - DNA, 280 bp, Glycine max
  unsure (1)..(280): unsure at all n locations
ttgactgccaagagctctcctagataggtacgtcacaggttctcactgactgactatgcccggatagggtcgggattggtcaancttggctttgggcactagcaccccacctgaagttcccaaagtattctgactcccgcgacatatatccaggtaccactttgggggctactgacaaaagtacgaagactaactcttccacgctttttcacatcaagcttgttggatatggagtaccccacatatgtgacactatgtggcgatcgggcgatggtgctaa

SEQ ID NO: 5156 - DNA, 574 bp, Glycine max
  unsure (1)..(574): unsure at all n locations
gctgacacacatacccgcancagcgtttacatagtgtangcaggngtgtgtcaattntnngcgnagnnnnaaaaacggatttgatacctggagaacgctcgcatcgatacacaagctgataaagaagcngccgggccgagactacaggctgcattgagtgcacactctggtagtgtagcagaatcatagagtctacatcagatgatacttctgtgacaaccagaaatggctgagtcacgaaataatactgaggtgtgcttagatgcgaggagagactaacggtagtggcggagcggccgacgaaatacttgttaaccaaaagtggcacgacaaaacacgttatgaaccatgtgtgagctaccaggtaggacagaaaaacttgagcgagctcacattgagtgaacctaaatacaactaaatcattctacaacgtcccgtgaagccttaaaagtatttggctaacatattatcgacacatactacacaaaggtctaccccaagctgcctgttgaaaccatacacaaaatccatttgctcaaaaaactttcttagcgacnacatccattggacaccn

SEQ ID NO: 5157 - DNA, 421 bp, Glycine max
  unsure (1)..(421): unsure at all n locations
agcttaatccaataatgtgtcttatttacaaaaagtgggaagggaacaaagttgtcgtaataggtctactcccactgccaacagtcccccttggtaggttttattttttatggaagtgtatcactattagccctcgttgaggcttatggcaatgccctaccatggaatggaatagcctttcctccccttaaaacttttgtttactaagaaagctgccgtagatcttggacttgtcatttatggttaagatatttataggaatacatatgcttaaaaggagtntgacttggacttgatgaatgttgtaagggattgaaattgcatctatactacgcggtatagtcaaaggttctcgttcatgaagttatgcttattcaaatgcatgggcctcagcatacagtgctgcactttgtgctggcct

SEQ ID NO: 5158 - DNA, 442 bp, Glycine max
  unsure (1)..(442): unsure at all n locations
tgcacgtgtaactcaacatctcanaggagtctgacaaacaataacttatttaataaaatagatcttaagcataaaaagaacattaacattttaacatgaaaaatcctccaataccaagagaaacaagacaaattctgaaaaatatttcactatattaatactctttcacataagaaatacaaaataggaaaatgttaaccagctcttaggatattgtttaagaaattaaaaagagaaaggtttttattaaaatgcgtaaaattgtgctttctatgactttnttttatattctcctataatttctacaataaatattttcttcttttaattctttaaccaatgccttaaggacattggttagcaagaccctacaaaatatagtgtttcttaaggagacccacttccatccaaatactagaagtcatagaaatgatactcaagc

SEQ ID NO: 5159 - DNA, 343 bp, Glycine max
  unsure (1)..(343): unsure at all n locations
agcttgcctgtccgattcagcagtaatgatggtccgagttatgttggggaacggttacgaacccggaatgggtttatgcaaagacaacggcggcataactagcctgataaatgccaaaggaaatcgtgggaagtatgggttaggctataagcccactcaagcagatataaagagaagcatcgcgggaaggaagagtggtagtcaaagctcgcggttgagacaagaaggtgaaggaagcccaccctgccacataagtaggagctctataagcgcgggtctggnggatgaaagtcaagtggtcgcgatatacgaagatgatgttccgagtacattggatttggta

SEQ ID NO: 5160 - DNA, 460 bp, Glycine max
  unsure (1)..(460): unsure at all n locations
tacggacctatgatactcagcttatactatgctntattattggttgtcggttaggcaaatgtcattgcctgctcaacaattaatccatttgatttctcatggaaagatctatctacatatattgtaaataatatctcccgttatagattttctaaggttaattcaacaatggaatcagctagcgcatgtgcattaaaaaggatttgatgctctgaaacctctattgcccaagaaaccatccttctcgccaaatcaagtcggtgaagaatttgtcgaatggactaatcaattcacaccattatccggtgtgattggaaatatagtcgtaggcgtcttgttgccattactaaagcaaaaactaccttctctaatgatctttgaagttcgaccccctgaagtgtgttgctcacaaaataaatcgatcttttgagttcacctttnttctgaactaaagcaacac

SEQ ID NO: 5161 - DNA, 441 bp, Glycine max
  unsure (1)..(441): unsure at all n locations
agcttctcggctcacaccgggaacgcctctagttcagcaactgtgcagcctaatgcacccacccagagggaagctccccaagttccaactccaaacacaacttgaccggccggcaattcaaacacaatgaggaacttccctccgaggccatttcaagaattcaccccactcccaatgacgtatgaagacctcttgccgtccctcatcgccaaccaattggccgtggtaactcccggaaaggtcttccaaccccttttcccaaagtggtatgaccctaacgcgacttgcaagtaccatgggggcgccccggggcattccattgaaaaatgcttggcctttaaacacaanggtccaacattgatagatgctggatgactgacttttcgagaggatcggcccaatgtgaaaaccaacccactcgccaatcatggagggggagcg

SEQ ID NO: 5162 - DNA, 383 bp, Glycine max
  unsure (1)..(383): unsure at all n locations
ngtcaaatgctcatcccattgtcttctttctaattcctccttatattcatcaaattcggtgtagtatactactacatttctctctggtagtagtttccttggcaccataatatcattatatctgtcccaagcttcctgagaatggaatcttgatctgtcaaatctgatatgagaagatgaagaagcaaaggactttcttttcttagatgccatctacaaaatataatatcaaacacaagattatcacaggttattttcaacaaaactgaaattatgactgggcgcttagcccataaggctatggttcgcgtgccttaataaaatttactaataggctaagcgcaacaaactcgtgcttagcctaaagacacagaanatatttt

SEQ ID NO: 5163 - DNA, 363 bp, Glycine max
  unsure (1)..(363): unsure at all n locations
agcttacaaatctaattatcatgcccaataatgtctggtggcccaattacaaaaatacagccgaaaaacgaaatanaatanaactggaggacaaataaaattgtctgctctcttcaagtccaagccagttcagcccaattgcttataattctcctgaaattaaattaaaacacaaatttagtcaagtaggcccaaatgataaaatngcacaattaatttgacaattaaggctaatcagtaattataatggagacagaaaggggtaagaaatacgagaaaataatgacacagcaccataatccctgcatttgcggtgggaagagtgcctcctgccatggtggaaaaggaaaaattcaatcatat

SEQ ID NO: 5164 - DNA, 290 bp, Glycine max
tatgcatggtgtctgtcatttccctggtgtatggttcagatgtatatgttgttgtcgtttgtcatgaccttgtagcaagaagaaatgaaagaaactatacaggttcttgaaaaagaaatttcaaggacaagaaatatttaaaggattttcaattgacaaattatgtcgaatgactcttcttgacaactcacttttctctcaaaaagaaaacttttaagaatgataaaatgaggtcacatgaatgcttgtacttatttttgatttgaaacacaggcaatcaaacattcttt

SEQ ID NO: 5165 - DNA, 349 bp, Glycine max
  unsure (1)..(349): unsure at all n locations
agcntttgacaactattacatcattatataattttcaattgaataatattttcttaaaactcatcgtcgaattgaaaatttatttcgcatagatcatatatgcaaatttcatattaatctaaaatcatttgtcacctcattcatatagattaaaattgacgtagtataaacatcttaaaacatggataatttgattatcttcttgttgttggtcaatnttgacaaatttaacacacatgatcttagaaagatatagatataattcaacgattgggattaataaaatcatattatatattaagttattaaaatgatgtaatgattaaagaaaaattaacaaatgaaatga

SEQ ID NO: 5166 - DNA, 387 bp, Glycine max
  unsure (1)..(387): unsure at all n locations
tgcttgtggagcttctatggatgctggatcttttatcttcaccaccatggagatgcagnggaaggcaaatgagaagaggatagaggatgcaccatccacaacggaataagccatggaagaaggagcttcaccaccaagaatgtgccttggataagatgcttgaagaggatgttttaatggaggaatagatagagagaatgggctgctcattattgaatgaataaaagatggagagaagtttaactctgagttgtgtatcacacgactctcattcatcacagttacaacaagtgttacacatgcttctattatagactaagtagctatcttgagaagctgtcttgagataacttctttgagaagcttctttgagaaaacttccttgag

SEQ ID NO: 5167 - DNA, 347 bp, Glycine max
  unsure (1)..(347): unsure at all n locations
agcttcatgtgcatgatcatttgggagatgtattgcattagcacttcttgcatagtgggtcttctcttttcttatctaggcctctgattttgcatgtgggaaggcctatacaagttttgattttgcccttgtctatagctctgtccttgatgaaaggtcttattgttgaagaactgctcgaagccattgttcctactgtagaagcaagcttcatggtaaatcaagattgattcaaggagtttngatgatcacaaagatgatgacaaaaagctcanaagtcaagatcactttatgataacaaagatgatgatattcaagaaatgagttangattgagtcaagaacact

SEQ ID NO: 5168 - DNA, 447 bp, Glycine max
  unsure (1)..(447): unsure at all n locations
tcaatgtgacaacggnggataaactctgtatatacatgtgaaatataacatcaatgtttattaatgctaattaaaattaaataatggttgtattgcttaaactcaagcaccttccatcttggatttacttgtcttcccaacatcccatcccaacataaacatcatatttacaacataaaataatttttcaaaatcaatataggaggtttcatatgttgttctgccaataaggatggccaatatctttatcctcatctgagtcctcaacccgtggttttctcctattactagatttacatggtacccaaatttagtaccagtacacgtccccatttactcacactactagaaaataggctgtcaatatcagttgttttttactttcaacatcagtttttaatcgatgttgaaactactgacgttaacattatcaatgttaacatcaat

SEQ ID NO: 5169 - DNA, 426 bp, Glycine max
  unsure (1)..(426): unsure at all n locations
taaacttgatacgaatttttatacattatggtttataagatgatntntaaatatcttttgtggaataccatcttacttaaaatgtataaaactattatagaagataaaattttctctttataaattaatacggtattgggattcattactaactagtatcagtattatttggaaccaatttcactctttatggagtgaaaaaaattatgtaaaatgagaagtaattatggatgggtctattattaatttgaaaaataggtacttctcgcttttatctttattcttataaattaaaaagaaaaaagaataagtaattaaagaaactagcgatggtaatttttttagagagtagtggcaacagttacatcttgaaggtgtaggaagacaataaaaacattatatatatatatatatatattaaaagat

SEQ ID NO: 5170 - DNA, 508 bp, Glycine max
  unsure (1)..(508): unsure at all n locations
cggaaaatcgtaccgatcgtatatacgcgttactatcngcgactcgagctcgcgggctcgtacatggaccaatactcagtgaatctggctattctaacgcagttattctattcacggagaatgcgagcggattgatcgctcggatgatgattgtgtctagtcgaaacatgggggctatatctgggatgaaactatctcaccattggtgaagacgatcactcttcactattgacgagctattggtctgacagatactctgacctttcatagacttgactgtttggaagagactctacttgtacagatgaatggcatgctgctcatgcctcaacctcatgtgtatgatgaacaagaaaatacggacttagcatgtggtgtagggcatgccttataaggcctgatctttccacagaacatggtccacccgttacgtttatacctcaaccttggaatggtgatagaatagctccactccatgtatcactgtcatgggatgcacacatgtatg

SEQ ID NO: 5171 - DNA, 443 bp, Glycine max
  unsure (1)..(443): unsure at all n locations
cttaagagagttgaggctatttggttgttctctttcatatacaaatattcaatctctgttttattcaccttccaacttttccactgctcttaccatccttgatctttcttcaaataagctcacatcctcaacatttcaactgttgtcaaactttccttctcttgttatccttgacctttcctataataatatgacatcatcagtctttcaaggtggtttcaacttcagttcaaaacttcaaaatcttgatttgcaaaattgtagtcttacggatggaagttttcttatgtcatcttctttcattatgcgttcttcatcttctcttgtttcccttgatctctcctcaaatctgttgaaatcatcaactatattttactggctctttaactccaccacncaatctcataaccttgtccttgatataacatgttagaaggaccatt

SEQ ID NO: 5172 - DNA, 466 bp, Glycine max
gctcatgacaggctccccctttgaagatgaaacagcctattgagacttgttggcagacttttatatttaactacaaccaggcctaacattgctttcattgttcagcaacttagtcaattcatctctcagacattacaagttcatcactcagcagcaattagagtcctcaaatatctcaaaagtgctcctgccaagggattgttctattcttcctcctccacactcaaactctctggttttgcagactcagattgggcaagttgtcctgctactcgcagatcagtgactggttactgtgtctttcttggcacatctatgcagtcttggaaatccaaaaagcagtccacagtagccaggtcaagttcagaagcagaatatagagctttggctagcttaacttgtgaattacaatggctgcagtatttgtcaaggatcttcacatctctcttgatcaacctatctcagt

SEQ ID NO: 5173 - DNA, 224 bp, Glycine max
agcttctcggctcatgctgggaacgcgctctaattcaacacccgagcattctagagcacccacccatagggaagcaccctaagttccaactacgaacatgactctaccggccggttattccgacacgaccaagaacttccctccgaggccatagccggaatgcaccccgctcccaatgacgcacaaagatcttctaccgtccctcatcgacaatcatctggccg

SEQ ID NO: 5174 - DNA, 422 bp, Glycine max
ggtctcagcgctcatgcgagacagagaccaacatgttagctatcatcgtcaagtaccaagagaagttacgtctagccacggtccacgagcatagaatcgcggatgagtatgcccaagtgtatgcggaaaaagatgctagaggaagggtgatcgactctttacaccaagaggcaaccatgtggatggatcggtttgctcttaccttgaacgggagtcaagaacttgcccgattggtagccaatgccaaggagatggcagacacctactccgcccccgaagagattcatgggcttctcggttattgacagcatatgatagacttaatggcccacataataataaatcgttaagaaactgagttggactctcagaccttgtcttgatacgacttcctttttgaaataaaatgagtaggtcccatg

SEQ ID NO: 5175 - DNA, 436 bp, Glycine max
  unsure (1)..(436): unsure at all n locations
agcttgaaactagaccccaccacaggtgatggtgccattatatcatatgtcacagctggccatggagaatcaatataatgtttagatgattccatgggtcttcttaacccatcatttgtcttcatatatttattacctgttttgcctccaccaatcttatgaggaacttggtcatggtagttaaactgcctctgacggaaacctctaaacgatctagcattccagtcatttctattttgaaacctcctaatctgtgaataagcatttgaacatgaagcagttcataaattgatatggctacagcattcatgtgagatgaagggagggattggaaaagagatacaaaaacattcttaggcctccattgtgttagaaaccaaacggaacacactagtctcactaccaccaggagtngcttgcaatcagcatcaaccca

SEQ ID NO: 5176 - DNA, 440 bp, Glycine max
ctaagcttggaaaggctgttttcaccttctcgctaagccaatctactggcttagcgagcatccgctaagctcaacattcctgggctaagcacgaggaagaatccaaaagaaaatgaagtgtacaggtttgctaagtgcaccacttcaattcatccgctaagcgagaaaggcgtgctaagccaaaaatcactaacgtgcgctaagcggtccatacatgcgctaagcgcacgggcacgaacaataccacctatttaagcctggaatcagattttgtgaaaggattttagactgggatttagagctttgcatgtctacggtttctagagagagaaaggtccaagttccagagagttttgagagattttgttgtgtgaagatctgcagagaccagagctcgaagcaagagctgatttgagagcttgagatgagtttgtgagtga

SEQ ID NO: 5177 - DNA, 408 bp, Glycine max
  unsure (1)..(408): unsure at all n locations
agcttatcgttcanaacaacaagctnttgcgcttcgtgatgcatttcattaagggtttcctaaacttcctcagtttcgagtttggagatggtttcaccattcttcattcaaaaagcttcatattcggatatagaagtgtactatcttgctcttcttacatctacagtgctttcatgattgacctcaagcattttccttgtctcctttgcatttttacaccttgcagtatggaaaaattcatcagaagataaaccaaaagttaaaatgtttttagcttttcgatcatcttggacttttcttttctcatcatctttcaactcatgtcattcttcaggaatcaaattagccattaactttnttagttggtatgaagggtcctttaacaatagcattctgtgcaccgggatc

SEQ ID NO: 5178 - DNA, 467 bp, Glycine max
  unsure (1)..(467): unsure at all n locations
ctaagcttaatggtctaggattgttaaaatactgcatgatgaaataaatgataataagttaataatgtattacaaattataaaaaaatcaaatttgtttgaaataaacgtaccgcttcccagttattcctaaaaattcctaaaatgatggtggacatccagtgcatgacataatagctgcactcagtgcttcctttttgtctattacactaaatacataatgaaatttggatattaattaaacaactagtgtacagacacataagaagtatatataaatggaagttttatgtaaatgacgtaccttgatgacaatccacctagcaggagcctttgatttaggctgtagagcatcatcaagacctattaaagcactgttccagacaagtaacaattaanaaatggtgttattgagggtattgaatgcaaatgcattgaaaagaacactgnacctgtaattatcccctt

SEQ ID NO: 5179 - DNA, 328 bp, Glycine max
  unsure (1)..(328): unsure at all n locations
caccaatcaaaacttagtaagagatatttgcattgacgattaaatacccaattgtaaagatcttggagagttggccttgaccaaaagtggtcattaggtcaacatagcctctagtctctactcgctcccctactaagccgaggagttgatcagcgtgagattggatggtgttaggcaaaactttagtttagatggtcattaggtcaacatagcctataggtacccagcttgtatgagctcttctatnttcaccttaagggcccaacaatctttggtgttgtgaccgatactgcaatggtatctgtagtatttggttgcatctaacctt

SEQ ID NO: 5180 - DNA, 370 bp, Glycine max
  unsure (1)..(370): unsure at all n locations
ngtcaaanagggaagcaagttaaaaattgttttcaaagtaaaaacgttgtttctacttcaaaaccccttgaactacttcacattgacttatttggtccctcgaaaactatgggttttggtggtaattactatgtcctagttataatagatgattactcaaggttcacatggactttatttttgaaaaccaaaagtgaagcttttgatgcttttcgcaaacttgccaaggtgattcaaaatgaaaaaggtctcaacattgtttcacttataagtgatcatggaggtgaatttcaaaatgagtatttgaaaacttttgtgaagaaaatgaaattcaccataatggttctacctcaagaacacctcaacaaaa

SEQ ID NO: 5181 - DNA, 443 bp, Glycine max
  unsure (1)..(443): unsure at all n locations
agctatggcatctatgttgttcaccatgttgcttatgttgctccccctatctctaataatctcccnctttttggctttggtgatgccaaacttaaatatcacattgagtgcatttggagggtctaagtcttgagattggagacttgattcttagtcaatcctgaaaaaaattattaatacttaagaagagatttattcatcatcatcgtcatatatcatacatatatatattattgatattaatgcaatgttcaatgcttatgcaatgcaatcaatatgcaaatatgcaatagtgtatattctccccattntggcattaacaagaccaaaaagtttaattatacacaaaacaaatcacataagtagaagagaaatagaactacatctcattaatcatagagcattacataagcattaatcattatgaaaaaacttaactatca

SEQ ID NO: 5182 - DNA, 435 bp, Glycine max
  unsure (1)..(435): unsure at all n locations
atgaagactctcctctaatctaaatgtaaatctgtgatctctatcagagactatgctagaaggaacaccgtgtagtctaactatctcactgatgtacaagctagtcaatctttctaaggaatatctgatgttaattgggatgaagtgagcagatttcatcaacttgtctacaataacccaaatggaatctaaacctttgggggtcctaggtaacccaaccacgaaatccatggagatgatatcccactttcactcaggtatgtctaaaggttgcaacttccctgaaggcttctggtgttctatcttagctatctgacacactangcacgcaaggacaaactcattaacttctttcttcatactcgaccaccaaaacatctgcctaaggtcctggtacatcttagtcactcccgggtggatacttatactacttct

SEQ ID NO: 5183 - DNA, 293 bp, Glycine max
  unsure (1)..(293): unsure at all n locations
agcttaaggggaattatgccaaagaactggttgttttaggctatagcagnggtaatggaaatgaaaagagcaatttggacagtctggtcaaggccatagttggagtatctgttactagtcaacctgaagatacaaaggtcaacaatgccaaacagaggcgagacaaaatagctcgactagaagcagaaagggagtagagaatccaagcagagcagagtgacattataagtatccaacttcaatattgagcacacataaaactgtgataagctgatatttaatcatatatcact

SEQ ID NO: 5184 - DNA, 338 bp, Glycine max
ttatatcttgtcatatagccactaatctctccacaatattctgatatttatcaagcctttatattaagtctctcactcgccattctctgccataacttaagcctatacataagtttttaccccatgtgaggttcctaaagattactataatcgtcacataatccgtatctttcggaattgctctaatgaagacaaagatgctcatttcacactcactctatcatcaccacccatgataaccagtatacacataatgcgatgctgatcaataaatactatctcaacaattccctgcaagaggatacatctatatataatcataattcatgcagatcaat

SEQ ID NO: 5185 - DNA, 448 bp, Glycine max
  unsure (1)..(448): unsure at all n locations
agctaggatattcaatctgacgagggatcgattgtttagtaatttaggctacttcatagaacacaagagcatgattgattagagaaatatatttctatgcatcagcttgtttgttagaaaaacccaacatatctacctactactatcattttatttaccttgcattttatagtttttagcataaaagtttagtttaaatcctgtttgaaattatcacttatacatgttctctcaacaatgcttcgactctgaacttaattcaggctaacattagttccctatgttcgatatacggattcatccgttttaatttttaatacttgacgatccggtgcgcttttcggtaaacccccattgaaatttccttgagacataaatgctcanaaagtaactgcaatggggagcgatcacttcactggaagcatttcatgatatgatgtccttaata

SEQ ID NO: 5186 - DNA, 446 bp, Glycine max
  unsure (1)..(446): unsure at all n locations
tgtcccctntcattatatctactnttatttgtgtgtaaattaattcattatatttactatggtatcttcaaacaaaatactaagtaacagtaacacgcttaacctataaaaaatggcagaccaagctaggtagctcaacatgctaaccaactgcctcgcctaacctaccaacctggtggaccaataaccggacacggcattatatgttgggccactaaccattgtacatatatatatatatatataggaacatgtaaatattataatgtatatagttattaagctctcactatgtatattttttaaaaagaaattagtgttcttaacaaatcaaaatacatatgaattagttgtcttatcatattttagaactcaattcctaatcctaaaataaaagttatattcaaaattaaatgtaagataagtaatagatataatttatgtta

SEQ ID NO: 5187 - DNA, 399 bp, Glycine max
  unsure (1)..(399): unsure at all n locations
agcttctccccttatttgctataaataggggtttatgtgaagaagaaaagggttcagccccttaggcacttctctctctttcgaatttgctgaggaaaattatttccgtgaagaaaatccaagccgaggcgcttccgtaacgtttccgtgagtaattacgcgaagattctcgaccgttcttcaaggtccatcgttcgttcttcgttttcttcagtcttcaacgggtaagtacctcaaaccagcttttcaattcattctatgtacccgtggtggtccacattttgtttcatgtatttttattctcgttttcatttgctttntatacccccttttgacatgcttaagccatttatttaagtcatttctcgcttaatctaaaaataaaataaatttccaccg

SEQ ID NO: 5188 - DNA, 331 bp, Glycine max
  unsure (1)..(331): unsure at all n locations
tgtcagaagtctataccgctgatttaatgtaattagagcctatagatttcctttctcttttgttttctgaaatctacctcattaaataaacaaagagatcttgtttcatctgttcttgcagttccaccttttctcatatcattttgcatgtttttgtttctttggtcttgtttggtatagatatgagggtcgattctttgaggatcctaacaacgagggtttgacaatcgattttgatagagatataagccaaacgataaacgaggaagaggaagaggacgtcctgtcaccagagttggagaggttggtcgctcangaagaacgtgaaatg

SEQ ID NO: 5189 - DNA, 388 bp, Glycine max
  unsure (1)..(388): unsure at all n locations
agcttgagatgaggaagtgtagaagggtgattacttctgctnttattcattgaccacagagtggtacctggagatatgtcgcggnggttaggagaccttggggacgtcaagtggggtgctattgcccanaaccaagcttgaccaatcccgacccaacccgggcatagtcggtcagtgagaacctgtgatgtacctaaacaggcgagctcctggcagtcaacagataaaaggaacaaagaccacaaagcaaggaggcttgtggtggctggccagctgtgaaacttgattgatatgtgagatatggtctctggtaatcgattaccaagggtgggtaatcgattacaaggcttanaaatgaagacaggaggctaagatggtctctggtaat

SEQ ID NO: 5190 - DNA, 353 bp, Glycine max
  unsure (1)..(353): unsure at all n locations
cgctctaaattacattgacgtttgtatttatgggaggaggttgtatgtcatntttgttntaagagtagtgtcccactggtaaaactaactttccaaatgtttgccttcgcaggaaatggccccgaggaagcttgcctcanagaggtccaggaaggacaaggcagccgaaggaactagttccgctccggagtatgatagtcaccgctttangagtgttgtacaccagcagcgcttcgaggccatcaagggatggtcgtttctccgggagcgacgcgtccagctcanggacgacgagtatgctgatttccacgaggaaatagggcgccggcggtgggcatcactggttactccca

SEQ ID NO: 5191 - DNA, 195 bp, Glycine max
  unsure (1)..(195): unsure at all n locations
agcttcgcatattttggtcctctcgacagtgtactcatcaattatttttttttatacatatctctatagctccaaaacaataattgaaatttcttacatagaatatgaccacttttcaaaatcagaagttgtgtggtagttaactttgttctggcccttggagtcnttgtcagaaagaatgattgagaatgggat

SEQ ID NO: 5192 - DNA, 451 bp, Glycine max
  unsure (1)..(451): unsure at all n locations
ngacattgtgtctcttataaaaaaggtgaaatgttggtgtgcttatatggcaatatctgctagttacattccatcctagatatcaaatattatctccttggtttttgctcctggtacaagcttggcattgtgtctcctataaaaaggtgaaaggttggtgtgattaaatgacaatctatgctagttacatttcatcctaaatatcaaattttatcaccttggcttttgcttgttggttattgatcttcacttcctttgtatgaatttttccctcaagcatagtgtagaactgaccaccaaaataaaattttatttaaactataagcttattcaaaagaaatcctcatgtaacacaaagggcataagcaagtaataattatttacctcttgttttctctttgctcgctcatcattgaaattgaatccataanttgngaccgcctacaccctg

SEQ ID NO: 5193 - DNA, 460 bp, Glycine max
  unsure (1)..(460): unsure at all n locations
agctntatacaccttgtgcgattttcctctattcggttggaccgagtgtttcttctaatgctccttattaaacaaaatgcaaatgtcttaatctcattattggttatgagaaattctatttgtatactttcattccacatttgtcgcataatttttttaaataaaaaatgtgtgtttgatctgatctgtttcggggtttgtttctttaccaagcgtgttcgtattttagtgtaagttttcaagacttcaatgtcttctatctttaaaatttcaagacttcaatgtcttttctcttttacatttcaagacttcaatgtctttaatctttacatttcaagacttcaatgtctttagtctttacatttcaagacttcaatgtcaataatctttatatttcaagacttcaatgtctttagtctttacatttcaagacttcaatgtcttctatctttttacattt

SEQ ID NO: 5194 - DNA, 437 bp, Glycine max
  unsure (1)..(437): unsure at all n locations
atactcaagcttcaatggctgcagaattcctagaggaaacatgactgatatcatttcaacaacatggagcagattcttggatttggaagcaacattcgagtggtatttattcgaccaacactgcttacaagtttctgatggaggaaataagtggggatccagtggatgggagttttgtgtttctgtggaagcttaagataccacctaatccaaagatatttacctggcgactcatcaaagatcgcttaccaacgaaactgaacctaatagggagacaagtggagataactgacccaatgtgcccgttatgcaacaattcctaggaggatgcagcacaccttntcttcaattgcagcaacgtgctccccttgtggtgggagtcactctcatgggttaagttagtgggtgctgtccccaaagaacccanagatcatttt

SEQ ID NO: 5195 - DNA, 434 bp, Glycine max
  unsure (1)..(434): unsure at all n locations
agcttcttgcggaggtggaagggtttgtggtgtttgagggtgaagttgaggaaagagtcaacgatgacatgctagttgcttcatcattaccattgtagtagttntgttgtgtgcttcctttgatggcatcgttgtggtggctacggtggtgtcgtctaagtggttcttggtgatgacgatgcaatgtgcgtgtggagccattcggacaattccgacaatacatgtggaacaaccaagtagactcttagaacatgttttggtccaagcctgaactcgtttgtcaggttcgaggactctggtgattatttgaaagggtgttaccgtggggatgcggngtgtgatgataggtttcaagatctgggggatgtgagaattgggtttgggaatgtgagcttgattaaggggaaatctaaaagctttgtgaaaggaagtgt

SEQ ID NO: 5196 - DNA, 452 bp, Glycine max
  unsure (1)..(452): unsure at all n locations
agacgagtataaggcctagaataccacaccaccagtgtgtctcccatgaataaaaactaccatttagagcggtggttcaaacagggctctttataggagctaccaaactttgtaccataaagtgaaggaactattaatctatctatccaagggcatcaatttttcttggggtaaatcaccttttttgccctcaaattcataaatatcgtcacatgaatttctaaaattaagaaaaacgtaaataaatgtttgaaattgttagagcgtgtttgagaatttgttggattagcaccaaaggtacattttttaatggagcccccccttatttttccgtccatccgttgggttaatttgtctccaatcacgtactacagcaaaataaatggaaaaacaatcatgcatttaatctgttcacctaagttnttagactctaattgttagaatattttaat

SEQ ID NO: 5197 - DNA, 397 bp, Glycine max
  unsure (1)..(397): unsure at all n locations
tagctnntactgaaaagatcactcccagatgtaccaaggatgctatgcaagatcctcaatggttagctgcaatgaaggatgaatacatggctctcatgcaaaataaaacatgggatctcgtccctttgcctcctcataggaaggctattggttctaaatggatatatcggctgaaatacaatgttgatggctctgtagccagacataaagctagactagtggcttaggggtattctcaacgaccaggccttgattataatgagacattcagtcctgttattaaaccaacaaccattcaaacggtcttgagcattgttgtcaccagaaaatggtatatacgacacgtagacattaacaatgctttcctaaatggttccattcaagaagagtatatatg

SEQ ID NO: 5198 - DNA, 445 bp, Glycine max
  unsure (1)..(445): unsure at all n locations
tgatgttngtgtttgttgtacttgttaatgatcaatggtggggttattggtcagaattgagaagtgaaactgggaaagtgttgttcttgatgagaatgtgacagtacagttcatgtgtttgaagattatgttaatggaagtgttgtgttgaatcttttcataggatgcacaatgaaaagatatgcgtcttcggaagatgcacatgctaaagttggtttgggattgggagatttgaattataagagaaaatatggttttngcgttggttcttgtaagaaatagaaaaattggttattggttaagtgaatcatccatgttttaaacatggtttgactgtttgagcactgcactatgcatgttggatgggagtttgttcattgaatggttagttaanagtggtttgctgttatgctcaatangatgatgatgatgataagttgatgaa

SEQ ID NO: 5199 - DNA, 397 bp, Glycine max
agcttgctctagattacattgatgcttgtatttattggaggggggttgtatgccattttagttttaagggtagcatttcttggtaaaaactaactttccaaatgtttgccttcgcaggaatggccccgaggaagctcgcctcacagacgtccaggaaggacaaggcggccgaaagaactagtaccgctccggagtacgacagtcaccgctttatgagtgctgtacaccagcagcgcttcgaggccatcaagggatggtcgtttcttcgggagcgacgcgtgcagctcacggacgacgagtatactgatttccaggaggaaattgtgcgccggcggcggacatcactggttactcccatggccaagttcgatccataaatagtccttgagttttatgc

SEQ ID NO: 5200 - DNA, 411 bp, Glycine max
  unsure (1)..(411): unsure at all n locations
atctatggnggcagaatcactctcattaattcagtcctattagccttacctatctacttactatccttctttaggatccctaaaaaagtggtgcacaaaattgtttccatccagagaaatttcctttggggaggtcaccaagaggccagcaagattccttgggtgaagtgggacacagtttgtcctcctaagaacaaagggggcctagggattaaagacttatctaaatttaatgaggctctacttggcaaatgggggctgggagctggctaataaccacaatcaaccttggtctangaatttactttctaagtatggtgggtggaaggagctgatttctggtggaaggaggaatttcacttcccaatggtgcaggatctgaagatcatctttcancagcagcacaacaac

SEQ ID NO: 5201 - DNA, 438 bp, Glycine max
agcttgtaggattatggtgtacccatcacatgtggtcctaggtggcggtcgggcgatggtgcagaacaagttttccatatccacaaagcgcgcataaacccaccatcccctgttgcccacctccatctgagctcacgtactcccacgtagcccatatcctcgtttctctcaacaccgggtccccatcaatcctcccaagcttccaaaacatccaaacaaaacgacattcaaaccgcacaagctatcacagccaagcaaaacagagcataggcagaaaactctgccaaacaccaaccaaatcacagcttttctcacttaaagaccccaggaacaattccttcgttccggttcattaaccattggatcgactcgaaaattttactggaaatctctaatacttaagcctacattttgaccgttgggatctactagcaaaca

SEQ ID NO: 5202 - DNA, 388 bp, Glycine max
acgacgctagtctctgcatgctatcatgcgttgagtcttagagatagcaaaagaatgtttatagggataactacttgggaatttccgcctgccccctaacttcatgggttagttcttgacaaaagtagtctgcgcggaacacgacatatatctactcatgtcaacgggcttgttggccgcgattgacaaaggatgcagaagacgacgttagtctctgcatactatcatgcgttgagtcttatatgtagcagaggaatgtttatgcggataacaacttgggtatttccgcctgccccctaatttcacggtgtagtgattgacataggtagtctgcacggaagtcgacataaatcttcacgtgtcaacgaaggtgttggccgccattgac

SEQ ID NO: 5203 - DNA, 437 bp, Glycine max
agctagttgtatcatgttctgttataaaacatcaaccaaatgaaaaatttatctatacttgtatctttagtacctctggtacttcttaatatataaaatatctatttttgctgagcaaaaaaaaaaaaaaaaaaaaacacaaaaatacttatatgaagaataaattctaaactacagcaatattaagttcacatcaaccctgatgtgcttggagagactagttcatgccacaaaatataatcaaatgaattttgatgctttcaagtccaaattaaaaaaattattttttatatttattaaattattcaaaagatcttggtttgaactggagggtggaaaatgagatcgacaatgttttaagggtgagttccttgaattctgcaatattaactacccttctttgctacatcctcattttctgaaaaatcttgcatcta

SEQ ID NO: 5204 - DNA, 389 bp, Glycine max
  unsure (1)..(389): unsure at all n locations
ntaagcaattaagcccacctcactcgtgacaattgtattgttcgttcaaacattntttacgtgtatcctaaatcaaatgagcttcatacaattgtcacgaaataatattcaactaagattaaccaggtaaagagtatttcctagtgtatgctatcacagtgctcctctcaagaaaaggtaacagatgacaactccatctaagtatcatgctaatttgtaccatccaagtcaaaaagcataactactataccgatgtaatttgatactaattatcacggtatttccttccatactaaagatgcaagtgggatttaatttgtaacatacaaaactctgcgcattacatgatcataagcgagcacacaacctcagttgaccaatgtaatcta

SEQ ID NO: 5205 - DNA, 359 bp, Glycine max
  unsure (1)..(359): unsure at all n locations
agcttagaggagtcatgctaggcaatgatagttatctggtaggagatgaggtaacccagattcatgtccatcttcatgataatgccacaaatcaacttggcccgatccaatgtgatatcagaagtgtgggaggtagggaccaagttggagtaagaaagaacactccaagtctgagcgagtgtggtcatgttcttcctgaggatcttcagaggctgaccatcaacatttagctcacaccccctccctgagatgcagagcttagcagctaactcttgaggatcaggcctncagagtgcaaatctagaataagctgataatgtctctccctcctgaatgatgacaggggtcttcaagaatgt

SEQ ID NO: 5206 - DNA, 467 bp, Glycine max
  unsure (1)..(467): unsure at all n locations
nggtgctagaagggctctgataaggttcatcttatttctaccttcctcactttccttcaactattaaatggtgcacaattgctttagtaattattgtttgaaaattagaaacatatatatgatgaggggtctacgtacaattgtacacgtttaataaattttaacgacaaaagtgaattttattaatcaaaatattatatgaaccattatgtatatcaacctgtgagccttttattgtaatcctttaaagatttaaaatgtgtggtttaagtccctattatcaagtaacaacattgatgaagaggtaatagcgacattgacagtccaattaactctccgcatcaccaacaagtttgacaaagtaatcatgccatgtgtaattattttgggataaattatgtttatagatgcccatcataaggactaaaatcaataaccctttatcttatagggaccaataattcacc

SEQ ID NO: 5207 - DNA, 451 bp, Glycine max
  unsure (1)..(451): unsure at all n locations
agcttctctcctgctctactacctcaaacaattcctgactgccacaaaatgcataaaagtttaataacacaatcagcaaaagaatgataacatagatcctacaagcaaaatcataaccaacctagtaggatccttcaagctaataggttgccaacacataggacactgggagcttctctgacacctggaaacaagagccagtagcaaaggctagagtatattcttccattntattttattttttgtttatgagaagagaaacttttaatgcattaactattaagaaatacagatataacaagaatatcttcaacagtgaaaagaccctcctcccactcaaatccatacntaaaaattataggccagttgactaattntccagacaaaacaatcagcanagtccaatctcagatcacaagtcataaccagtgtgaatggccttaacattgat

SEQ ID NO: 5208 - DNA, 470 bp, Glycine max
  unsure (1)..(470): unsure at all n locations
cgtgattagttagatgattattattattatttgtttttttgactgaagattntaattnttattcaaatcgatattgtatagtactcctgtataaaagtaaaaaaaaaaaaaaggaaaaatggccaactccaacctccatatctagagatgatcaattgatcatatgttcgattgcttcatattaatcaaattcgaatcaatcatatttaattacatgactttgatttttttttcttgttaatttgaatcacaccaatttaataaagattgagttagttttttgagtaatcaagttatcataaagaaactaagttactatattctatttaagtttttatccccactaattgcctattttttaactaaattnttaaacattttaaaaaaattaaactgaatattaaactagctatttatattatttaatatataattttgtctatgattatcacttaacgtatttcattaat

SEQ ID NO: 5209 - DNA, 393 bp, Glycine max
  unsure (1)..(393): unsure at all n locations
agcttttagaagaatgttanaatcaaatgtcggtcctaataaatacacttttgcggccgtaatttctgcctgtgcaaatcttgctattgctaaatggggggaacagattcatggccatgtattgcgtttaggtttggtaaatgctatgtcagtggcaaattccattgttactctttattcaaaatctgggttgctaacctcaacttctctagtgtttcatggtataactagaaaagatattatctcttggagcactataattgctgtaaatctataagttggctagcccaattgatttattaattcccaatattctcgtggatagataacatctttcttcaagtttcatcaagaacttacgataaagtctaagatctattggcaccaagtgta

SEQ ID NO: 5210 - DNA, 403 bp, Glycine max
  unsure (1)..(403): unsure at all n locations
ggaagcccttagttntagtcttggtttgataattttgcaatgccaaacatgtttaatagatgtggcatttgtattaaatgcttttagattaggcatgtgtgtgatatagtctaattctttttcatgcttaattttgatcaaaagtgaagtgaatgaagtattctatttctcttagtttcctaagtacaagcaatagaagttacttctacttgaaatttggttggaaccatcgaattaatcaattgccaagcttggtaatcaagtgcccaagctagtttcaaaagaaggaaggatctgtagcttaggataattgattgcctcatttgataatcaattaccttgctcttggtaacaatgagaagctctttgtgtgattctataatcaattaccacatgtgaaaat

SEQ ID NO: 5211 - DNA, 431 bp, Glycine max
  unsure (1)..(431): unsure at all n locations
agcttctcatgcatgagaacaattctcaagttgcggtaccaatcatcataattggctccgactagttttccagattcaagaataccatgaagtgatagagaagacatactgttgattaaacacacaacaaaatatagttatgtcaaagcataatttttcaaaccttttaaaaaatataaaattattaataatatttccactaattacaataataatatattaatgtaagaaatacttatttcttttaagtggataacatanagcctcttaaaaaattgtgagcaagccacttggttatctagtcgtttctcatacacattctaagaaaatgtatcatattcattntcaaatcaaaataagaaataacatatcatataagttcctagttgtcaggtcaatcctattgatatcaataannataatntaatact

SEQ ID NO: 5212 - DNA, 387 bp, Glycine max
gttgacttgagtcatcaagagattataaatatgttaccatggcataagtttcaaaaaaagatcaatcatcaatcatctttgaatcatctatctttcaatctttatcaacatcatctctcaaacatctttcaatcaatctttcaatatctttctacagaattttctgattcatttctcttcatctttctaaaaagtttttgatcaacactttctcttccaagacaagttctttgttcaaaaacttgtgctattcatctttttcattctcttctcctttctccaaaagaacaaaggactaaccgcctaaattcttttgtgtctctcttctccctttgccagaagaacgaaggactaaccacctgaattctttggctctcttctccctta

SEQ ID NO: 5213 - DNA, 242 bp, Glycine max
tgtatgcaagcttgcatcatttaagtgaattgcccagctatctactcagaacattacatatgattatgataacagagtaacttagcatgatgttggaacctgagtaacaaactttcaccaacaagaacagaggatagcagtctgcagcattgtctccttggtccaaatgatcttgaccttcacctgcaccgatcttgagagtcaacacaactcatgaaagacaggcattgaattgtagatca

SEQ ID NO: 5214 - DNA, 367 bp, Glycine max
  unsure (1)..(367): unsure at all n locations
ntagtgaacaatgaattagtaattgtctaagggaaacaggatccactcatatatgatttattatcttttactctcatcttattaatactcgcatgggaagcaattctaacaccacttctatggaagatatgtcataatatgcggttgcttataagaaaattgccctatcactacactattaaatcgacttcatatgattcatattttttttactaaaaaatagacctcgtatgatcttaagcactctctatgacttttatcatataatctggcgtactctttttcacttataccatacatcggaattatgtatatattaacttgagtgtgaccatcttgtatatactaatatttcatgcaagtcaca

SEQ ID NO: 5215 - DNA, 403 bp, Glycine max
  unsure (1)..(403): unsure at all n locations
agcttgcttaagaagattcctaaagaagctagatcttagctacacacacctctctaatagctaagctcacctccttgagatgagaagctagagcttanctacacaccccctataataactaagctcacccctatgccaaaaaaaaacatgaaaatactaaaaaagtccttactacaaagactactcaaaatgccccgaaatacaaggctaaaaccctatactactagaatggcacaaatacaaggtctaaacgaaggaaaaacctattctaatatttacaaagataagcgggctcatacttagcccatgggctcgaaatctaccctaaggctcatgagaaccctagggccttcccttggatcacttgcctaatctacttggagtcttcaataaatgcccttgc

SEQ ID NO: 5216 - DNA, 420 bp, Glycine max
tctacttatgtggcagggcgggtttccttcactttcttgtttccaacgcgagctctgaccactgttcttccttcccgcgatgcttcttttcatgtccgcctgagtgggcttatatcccaaaccatacttcccacgattcccatgggtttttatcagactagttatgccgccattgtctttgcctaaacccatcccgggttcataaccgttccccaacataactcggtccatcattaccgccgcctcggacagacaaggttgcccaaagagggagtccacggaggaaatgctgaccacctcaaaagactggaaagcggtttctaacgactcttctgcggcttccacataaggcatggaggatgggcagcttaccaagatatcttcctcgcctgacacgatgaccaagtgcccctccactac

SEQ ID NO: 5217 - DNA, 489 bp, Glycine max
  unsure (1)..(489): unsure at all n locations
ttgacccctgtgagccgctgataaccgcgccctgatacattgcccntgcactatacaaacggaccccgtgtgattactaccttttgttacctacagngaccgcaaatgcagacttatagcttccgacgctcatagccttactctatttccacatgcaacacaccattgtcacttttcaaccctacggtaacgctaccgttcatctactacaggttaccgagagcatttgtagcatatatcatcgcaaacactaatcgcaaaacctctacacagaatgggattgctgactcattcaaacatggcaatttgacaagctttcacgaatgccttcacaaatacctttctgaagcagaaactatcaaactacccatctatcatccagacgccgtcgcccgaaatctacagagaagaagtcgaccgaacctgagtttctgagtccacttcttaccctggctctccgacttcaaaaccccctgcttctcatgagcg

SEQ ID NO: 5218 - DNA, 446 bp, Glycine max
  unsure (1)..(446): unsure at all n locations
agcttcagaccaaagcaacatgaaacctaggtatccaaaacccctcaatttaatggattttcaaggtttgagaagtgaaattgagaatgaggtaaatttggagaaaactctcacctcacacaagtctataacatcaatctaaacttgctcaaactggatttacacctaaaattccaccgaatcaaaatttgactcctcaacacccgattttaccctagaaatggctctttgttcactttggtcatttgttttctctcttgcacagcccaagcttcctcataagtcctaaatgacatttcaaactaggattgacacactttaatctccaaataccactaaatccagatttggcctttcaactctcaaaaactcactctntttccactcataacaccatattctcactttctaaccctaggttaactctacccttcatccctagcagt

SEQ ID NO: 5219 - DNA, 279 bp, Glycine max
gctgcttctcaatctcacccattttgatgatgacaacttttgttatcaagagactctcacactctcacacacatttcttcttagtcgatcactcacataaattttgattctcccgctttgctattgaatttatgcttctcttaaaattaagttgattactcatgtgagttcttgatttaatccctatctctctccccctttggcatcaacaaagagccattgtgcgtaacacgtatgtatcatacaaattcaactaagcatgcacgcagcatttatgga

SEQ ID NO: 5220 - DNA, 372 bp, Glycine max
  unsure (1)..(372): unsure at all n locations
agcttgcttgtgaagcttctatggaggctagatcttcgagcttcaatgtggtccttcaatggtgattttccaccatggagatgcagcggaagataaaggagaagaggtgagagaaggcgccatccactatggaataagccatggaaggaggagcttcaccaccaagagagtgccttggataagaatcttagagagaaagcttcaatgcagganaagaataagatagagagagaaaggggggaacatgaaattgaaggagaanaagagggagagaagttgaactttgaagtgtttctcacaagtttctcattcatcanagttatgacaagtgtcacacatgtttctatntatagcctaggtcactaactaaat

SEQ ID NO: 5221 - DNA, 450 bp, Glycine max
tgagtcttgcaccatcttttcatcaactatttacatgagttctatgaggaagtctcgagctaaaatatcctatttttgattgcggcttgagttcaagaattaaaatttgtttttgtttagtaagtacaattgcaccttttctcttcaacattgctctttgaggactataatctcattaacatgatcttgtttatcatggacatctatatgaaatcagttgtttgagggctataatctcattaacatgatcttatttgatgaattcttattcgtttaccacacctgaaaggatgttttttgtctgtttagaggctaagtgatgcttaaccattgtttgcttttgcctaaagcctgatagatggtttcattaccttatattatcagtgagatgctcaactgattacacacaatccattaacttgctcttacactaagcatcatacttttata

SEQ ID NO: 5222 - DNA, 396 bp, Glycine max
  unsure (1)..(396): unsure at all n locations
agctngagatgaggaagtgtagaaggatgaatcttcctgcttttattcattgaccacagagtggtacctggagatatgtcgcgggggtcaggagaccttggggacgtcaggtggggtgctattgcccaaaaccaagcttgaccaatcccaacccaacccgggcatagtcagtcagtgagaacctgtgatgtacctaagcaggcgagctcctggcagtcaacagataaaagaaacaaaaccacaaagcaaggaggcttgtgtggtggctggccaactgtgaactttgtttgatatgtgggttatggcctctggtaatcgattaccaagagtgggtaattgattacaaggcttaaaaatgaagacaggaggctaagctggtctctggtaatcgattac

SEQ ID NO: 5223 - DNA, 466 bp, Glycine max
  unsure (1)..(466): unsure at all n locations
catggtatatgttagggtttggccagttgttcggngataaaggagacatcccacattatttccatgatacacatgcaacaataatgattaggaaattntatgcaaaactggtcatgcatgcacctatgtggacactcaagcatcaaacttttatggtcaagtgatgctagggatcatgattcattttctctactttagtcaacccggtgtttccaaaatatgttcttttatcaatttgtgcattcatccgagtctattttgggtgttcgaaaaaactttcacagcatttacccttcaaatgtatacacattttttttcanaaactggttatgatcagtgaattctttcaaagaaaaagtggaaaatatctcttttcacaagcatggttgttttaagctagacaactttttaattttaatattttctttttntcttccttctttttctttcttactngctctctttt

SEQ ID NO: 5224 - DNA, 340 bp, Glycine max
cacctgagcatgcaagcttacatggcacttctatgaactgggattctaatgaattgaagtgaatattctcaagtcgtgaaagggtatatatccgctcccaaaaaaacataaaagtatgggctgaacaagcatcaccaaagtggtgataattaagtttcatgctaacatagaaccttagccaatattgaagtataaaagttctggcgatgactttgggacatgaagacgtgattcaagcatcaatcatgtgacattgtagtccttaaacacaatactattcaatcacttgtctcgccacgtacatatggtcagacaaaagggactctgcatttgaagttca

SEQ ID NO: 5225 - DNA, 527 bp, Glycine max
  unsure (1)..(527): unsure at all n locations
tcgcccaaccaacacatccgctcggagtacgagagcgaaaccaaaacnnnnaaaggaatagcctgtgaccatgaaaccccccaaaaccagccggcgcatgcgcaacccaaagattgaagcgaatagaaagatctctaccaaaacaaaaactctgtacgacagaagagacagatactcgaatcaatccccgccacgacagactgaggaaagcgagagcactccttgacgagccatgactctagcctcaacccacccggagaaaaaccggccccaacatcactagcccaaactatctgagagctggggcaaaatgagcagccaatagaaccgtccgcaagagaaatgcttgccataaactccaaactgaatgcggattcgaacgactcttacgctattaacacataaagacagaatgatacgccctgactcagatgagcccaccgactagcacaaacaccgatccgccctcgctgcacatgagcntccatgcccgagtagaaaagcacactccatcgtcaagcccaacg

SEQ ID NO: 5226 - DNA, 449 bp, Glycine max
  unsure (1)..(449): unsure at all n locations
agcttcatggtgaatgtgattcanaggtgttttgataataacaatgatgactacaaaagatgatgacaaaggtgatgaacaaaaagctcaaagatcaaagaacatctcaagtgaatctagaacaagtcaagagttcaagaaaagaatcaagaagaaagcctagaatcaagaatcaagattcaaggttcaagatctcaagattcaagactcaagactcaagattcaagaataaagaaaagactcaatcaagataagtattaaaaagtttttcaaaactttgaatagcacatgagtttttgacaaaaccttttaccaaagagtntttactctttggtaatcgattaccatattggtgtaatcgattaccagtagcaaaatgagtttgaaaaaagtttctaactgaattacaacgttgcaattattntcaaaaagctgtaatcgattacaat

SEQ ID NO: 5227 - DNA, 421 bp, Glycine max
  unsure (1)..(421): unsure at all n locations
tcttcccaagtcctaaatgacatttcaagctagtattaccttacttcaatctccatttaccacagaattcagacttaaccttccaaccctcanagcctcactctntttccactcacaacaccacattctcactttccaaccctaggttaactctacctttcgtctctaacagttttccatgagcaattttagcatataacatcacaaacataatcacaaaaaccctaaaacagaatgggtatgtttaactcatccaaacatggcaatttcaacaagctttcagcaaatgtcttcacaaataactatcatgaagcagaaaactagcaagactacccatcatatctcccanaaccccatacccacgaaatttaagagagaaagaagtccacccaaacctgaattttcgaagtcccactcgtag

SEQ ID NO: 5228 - DNA, 342 bp, Glycine max
  unsure (1)..(342): unsure at all n locations
agcttgtaaagttccctcaatttatggttatttgtgagtaaatttgtaaataaatcttgttttatggttaacactgtctctagaacatttccattggatttaatgatggaatctatgcattntcaggtgaaaaagaggctaagttttgaaatgcaaaaagtagcagttgggctaagcgcatatccaccgctaagcgtaaaggagaatctggcagagcatcaacatcaaagttgcgcgctaggcgcgagatcagtgtgctaagcgcagcaggtgccttcagccaggcttagcacaagactagcgctaagcctaattccacttactcgcgctaagcgcgagggt

SEQ ID NO: 5229 - DNA, 474 bp, Glycine max
gacactcagatactcagctgcaagaaaagatggtctcagcatattctttatttccagaattgtattctgtcaatagacactccaatctttactggagagggttaccactactgtacaacacgtatgcatatttttattgaggcaatatatctaagtatctgggaagtcatacaaatatggccttatatacccaccacagtagaaagagttacattagatggtagttcatcaggtgaacgcgtagctatagaacaacctacagatagatgtgctgaagaggatagaaaacgagttcaatccaacttagaagccagatgcataatagcatctgccctgcgaatggatgaatatttcatggtttcatattgcatgagtgctaatgaaatgtgggactctcttcgatatcacatgaaggatctacagatgtcacacgatctaggatcaatgcactatctcatgagtatgaactattta

SEQ ID NO: 5230 - DNA, 452 bp, Glycine max
  unsure (1)..(452): unsure at all n locations
agcttatccttttgaagtaatatagcaagttgtgtagctcgggcttaaaactttgaactaatttaccttatttaaaaataatacttacttttttttaatctttgtgagtttttgaaaaataaaaaatgaattaatctcctaaaaaaattgaagcaaatatgagctcaacaattaattgaacagctttgaggaaaataattaagaaatatgactctaaaaaaaccactctatctcaaggtttcatattcaaaattaattaaacagaacaataatgtataaaaagaattagtaagttaattaataatntagtgtccaagataaatctacgattaaatgattcaaattgagaaaatattagcatcatattaccacgttgagattaaaatcacactgaaatcactacaaaaataattatttattgcttcaaaaaattatgaataaatttactcatg

SEQ ID NO: 5231 - DNA, 277 bp, Glycine max
cctctcatgggcttagtatgatatgatatgagcagaagttcgcataatgtacaatggagctaatatatcctaaatgtgagcgcgcaagagacaaaacataaagaaggggcctgtttagtttacaccatagctccatataccataacaattgatgcttaaggactataatctcattaacatgatctagattaacatggacatcgaaatcataatcaaatgtgtgatggctataagctcattaacatgaacaaatttgatgaaaagatattagttaacc

SEQ ID NO: 5232 - DNA, 409 bp, Glycine max
  unsure (1)..(409): unsure at all n locations
agctagaagttgcatgtgggtacctattttgaatctcctatgctgtctctacatacataaaacagtcccaccatcccaattttgcaaaaccatattcatatatcattggggcatttcaccgagcacttggtgggcgcacgtttggacataaattgcaagagaatgggggcaatgtggcatgccccattgcttcagaacacaacataggcctaaggccttctcattcaaatcctcaactcaagaaatcaagcataaaaacaacccaaaactgcctcaccaatttaagcatgttctcacaatttagagcaccaaaagatgaagaaaatactccaatgggaagcaaaaaactcaaggatngaatacttacttgttggagtngagtagaaacaccaaaaatgaaagcaaatgc

SEQ ID NO: 5233 - DNA, 446 bp, Glycine max
  unsure (1)..(446): unsure at all n locations
agggaaggatgcttcaatggaggaaaagatagagggagagaatgagggatggggagcacgaaattgaaggaagaaaaagggagagaagttgaactttgagttgtgtctcacaagactctcattcatcaaagttacaacaagtgttacacatgcttctatttatagactaggtagcttccttgagaagctttcttgagaaaacttccttgagaagcttctttgagaaaacttccttgagaagctagagcttagctacacatacccctctcataactaagctcacctccttgagaagcttccttaagaagattccttaagaagctagagcttagctacacatacctctctaatagcttagctcaccttcttgagatgagaagctagagcttagctacacaccccctataatagctaagctcacccncatgacananaacatgaaaata

SEQ ID NO: 5234 - DNA, 339 bp, Glycine max
  unsure (1)..(339): unsure at all n locations
agctngttacatctagtattctntgtccaactcttccattacttgctctacacaaatcaaaagattcattgtttgtttgtacaatgactaactctaaattgtcttacagataaatatacaatctcaacacttagtcttttttctcaaggtgttttgagagctttttcaaactatacaacaatttacagaaaaatttatacaaaaagaatttgaatggtagcgcacaggcttataactatgtcttcaaagcttctaagatatacaagtcttctccaacaatatacaatagatttaattgtgtatcagatcatgacatgtatcttctattgtctaataata

SEQ ID NO: 5235 - DNA, 330 bp, Glycine max
  unsure (1)..(330): unsure at all n locations
cttgatgcttgctntgaactcttggaagccgcctaagttggtctaagatttctcgaagtttttattttgaccaatgtatttccgacatgtttcactatatttcatgttttcagattttttcttttcttttcttttctctttcttctttaatgttgatgtattgaattctccaagtttgaagtgttttcaacacattccagcttgtgggggggggggggtgatcatatgcgcattgtaacctgtttaacctagcaatttcgacgacctacccactaatgtcttcacaaataaccctcatgaatcctacatctagcagcactacccattata

SEQ ID NO: 5236 - DNA, 210 bp, Glycine max
agcttgcctaattaacctgagaatggagaaatatgattattaaacacacaaaatgagagtactaagtatttattacctatacttagcagagaatacttataacactacaaaataaccataaattggaagagtttgatacaatttacacaagtgttatacataaaaggtaggcgttttcaccgactaacactgccaggtctcttcaccttt

SEQ ID NO: 5237 - DNA, 410 bp, Glycine max
  unsure (1)..(410): unsure at all n locations
tatgctgcanacatctacaatagacccactcatctctcatctttgtaatcagccacattagagcagctatgacctctctagaaaaaggtccatcccgggtggaggaatcatcccaaccttagatggccaaatcattctcaacagcagctgcctcaacaactacagcttcgaccccagagacaacgtatagttgatgcttctgcacatcctacccttgaagaacttgtgaggcataagactatgcataacatgtcatttcaacaagagaccagagactccattcagagcttaactcatctaatgggacaatgggctacacagttcaataaacatcagtcccagaattctgacacattaccttctcaatctgcctagaatcccataaatgggagttccattacattgacatc

SEQ ID NO: 5238 - DNA, 456 bp, Glycine max
  unsure (1)..(456): unsure at all n locations
gctagtaattcanatcgctagtacggttccatttntttttccctttttgttaacggttttcagaaagttttcagaaagcttcattggatgacaagaaggaagactctctccaacttcagggatcattaaactttatatatatttcatgcggttatgtttagcttaatatatgtttatgccattttttatataataaaaaaataatacattgaatagatgtgtacaagagatactcaactaattaataaagtttacactggccaacatcaacaccaacaaaccttatagtaatcctggcctctttttttttcgctgccacgagtgtatnttttggtagaaataatctgacaatcctctntcaatagatatgtatgggcgaataatttgtctctagatctacgacatattaacattaagttaaaacaagtctgcattagcaaaccactcgatcacttg

SEQ ID NO: 5239 - DNA, 470 bp, Glycine max
  unsure (1)..(470): unsure at all n locations
gctgtttctanatagattcccannattaaaaaaaaaaaaaaaataacattgtcccgctctttttaagtcttttagagtttagacatatggtaatcatgctggcaatcaaacttttttttttaagaaggcaatcaaaacctatataatatatagtattaaaattacattcaaatcacattcacactccaaccttgctctctcaacttcatggattccgcatttaggtagttgtgactatcatctatgttacacattggaagcggttataattgattaattttggtgacttacgcatttatgtatacacgtctaggccatatatgtacttcttctgcaggcgtgttgtcatatatattgtcaaaattctcttatattgacctgttgaatatatggtcaaatttctaattttgttgaatgtattggtgttaaatataatattctacatctcattcgccattaatatgaaaagc

SEQ ID NO: 5240 - DNA, 464 bp, Glycine max
  unsure (1)..(464): unsure at all n locations
agctntcaactgaatttatcacgttccaattgttttcaaaatggtgtaatctattacaatgatttggtaatcgattaccaatatgtttgaacgttgaaattgaaattcaattgtgaagagtcacatcctttcacaaaaatgctttgtgtaatcgattacaatgatttggtaatcgattaccagtgataagttttgaataaaaatcaaaagatgtaactcttccaatggttttcaagtttttctaaaggttataactcttctaatggttttcttgaccagacatgaagaatctataaaagcaagaccttgacttgcattttagatttaaattcataacaattattacaatcctttacaatctttgaatctctttgaacatcttcttcttcttcttcctttgccaaaagctttctaaagttttctggttttccaaactttgaaaacaaaagtgtcttattcatctt

SEQ ID NO: 5241 - DNA, 455 bp, Glycine max
  unsure (1)..(455): unsure at all n locations
acacatttttaatatttttattntttgaaattaggaaataagaaattaaataaaacatattttttaaactttaaaaatatgaaaatgaattttgttttcaaaaaataaaaacaagaaatgaaaataaaaaatgttttctcaaaccaaacaaccccttgagtaacaaaatctgtgcagttcaaaaaaatcaatccacgaaaatattattaacaagtattttgatagcaagctactttctatctaccggaaataacctaaagactactattaagatatgaagagactatagagaataagataaaattgagatatttcattcaataataataggtaaagatgagtatattatatggtcctatgtgatgtcaatcaatggataataattattcaaatgtcaacatcatacttatttaacaagcaaattataaattacatattttattccatcctatata

SEQ ID NO: 5242 - DNA, 420 bp, Glycine max
  unsure (1)..(420): unsure at all n locations
agcttgtcttgtgcagaagtaggctacagagggcacataattttttacttcaattccataacacaccacaatgcctatttttcgatgaaagagctctagaggtagcaagaagagtagcttctgcagagagacctaggttttgtaataagagagattagtgagctgcagagtgattgtgagatgctgagaagaggaggagggaccccccttcttgtgtaaggaacaattattctctactcttaatctcatttgtgttagcgtttttctgtatggctggctaaacactcttgttgggaatttctaaggaacaactgatgtaattactttaatatctaattgattgtctttcctgtgttcaatgcttctttcaatgcttaattnttgcatgctcttgggctgatcacccatttgtatgtctag

SEQ ID NO: 5243 - DNA, 429 bp, Glycine max
cttgatgggttgaaagagatacatgtctgtcatcatcaatattgcggagaatgagaatgtatgtatacatgattatgatgatgtcaaaagaagaatcaaacaaggctcattttgcttcaagattaatacaatattgtttcaacgaacaaagccttgattcaagatttcttcaagatcaagccttgcctcacaatgaaaggtttcacgtcattcaaggcacatgttatcgattaccaatgtgttaaaagtgagtaatcgattacacatcatatgtaatcgattaccagagactctgaacgttaggaattcaaatcttaaatgaacgatcacaactgttcaagaaaaatagctgtgtaatcgatcacactaattctgttatcgaataccaaagaggattttcaggaatatcgccaacaatcacatcttatc

SEQ ID NO: 5244 - DNA, 449 bp, Glycine max
  unsure (1)..(449): unsure at all n locations
agcttgtcagaagtctataccgctgatttaatgtaattagagcctatatatttcctttctcttttgttttctgaaatctacctcattaaataaacaaagagatcttgtttcatctgttcttgcagttccaccttttctcatatcattttgcatgtttttgtttctttggtcttgtttggtatagatatgagggtcgattctttgaggatcctaacaacgagggtttgacaatcgattttgatagagatataagccaaacgataaacgaggaagaggaagaggacgtcctgtcaccagagttggagaggttggtcgctcaggaagaacgtgaaatgaagccttaccaagaagaaaccgaattggtaaacatggngaccacggagganaagaaagaagtaaggtangaaccgatatgatcgcgcctatccgtcaaggcttgataacccttc

SEQ ID NO: 5245 - DNA, 399 bp, Glycine max
  unsure (1)..(399): unsure at all n locations
tcacctgatatcctcanaattagaaagatgtgccttttcattgtggcacttgaatagattcttaattacacttacatgatatctccatttcccttcttactctttcttttgggcaatgtctagtgatgtcgagattcatatacatgctctacggatctcattctcagaatacacaaaacaatagttatagtaattgtaggtataaattttttaaaataaaaactatgtccatatatttgtgtagaaaaggaagaaattcgcataacaaatgtgtcgtggctatcagtatttacagtataggtaccctgagaaggattaaagacttacatgatactcacattatagaaaagtatgacttttaagaatctaacaccgagaaccaaaaccaggaccaaacat

SEQ ID NO: 5246 - DNA, 453 bp, Glycine max
  unsure (1)..(453): unsure at all n locations
agcttaccaactaagctatcaaacatagataattactaaaatattcatcagagtcaaatttcattctgtaaataatgtggtcagaaaaaaagaagactatagatgcaggtttttctgttctttctaaatctcaatttgattggctcaccactgaagatttccctctgaagagtcttagcattgtaggagcaggtgaactcttgggaattgccacagttacatcataaatggcaggaacaaaagagcgcatatggtttactgctgaaacaaaaccctgaaagcaacatagcggagtaaatatttcagagcaaccaacagaaaagaacaataaaacctaatataatggttagcactgcctattaggtaatatatgtaagattgaatgtgttatgtaaatttaaaagaacaaagaagccaaagcatgaaagtaaaatacanagataaagtctatct

SEQ ID NO: 5247 - DNA, 404 bp, Glycine max
gaggataatgccacggcgaccgcctccaatacagctagggatatcggaaccggtgctacagcccgcaataaacttaggccgagatagaaacacgatggtgttcggtcggaggtatagtcctcaagcttacccttatggcttgcctccagacttcactccccgtaccgctccggacgatttaagccaagcccctacctttgaggggcaactccttccttatgccgattatcccctgcaagaagacgatgaagaagatgcccgtctaggccctctactgcccctcaaggatccggtcccccatgaattgccccaaccaaacatagtccgccatgtcccgtctccacccacacctgttaaagaatccgttccctttgcaaaagataagggaaagattgatttacttg

SEQ ID NO: 5248 - DNA, 413 bp, Glycine max
agctagttgccccaatagtaatgccttgcgtttatatagcaagaaaaagcccttcgataatatgtatatatgtaaatgtgtaacataaaatgccttgcaaaatgaggaataaaatgccttgcaaaatatgaatatatatagcatgaaaatgccttgcataatatgaatatatatagtatgaagagccttacaaagtgttggatggatagcgtaaaagtgttcttcaaaatatgtgatttgtgagtaggtagcaaaagaagccttccaaaaaaaatgtgtgtatatatatacgatggaccgtgataaggtatgtcaaacaatatgtacatggatgtgtgtcgcaaagtgcctttcacaaatttattgtgtgcaaatgcataagtgtcaaaaatacctggcccatatgatgattt

SEQ ID NO: 5249 - DNA, 378 bp, Glycine max
tcacatggagctacatcatgtggtatcattagcatcttcatctatgtgatgttcttttgcttcctctattttttgttcggtcaattcactttaattccttgttattcatcttattcttcgtatatatactccattgtcttctggtttggtgctgtttagagtagattcaaaaaaataaaccgattaaatcttagatttacacttgttcttgcatttttatggttcaaattttataaatctactcttgaatcatgtttttgtgttgattgtacgttctatcatttatcagtcataatattcttgtgctgtacctttagatctaaagtttattccaaaatattgattgaaaaaataacacaatagtctaagtgaaatcac

SEQ ID NO: 5250 - DNA, 357 bp, Glycine max
  unsure (1)..(357): unsure at all n locations
agctnntgaaaagtgtttttnttcaccttcttcttaagccaatccgatggcttagtgagcatccgctaagcgcaacactcattggctaagcgcaagtaagaatctggaagaagatgagctgtgcaggttcactaagcacatcgcttcatctcactaagcgcactgcttcagtccatccgctaagcgagaaaggcacgcgctaagctgaaattcattaatgtgcgctaagcggtccaaaattgcgctaagcgcatgagcaagaacaaggccacctatttaagcttgaaatcagattttgtgaagagagtttgggctaggattcagagctttgcatgtctagagattctagagagagaa

SEQ ID NO: 5251 - DNA, 431 bp, Glycine max
gtatgcccgagtcattcatccctatgagatgttgttgatttattggcgatcagaattgccattccttggattatagggttgaaccaagctcatgcttttacaaaaaggttcatcaagtcaagttgaaatatggaagtaaccgtcttgcaaaattggggcaaaagatgaatcgagtcacatcactgcttcgtctactgccaaacatatttaggattattgatgtccttgttacttccagtttcaccttgacaaagatgtcatagaccatgtggaaaatctaaattgattcaaccccatactgtacatcattcgcatacatccatgcttttcattggttgcattgctcattgcattctttccttgaaaaagaaaataaaaataaataaataaataaaataaaataaaaatgatcttaatcatttgtatcaaaa

SEQ ID NO: 5252 - DNA, 261 bp, Glycine max
  unsure (1)..(261): unsure at all n locations
agcttgtgcaaatcatatcactcctacatcttatctctagcatgcattttctttctttacccactcctcacgtttggttttttaaggaaaaacaccataactaaacgcgccgcaagggatccctatcgcaccagatccaaatctagaacgatgggtgatcaagaggagacgcangaacagatgaaagccgacatgtccgctctgaaagaacaaatggcctccatgatggaggccatgttaggtatgaagcagctcatggag

SEQ ID NO: 5253 - DNA, 517 bp, Glycine max
  unsure (1)..(517): unsure at all n locations
attgaccccatgatgaacgcgactgtatntacgcgacactctacaatgctcatgctcacatggaagagaggcgtgccttgtcattgttgcacagagattagactcttaattacactaaccttatatatgcgatttccttatcactcgatcccttgggctaagtctaatgagtgtcctattactatacatggcttacccatctcgttctcagaatacacaatgcaatgttgttaaagttgtatggctaaatcttctataacacaaactatgtccatatatctgtgtataaaatgtataaatttgtctaacagatgtggcgcggctattacaatatacaccatatgtaccctgcgaaagatgagagacttccacgatactgtccttatgtataagctggactatcgataacttngcagcgatagtcggataccggaccaaaccttctccgccttcctccccgagtatgacaagtgtctctcttgctggagtgctgaccttacttactggcatctttttn

SEQ ID NO: 5254 - DNA, 444 bp, Glycine max
  unsure (1)..(444): unsure at all n locations
agcttgtattggagattgagttgatcctgtttgaaagggaaacacttgatgtcctanaagagttggggagctgctgccctcacagaaatcaaagttttatctcatcatgaaaattcacctagagattgtgtagaaatattagaattttatgtcaaaagataaagtacatacatattaaaaattaatttttttatttacattacttaaataaaaattaaataattatttttggtggacattttgaaaaaggtagaggaagccacacaagatattaaaaccagctagaagttaaagcaataactgcataaaaagatgttcaatttaaaaaagaatattctagaaggcatgtgacgacactagctgagctgggttctttctcatacacatgctggtctatgtgcaataaanaagcattggatagagagccgatgactctgatttatg

SEQ ID NO: 5255 - DNA, 413 bp, Glycine max
  unsure (1)..(413): unsure at all n locations
gcctcttcattgtggcacttgattagattattaattgcactaacgtgatatctccatttcccttcttactctctctttagggcaatggcgagagatgtcaagattcaaatgcatgctctgctgatctcattttcagaatacacaaaacaatagttatagtaattgtaagtataaatattctaataaaaaaactagtgccatatatttgtgtagaaaaggaagaaattcgcagatcttatttgacctggctatcagtatttacagtntaggtaccctgatattgattaaagacttacatgagtctcacattatagaagagttagacttttaagaatcttctctccgaaccaaaccatgaccaacattcctcccctccccctaaaataggcaaaataaaacttttacatgaaatc

SEQ ID NO: 5256 - DNA, 412 bp, Glycine max
  unsure (1)..(412): unsure at all n locations
ttaccttgaagatattcctctgataggcacttcgagccttgtctcctttcttaggatgaagctcactacgagccttatatgaacaaccgtgatatcaccatcattttaatgaattatggagctatggaactgttctgggaataaaggtggggggttcgtttgtttcattggataaccttgaatgggggctatgcttcacgatgtatttagagccatacttgatgcacattggatataggtttaatgtcggacatgctgaatgacatgttcgttctcaaaggctactcaaaatagacccgcatagaagaatatgagagtagcttttcggttgagtgaaaataatctanatggcacacgaacgatggaactgtgggntctactctatatgtgtaatatgtatctctacctcttt

SEQ ID NO: 5257 - DNA, 393 bp, Glycine max
tctatagaaggttcattcctaatttctctacaattgcatcacttctcaatgagctggtgaagaagaatgtggcatttacctagggtgaaaaacaagagcaagcctttgctttgctcaaagaaaagcttactaaggcacctgttctagctcttcctgacttttctaaaacttttgagctagaatgtgatgcctctagagtgggagttggagctgtattgttacaaggttggcaccctattgcttattttagtgaaaaacttcattgtgcgaccctcaactaccctacctatgataaagagctttatgccttaataagagccctccaaacttgggaacattaccttgtttctaaggagattgtcattcatagtgatcatcaatcacttaagtaca

SEQ ID NO: 5258 - DNA, 292 bp, Glycine max
  unsure (1)..(292): unsure at all n locations
agcttgtntatttagataatattcaatttcatagtatattagagtaattgagaaaactttaacctttcactcttttcttgttattacatcgtatctagtagttttcaagtacattaatttatacttgtgatgtttcttttgctcatgaacagtatggcttgcataagacaatgttgctaaaagatcatatgttataaaccaggtcagtgtggggtccataattgcgcttagcgcattgatcaagaacatggcctcctatttaagcttgaaatcagactttgtgatagagagt

SEQ ID NO: 5259 - DNA, 342 bp, Glycine max
  unsure (1)..(342): unsure at all n locations
tgcanagcatgaacaaagtgatgcttaagtgatctaagtnagagaacaacatatgatttatgataccactagaattggtttgtgtgttcatgatgagcaaaggggattggtttaagcaatgacattgtggagacaaccatgcatggacgttcaagaaagtgaaacatggtgtttattaatgacttcattttgtagctacaataaatatgaatcatgtagtgtttaaatcttactgtaaaacgatagttggtgagataaatactgcatgtggggacagacaaaattgagaaatattgtcgctgaatgtagaaatattttagttgctcattcatcctatggaat

SEQ ID NO: 5260 - DNA, 128 bp, Glycine max
tttatgcaagcttcctcttggcttctcttgagtagctaactctttaatacaacaccctcttaatactaaactcacctcttgataatatttcagatagaatagacactaaattatcgaacatgacatat

SEQ ID NO: 5261 - DNA, 161 bp, Glycine max
atgagttggtacatagcctaagagatgttccaaacgatctgagggagctgactgatcttcaattatgcataccgaagtatagatatgattctatggagagatagttcacaagcgctctatgattatgattacctctatgcgagtaatcatggtctgtgggt

SEQ ID NO: 5262 - DNA, 449 bp, Glycine max
  unsure (1)..(449): unsure at all n locations
gcttcgctgaaaaaataatatacgcatgatatatttaaaactaaatcttctcccttcttagtctccacaatatgagagaataaaatacattatctacactataaatcccccatacaaactgaaattccaatgtaactatgcaaaggcattacctgacagagttcaaaataattaaaacaccataatccacacattgacctaaaatgtcaatacaaacaagtgcatgcatgttgctcagaatcagtttagactgtcctgtaaatatttctatacaaaaactatgattggcaattnttgagagagctgggtattccctaaagtccttggacaagttatcttactactacctttgttggttctggtagagggtaaagaagctaaatntttgccaataagccatctatgctacactttgagggagactgtcaaagcgtaattctcgtatctat

SEQ ID NO: 5263 - DNA, 405 bp, Glycine max
ctcagctaattaatgcctagtgttatccgatagcacattggggatggttcaattggtatgtggtggtttgttctgtgcatgaatcatatatatatgccagcttgttcatttggtgtggtttattcatagttgaccctatcttgtgacttgcgatcgagttctaacctttggcctctagctagcggaaatcacttcctaaatcctacctccttgtgattggctaacaacctttccgagataattacacgttataagtgttaaacaaccaactcgtgttgggatctaggattaaagtaatgttatagttgggtcaaatgttatggttctttggtggcatgggacttggttacaaatagctgattactacaagcaaatgctattaaacatcacatgctgtctgcaata

SEQ ID NO: 5264 - DNA, 411 bp, Glycine max
  unsure (1)..(411): unsure at all n locations
gcttcaggttttctatttcaatcgtggaatgtcaactattaattntttgacaatatagtaaacttcatgcgagatataaagctctctctgtctctctcttctctctctctctctctcgttttatggtttgttggagaatacagaacaagccacaactcacaaggtagatattactaccgttacggagtagaaaggtgttggtcgaataggtctttgtattcatttggtcgttttagcattttatcattatttctaaacttggttatggttattattttagaatttgttagcaattgcatattttgttacttctaataatacctttacatggagtagttaattattttatagtagagtattgctaatgacttttgacttttacaaagtactctatgtaacattagtttttag

SEQ ID NO: 5265 - DNA, 423 bp, Glycine max
tgacgcttaggatatgacttaatgactagtagagagattaccataataccaatcccattttcttactacttttgtctttgtactattaagcattttttataaactaaactaatatgggtcctttgttttagtttatttattacaaaaagcacatttttaaaacaaaataagtaattcttttttgtttttataaataaaaattctggtttttaatatttttcttataatgtgtttacttaaataatagttttatgtgtttttaagaagaaaattctatttatttcttataaaaacgcttttattcataatattttataaatattatatacatttttaaaagactagctttaatatatattaatacttcaaatatgacattaacttcttttgttaattagtattattttcgacatctttaattta

SEQ ID NO: 5266 - DNA, 454 bp, Glycine max
agcttccacaacatccaagcaattcaacatctttacatcatgaactatcaaaaaccaagaaaacagggcagaggaagaaaactctgcccaaaacacaaaccaataccacatctttccttactcaaataccccagtaacattctcttcggtccaattcgttcaccgttggatcgactcgaaaattttattggaggtccctagtacataagtctacattttgaccgttgggatctgctagaaacatccacaaccaaatatgtacaaccctttccacaaccagccatgcataagcattttctgcacaagcacaaaattctgctgcacatttcaacagcaaaattctgcataatagtgcagaatttcgaaatcactcttgccctcatccaattttgcccaaattggatcctacaagtcctaaatcatgtataaatcatatctaaaccaaagacaagct

SEQ ID NO: 5267 - DNA, 261 bp, Glycine max
cattacgtatatggctgaatgataggctctatatgtataactgattatgacttctctgccgtcctttatgtcttcatacctgggtcggggaggggatatcatgtctggtggacgacctcaccttcaacgtcatcaccacacccaaatcttccagatttaagaccagtgactattgagctatgacttgaatttctaatgtcatcatggtcttggactattcttgtatgatgaaatcatgcttatacttgtatcttggtataa

SEQ ID NO: 5268 - DNA, 463 bp, Glycine max
  unsure (1)..(463): unsure at all n locations
agcttaggaacccanactttntagcttcaatgttagaagacatactcgtggctaggaacccaaaatttggttttagagtcagaaaagcatgaaaattaggacttgcttgtgagagtttttactcgaatttgggctgccccatgatcgatactttgcacctaagtgacgtgggaaatgcttttcaatggtatgtggatatatgtggggcatgaaattccttgccaagtgtgaatgattattttcctaaatggatgtatgatagcatggaattcccttttgaatgcaagtatgtgcaggatgtaattagctttccaatatgcacgaaacaataaaattgtatgatatatattccaaatgtgtgtagttagttggtaatagcaagtatttaggatataattaagtgtgaagtttgacgcaatgccttgggcgtgagaatgtatgttcttttcaaatgcatatatat

SEQ ID NO: 5269 - DNA, 392 bp, Glycine max
cttctaagtttctggtttcccaccttcaaacaaaagtgtgctattcatctttttcattctcttctccctctgccaaaaagaattcgccaaggactaaccgcctgaattctctatgtgtctctcttctcccttttccaaaagaacgaaggactaaccgcctgaattcttttgcgtctcccttctaccttgtcaaagaattcaaaacgacacactctgagaattcttttgattcttccctttcccttaaaaaaaagatctcaaaggactaaccgcctgagaactttgtcttaacacattggagggtacatcctttgtggtacgagcagagggtacatctacttgggttgttgtgatgagaacaacagagagacatctcttgtggatcagtctag

SEQ ID NO: 5270 - DNA, 268 bp, Glycine max
  unsure (1)..(268): unsure at all n locations
agcttaggaacctaaactttntagcttcaattctagaagacatactcgtggctaggaacccaaaatttggttttagagtcagaaaagcatgaaaattatgacttgcttgtgagagtttttactcgaatttgggctgccccatgatcgatactttgcacctaagtgacgtgggaaatgcttttcaatggtatgtggatatatgtggggcatgaaattccttgccaagtgtgaatgattattttcctanatggatgtatgatagcatgga

SEQ ID NO: 5271 - DNA, 312 bp, Glycine max
  unsure (1)..(312): unsure at all n locations
agtttctggttttccaaaccttcaaaacaaaagtgtgctattcatctttttcattctcttctccctttgccaaaaagaattcgccaaggactaaccgcctgaattctttntgtgtctctcttctcccttttccaaaagaacgaaggactaaccgcctgaattcttttgtgtctcccttctaccctgtcagagaattcgaaacgacacagtctgagaatgcttttgattcttccctttcccttaaaaaaaagatttcaaaggactaaccgcctgagaactctgtcttaacacattggagggtacatcctttgt

SEQ ID NO: 5272 - DNA, 431 bp, Glycine max
  unsure (1)..(431): unsure at all n locations
agctngacaggttcaggcgcaggtgctgctactggtggaggcactntaaattggttgccaaacctcaaggtgatggcactcacatttttcagattctgcacagtttgtgaaggcaatttgttagaatttttggattgagcttggtttaactgagtagccatttgccccatctgatttgttagactttgaatggaggctcttgtctcttgctgaaattgcatattctggatggtcatttgcctcactaactcttctaaggaaggttaaggagaggcctcagttgcttgttgtctttgttggtggtgctgttgtattggaggaggaacatatggcttgcttggaccagtagcattctataaaggagggacaggttgttgttgttgtggaggacttgcccatctcagatttggatgatttcttcaacctggatt

SEQ ID NO: 5273 - DNA, 483 bp, Glycine max
  unsure (1)..(483): unsure at all n locations
tacggacactataatactcagcttttatccaggcactctctnggtggtgaagctccttcttctatggcttattccctaggggatggtgcctcctctcacctcttcttctttatctttcgttgcatctccatggtggaaaatcaccattgaaggacctcactgaagctcaaaggtccagcctccatagaagcttcacaagcaagcttccatcagattccccagtgggtgatcatgaaccccaagaattttccattgtcgaccccaaagttgcactttttagggttgaggcacatgttatatttacaaatttctctgaatacttcctttaagtctgctacatgttgggccacactatgagacttaatgaccatgtgatccacataaacctcgacattntgaacctattgatgattgaagacctggtccatgaagccttggtatctggcttcatcattttttagtccaaaaggcatgaccctgtac

SEQ ID NO: 5274 - DNA, 439 bp, Glycine max
  unsure (1)..(439): unsure at all n locations
agcatttcgttntacagaatgcanaaagtttattctgataaccactcgggtatttccgcccgtcagcgtgactcaaaagtcagtatgacagatcttgcgagcacggaagatgacatatatcaccgcatgttaacgggcttgtcagccgcgattgacgaatggcgcataagacgacgttagtgtctacgtgctatcaggcttttcgtcttacagacagcaaanagtttatacggataaccactcgggtattttcgcccgtcagcgtgactcanaagtcagtatgatagatcttgtgagcgcggaagataacgtaaatctccacgtgtcaacgggcttgtcggccgcgaatgacgaatggcgcaaaatacgacgttagtctctgtgtgctaacaggcttttctgcttacagacagcanaaagttatatgaataaccactca

SEQ ID NO: 5275 - DNA, 463 bp, Glycine max
  unsure (1)..(463): unsure at all n locations
gtacttaggngattgtacctgtganccatgattcatggaactctgaaactatagctgtgaccgcgtgattacgacatattcgcgctacaatatctgtctactgacttttgagtcacgctgactggcggtaatactcgagaggatatccgcataatacttttgctgtcagatacacgagaagacttatatcactccaagactaacgttatcatctgcgcccatcgtaaatcgctgccacaaacccattacatgcggagattacgtcatacttatgctgacaaaactgaatagtcgcttatgagtccgttgacaacagaatatcccatggtttcgtccacctttcgattttgtagagatagctgattcttcaaaataacctagttttaaacttcaaatccggcgacatccccaacacgtggattacgcccttcccctaaaaaacttctatgacttttgaatcccg

SEQ ID NO: 5276 - DNA, 390 bp, Glycine max
  unsure (1)..(390): unsure at all n locations
agctntaatcgattactatgttntggtaatcttttacctgtgtctttgaacgttgaaattcaaattcaaatgtgaagagtcacatcctttcacataaaaagcttgtgtaatcgattacactggattggtaatcgattaagagtgactgtttttgaataaatcaaaagatgtaactcttcaaatggtttctgtctttttcaaattggttttaagtttatctaaaagtcataactcttctaaatggttctcttgaccagacatgaagagtctataaaagcaagactttgatttgcatttcacatctatctaatccatcaatctatctttttccaattcattctttacacaagcaatgnttccacattcatttatgagtctctttgaacttct

SEQ ID NO: 5277 - DNA, 198 bp, Glycine max
gactggcctatgcaccttgccgccgacactaagataatagactgtgtgccgtaggagataggctgtcttatggacgacctcatctatcttcgcatgaccgctcccacatctagtgcattcaccacccccggctagagaactatggcatgaatctctaatgtccttatggtctaggactattctcgtatgaagaattca

SEQ ID NO: 5278 - DNA, 364 bp, Glycine max
  unsure (1)..(364): unsure at all n locations
agctagaaggtgtgtatcccaccattttccattatagaacactagtaatatgtctactatcattgntattatttctttcttcgtcattgagggaaacacttgggctgccagatccctccacctttaggcgtattctttgaaagatgcgtgccccctttttgcacatgttctgtagttgcatcctatccgaagcgattatactgacactacctaacgaaggcaaccattangtccttccaagaatggactcgagaaagtccaagtaatgtaccatgtatcagctaccccagtaagactttcttggaaggaatgtatcagcaattcctcatcttttgcgtatgcccccatcttccgacaatacatc

SEQ ID NO: 5279 - DNA, 268 bp, Glycine max
gctatgcatctattgcattctcttctccctttgccaaacacaattctcacgagactaaccgcctgaatactttatgagtctctcttctcccttttccaaaacaacgaaggactaaccgcctgaattcttttgaggctcccttctaccttgtccatgaactcaacacgacacagtcatggaattctatcgattcttccctttcccttagctaaaagatttcacaagactaaccgcctgataactttgtcttaacacattggaaggcaca

SEQ ID NO: 5280 - DNA, 343 bp, Glycine max
agcttcaagttgctcattgactccagaatgctgcaaagaaggacaaagatctaaatggtgatctgcagaagaacatagaccacagactcttgcaataggtgtagattttttattcatggcaagctgggttactatgttgaccaaggcatcaagttttcctttaagctttttattttcagtagatgaagatgaatccgtggccacctcatggactcctctaagaacaatagcatcatttcttgcactgaattggtgggagttggaagccatcttcttaatcaaattcctagcttcaacagggtcatatcaccatggattccaccattggcagcatcaatcatac

SEQ ID NO: 5281 - DNA, 394 bp, Glycine max
  unsure (1)..(394): unsure at all n locations
acctgtcatatgtggtactaggtggtgatcggacgatggtgcaagtcgactctccacatccacaaatcacacataaatccatcatccccagttgcccaccttcaactgagctcacgtactcccacgtagccccttatcctcgttcctctcaacaccgggttcccatcaatccctccaagcttccacaacatccaagcaattcaacattcaaacatcatgaactatcaaaaaccaagaaaacagggcagaggcagaaaactctgccgaaaacacattccaataccacaactttctctactcaaataccccaggaacattttcttcgttctgattcgttaaccggtggatcgactcgaaaattntactggagggccttaatacataaatctacatt

SEQ ID NO: 5282 - DNA, 311 bp, Glycine max
  unsure (1)..(311): unsure at all n locations
agctntgatgcatttagaacanaagctntgctggttataatgaatgatggctatggctgcttgaaaattntgatgcacctgcctactttancaatattaatttataatgtaatttggatacatattcttttttcatgtgggtggttttgatgccactatgcaggcatatactgaaacttccggaaacctgaagggcttaccacaaggtataatacaagctacttcagatcttgagttaaagcatttatggtcgccaagtaaattgaggtcaaggtcaacatctttgcaaatttaattattttacattatat

SEQ ID NO: 5283 - DNA, 309 bp, Glycine max
tttgttgatgtgacacaagggaaccctcttcacttgcagcctcttgggtcggcccatgcttcttcccctcctttctagggcactcctcctcacgtcgatgcgtgtaggctcatatcccagtctgaaccttccgcggttccctgtgaactctaccaagcttgccacaccatcgtcgttccaccccaaacccattccgagctcgtatccatgtcccaacattaccctgactaccattaatgtggccccagatgggcgtggttgtatcgggggagattccacataaacattgctcactaccttcaatgcttg

SEQ ID NO: 5284 - DNA, 428 bp, Glycine max
  unsure (1)..(428): unsure at all n locations
agctntacatacctgtaattctcacacttgttgatgttaccacacctgacacaggacaatatntgtcaacacatgagggctcgacaaactcgtcaccctttacttgtcaaggatactaccctagacaccaaacaatatccctcgacacatgataatccctttcgacactggacaatctcttttgcctgcaagccgactcagagcttggaaggcttatgtattgtccagggtccacaaaatacatgtggcaccttacatggcacttcgagatacgtgtcaacccttcacatcaaccttggaactggagtacagacactcaacccttacagtcaagctctctaactaacaagttatctctaacctattaatatttgaatcctcttatctctcgcagataatttatcatctacaaagccacacatatctac

SEQ ID NO: 5285 - DNA, 321 bp, Glycine max
gacacaatctagatgcaataagatctacataagattagagaagataagatctgaatgaagtagtatctatatgagataaaatagtctgcatatgatgagaggaaatctagatgagataatatctagatgagatagcatctagatgagataagattcgggagaatacaattgtttgctctcgttcagtccaagaccaattggttattattctgctagaagtaaattaaacacacacacttagttcgctcgcccaatagataacactacataagtagagtgaccatcaaggctgatcagtaattatgatggtgacaaaaaggg

SEQ ID NO: 5286 - DNA, 493 bp, Glycine max
  unsure (1)..(493): unsure at all n locations
agcttaatcccttgaaatngagggtaggagatttgccctggattcagctaaggactactttccttagcacacttatgttcaatatgttggatttgccctggagaattgccctgaattttctcctttgaaaactattttatttggaaatccttcccaagacaccattgaaccactgatggaggctttggaggaagattataaagatggaaataagataaacgaatcaaggcagtttattgaaggagtattggatcttgaaaagagaatcaatagactagatacattgacttagaaattaaatataaccaaatttgtcattgttgaacaaattattagcttataaaccaaatctttaccatttgttaatatgtnctacttatttctgatacgagcataataaaatgacatgaatgttcaaaaaatcaaactacaacatgatcttgtangaattagcaatatgtttgttgtgtataaagggatgtattttataata

SEQ ID NO: 5287 - DNA, 168 bp, Glycine max
  unsure (1)..(168): unsure at all n locations
ccttatcactccatgcctgaaccttcactcagttgtagtacaaatagactaaaatatctatgagcgnggcatctcgatataacgataagttgtaagcttcaaactccacttgaatctcaaagtacagagactcaataatatgtttatgaatggacaactaataccact

SEQ ID NO: 5288 - DNA, 408 bp, Glycine max
  unsure (1)..(408): unsure at all n locations
tagctctctaccaaaactatgatggaagacacctcaagagcacttgtatgaaggttgaaaaacaagaaagaaatgggcttctctctcccttggctgagctcatgagaaatgagggagaaaagcctcaaaaacatgcttttaaaagacttatgaagataaggtctaaggcttttgtccaaaagaaatttgattaagcctaattgacaagcttaattgacggcatgaatgactacttggccggcggccatggtgaacatgccaagcaatgccttttatgggtgttattgtttttgaaattnttgccaaaatggctagagtagacataagcgaaaatggtaaaaattgttttttgccaaactagtaaatcttatcttatacgtctagaataatgtgataacttcttaaaat

SEQ ID NO: 5289 - DNA, 316 bp, Glycine max
  unsure (1)..(316): unsure at all n locations
gacgtcatgctgaaaatgtttctcgttatgaagaagacaccaaagaataaaaaatcgggactgcttgagaatacatcgcatgtgctnttatttaataatntctttttacgaaacttacaattcgcctgtagaccttatatgaattgtcaatcttatattaatattacattcatagaatcatatntcataaaactctattgactagagttgcatcgtacaacgcaaatgagatatcaaaatatgtggttgagtagctttcatacatagaagtggactatcatactatatggatcacgatcacatgtgaatcagaatc

SEQ ID NO: 5290 - DNA, 483 bp, Glycine max
  unsure (1)..(483): unsure at all n locations
agctngccccacttgaaaagcctcttttgaatggtgactctaatgtaagcaacaattatgttcccattaaggctagaggaaatgaaaatttaacctggtattcaaatgttggatttttcagcattcttactttctcatggatgattcctttaataactctagggaatgagaagactttagagcatgaggatctcccacatcttgctactgatgacagtgtggatgggattttgccaacttttacaaacaaacttgagtcagagtgtggtaatgtgataacaaccctactctagtttcataacaaccctacgaaaatatgaggttactgcacacatgaacaacactacactagtgtgataacaaccctgcttacactatgcaaacaaccctgcttccagtgtatgtttgtgataacactacgttacccattattcaatctcctcatgccctatccccaatgaacaacactacactacctcaatc

SEQ ID NO: 5291 - DNA, 465 bp, Glycine max
  unsure (1)..(465): unsure at all n locations
tctttacgttattccattccaccatagcaatagcaacaagaactgcatagacaatctntgtaataattttataaagtcacattctttnntctttttatgntaataaatattttgtatnttttatgtaataatttctttcttttcaaacatntttattntatttttgagtcttgctaaccaaagcccttaggacattggttaaggaactaaaaggggaaagtatttagtgtgtaaatcatatggaagtgtaaaanaaatcatggacaatgcaattttctgtctcccaataaaaacatttctactttaagttccttaacanattatacacccgtccttgggatagaanaagagtaattctacatccctttacagngtatnttcactaattctcctacttagntaataaagaaagtatcaattntttttatgtctaaggattaatgcatttacattattaatacttct

SEQ ID NO: 5292 - DNA, 464 bp, Glycine max
  unsure (1)..(464): unsure at all n locations
ttaagtcacctgcggcatgcaagcttataaatcacgtgactggtgtagctaaaataatacaagctgccagatttaccagaaatgtcaaatattccctgcagtaatgattgctttgttatcattatagcctttaacacaacaataatgctatccatacatcaaatgattcatagaactggattttactagtttctcaacaattccatagcacgtgctcgagatagaagttttatatgaatgtattgccatgctaatgctntaatggaaataaaatagaatagcttaattgaagcacaaggaccattaacgcattgtttcatgcatcctagagatcctctgggaagtaacatgtaaacagtcaatggaaataattagcctgggtgatagcttctcacatcacatgtccaagcgaaagaattgttcttttgcaagtgaaacattatgcctagctagaatgtgacact

SEQ ID NO: 5293 - DNA, 345 bp, Glycine max
  unsure (1)..(345): unsure at all n locations
tgttgacactgttacctaatgcattcacattcagcggaagccttgcagggtctntaccagccactgtctgcacagggttgcttanggaatcgaagttngagctcgacacanactctggcaatatgtggaactgcactaattcgattttctggccttcgtttanggagttgaggaagcctgctntgaggttggaaaaggcagaatcatctggtgcaaggatggttatgccgccactctnggctgttatgagctgtgagttgatgttgttcatgatttctgtggttntgaggaggcggattangaactgagaacattttgcctttntcangattctggtgatgtcgt

SEQ ID NO: 5294 - DNA, 379 bp, Glycine max
ctgcagctgttcaggtctatattcacagtgcgagtcactcatgtcatgcaatcaattcagttcaaaacaagatatcaagacaaacacaccatttactgaggaaaaaattatgaaaatgctagattaaaccactgttcaaatccaacaaatagtaaaataactaaataaataaagaaaattgtctgaaaaacaagataattaaatggaatcttgtcactcctcagtcctgtgctagtgtgggccatggatcccaggcccctatgctgtagtgacgtctgctacataatcaacgtccacgcccacctctgctgcccctaaatcctccgcagcctctggggtgtcctcaacagcctccttatcctctagagtgccctgtgca

SEQ ID NO: 5295 - DNA, 289 bp, Glycine max
  unsure (1)..(289): unsure at all n locations
ctgtacttggatcatggaatgtgtntcttccacttnctttagtgtggcagtcaatggatccatttatggtcacttcanagggcagcggggtcttagacaaggggatcctctctccccttatctgtttgtgctttgtttggagtacttttccagagatatgagcagccttaaggatgatgccaattntaaatttcatcccaactgtgcaagtattcagctatctcatttggcttttgcagatgatattatgcttctatctagaggagatatcccttctgtgtcaactatg

SEQ ID NO: 5296 - DNA, 348 bp, Glycine max
atgcgacaattgctgcacctctaaccaagcttctaacactggaaccttttcaatgggcccaagatgctcgtgcagcttttgctgctcttaagcagatgctgacctcaacccctgttctccggttgtcggacttcactcttccctatacggtggagacggatgcgtcaagaacgggcatgggcgcaatgttatcacaatatggccacccagttgcttactttagcaaaaattttccaccaaagctacttggtgcttccacgtacgttcgtgaattattcgccattacggccgccgtcaagaaatagtgtcaatacctccttggccggtgctatcacatcctcactgatc

SEQ ID NO: 5297 - DNA, 599 bp, Glycine max
  unsure (1)..(599): unsure at all n locations
aggggntgtggatgtcccatcgtagcatgcttcatctcagctgcacctngatactaagctgagatcttgcttaagtgtgcacctattctttagangaaacacgttgcctaaagtactatcatgccaagaagatactgtgtgcgatgggtatggagtatcaaaagaatcatgcttgcccgaacggttgcatactatacaaacatgaatntcacgaaatgcccaaatgccctangtgtggtgtatcatgctacanagtgaaggatgatgacgaatgtagtagtgacaaanactcaaagaaaggccccctancgaaggtgttgtggtatcttctatcattccaagggttaagcgcctgtttgcttatggagacaatgcaaagaccttacatggcatgcaaatgggaganatagtgatggaatgctctgtcatcccgttgaaatcctccactggaagaagattgatcgtttgtatcgaattcagcacagaggcgaanatcatatgctcggactagccactgttgaatgatctatgtggccgttaacactcacacacgtcgtgccagattgctagaaatactatttctacttgttggcctaccg

SEQ ID NO: 5298 - DNA, 448 bp, Glycine max
  unsure (1)..(448): unsure at all n locations
gatcatcatcaaaacaccaaagatcttctacaatctccttctacaatctccccctttttgatgatgacaatccctgaaatcaagacaagctatatacaatatgatagcacgttcacacaacccttactccccctatcttttggcatgtatgcctaattttacttaattctaattgatttctaacccaagctctctcaagttctctccccctttggcaacatcaaaaagaactaagcaatacaaacaaaatccaaacatagccaaacatgagaccaaaataaatccacacattgttataaccaaccaaagcaaagtcctgaaatataataataatgcaagagtacgataacttagagcaacaaaaagccaaatacacggtgataaaacanagtactaagaatacttaattactaataagactcagtcataataataataacaattaatc

SEQ ID NO: 5299 - DNA, 425 bp, Glycine max
  unsure (1)..(425): unsure at all n locations
gtttgtctgtttacatgcccaactctntgagtggcatttgtattgattggtgcatcttagtctctatcttttcatgtgtacatcatgcatcatcatgtagaagtaagaagattngttctaaatttagaaacttcttcaatgcataaaactttctgttttaatcgattacaaggctgattgtaatcgattacaagtgattatagcttgtagagagattctagttntggtttaatcgattaccagttaatcagaattgattacatagttcagttgaaacaatgagtggtttttcatgagtctctactntaatcaattaccaggtgatcataaatgattaattctctctttaaagtgttcccaaaagtgatcaagaacactntaatcaattacatcaagaatctaatcaattacattattcttgaaag

SEQ ID NO: 5300 - DNA, 453 bp, Glycine max
  unsure (1)..(453): unsure at all n locations
agctcggccatggcgttattacgagatgatagttaatttgtggaagccataaaagaagagaaggactgagacacaggacattatctaataaatttgatggttttaacgggtactaacctgaagaagtttggcaacacacttggactacactaattacagtatataataaatgaattatacacaccacctatgtagttttcaaagaggttttcataaacctgtctaggtgtacatgatatctctaaccatctttccttagacatgatcatgtattcactactaatttaattacattggagtttattgatgtacctgtctgacctatatgcagctacatctcaaatgatgttatactataattcttactagaagcccctctactttcctatcctangataagtacatcttttcccttatttataatcttacactctcatacattggcttgtacat

SEQ ID NO: 5301 - DNA, 294 bp, Glycine max
ttattctttctcacccacagtctcgtttagatacatattacatctgtgataatactattgcggatctttctgaagtcctggaaatgtataacacctcttaccgtatttttagtgactgtgctggataataccaaataactggatggtaaatatctgactgtatcaactgtttaaatcaaatgagctatcggtgaccaccgtctggtaaatgacctaagccgttaaggaattaaccggcaaaaaatccttcttgaaaaaaaaacagctgtcactttttaaagttgttcactgact

SEQ ID NO: 5302 - DNA, 415 bp, Glycine max
  unsure (1)..(415): unsure at all n locations
agcttcaacatcagaccacttccagggtgctggaactacttcacatggacttgatggggcctatgcaagttgaaagccttggaggaaagaggtatgcctatgttgttgtggatgatttctccagatttacctgngtcaactntatcagagagaaatcagacacctttgaagtattcaaagagttgagtctaagacttcaaagagaaaaagactgtgtcatcaagagaattaggagtgaccatggcagagagtttgaaaacagcaagtttactgaattctgcacatctgaaggcatcactcatgagttctctgcagccattacaccacaacaaaatggcatagttgagaggaanaacaggactttgcaagaagctgctanggtcatgcttcatgccaaaagaacttcctataatct

SEQ ID NO: 5303 - DNA, 380 bp, Glycine max
  unsure (1)..(380): unsure at all n locations
ctcagctctatttagacctcgatcggtcatctttcctggccgacgccgactgtncattttttcgagcaatatcggtgaataatatatntntgccgaggtgggctaatgttttcctggccaaataaatgggaacatgccagtttctgccgaaaagaaacatcggttgagctcgcacggaaaaacctagccgacctacgttgtaaattttttatgcaacaccaaaacaaanaacttcctctaccgttaaaaaaaacattatcggccagcgtttgtaaaagaatattgcgcaattcggctganagatatcaatcagggacatataacgaccgacaccggccattgtttattctatttaatccctgaataacaattggatgatg

SEQ ID NO: 5304 - DNA, 465 bp, Glycine max
  unsure (1)..(465): unsure at all n locations
agctntcaaccttgngacgccctacttnttttcttctatcttcattgatcatcacttctctttcttcattntccttttcggtgggaattaggataaccctcctcaatttttcaactctaaatttgatcatcaccttcacccactttactcttactaggaggaacccttctctctgtgtgtgtgttctgagttgattctgtgcttcagctttccacaaagtaaagtagaaagatggcaatgattccttaccacctttgccgtttaccttaccaggattccctcaaagcacttgaggctgatatacagcacgccaatgctttgtgagttttctttnttatttttccctaccctntaaattttttttcaccaatttattaactttcccctttntttcttcttacaaatatatgttnttggttactanganaaaagtgggaaagaagggtcttctgataattgttgata

SEQ ID NO: 5305 - DNA, 394 bp, Glycine max
  unsure (1)..(394): unsure at all n locations
ataaccggcctccataccananagtcaaagttatagatgctgttgttacaaaatatgaggctgacaatatggaacctgaaatccatgattgcttgatgctttctttcttgnggccttccatcgccattctgaacaaatntaaaatccttttctcagatgagaatgcagcaatagtcctatgattggtagtagcttccattgctaattgactaccctctctntgagcctttcttgctnntgcctgccatactttcatgagaatgttnnttgagtagaagcatacaatgatcaacggctgcattgcggtcataacaagagccaccctccatgtgacaattaaacttagtacaaaagccaagaaagccataacagaaacgttaactaacaatgacat

SEQ ID NO: 5306 - DNA, 300 bp, Glycine max
gatgtcttggttaacctgttaacccagctggccttgaatcaaaaataagtacctgtcgcacgactatgtggtttatgctcctctgccgaccaccatacagacctttgtccttctgtgtgcaagctggagcaactgaacaacctaaagcttatgctgcaaacatctacaatagacctcctcaacttcagcagctaaatacaccacaacgaaacaattatgacctctccagccacagatacaatcccagatggaggaatcaccctaatctcagatggtctagccctcaacaacaacaacagc

SEQ ID NO: 5307 - DNA, 644 bp, Glycine max
  unsure (1)..(644): unsure at all n locations
atgggaatttgatnccccagctgatangccgnctgaatgcantcnatgatcaccatctattangccncacctataatactcagctctgccgaattgtcttctcagtgaaaagatctatgtgggtccgaatagaagcanatttgatcatcctactatgacgactgagaaactggngcaaataaagaaggtgaggatgatggagaaacccatgctgtgactggcatttctgttccgccaaattttccaccaacccaacaatatctntactcagccaataacaaactntctccttacccaccacccagttatgcacataggccattcctaaatcaaccacaaagtctgtctaccgcactttcaatgacgaagaccacctttagcacaaacgcaaattacacgcaattaaataggaatgtnttgcagcaaaagcctcgttaattcaccccaataccagtggcctatgctgacttgctcccatatctacttgataattcaatggttgccataaccgtagccaagggtcatcaaccctcatttcttctagaatacgactcgaacgccacgtgtgttagtcacggagaagcancagcgcgtttcattgaacatttgttggctcttaagcgacaagagcaagtctacatatt

SEQ ID NO: 5308 - DNA, 439 bp, Glycine max
  unsure (1)..(439): unsure at all n locations
agcttcataatagtgatttattgagtntgtaacatccacactcccattattattaagtggctccatangagtagaatgggagaaggaagcatttccccaagccatgttttgcatgaagttgccttcactttgatgcatgnttttcaaagtatgatcacaagccctaatcttggcatccaccagagcaatgaaagccctcaattgctcctcttccatgtttctgaaacttggattccaagttggatacttgatgttggtgatctctntgtgaactttggaaatcttagcttcaacaatgctcttcctatcctcaacaaagtcttgaatactaagaggtctctcattcttctgagactcatacttttgaaggattgagtgtgccaacgcaagttctttgagacaagtcactggttcacatcacattgcatcatcatacaca

SEQ ID NO: 5309 - DNA, 344 bp, Glycine max
  unsure (1)..(344): unsure at all n locations
caacactttctgtgattggtttaaagatacaatctntgcagatgacaatgcttcataaacattaagaaagctagcagatgagcctaaaagaaatgttataacctggcaaggatacgacataaacaggtattcattttacacaaaagcacaagatgataaaagtacaatgcagaacagcggtgtcaccctaagggtngaatctcaacactctgcaagtgtcaatgacgccaatccctgtgtagctntcatcccttactttgngttcattgatgaaaattgngagcttaactatgtganattacgatatctattttcaaatgtaaatgggttgcagcaacaccggt

SEQ ID NO: 5310 - DNA, 371 bp, Glycine max
  unsure (1)..(371): unsure at all n locations
tctgagttcttacagagaaagctgagagaaacagaanaaaagaaaggaaaaataatgctttgctaatatgttaaatagaatctaatgagggaattctctttccaagggtttccccttcctacgagactgcaacagagcanatgcttagttcccaaatacaaacaaatattaatggctttccttcaaccgcttctactattntagtcaagttcttgctattacaactataaccaccttactaattctataacttcgtaaaccttattagaagcacattaagaacaaacaagaccctaagagctgtcatggttcttgagtaagaaaccaatcactggaacacatctagaagtcctcttaccagaacaactgga

SEQ ID NO: 5311 - DNA, 301 bp, Glycine max
ttatagttcttgccaaaacttgttatcataggaagttattgagagctagtttttaaaagttatttgataagtattaaaagattgaaagaaatagctaactgatacgactcttttttttcatttatctgatatccattgaaatataattatttttattaaataaaatctctatctctttgttgagcaagagaaatttgattattacatcttactatagaactataatatctctttatgcttaagtataattgtgatcttacttacatattgccatatcatatgtatctaaatattgacatta

SEQ ID NO: 5312 - DNA, 424 bp, Glycine max
  unsure (1)..(424): unsure at all n locations
cacaatgacaagttgccaatggcccttgagattgacaataattaactacttataatgcaaacattcatttaatgcatttgttaaaatttacttactgactcaagtaaggtcctaggtagatctctctttgtgattccttcacccatgtttcaatgtaatgttgacatgcatcacatttattctttgcattgtgtatggactaaagcccatggaattcgtacacgaaactatgacctaaccttatactcgattcatccataaacctattntgaagactacaaagtaaaattgttaatcatatatgtcataacgaatattaattattagttaatgaaagtacaccttcaaatagaaattacttacattatncacaactataatatagacatgttaaacatttgtcacctgatattatttcatttac

SEQ ID NO: 5313 - DNA, 311 bp, Glycine max
  unsure (1)..(311): unsure at all n locations
agctatatacacaagctaaactagagttagttgtaactaactataatactaaccagaaatagaaagttaacaactaagctaacataattagttgctaactaaggtctaaaatggacaataaagaatacaattgtnatagaacttgtctaatcctaatactatcaagaagcttgatctgataatacacctctttagcactgaacaaaagttngngatgttngttaagtttgacgagaatacccagcccatgattgtccatntcaagtcccagctctgatcttagtctcanatcccttgagcataacatacta

SEQ ID NO: 5314 - DNA, 389 bp, Glycine max
acctgtgagttatattatcaatcacgctttgattctgatatatacgattttctaagatagcatgaatactctgcaactaatgggatgtctacttgggtgagaagtacccatctgataagaattggacaaagaatctgcgttgtggactggtggtatattggtatgagtccaaaggaactcacaagcgctagcattcatttgactgatgattcgctttaacatacgaaagatttataatcagtgaatcttgaagtaccagattttggaccccagaattgtttagcacaagtctaataatatgactagtaaagtaattcatggttaagcaaacttacagctgagttgagtatgtgatgaaatatgaacagccagcctgagtttaaaggtgc

SEQ ID NO: 5315 - DNA, 385 bp, Glycine max
  unsure (1)..(385): unsure at all n locations
catcagctngaatgattgagtatggtagcatgaagtacacattccctggctggagttgtgtgtctccattcaatggcttngagcaagaggaaagaagctgaactgatgtacaaacaaagtgctttggaggggtgcctgtgactnggctcactgaaatcggattctcaaaatcctccacatagccactcagatgaaccaaacgaacattgttgattgtgaaggatggcttataagaaaaacaacctcccatgtngtgctttttctttgtaaatgatgcacaatgaaagggtattgtactaatgttgtagtatacttatgtatatgactatatcaattaatcaattaaccatatacaatagacaactatgatgtgattattgatgcg

SEQ ID NO: 5316 - DNA, 479 bp, Glycine max
  unsure (1)..(479): unsure at all n locations
agcttagaacaataaacttggccttctcttaattgtctttgggcttgtcgaccacgatcaacaaagtactttcggcacctactatatgttgacttgaccaacgctgttattggaatgctgcgacaatctttcaacaccttattgacacattctgataggttggttgtcatgtgaccatatcgtcgtccagatgtatcgtaagccatgctccatttttcctttgaaatgcgatcaatccatcttgctatggctggactcagttgacgaaattnttctaagttttgatcaaacacatgctngcaaggagtgtacgctgcatcaaatttgttatcatcaaaagttgtacgtagacatcaaactcaaattaaattaatgtataaaatcaaccttacccaatttcttgaacatctctntttnngttcgcgttgtgaatttgcgaatgaaattgctggctatgtgtcggacgcagtacacatgat

SEQ ID NO: 5317 - DNA, 387 bp, Glycine max
  unsure (1)..(387): unsure at all n locations
agaatgtgagaagggcacatcannataaacacantttcagaattgatttcttgcttcttttttttcttctttctgatcactaccatggctagaaagaangtgaatcttacatacatacccaatgactcaaagaggaagacaacattgaagaaaagaaagaatggtcagnngatggtttctctttacttcatatattantttgtacataaactgtgtattataaccttgtagcatgcatctntnnttttntcttaaaaaaacgtngtagcatgcatatttctgtgtatttattaaccttgagcatngcatcttnttttttntctaaannaaaacgttgtagcatgcatatnntaccattaataanagttcaatttcacatcactactc

SEQ ID NO: 5318 - DNA, 349 bp, Glycine max
gagcttctatggaggctgaatctttgagcttcaattatgtccttcaatggtgatattccaccatggagatgcagcggaaggcaaagaagaagaggagatgggagacaccatccactatggaataagccatggaagaaggagcttcaccaccaagaatgttccttatataagaagcttgaagaggataatttaatggaggaaaagaaagagagaaggggggagcacgaaattgaaggaataaaagagggagaaaagtggaactttgaagtgtgtctcataagaaacttcattcatcaaagtacaacaagtgttatacatgcttctatttatagactaagtagcttccttg

SEQ ID NO: 5319 - DNA, 417 bp, Glycine max
  unsure (1)..(417): unsure at all n locations
ttctgcactattaatctatntgaacaaaagtaaaatattcanaactataaagtgtgacaactatcaagttaaaagcgttgggaagtgtcctactaaatttctcttgctatataaaatgtgtntttctctatntaacgttatcctagtgttcttacactaagaaattactcanaccatgattcctcacatgaaggaacctaactctctntagcctttgttcttgattcctcaacaaacttgttctaaaagagttgcactaagtctatagtggtaaatggactagatcactacactccacttttagacatacagatttctagcttgctctatcaagttctaagggtgtaaagcattntcccaatactaaaagcctaactacacatacaaatgggtgatcaagctacaaacatgtgaaat

SEQ ID NO: 5320 - DNA, 367 bp, Glycine max
agggtgcccaaagctatgaaatctaccagatgtgaaccttcaatgtgagagggtgagcataaaatgaacatagtggttggtagttcaggaactccaagtttggctctcaaggttgttcgtgacaacaagaagaaaaaaatggataattattggatgaaatttccaatgagttgcaacaatacattctaaagattgttgatgtcacactggatgaaaattatggttacaaggcaattgcagctttgctaggccagtgtaaggaatcttggtctctcgttcaccaatatttgatttatgaacttctaatatgacactctctcttgttatgtctagacaattcaccatctactagacgacctatcatacc

SEQ ID NO: 5321 - DNA, 347 bp, Glycine max
  unsure (1)..(347): unsure at all n locations
tgaccatgacatgtgttttaataataatcaacaatcaatgatcaatcatctntgaatcatctatctntcaatctattttcagcatcatctctcaacatctgtcaatcaatctttcaatatctttctacagaattgtgtgattcatctctcttcatttttctaaaagttntttatcaacactatctcttccaagaaaagttctntgttcacaaacttatgttattcatctttatcattctcttcttcctttgccaaaagaacgaaggactaaccgcctgaattcttttgtgctctcttatccctacaaaagatcataggactaaccgcctgagaattcttttgattct

SEQ ID NO: 5322 - DNA, 458 bp, Glycine max
  unsure (1)..(458): unsure at all n locations
agcttcttagtttcagatgatgcagctgagtttgtagctacctcatgcactcctctaatgactatagcatcatttctggcgctaaacttctgggagttggaagccatcttctcaattaaatttctgacttcagcaggagtcatgtctccaagggctccaccactggcagcatctatcatacttctctccatattactgagtccttcataaaaatattggagaagcagctgctctgaaatctgatggtgagggcaactggcacatagtttttaaatctctcccagtattcatacaggctctctccactgagttatctaatacctaagatatccttcctgatggatgtggtcctagaagcagggaaaatttttttctaagaatactctctntaggtcatcccagctcgtgatggaccttggagcaaggtaatacaaccagtcctttgccactccctctaa

SEQ ID NO: 5323 - DNA, 444 bp, Glycine max
  unsure (1)..(444): unsure at all n locations
ctaatgtattgtgagatataatctcactccttggttgtttgccttgttggtgtttgngatgaaatttgtccttgtaagtgagtctttacaagatcaatggtgatgatgccgaaagagaggcttangccttcaccttattattnntcaatttatggttatatatgctctggtataatataacaaccacatggattnttattccttagtctatgtttcaatttaaaattagtttcccttatattttgattcacatgatntttatggcctctggggtgtcaagaattatntaatgttggattatgttatttactaacttncgtttgaaagcttatgaaaataccatatgtaatgctctnttaccatgaaagaagctntngaaaatntgtacattcttttattaatnttacgacaacatatnntanaatatattgagtgatgtgtgta

SEQ ID NO: 5324 - DNA, 457 bp, Glycine max
  unsure (1)..(457): unsure at all n locations
agctntcataagtganatctaatgcaaccatctttcttagagtcctctcacgaggtggaggttgagccatattcttagtataaaaattagtagtggaatgctcaaaatcagaatattcagaatcactagcaacaaaatactcagaatgctcaaaatgcacaaaatgatcaagatgcacactatgcctaactaatctatgaaaggttctatctattttaggatcaaagggttgtaaatcgcctggattgcccctagtcatgcactatatgcagcaaataatgtgtttcccaacaagcacctaacaagggggtaaaactacagctatactcaaatgatatcaaaatgagctgagattttgtgaggaacaccctatnatcatgaaaagatagcacaaaaattttcagacaaaaattcanagtctaaatatgaaaactacctaagcaaagtttataaaaat

SEQ ID NO: 5325 - DNA, 365 bp, Glycine max
  unsure (1)..(365): unsure at all n locations
aatgataaataattcaccgacattgtgttgaatctcgttaatcattgtaaaacaaaatctaatcgatcgttcacgctataatcccggctaaaccaaataaagaaatataataataaaataatcaagatatcttgaacaaaataataataaaataatcaagagaaatcaatcgaacgtttntctttgaaagtttccttgaatgaattgactaataaccaaagtgaaactaaagctaanatcaactcacaaatcaagctgtgtccgcagaaatcactaaagaaccatttaaggtccaatgccttanacgatcgtctttgctttatcggtaacatgaccattcaaagcataaataacatgttacttac

SEQ ID NO: 5326 - DNA, 455 bp, Glycine max
  unsure (1)..(455): unsure at all n locations
agcttctgtgaggccgaagaacgtgcctgtgctgttactanacatcgaccctgatcccacgttaatttatccgaatctttcattcctcctctcctgctgatatagaattcacatgcataggtgccagctngcacactcttctgaaccaatgagggctggcacttacactagagatgtgtgtgtgcaagtggggagagtgataatatctgagttagagaaacgtctaaacttctactttgataaggctcctacttcctatacatgccaccattaccatatatatggcactgaacaatttccacctctctttgtttntactcttcaggggggtaagtggttaactactntctatcgcaacaaacatactactctgtcatctaaaactggcaatagctagntcccgttggcttttctgtgatgacccaatgcatacacaacataatattataccattc

SEQ ID NO: 5327 - DNA, 562 bp, Glycine max
  unsure (1)..(562): unsure at all n locations
gacattatcgccttgagnnncttgaanccatgattagcgcccttaganaccnccgctntanctaggaaacacaactactaatttatattattataaagggattattcttatgtatgttctatcttaataatacacatagtgtgcttaatcagttaagctaaactatcttcatcaccacacattaatagntagccttacttctactagcctataattaagaagtgggaaagataaataataatctattaaattatattgaagcactctatattgaaagcgccatacataatatgtatgaaagtatgttagaaaggtttcatattgctttatacagctcttagtgtgaaataaaaagaatctacatgaaccctgtaaattcaattttaaatattcagcttctgtatttaaaaaacatatacaacttcttctatgaaacattaacttttgaaaaaagagacattatagttagctataaggatactgtatctatattttgaaaattaatctgataatttcaagaatttatactcttagttaaaggtttatattaagattaataatg

SEQ ID NO: 5328 - DNA, 409 bp, Glycine max
  unsure (1)..(409): unsure at all n locations
agcnnttgcggattggtcttcgccagtgaaatgtatctaagtggatctgaaaagaggcaaatttaatcatcctgcttagacgaatgagaaaactggggcaaataaagagggtgaggatgagggagaaacccatgatgtgactgccattcctatacggccaagtttcccaccaaacccaacaatgtcattactcagtcaataacaaaccacctccttacccaccacccagttatccacaaaggccatccctaaatcaaccacaaagcctgtctaccgcacttccaatgacgaagaccacctttagcacaaaccaaaaaaaacaccaaccaagaaatgatatttgcagcgaanagcctgtaggattcaccccaaattccggtgtcatatgctaactcgctcccatatctac

SEQ ID NO: 5329 - DNA, 376 bp, Glycine max
  unsure (1)..(376): unsure at all n locations
agtacctgacatctcaaacaaacaaatcagacgtaacaagacaattatagttgctgtttgaatacctcacccactcaagtgtatcacacaattatggcttttctctaatgaaacactcttgcctcttaccactctaattccncttgagttcttatgcaattcaagagattatggccacaacaaagaacaattcaccaatatgtgtaaggtaaggctagacaaggaaaaggttaaccaagaaaaaggctaacaatgtttttatgcacatatgaaggaaatataatncagaatttatgaattcagtaacaatccttcatgcaaccaatatattaccttaaagagtgtgttttttaagttcttcaagcatgaaccattc

SEQ ID NO: 5330 - DNA, 377 bp, Glycine max
  unsure (1)..(377): unsure at all n locations
agcttgacttacttggactgatcatattctcttatgaaatgatgatcaatgtcaatgtgctgggatcattcatgatgagcagggattgaagcaagacttatagcagatttattatcacaaaataacattacagagggcacatcaacttcaaagtgaagaagtaacttgggtaaccaaacaatttcactagtaacagaagacaagacacgatattcagcttcagtggatgaatttgaaacagtgggttgtttcttagaacgccaagaaagaaggatatttcccaaaaagacacaaaagccagaagtggatcttctggtatcaacacagctggcccaatcagcatccgcanaggcagtgaggctgagagagttctgagc

SEQ ID NO: 5331 - DNA, 393 bp, Glycine max
  unsure (1)..(393): unsure at all n locations
tatatgcgtattataagtaacaataacatatttcctgattaatttttcagaagcagaattgcagtcaggcttcataaaaatagaaccaaataggatagtcacaccaccattcaaacatgaatgtaagagacaaaaatcgcaaatctatttcgtccataaataaatattcatttttccaaacaagaaacaacattgaaggaatataaattaaaaaaaaatccatcaatctcacataacacaacanatccaacgaagaacctatcaacaacataaacaataaaacaaataatccctaaacaaacctaaaccgaagatcctcgcaaccgaacgtgaaacaactcgatccgaatacacaaaacagaattaatgaacgcagaggggtcaacgcacatg

SEQ ID NO: 5332 - DNA, 441 bp, Glycine max
  unsure (1)..(441): unsure at all n locations
agcttgtactttaattgatattcatgatatatatattaanattcctaaatttcataattagggcttatacattagtaagagaaattatatcattcttggagaatcataaatttcataacacatgctctgataccacatgtgagaatccttaagggtttcctagactattaatgattggaaacaacaggatcttgacacctatggttctcacatacaatcaataaacaaccatagataatgatgtgtacctttctccataggaagacatgtacatttctctttggaacttctcttcggtgcactttgattctccttgaaagagaagagatataagatttacttcctatgtctttcttgctgtctctctcattcggatggcatgggtggagagaacctttctgtcagaagggaccctatttaacttatggtttcaacccttta

SEQ ID NO: 5333 - DNA, 250 bp, Glycine max
  unsure (1)..(250): unsure at all n locations
gaaatcgagatttacacatgctgttcgctatgtgtcntcagtgtagcgtacgtgatacttacaatcataattagcccatccaatgcgttgaccagcaagatcatagacaaatagtattgtcttttaatacgacgtctgcagcataagagtgcaatgtttgcagtatcataatcttgaagataaacataacatgatatatatctgataacaataatttacatacaagaacaatattttttataattgatat

SEQ ID NO: 5334 - DNA, 224 bp, Glycine max
gctggaatcggacctcagtgtgaacagtcgtgttcatttgaatgtctcgagagcttatgttcttcagattcgtgcgaatatgtatgcgactcgcccaaggcagacatccgagagaaacgtgatgagcatttagatgtgtcaagagctttcgatgtgggatgtcgaccatctcgagatgagaggcgtctgaattggagattcttggctaaagttatgaccacttg

SEQ ID NO: 5335 - DNA, 498 bp, Glycine max
  unsure (1)..(498): unsure at all n locations
ctgcggcatgcaagcttctcctttttctttttganatcacaggtcttataacaattgttcgtgttttctgatgaagatattgattctgctgcagaggcattgaatgatgtacgtataattgctcctttatgtccttcattcttttaattgtcgtgttagttttgcctgatttgtaaagcaagggaactccaataattntgtttggaaggggaaccaccttttttgttaatttgtgcttgtcccgtgttccaattacagattactagtagaaatagcggtggtcttttgactgataatatttctccagttatggatgaggtttttttttttttaactntcgtccatctctttcaaaatgaaggtgcctaatttagttacagtcagggaattaaattgttaggttactattaatttaatctgcacttatttttctattggaaagcagtaagaacattgattgcatgatgttatnggtacttattctgactgtngtattct

SEQ ID NO: 5336 - DNA, 327 bp, Glycine max
  unsure (1)..(327): unsure at all n locations
ctttctcctcttctaccatagttggccttctataaaagaatgttcctatntatcttccttctccgtcacctttactgtaaacaatgcactattgttgccaacatttgaaaaagaatataacttatgatggtaacgactaaagttgtntgttttttaaagtaacatctcaactcatttcattaataatgacatcttcaatacaagatgatatgtaatcataatcttggtgactaacattaaattgcgtcgtccttgctaatagatgagcggaaattaacttgtctcctaaactaagctatctcagagtttaacagaaaaatacatgta

SEQ ID NO: 5337 - DNA, 424 bp, Glycine max
  unsure (1)..(424): unsure at all n locations
cagcatgcaagcttttcatgccctcgtcatcagaggactacacgttctcgccatctatagggtgcacgccttcaccgtcagagggctacacatcctcgccatcaaaggactacacgtcctcgccatcagagggctgcacaccttcacctatataggactacatgtcctggccttcagagggctgcatgccctcaccatcagaggactgcacgttctcgccatcaaagatctgcacgacctcacctttagaaggctacatgccctcaccctcagaggactacatgtccaaacctttggaggactacacgtcctttggatcacaaggctgcacgttctcaccatcacaaggctgcatgccctcgccattagaggactctacgttctcgccataaatggcatgccctcaccttaanaggactacaca

SEQ ID NO: 5338 - DNA, 499 bp, Glycine max
  unsure (1)..(499): unsure at all n locations
gattgattacgctgcttcgatgaattctggtgataggaaccctgngccaaatggagggaataagaaggagggagaaacccatgttgtggatgccattcctacatggccaaatttcccattagcctaataatatcaatactcaaccaatatcagtccttctcattacccactattagtcgcttcatacgactaacttttgtatagaaatcattntccaaagcttgtatagttccncaatttatggttattttgtagtcaagaacactcaatcatccataaaggcaacccctaaatcagccacaaagcctgcctgccgcacattcgataccaaacaccacccttaacacanaccanaacaccaaccagggaanggaatntccagaaaagaagcctgtagaatcaccccaattcggtgtcgatgctaactactccatattactcataatgaatggagcctaatccagcaagatcacacctcatttctgagatcaactgatgc

SEQ ID NO: 5339 - DNA, 390 bp, Glycine max
  unsure (1)..(390): unsure at all n locations
acaatacctcagtcagacaagtataacttaagatatgaagtggtctttctaaggtcttcatcataaaactaacaccaaacttagaatattnttaagcattctaattataagaacttaatctaacactcttctaatatcaatataataattacaccacttttataattatataaaaatatcattgaacataatataatataataagaataatacataatgtcgcaacctacccttcggcgggagggcgacgcgagactcgcgggatgcgtgttccacgaaaggaatacgcgcggagtcgccaccaacgtttatttgaggaaaacatnggaaaaaccgggaaagacgcgatctacgaacttttaagtgaaagggtcgggagttgtatttacg

SEQ ID NO: 5340 - DNA, 504 bp, Glycine max
  unsure (1)..(504): unsure at all n locations
ctctatatatgtgtgtctgatntcgaanagaaaaaaagagatagatattctaagagaacttaattgccaaatgctctctcaacaactcttgagagaatacttgcaaatctattgagaattcatccagaaacttcaaattgtattatcatctctaaaagagagaaattcctctaggatcttcaatttgtatcatccactctaaagtatagaaatctttctatttatctcagaaagttagttgtaatcaagagactggttgtctcttggattgagagaatngtagtcaagagattggttgtctcttggagaatctntgaacacaagggtgagggatctcaaggtgtgttcaaagtctgtaaaggatttatagagatagtggaaaatctcaagtgcttgaggactggacgtatgcaccggaagtggccgaccaatataattgagttgcattcttcttccttatctattatttatacattgatgtgcttgctgttaagacatataaat

SEQ ID NO: 5341 - DNA, 410 bp, Glycine max
  unsure (1)..(410): unsure at all n locations
agctntgcggatntggtcttcaccggcgaaaggatcaaagtgggttttgaaagaggtaaatctgatcatcctgccttgataaatgcaaaaactggggcaaatgaagagggtgagaatgaaggagaaacccatgctgcaactgtcgttcctacatggaaaatcccgcaccagctcaacaacatcattactcaacccatatcaacccttctcattacccaccacccagtcatccacaaaggccatccctaaatcaaccacaaagcctgtctaccgcactttcaatgatgaacatcacctttagcacaaaccaaaacaccaaccaagaaagggaatttgtagcaaaaagcctatatgattcaccccacattctggtgtcatatgctaacttgctcccatatctacttgataat

SEQ ID NO: 5342 - DNA, 305 bp, Glycine max
  unsure (1)..(305): unsure at all n locations
atttactgtgtgtcttcaaagaaatattggatgcctaatctaccctaagggggttcgagtaagtgaacgctgacccttagagagccatacttatgtcttccctaanacaaaaagtacaggttagctcgcctgggcaagcacccnctgtacgagatgagttaaaagagagggaggggtacgttttcttcacccaaaactcccccccccccactttcanaaacgctaaagctacgggacttgccatttttgcgcccccaagccaccttttgttgcattntgctntcgttttgatactcctactcact

SEQ ID NO: 5343 - DNA, 384 bp, Glycine max
  unsure (1)..(384): unsure at all n locations
agcttcattctacacctgatttagangatgagttatctgcacaaaagagaaagcttcttgattatgagggagctaacaaaaaatatcatgcaggtggaccttcttctagtagttctgacttgcagcagcctcctatccctcttccattttcacctagagcaattccaaacaaaaagatggaagaagtggataaggagatcttggagaccttcagganagtagaggtgaacatacctctgctagatgccatcaagaaaattccaagatatgccaagtttctaaaggagttgtgcacccacaaaaggaggctcataggcaatgaaaggattagcatgggcagaaatgtgtcagcattgataggtaaatctgttcctcacattcctg

SEQ ID NO: 5344 - DNA, 431 bp, Glycine max
  unsure (1)..(431): unsure at all n locations
agcttcatgatgatgaatcatgtatgattcaagttgttntgatgatgacaaanagcccanaagaatgatgtcaagattgagtcaacaagttcaagatcaagattaaagaaaagacatcaagaaaaatcaagattcaagattcaaaagaagaaaccaaaaagcaacaagtcaagacttcacaagggaagtattgaaaaagatttttcaaacaccaaacatagcataattttgttttacaagaaaagtttttccaaatttttctaagttaccagagtatttactctctggtaatcgattaccaattacctataatcgattaccagtcgtaaagattgatttcaaaagcttttaactgaatntgcaacgttccaaatgttntttaaatgatgtaatcgattacaatatattggtaatcgattaccagtgtatct

SEQ ID NO: 5345 - DNA, 504 bp, Glycine max
  unsure (1)..(504): unsure at all n locations
cgcttagatagcatgaaaaagctccttcgataatatatatgtatgtaaatatgtagcatgnaaatgccttgaaaatgtngaatgaaatgccttgcaaaatgttgaataaaaagccttgcaaaatgttgaataaatgccttgcaaaatatgaatatatatatagcatgaaaatgccttgcatgaagtgccttacaaagtgnttggatgggtagcgtaaaagtgtttttcanaatatgtgtatntgtgagtaggtagcaaaagaagccttcaaaanatgtgtatatatataggatgtagcatganaagggttgtgaaanaatatgtaaatggaaatgtgtcgtanaatgcttctcacannaattttatgtgtgcanatgcgtatgtgtcatanaatagcacgcgcccaatatgattattatatagagtgcatgttacactccnccatatgaatgttgttgctcttgttgaatgatggatattctgtaactaacttcaatgtgtctc

SEQ ID NO: 5346 - DNA, 458 bp, Glycine max
  unsure (1)..(458): unsure at all n locations
agctntanataggctctgatatcgcgacactgttgctagcgccaccgtcgcgcttagcgcgagtaagtgaaattgggcttagcgccaatctcgagcttaccctggctgaaggcacctgctacacttagcgcactgatctcacgcttagcgcgcgactntgatactgatgctctgccagattctcctttgcgctaagcattctgaagctgcgcttagcggtggatatgcgcttagcccagttgctgagcttagcccaactactacattttgcaattcaaaacttagcctttntttcacctgaaaatgcatagatttcatcattaaattcaatggaaatgttctagagacagcattaaccataaaacaagatttatttacaaaaatcactacaaaataaccataaattgggggaactatacaaacttggaaaatgatttctatacanaagttagtcgtat

SEQ ID NO: 5347 - DNA, 297 bp, Glycine max
  unsure (1)..(297): unsure at all n locations
atggagatgcagcggaagacaaatgagaagaggtgagaggaggcaccatccattatggaataagccatagaagaaggagcttcaccaccaagatgagccttggataagaagctcggaaggatgcttcaatggagganaagaaagagggagagaaagagagaggggggagcacgaaattgatggaataatagagggagagaagtggaactttgaagtatgtctcacaagactctcattcatcaaagttacaacaagtgttacacattgcttctattatagactatgtagcttccttga

SEQ ID NO: 5348 - DNA, 88 bp, Glycine max
  unsure (1)..(88): unsure at all n locations
ttgatcatctcctatgctcatgggggaaccattgatcttatttatgatgnaaaggacggattaatatttagaaatggaaattgatgat

SEQ ID NO: 5349 - DNA, 398 bp, Glycine max
  unsure (1)..(398): unsure at all n locations
agctntcctcccattatattctcaagatcactatacataaggtaagaagtaccacttcctcataagtcatacccaatgacacaaagtatatgattcctcctaaantaattattaatgcagagatgataaagtaataagccccctaagcaaaatttttaaacaaacccctaaatcaaactcaggaacccaaagcaaataaatgcatcttccttttctacattactctctaaggccctgcatgaagatgtattntactctgattcagaattgttctttgcatcaactgaaagtaaagatccaatccacacgacccagaagagagaatatgaaaaaanaaaaatcgagttttcagtctcgaattcgcataactattagaagagnagttccggacattacat

SEQ ID NO: 5350 - DNA, 239 bp, Glycine max
  unsure (1)..(239): unsure at all n locations
ttaatgcgtgtttggtttcaatacttaatgtcaatatctgcttaggatgtacatgacagtgtgaaagcgttaatagatgcagcttagacaagaaaggtagcagcagaggatattctttctgcactgtctatcattgataaagcaaaagatgatccttctgcctcttttgagacccttggtggaaagggaatccccaggaggacctggatgctaacttttactgctganggtaacatcta

SEQ ID NO: 5351 - DNA, 268 bp, Glycine max
gcttggagcatataatctatatgttccagctgaggggggatgttagagtaatatgtatgttttgtatatgttatattatctttcttatattgcactattcctctgctgtactatgggattcagtctgcaccctatctagtctcatcttgtcatgtacttgcttcttctttatatatacaatagtctcagctgagtgagacatgttaagttctccataatatttagttcattgtcttaactcgaagaaacatgatattatatgcagata

SEQ ID NO: 5352 - DNA, 420 bp, Glycine max
  unsure (1)..(420): unsure at all n locations
ggatccttaagcacctgcggctgcaagctttaaaatatttcgcctctttcttctaatangagatcagggacagttnggttgtgataatacagttttaagggtgttttccaatgtttggaatttattggattaatgtctttttccgatactgaacctatttcaattgttttttctaaattttggtcactatcttcattaatgaaattaaattaattggaggtgcttcttgttaccatttttgaagttccctttgaaggttggggagtttcaaggatgactctaagtaaactatcaagcttgtttaataattcactattattgtcacctactccttctataacggacttgttttccttagttccctaatnttttgttatccttgtcactaatcttgaaaggtttgaataaaggtttttctat

SEQ ID NO: 5353 - DNA, 280 bp, Glycine max
  unsure (1)..(280): unsure at all n locations
gatgtttntcaagatactagactcatctggcacttcaatattcaaacttcttgcatgatcgagaagagaggggaaagcaacttcaaacccgataggcatatgttctgcattttcatcctgaagcttgtacaaattctccttataaaatgacattcctgttacatatgaatgcatatatacacaatagaaacattaaattaacataaacgtgctgataaagaaataacatttatatcataatactctactatttcccggtcctcttcttttactatggaat

SEQ ID NO: 5354 - DNA, 458 bp, Glycine max
  unsure (1)..(458): unsure at all n locations
agcttgtgcatccaatactctgatgaggatgtcctatatgttcttaatactagactgatnccattgcttccaaagtttcatggccttgcgggtgaagacccacacaagcatctgaaagaattccatattgtctgctccaccatgaaaccaccagatgtccaggaggatcacatatttctgaaggcctttcctcattctttagagggagtgacaaaggaatgtctatattaccttgctccaaggtccatcacgagctgggatgacctaaagagagtattcttagataaatgtttccctgcttccaggaccatgaccatcagaaaagatatttcaggcattagacaactcagtggagaaagcctatataaatactgngagatatttaaaaaattatgtgctagttgccctcaccaccagatttcagagcagcttctcctccaatatttttatgatagatg

SEQ ID NO: 5355 - DNA, 404 bp, Glycine max
  unsure (1)..(404): unsure at all n locations
taaaagagtctctcaaagtcactgggccctattacaatactctggcccaaaacgaaattaacactgaacaacatataataaaattgcgaaatttcctaattaactaaggtaagcgctgcttaatatgccctcttcaagtccataaccaaaatccggattaagcccaatggttcattaattcctgaaattagattaagaacatcaaattagctaaatgagcccaaataatataacttgctgattaattgacaattaagactaatcagtaattaatatgatgcaaaaagggtntagaacatagaagaatatgatggcacatcacatggtatgggctgggtacaccaaacatanaaatcaactatacgaggcctatactctggtgtgtcacctgtcactatgaaaat

SEQ ID NO: 5356 - DNA, 463 bp, Glycine max
  unsure (1)..(463): unsure at all n locations
agcttttattgtaatcttgaaattcaggacagtactctaatttctgaaattnntgggataaaaatggtcattgaccagtcccttttccatgacttaaccaaattacccagtgacggtgtaccatttgaaggtacactgaatgacgactggaaatttgatttctctgcccatgatgcccgccagttggtttgcaccaacaatgcggatatgaccggacgtcttcttgacgggtcattggcttttgaaagccgcatccttcactatttaattgtgcgtattttgcttccacggccttccaaccttgcccaggtttctgagaaagatctaattatcatgtgggcctttcatacagggcgtcaacttgactgggcacacttagtcagatatcgcatgcataaggcattgcgattaaatgctccactaccatatccacagcttgtcactctcttttntcaccattttc

SEQ ID NO: 5357 - DNA, 468 bp, Glycine max
  unsure (1)..(468): unsure at all n locations
gaacttgcacatttatgatgttcttcatgtgctttgactgattcaacaagtctttacaagccttcattgcattgttatgtggtgagcaaggactatctccaatgtgattaagaaatgcacnaattttccagcattaacctttctacatgatctaaatccttgtctattaagacatgtgatccaaaaatgatcactttgcttngtactgaatagatagcataacaaacaataaactctatcattagatggggaatactctagcccagaaagaaaacatttaaaccaagtacattggaaatgccttggatgtntctctntacanaaaggataatattgtagttctatttgatatggaccccatttgatataagctcttcgaacttcatctcttttgatcatcagatattcatatatgtgaagggcatttctcaggtcacattccaaagaaataacatcaaattcatcaac

SEQ ID NO: 5358 - DNA, 414 bp, Glycine max
  unsure (1)..(414): unsure at all n locations
gtaagaatctgttntagaatttctaacatgtacacaattctttagttggatattccatgaaggtttagaatcatcaacagcatcacagaggtttatgtgctttctttctacattgtgcaaaaggcatgactggttattttcttttatccatattgctgtctgaacttgtcgtgcaatgagtctccagcacattgctgtagtcaaattcatcaacttatcccaaattacaggataatctttgtcttttctataagcagggggagctgaataaacaaagtacccattgaagcgaagaaggcgattcaactccttcagtaaaatcccatctgcaaaaaacagaataaattgacaataaacaagtctgtcagaataacgtgccagttcatgaatcactagaacaaaataaacaagtct

SEQ ID NO: 5359 - DNA, 396 bp, Glycine max
  unsure (1)..(396): unsure at all n locations
gaaagagggagagaagagagagggggagcacganattgaaggaagaaaaatggagagaagtntaactttgatttgtgtctcacaagactctcattcatcaaagttacaacaagtgttacacatgcntttatttatagactaggtagcttccttgagaagctntcttgagaaaacttccttgaaaagcttctttgagaatacttccttgagaagctagagcttagctacacatacccctctcataacttagctcacctccttgagaagctctcttaagaagattcctaaagaagctagagtntagctacacacacctctcntaatagctaagtcacctncttgagatgataagctagagcttagctacacaccccctaaatagctaagctcacccat

SEQ ID NO: 5360 - DNA, 324 bp, Glycine max
  unsure (1)..(324): unsure at all n locations
tatgattagtattatagcttcgacctttgttcattntttatgactagtacaaaaggttcgacctttttttgttctacaatgactntatcgttttgtatacgaagctaatggatttttcttagggaggtttgtgttatgtatcattttgctcgaacaatccgttttttcatttccatgttggtcattgttttctatctgcttgactcgatacattagtcaacctcattgtcaatcttgctttgcaccctgatttgtttttttttttttttggaatcctatctttcatacaccctcttcatgttttctattatgttgcatgttggc

SEQ ID NO: 5361 - DNA, 298 bp, Glycine max
  unsure (1)..(298): unsure at all n locations
ttgtagcgggcagcgaactcaatcatatatatagccagactaaggcaagatctagatggattaaggaaagggatngcaactctaggtattttcactcgacagtaaataagaagcaatgttacaatatgcttagaggagtgtccgttggtgggtgctgggtagatgagccaagcagaattaaagaggaaaccagactcttcttcataaggaaatttgaggaaccaaaatgggagagaccgacgctggatggtgtcagattcacgtctattgatcagtaacatagtgaactgttggtggc

SEQ ID NO: 5362 - DNA, 326 bp, Glycine max
ctctaaattattcatagggcttgtgcattatcaaaactacttgaatcaacatgattcatcatcatgaagcttgcctctacacaacgtgaaaagagagtggaagaaataagccaagatgaaagagaggaagacagaataaagatcatgaaagaaatgacaagagacaaacatgccttctatagtaatcatgaatcttgcaagaggttaagtgaagaacttagtgactactatagagggcttcatagatcacatactaaacatcactcccaaagaagagaaaaggatagaatgcctcaagaggtttacatttacctcctatatttcat

SEQ ID NO: 5363 - DNA, 608 bp, Glycine max
  unsure (1)..(608): unsure at all n locations
tgaatgtccatcgttagcgcctgatctagctccatgtgatcttctacactgagttttgaagaccagtctctattctgttctaaccaaatggattaaatgatgcatggttatgtgtgctgccctacgatgccacaaccatgaatcatctattntacttaccaagcaactcaacttatgaaacgatgtgtttcaacatttaacatatagatattacctattctctgacctatatggacaactntactggatatggcttcattataagacaacagtattctggtgaactatatgttgaagcctctatcacaacgctgactaatggctaggagggtatgctttagtccatccacatataacacagtacttatgtgagttgtgtgtcgattacctatgattccttctgccattatattcctctggtaatggctngcaacgtgacgtatgctncatcttctgacacacagttcaaagagtatggactttgtcaggtgtcatgtgcctagagtcntcactatccatgtccataatgaatctcttgcgttaggacacctactaggcaaatcattatacggagggggacgcgcattaggtggatctactcgctcatg

SEQ ID NO: 5364 - DNA, 338 bp, Glycine max
  unsure (1)..(338): unsure at all n locations
agcttgtcttgactgaagatgtatcagtggacataagcactgctcaatatgatgcatgggctgtaaggatcttggctgcagatatgattcttcaggtttttttctattaatttccaccttgtttctgttatgttgatgatgcttaagataagcgcatgattgtaaatctgataagatgttgtttccacagttctatggatcctctgatgggaacattggcattattatgtggatcatttgtctccttattgaagaaaatgcatangttgagatttcttcgtcatttacgcacgttggtccactttcttgaattttggaccttattaatgttcaacaat

SEQ ID NO: 5365 - DNA, 307 bp, Glycine max
  unsure (1)..(307): unsure at all n locations
tgagtgaaagccagaaagctatgttgaggactatttgtccatagtgagtttgggcagtgttggctttcttgctctgttcctattacattactactctctgtttcagctccattctttctttctttctttatttctttatccctntctattttgtgaggggaattatgtttntatttatctaattatgtatacgatgatgtcaatagcaaccctaccctatgatagggagctngggatgctntctatgtcttgagaaggctgaaagccgcggagaatggcgaactggctntgttgattngatgtatct

SEQ ID NO: 5366 - DNA, 378 bp, Glycine max
agcttactaaccttcttcacttatatgaacattgtaattcacataaatatatattagcaataaaagacatcccagggtaagtgactgccttttgttttctacaagtagataggatctaagtctaataaatttataaaatagaaacaagtgcaaagaaaattgtcttccataaatcatcaccaatgaaataaaaccattttgaggtaacaaataaggcaagtcaagtttgtaactttgaaactcaagttcaaagaccaaaatcaactcaacagcaaataacaacagttataattttgggacaatattgttataaacttcaaccacatgttctacacttcttcggggaaaagataatacaacttcctgaacttacttctc

SEQ ID NO: 5367 - DNA, 389 bp, Glycine max
  unsure (1)..(389): unsure at all n locations
gagctttctttgtcattagagcttgtcacacaaggtaattaaaccctgagaaaaaaatgcataaacggacacccttttgcgatgtgaagttaaagattcttgcttttgtttctgggtgtgttgtntttagtttnttagcancttttttagatgtgggtttgatcttttttgaatttgatgcagcaatngaggcgtgtagacagcaattgtgtggaacggttgcggagtacaatttgaatgcccaatcggagtgttcggagcagacatcaactgatggtacctgttntgaggagttcattattcctataaagaaaaaggcatctcaagcatctgctgaagaagatgatgatgaagaacattctcatatacacacaataaccaccactgat

SEQ ID NO: 5368 - DNA, 386 bp, Glycine max
  unsure (1)..(386): unsure at all n locations
agcttctccttttcttttctaaaattacaggttctataacagttgaatgtgtttactgatgaagatattgattctgctgcagaggcgttgaatgatgtatgtataattgctcttttatgcgcttcattcttttaattgtcacgtgctagtttttcctgatttgtaaaacaagggaactccaataattttgtttggaagggaaccatcctttttcgttaatttgtgcttctccgtgtaccaattacagattactagtagaatagctattggtcttttgactgataatatttctccagttatagatgaggttctgtttattntaattttactctcggccactctttcaaaatgaatgtgctcaatttagttactgtcagggaattaaa

SEQ ID NO: 5369 - DNA, 230 bp, Glycine max
accttcttcttcgacttatgtctggtgaccactccactgtctctgacggcggcaccatccaccacctccaggagcaacatcacccaccactgacattccccccatgtcacgagaacgcaaaaatcaaatcttaaacagagtcaataacatataacagatatcaaagactaaaactgcaacactgatctcatcaaattcaggccacacaatattccaatgagaactcaagt

SEQ ID NO: 5370 - DNA, 325 bp, Glycine max
  unsure (1)..(325): unsure at all n locations
catgcaaccttggctgggcagcagttttgatntcgtgatgtattatagaatatgacgcattgtaatcgattacaggcccaataagccttctggtaatcgattacagaatgttgtaatcgattacaggctgcctgttcatgtgtaatcgattacactggatggtaatcgattaccagagcctatcctaggctagtttctaagagaatatctatatttatgctcaagtacattctatatgactaattttcactactaatacactatagtcaatcattcaattactatatacacaagaaatcatatattctatcataaaaacaagaat

SEQ ID NO: 5371 - DNA, 355 bp, Glycine max
  unsure (1)..(355): unsure at all n locations
tgggtctaaatagaggcaagtctgatcatcatgccttgataaatgcannaaaacttgggcaaatgaagagggtgagaatgagggagaagcccatgctgtgactgccattcctatacagccaagtattccaccaacccaacaatgtcattactcagccaacccaccacccagttatccataaaggccatccctagatcaaccacaaagcctgtctaccacacaaccaatgctaaacaccacctttagcacgaaccaaatcaccaaccacaaaggaatgttgcagcaaaaggcctgtagaattcatcccaattctggtgtcctatgctgacttgctcccatatacactcgataatgc

SEQ ID NO: 5372 - DNA, 369 bp, Glycine max
  unsure (1)..(369): unsure at all n locations
agcttcagcagcntagttntcaatttcttgaataatgctttcttgtgcttctttggatttagtctttcgattcttctcagaggaaatgtctgtcaccaaatgccttatttcgttgattatttcatcagtaaatgcagatatagattcctcttgacctgcctcttcagtcacttccttctgcacaccttctgattgatcttctctgttgccagtaattatgctttcagaacttgggagagggatatataagtcatctcccatgtcatttatccaagtactgtcatttaccttaagaacaaacagaaatccagaaaattcttctctcacagagagttgtactgaacttccctctccactgtctcttgactg

SEQ ID NO: 5373 - DNA, 301 bp, Glycine max
  unsure (1)..(301): unsure at all n locations
ctcgaatctccaaatgcttatcaatcccaatgtctgtccttggtgaatcttgcttctccacaagctcttcaaacccaaggatcgccctcggtgagtctcgtntccctaaaggctctcataatccaaggtccatccttagtgagtctcgcatctccaaaggctcattaaacccaangtctgtccttggtgagtctcacttctccaaatgctcgtaaaacccaacgattatccttggtgagtctcgcacgcttatcaaactcaatgtccgcccttggtgagtctcacttctccaaaggctcac

SEQ ID NO: 5374 - DNA, 127 bp, Glycine max
gactgcgtaggcatctccttcctttttcctcgcgcccactactggggctcttctgtatgtgttggtggccgtattggcagcatattcaaacttgccttctcgtagcccggattcaatcctctctccg

SEQ ID NO: 5375 - DNA, 613 bp, Glycine max
  unsure (1)..(613): unsure at all n locations
attgctcgcccttgnannnncgtggngnccnctgaattggangtcctgnattangtcanacnannntannactaagctccactcgcgcatgtatncatcatanatatgaaagtctttatacacagtttctctagttctagtcaacacactgactgaacacacactntttcactgcatgaagcatgaaaaatatatacacataagaaaattcagcagcgacattagaaattgcagtgcattaacagatacccattgtgcgtttgaaatgaatatatgttcatagtcttttaaacgtgtttgaatgtcaactgttgaagtttgattctctcctaataaagattaataaatgattaattaatatttaccggtaagataaaataaatatatggtcatatgtctttaaacgtgctgttgaaatgaatatatgttcataatcttcttgtgcatgcattcaagcacatcgtcagagctgtgtgtgaaagatccagcactctatgtccagtgtgatccaacagactcaatcaatctcaacttcttatttattgtaatgtgtgagccttgttatctgcttatcatcttgaagaatacaggtcatgaatgatgatagctggcn

SEQ ID NO: 5376 - DNA, 341 bp, Glycine max
  unsure (1)..(341): unsure at all n locations
agcttctgggctcactggatgaacacgctaagttcccacctggcggcttagtgcgtgcttgaatttctagaanaataggatgaacgcgctaagtgcccctgctgcgctaagcacgttaatgagtctgatgcattattgggttgaatttcatgcatgggctaaccgcgcagtctcgcactaagccccactaagtcttttaatctgcatgcatggacttagcacccagtttcgcactaagccccagtgtcaggggtgggcttagcatgcttcctcgctctaagccccagtagtgcattggcgctaagcacccactggcagcttagcgcctaattaattntcat

SEQ ID NO: 5377 - DNA, 503 bp, Glycine max
  unsure (1)..(503): unsure at all n locations
cgatgcatncgatatggcgtcattggangtatcatggatggcgtaataattcacacgcgagggttagattggctctccaaaattgaaagtatcgatgaggagaacttctaagctccggaggaagatgaagaagtccaagctctaaaattggagctatggaaggcaaggctcgccaaggagaaattcaaatcagctgctacacacattctgaaggagtgcaccgagttacaagaggaaaacacggccactgcaaaagccctttaacatgaaaccaaaagggcccgctaggaggaatatggtcgagagaaattctaggacattgtggtgttgtacatgagctcaactccaagagaggagnagatcggcacngggcatgcatatcttaaaatgagtaattgttcgcacgtcaaatgagttggctacacttgaaccacgacaacatcttcttctaggcatcaagaaagnaacatctgtgcctaacaaactatgagatttccagtgcg

SEQ ID NO: 5378 - DNA, 389 bp, Glycine max
  unsure (1)..(389): unsure at all n locations
tggtcatacgttntcacacagatgtccaattcggggtcataatatatcgagacgctcgaaattgaacaacggaagctctcgagaaaatcgaatggtcataacttttcaaacgaatgttcgattcggggacataactcatctagacgctcgaaattgaacaatggatgctctcgagaaattcgaatggtcataagttttcacacggatgtccgattcgtggacatattatatcgagacgctcgaaattgaacaacggaagctcccgagaaatttgaatggtcataacatttcactcggatgcccgatctggaacataatatatcgagacgctctgaaatgaacaacggaagctctcgagataatcgaatggtcataacttttcacacgga

SEQ ID NO: 5379 - DNA, 584 bp, Glycine max
  unsure (1)..(584): unsure at all n locations
tgatatgacgcagtattagcgcacttagatctattcagangtcaacnagcaacttacacagcagcccaagagactcatataatgatgcacagaccttagttgcgtatgttaaaatattgtatgacctagtgaatgtgcaaattgcatagaagaatgataactatgccaatctagccctaaagataaggaaggacgtggtacttgaacccggtgatgatcttggacatttgaggacacatgttatccaagaaggagggaatgatgagaatcattaaacagtgctaatacattctatatgctcaagtttataatgacgaatgccctagtgtataatgacataactccttattggtaatgatcaaggctcaatctgataatgatgatagtcctgatgcaataccttttaagactttgattgttcttgaagcaagataatctgagcgccatgataatatggcttctatttatactcttatttatgaataatggccacattgttaaatgcctatgtaattttatattattcgtgctcactatactttggacgatgttaataataaatgcttgctgtttgttaatagttg

SEQ ID NO: 5380 - DNA, 449 bp, Glycine max
  unsure (1)..(449): unsure at all n locations
aagcntgtaggcgtaattgtttaagtccttattatagtccttctatgggacctatctcgatgggtcgatccacaaccccacaagcattgagcttgtaaggcgtaagtgcttaagtgtattgatagagttgaacctatgaatttatcttggttagatggtacaatttcctaccaagaacttagcatgtaggagtaagtgcttaagtactgtcataagctatgtctcaaagacttacctcggtcaaataatccatagtacaacaagtacttatctagataggcataagtgcttaagctntcttgatcaattgttccttagtaacatgagatttactttgatgagtttgacaccctaccccaacatgcatataaatgaaaaaaaaacatacaatgcggaatctaattaaagtcaatttcattcaataaaatngtaagtaaatccacatggat

SEQ ID NO: 5381 - DNA, 349 bp, Glycine max
  unsure (1)..(349): unsure at all n locations
ctggagatgaagatgattggataagtaccagtggatntgtgttnttcatangatacacaaccttcacttggatgtcaaaaaagtagccgatattcactcttttgactcgtgaggcagaatacgtagcagctacttcatgtgtntgtcatgcaatctagcataagaatntattaaaagagttgggcatgtcacaagaagagttgaccaagatctttgtgtgataataagtagtcattgctctagcaaggaatccagtgttctatgatcgaagcaagcatattgataccccttaccactacataagggagtgcatagcaagaaaggatgtacatgcagaatatgtgaagtc

SEQ ID NO: 5382 - DNA, 358 bp, Glycine max
tggaagaaaaactggaagaaaaaggtttgggtttaggtgtatatttctcttcatagagtttggccaacgaaactgttctaaagagtgatgtacgtgattgcacaatgacatcccttctgatatcaggttataatcctgccacaaagcaatccaatagagcttcttgtgtaattccttgtactcgattagctaaagccgtgaactgcacgtaatatgactgaactgaaccaagttgagtgagtttaaacaactgagatctatgacattcatacggtgaggggccaaattctgtctctaaggttcgcgtagaagcaatccatgttttgaatgaattttcacgagtcatcatttggtacca

SEQ ID NO: 5383 - DNA, 650 bp, Glycine max
  unsure (1)..(650): unsure at all n locations
agtcaatgatgcncaattgatcgccatctattangcgactctatacaatactcaatgctagctgatattngacccttgaggtgtgcttgagtatctnntgtgaaataaatntctgagttntataagtttattgaaagccccgaagactcataagcaccaaggatatcatgcaaaatgtttgcttcttttattgttgcccttgcaaataaaaacaattntcagaaaaataaaagtgtgaggagaggagctcccctatacactntgacaccatgaaatctctctttctcttgaatntcctaagtagtaaagtaaggccctccatacataaaataaagagataagggacactgngtcctcctgcttaagtcnttctcctggtaagataggtccaacaccttctccattaaccaacacatgaaaatcaatcgaattcacacacatcattatccaagccacccattataacaccctgacaaanattacaacttaggttaatagagaaaaatctatgttgtcttttgtgcttgtgtgtatntaattgcaatgaatagatactntaantattgattntngtgctctatatatatatatatacatatatatatatatatatatatatatatatatatatttagtggaaataatgtgtg

SEQ ID NO: 5384 - DNA, 422 bp, Glycine max
  unsure (1)..(422): unsure at all n locations
agctntgactngagtcatcaaaagattataaatatgtgaccatggcatgagtatcaatcatcaatcatctttgaatcatctatctttctatcttttttcaacatcatctctcaaacatctttcaatcaatctttcaatatctttctacagaattgtctgattcatttctcttcatctttctaaaagtttttgatcaacactttctcttccaagaaaagttctttgttcaaaaacttgggttattcatctttttcattctcttctccctttgccaaaagaacgaaggactaaccgcctgaattcttttgtgtctctncttctccttacaaaagattcnaggactaaccgcctaagaattcttttgattcttggccttcccttaagcaaaatatttcaaaggactaaccgcctgagatatcttt

SEQ ID NO: 5385 - DNA, 624 bp, Glycine max
  unsure (1)..(624): unsure at all n locations
atggatattgtacgcagtcattangcgctgtatacactactaagctcgtagtggagtgtcattntcagcttcagaaatatctgagtacatatatatatatatatatatatatatatatatatatatatatatatatatatatatatatatatgtgtacctgcacatccatctgtgaggttnttttcacatagnttaatggaattatattatctttattattcacaccccttgtttacactaaactagagataggccattttcaatctcttttgttgatggacaagcacacgctagtgtcattacaattaatgattaagagattaatatgcaaatatacttaataagagatataatatgtattatatatactatatctaattcgacacctcttatgttttaatgttataatagcacccacaacgcatgtcatgagaaatatatatatatatatgtctgtagcaaggtatctacacacgtacgcacacttcactattgagtataacgctttattttgcatatagagagcatgtggcatcgaattttaagaaccacattatctnncctatatatacataaccttgnactatatattcatcagctcaagagaacaatcagatataccn

SEQ ID NO: 5386 - DNA, 483 bp, Glycine max
  unsure (1)..(483): unsure at all n locations
tcttaagccacctgcggcatgcaagctntctgctagatatcatcttgtttgtgcgacgaccatttccatctacagaaaactgatcatagtcgctcaaggaaacacagaaaatgaccaatccaacatcctcaaacatttctagccacttgcaattttctgctagccctctcgcatgtattgtaattagttgatacctgtaatcaaggagaacaaagcatggtacaggttagcaacattttagcagttgttgcaattggatcaatcagggctacccagaaaacttctcacatataacattaggcacaaatattttcacccacctaactaaagaattatgtagatcagcagtgtcaacagtttcctcgggagctggttgaggaaatgaaaactctacagaagccatcccattggatgaagtaactccttcagcatagaggatatctaaatccganggttcatactcagtcctcagtatctcaacag

SEQ ID NO: 5387 - DNA, 304 bp, Glycine max
  unsure (1)..(304): unsure at all n locations
cttggagctgnngttttctgctgatgacattnntttctctgtaaatgaaatgtatgatatggntnntgttttcttcannggtttttctgtgtgggttactggacagacagatccatgagtgtgagaagggtgggaatgatntaagggagagtgggaaacactgaaaantttgcgactgaaagattggacggatgcagaatgtgtgggggataatacccacagttgttgtggtagtgttgaagggtggtgaaatggacttgacttgcactaccaattgganaaaaagaaagggaagatgagaatg

SEQ ID NO: 5388 - DNA, 548 bp, Glycine max
  unsure (1)..(548): unsure at all n locations
ttgaacatcgatancgcgacctgaacgcgatccttagcgtcaccctcggcatgcattcttgttcagagccttattttgttccgactattggacctacctagattggacgctacatgccatacgggcgcctatcgttgaaggtccacgtgcctaagtgtagttatcaagttggaccgatggggtgaacttggctatatggtccaatctcctaccatgatcttagcatgtatgagtcagtgcttaaatactgtcataagctatgcctcaaagacttacctcgggcaaataatccatagcacaacacagtacttcatctagatagtgcatatagatgctctatagctcttctctgatcacatctgcttcctttagtaacactgagattnacatctgactgagtttgacaccctaccccaacttgcctataaatgatacaacaacatattactgcggaatctaattacagtcaattccattcataacattgttatttaattacatggtgtaaaggacctcattctctctactgctaccaatgatacctatcc

SEQ ID NO: 5389 - DNA, 591 bp, Glycine max
  unsure (1)..(591): unsure at all n locations
agggcatgtgcnaatgaacnccgtcgtangcatgatcgcatcgttttgcgcactatagaaactcaagcttcaaccttngaccatcatttctgctccatatcgcgaaaggagggcattttctgtgtcgtgaagtgcgtggctacgagtgggacttctaacattcancgttgggtggacttctntctcctttgattctcgagggtattggtttctggcgagatatgatgggtagtcttgctatgttactgctgagtgatgcatattngtgaagacatttgttgaaagcttgttgaaattgcttatggagagatgttacagatgaatggtagagcttacctacgtgtacaaagtgagaatgtgattgtatgagtgcgaaaagagtgaggctttctatagtggaatgttanctctgaatatttgtggaaatggaggtaaagagagttatcctagctcgcatgtcattatgactatgagaaacttgactggctgggagagaactatgaccaatgaccacatcattttatggaaatatgggtgagatcaatttgatcgcgatttagctacatcgtttactactaattaattggctct

SEQ ID NO: 5390 - DNA, 363 bp, Glycine max
  unsure (1)..(363): unsure at all n locations
tgagaagagaagatgaaagatagaagaaatacatgtagtggggatgtctcctccacctctagaaaccccacaatctctcanaatctcatccaaagcttgataagatggcttcttcttcaagctcagctctctctcagtctctccacagccaaaaactctaaaaaaaaaactcaactccctttagaaatcgtgatttcatcttanataggcaatcctgtcggtggacgcacgcttagtggaagatgagctcgcttagcacatgtaagtgacttctgccttagcgccaatcacactcactcagcctgaaggtgaanacggcgcgcttagcaatttggctttcgctcagcacctctatacagctca

SEQ ID NO: 5391 - DNA, 204 bp, Glycine max
  unsure (1)..(204): unsure at all n locations
agctnttaatggatttcatatccattatgggtggcatatgaattgcaatatacactngacgaaattacttattaattnttaagtggggatgtntgcataagatcctagcgagatatctagagcactcatgaatattgggcacacgcatggcctagtagcacaacacaacaataatgtcaagaattgtgtgggtgactgtgattg

SEQ ID NO: 5392 - DNA, 335 bp, Glycine max
  unsure (1)..(335): unsure at all n locations
tgatgctacacaactgcatatcttctatagtggttngaaacttcanaccataatgatccttgatgcctcagctggaggcactatgatgtccaagagtccagaggaagctattgtcatcattgactccatagcaactagtgatcatcaaagtcatcatgatagagctccgactcanagaaaaggtataatggagctggacactcatagtgcaattctagctcanaacaaaatcttgacacaacacattgaggccttaacaaagcagataggccaacttcctcagcaatatcaccaaggtggaccacanaanacatatcaagctcaccaagttcaac

SEQ ID NO: 5393 - DNA, 407 bp, Glycine max
  unsure (1)..(407): unsure at all n locations
agcttaaaagggcttcctgatctcgacgtcgcgctaagagtgagtatgtgaatttgagcttagcgccaatctcgcgctaagcctggaaagtgactgatgactcgcttagctagctgataacgcgctaagcgcgtgcttgcgtagcagatgcctttctagattcccatttactcgctaagcgtgctggtgctgagcttagccattgatgcatgctaagcgcattgagctcgcttagcgtgatgactcctttggcacttcttcaaaataactcatttttgcctaaaattaaagaaaatttaacattaattccatgtaaagaggcttctactgagcagagatcaaaacaaagcaattttatttacaatcctaccaaaaagaaccataaattgggagatntatatacattt

SEQ ID NO: 5394 - DNA, 334 bp, Glycine max
  unsure (1)..(334): unsure at all n locations
gcattcattcaagggcaacagtttanagacctgcatcttcattccatcagtttcctgatgaatctttgagtgaggcattagaaagattccgtagcttgctgcggaaaactcccactcatgtggtttcagagcctatacagctgaacatcttcattgatgggttacggccgcaatcaaagcagntactcgacgtttatgcaagaggaagaattaagttgaagaaacctaaagaagccatggacttaattgaaaatgtggctgccagtgaccatgcaattntgcatgatagagttcatattcctaccaagaagagtttattagagctttcatcaca

SEQ ID NO: 5395 - DNA, 372 bp, Glycine max
  unsure (1)..(372): unsure at all n locations
agcttcatatggagccatgccgacggtagaatgtaaactatngttataagtgaactctatcaatggaagaaaactctcccagctttccttctgctctaagatacatgctcttaaaaggtcctccaatgactgaatggttcgttcagtttggccatcagtctgaagatagtaggctgaactcagtctaagcttggttcccaacactctgttcaagctctcccaaaatctagaggtaaatctaggatctctatcagatactatgctagatggcacaccatgcagcctacaacctcacttatatacaaggtggtcaacttctccaggaaaatctaatattaatgggaatgaagtgagcaaacttagtgaatctgt

SEQ ID NO: 5396 - DNA, 434 bp, Glycine max
  unsure (1)..(434): unsure at all n locations
ctgctctagctcntttaggcttgtgattcctangctcttgaccttgacttgatagaacctctntntaagtgaaggctntngacttgatcccatgntttactaaagtgaaacaaaacccagcgcgaatcataactccgacatctatcatgggtggaatggatgaatgcttgaagaaatgcatatgatacaaatgcaatntatgaacacgggagcccgggaaattgtctccttcttagatacaacgtcttggggtaacacagtgcccaacgtatgtatntaagaaggtgacacggaccttccgttggttttcaaagagaggggattaagacgggacccacgcatgatgcatatgcganaggtacaacacggngatgtacatagtacgacaatattcacaaacaaatataagcataaggggtactaacacttatgca

SEQ ID NO: 5397 - DNA, 444 bp, Glycine max
  unsure (1)..(444): unsure at all n locations
agctntggaaaatgggttctatacaaaagatagtcgtataaagtgactaacaagctcccccagatttacaatnttgcttttcctcaagcaaagaaagaacaattcacttgtcctcaagtgacaaagacagtggctaatcaaaagaaaatggtgtttgattcattaaggacatcaaccatatgaactgaataccatggaatgcttaaatcaattacttctcacaagcatgcagttntttcaaagataagagcacaagtattagattcatagctgaaataagctagtaagcatgacagaaatcatggaaggatcatcaaccaaaatctcacagtcattgtttcactcaaactcaagtgtttaggcttattccatcataaacaaccaacacaagttccaacctttgcatttcatctcctatcatacagtaatgaacacacaaaaatg

SEQ ID NO: 5398 - DNA, 348 bp, Glycine max
  unsure (1)..(348): unsure at all n locations
tcttagtctcagatgatgcagctgagnttgtagctacctcatgcactcctctaatgactatagcatcatttctggcgctaaactgctgggagttggaagccatcttctcaattaaatttctggctttagcaggagtcatgtctccaagggctccaccactggcagcatctatcatacttctctccatattactgagtccttcataanaatattggagaagaagctgctccgaaatctgatggtgagggcaactggcacactagtnttaaatcgctcccagtactcatacaggctctcttcactgagttgtctaatacctgagatatctntcctgatggctgtggtcct

SEQ ID NO: 5399 - DNA, 249 bp, Glycine max
tctctcaagtctcaatcaaattatatcagatgttcagatcaagagaaattatttattcatctgcgagattatgaacatacagcacccatctggcaaaaactaaatgaacaaaaaggaatacatggcatggaatcatgaagcttggaaatttaatttcatcaaaaccaagacagactctacatctgagaaaaattacaggactcactctgtttgaagattatgaaccaaaccaccggttatgtgggaaca

SEQ ID NO: 5400 - DNA, 613 bp, Glycine max
  unsure (1)..(613): unsure at all n locations
ctgacangcactcagnnnncnctgatgacacctgnattgatcgccattgcatnangccgacacacaaaaaactcaagcttgaggactntgtgttcaagaatacccactgttttgcttgtagatatctagtcantatatactcaattgtaagcttgaaagacttgttgaaataaaagaatacttgtgacctaattctggttatcttggtgtaactcaataatgaatgttgtcttatcgtggagatgaactactataataaatatctatgtttcgatctctctaattgtctatcttattatattgtttaagactatgttggtctctaaaatgtactcattctataagtcttaaacattactgtctaaaagctctttcagaacatttactaaagcacattctcttataacaaatcattttgtattactgttaaatataatncaatctcatgactagggattaatgataatgtccaataatcaacttattttaatagataaaatatattttcctgcttatatatattaagaagttgaaattgcgccttcggatcttttcatcctcgaaatataatgtgttgttcttcgtctacacttagttcgacgaattgagctct

SEQ ID NO: 5401 - DNA, 526 bp, Glycine max
  unsure (1)..(526): unsure at all n locations
atgacccttgagccgcgactgtgacctacgctgctgcagctttgaaggaagagagagaccactcacatctcataggatggtcttgaaacaagatttagctgcttgctcaaaggccaacagaaacttgtttcagcgttatgcgagacagagaccaacatcgtagctatcgtcagcgagtaccacgaagaactaaatctagccactggccgtgagctcgtagtggcggacgagtattccccagtgtacgctcaaaaggatgctacaggaagggtgatcgacgcgttacatctttaggcgacaatgngnanagacctgattgctcttaccttgaacgagagtcaagagcttccctgattgttagcgatgtcaaagcaatggcggacacctactccgctctcgaagagaatcacagacgtataatctattgtcaacatacgacacacttgatggcccatagaattacaaatcgcttagaagctntgactgcgccccacatcttagcttaatatcactttcggagtgtatn

SEQ ID NO: 5402 - DNA, 600 bp, Glycine max
  unsure (1)..(600): unsure at all n locations
cggctggggaattgatgcgnccagtcgaatangtcactgcantccanctactattgatctccacgtataagtctacatgaactcatatttattatctgagaatactacacacagcctactagaaattctcggtctatttcaaatatgacattaactctaaactgtagacaacacctgagaagcatgagaacgagaaaatacaaaattaatagtctactccctgctacgctaaatatgtacttacttaagttcatcaattcacgctaattagacaaatgttcaattcatagggttcacactcgatacaagaacacatccaattcatagcaatatctcattgcgacatcaattggttcatctaacgtatataactcacactgactattataaggatagaataanaaattcaataacaccccatacgcattgtattgagctctaggatccatcacatgttatacttatctcaattggaataactatcgcttactcgatgaggcttcagcatcttgttcaattggcattttgggcttctaagctcattctgtgtctttaggtccagcggttaagagagatgataaagcaaatccaggtctcgcg

SEQ ID NO: 5403 - DNA, 336 bp, Glycine max
  unsure (1)..(336): unsure at all n locations
cttcacaatatagtcttccctaaaaagtgtttaatctcatttaacttctctaaaatctgattctaatttatccaaacaagtcaattagataacttctgttgcggntagttggagttggttattaattctgttcttttccctccatcatattcagtgtacatactatatattcacatagaaatcaatgaaacatgtgttctgcgaaatttccacttctcttaatctcagtctcaatagcaagagaataatattcttaatttttggtcagcccgagagttatcattttagggtgtcagtcttacacattatctgcaaatataatctgcagtattaact

SEQ ID NO: 5404 - DNA, 267 bp, Glycine max
  unsure (1)..(267): unsure at all n locations
tagcttaaaagtaaagtcccgagaacatactttaatacaagtaacagagtttaagtatttatggcccttcatacagaacggcagagaaattgaggaagatgtaaaccacaggattcaagcaggtagatgaatnggaggagtgcttcaggtgttatctatgactaaaaagtatcactcaagcttaaaaactntatcacagttaaaaaacctgcaatattgtatgagactaaacatngngcattaaaaagccaacaacggaataagctc

SEQ ID NO: 5405 - DNA, 382 bp, Glycine max
  unsure (1)..(382): unsure at all n locations
tactaaacatgttttattcaaacaatcacaagcaatctaacttaactaaatgcaaggaaaacagaatttaaaagggttgggttgcctcccaataaacgcttctttaacgtcattatgcttgacgcaaaagtctttgtcagctcggatcaatcttggttctctcctttagaaccttctattcgctctccttcacctctagacaaacattctggtccagcaatgtcctttattcatcaaatagctcanagctaatcttttggccttcaatacccatttctagcttcttctttcccatgtctactacacagcttgcagtagccatatatggacgtcccaaaattaatggaatatatgtatcttcctctatgtccattaccacaaa

SEQ ID NO: 5406 - DNA, 347 bp, Glycine max
  unsure (1)..(347): unsure at all n locations
gagagaatgagaatgacgaatgaacccatgctntgactntcgtttctacatggccaaatntcccaccaactcaacaatatcaatactcagccaatattagcccttctcattacctaccaccctatcaaccaagaacactcaatcatccataaaggccacccctaaatcagccacaaagccctcctgccacacatctaataccaaacaccacccttaacacaaactataacactaaccggngaaggaattgtccagaaaaaaagcctgtagaaatcaccccaattctggtgtncgatgctaantntgctccttatctactcaataatgcaatggtagtcgtaatccca

SEQ ID NO: 5407 - DNA, 550 bp, Glycine max
tctcatcattattactaactctgtctaattttaattttatgtaacgaaccttgaccattgtgaacgtcataaccacagctgctgcaaccgtaaaaggtttgaataacgtattgtagatatgtctcataacatgttcgagcacttacggtgcatagatgaattgaaagattccactcctggaacttattctcgtgcagaccgaagaacatcacagaacgattgaagaacggtgataaatcttctcgaaataccttactgaaacattttcgaagccgttccagaacctctgcttgaaaagagggaggtggttgtcacgcaacttgcccaagctagttaaggtcttcacacttaaaggcaccgacttcctttggaacccttaagaacgtccaagtgggcctcggttctattagcactccctttatcatcgaatacacccgctcttgtggtttctaagagattcattgctgaccgctcgaaatttgccgatttgcaatgaacctgttgtctttcggacgttgtaaatttatgggtactccacaagtccgcttcg

SEQ ID NO: 5408 - DNA, 262 bp, Glycine max
  unsure (1)..(262): unsure at all n locations
tggcagaggaatggagaatgaggaaaggtgattggagatgccacttcaacgagaagatgagtcaagaacttaaaggtagaagaagatgagtggagggaaagggagagaatgggcacacaatttatgcctcacatgaggtttgaactctgaagtgtaatttctaatatgatcaaagttgataaaatgcacacacaaggcctctatttaagcctaagtgtcacacanaattggagggaaatctgaatntcaattcaaatttcgc

SEQ ID NO: 5409 - DNA, 374 bp, Glycine max
  unsure (1)..(374): unsure at all n locations
taagaacacagtattagtagtgttgtatcagtggagaacagccaaccccttattgtagccccacaaccacttattggagccccacagtatgaattattgcatgaataacaacgatacttatagaagaaaanccttgatataagatatcatcaacaaggaaatcacaaaactttaaagaagacaggatgaaacgctgaaattcaaacaaataaatcaagtaaaaaaataatcctaataatgaaaggttacctaataggtgatttctagcatgttatatcacttgcgctctgcaagagtttattagtgtggtggcgaaaactactaggaatatgattgacttctttcattcataaaatgtggtcttgaatatcatg

SEQ ID NO: 5410 - DNA, 420 bp, Glycine max
  unsure (1)..(420): unsure at all n locations
cacacacacacacacacacatatatatatatatatatgtgtgtgtatgtatatgacttgntaaaataaattangaattaatagttcaaataataaaattaaattgaacgaaattaatatattaagaatcaacaataaatactntcaatgaatttgtagattaattatctatgaactctctttaatctgaaataatatagttcgaattaatatatacatgttctgtgccatgtaaacattaataatgtgtgatgtttatatgattgatgacgtgtgatcacatgttgtgttgcgattataacattgtaatcgagattgagtgttcgtgataaattgagtatgtgttgaatcgtaagatacatgtgtatcgagatttcttacacattgagttgtgagctattaactgtacaatcacacaact

SEQ ID NO: 5411 - DNA, 412 bp, Glycine max
  unsure (1)..(412): unsure at all n locations
agcttctataatatccagtgctgcaaaaaccacatctcacaaataagcgttgtaaagtacataccacaatataaaatttattgatattagttcaataatgtacatcaattntttttattttttttgaagaagcaataatatgcatcctgttaagtgttaacaacagtcaatgacaaaatatgtggttgagtagactcattttccatttattaatctgatgcaaaaccctttcctaaaaatccacataatgcgcatatttgcaattctgtgaccatgtgactgccaagtatngctaattatttttatggtcaaattntcccctttaagtttaactattgaaaaactatattcaacaaatggacaataaaccaatatatcatgctcacctggatngtatacttcaggttcgata

SEQ ID NO: 5412 - DNA, 292 bp, Glycine max
  unsure (1)..(292): unsure at all n locations
agcttagatcaggcatccgagtaaacgttattgtcgtncgaatatgcatgggcattccatttcaacttttaatcgtcatgatatattacgggcctcaatcggacatgcgagtcaaaactttagcccgtcagaattcacccgagtctttcatgttaaattttgagcgtcgcgatatgttactcggcttattctaagatcccgaggaaaagttatggtcgtttgtatttgcgatgggcttcaattttatcctaagagcatctcgatatattatgagcttcaattgggaatccga

SEQ ID NO: 5413 - DNA, 351 bp, Glycine max
  unsure (1)..(351): unsure at all n locations
ataatatatcgagatgctcttaggatataaatcaagcccatcgcatatacaaacggccataacattttctctcgatcttcgaataacgaaagtaacctatcgcgacgctcataatntaacatggaagactcgggtgaattccgacgggctaatagtttgactcggatgtccaattgaggcccataatatatcatcgtccctcgatagtagtaatggactgaccacgcatattctgacagccataacgtttgactcggattcccgatggaagctcataatatatcgagacgctcttaggataaaaatgaagcccatctgaaatacaaacggacataacttttcctctggaac

SEQ ID NO: 5414 - DNA, 588 bp, Glycine max
  unsure (1)..(588): unsure at all n locations
actactcacacttcagatgactgttctngctntgcttctattatgtctatctttatttcatatagcatacatattannatgtgatcctctcttganatcgatcgtgtacaccgagacctatagagtccacctgcggcatgcgacntctagatcatccttacttaccctaactatatactaaaccactaacaataacgtatcctatccttctaccccctgatcatgctcgtggcttctctccacatgccttacgcatatcattctgcatggtttctgtctgagcctttcatgatacggtggggtggaacttctcttttgtggttaactactctgtgttctgcacctctcttgctattagacaccctatcttcatattatccgtaacaacatagttcataaggttacgaaatctggagcaaacatcattgcacaaccttattacttaagtgttgcattacgaagtacacacggattacgtcaggaactccatctctaaaataggtatacctatcagattcactcctaacgtgcgcggtcaacccttggaccatcgatcatttccatctttttggtacaagcaatacacat

SEQ ID NO: 5415 - DNA, 402 bp, Glycine max
gcttcaccggatgacaccgatcgaacattgcctaaccgacgtcatgcaaatatcgttcacggattgaattgaaaactcgttaggcgacatctgtcgcgaagtagcgaccgatatttttcagccgacattgcacaattcttattagaaaagctcgctggtcgataatggtctttttaccgcagagtaagtattcttggtttggtgttgcatacaaaagttgcaatgtacttcggctaaagttttcgtgcgagttcaaccgacattttgtttcggccagtataacattagcccacctctgcataacaaatagttgctaaccgtcttcatgcatatttcattcaacgattgaatagaaaactcactatccgccaacggtcgtgatatagtcccgactgatatttt

SEQ ID NO: 5416 - DNA, 265 bp, Glycine max
  unsure (1)..(265): unsure at all n locations
ttgtagacctcgatcggtcatctttccaggccgaagtcgactcgtcattttntcgatccatctcggtgaataatatattgttgccgagatgggctaatgttntcctggccgaataaatgggaaaatgccagattctgccgaaacgaagagtctgttgggctcgcacaaaaatacctagccgacctacatattaaatttgttatgcaacaccaaaacaagaaaacttcctgtgccgtagatataaaacattacatgacagcgagcg

SEQ ID NO: 5417 - DNA, 636 bp, Glycine max
  unsure (1)..(636): unsure at all n locations
tctcaccgtacgtcatcgccttttangtcacgaagtntanctacataacnctcttncannagcgaatgtgcacatgatcgccatcgannnncactngnngcganntttgatagccatcgatnangcgcactatnnatacacaagctcaataatctattatggtttaaacaagcctgccgtcagggtctctgagttcatgggataactacttcattagggtttgaggaaaacctcaatgatcaatgcatgtatcactaggtcaatgaaagaaaacaaatgtttgctcgttgtatatgtagatgattatatagtttgcaccaatgatcgggatacgctacatgaagtgaatacatatatcatctatatatttgacatgaaggatatggaggatgcatcttatgtcattcacactaagatgcatatagatatatctccatgcattttaagtctccacacaaaactatatacaataatttggataattaaatgaagagtgtaccaagtgtgcctcattggaaggtgatagttaattgaccatgctcaagatgcttgaagaaacaaacaaacattctatgcttcatgtgaacctatgtgctaatactcacgctgcatgtttgcatgatgttgagattaacg

SEQ ID NO: 5418 - DNA, 425 bp, Glycine max
  unsure (1)..(425): unsure at all n locations
agcttgactctgcaccactccacccatgaaagacaaaaccaccctcaccacaccactctacatcactccacccatgtttttctgaaccccactatttctttcatgatggccgctcgagcagtgacctcctgctccctcttncgcccttcctcttcgcccctcttttcctccgccctgcgtttcttccctatcgctcccgcggccccccttccttctctctccgctatggggcccacacccagacgcgctccgtccaaagccttctcaacagcctcatggaagagcttcgagccgcgcgcaaacgccgccagaagcgcgtctncgccgccgcttccaatacccttcaacttattcctcttccacctccctaactacgcttattgcatatcttcattctgaatcgtgcatatctatatgctgttctg

SEQ ID NO: 5419 - DNA, 327 bp, Glycine max
  unsure (1)..(327): unsure at all n locations
agaagtgaaattgagaatgagggtaatttggtgcaaactctcacctcacacaagtctataacatcaatntaaacttgctcaaactggatttactcctaanattccaccaaatcaaaatttgactcctcaacaccccaatttaccctagaaatgactctttgttcactttggtcaattgttgttctctctagcacagcccacactttctcataagtcctaaatgacatttcaagctatgagtaactcactgtaaacctcaaatccactaaatccagatttgccttccactctaaaaactcactctcgttttttactcataacaccata

SEQ ID NO: 5420 - DNA, 456 bp, Glycine max
  unsure (1)..(456): unsure at all n locations
ccggatcttaagtcacctgcggcatgcaagcttcttggggcatgcagggttctacaggagattcatcaaggatntttcaaagattgctagacccctaagcaacctgttgaataaagatgtggccttcaagtttgatgacgaatgttcaacagcatttcagacactgaaagacaagcttactactgcacctgtgatgattgcacctgactggagtaaagactntgagctgatgtgcgatgccagtgattatgccataggagcagtccttggacagagacacgataaggtatttcatgctatttattatgctagcagggtcctgaatgaagcacagttgaattatgccaccacagagaaggaaatgctagctgttgtctttgccttggagaagttcagatcatacttgataggatcgaanggtcaccatttcacagatcatgctgccatcaagcacct

SEQ ID NO: 5421 - DNA, 369 bp, Glycine max
  unsure (1)..(369): unsure at all n locations
agctcgcctgngcgagctgagctcgcctgtgctatctgggcggcaaccacctnccctattttgctataaataggggaggaagtgaagaagaaaagggntcagccctttaggcacttctctctctttcgaatttgcttggaaaaatcgtttacgtgaagaaaatctaagccgaggcgcttccgaaacgtttccgtaacgttntccgtgaagaatttcgcgaaggtttcgacccgtcttcgacgttcttcattcgttcttcgatcttcaacgggtaaataccttgaaccaagcttttcgattcattctatgtacccacggtggcccacattgtgttttgtgtaattatattccccgttcatttacttttta

SEQ ID NO: 5422 - DNA, 184 bp, Glycine max
accaatcccgacccaacctcggcatagtcagtcaatgagaacctgtgatgttcctaagcaggcaagctcctggcagtcaacagaataaaggaactaagaccacaaagcaaggaggcttgtgtggtggctggccaactgtgaactctgattgatatatgggatatggcctctagtaatcgattac

SEQ ID NO: 5423 - DNA, 410 bp, Glycine max
  unsure (1)..(410): unsure at all n locations
agctnggttcaactgagtagccatctgccccatctatattgtcanactcttaatggaggctcttgtctcttgctgaaattgcatattctggatggtcatttgcctcactaactcctctaaagaaggttgagaaggggcctgacttgcttgttgtctctgtcgctattgctgcattggaggaggaacatatggcctgcttaaactatcaacattctataaatgagggacaaattgttgttgctgctgttgtcgttgtggacgatttgcccatctcagatttggatgattcctccaacctggattgtatttgttgcttgaaagattactaatattctgctgcttgttggttttttgttgacggggtctattataaatgtttgcagcataagcttcaggttgctcattgactc

SEQ ID NO: 5424 - DNA, 300 bp, Glycine max
  unsure (1)..(300): unsure at all n locations
tgaacttttgagcaaatctttcgcatgtngcacctgtggctattcatangttgcatgtctattattcngctgacaacccaaagttaatttgcaattagactacaattaatcatgatttgggataattaggtgatatttttcattatgtatatacaagtatctaatttggttgggtattattttaaaactattgtaaacattactattggggatcatgaatgcacgggctattgttattaatatcttaaaaataatactttaatgataattgaataaacacatacttttataccgttatac

SEQ ID NO: 5425 - DNA, 343 bp, Glycine max
  unsure (1)..(343): unsure at all n locations
agaaatatgtacaatattcaataaatataaataggagaaagaaaataaaccttcataccaagagaatatgacttagaagcggacagatgaggccagataaactccacactatgggaaacacctacaaataaaanaatcacattatagcaagatagagagttatagttgctccccttgttgaatgatattacagagatattttaanagtaaattanaatgaaagggcaactcacagttatgagaaggatcccataatgcagaagaaagtagcttcagcccgatgtatgtttggtatatgttcctgtagctcactgcanaaaagaacaagagaggcactagcatc

SEQ ID NO: 5426 - DNA, 461 bp, Glycine max
  unsure (1)..(461): unsure at all n locations
agctgttggagaatattatactcttacatgacaaagcaatgatgggctatatattcataaacagaataaattacaaatacataggtgatatgtaactagacaacaattactttcaaaagtntttagatctttcaatgcacagataattagaaaaaagttgagaataattntataatgatactgagagcaacaactacatagtgccttcaaataagagacaataacatctaagggaaatgagaatgaaagaaaacaagatacaaattttgagaaaatgccaatacagatcctttaagtttgggctaagattatctctgcagccggaagtaaaaatggtcaaagagctgtctataaaaccaaacaatntggtgattattataaaacagtgagtcaattgatctatgatggtttcatgaattatagcggcaacaattattaataagtaatggtcaacatataac

SEQ ID NO: 5427 - DNA, 367 bp, Glycine max
  unsure (1)..(367): unsure at all n locations
gctcgtctnngctgatattatcatgcacactnttctgatgatgacctatgaaccaatagggatctacttgaaacttatgtgcttcaagtgagaagaaatgcttctttntccacttgtgaagatgttcaaagtttggctatgaagatggttcagactgagaaacatttggtatttccattggtttataaacttattgagctagctttgatattgccggtgtcgacagcatccgttgaaagaagcttttcatcaatgaagaatatcaagtctaaattgcgcaataagatcaacgatgtgtggttcaatgacttgatggtatgtacaccgagcgggagatattcaagtcgcttgatgatattgatattat

SEQ ID NO: 5428 - DNA, 581 bp, Glycine max
  unsure (1)..(581): unsure at all n locations
ctcccccacagtatgatactgcactgtcantaatccacactcgtgacacagcnnncncatnaatgaacctgatgacgcgtccanacacgcagacccatgatccacccgcagcatgcaatccaggactctaacnnatattataggcggtctcacaaccaggctttacaactcacccccgctgggatatcaagatgagagaaacgaatttcccgacggctacaaataagaaattgagccgcatacctacaccaaccctctgagttgcccacataaccgaaatggcttgccaaatatacagatagcatacgtccaaggctcttggcatagccttccaattagggacatgacaggtgcataaaatggggcttcatgccatgtaattgcacacctagtacggcagttgtgtcgactctagtatgctcttcctttgccaataaggcatatagtttcgcgggcacactaaccttcaataatcccgactggaagcacgagccattgtctacggaaggctgaatcactgaccggctggcaactcattacgactcatgctgctacttcagtgcataaaatcgaaagttgcc

SEQ ID NO: 5429 - DNA, 233 bp, Glycine max
gctggaagaggaagttgtcctgagagcttgagatgagcttgtgagcgactatgacgtcctagaggtggaggagacattcctactacttgtatgtctacaatctgtcattctcttctctatggtgtaaggaagcttcccagttatggaaagctaaatcctctgttggatcttccttgttagtactcgatgtaaatatctttctatctatataatgatgtattagagtgttcact

SEQ ID NO: 5430 - DNA, 222 bp, Glycine max
acacccttgcggttgtctgtgcgttcatcagatttattgataactactttcgactcattactgccatcaatccccttattagtctttttacagcgtaccacctagctattaaggcactcatattgcttaataaaatttcgcccctcttgccccactgatgccatgtgaattactaaacctttgctataatgatacatataaacgggtgttaatctgattctt

SEQ ID NO: 5431 - DNA, 400 bp, Glycine max
  unsure (1)..(400): unsure at all n locations
agcttttggtcaatgggcttgtatatagacaatcatggccttcatcatgtcctcattcatatatttctttctagattntagagattgatgcaaagattattactcacagctagttgttcactcacagtttaagatcacactctcaccggttatggttcaagcttttctttctcaatcaatctgtctactgactaacaattctaattgtaagttcatagtcttgttctttctttgtctaacatacatacttgctcaaactcatganaagaaacataaactccatcataatcatgcattcaaaccaaaataaattcatacaccaattttcacaaaaggataaaagtgtttcactgcataatcatcaaaatcaagtcaaactgttctaaatgcttcagaatga

SEQ ID NO: 5432 - DNA, 343 bp, Glycine max
  unsure (1)..(343): unsure at all n locations
tatagctaaatggttaacaagagtagcgttgtgatctgttcatttgttccattcccaatttaatgtgacacaacttgaggagaggagctcaacaattagcattaagcaccatcctctctcctaagatcttaattcctcccaaaataaaatatagaataaaaaatatagacaaacatttatgttggtacatcccagtgttngaaaatctggtgtgaaaatatgaacaatactcttgcaaaagaatcatcactctcgtgtntgtatgtatgtcattcttatctatctaattatattaaaatgcacgtcggaataattttaactatatatcaaatatacacatata

SEQ ID NO: 5433 - DNA, 345 bp, Glycine max
  unsure (1)..(345): unsure at all n locations
gcgcctatttcttaaaacgttccttgcacaatacatataaccgaaaaacatgcgcccatatacaatcaaggcagcttcgctacctacataatctacacgtacctccaatgtgtatttgttacttacatcacacacatctgcttggctaaactcacatacatgcatacttcaagcattttggggcaccaanaattgcacatgagcacatttcggcatttctaatacctacatacgcaaacttcatgatgaatcttgactatctacataataaggtgctacatttcatgcccccctttttttttcaaggtatcgctacctatagccgcatacaaattcaagcaatat

SEQ ID NO: 5434 - DNA, 423 bp, Glycine max
  unsure (1)..(423): unsure at all n locations
agctngaatcttccttggtcgggtacatgagcatatgcaatgctcccaaatactctcaagtgatcaactcttggcttcactccactccatgcttcttgtggtgtttgatctttgacattctntgttggggagcgattggacaaataaacggcacacgcaacagcttctgcccaaaattcctttggcatatttttagccttcaacatacatctagttatattaagaatagttctattttttctctctgctaccccattttgttgtggagatctatgaaccgttagagggcgacgaatcccatattnttcacaaaattcattaaattcttttgatgtgaattcgccacctctcttggatcttagagcttngattacataaccactcttcttttcacaagagctntataattntaaaaactacaat

SEQ ID NO: 5435 - DNA, 228 bp, Glycine max
  unsure (1)..(228): unsure at all n locations
atgagaatntaacctaagtaataagtntcaagctattaatctatataaatcactcttatatgtttctttntatanttaacagctttagataataattcacaatgtatcacattttcaggtggtgcattcttatnntatttgctatttccctcgtcatttgagttcaaacttccttntacttccaaaacaaactaactcttttcagtacgtaacaccctaaccctatct

SEQ ID NO: 5436 - DNA, 431 bp, Glycine max
  unsure (1)..(431): unsure at all n locations
agcttgtgaggatngatggngacccggtattgatagaaatgaggatatgggctacgtgggagtacgtgagctcagttggaggtgggcaacatgggatggtgggtttatgcgcgcattgtggatgtggaaaacttgttgtgcaccatcgcccgaccgccacctagtaccacatgtgatggataccccataatcctacaagcttgagatgaggaagtgttgaagggtgaaacttcctgcttttattgttgaccacagagtggtacctggagatatgttgcggnggtcaagagaccttgnggacgtcatgtggtgtgctattgcccaanaccaagcttgaccaatcccgacccaacctgggcatagtcggtcagtgagaacctgtgatgtacctaagcangcgagctcctgtcagtcaacagataaaaggaaaa

SEQ ID NO: 5437 - DNA, 522 bp, Glycine max
  unsure (1)..(522): unsure at all n locations
cgtgcatcaatatcctaatgagggtattccatatgttctcaagattgtgctaatacatttgctgctcaagtttcatggtcttgcaggtgaagatcctcataagcatcttaaggagtttcatattggttggttcaccatgaagccccctgatgtccaagaagatcttatctttctaaagggctttcctcattctctggagggagtggcanaagattagctctactaccctgctcccacgtctattattaactgagatgaccttaactacgtgttcttggagaaatttttcctgcatctatgaccacagccatcagaaaagacatatcacgcatcaggcaacttagtggagaaagcttgatgagtactgtgaaagattcacacattgtgtcaagctgccctaccaccagatgtcgagcactcctttttatattctatgaggactatcacatggagaggtatattgtgctgcactgtggatctttgtgaatgaccctgctaactagaattgatgaaaatggctcg

SEQ ID NO: 5438 - DNA, 291 bp, Glycine max
  unsure (1)..(291): unsure at all n locations
tgcaagcttnncagggacaccacattccttttgaaagtttgtgggcaatcacattctaaatggccttagcccactgtgagtttagacatatgaattagtagtatatgatattatatacacacatacatatacttttctgggcatgatcgagtctctatatatatatacccatacatttactntggntaatttaaacatgtgaacatntgttggtntacgaggaagacaaagctatattggtgcatgacacagggtcgcaattaaagcagataaataattgtgtcataaatc

SEQ ID NO: 5439 - DNA, 298 bp, Glycine max
  unsure (1)..(298): unsure at all n locations
agcttgtcggccgtgattgacgaatggcacagaatacgacgtttgtctctgcgtgctatcangctntttgtcttacagacaacagagactttatactgataaccagtcgggtatatgcgacgaggagtgtgactcacaagtgagtatgacaaatcttgtgagcgcggaagatcaagcaaatctccacgtgtcaacgggcttgtccgccccgattgacgaatggcgcagaagacgacgttagacactgcgagctatcaggctttttgtcttacacacaccaaaaagtttataccgataa

SEQ ID NO: 5440 - DNA, 220 bp, Glycine max
ctgacttttgagtcacgctgacgggcggaaatacccgagtggtattcgataaactattcgtgctgaagacaaagcctgttcacctgaactacgtgtcttctgcgactctaaatgggcgcaacccgtacaagggtattatgtatttcgtctacaaattgtctctgacttgagtaccttcgcggaatcccagggtatccgtaactttgttctgtgataaagc

SEQ ID NO: 5441 - DNA, 438 bp, Glycine max
  unsure (1)..(438): unsure at all n locations
agcttcgaaaaggtgtagagaatggagaattacactaagcaatcactacgcatggctccaaactcgtgggcggaggatgcatgaacgctccaaactcaagggtggaggatgcatgaatgaaaacgcaattcatgaggctccgaaaaagggtagagaatggagaaatgcacaaatcaacactacgcatggctccaaactcgtgggtggaggatgcatgaacgaaaacgtaattcgcggggctccaaaaaagggtagagaatggagaattgcactaagcaatcacaacgcatggctccaaactcgagggcggaggatgtgtgaaccaaaacgcaattcatggtgcttcgaanaaagggtagagaatggagaattgcactaagcaatcagtacgcatggctccaaactcgtgggcggaggatgcacgaacgagaacacaat

SEQ ID NO: 5442 - DNA, 600 bp, Glycine max
  unsure (1)..(600): unsure at all n locations
actatctgtaattcttcgtgtcttcttttnctaaanatcatcnnttttcgcttttgcctgtacatcaactcgttagtccaatatgggtatgtgagagattatgcaataatctatttatggctatcctgctctaaacatttcattggattaatgatgaaatctgtgcatcttcacgtgataagaggctaacgtttgaattgcacatgttacaattgggcttaactcagtagttgggctaagagcatatccaccgctaagcgcagcttcagcacacttagcgcaaatgagaatttggcagaacatcaacatcaaagccgcatgcttagcgcgagatcagtgctcttagcacatcaggtgccttcagccactctatgctctagactgcgcttatcccaatttacttactctccctaatgcgagggtgcgcttagtgcacttcncgatatcaagcctattaaagcctgtctgtgctaatatggtcaatatatcatctctacacacctgtataatacttctgagacngcacggcttgaattccgacagcacngcctatctgtaaataccctaatatgatatggatacttttcattaagctagtct

SEQ ID NO: 5443 - DNA, 377 bp, Glycine max
tgccacattcttcttcaccagcttattgacaagtgaggcaattgtacaaaaattaagaacaaaccttctatagaagcttgctaagccatggaagctcctaatatgtcccacactttttggggtgggtcattcttggatggccttgattttctcaaggtccacttggaccccatttctaccaactacaaaccctaagtaaactatattatctaaacaaaatgtacacttctctatatttgcatagagggtgtttttcctaaagaaagaacttgcctgagatgtcctaaaagatcatctaggcttctactgtacactaaaatatcatcataataaaccactaccaatctacctatgaaatcccttaagacatgatgcat

SEQ ID NO: 5444 - DNA, 430 bp, Glycine max
  unsure (1)..(430): unsure at all n locations
gcacaacaagtttttcacatccacaaagcgcgcatatacccaccatcccctggtgcccacctccatctgagctcacgtactcccacgtagcccatattctcgtttctctcaacaccgggtccccatcaatcctctcaagcttccacaacatccaagcataacaacattcaaacagcacaagctatcacagccaagcaaaacagagcanaggcagaaactctgctcaacacatcaaccanaatcacagcttttctcacttaaagaccgcagtaacaattccttcgatccaattcgttaaccgttggatcgacntccaaaatttactggaagtctatagtgcataagcctacatggtgaccgttgggatcgactagcanacattcagaactcattctgtactatctcttgcacagccaaccacacacaagca

SEQ ID NO: 5445 - DNA, 202 bp, Glycine max
gcttgcataatgagaatctgtccctcaacaaactctgcaacttatcatctgaagtctgggagctttgagcagatggtgttgttgatactggcgaagagggaacaccagctgctctggacctggttttccttgcccttggaaaattaactatttggtcattcacattccaacatttccttttaatataggccaagataatgac

SEQ ID NO: 5446 - DNA, 327 bp, Glycine max
  unsure (1)..(327): unsure at all n locations
catctattcttgcactccctcttcattatccatntttctagatcgagtgttataggggtgcctctacgctttcttagttattntgagttccctaaagaaacaaacaatggtgagtatgccaccaaaacatgaatatgctaatgaatgatcggagcacttggatccacctcaagaattttagataacatgatgagtttcagaacttctcgntttataagaaggaacaaagcttntatctagccaagatcatacaaaagtgttacaacagaacctaacggnttctaattatatgggccatcaaatctatcatgtgttgacagtaattga

SEQ ID NO: 5447 - DNA, 339 bp, Glycine max
  unsure (1)..(339): unsure at all n locations
gcgcgggttctggagacacaagcgaggcgttcgcgatatgcgaagatgatattccgagtactctggatttggtacgaccatgtccctctgattttcagctgggaatatggcgagtggaggaacgccccggcatttacgcaacaagcataatgtaaacctttacggtnttaaaaagctctatagttgggcctaggctgtagagatttcattntgttaaggctgtgtgtcttttgtgtttgaatatataatacaaggatctttcttcatctgttcctggtctctacccattctcattcatttgcatgtgtacttctttntctggaacggcagatccgatga

SEQ ID NO: 5448 - DNA, 420 bp, Glycine max
  unsure (1)..(420): unsure at all n locations
gagcttcttttggaccttgatcaagcaatcaactcctctttcagaaccatgctatgtgctcgcgactggtccctttcttcccttcgcaacttgagttcattattgctaccccatagagctccgcgaaatttgttccggccatactcttcctttcgagccctcttggtctcttgttcaagggctcttgcggtaattgcattctctttccgtaacccggcacactcctttcgaacgtgtgtagcagccaacttgaacttctccttggcgagtttngcctttcctaactcgcttatgagagcttggacttcttcgtcctcttccggtgcttcaaaattctcttcgctgacgactgttaacttggcgagccaatctaaacctcgtatgcgaacattcagccattcgggggacccaccaatgatg

SEQ ID NO: 5449 - DNA, 371 bp, Glycine max
  unsure (1)..(371): unsure at all n locations
ctccctcacgtnngcttntctntcttcttcattctccattgaaactccattaaagctccaacctttggtgcccatttctgctccaaatcgcgaaaggaaggcattttctgagtcgtgaaacgcatctctatgtgtgggacctcgaaatttcagggttgggtagacttctttctcactcgattntcgtgggtattgcgttttgggagatatgaggagtagtttngctaggtttctgcttcatgatagttatntgtgaagaaaattgttgaaagcatgttgaacttgccatgtttggatgagttaagcttacccattcagctttagggtttttatgatgatgcttgtgatgtntatgtgctgaaattgcttat

SEQ ID NO: 5450 - DNA, 417 bp, Glycine max
  unsure (1)..(417): unsure at all n locations
agctntgcggatntggacttcgccggcagaatgatcaaagcgggtctgaaaagaggcaaanttaatcatcccacttagacgaatgagaaaactggggcaaatgaagagggtgagaatgagggagaagcccatgctgtgactgccattcctatatagccaagtttcccaccaacccaacaatgtcattactcagccaataacaaaccttctccttacccaccgcccagttatccacaaaggccatccctaaatcaaccacaaagtctgtctatcgcacttccaatgacgaacatcacctttagcacaatccataaacgccaaccaagaaatgaattttgcagcaagaaagcctgtagaattcaccccaattccagtgtcttatgctgacttgctcccatgcctacttgataattcaat

SEQ ID NO: 5451 - DNA, 407 bp, Glycine max
  unsure (1)..(407): unsure at all n locations
gtggataattcacacaaccatggccttcatcatcttctaattcatgcattcattccataatcagagattcatgcaaaaatcattacttaatgctagtcgttctctcaaaattcaagatcacatactcaccatgctgtggttaatgagtaccttcacaatcaatctgtcaactaactaacattntcagtcatagtcctaatccatgttctttctcttctaatcactgcatgctcattcaaagcatatgatgtgcgcattacacttcactcaaatcatgaaattgatcattttcaaccatcaagcactaaatgtgtcaaaatcaaacatcaaccactctataatataaatgtaaatgttcaatcaagccttaaacaagctatcatgcaaactataaactaatataaaac

SEQ ID NO: 5452 - DNA, 481 bp, Glycine max
  unsure (1)..(481): unsure at all n locations
agcttctttttagacctcgatcggtcatcttttctggccgacgccgactgtcaattttttcgatcaatatcggtgaataatatttttttgccgaggtgggctaatgttttcctggccgaataaatgagaacatgccattntcggccgaaacaaaacatcggttgagctcgcacganaaaacctagccgacctacattgaaaagttttcatgcaacaccgaaacaagaaaatttcccctgccgtaagaaaaaacattatgggccagcgagcgttttttaaaataaaaaattgcgcaatgtcggctgaaaaatagttgtcggggcaatntcacaaccgatgtcggctattgagttttctattcaatccctntaatgaaattgcatgatgtcgatccgganatgtntgatcggcggcatccaatgatgcatcttntttagacctagatcggtcatctctccatgccgacgtcagctatcatttt

SEQ ID NO: 5453 - DNA, 139 bp, Glycine max
ccctacctcgggtgccacatgcttggctcatgaccgggaagtccttgggaattcaacggacttaaatacctagtcaagataataaaaacggtaaatggactgaatgaccatcgttccatagtttattgcctccacatgt

SEQ ID NO: 5454 - DNA, 450 bp, Glycine max
  unsure (1)..(450): unsure at all n locations
agctntacaatnngtgaaatttgatttataacattggtgcaatgttgccgatgtgaagatngaaaataggagaaaatattatagaaggtaaggatagattttcctaccttatangttgaaaacaacattttactacactataaaaagtatagtttaagttaattaagtatacattaagaggagtcacgaataataattggtttgccaaaaaagtctacaatgaagagtatntatctttttatcggagatcgatagagaggtatcgaaataaagtaagaaacttaaatataatttttgtaatttgaaaatggaaacacttatgatgaagtgtaaaagaaaatattttgaaaaaaaggtttagtgattatatttagcaatttagacatgattatggcttactagtagtgtatatggagtactattatgtagaattctanaataaattgactc

SEQ ID NO: 5455 - DNA, 106 bp, Glycine max
tgttgctgttccctacacttaccctggtactggttaaggactcttactagactaagtatgctgtttaccttttggcctctttttaacacactggttgtctgtaaat

SEQ ID NO: 5456 - DNA, 389 bp, Glycine max
agcttgttcttgcagttgctcagcttaagcaggcacctgagctctgccgctctattgggttaattcacaaaatgccacgttggtgttcttataataaactgacctgtgaagtctgcaatgaaagattgtcctgtcagatatcatccatatgctagataagtagttttctttaagggcagtgtagctagactacttgataaagagtagacatgtgtgacatatgatttgcatgccaatagttattttgattatcagatgttgattattctaatcttcactatttatgcagtggttgtagaatcattaatcaataatgggaaacacatagcagctgtacattttattcatgcctctcagcttcaagagagcttccccctgtgccccttctg

SEQ ID NO: 5457 - DNA, 245 bp, Glycine max
  unsure (1)..(245): unsure at all n locations
caacttctgaagagaatgtcaagacattaataatgtcatgcttgcatacatccaaatgaaagaagggcatattcattttgagttgggtgctatggttggtcataacactagtaatgtacgtgcaagtacttatcttattcttttgttaagattaatatattattaacactcgacatgatatgatttntattttatatgatgaaggaagtggacaagatgtgccaacaccaagaagaggatcatca

SEQ ID NO: 5458 - DNA, 344 bp, Glycine max
  unsure (1)..(344): unsure at all n locations
atgcttggcaggaacctacacagggatgctagcttaccgttcagcttctgaacttcttggatgttggtggggctacgcatctctagtatggcagtgtatttgtcggggttggcttcaatccctcagtgagtgatcatgaagccgaggaacttgcttccacctaccctgaaagtacatattttaggagtgaggcacatgtcatatttgcagagttcctcaaagacttgttccatgtccgccacatgctggactatgctntgagacttgacgaccatgtcgcccatatatacctcgatgtttcatctgatctgctgataaagactcggtccatcagtcattggtat

SEQ ID NO: 5459 - DNA, 508 bp, Glycine max
  unsure (1)..(508): unsure at all n locations
atgcttctagcttatcnatngatgatctgcgttgtgtagaatgggattgagccacaccttataatgtggagacctgttcttccggtggcttatattttccaattgggacacggatgcatacctgttctaaataaagaccagcgtgccaattccttactaccactgatattctgcaagagttcgtctttatatttncattgctcaggtggttttcttcacctagtccataagttgttcctatccttaaagagcaaatgagttgtatccaagggtgctggaatcttgtgaacacttatttttgttagaatggagacaatttttttattatttgcatatataaaattatcagcttgcaaatttttgtttcttttaaaataagttaacacccctgctaggttaatttatttctaagtcgtgtatgcacactttttctggatcctgtttttaacccaagaattccagtatgatgtttgtgacatctgacatgaatcctctacattaatgaaag

SEQ ID NO: 5460 - DNA, 308 bp, Glycine max
  unsure (1)..(308): unsure at all n locations
agcttgatattggtttagacatgatngatacattgattgggacttgtagggaatgattngggcaagattggatgagaggaagtgtgattttcgaaatctgcacttatgcagaatttttgctgtgaaattgtgcagcagaatnttgcacaagtgcagaaaaatgcttgtgtgtggttggctgtggaaagtctattgcagaatgagttctggatgtttgctagtagatcccaacggtcaaaatgtaggcttatgcactatatacttccagtaaaantttggagtcgatccaacggttaacgaattggatc

SEQ ID NO: 5461 - DNA, 294 bp, Glycine max
ctagtcaaggtcttagagaccatacaagtttcctaacgatttctaattatgtgggccattaagtctatcatatgctgacaatagccgagaagcccatgaatctcttcgggggcggagtaagtgtctgccatcgcctaggccttggctaacaatcggggaagttcttgactcccgttcaaggtaagagcaaaccgatccatccacatggttgcctcttggtgtaaagagtcgatcacactttctctagcctctttttcgcgtatacttggcatattcgaccgcaatcctatgctc

SEQ ID NO: 5462 - DNA, 440 bp, Glycine max
  unsure (1)..(440): unsure at all n locations
agcttgcaagtgaaatcgaattactcgacttatgtacgcaacacagagaatagtttacactagaataaaaaggtgtggtcaaaagagtattctatataaaatatatctcgatacgagtcctcgaactatagagtgtcaacattgcaaagaacaagaaatcacgaacaatcatactatctatgcaattaaggcaaaacaccatactactaacatacccagaattataagggtcttataataagtatacaacgtacatataagaagtaagaatttaatagttaataaggatgtattaaacaatcacaaacttcaactactacattcacgactacgcacgagataaagtgagttaagtagtcatgcgtntacacatcaagaaagacatactcatccaagacatatatatgggtcanaaggttntcacaacactaatccacaca

SEQ ID NO: 5463 - DNA, 425 bp, Glycine max
  unsure (1)..(425): unsure at all n locations
tgaatattctatgcaacatgacatggttatctgacaagctatgaatatgcttcattcaacaatgctngatgcagaactatgatgcagttgttggtgatgtatcgatagtgtccacacgttatgaatatgcttcattcactcagccctatactgaaaccggactgatgatgattgttcctattaaatcaaagacaggtgatagaacgtggctattcatgaaacctttcacaaagcgcatgtggattctaatattggtcatcattgtctacaatggttttggtgtatggattattgaaagaaaccaccgccctgaaccggaggggcctattctgcagcaaaccacaactatgttatgggtggctntctgttctttgttctctctgaatgggaatttctttctgctgtggtcatctgttgatccatct

SEQ ID NO: 5464 - DNA, 441 bp, Glycine max
  unsure (1)..(441): unsure at all n locations
tgcaagctgtttgttatnggagtcccttgtttcatatgtatgattccttatcgnttctcctatttttagtgggtaataagggacctacgtccaaccaaaaacaggcataaaagtcgtactaaacgttagcagaagggtggtgtatactaaatcaactcagctggaagtgcaaataaaactatagtaagctgcgttgcatattttaactagctgttaagtaatcaactaaagtttatagataaatcacgaaatcaaagtaaaattatagcattcatttacatgaatcgttatgttttgttgcaaaagtatgtttcattttcatattataacctttttttatcgataaatattaagtgttaattattaattttttattaacagagataatcaaatgcacaaatctttttccttttttttattctttntatcataaaatcaatc

SEQ ID NO: 5465 - DNA, 447 bp, Glycine max
  unsure (1)..(447): unsure at all n locations
tcaagattcattgtttccaataacattaagcgaaagtcaagtagattggcagccattctgggatgctagcatacttagaagatggataaatatttggggttccccatgctttctggtagagtcaagaatgaagacttcccttatantttggaatgattgaacttgagattagcagggtggaaaacanaaactctgagtaggtctggacgtgttactttggttaagtcagtgtgaaactcaatccccatatattccatgcaaaatntctggattcctcangggatatgtgatgtgattgatagaatctcaagaagtttattttgggtaacaaccatcatcattgggtggggtgggacataataacttagccctttgaggaaggaaaacttggagtctgtaaagttagagaaacaaatacaactctcttagggaaacatatgtggtctc

SEQ ID NO: 5466 - DNA, 434 bp, Glycine max
  unsure (1)..(434): unsure at all n locations
agctntgatcaatntcaatccttcaccatttgaatcctctccaacaccgattggcgtttggatccgaatcaaacaataataatgtgatgcattataacaaaaaattatgttaatattatataaaaaaaattaatatatcatcgttatatcttactctttacatagtaatgcatcgtatttgactctcttttttgtggtggtacatgccctatccaaaataaatcagaagaggcgtatccaaataagcaactacaatttattctttntaggtagtgggaggcaaaacaagtacaagttattcacaaagtaaattaaataagcaactaaataggaaataaatataaatggggtgtgttcctttatcaattacccactaaataatcccgtaaccttttcacatatgcaatattngactatgcctcttgccatcattt

SEQ ID NO: 5467 - DNA, 481 bp, Glycine max
  unsure (1)..(481): unsure at all n locations
tgactcatgcattgctatctatctattaactctataatagtcattggatttaaccgaatgtaatgcttctatgttcttaaggaagaattaaattgttgacattaattttatttttatatataattttaataattgaatgttagctttgataacttaatatttagtaatattttatatatgatacaattttattttaaattaataactaaggataaaattaagtaataagatattatgtatatattataataaactcaaaatttttattttattttattcaaattgtaaatattgttataaataataataataataataataataataataatatactattattttttcttaccaataatcagttttcacataaaaataagttttatattctntattttatttaattaaaatcttaaatatttatagatatacaatatatattacaataatactaaatattatattaattcttattctcaac

SEQ ID NO: 5468 - DNA, 437 bp, Glycine max
  unsure (1)..(437): unsure at all n locations
agcttcaccttctggtcctcctcatagttgctgcatgagaaaacatgctctattntcatctcccactccaagtaggcctccggatcattctttcctttaaatggaggaatgttgagtttaataccatcaattcggttttgtctaggaacaccatcattccctcttctcctcctttcttcttcattatgatctctattctccatttgatacaacctctcatggagcgcatcatctcgttgtttcattaacctctccaaatgttgcatcaaagcttgcatttggaattgcgaaagccccactccatcattaggattagtacctgacatctcaaacaaacaaatcaaacgtaacaagacaattatagttgttggttgaatacctcacccactcaagtgtatcacacaattatggcttttctctaatgaaacactcttgct

SEQ ID NO: 5469 - DNA, 477 bp, Glycine max
  unsure (1)..(477): unsure at all n locations
ntccacatccacgatgcgcgcataaacccaccatcccctgttgcccacctccaactgagctcacgtactcccacgtagcccatctcctcgtttctctcaacaccgggtccccatcaatcctctcaagcttccacaacatccaagcaaaacaacgttcaaacagcacaagctatcacagccaagcaaaacagagcaaaggcagaaaactctgctcaacacatcaaccaaaatcacagcttttctcacgtaaagaccacagtaacaattccttcgatccaattcgttaaccggtggatcgactccaaaattttactggaagtctatagtgtataagcctgcattttgaccgttgggatatactagcaaacatccagaactcattctgcactagactntccacagccaaccacacacaagcanttttctgcacttgtgcaaaattctgctgcacaatttcacagcaaaaactctgcataa

SEQ ID NO: 5470 - DNA, 427 bp, Glycine max
aagcttccaaaaggatcattgattcaacgatattcagtgacgagaaacaaatcttcaattaacaaatccttttgatgtggaaaaaaattcacagatccttcttccccttttctttcattctcttccaccatcacagtaatgaccactctcccattctctcacctttgatgtcaacaaggaagataaagagggaaacaatgatgtcgttgttaggtgagagtcaaccttggcaaagatttggagcacgaacgtagcacagttgtcgtattgggcgacgcgatataaatgaataagagtttcgagtttagagggagttgggcataagtgagatttgagattgaatgttaaaatggtctactcaacatataatctataaataattaattgtataataaaattaatattctgattgcccctcacaaatctc

SEQ ID NO: 5471 - DNA, 464 bp, Glycine max
  unsure (1)..(464): unsure at all n locations
tgtaagtggctntcaaagcctactctntattctatgaatattgttaatctgctaatggattcaatctctcctcaggatatcactattggagttgctattggatcgtctacacagatatctatgtttgtggtatggcctcgaactgttattaaatgttattaagttgtttggggtatacatttaccatatctttttgtgattaaactatcctgaatttcttcttgtcataggaggacatttcttgagtttattaactttttaaaattagttaatcagatgatgatcattggagaaagttgatggttcttgatctcttgaaaattgtagatccctttctgtgtagttgttggatggtgcatgggaaaagaaatggacttgaattttcaactattcgagactgccacgctttttatcactgtgttagtagttgcatttatgatgcangtatgttatttcttacttgc

SEQ ID NO: 5472 - DNA, 384 bp, Glycine max
ccccacatcaaaatcacaagtagaacactgaagctgcacaccatgtttggccaacacatcattaacttgatttccctcatgcaagatatgaatccatttaactgtgattcatgcaactgattgcacttagtgggataaggctttgtcattgttgttgttgttgtcattgaagatgtttcttattgtatttagcttgatggatttcatgaagttgacatttctacctttggtaaacatgttgaacacttgcatatattaagcaggaaaataccaagataaagcatggtttgactcagttagcattataggatccgattcagatgatgaattcagcagtgtgcatggaggtaatgcaatcatgtcttgtagtttctaataactatt

SEQ ID NO: 5473 - DNA, 460 bp, Glycine max
cgttcagcaactgctggttatctattaccatatatgtgtgatcgattacacagtgcaaattctgaattcaaattttaatagctgttgtgaatcagttttggccactggtaatcgattacatcctgtggtaatcaattaccagagagtaaatctcttgaaaaagacttttttaacttaaatttcttggccaaaccttttgctccttcaattggaattcccttcctatttaatgtaatcttcttaagactctagagactgtcttgatcatccatcttgaatatctttgatttctttgtcttgaataaaactttgagaaacatgtaatcctttggcatcatcaaaacatcagctggatcctttgtctacaatctccccctttttgatgatgacaatcctgaaatcaagacaagctatatacaagatgatagcacgttcacacagcccttactccccctatctt

SEQ ID NO: 5474 - DNA, 416 bp, Glycine max
  unsure (1)..(416): unsure at all n locations
agctngngaggattgatggggacccggcgtttataggaacgaggataagggctacgtgggagtacgtgagctcagttggaggtgggcaccangggatggtgggttatacgtgatttgtggatgtggagaatcgttttgcaccatcgcccaaccgccacctagtaccacatgtgatgggtaccccataatccggcaagcttgaaatgaggaagtgtagaagggtgagacttcctgcttttattcgttgaccacagagtggtacctggagatatgtcgcgggggtcaggagaccttggggacgtcaggtggggtgctattgcccaaaaccaagcttgaccaatcccgacccaacccgggcatagtcagtcagtgagaacctatgatgtacctaagcaggcgagctcctggcagtcaac

SEQ ID NO: 5475 - DNA, 459 bp, Glycine max
gttgaggggtgcgcaacccaccattttttccatagtagaacaccggtcatgtgtctactatcattgtgataatctctttctctgtttttgggggtgctacttgagttgccaagtctctccatctttgggcgtattctttgaaagattcgtgccccctttttgcacactttttgtagttgcatcctatccggagccatatcagaattgtactgacactgcctaatgaaggcaaccattatgtccttccaagaatggactcaagaaggttcctaagttagtataccaggtgacagttgtcctagtaagactttctcaggaaaaatgtatcagcagtttctcatcttttgcgtatgcccccatcttccgacagtacatctttagatggttcttggagcgagtagtccccttgtacttgccaaagtccggcaccttgaacttgggaatgaccatgtttgggta

SEQ ID NO: 5476 - DNA, 383 bp, Glycine max
agcttcaatcggcatactccacacaaagtatttgatgggattattatacagcatactccacacaaacagattttgaagacaaaaattgggcaagtttctgcggatcgaatgttatgaactgataagaccattttatttggcttaatgagagaggtcttatacattataccacaattttaaaacaataataacaggaaataacaagttatgatataaaaagaatagttttttcagtaacatccggaaattttgtttaggctaattgaaattctgatggcagattgaaatcaacgctctcttcaaggtcttttgaaccttcatcctcaaatttttaacctttataattttatattttggtggtggtggtggaatatggggatgtc

SEQ ID NO: 5477 - DNA, 427 bp, Glycine max
  unsure (1)..(427): unsure at all n locations
cgagaggattgatggngacccggtgttgagagaaactaggatatgggctacgtgggagtacgtgagctcagatggaggtgggcaacaggggatggtgggtttatgcgcgctttgtggatgtgaaaaacttgttgtgcaccatcgcccgaccgccacctagtaccacatgtgatgggtaccccataatcctacaagcttgagatgaggaagtgttgaagggtgaaacttcctgcttttattgttgaccacagagtggtacctggagatatgtcgcgggggtcaggagaccttggggacgtcaggtggggtgctattgcccaaaaccaagcttgaccaatcccgacccaacccgggcatagtcggtcagtgagaacctgtgatgtacctatacaggcgagctcctggcagtcaacagataaaaggaaaa

SEQ ID NO: 5478 - DNA, 429 bp, Glycine max
  unsure (1)..(429): unsure at all n locations
gcttatgcgcatattttcttacatacgttctcttgcacaagacatttaaccgaaaaagtgcacccatatacaatcaaggcatcttcgttacctatattatatacacgtactgccaaggtgtatttgttacttacatcacacacatcttcttggctgaatntacatacatgcatactcaaagcattttggggtaccaaaaattgcacatgtgcacatcttggtatttctaatacctatatatacacaaacttcatgatgaatcttgactatcttcacaaaaaggtgctacacttcatcccttttttcaagtttttgctacctaaagccgcatgcaaattcaagcatattttcctttgcggactaaaatcgtattcaaattacaaggtatattttctgtaatatgttgtcttcacataacatgcaacatat

SEQ ID NO: 5479 - DNA, 430 bp, Glycine max
ggcttccttgtgagttctgacacgtctcgggacttcattcattgtccaaggacgccaagtgtctcgaagcggccaatcaaaggttgtatatcatcaaataataatccccggacgaaattagggtatgacagttgcccctctttacttacctctcatcggagataagaggaaagcaaagataggacactgatttcgtccgtcctgccctttccgtgatgacgactctcgcctctactccttcgtttgtcttctgcacaaaacaaaatacaaacaacaacctgaacaacgaatataatatacatataaaaatatacacatatttggcgaaggaaccgatccggaaaacaacagaagaacgtgtttcccagtcaccagaggcttcgcgcttgataatggaggacacatgaacagcgctaggcaatgacattca

SEQ ID NO: 5480 - DNA, 442 bp, Glycine max
agcttcctccacgttttcctccatacctagaacttcaaaccttcgattctcactcaattcttcaccaaatcacgtcccgtaaagcccaatcttcctctttttcactcctctttcacttccaccgatcaaaatccagaaaaacttcatcaaatggcagagtcatcaaagaagagaaagggatcatcctccaccgctaccgctgctgcccatcgccgtcacggcccatccggagcacccacagcacctattcctccttctttgtcatctccaagatcatcaacactgttttcatccgatgatcaacgtctacggtacctttctcagttttcttctagaataatcttagaccctaagtacctagacgtagagttctttaatgatgaaacgttttgatgttatcaagtggttcaaaaatctggtcttgttgatatcatgtcattaa

SEQ ID NO: 5481 - DNA, 436 bp, Glycine max
tatccttatggcttgcctccggacttcactccccgtgccactccgaaagatttaagccaagcccctacttttgaggggcaactcccgccttgtgacgactatcccgggcaagacgatgaggaaggagatacccatctcggccccctgctccaccttaatgatccgtccccacatgaactaccccaaccgaacatagtccgccatatcccggcctcacccacacccgtaaaagaatctgttcccttcgcggaagataagggaaagatagaggcgcttgaagagaggttaagagcagtcgagggccttggcaattacccgttctcggatttagcggatttatgtctcgtgcccaatatcgtcattcctcccaagttcaaagtaccggactttgataagtacaaagggacgacatgtccgaaggggcatcttctgatgt

SEQ ID NO: 5482 - DNA, 371 bp, Glycine max
agcttgtagggttaaagtctcactattgtcacgtgctcatgcaacaattgttaaccgcggctatacaagacatattgcccaacaaagtcagggtattcataactcgactgtgttttttcttccatgccatatgtagcaaagtcgttgatcctgtatagtttgatgagctggaaaatgaggccgcaattatactgtgctagatggagatgtatttgtcccctgctttctttgacatcatgattcacttgattgtgcatctggtcaaagaaatcaaatgttatggacctatttatctgcggtggatgtactcagttgagcgatacatgaagatcttaacagggtatacaaagaatctatatcatccagaaaca

SEQ ID NO: 5483 - DNA, 319 bp, Glycine max
agtgtcaatattgtcatcgccactctcacaaagatactaaaatccagcctcatgaggaattccttaatgctccaattaatatgtattacaactgcacaaagtctcaaacaatttaagcactgcatcaaggaaatcatgctctatttgtccaatacgggttccttctctttcttggaaatcactcacaaaaaatggacaacaatgaagaagcgcaacacctggacaatgttggagaatatacatatatacaaacgagagagatatatctatatctatatataatgtattatcaacacaggcatatagtatgtgatgcata

SEQ ID NO: 5484 - DNA, 388 bp, Glycine max
  unsure (1)..(388): unsure at all n locations
agctttgtccgcaaaaatcactaaaaaccgttttaaggtccaacgccttaaacgatcctctttgtttttatcggttaacatggacctttcaaaagcataaaatcaacacgtaactttaccgtttttgcaagaactacgtaggtccgagttcctcaccacaaatcgaggatacgtaggagcagaagccccgcttttgtcgaccaccccttttcaaacaaaccaagagatcgttaatggtccaacgccttaacatttctctactttcaaaaaccaagagatcgttaatggtccaacgccttaacgtttctctcctttcanaaacaagagaccattaatggtccaatggccttaacgttctctcctttcaaaatcaaaagatcgtttaatg

SEQ ID NO: 5485 - DNA, 365 bp, Glycine max
tcatgttgctcattgactccagattgccgcacataatgacttagatctgcatggggatctgcagaagaacagagaccacatactcttgcaacaggtgcagatctctgattcatggaaagctgagttactaggttgaccaaggcatcaattattccctcaagctttttattttcagtagatgaagatgaatctgtggccacctcatggactcctctaaagacaatagcatcatttcttgcactgaattgttgggagtcggaagtcatcttctcaatcaaactcctagcctcagcaagtgtcatatcaccacaggctccaccatatggagcctcaatcatactcctctccatactgctgagtccctc

SEQ ID NO: 5486 - DNA, 423 bp, Glycine max
  unsure (1)..(423): unsure at all n locations
agcttgtgaatntgttgtgttatttgtagctgtcatatcataatactgtaattatataatattattatgttaaatcttattgcaagtctacactttccttgagaccactcttgtgactatatcattactgccacatttcaaaacatacttttctgacggagaaattcctggaacacctggcactcttgccacaacttttcttacttttggttaggtcctgaaacatgttttctatttgagttgttggtttcatatttgactttttataacactgttggattgactgcagttttgaatctggccttttccttgagtgtcttgggatttcttgtcttgcacgtgtcattggtagcttctaatacaaccactattgaggtaagagtttgcactcttttccctttcccttntctactttagaaatct

SEQ ID NO: 5487 - DNA, 471 bp, Glycine max
  unsure (1)..(471): unsure at all n locations
gtggcaactntagtgatgcctttcccaataaacgtatgcaatttgtgtgccatatgccaagaatataattgtttggcttagctttgagactccacctcanaaggaaagaccttttccacatagttcaacactgacaccaggtttttgtaggccacaaaatgtaaacatgtatgaaactagatccatcacttgaacttcaaaattgaacactactcgggaggtaacagcataattggatgttaggtaattttctaaaaaggttatcatatnttactttaatataacaagagaacattttaaatggccaacanttggtccttanaaattaaattgcataagatctntagccaaacatgtatatatatagaacgatatctgcactannagaatctctcataaactgctcaatccatctttcacttaaatctctattttgggatccatggaccccttcattcaccattttcacac

SEQ ID NO: 5488 - DNA, 428 bp, Glycine max
  unsure (1)..(428): unsure at all n locations
agctntgcagtagatgccactctactctaaattttngaatgatatgtngacaaggaagcacatgtacattcatcangaaaacatcatagtggaaggaaattgtagtgctgtaatccaaaagatccttccacctacgtgcaaagatcctgggagtgtaaccattccttgttcaataggagaagtcaatgtgggaaaggctctgnatgatctgggagccagcattaatttgatgccactctctatgtgcagaagactgggagagttggagattatgcccactcgaatgactttgcaattagctgaccgctccattaccaggccctacggagtgattgaagatgtgttggtcagggtaaagcattttatcttcccagcagactntgtggtcatggatatctctgaagatattgacatccctgtaatcttgg

SEQ ID NO: 5489 - DNA, 387 bp, Glycine max
  unsure (1)..(387): unsure at all n locations
cttgcttctacagaacacttgggttttcaaagagaacaagggatgggacatcccttgtggatctttggcttgtaaaggattntacaaggttgaaagaaatctcaagaaccgtaggttgcttgaggactggatgtaggcacgggttgttgccgaaccaatataaaatttttgtgtttgtcttcttcttccctacactctntaatttctgttgtatacttttcttttacgctttacttttgtttgaattacataacttagtagtaaagcctaattgaatctggtaacattaagaaggataagattntaattagtcaaagcacattaataattaattcaaccccccctttctaattattctgangtcacttgatccaacacaggtctatt

SEQ ID NO: 5490 - DNA, 428 bp, Glycine max
  unsure (1)..(428): unsure at all n locations
agcttgtaactcaacagaaacattacatcaaatctcttaacagctggctaaagttaaatctcattcctattgaaagcaacctaaaagagaaaatctcatcccctccaaaggcacagaatccaccaatccaagcccttctccatgcatggcatgattatgttgacaagcttcctgatgagcttgccaaatctgctatttcctcctttgttgccgtgataaagacaatcatacttcagcaggaggaagagatgaagttaaaggagcgatgtgaggaaaccagaaaggaatacttcaagaagaaacaagcatttgaggaatggtaccagaagcatttaatgcggagagggcctgatgaagcataacatganagaggagaggaagtaaacgcatacaatcctgtctcagagaggcagtttgttgttgagagc

SEQ ID NO: 5491 - DNA, 411 bp, Glycine max
  unsure (1)..(411): unsure at all n locations
tccttgtgccagccaagcaccctctcttctaggatgcggatgtggngctgcccatgccccaccatgattgacggtaaaaaaaaatgtctacaccttctccccctgccccaccattgtcgtcacctatgtttggctcaaactccccttcatcgtcgccatttgtcattggctcgaactcctcaccactcgtgctggtactccaccaaccacctnctcctcaatgtggactctaccctcttcatcttcaccaataacaaagtcattctcttcaactacaccaaaattgttgtcattcgaaccttccctatgctttcacatggcgaccccaagttaacgtgagaaggtggcacacggtggcgcacaggtgcatacgtatcacatggtggatgatggcttggtggcaagggttca

SEQ ID NO: 5492 - DNA, 432 bp, Glycine max
  unsure (1)..(432): unsure at all n locations
agcttcttctctgcattctctctctccagaaattcacgcattttgaatctatgcttccctttcgtattttttgtttccaagcaataaccattcaccatccaaagtagttccttgttttttattctcttttacttgtctaaactttagggtagaagactttacttgtagttttaaatttttagggttttaatgttttgttagaattagtttaaaattaggactatatgtacgtttatacattatagaatatgttgcacacattgcatgtttgatatgccttttagaggtttaaaaagtgcaaggaaaatgaactgcgttttctgcattttctgganaacgcgatgaactcgctaagtgagaacatgcgctaagcaagttcatcagtattcattgaatacatgcnattttggacaaactcgctaagcgcgccta

SEQ ID NO: 5493 - DNA, 463 bp, Glycine max
  unsure (1)..(463): unsure at all n locations
tctttgaganaacttccttgggaagctagagcttagctacacacacccctttcataactaagctcacctccttgagaagcttgcttgagaagattcctaaagaagctagagcttagctacacacacctttctaatagctaagctcacctccttgagatgagaagctagagcttagctacacaccccctataatagctaagctcacccccatgacaaaatatatgaaaatacaaaaatgtccctactacaaagactattcaaaatgcctcgaaatacgaggctaaaaccctatactactagaatggccaaaatacaaggcccaaatgaaggaaaaacctattctaatatttacaaagataagcgggctcatacttatcccatgggctcaaaatctatcctaaggctcatgagaaccctanggccttcccttgggattttgtcccaatctacttggagtctttta

SEQ ID NO: 5494 - DNA, 324 bp, Glycine max
agcttgtagcaaattcaaaccacaataactattatctcttatgtctgattgagtccggtaatttatctagacgctcgtaaatgaatacggaagcacgtatcaaatgcaaaccgcattaacatttaactcagatgtgcgaatgaatcccgtaatatatcgagacgctcggaattgaaaacagaagctctaagcaaattctatacgacaattactttttactcggatgtctgattgagtctcgtaatatatcgagacgcttgaaattgaaaacagatgctctgagcacattcaaaccacaataacatttaactcggatgtctgatt

SEQ ID NO: 5495 - DNA, 388 bp, Glycine max
ctggagtttccaagtgccaattcgtcttcttctgtagaccactctttctctggcttcaattcatcagcgggctctccttctgtgtacaacatcttgcgatgttcccagcctttgatgacagctttccaggtactgctatccagtgagacgatgaaggccaccatccttgctttccagtattcatagttggttccatctaggattggtgggctgttcactggacctccttcgttgtgcatgctcatcacaacttatctgcctagatctcactctgtgatttcgagggttggctctgataccaattgaaattctgatgccaggggacagatgtcgtacatgatgtcacgacatcacgcttcataacatgcagtatatgtgggtctgtatg

SEQ ID NO: 5496 - DNA, 406 bp, Glycine max
  unsure (1)..(406): unsure at all n locations
agcttagacctcgaattgaagttgttcgtgtttctctcttaaatcggcacccacttccctctctggatgtatgtgtnggcgaactgcttcgggaaaaacaacatcttctcactcaagtagctctatcgcatgactcttctatttcgaaagctattgttgttgcctatactgcccgggataatggcaaaggtcgtgatacatgacaagttcaatgttattcatgcaagcaatntggtcatattgctcgccattgcaccatgaagttttgcaactattgtaagcaacatggccatatcatcatggactgtcccactaaaccaccacggcttcaggtgcaagcttttcatgtagctaattctatgagtgagacacccacttctatcccaaccaatgttgatgccttaac

SEQ ID NO: 5497 - DNA, 449 bp, Glycine max
tctgtaagatattctcctccaattttagatgtagccacagccttaagttgtaaacatagaagataatatgagcagacagaaagacccatggtattagccaaaactcaaatataaatgctgagttcaatgagatcttaaattaatttgatatgtgtgtgtatgcggcattcacatacatagcatagttgtcaataccggcgtagcggagtggagcggccgaccccaaaagtgggatagtgggatagcagatagcgggatgaccgctattctaatgtttttttttatatatgttaaataattaataatatatatatatatatatatatgttcaaaaacagaaatatatatatatatataacgttctaatattataaaaatatgatattattatagttatttaatattatctctatattacttaaatagtaacactattattatatattaat

SEQ ID NO: 5498 - DNA, 311 bp, Glycine max
agctggtgagagtatggggtacccattacatgtggtgctatgtggcagtcgggccatggagcacgacaagcatatcacattcacaaatagcgcatatagccaccgtacgctgtcgaccacctccaactgagcgaacgtgctcacagatagcccatatccttgtttatctcatcaccgggcccacataaatcctcccaatctttaccgaacatgcaagtaactcaacattcacaccccacataccatcacagccgaaaatacatggctaaggcagaaaatcctgcccacacaccaaccaaaaacacagcttt

SEQ ID NO: 5499 - DNA, 215 bp, Glycine max
gacctataaaactaagctttgagggagcgcagcccaccatgtcttcatagtgtattaccaatactgtgtctaccatcacgatgatcgtgcacgttctcattatcgcgagatccacctatgcctaccaatccttccaccttttgggcgcgttctttgatagagaccccctacttttagcacatgttctgtagaagcattctattcataaccatatc

SEQ ID NO: 5500 - DNA, 425 bp, Glycine max
  unsure (1)..(425): unsure at all n locations
agcttgttgaaattgccatgtttggatgagttatacatacccattctgttttagggtttttatgatgatgcttgtgatgttcatgtgctgaaattgcttatggaaaactgttagagatgaagggtataattaacctatggttagaaagtgagaatgtggtgttgtgagtggaaaaagagtgaattttgagggctggaaggccaaatctggaattggtagtatttagaggttagagtgagttaatcctagcttgaaatgtcatttaggacttatgagaaagcttggactgtgctagagagaaaaacacatgaccaaagtgaaccaagagccatttctagggtaaaattgngtgttgaggagtcaaattttgattcngtgagactttaagcataaatccagtttaaacaagtctaaattgatgttat

SEQ ID NO: 5501 - DNA, 482 bp, Glycine max
tagctacacacacccctctcataactaagctcaccttcttgagaagcttccttaagaagattcctaaagaagctagagcttagctacacatacctctctaatagctaagctcacctccttgagatgagaagctagaacttagctacacaccccctataatagctaagctcacccccatgacaaaaaacatgaaaatacaaaaaaaggtccttactacaaagactactcaaaatgccccgaaatacaaggctaaaaccctatactactagaatggccaaaatacaaggcccaaacgaaggaaaaacctattctaatatttacaaagataagcgggctcatacttagcccatgggctcgaaatctaccctaaggctcatgagaaccctagggcctacccttggatctctagcccaatctacttggagtcttctacccaatgcccttgcgggataggatggcatcagtacctggatctttacatt

SEQ ID NO: 5502 - DNA, 372 bp, Glycine max
  unsure (1)..(372): unsure at all n locations
agcttatattnntattttctaaaatttcaaaatatttgtttagttcgtcccgcgataaaaaatatgtcatcgtgaactaaaaagaataatttttaattgagtgactagaaagcacatatctaaatatggaagactaaaaatgtgattctctaaatctaagagaatatatataaggaaggataaaaatgcaatctttgattaacttgatgtcgcatcctaggtgatagtgaagtcgtaatcaaatatgtaacataactagtctatacagtngaatatcgatatgttaatggaatgactatcttttaatgtcctaaatcttgaggattctgatttatgtgattagttagaatttgttactttaacttctctata

SEQ ID NO: 5503 - DNA, 473 bp, Glycine max
gtattgctgtcaagtgaacctgccctccatcaatctactcttaatagctaaactgttccatcgtctgacacatgttaattgagtaacccgagtcaagaacccaatctggtttgactggtgcctctgaaacacataggacatcatcactgccatacccttctaaggctacgtctgcatcaccactgagatcgttctgatccctctattaatgtttcttctatgactcaggacattctttcttgaagtattcttcactttcatagatgaaatatctcctcttcttgccttcatttgaatgggatcttatacctgtcttgcccttgaattctttcttttcatgactctctctatcgaacaattcccttgcatctcgatcacccttactttttgacttgctcctgaactcctttgtaaacaaagctgcatgtacgtcttctaatgagagagtacccctgccatagatgagtgacgtc

SEQ ID NO: 5504 - DNA, 417 bp, Glycine max
agcttcaagaaaaagatggcctcatttaatttcttatttccagaagggaattctatcaatagacctccaatctttaatggagagggttaccactactggaaaacccgaatgcaaatttttatcgaggcaatagatctaaatatctgggaagccattgaaatagggccttatatacccaccacagtagaaagagtttcaatagatggtagttcatcaagtgaaagcataaccatagaaaaacctagagatagatggtctgaagaggatagaaaacgagtacaatacaacctaaaagccaaaaacataataacatctgccctaggaatggatgaatatttcagagtttcaaattgcaagagtgctaaggaaatgtgggacactcttcgattaacacatgaaggaactacagatgttaaa

SEQ ID NO: 5505 - DNA, 427 bp, Glycine max
tattactggtaaacttcgatctagatgggatagacctttggttattactaatatttttctccatgatgcagttgagattaaaaatgaagttatcggcaaagtctttaaagtgaatggtcagcaactcaagctttttcattagagccctcaagtggaaggggaatttgtggtggatctctctttggtcttgccaattttatatgatgatgtgccttgaatggcacttgaggagtttccttctctcttcttttatgttctctttgtttgcatttcattgcatgcttacattgaggacaatgtgcacttcaagtgtggggggaagggtctagaaaatctatttgctgttttctctattttctgtttttgtatttgttgtttgctatttgtttccgtattctgttttagtttctcgttctgtatctgtctt

SEQ ID NO: 5506 - DNA, 323 bp, Glycine max
atggatgatcaagacagtctatatagtcttaaaaagggtatattaaataagaagggaattccaattgaagtaacaaaggtttggccaagaaaattaagttaaaaaatcttttacaagaaatttactctctggtaatcgattaccagaggatgtaatcgattaccggtggccaaaacttgattacaacagctattaaaatttgaattcaaaatttgcactgtgtaatcgattacacatatatggtaatcgattaccaacagtttctgaacgttttaattcaaaatttaaagcttgtaatcgattacacacatactgtaatcgat

SEQ ID NO: 5507 - DNA, 418 bp, Glycine max
  unsure (1)..(418): unsure at all n locations
tatgaatgtgtcaaacagttacaattntaaacaaaaactctacgtttagcatataacaagattaagttcatcataattcaagcaacttaagattataaactaaacatattaaaaatggtcagtcccatgcaaaagtgctaataatagtagtaggagactaggagttagcaaagcatactttcaggatctgtggcaaaaatgaagaatatactagcattaagctttcagtatagcagttgtttatatagttagttctaaaattgacatagcatttaccagggattcaaccattttaactccataacttctagctgattatcctgccctatatgaaattcctcttgctgattcagctaaaccaccttcactagataatagcctttctgatggctcagctgaatacatngagttatattca

SEQ ID NO: 5508 - DNA, 392 bp, Glycine max
  unsure (1)..(392): unsure at all n locations
agcttgctctaaatttacattgatgtttgtatttatgggaggaggttatatgccattttttgctttaagagtaatgtcccactaaaactaactttccaaatgtttgccttcgcaagaatggcaccgaggaagcttgcctcaaagaggtccaggaaggacaaggcggccgaaggaactagttccgccccggagtacgacagtcaccgctttatgagcgttgtacaccagcagcgtttcgaagccatcaagggatggtcgtttctccgggagcgacgcgtccagctcaaggacgacgagtatactgatttcaggaggaaatatggcgccggcggtgggcaccactggttactcccatnggccaagttgatccagaaatagtcctttgagtttac

SEQ ID NO: 5509 - DNA, 465 bp, Glycine max
tcttccatggccctcaaagatgacaaaaactctatttataatgttggtaggttctaaattggcaatgtcaaccattattggtatggaagtgttgtcaacaaccaaaaagtagcacatttgaaacatgataataggaatttgcttgttcaaatgttatccaacaaattcaatggaaaggtgtcaattactctgtacaatcgcataactgcactccaaatcaaaaccaccctcctcctcttcctcttcttcttcatcaccgtttccatgccctgcgccgttgtcctcgaattagaattctatttctaataagagttagtcttcgaattactctcaaattgatcagattacacgctccctcttctgtcaacttataatcaacctcttgaactaacaagtttgttagttctataacatctatagttcacacattacattaaaagaaattaccacgttattggtggtagt

SEQ ID NO: 5510 - DNA, 294 bp, Glycine max
  unsure (1)..(294): unsure at all n locations
agnnctgtgataatgtntaggcgtacattatgtatattatccttcataagggaaaggaaaataggatataaattatggatgttatcatgttgatgctatttgtgttttcatttcaaaacttatcatggacttgtgtaaatgtcttattgaatttggacttgtgttatcaactttaatacttcaattattattttggattttggagtatgaaataaactttcttaatcaaataatgttaggtatatggtaatatataatanatacatatattattttgaattttttatatatact

SEQ ID NO: 5511 - DNA, 374 bp, Glycine max
  unsure (1)..(374): unsure at all n locations
tctgcatcgggaaggtaagtgttggtgcgaaaatggaagattaatccatgatatagagaatgaaagaatggatatgcgtgttgttgaagaagaaggagattgggaatatactgtgtgtgttgtgaatgtgaagtgaaggggatggaacatgaggctcggaacttggttgtgaaaatntgagggatggatcttcttagtgcctcaatagatnttttattttttctagccacgaggggatatggatgaaatgaatnttttttttttttacttttacatacactatgacaaacaattgtaggtataagtattttttgacttttacctacactaatttatgtgtgtaggcaaaagtctccgtaagtatatgtcatttt

SEQ ID NO: 5512 - DNA, 432 bp, Glycine max
  unsure (1)..(432): unsure at all n locations
agcttatgtagaatggggccagtgggtgngattacattatttcatcatagtaactgaacatcggagcttgaaagaaataatgatccaagtcattcatacaccgacaaagcatatctactctttcacgcctcgtggggtatgactacaccagtcagtatcgctcatgtaagtacaacataggtgcggatgccctgactcatgtttatgaagactcacatggaacattctttattgtctcggtacctcacattacttttttggaacagattaagcatgacttatcaatacaccctgaattcaaggctctgcgataagatatattgtctaatcctatgcgcagatcagattatactatcaccacgtatatgattttgcataagaactgtatttggctgcctagtggagatcaattcatacagacactgcttactg

SEQ ID NO: 5513 - DNA, 267 bp, Glycine max
ttatggacattgatctctccccggaatgcatatcgtagacgtcttcctgtagttcttagagcacatagctagcctattattggccaagaaagttgagtataggggaggagaaccctctactatatagtttgtccgccactaagatgtacctagcaacttgtgttcttagcttctttggctatctctttgtgtgttgggagtgtttcatgcttcaagtatttgactatctctctgttccagcttaaagagtttccttctttgagctag

SEQ ID NO: 5514 - DNA, 434 bp, Glycine max
  unsure (1)..(434): unsure at all n locations
agcttgtaacgttctggatttctggggaagtgttctgtgtgatacttgttagtttagaattgggctggttttgtactcacatttgggtgaataagattctaaaaaaggcatgaaagcagcaattgtggtcacaatttttgtttttttaattattattttattctgatgaacctgtcagaaatttatgtgagtttgcgcaaataagcaagtcatgaagtggcaaaataacttaataactttcaaggattgtggtattgcgtgctgcttatttgaaacttgaacctacatgttgttcgaagccaattattatgcaattatgcatttccagagttgagggactaaatggttcctttgtnntataattttggtcaagttgttctcttagagtcaagggatagaattggtggccgaattcacactgattactcatttgg

SEQ ID NO: 5515 - DNA, 465 bp, Glycine max
ggtatgccactggttccaacctctccatgatctgaaatggttcatataagcgtttggcgagcttcaaatgagtggaacccttcatcgttgtttgtctataaggtcgtagtttaactaagacccaatctccgatattgaagttgtgatctcggcgatgctcatctgctatgttcttcatgcgtgcttgggccttcatcaatttttgcttaagtaacgcgattacttcctccctttgactgagccactcatccactgcttctatctgcgtagaaccttcgacttagcgagggtaattgggaggttttcatccaaaggtgacttcgaacggagttaacccagtggttgagtgaacggaggtgttgcatgaccactccgcccacagcagataacgtccccatgtcaagggtttgcgatgaacacaggcgcgtaggtattgctccaccacacgattagccacctccgtct

SEQ ID NO: 5516 - DNA, 433 bp, Glycine max
  unsure (1)..(433): unsure at all n locations
agctngagctcgttactgttgccccatagagtctctcggaacttgttcctgctccattcttcctttcgagtcctttntgtttcccactctaacattcaaccgtggtcaggttgacattnttcagcttatcacactctttcctgaccttagtgactgccgtcattagcttctctttcaccactcttgccttttcgagctccgctttcagagcttgcacttcttcactttcctcaggaatttcagcctcttttccacttagactntttagctttgggagccactttatcccttgcattctagacttcaaccaattgtgataaccgccgatgatgccattgctacttcctttaagctccttatcttttcttcgcactctatttcacgctntacggattttctgaagtatcttcacattagcttcattgaagcctca

SEQ ID NO: 5517 - DNA, 476 bp, Glycine max
tcgaaggaccgaaagggacgagtcaagggtggaaagcatggttttatatgataaattgaaggcttgtcaaaggtcgaaaagaagtttgactgagcagctgagtataacagaagaaaatatgttgacaatcattgaccagtataaggagaaggtaaacctagttgctacccatgagcaaaggctagaggatgagcatgcaaaggtatcggctctgcaagtggaaagggaagcaagagagagagtgatagaatcattgcatggtgaagctatgaaatggatggataggttcgctctcactctgaatgagagtcaagagcttccaaggctattagccaaagccaaagcaatggcagacatatactcagctcctgaggaagtttaggggctttttgattattgtcaacatatgattgaattgatgtcccacataattaggaaccgttgaggcgttgtatttatgctttgacttggacaag

SEQ ID NO: 5518 - DNA, 444 bp, Glycine max
agctttaaactccacttccaatgcatgaaaagttaaatgtttcttctggtagataagtaaaacttgtttcttttctcgtataagaatgtaaatttataacttataagaccatttgtgtttcaattcatacaaactcaaaatgggcaagtaaaatcaccaataagaacattaccatcccatgagacaagtgaaagaatagtgacactggaatggatctcattgagatgctcttacagattaatttgaagaatctatatagttagttacaaatttcatctcctcaattgttagttacatattcctccatagtgttccccctattcctgctaacatagacctttgtaactacaggtgtcctatcacacaacaaaaataggttatgtaaaaatgatttgatagtccttaatcaaaatctttaatgggagtaaagagaataatggagaa

SEQ ID NO: 5519 - DNA, 375 bp, Glycine max
  unsure (1)..(375): unsure at all n locations
tgagcttggctcattacatgtcataggctatntttaaaggctctgcttggcttacataaaagcctaacttggcctacgagcctatttaaaagcctgcttaaagacgtctttaactaattaattgttttaaaacctagtaaaataataactaagaaagaaaacttataaaatctgcgataagtaatgtacaaatccaaagataattgataaacaaaatcatatgtgaattcaacttatttaaacacagagtatatcataagataatgaaaaaaaaaacgcgtaatattaaaaaatatatggattagagatgatttatactaatatagacaaataaaaatatttaaattgtctgaaaatgtttttacaaaacattct

SEQ ID NO: 5520 - DNA, 390 bp, Glycine max
agctttctcaatagttgcaggcagtgtatcttatccattcttcagtcatgcacattgggggatgcaacatttgtggtagggcccatgagtcaggcatgtgcatagtccaagacgatgtatcccaagaagtcaacgatatgaccaatccaaaccatcaagggttccatcaaggaggacctccaggacacaatctgggggggaatttctctcaaggccaaggttggagatcccaccatgggaataactccaacataaatcaaggagtttcatctaatcggcctcccaatcaagggcctgatttatatgacaaaaccactaagctagaagacactttgcatcagtttatgtatgtttctctgtcaaatcacaagagcattgagtttgctatca

SEQ ID NO: 5521 - DNA, 482 bp, Glycine max
tttgcagataatgtcaaggctccaccaattctgttgtatgtgttgtccgcaccatggccattatgaatgtgggggcatagatatgattggggaaattaagtccaaagcttcgaatgggcatcatttcatcctagtcgctattgattacttcactaagtgggtggaatccacttcatatgctaatgtgactagaaatatgggggttaggttcacaaaaaaggagataatttgcatatatgtgttgtggagcaaaatcatcaatgacaatgccaccaacctgaataataagatgatgcatgagttgtgtggggatttcaagatccaacaccataattcgactccttatcgacccaagatgaatgatgcagttgaggccgccaacaagaatatcaagaagatcattcaatagatgacagtgacatacatagattagcacgagatgttgccattcgcattgcatggatatcgaacttctgtgcata

SEQ ID NO: 5522 - DNA, 434 bp, Glycine max
  unsure (1)..(434): unsure at all n locations
agctnggaaggatgcttcaatggaggaaaagattgaggaagagaaagagagaggggggagcacgaaattgaaggaataaaagagggagagaagtggaactttgaatatgtctcacaagactctcattcatcaaagttacaacaagtgttacacatgcttctatttatagactaagtagcttccttgagaagctttcttgagaaaacttccttgagaagcttctttgagaaaacttccttgagaagctagagcttagctacacacacccctgtcataactaagctcacctccttgagaagcttccttaagaagattcctaaagatgcttaagcttagctacacatacctctctaatagctaagctcacctccttgagatgagaagctagagcttagctacacactccctataatagctaagctcacccctatgac

SEQ ID NO: 5523 - DNA, 422 bp, Glycine max
  unsure (1)..(422): unsure at all n locations
ctaagcttcacaactagtttctatcttcactattntattcttgtttggttgctcaaattaaatgcattgttctaattttttgacattgctatttttctttgaaggggaaaacacacccaactcaattttttatgcttttgatgtccaccccaacccaattatgtgtgtttaagctgtattagcaatgtgatttgttatattttgtggaaactgggaatttaattctgtaattgtctgtttgtgtactgggctggctttattgcagaagcaaaggagacanctctcttgtttgttacttccttntctctcactttggtgtcttacagatgaaaatgtatgtttctaccatttttgtttggtttcaaaattaatacactaatctcaattgaacctttctcttttatattgggatatcattgatg

SEQ ID NO: 5524 - DNA, 418 bp, Glycine max
  unsure (1)..(418): unsure at all n locations
agcttgcttgtgaagcttctatggaggctggatctttgagcttcaatgaggtccttcaatggtgattttccaccatggagatgcagcggaagataaaggagaaaaggtgagaggaggcgccatgcactaaggaataagccatggaagaaagagctttaccaccaagagagtgccttggataagaagcttagagaggaagcttaaaggaggaaaagaaagagagagagatggggggaacatgaaattgaaagaggaaaagagggagagaagttgaactttgaagtgtgtctcacaagactctcattcatcaaagttacaacaactgttacacatgcttctatntatagcctaggtagcttccttgagaagctntgttcgtggccggcangtgcaccagatcgcacaagtagtataaaac

SEQ ID NO: 5525 - DNA, 457 bp, Glycine max
  unsure (1)..(457): unsure at all n locations
ntgagggattggtcnttgccagtgaaaggatcgatgtgggtctgaaaaaaaaaaaaaaaaaaaaaaagggcaaatttgatcatcctactaggacgactgagaaaactggggcaaataaagagggtgaggataagggagaaacccatgctgtgactgccattcctgtacgaccaagtttcccaccaacccaacaatatctttactcagccaataacaaactttctccttacccaccacccagttatccacaaaggccatccctaaatctaccacaaagtctgtctgcacttccaatgacgaacaccacctttagcacaaaccaaaaacaccaaccaagaagtgaattttgcagcgagaaagcctgtataattcaccccaattccagtgtcctatgctgacttgctcccacatctacttgataattcaatggtagccataaccctagccaaggttcatc

SEQ ID NO: 5526 - DNA, 419 bp, Glycine max
  unsure (1)..(419): unsure at all n locations
agcttgaaccgaaaacgagtgagagtgtgaccttaaactgtgagtgaacgactagctatgagcaataatatttgcatgaatatctgaattttagaatgaaatgtataaattatgacatgatgaaggccatgattgtacatacacaagctctctgaccaaataacttaccttgaatgatacttgtatcttttgctcccatgtataaagtttattgatttgtcattaactgaaccctgaactttaaatgagtatctcctaataccttgtttagattctaggagagcatatggttcaagacaaatttactctaaatttgggggagaaaagttgaaaggaatgaaaagaaaaaggttaagcatcatcacacacaacaaataagttgtatgttttanaaaagagagaagaaagaaaagaataaa

SEQ ID NO: 5527 - DNA, 481 bp, Glycine max
  unsure (1)..(481): unsure at all n locations
ggccaagacaacacacacgtcctctnttttcaggtcctttgaatattgaatatatatcatttgtccaattagtagaatcttgggtgctttgtaaattttgcgaactctctgcttcaaccattttcttttttagttcatcctacataaatacatcttataaattattatcatacatcaatatcttgaatacttcaatatcactaaacaaaactcatctccacattagttactcctcctcaccccataaccttctattagaaaattgagcaaaacaaagaaaaaggtattgaaataaaaattaaaattcttacaattacaatatatagcagccttttcagtaacaatgcttccatcttttcgagttcgagtgtcaatataaatntttggcctagaaggttgcactcccttagtctttgttgtctagcattggttaaaaaaatcaatcatcctatctgtattaagcaatttaatattaaaaaaa

SEQ ID NO: 5528 - DNA, 424 bp, Glycine max
  unsure (1)..(424): unsure at all n locations
agctntgatcttccaccaccgccgctcccatcatcttagacttatattttaatattagtactttgattttcagccttgtattttggctatattagtatggtatatgaacattttactatttccttatttgcatagtatgtttagaccaatattaagtatgttatttggctatgtgaagtttataatttatctatgcatggttgtttgcttcatgatttcatggttcttgtttcttgcttcatgatttggttgatattttttatgacaattgtttggatggtttaaattaaattgtttgataccgcactttggcttttgttgatgccaaagggggagagaaatgggataaatcaagaatcacatgagaatcaacttatttaaagtaaacataaattcaaaacacagggggagaattatgagtgat

SEQ ID NO: 5529 - DNA, 437 bp, Glycine max
  unsure (1)..(437): unsure at all n locations
ntctccacaaggtacgtaggtcaaattcgtgtatgctaagtttccttgggtgttcatgttttattgatgataataataataataataataatacgtcttcagttgcagtattgctgattgaggtacgaggaaagcttaaagtttcgtgccattttgttagatctgactgccattgtcactgtttgggtttgaggtaagctttgtctctttttcatttgtagtttacttaggaaacatgttgaagtttgtctctgttaaatctatagaatgcttggagcaccagtagagataaatagtgataaggatcctgcttggctcactatctcattattttgcattaagcagattcataacaagttactgacacttcttgcaattattttggagtttggggcacttgtttggtatgtcacaaattttccaaatgccttccatat

SEQ ID NO: 5530 - DNA, 316 bp, Glycine max
tcaatatctttctaacagtaatgagtaaagaacttggcctttttagcataaactctttcataaacacatcttcgagaaaaatataagaagctaaaatgaaatgggtttctcccataagctaaaataaactaatgtacttcaagttttggagaagttaaatgagagaggctttataaaagctatgcccttaagtggattttacctatgagagaggtcttttaattcatttaccttcttatttatcatcattaaaggctcatcatggaaagtttatcaaacatcaactcactatgactatgttgcttcaaatgtagtg

SEQ ID NO: 5531 - DNA, 422 bp, Glycine max
ctgccacatagaatacccctgcaaggacatacccctcatgtgtgaaaatctctttgccaaccaagtaatcaacaaagtaacttatcatatatggaccaacatacgagacaagagtagtgacaccagcaaacacagcgttacaagccgcctccttccagaaggatttgagaagtgcccaagccaacgaaggctgcccggataggttttcagccttcaacctctcccaattagaattcaaaaccttataatttgtcttggatcggtctttcggcgcaacaaggggaatgtccttaagctcaagcggcctttttgccccaatggaaagaagtggattcaaccaagacaaaatggccaagctaaaaagtccagcatcactataaggagtaaccttgagacacccgggatcctcatcaacaagcaat

SEQ ID NO: 5532 - DNA, 420 bp, Glycine max
  unsure (1)..(420): unsure at all n locations
agctngtcagatcagaaatgagcttctaagcctttctctcaagaatcacccaatttttgagaattttcttcagatccaaacacttgtaaactcgcatacttctattggtgattctatctctcctggggagcatttggaaatgattctcaatggtcttccagaagaatatgagtccactgtttggcttgtttgtaacaagttcgagcctttcactgttgacgaggttgaaactcttcttttggagcaaaaacttccttcaagagacataataagagatctctggtttcaatcaatcttactgaaggtgcaattggtaactcctgaaatgtgaattctaatcctactgcaagttctaattcgcacgcacaagtcaatntgacttctcagccctcctccactgatatgaattacaatgattac

SEQ ID NO: 5533 - DNA, 454 bp, Glycine max
  unsure (1)..(454): unsure at all n locations
tgagggtgcgcagcccaccatcttttcatagtagagtaccgataatgtgtctaccatcacgattatcgtctccctttccattattgggggtaccacctgngccgccagatccctccaccttttgggcgtgttcttttaatgatccgtccccctttttgcacatgttctgtagttgcatcctatccggaaccatatcaaaattgtactgatactgcctaacacaggcaaccattaggtccttccaagaatggactcgggaaggttccaagttagtgtaccaggtaacagctaccccagtaagactttcttggaaggaatgtatcagcaattcctcatcttttgcgtattcccccatcttctgacaatacatctttagatggttcttgagacaagtagtccccttgtacttgtcaaagtccagcaccttgaacttgtgaatgaccatgtntgggta

SEQ ID NO: 5534 - DNA, 394 bp, Glycine max
agcttatgcatgttgatcaattatgcatacgtttgttgctttgactggttcatatagatgagcagcacaaaatgaacaatcagcttagcattactcgaaattgaggatcaatagaaactttcatgttggttctctgcaattgagtagatcaaaatctttattagtaattcactgggaggagtaaaaagaaagctttctactgcgagaatatttgggttaatatttctaacttgggtcacacaacatatatgtgttcatgtaatatggagaactgaaaatatagctgctagcttactacttatacctttgcttagatctgacttttccataatttttctaggacactatgaattctgcataactcttgcttcacaaaacaactgtagatctatca

SEQ ID NO: 5535 - DNA, 369 bp, Glycine max
  unsure (1)..(369): unsure at all n locations
tcttagcaatgcaagttgagtttgcatcagagatcgtcattgctctaatgcatgcgngtctacctacataggactttatctgatgagattctttgtatacagctggagatgcatggatcctacatatgcactcagtgtatgctgtagagtggcattaaacaccacttggaacttgctatcgtgtgaactatgaacatgaggagattaagatgttattgactttgattgctcaattcagaaagatttagtgacaagctttgaatgccacactgtggtatcaattgcagattgcggcaaatggcggaaagccaatngtccgctatatacgtatagtaaatagtatctgatatataccgattatatatgtat

SEQ ID NO: 5536 - DNA, 439 bp, Glycine max
  unsure (1)..(439): unsure at all n locations
agctntaaagcacaacaacacagaatctaggtgtccaacacccctccattcaatggcttttctaggtttgaaaggtgaaatttagaatgaggtgaatttgaggcaaactctcacctcacaccagtccataacgtcaatctaaacttgcccaaactggaattacacctaaaattccaccaaatcaaaatttgactcttcaacacccaattttgccctagaaatggctcttggttcactttggtcatttatttttctctctagctcagcctaacctttctcacatgttctaaatgacatttcaagctagtattgactcactctaacctccatttaccacagaattccgacttagccttccaactctcaaagtctcactctttttccactcataacatcacattctcactttctaaccttgggttagttctacccttcgtct

SEQ ID NO: 5537 - DNA, 275 bp, Glycine max
tgagaatggagaattgcactaagcaatcactacgcatagcttcaatctcgaaagtggaggacacatgaacgaatacgcaattcatgggtctccgaaaagattgagaatggagaattgcactaagcaatcactacgcatagctccaaactcgatggtggaggacacatgaatgataacgcaattcatggtgctccgaaaagatggagaatggagaattgcactaagctatcactacgcatagctccaaactcgaatgtggaggacacatgaacgat

SEQ ID NO: 5538 - DNA, 436 bp, Glycine max
  unsure (1)..(436): unsure at all n locations
agctntgagcanaatcaaacgagcaataactttgactcggatgtccgaatgaatcccgtaatacatcaagacgcatctaattgataacggaagctntgaccaaattcaaacgacaataactntctactcggatgtctgaatgtgccccgtagatatcaagacgctattatatgaaaaccgatgctcgtagcaaattcaaagaacaataaatntttacttggatgtccgattgtgtcccgtagtatatcaagacgcttgaaatttagaacagaagctctgagcaaaatcaaacgacaataacttttaactcggatgtccgatggaatctcgtaatatatcgagactcacgaaattgaaaatagaagctttgagaaaattcaaacgacaataattttgtactcatgtctaactgtgtcccgtaatatatcgagacact

SEQ ID NO: 5539 - DNA, 472 bp, Glycine max
  unsure (1)..(472): unsure at all n locations
tctcccctattntcctataaatagggggagaggtgaagggattaaatgttcatccctcctggtaattcgagaatcacttgaaattagtgaaaaaaattgtttccatgaagaaaatccaagccgaggcacttccataacgtttccgtaacgtttctgtgggtgatttcgcgaagattttcaaccgttcttcattcgttcttcatcgttcttcggtcttcaaccggtaagttcccgaaatcgaacttttcaattcattctatgtactcgtaatggtcctcatttgtttcgcgtacatttattctcgtttcatttacttttcgtaccccttttgacgtgctttagtcatttacttaagtcattttctcccctaatcaaaaataaaataaatttccaccgatccatttgattgtaatatccgttattttctgttaaaatgaaattcgaccattctgtcatgccgtaaccacattgg

SEQ ID NO: 5540 - DNA, 431 bp, Glycine max
  unsure (1)..(431): unsure at all n locations
agctntgttctcacattntaaaanatgaattgtatatgatacaacaataacgctgagcaaaaaaaaaaaaataggaaacaacattaacaatactaatactcatagaaacagtaactataaggatacatgaaccctttttctgggaaatttcctttttaagaggatattgaatcttgacagtttaacattgtgattaacttctatttccttccctgtcccctttcttaaataggcaatatgttttagtttcaccattcttatatnttgtttcactgtctttactgtttagtgaactctttttggtttgtagatataatatggctgctgtggtcttgttttgtgacagggcttcaaattaaccaagcaaagtatgtggagatccactctaaactggcaggcagtttcaactagccggtatcctcctggtcatt

SEQ ID NO: 5541 - DNA, 466 bp, Glycine max
  unsure (1)..(466): unsure at all n locations
tgtttctggttggaaacatcctctaagtgccctccanaggatatgcttatattttggagggatgttgagcttccaaattgccatccaatttccttcgactttcaggtgagagacatccaagatttcttccattatactgtggtaagcatagcgcacattgtacatgccattatgagtaaatttccagatctttttatcactgtccagcagattcaacaatggtgtttctttaatagccacgacatcacattatatgaaaataggatcttacttgatatattacaaaacaacatgatatcatgtaaaataagagtaaacataaatggtgcgacataatattatgtgtatgacttatattcatctgaattgacaataattaaaagaagaaaaattaatttaaagcttatagctagtttgcaatgaattaaagtaactcatctatcttaaacaaatactcatgtccgga

SEQ ID NO: 5542 - DNA, 442 bp, Glycine max
  unsure (1)..(442): unsure at all n locations
agcttggaggggttgatggngacccggtgctgttaggaacgaggataatggctacgtangagtacgtgagctcagttgaaaggtgggcaactggggatggtgtgtttatgtttgacttgtggaagtgggagagttgatttactccatcgcccgatcgccacctaataccacatatgacgggtgccccataatccaacaagcttgatgtgagaaagcatggaagagtcagtcttcctacttttgtttgttgaccacagagtggtacctggagatatgtcgcggaggtcaagagaccttggggacgtcagttgggtgctattgcccaaaaccaagcttgaccaatcccgacccaacctgtgcataatcagtcagtgagaacctgtgacgtacctaagtaggcgagctcctggcagtcaaccaataaaagaacaaagtccacgaa

SEQ ID NO: 5543 - DNA, 484 bp, Glycine max
  unsure (1)..(484): unsure at all n locations
agtaggattatggggtacccatcacatgtggtactaggtggtgatcgggcgatggtgcacaacaagttttccacatccacaaatcgcgcataaacccaccatcctctgttgcccacctccaactgaactcacgtactcccacgtagcccatattctcgtttctctcaacaccaggtccccatcaatcctcccaagcttccccaacatccaggtaaatcaacattcaaacagcacaaactatcacagccaagaaaacagggcaaaggcagaaaactctgcccaaaacaccaaccaaaatcacaactttttctcacttaaagaccccagtaacatttccttcgttccaattcgttaaccgttggatcgactcanaattttactggaagtctctagtacataaatctacattttgaccgttgggatctactagcaaacatccagaactcattcttcattactctttccacaaccagcatatacatag

SEQ ID NO: 5544 - DNA, 426 bp, Glycine max
  unsure (1)..(426): unsure at all n locations
agctntacaacagatgtcactctattctctagttttcaaagggatatgtaacaaggaaacataagtatattcaccaggaaaacattgttgtggaaggagaatgtagtgctatgattcataagatccttccacccaagcataaagaccctaggagtgtaaccattccttgttcaattggagaagtcactgtgggaaaggctcttattgacctgngagtcagtattaacttaatgccactctccatgtgcaaaaggttgggagagttggagatcatgcccactaggatgactttacaacttgttgaccactccattaccaaaccatatggagtaattgaagatgtgttggtcagagtaaaacatattatcttcccgacagactttgtgggtatggatatctatgaagatatgacattcatgaatattg

SEQ ID NO: 5545 - DNA, 483 bp, Glycine max
  unsure (1)..(483): unsure at all n locations
tcaagaataatggtctcatcanattatttattntctgttaggatttctataaataggccttctatttttaatggtgtgggttaccattattggaaaacttgcatgcaaatttttatagaggcaatagatctgaatatttgggaagccatataaatagggccctgcattccaactatggtggcaagaaatacaaccatagaaaaacctatggaagaatggagtaaggaggaaaaaagattagttcaatacaatttaaaagccaaaaatataattacatctgctttaggaatggatgagtactttagggtatcaaattgtaaaagtgcaaaagatatgtgggataccctacaagtaacacatgaaggtacaacagatgtaaaaagatctatgataaatacattgactcatgaatatgaattatntagaatgaatccatatgagagcatacatgacatgcaaaaaagttcacacatataattaatc

SEQ ID NO: 5546 - DNA, 408 bp, Glycine max
  unsure (1)..(408): unsure at all n locations
agctggttcttgattnttcctaagttctgtaacaagcttagaacaataaacttggccttctcttaattgtctttgggcttggcgaccacgatcaacaaagtactttcgacacctactatatgttgacttgaccaacgctgttattggaatgctgcgacaatctttcaacaccttattcacacattctgataagttggttgtcatgtggccatatcgtcgtccagatgtatcgtaagccatgctccatttttcctttgagattcgatcaatccatcttgctatggatggactcaattgacgaaatttttctaagttttgatcaaacacatgcttgcaaggagtgtacgctgtcatcaaattgttatcatcaaaagttgtacgtagacatcaaactcaaattaaattaat

SEQ ID NO: 5547 - DNA, 435 bp, Glycine max
  unsure (1)..(435): unsure at all n locations
nggtgaanatgtagaagtaggacgttgtggtttgtctaattacgtttaatgatgcgaatcaatatcaatattagatacaagggtgttgttgatgagtgttgtgttgtgtatgtgcaatgctgagtttttttttagtgaaaaagaagttagagcaatcatggatagagaggggaagtgtatcttttcttgaagaatgagagagatatagaacagagaaagagttcaagatatatagtttagagaaaataatttaaaagaagggaaagtgtaaatagtaattgccttactttattaattaatatttcaggctaatttttcatattttggattgtaactaagactcatagttaggtgaaattatacttatacctatacaaggataacaatggcttgaagagaaattgtattattntaaataagaatttcttcaagttt

SEQ ID NO: 5548 - DNA, 406 bp, Glycine max
cacctgccgcatgcaagcttgtagggttaaagtctcactatttgtatgtgctcatgcaacaattgttagccgtggctatacgagacatcttgccaaacaaagtcatgttaacgataactcggctgtgctttttcttccatgctatatgtagcaaagtcattgatcctgtcaagtttgatgagttggaaaatgaggccgcaattatactgtgccaattgtagatgtatttttcccctactttctttgacatcatgattcacttaattgtgcatctggtcagagaaatcaaatggtgtgatcctgtttatctacggtggatgtacccggttgagcgatacatgatgatcttataagggtatatcaagaatctatatcatccataagcatatatcgttgagaagtacat

SEQ ID NO: 5549 - DNA, 479 bp, Glycine max
  unsure (1)..(479): unsure at all n locations
cgcagggatattagcttaaaatgcttacaattagtttaccatggaattatgatttaggctttnttggggtatctgagcttgatggttcagctttcctcttaattcccaaaaaatgctctacctgaatcaattaaaaaaaaaattttaacagaaaaatgcaaagctattccacaaaagcactttttctaaagcttaaacacgtcctaaattacctttcgatcaccaagttaaacattattaacattaaacattaaacatagttacttacttcttagcatgccaaaatcactttttgccataatcaatttaaatttttttaaaataggttcttaatgcagccataagtcaactctcttacatcatctttggtcaatttccttctctcaaattcaaactcaagttttgaaatgggttgagtggatggttcacagtcatgttcgccaagccagtgaagtaaggatcagataatgcctgatatc

SEQ ID NO: 5550 - DNA, 379 bp, Glycine max
agcttgaacatggaaactctacaatgctaaaagtgatttcattcctaaatccaaatccacatagaacatcaaaagatgaatcatatttgaaggagagagagagaaagagagaaaaaatattgagattctatttttgcaagtcacaaaaatgaactaaaagcttttttacaatgatgttacaagctcttatgtagaaagttgaaattgcattattttttttttgcacaaaagaatttcatttgagcaagaatacatctcactacaacgaatttacaatattcacaaaggacttctccacttaaatcttcatgtttctaatccttgctcgttggtgtgagagattgactcactgtgacaagtttctacttaactcaaaatc

SEQ ID NO: 5551 - DNA, 466 bp, Glycine max
  unsure (1)..(466): unsure at all n locations
tgacatttctttgaaatgggtgaagggtctcatatgaagttttgtcatcaccttcgttctcagtgtccccttgtgttgggctctacttctcttactcaagcattacaaattaaaaaatatttgaagtaaaattgtaaaagtaaaatagtaaattttgttcctaaccattaattttaatccaacggttataattttttaaattgagattctacatttttttttataaattaaagagatccattcccggtatgtaattggtaagatagtgtacctaattttttttaatttgttcaaagctttgttggggaaggaaatcagaccaaaataaatgatttttttatttaaatttatataaataaaataaaataaattactcgagtttctcaagtttttacttattacactcaaatatccctacattntgtagccctaagaccaaaatctcctagaattttcatatatgaca

SEQ ID NO: 5552 - DNA, 433 bp, Glycine max
  unsure (1)..(433): unsure at all n locations
agctntaactaattcagaataaacatgcaattttaaagacatgaaaggaatgagattggagttctcaaatgcctgaatgcattcaaaactctcattggaaaagaaatccatgtcaatgaattttggatcaataatggaacaagaagagaaaagatttgtgtaccatatccgttgttcttctgatgagaacaatgaggaagaggaaatggaggagggaatctgcatttcttgagtctcggaatgccgttggcttcgactcgaagtaccctttcacttctttgatggttccaccatttgagggagttatttgtaaattaaataagtctaagtgaaagataatgaaaaaagatgaagtttgggctttgtggggagtgatatggacaacaaatgagtgagatatggcagaaagaagaaatgggaacgagggttcgcg

SEQ ID NO: 5553 - DNA, 463 bp, Glycine max
tgtctggctaagcgggagtccacttttctcgctcagcgtgcttattcttgctcagcgtaacttcttctacactatggctcactcagcgtaattccctctcgggttggaattgtgcttagcgagacatctaaagttgttattttcaaaatcccaacggtcagactatgcacaaatgtcttaggaagctccatacaaaatctaaagatgatccaacggttaaaaagtctgggatcgcgattttactgaaatatgtttgggtaaaatctgaaatctcataatttcaacttagttccacataactcagcatccacatcaagaaattcacacatgactaattcgagccatacctcaactcattcaagtcaaccatatagtgaaataacatgagaaatacaattaaacatcgattcataactagttatatttcatggtggtacaggtgttggttggccttcacaatgga

SEQ ID NO: 5554 - DNA, 366 bp, Glycine max
cggacactataaaactccgctttttgttatcatagcgcggcatgccatttttttccgttaggaaacccatttcagcccatataacaatcacgcgggccatatgtcgatctgtagtggaccgaatgccctcagctgaactctcgtgccccctattctatcgtgaaagcaatccttggctccatctgtttcactcacacttcatgatgaacgcactacatctcgttctgtctcttacatctctatcattctctgttagctgcaactgcaaagcatgtggagtctcttgagctgttggctgactgctgctagtgcaactaccagctctctcgtatagcttgctgcagctgcagaactctagtgggtgtt

SEQ ID NO: 5555 - DNA, 314 bp, Glycine max
agcttctcctccaaatttttattttagggggttatgcgaagaacaaaagggctcggccccttaggcatttctctctctttcgaatttgcttaggaaaatcgtttccgtgaagaaaatccaagccgaggcgcttccgtatcgtttccgtgagtgatttcgtgaaggttttccaccggtctacattctgtcttcatcggtccttaatcttctacgggtaagtaccatttacctagcttttaattcatctatgtacccgcggtggacccaattggatgacgtattttattctcggttatttacttattaaccccctt

SEQ ID NO: 5556 - DNA, 298 bp, Glycine max
tcagctaaaggaagggcagaatgagggtttcatgatgatatttggttctaaattcgcctatgctggcatttggctcgcttgggctaaagagaatactttagccataagcaagccactcgcctagacgagctcgagctcgcctgggtgagctgatttcgtccagcctaagcaagaagtacacctgggcgagttccccctacactagatggcttctccaatatatgttgtcatactataattatgcctggggaccattgggtgagggaatgcaaccttcgcttgaccttctcgaggtact

SEQ ID NO: 5557 - DNA, 419 bp, Glycine max
  unsure (1)..(419): unsure at all n locations
agcttattcgagcctgtgatgagcagcagcattgtttggaacttacatacttatacatccaatatgatgagtttgataatgctgcaaccactgtaatgaatcactcttctgaagcatgggaccacatgcaattcaaagatattataattaaggttgcaagtgtggagctctactataaagctgttcacttctacttgcaagaacattctgatantttaaatgatcttcttaatgtacttgccctacgtgtggaccacacccgtgttgtggatataatgcggaaggtctgtatgtctcagtctgttttctaatgtgttaagtcttaatcttatnttggtgaggttaatataccgttcgaaaataatttatgcaatattcttatttgttgcttgatttttatggtttttaagctggccaca

SEQ ID NO: 5558 - DNA, 404 bp, Glycine max
  unsure (1)..(404): unsure at all n locations
gcttgaggagcttcgccccttgtatgcttctactgggtctgctattccttccccgaggtcctattcagctagtgcttctgcattggagatgggttcagttaaccacaatgcacttggttctccatctgtcttgatgccacctacctcaacaccacctttgactccatctggagcatcttctcccattgctggatccatgtggtctcaatctaatgttgcggtccctaccttgcagctgcccaaaagcagattgaagactgcatctactgtaagagatactgacttagatatggaactgcttggacttgaaacacattggcgtaaacaacagctaatgatggatgagatatctgctcttttctctcccaactagaanaattccatgcctaatagtccatcttttc

SEQ ID NO: 5559 - DNA, 427 bp, Glycine max
agcttctgcttgagctaggatcatgtgttgttattagttaaggaaagaagagaagaaaagtgcgtataaatagtaactcacaacttcaaatcttttgattgtgaagatcttttgtgataagtgagttatgttactttttttgagttcaagaagccaccttatttagtcaagcaaggttttgcataatggattgatcaggttgtgtttatctttaactctagtttttcatgtatggttttacacatttcttgtttgtgcatgaatttctgaaggcatactagaatagttgtttctagtttaggctaagggtaggtttctcttaggctcttattcagagaggaccctagtgttgggtgcctaagtctctttttctcggtgagaactgagaatggcctatagaaatctatatgcatagtggaaatctaat

SEQ ID NO: 5560 - DNA, 405 bp, Glycine max
ctttatagaaggttcgttcctaatttctctacaattgcatcacctctcaatgagccggtgaagaagaatgtggcatttatttggggtgaaaaacaagagcaagcctttgctttgctcaaagaaaagcttactaaggcacctgttctagctcttcctaatttttctaaaacttttgagctagaatgtgatgcctctggagtgggagttggagctgtattgttacaaggtgggcaccttattgcttattttagtgaaaaacttcatagcgccaccctcaatcacttaagtacatttgagggcaaagcaagtttaacaagaggcatgcaaaatgggtagagtacctagagcaatttccataggttatcaaatacaaaaagggaacaacaaatgtggtagctgatgccc

SEQ ID NO: 5561 - DNA, 437 bp, Glycine max
  unsure (1)..(437): unsure at all n locations
agctngtcttctttctttctttntaaccaaccactgctaaatctaccatttatgaaatcataaggccatgtttccatggctctgaaaagcatttttacctatttatttccctcctcaaagttcttcaacctcaatgcccgattgttctttttacctttctgctcttggcccatttaaaccaacttctggaagaactttttcacagcaagaccaagattttagagcaaaagccaaatatgagatgagcttttatcacatttcttgaaatattgttttattattgactaaaaagttattagcaattgtaaaatataagttttacttaattatgtaataaattatatatacttacatgtttatgacttcttataacgtgtttgattagaaaaaaagaatgggttgaaaaagattaactgtaaaatatgtcactgattaac

SEQ ID NO: 5562 - DNA, 488 bp, Glycine max
tccatccctgcaaacgcacaagagccataaaactcattcataagagagtggggtagttgaagatttggagatagtatggtgagataaaagaaaattcatttttaaaaaaattagagaataagtgaactagcagccagctgctcaggcataaagtttagtatagctaaattcatgtactatgacagatctaagtgtaagagagaagggacaagccttcaagaatttgtgggaataatacatgtagatttttgtaatataacaagcaacaaaattattgattttcttccatagttttaagagttctctttttgggtgcataaattttattcccagaaactaaaattcctggatttgccactccatgcaaacctgccaactaataatcatctaacagcaagtaatggatagttgattctgctctaaattatgtggaacatattagtaacatgagttgaaattaagtggagggagagaaattaagtggagag

SEQ ID NO: 5563 - DNA, 466 bp, Glycine max
  unsure (1)..(466): unsure at all n locations
ggatccttaagtcacctgcggcatgcaagcttaagccacttttgtaccaagtctgcatgtatgctgacaccgtcacaatgcatganaagaaggaactntgactaaagttaaaaagttaaaacttaaaaaactaaaaaaagaaagacaaaattataaaattagtcttccattttatctccaatttctaatttggtcatcattaatttaattcacaaaattggtctttcaataatttaattcacaaatttgatcccttatcttataaaatcgtgcaatgttggtctttcagatcacaacgttgaccgttaacatgtgaccgttaacatcacctgttaacggtcaacgtctaattgtgatctanaaaatcaataatagtgtacgattttataaaataaggggaaccaaattgtgaattaaattattgtggaatcaaattcaaaatggagatanactgagaaataaaaat

SEQ ID NO: 5564 - DNA, 485 bp, Glycine max
  unsure (1)..(485): unsure at all n locations
tgaacgcaagttcagtgctgtattcttaaattatgtatgagctaaaattttctccctacacgtgacgcctaatgttaccagcttaagcttgccgcaacacctgtatataattagttagatagtatatttaatcttaataagtgctgttaaggtttcattctatgtaaatgacattttttcatacaccaaaggtaaaagttatgctttatgctcacaagatactgtgaacgctaacacctgaaccctccgttacgtatcacttgatttcgatatgacctagtatgtttaaatggtctttaaatatgatgcagaacttgctagcagaaaagccaagtacgttttgtaaatcctcgtaaacatatggaaggaatcatggatattcattcattatgaagaccaactgtacgcttgaatatntgtaataatgttcctccaattacaagcatttctcctccttgctctaattacaagcatttcaattaaat

SEQ ID NO: 5565 - DNA, 409 bp, Glycine max
acctgcgagctgcaagcttgctcctctcttacacctgcagatgtattctagtttctcacacgagattttatgttgagtaaagctcgatccagcgatctcttttgggaagctgtttggcctcttctgttagcaaaaggctggcgttctgaacagcctatagatcaagttgtttgtggatcaaaacaatctttggtttttcttgtacctggcgttaacaaatgttcaagaaggaaactgataaaaggtgaccactactttgattctataagtgatgttttgaataaagtaacatctgaccctgtgcttcttgagactgaaagtcaagcaactgacggcagtgtatatagggaaaaaacataatacaacgagacctatagggtgtgccaaatatggaacaagttcattacct

SEQ ID NO: 5566 - DNA, 410 bp, Glycine max
gcatatcagctctgaacgggggaaacagctctattaaacttctataatctatgcataacttttcacccaactttgagttgtttctgtttcattcaaatgctgttcaataaattactacagaatccttctcaaagaatcagattttatttaatcttttcattatttttattgctcatacattaacatatgttattttatgctacagaatggtcaggtatctacttcgtatgccttttacccatttaagctaaaaaagagtggagacgaggacctgctgcatatgatcagatcatgattatgcctttactttaacagcttgctagatcgaaatccaaatagaagcagcgcgtaaaaggctaaaagcctgcaaatggatctttggtgctctcttcctcctgagaactggagag

SEQ ID NO: 5567 - DNA, 388 bp, Glycine max
gctttgtccacaagaaaatcacttttatccgttcaaaggtccaatgccttaaatggtctttttacttttaaataattaaaatgaacctttagaagtctaaaatcaatcctacgtgtaattttctttctttaaagaactacgtaggtctgagtttctcatcacaattgaggatacgtaagagcaagagcctcactcttgtcgaccccaaaaagataacaaatataaaaagggaaataaactaaaaattgaagtcatgattttgcacattaaattaaaggctgtcatcccttgtgacggacgcgtggggtgctaataccttcctcgtgcgtaaaacaactcctgaaacctttattcttaatgttcgtagactgggctttggttttctaat

SEQ ID NO: 5568 - DNA, 460 bp, Glycine max
agccgcccagctcgcccaggcgagcaaggttgcttcctccataagcaacagccttctggaggaatcttctggagggcccaagtgggcctggttgctatttgcaccccctgtttactaaatgcacccccttttctattttttgtaattctttttccgtaacgttacgaaactttacgaatatcgtaacgatacttattttccttccgcaaggttacgaatctttacggattatgtatttactcttttttggctttcaaagaagttacggaaactcacggattgtgcaaaaacacctcttttcgatttctgccacattacggaatttcacggattacgcaagcttgcttccttttggatttctgagacatctcgggacttcatttattgtatgtcatcaagtaataatccccggacgatatagggtatgacagttgcccctctttacttacctctcatcgga

SEQ ID NO: 5569 - DNA, 420 bp, Glycine max
agcttgttgagattgagggagtgatttaaattctttaacatgatttgtgaaatatgcagcaagtggagtttttgctaatttcaggcacttttgtgtttgccatctgaaaaaattacactttaaagcaaccaaatttattggatggttggtatgagatttggtttagatgagataatttcttgcctgattttgaaccttttgcagtgaagggggagaggctaatggcaaatttaacgctgaatttaacgtgtaaaaagcaatatcatagagggatttccataccaagtttgtttatttcaggagcttatttggaaaagagtcttaagctccccttccctcactttgccccccttttcttaaatttaactgaacatttttcaaaggagccataacaagttgacattttttcctctttttttt

SEQ ID NO: 5570 - DNA, 474 bp, Glycine max
  unsure (1)..(474): unsure at all n locations
tcagataaaccatagaatctggcgataggtgcagattntttattcatggccagttgggttaccaggttaaccaaggcatctagtttaccttcaagcttcttagtctcacctgatgaattcgtggctatttcatgcactcctctaatgaaaatagcatcacttctggcactaaattgctaggagtttgaagccatcttctcaattaaatttctggcttcagcaggggtcatgtctctaagggctccaccactagaagcatctatcatacttctctccatcttgctaagtccttcataaaaatattggagaagaagctgctctaaaatctggtggtgagggcaaatggcacataatttcttaaatctctcccaatattcatataggctctctccactgagttgtctaatacctgaaatatcctttctgatggtcgtggtcctggaagcatgngaaaagttttctaagaatactctc

SEQ ID NO: 5571 - DNA, 430 bp, Glycine max
agcttaccacgttacagggtatatgatgtgaattatattccttttgtttctaagcatagaacaatatatcatttatatttctgaaaaaattgtttggttgtaggtagtaggttcaggcataaagttagaaagaaatttcttgtttcaaaagcgtttgaatcttctttgttgtgtttggtttcccactcctttgatcccactcgtactacctattcactgtagttgtctgctatgtatttctttcactcccaccactgataattagataggtatttatatatgacatttggtttttataagcaattatatgcattgtgagtgaaccttagtttcccgtttgagattctatacaatgattaatacggatagtttgcattaatcgttgtatagaatcttcaattgtccgtttggacagtttgagaagacccaa

SEQ ID NO: 5572 - DNA, 476 bp, Glycine max
  unsure (1)..(476): unsure at all n locations
ngaccaatcccgacccaacccgaacatagtcagtcagtgagaacctgtgacgtacctaaacaggcgagctcctggcagtcaaccaataaaagaacaaagtccatgaagcaaggaggcttgtgtagcggctggccagctatgtatcttggatggtatctgaaatttagcctctagtaatcgattaccaagggtgtgcaatcgattgcagggcttaaaaatggagacaagagattaaatggcctctggtaatcgattaccaagtgtgtgtaatcgattacagggcttaaaaatgcagacagaatgttaaatggcctctggtaatcgattaccaatggtgtgtaatcgattacacagggtgatagggctctggtaatcgattaccatttaggtgtaatcgattacatagtgtaatttgtagatttccatgtgcaaaggctgagtaattcgtgtntaggcactggtaatcgattacatac

SEQ ID NO: 5573 - DNA, 424 bp, Glycine max
  unsure (1)..(424): unsure at all n locations
agcttggttcaaagctcatccagagcttcccaaagcagctaatccggagacttcattattccttaactagaagtcctaactcgctgcatatttagccaactcaagatcaaaagcaagcttggcaaaaaatctcaaagaagttcttcaacttctacagcaagaagaagaagatggctctttctcgaagaaggaagaaacaaaatcatcaaaagaagatgacacattttaccaaaacgagaatgattgttttggtatttcactaaatgatgattaattgtaatctatttgtactgtgaaaatagttccggttacataaccggtactgtagcaaacagtaactcaatcggctataanaggagtcatcgaccctattgtgagacaccctntgagatagtcagatagcagacttagagagagaagctct

SEQ ID NO: 5574 - DNA, 480 bp, Glycine max
  unsure (1)..(480): unsure at all n locations
tgtatctatcatgtttatatttgagcttgtagacccatctgcagccaatacaacgtttgtcaacaagtaaagggaccagagaccaagtgttattagataatgtaaaagttagttgagtattttgttatgttagttgagtattctgttatgttagttaaattatgggcttgaaattaattagttagtttgaccttgtatataagcatcagtataagttgacaagtgaaaaagaattaagaagccaagaagaatgttgtcattgcaatgccaagcaacatgattcgcatgacccaaagcaggttcaataattgaaccatcaacgaaaccaaatttgttcttgccaatgaagatgactcttcttggcaagaaaaaatttggtttcattgatggttcaattgttgaacctactttgtgtaacacctcaacgaataacaccaganagagaaggatctggagactgtgcatggtttggactgtaca

SEQ ID NO: 5575 - DNA, 381 bp, Glycine max
agcttcaggttgcttattgattccagattgctgcaaagaaggatagagatctgtatggtgatctgtaggagaacatagaccacagactcttgcaacaggtgtagatttcttattcatggaaagctgagttactaggttgaccaaggtatcaagttttccttcaagctttttattttcagtagatgaagatgaatttgtggccacctcatggactcctctaagaacaataacatcatttcttgcactgaattgttgggagttggaagccatcttctcaatcaaattcctagcctcagcaggggtcatatcaccaagagctccaccattgctagcatcaatcatactcctctccatgttgctaagtccctcataaaaatattg

SEQ ID NO: 5576 - DNA, 487 bp, Glycine max
  unsure (1)..(487): unsure at all n locations
tgtaggattatggggtacccatcacatgtggtactaggtggcggtcgggcgatggtgcacaacaagttgttcacatccacaaagcgcgcataaacccaccatcccctgttgcccacctacatctgagctcacgtactcccacgtagcccatatcctcgtttctctcaacaccgggtccccatcaatcctctcaagcttccacaacatccaagcaaaacaacattcaaacagcacaatctatcacagccaagaaaacagagcagaggcagaaaactctgccaaaacaccaaccaaaatcacagcttttctcacgtaaagaccacagtaacaattccttcgatccaattcgttaaccggtggatcgactccaaagatttactggaagtctatagtgtataagcctgcattntgaccgttgggatatactagcaaacatccagaactcattctgcactagactnntcacagccaaccacacacaagcatt

SEQ ID NO: 5577 - DNA, 350 bp, Glycine max
  unsure (1)..(350): unsure at all n locations
agcttatacttatggcatcttccgccttatgacgactatcccgggcaagacgatgaggaaggagatacccatctcggccccctgctccaccttaaagatctgtccccacatgaactaccccaaccgaacatagtccgccatattccgacctcacccacacccgtaaaagaatctgttcccttcgcggaaaataagggaaagaatgagggcgctcgaaagaggttaagagcagtcgagggccttggcaattacccattctcgtatgtagcggatatatgtcttgtgcccaatatcgtcattcctcctcagntcaaagtaccagacattgataagtacaaagggacgacatg

SEQ ID NO: 5578 - DNA, 452 bp, Glycine max
tgccgcccagctcgcccaggcgagcaaggttgtttcctccataagcaacaaccttctggaggaatcttctggagggcccaagtgggcctggttgctatttgcacccccctttatactaaatgcacccccttctattttttggtaattctttttccgtaacgttacgaaacttcacgaatttcgtaatgatgcttatttttcttccgcaaggttacgaatccttacggattatgtatttactctcttttagctttcgaagaagttacgaaaacttacggattgcgcaaaaacacctcttttcgacttccgccacattacggaatttcacggatcgcgcaagcctgcttccttttgatttctgagacgtctcgggactacatttattgtgcaacaaaggacgccaagtatctcatagcggctaaccaaagggtgcatgtcatcaagtaataatc

SEQ ID NO: 5579 - DNA, 366 bp, Glycine max
  unsure (1)..(366): unsure at all n locations
agcttataacaatatatttgtctactcaccttttttttcattttcctactgcaacctctcttcttcactctaatgacagtaaaaaaattgtgacaaactccgtaaaaaaaagtgaaaaatgaagatttgtcatagatgaaaagggataaaaacttgggtggttatgggataaagaaaaagcacggcaagaacgggctttggaaccatttccaaaagctcttcatctaagccataaacgtcacagcattctgcctcatcctctcgaagcccaagcccccaaaggaattgcaaatcacccaaatcattatacaacttcaattctttcgacgatacctttgcactngtcattgccctccttttatactc

SEQ ID NO: 5580 - DNA, 480 bp, Glycine max
  unsure (1)..(480): unsure at all n locations
cgcttgcatatcctntgataaaccttcgatagtatctcagtgaggcctaagaaacctcttagctgcttgatattgagtggtgtaggccactctagaactgcctgcaccttagtagcatccatagcaactccttcacctgaaactatatgtcccaagtactctatctccaatacaccaaaagagcatttagacaacttagcaaacaaaacattttctttcaatactttgaatacaacctctagatggcataagtgttcatgccatgtggaactatataccaatatatcatcaaaaaacactaacacatatttccttatagcatgttggaaaatatggttcatgaaacactgaaaagaagtcggagcattggttaaaccagatggcattattgtgcaaaattttgactatgatatggcaaaattgccttattggccagaatttgtttattgttgcagcgaaaatttctttatctgctggtta

SEQ ID NO: 5581 - DNA, 414 bp, Glycine max
  unsure (1)..(414): unsure at all n locations
agctngaagtgtggtcatggaatcattaaagttgttaacggaatataggatctcctctccttgttgttagttgagttactagatgacttcctactcttttagtatttactctttcgattcctatctctttacaattccttagctcatctttccaaaaaaagaaaaaaaaatcctactctttcaattaacccaaataaataatatctataacagttataacgacagtatcccattttagtatttactttttattaaacacttttattcttttatatgcgaaaaaaaaaaagaataaaagagaataaaatacttttattctttatttctattaagtaactaccattatttttcatatcttatttaacttttattcttgtctttatataatagagagaaagacacgacacatccacc

SEQ ID NO: 5582 - DNA, 403 bp, Glycine max
  unsure (1)..(403): unsure at all n locations
gcttgacactggaaccaaatggtaggaggggaatgaataaacatttcttgactgtaaaaaggagtatagaaaggttgggggaaggcaaggcaatgatgaaaanttgtgagttcagaatcaaaattcagttttgagaggtagaaatgatgcagaatgtatggccacatgaataaaatttatgggtgtggctggcagcctccattatgaccacaatccacctcttggtaatgcacgcgcaccaccaaactcaaacactagtatctcctaagcccacactttcacacactgtcactctcacacgcaaggtatccaaccccaacataccaacactcactatcacaagtcacacacgctntacaattttgcatatacagtcactccctcgcaacatccccgcatcaca

SEQ ID NO: 5583 - DNA, 426 bp, Glycine max
  unsure (1)..(426): unsure at all n locations
agctntgatgttgttagttgtcatttcaatgtctcatagtgtcatcttgttggaatttgagaagaagatcaataaaatcttggtcctctacttcggctccatcttcttttgcaattntcttcttttcttgatgctctcttatgatgttttctaagaccttgtccacctgcttgtgtaacttcttcaatttggccatctttccagttatgaaatataaaaatggaattgaaggaaacacgtcagcaaggtcaaatcctcccccggattctacgatttttcggatcaaagacacaacaaactcatcttgctccttgtatatgccaccaaatgctaccctggaaatagaggcacatatcaatgagaaaanttgactggtgagattgattggggaacctgctgcttcgcgaatggagttgataaactttg

SEQ ID NO: 5584 - DNA, 436 bp, Glycine max
  unsure (1)..(436): unsure at all n locations
ctaagctgcttctacatggatgacctcctttaaagttcccaacaaaacactcactatcctaagagaaaattgcctaaaattattacacaaaaatggaagtagggtgacctattggaggctcccaacttacttccaatgaaaggcctttttgttacaaaatttgaaagcaaagcaaattgccaattacaaaaagaaagtcctcaattgtggtggctattctctctttagtgtttcactcaattgtggtggctaaaccaatagagttttaacaagaaaaattntcaaggattattcaacaattaaagcaatgaaaagcacacaaaagcaggctaggacccaaagagaaacctagaatggctctagagtagagtagaanaaccaaaaaaaagactgaagaaacctctagttttgacacttttgtttcacaataatttca

SEQ ID NO: 5585 - DNA, 431 bp, Glycine max
agcttcttgaagaagcctcttaatgaagcttcttgaagaagccttttaatgaagcttcttgaggaagctacaggaagctgcctcggtaaaaacgcttctcagccttcgttaattgttggatcttctcgaaatttggtctacagctacacaagacacttttccatgatctgaccgttgggatctttgtgaagatgtctggagtgtgcttgaagcttccattcccaagagcatttcttatttaagcacttcaacctttgctttcgtgtagcttaggaaaaatgtcatttcttcttctttctttcttccaaagccatttctaatgtcccaagcactttctccatcacccacagccagcattagccaccacaaaccatcattgttctccattgaaaccccacaccgagaggaacccttcaaccgaagcggaatct

SEQ ID NO: 5586 - DNA, 458 bp, Glycine max
  unsure (1)..(458): unsure at all n locations
actaagcttcttatccaagcactctcttggtggtgaaactccttcttcttctaccattaaactttaagaagaaaaggactccattgatgaagaagatccaaagcctacaagctccacatggagctacatcacttctggcttacaagtattctcaaggccactactagcacaagccttagactccccttgaatctaagaacacccaagtattgttttgtcactaagtcaatcatggctttcaaaaacaaaatnttgatatagaatcagagattatttgcaacactcaaagagtaaacttaaatgaagctttgatctctcaaaagtactttgtatatcacaaaggacgaactctcttaagctcaatgtgcccctcactattgcttttcttttctcttgtttcttaatccacgacttttgtttntttttttcatgttcgttgttgatcttcaacccttgat

SEQ ID NO: 5587 - DNA, 437 bp, Glycine max
  unsure (1)..(437): unsure at all n locations
ggcagcaagcttttatagaatgggtgagttggagaaatgttcatgatatgctaatggaagagtttcaatgttgtttatattttcctcttcatctgatccttttaatgtagtgtctaccattaaacagaggttggcttcttcttcctcttctatttcctcattggatgatgtgttgttcagctcttcccatgtgcttatcaatactttcttgttctttggttagatttacttttgcttgtttagcaagatctagatattctgacttgaaatgtcctagtttcatgtactcatagcatacgatagagattttctacttgtcattntnttctctatatggnttgacccactccttttcttccacatgttccttaccttccttgacatgaaggcaaactgatcttctttntctaaaccttcatcattgcactcatcatcat

SEQ ID NO: 5588 - DNA, 486 bp, Glycine max
ctaacactgatgactgtcccaacatagccacagagtatggaatcataagcatagcaactgttctgctcttcaaaaatggagaaaagaaagcgtaattggtgcagttcccaagtccaccttgtccgcagcagtggataaatatgttgatgtctaaaactggaaaggaaaaaaaatgttataataaggaaacgcttgatcataaattatagaccatctttcattttatggttttcaacacttcaaaaaagtactttgttgtatccacatcttttataacattttgtaaagattacattgtataaattcccgatggagggaaatcttcagtccttcttctcttctctgttgttccttctgccatccattgcaattcacttcccattttcgattactgaaccaataatctatcttgcaatgttaatttgaaaccataactccaggtttgtgagtaaattgaaattccaatgtcttcatgggcctttctag

SEQ ID NO: 5589 - DNA, 427 bp, Glycine max
  unsure (1)..(427): unsure at all n locations
agcttactctcttcaggcactactatgtcgtttttatctgttacatttacttcaccagggttgtcgtttatgccttggagactattacctcctatcgttattcttggaccagtgtggttgctgctgagttggccacccttgctttctatttgtttactggctacaagttcaagccagaggctcacaattcgtattttgtcatcgatgacgaagaggaataggctgccgcagaggccttgaagcttgaagatgaatttgaattgtaatttctttcanaatacaaacatagttgttgaacaagttggtaccatgctcagcaatgctctcacgtttcatctcaacagccagtagaaatttgcatgttacattgtatgggtatagtcattattcatgaatcattgtgctatattttgtgttctggactcat

SEQ ID NO: 5590 - DNA, 476 bp, Glycine max
ctaagctatgctgcaacatttatatagacctcctcagcagcaaaaccaactttagcagaataattatgacctttcaagcaatagatacaatccaggttggaggaatcatccaaatttgagatggacaagtcctccacaacaacaacagtctgttcctcctttccaggatgctgctggtccaagcaagccatatgttcctcctccaatacagcagcagtcacaataaagacaacaagagactgaggctcctcctcaaccttacttagaagagttagtgaggcaaatgaccatccacaatatgcaatttcagcaagagacaagagcctccatttagagtctgacatatcatatggggcagatggctactcagatgaaccaagctcagtcccaaaattctgacaaattgtcttcacaaaatgtgcaaaattcgaaaaatgtgagtgccatcaccttgaggtctggcaaccaaattcaag

SEQ ID NO: 5591 - DNA, 341 bp, Glycine max
  unsure (1)..(341): unsure at all n locations
agctntacaacagatgtcactctattttatattttcaaaggatatgctaacaaggaaacatatgtatattcaccaggaaaacattgttgtggaaggaaattgtcgcgctatgattcaaaagatccttccacccaagcataaagaccctaggagtgtaaccattccttgttcaattggagaagtcactgcgggaaaggctcttattgacctgggagtcaatattaacttaatgccactctccatgtgcaaaaagttgggagagttggggatcatgcccactaagatgactttacaacttgttgacccctccattaccagaccatatggagtaattgaagatg

SEQ ID NO: 5592 - DNA, 337 bp, Glycine max
taaataagcctgctatatttaatggcgcgggataccattattggagaccttgcgtgcgcattctaattaaggccatagatctgactatttgggacaccatagaaatacggccctgcattccaactatggaggcaagaaatacaaccatagaacaacctatggatgaatggagtactgaggaaaaaagattaatccaatacaatttaaaacccaaaaatataattacgtctgctttacgaatggatgagtgctttacgcgctcaaattgtaaaagtgccaaagatatgtgtgatacgcttcaagtaactcatgaagtgacaacagatgtaaatgatct

SEQ ID NO: 5593 - DNA, 415 bp, Glycine max
  unsure (1)..(415): unsure at all n locations
agcttggcagggtcgacaacaccttttactatatctngatcattngccaagtctgtttccactgattctactcctgcacatacaattattactacacataatttttttgggtgaatctacacaatattattagtatgactcgtattacgtagcaatgattgatttatcatttacggattatgaatgtcagtttttcgagtgttaaaagagtagggcatggaatgtattaatcattaagtatttctaacaaagttcagaaacttttccatgaagaagttatctttcaaaaagaatcctctattcatggaatcaatcaagggtggaagggaagggaagttatctttgaaatacctctaaccagaagagtgctattcacatgacaacccaacanaccatagaggccatcaacccggag

SEQ ID NO: 5594 - DNA, 482 bp, Glycine max
  unsure (1)..(482): unsure at all n locations
ngagctctntatcaacctgtgcctgcaaaanatgcttaagctctttgtaccccagattctctcgctcaaaataaaataaagcacaccctagaagttctggacaatgcttaggaatggcaaaatggtacaaaaatcaagctattaattacctactgagtcacaaaaagtaaacaacaaaaacaacagcttatctcttatgtatttgttgtaatgaaatcccatattcttataattgaatcggaaatccatttgattacttttgagaaggcatgctagtggcagttgtagtgatgttgtttgcatggttgctacaaaataattagtcattttctattcttgtttcctgatttgaggaccaccgctgtccactgngtagtactttataaccaacatgaaattaacctagaggccagcctcaccattttcattatctgtcgtcaagtggatgattatattttgaacgaatcanaagtgcaataaac

SEQ ID NO: 5595 - DNA, 433 bp, Glycine max
  unsure (1)..(433): unsure at all n locations
agctngaggttgcccgctaagcacgattgcacactaagcctggattatgcactaagcgagctatctacttcttccaacttttcttcaaggctctttcttctagttttggtatcaattttcctataaagcacttgaaatctttttcttttgaattatgccaataaaaaattctgaagatattaatttctttattatttcattaaaaacaacagtaaagtgaagaaatttcaatcattcatggccaaaattgattatcaaattaactcaaattttgcagttatcaagttgattgacagatagatggagtttcacacttcttaagtgtgatctgagcgcttatgattgtggtgagaaaagtgatatgttgctctttgaaacttgacatccaactagaattgaaaatctattgaagttcctacggaaaaaatcttga

SEQ ID NO: 5596 - DNA, 482 bp, Glycine max
  unsure (1)..(482): unsure at all n locations
agaattatacaataacactgtgtgcccaaccatgtttcccttcttaattatcatgctatcatggaacttcttggtcttttctttgtagaacttgacattctcgtaggcttctaggcggatctcatctaactcactcagttgcaactttctttcctcaccagcttgatccatagagaagttacaggtcttcactacccagtatgctttgtgctcaatctccactggaagatgacatgcctttccaaagacaacccgataaggagacattcctatgggtgctttgtaggcagtcctatgtgcccaaagagcatcatctagcctggtactccaatctttcctgcttggctacacaatcttctctaanattctcttgatctccctgttagaaatttctgcctatccattggtttgggggtggtatggtgtggataccctgtggacaaccccgtactttntaagcaaggcatgcattgatttgttcn

SEQ ID NO: 5597 - DNA, 378 bp, Glycine max
  unsure (1)..(378): unsure at all n locations
agcttcagaagagagtgatgaggtattagccttaaaggcagagcttgaaagagcccgagtagtctaagagaagttcaagtccatagccatcaaagtctgaaaagagtatgatgaactaggggacgtcaatatggccaccgctgaagccttggaacgagaaaccaataaggcctgacaggaagaacacgtgccaacaaagtttttgaggggctttatagggcagcactagtaagctcaagctccgaagaggtgaaaggaatcatcacgggtcaaaggcatgatcttgaaggacgagctaaaggcttaccttangtcgaaaagatatttgtcccaacagttaagcgagactgaagggaatatgtgggctcgcatcgatga

SEQ ID NO: 5598 - DNA, 399 bp, Glycine max
gagcccgggtagtcaaagagaagttcaagtctcatattcatttttgtctgaagagagtatgatgaactaagggacgttaatatggccaccgatgaagccttggaatgagaaaccaagaatgcccgaaaggaagaacacgaccaaaacaagttttgaggggctgtatacggcatcactaacgagctcaagctccgaataggtgataggaatcatcacaggtcaaaggtatgatctataaggactagctaaaggcttgccttatgtcgaaaagaaatttgtaccaacagttatatgctagactgaagggaatatatgtgccatcatcgattagtgcaaagagaagcttaatctagcggcgactcatgagcaaaggctagaggatgagtatgccaagatatc

SEQ ID NO: 5599 - DNA, 347 bp, Glycine max
agcttgtcgaaattgccatgtttgggtgagttatacatacccactctgttttagggtttttgtgatgatgtttgtgatgtttatatgctgaaattgctgatggaaatctgttagagatgaagggtagaactaacccaaggttagaaagtgagaatgtgatgttatgagtggaaaaagagtgagactttgagagttggaaggctaagtctgaattctgtggtaaatggaggttaaagtgagttaatactagcttgaaatgtcatttatgacatgtgagaaaggttatgctgagctatagagaaaaacatatgaccaaagtgaaccaagagccaattctagggcaaatt

SEQ ID NO: 5600 - DNA, 467 bp, Glycine max
tcgtgggaaaccagtgcatgaaggggaaggttggatggtgtatttgatctgtgggattcacaatcatgaattggccaagttcttagttggacatccatacgtgggcgattgactaaggatgaaaagaaaattattgctgatatgacaaagtcgatggtgaaaccaaaaaacatcttgctaacgttgaaggaacacaatgccaacagttgcaccacgataaagcaaatttacaatgcaagaagtgcatatcgttcttcaataagaagagttgataccgaaatgcaacatctgatgaaacttctcgaacgtgatcaatacattcattggcataaattgaaggatgaagttgtggtgtgtgatctgttttggtgtcacccagatgcagtaaagttatgcaatgcatgtcatctggtgtttttatagacagtacctacaaaacaaacaggtacagacttccactacttgac

SEQ ID NO: 5601 - DNA, 425 bp, Glycine max
agcttgtcccacttcaatgacatctttcttattgagattatccttaggtggaagcctcattttaacgatccttcaaacaaaaagtataaccttggaggggacattcaactcccaaataaaggagtacttgttgggaataaatatgtatatccaaaatccaatccatcatattatcaattttagtaaaaaattattctttattgtattatcatatatattgcttcattaaattgttaatttgacaagtctttgattaaaattagaggtttgttatcatgataaagaatatgatgataagaaataagtcctttataattttaatctaaattgttcttgatcgtaagattattgtgaataggaaatcaataatccgaatagattaatatatatgtaatgatctctattggataaagaataataaattt

SEQ ID NO: 5602 - DNA, 465 bp, Glycine max
tggagtggtgaaccacctgattactcaggattgaatgtgtttgtatcactggcctttgctcatgttaaacaaggaaagcttgatgcaagggctgtaaagtgtgtgttcattggctatcctgaaggagttaaagggtacaaactgtggaacctggtgagtcaaaatgtattatcagtagggatgtaacctttgatgagagcagaatggcaatgctgagtaaggatcagaaggataacagctcaagtaatgagagtactaaatttgaggtgaagcatttagagttttttgatcatgtcagtggagatactattgatcacactattcaagcagtaattggtgataatgaagaattggctactaagcatgacttgtccaattatcaattggctagagatagagcaaaaagggtgataaagcctacaaagaggtatggtcatgctgacattatctgctatgccttgaatg

SEQ ID NO: 5603 - DNA, 416 bp, Glycine max
  unsure (1)..(416): unsure at all n locations
agcnttgagccaaaatcctgactcaccataaaccttgacccagggtgagaatgtcaatccttacccttggaagcggaaagaatagaagggaaatttccaatcaaagaaaaggaaagaaggaagatttccaatcaaagagaaagcaaaaaaagaaaagaaggaaaattccccaatcaaagagtgggagaaagcaaaaagaaaagaaagaaaattcccaatcaaagaatgggagaaagtaaaaaatgaagaagaagaaggaaagaaagctcctgatcagggatcgaaggaaaacagaagaaatgtgcagaaaggtctttggaccgaacaatatctgaacaatacaaaattgtcaccaaatgaacaaaaagaaggaaaggaaaccacgacctanaatggtcttctccctttgattacca

SEQ ID NO: 5604 - DNA, 426 bp, Glycine max
  unsure (1)..(426): unsure at all n locations
ctcataagtgaaatcaagtgcaaccatctcccttagagtcctctcacgaggtggaggttgagccatgttctcagtatgaaaattagtaattgaatattcagaatcaccaacaacagaatactcacaatgctcaaaatgctcacaatgcatagaatgatcaggatgcacactatgcctaactaatctatgaaaggttctatctatttcaggatcaaagggttgtaaatcacctggattgcccctagtcatgcaccatatgcagcaaataatgtgttctcaaacaagcacctaacaagggggtaaaactacaactatagtcaaaagatatccaagtaagttgaaattntgtgagcaacaccctaaaataatgaatagatagcacanaaaaantcaaacaaaaattaaaagtaaaactatgaaaactac

SEQ ID NO: 5605 - DNA, 417 bp, Glycine max
agcttgcatggtatattggttacacacgtacttatatgtgcaggcgtggacaagggagaaagaggaggaaggggcataatatgaatgaataaatgggtagagtttcacttttgcatgtcaatccatacaaaatgcctttaattgaaccacaaaaagaaaaatacctggcgattgtgcacatattctatgtatgaaggcacatctggatagcggacatgttcactgtctatagcaggagctttctgaaagcatacaatatctccatcttctaactgcaaatatagaaaaacagatcaataaaccaaacaaagatacagtaactcaaagtgcatcaatggtgtttataatttacctggcttgctcgaaatgttagtttcttatcaatgggttcacacataacatttggctcagacttaa

SEQ ID NO: 5606 - DNA, 446 bp, Glycine max
ataagatccctggctttgatgataatataggggtccctagtcttcctgttgtttgaaacagtcatggaaccctcaacctgtgcattgtcaaaatcgaaggcgaagttagggtttttgattgaaactagaggaggaaaaagagaatgagtaacagagtaaggtagttacgaggttgagttcgcaagcaacaccgaactccttgagtgaggatttgaccatgggccaagcttcttggaggtacttttcgcggtactgagggaagagagtggagaaggagctaacttcaagcatgccgccgtcgttccacgaagggtcgaacttgttgatcttccagtggtcgatgtttgggtcgtcgtcccatggctttggcttgtcgtgctttccctttcgcttctccttctgctcaagtgatcgaggttcttcttctacgccattctcctcgtctg

SEQ ID NO: 5607 - DNA, 434 bp, Glycine max
  unsure (1)..(434): unsure at all n locations
agcttcaaatttcttttgcttaccgtatagcattctttatctgtgtctgactcggctatgtcaagtgcccatgtgcgaatccattcaaggccagtcgaaatttcagcatttccttcgagtaaggtggatgaaatgtaagtaggatgaagggcaaccaatacacatgcagctgcaaaaagcacggctcttctcacatatgcttcctggtgatggcatacctccctgcatgagttaaaaagcaaagtgacaagttttcctgtattagcagttagcacactagcaaaaacaacaaagcaccaacaggaaatataaacatatacaaccaataggacaccaaattatcaattccattagcacacacactntgagggggtgattaagattttagattatgtcaatcctcatagggtttgcaattaaatagacaactaatg

SEQ ID NO: 5608 - DNA, 460 bp, Glycine max
  unsure (1)..(460): unsure at all n locations
tgtaagagtataactctattagtttaaagctacctatggttattctgttatggttaggttaactgtgttagttagttagttagaatctctgtatgcataaatacagttgtaaacagagattcagtaactaattgtaaaatctcttgtcataataatggatctattttctctctcttatatgttcctctcccaaagctttataaactcaaattaagtcatatctctagttcatgttggattaaacctccacacttgaggtgcaattaaggacggccccaaagaagctgcagctaaggcaggctaggggtgacagcaattaaggcagattccaacaatttctaaagcattagtcttagaatttggctttggacctaactcgacccaacaaaaccaacttngtaggtgagagttgtctcctacttatatacactactttggccatatcatgagttaatgtggg

SEQ ID NO: 5609 - DNA, 454 bp, Glycine max
  unsure (1)..(454): unsure at all n locations
gtcacctgcggcatgcaagcttagccctagaggggatggaccttttcatgttttggagaggatcaataacaatgcctataggttggacctcccagaagagtatggagtcagcaccacttttaacatttctgatttaactcctnttgtaggtggagctgatattgaggaggaggaactaacagatttgaggtcaaatcctcttcaaggggaaggggatgatgcaatcctccctaggaagggaccaatcactataaccatgagcaagaggctccaagaagattgggctatagctgctgaagaaggccctagggttctcatgaaccttagggtagatntttgagcccatgggccaaggttgggtccaattatctttgtacatattagactaggatgtcattatatgtggtccttgtatttaaggctccatattgtaggtagggtaccctagaaatat

SEQ ID NO: 5610 - DNA, 547 bp, Glycine max
  unsure (1)..(547): unsure at all n locations
nttggatccgtgcagctccgtgagctattcactagcgacgcaagatatagtgggcctggatcgtacatccgaagaatgcgtgctggctgtgtaatgctgcacgtgagctgacacgcactgttctgagcagctcagaactagtggagcacactgatatcggtgcatcatgagttgaattagactatgccaatgatgatgatgcgactgagacgcttacttcgctaccagatttctgacttatatgcggccatataaggcctagtcatctgcctgtcagatagcattaagaatgtgtgaggatcatactctgggacgtgcgtacgtgtccaccattgatcaggcttaggctagctgcccctgaagtgctcgactgccgtgcaaagtatgacataataggtccatccacagtgttgcctctcgatgttatgagacgaccacccttactctggcctactttgccgcgacactcagcatactgcgccgcacttatgctcgcgggccgggtagattagctatttaggactgctgccaaggctacatgtggttn

SEQ ID NO: 5611 - DNA, 348 bp, Glycine max
ataacttttatgatttttgcctacaaaatgattaatgagctatgatgtataaattatgacaaactgttatgtttctgaggtttaagaaccagtgagtgtgtgatcacttggcaatgaatgttgcatgattatgagttctgagcgttacattaaggaattggtctaagggtatttgcccttcaacagagtatatttacttgagagtatgattgatgttgaatatgtgtagtgtgctctatcgtgatagaaatgtgaagtacgatatcgagaggggtgtatgctagtgaaccacatgtggcatccacgtatgttatgcataatgcttaatcgttgtgtttggggcttatg

SEQ ID NO: 5612 - DNA, 493 bp, Glycine max
  unsure (1)..(493): unsure at all n locations
actaagcttgcaaggaagctagagaganaaagagatataggaagcaatgaatagcatagaatgaattagcttacaaagtgggttattacaattggttatatagttagttataagaacaactaactcacaactaactaaactaactctagctacatagtgattaaccaactaagctaactctagttacaagtggatctacgataagagatcttttcaagctaggaatggacatcagacattccttgcttgaaatacagaatctggaaagtgctaggcattaaagccttagtgtagatatatgctaattggtttgtagaagggataggaaacaacttcacaatgtgctagtcaatctcaacatgctttgtcctttaatgaaacacgggacttgcaactatatgaagagcagatttgttatcacagtacaaggtaggagggtgcagganatcaattgtaaacccagcaaatagttgagccattgtagcttagaagt

SEQ ID NO: 5613 - DNA, 428 bp, Glycine max
aagttttctggttgtccaaacctttaaaattttgctattcatcatttcattcccttctccctttgccaaaaagaattctccaaggactaaccgcctgaattctttctgtgtcaaagaacaaatgactaaccgcctgaattctattgtgtctcccttctcccttgacaaagaagacaataagatgcagtctgagaattcttttgattcttccctttcccatatacaaaagaattcaaagtactaaccgcctgagaattcttttgtatccccattcacaaagattcacaggtttaaccgcttgagaactttgtcttaacacatttgagggtacatcctttgtggtacaagtagaggatacatatacttgtgtttgaatgataacaagagagggtacatctttcgtggatcagttctagtagagggtacat

SEQ ID NO: 5614 - DNA, 300 bp, Glycine max
ctatgatctatagtggagtgggttaccactattggaaaaattgcttcacccgcatgcttgtatatataaaggcaataaatttgtatatttgggaacccatatgacaaagaccactaggcaccctctatgaggggcggtgaggcaacaatagaaatacctaaatcagattggattgaggaagaaagaagaatagtagccttttttattaaggccatatgcttgcttacatctgccctaggaatagatgaatacattcgggctgtacatcgatagacatatattgaattatgggatacccta

SEQ ID NO: 5615 - DNA, 411 bp, Glycine max
agcttcggaagagagtgatgaggtacttgctcttaggcagagcttgaaagagcccgggtagtcgaagagaagttcaagtccatagccatcaaagtctgaaaagagtatgatgaactaagggacgtcaatatggccacagctgaagccttggaacgagaaaccaagaaggcccgaaaggaagaacacgaccaaaacaagttttgaggggctttatagggcagcaatagtgagctcaagctccgaagaggtgaaaggaatcatcacgggtcacaggcatgatctggaaggacgagctaaaggcttgccttatgttgaaaagaaatttgtcccaacagttaaagcgagactgaagggaatatgtgggccatcatctataagtgcaaagagaagctaaatctagcggcgactcac

SEQ ID NO: 5616 - DNA, 462 bp, Glycine max
ctcagcttcctctctaatcttcttatccaagacactctcttgtgttgtgatgctcttttttccatggcttattccctagtggatggtgcctcctttcagctattctcctttatcttccgctgcatatccatggtgaaaaatcaccattgaaggacctcattgaagctcaaagagccagcctccatagaagcttcacaagcaagcttccatcaagtggtatccgagcacaagagcttcaagttggtgctccttaaacctccattaattttcagctctaccttctcctacattgttgtttcttcatttttgtccatgtatctcctcacatgtcttgcgataaatgttgttaacatgattctttagaatttccaccgattaaacttgctatagaagctagatttgattctctatggttcaaatttcttgttcttgttcttgaaccatgaattgtgttgagtttag

SEQ ID NO: 5617 - DNA, 411 bp, Glycine max
  unsure (1)..(411): unsure at all n locations
agcttatgaaccctntntttgaaaattaaccattctgaaatttacacacaatcacaagcaatcaactacactatatgcaaataaaacaaaattaaaaaggattgggttgcctcccagcaagtgcttgtttaacgtcattagcttgacgcatcattctgttatcctagatcaatcttggttctctccttcagaaccttctcatccaactccttcacctgtaaacacacatcctggtccaacaattttctttcttcattaaatagatcaaaactgattttttggtctttaatacccatttctaactttttcttccccgtgtccaccacatagcttgcagtagaaataaatggatgtcccaaaattaagggaatatctgcatcttcctcgatgtccattacaacaaaatcagca

SEQ ID NO: 5618 - DNA, 477 bp, Glycine max
  unsure (1)..(477): unsure at all n locations
gacctataaaactaagctggngatgcatttgngcattctatttgactttcctatgctgtctctacatacataaaacagccccaccatcccaattttgcaaaatcatattcatatatcattggggcatttcatcgagcacttgatgggcgcatgtttggacataaattgcaagagaatgggggcaatgtggcatgccccattgcttcagaatacaacataggcctaaggccttctcattcaaatcctcaactccaaaaaatcaagcataaaaacaacccaaaactgccccaaaaatataatcacattctcacaatttggagcaccaaaagatgaagaaaatataccaatgggaagctaanaacatcaaggattgaatacttacttgttggagtgaatagaaacaccaaaaacgaaagcaaaaacgcgatcaatagtggctcaagggagccagaaacgcaagccttcgtgttctttatc

SEQ ID NO: 5619 - DNA, 413 bp, Glycine max
  unsure (1)..(413): unsure at all n locations
agcttcacggagaagagaagaagaagtatgttctggaagaagaagaagctgttccgggagagaagaagaagctgttccgggagagaagaagaagctgttcgaaaaaaagtcttccagaaattacattcgcgctttttataattttattttaaagggcaaaatggtagtttcaataaattgctgggtgcaccagcaatattgctgggtgcacctagcaactcccttaaatctagtgttttagatggattggatcacttagcatagagtccaaggtcttgaggagtaatattagtctgtttcagagtagaacactggcaatttacactttnttttntatgcttacattatcaatttactctgagtcaaggtgagttcttctgtacttgggtgcagagaagcaatctgtgtttggg

SEQ ID NO: 5620 - DNA, 476 bp, Glycine max
  unsure (1)..(476): unsure at all n locations
ncctttaaattaaattcaaatttctaaaagctgttactaacaatttaaacttctagtaatcgattacataccatgtgtaatcgattacaggcttttaaatacaaattcaaaattttcaaattgtttcagaaatcaatttagccacttggtaatagattacttcctctggtaatcaattaccagagaggaaatatcatatttttgaaaagataattgttctttaaaaaacttttgtaaaatatttcttttagccaaacctgtgcagcatcaattaaggaattctttctaagatcctaactaagtacatcgttcttcttacatttctgaattcttgacttgaattgtgctcatctttggcatcatcgaaacttcatatcttatatgcttctacaattttgacactactaactgttttccagtactagagaataaagtttttatgatgttggaacaatgatgatagtaccaaagtcgtc

SEQ ID NO: 5621 - DNA, 437 bp, Glycine max
  unsure (1)..(437): unsure at all n locations
agcttggtccaagtttctcaaacacctgttgtaaccatttgaattcacccttaacccccattatgtatattggggaaatcaatccatcacaaatcaatcaaatacttacaatacagatatgattacgatagtcaaaccagttccgtatttgcacacaactgcaaggaataaacccatttaaccaatgcaatggaatcaaatatggtatgtcatactggcatatataacatgtaagaaaagtttcaggtcaaaatacttaccgattgctacctttatcgtgtttcccaagctgttgcaatacctcaatttctatcatggctgcctctcgatacttctttatcccacggacaatntttatggcaaccatttccttcctttctctgtcccagcactccaagacctgcccaaaagttccttcgcccattntactatggatc

SEQ ID NO: 5622 - DNA, 437 bp, Glycine max
  unsure (1)..(437): unsure at all n locations
tgtcaacgtttttattcttctcaatcaatctctntgtttactttttttttgatgcgttagtaaacttatatgtttttgtgctgctatgtattttttattttttgggatcaaagcctaatatataacatatgaacactgtctgaacaggtttttaatgaagttgaacagtgagaccatatcaattgagctcaagaatggcactattgttcatgacaccattacaagtttcttttcttcctcaatatttttttttttggtggcataaaagtgttgaaccatttataaataacatatattagagttggattggaatagtgaggcgtttaattatttgcaagggtactctactccttctgaaaattttcattttttgggtgctttatgtagtaggaattattggtggatgatgcctcgatgctggatggcgattctaatgc

SEQ ID NO: 5623 - DNA, 369 bp, Glycine max
agcttcaggaagttgactatgtattttaatgctgggatcatgtgttaggattattattgtgcagtgcagagcatgtataagtgtatactttgtttctactccttggcacttctggtgctgctgtattaatatataagttttgtttatctattaaaaaaaaaacttataaaatgagaattgttctcacttatgacatttcatttagtcaaatgattagtcggtgatagatttctaatacagagtgtttatttttcctataaaaaatcataaaacaactcatgctccaagtaaattatacctctttagaatcaacacaaaaggaatttgacagcacacatttatcgtaaagaatacataccattacatata

SEQ ID NO: 5624 - DNA, 432 bp, Glycine max
  unsure (1)..(432): unsure at all n locations
tctggagcaagttttcctttttgcaatattatttttaaatttgattcttgtcaacatattttattttctgttatttatgaaattctacatcttgtatcagtgattgttaatgtgatgggggtaaatttgagctttgggaattttcaagaatttgacaaaatttgcagtatagcagatttttctactgtattggcagttcagtttcctgtaattnttaacagtgtttctagtgcaaaaaaacacactctgtttatgttgtcaagtggtgttaagagacaattgaatcaaatcaacaaatgatgttcaagcctattgaaaccgcaaaggtctctggaaaaacttgccatganagatgcccaaagaaaacaaggcacatcanagatgtgctcttactcttactggcacaaactagtctatattgatttacggttt

SEQ ID NO: 5625 - DNA, 407 bp, Glycine max
agcttgatctggatcgattcttgttaaggagaataactcaagtctgcgctgcacatgcatcttattcgttcaagatcaattagcataggatttgctcaaaatttacatttttttcagcaactaatgtttcaataagttaactaatgaaattctatagaatttttttattaccatgttaacaactacagaatttttcttttctaggcggttgatatgttcgctactcataaatgatgaaaaattgccaatgaaattgtttactcatcaaaaactattatttctatttcgttgtcattgatcaacgttcaatagtaaaaaaataaaggaatacactccgtcactccaatatactcattgcagtcatattttaagttggataattatgttttagaactttttgatacatt

SEQ ID NO: 5626 - DNA, 471 bp, Glycine max
  unsure (1)..(471): unsure at all n locations
ntanataatcaagtaaccttataatgatctgcagaatcttttatctntgnggcttcttccagaatgctagaggcagtttggctagaatttgttgtcacaggacctgactcactgagttgtccatcacgtatgaaactttctgaactgcaattaactccaaccttgcaacaaacatcaattggatttctcgcaaacttgggaacatcattgccagaagcgtgaactgggtgcccattagacatatctcccttttgtgactcatgtgcagttctagaacccacatataatgtttcccttttcactttatcctcggaagatgcgatcactgtggctttcccatctcttgatccagtgcatacttgattagctatgttttcttccacaaagttctgaatcaggttctgctgggagataatctttctattagtgctacgtgtagcatccactttcagaactggatgcccatctaat

SEQ ID NO: 5627 - DNA, 409 bp, Glycine max
  unsure (1)..(409): unsure at all n locations
agcttgaggatagagacttcccaagctatttatcttctctctcagagaggctctctaactttctagctttcttactctaagaagtggattcactcttgtcttggatcgactcactctacggtggctcactcaagcttgaggatagagacttcccaaactatttatctcaaaaatcctcccaactacttcaaaaatttcctttgtactattaacccactctaataatattttttctaagctatggataacactactcaatcgtcaactatttctgtccctatcttcaatggtgaaaattatgatttctggcgtgttaaaatggaaacatatntttcatctcaagatttatgggacataatagaagaaggcttcaccattcccgcggatacttcagttcttaatgcatctc

SEQ ID NO: 5628 - DNA, 452 bp, Glycine max
  unsure (1)..(452): unsure at all n locations
tctatataagctgaaccattttatcaataaacacaagttgagttttattcagaaaattagagtttatctcttttatcttagtgagagtgattctcctaaattcttgagtgattcaagaacaccttggctgtatcaaaggactttcacaacctttgtgtgttgccctcgctggaaagagtgattctttccttcctttcatcatcacccttgttctttcaaaccacaattccagaaaatccacctctgcccagaattatctcgtggccataacttccattttacgcactcaaattaagtgattcttgagcctaaattgaatttcaaaacgagacctttcacctcgttttggaatcacctcatttggagccctgtagcttcagttattgccatttctatatntctgtccagccaccacttaacctacgttttaccatcccattcatccattttat

SEQ ID NO: 5629 - DNA, 412 bp, Glycine max
  unsure (1)..(412): unsure at all n locations
cccctcgacataatttctatgctcatagcattcgacatgggatagncgattcggagacataatatatcaagaccactgaaaatgaacaactgaacctctcgagaaagtcagatggtcataaccgattacagggatgtacaattctggcgcatgatatatcgcgatgctctacaatcgacacataatgcgatggagaacttcccatggtgataaatattcccatgggaccgacggtcctgtgctaactatattcacactctgaaaaatgaacaacaccacctctggagaaaatcaaatggccatcacttgacacacggatgttcggatcaggtacacaacatatttggaggcgtgaatatgacaaaggaagcgttctgcaaatagagtgggattccatttgacacgaagtgcg

SEQ ID NO: 5630 - DNA, 390 bp, Glycine max
  unsure (1)..(390): unsure at all n locations
tgtatataagctaaaccattatatcaataaacacaagnggatttttattcttaatattagagcttatctcttttatcttagtgagagtgattctcctaaattcttgagtgatgaggacatgaccaagagcaagggcaaggattcacttgaaagactgggagggcctatgacatgggctatagcaaggaaagccaaggaagctcttcaacaagtgttgtccatactatttgaatacgagcccaagtctcaaggatataagtccaaggttgtgagttgtatcatggcccaaatggagaaggactaaatgacaccactttgtctcaattttagagtgtttagtttgtctaaataatggaccaatccttgtaaagatggctgaccaacaatatg

SEQ ID NO: 5631 - DNA, 430 bp, Glycine max
  unsure (1)..(430): unsure at all n locations
agcttcttatccaaggatcatcttggtggtgaatctcctttttccatggcttattccctagtggatggcacctcccctctcctcttctcctttgcctttcgctgcatctccatggtggaaaatcaccattaaaggacctcattgaagctcaaagatccagcctccgtagaagccccaagcaagctcccatcactaattgtagttaacatttaattaatatccaaatttcattatgtatttagtgtaatagacaaaaaggaagcactgagtgtggctattacgtcatgcactggatgtccacgataatctcaggaactttcaggaataattgggaaacggtaattgtttatttcaaacaaagttgattntcttatcattgttattacattattaatttatcttttatttgatcatgtagtattntaatgat

SEQ ID NO: 5632 - DNA, 484 bp, Glycine max
  unsure (1)..(484): unsure at all n locations
nggttgacaatggaaatgcaacatattgctaacttggaaagatacattgagtttctaagattagctntgcctaatcctagtgtttgaaacatatggttttgacatctgcaaatgaattcacttttcaaatagaaacattcaaaatatatgtttgcacaaaagaatgataaaatgttgcaagatagtcaaccacattcttattgtcaattatctgttgggaaatgatctatagtactatcatggaaaataagatggtgaatggtacacttgttattttatgagactctacatacatctatgttgctctggtgaaccatatcaggaatttgtttaccaggaattggaacttgagtatccaacatatttacaaagagagtaattgttgtgcagatttactaactacaaaaggttcttcatgtgataagttagttatcgtggatcagtgcccaccattccttattctggctttactatcagatgcatg

SEQ ID NO: 5633 - DNA, 448 bp, Glycine max
  unsure (1)..(448): unsure at all n locations
agcttatgataaattctattctcccnctgttctctccccctttggcaacatcaaaaagccaaaaacgtctaaagaaaagaactaaggcaacaacaaagaccatagcacaatccatccataaactaaaccaaaccataaaataaaccaaactaggcttaagttatcaaaacaaagtccaaagacaaagcaaaacagaacgacaaacatccaagacaagcttaatcaaagtacaaaagtaataaacgccaaaatacaaggctgaaatacatataaaactaaggaaatagaacataaactaagagttggccggggcatcaaagcaacgcctaatgaagctcatatcatctttgagtcgagtgatcctcgtatccatcccttcaaagcaagtatccattgcatcaaggcgagtatccatcgcattaaagcgttcacccactaaagctcgaaa

SEQ ID NO: 5634 - DNA, 486 bp, Glycine max
gtgtaaggattgaaaatataaagtgaagaagagaggacttattatctaattcttccaatagagaagatgaggggtatgaaaaggatgagggaggaaggaggaatgagaggtatagggagagaagaaatcatagaaaatatagaggtagacaaagagaggaagagattgagggagtgaagataaagatccctacttttaaagggacttatgaaccaaatcttgagtgagagatgaaggttaagcaactctttgcttgctacaactataatgaagagaaaaagatcagattggcctccctggaatttgagggatatgccttagtgtggtggaatcaagtgagaattgattttgagaggatgaaaatgcctttgattaatacttggcaaaacatgaagagagttttgagagagatatgtgtcatcctattatggagagaccttcacaacaagctccataaactaattcaaggaaataggagtgtggatg

SEQ ID NO: 5635 - DNA, 510 bp, Glycine max
  unsure (1)..(510): unsure at all n locations
naccttagttgggacgtcgctatcannttngatanatacccagctnnngggananccnaggataatgaataagagacagtttattgtctgagacagagattgtgaaatgctgcgaagacgaagagggaccccccttcttgcgaaacaagcaactattacctactccnaagancattatggacaaggctgatctgtcatggctggctacacaccattattggggatttctacagaataccagctgtaaatactttattatctgaatgatagtgtttcttgtgatcaatgcttctttcagtgcctacattgttaatgctcttggtctgtcaaccatttgaggcatagaaggtgacttagcattgcgaatgttttgctgcctataactctaatgagaccagcttggacctatctttcattaaggatctctggataagtctcggtttacatatgttttaatataattctttggtctaattctaactctctaaaagttttaggttatttctttcc

SEQ ID NO: 5636 - DNA, 427 bp, Glycine max
  unsure (1)..(427): unsure at all n locations
tcaagcttggttcctaagcttagaattgcatgtgggcacctattttgaaccctctatgttgtccctatgtatataaaacagttccacaatcccaatcttacaaaactatattcatatgtcattggggcatttcaccgagcacttggtgggcgcatgtttaggcataaatagcaagagaatgggggcaatgtggcatgccccattgtttcagaatacaacataggcctaaggccattccctacaacccctcaactctaacaaatcaagcatagaaaaaaccccaaaactgccccacaaatatgagtacattctcacaatntagagcaccaaaagatgaacaaaaggcaccaatggaaagctaaaaactcaaggattgaatacttactttgtggagtgagtaggaatacgaaaaacgaaagcaaaatgt

SEQ ID NO: 5637 - DNA, 476 bp, Glycine max
  unsure (1)..(476): unsure at all n locations
tcaaaggactctatagggcttgaaacaagctattatgcaatggtttgcaagattatcatcttttcttaagtttgcaagcaatgtgcttttgaccattctttgttcattaagcatggttgcaacacaatttttgttttattggtttatgttgatgatattgtcttgttaggaaatgatttgcctgnaatttagagaattacaaatctactcgacaatgctttcaaaatcaaggacttaggagacctaaggtactttctggggtttaaggtagctagaagctctactggtataaatctttgtcaaagaaagtatgcactatatattttcaatgatgttggcatgcttagttctaagtcagcttccacaccttgtgattataccaccaagttgcatcaacactcatggtcacctcttatcacagaatatgcttnctcctatangagattaatanggagattgatctatcttgaccacac

SEQ ID NO: 5638 - DNA, 428 bp, Glycine max
  unsure (1)..(428): unsure at all n locations
agcttgaaattgaacaacggaagccttctatatattcaaatggtcataacttgtcacacggaagtccgattaacgcgcagactatatcgagacgctcgaaattgaacaacgaatgctcttgagaaattcatatggccataacttgtcacacagatgtctgattcaggcgcataatatatcgagacgctcgaaatctaacaacggatgctctcgacaaattcaaatggtcataacttgtcacacggaagtccgattcaggcgcataatatatcgagacgctcgaaattgaacaacgaatgctatcgagaaattcanatggtcataacttgtcacacggaatacagtggagaaattcatatggtcataaacttttgaacggaagtctgattcacgcgcataatatatcgagaagcttgacattgaacaac

SEQ ID NO: 5639 - DNA, 504 bp, Glycine max
  unsure (1)..(504): unsure at all n locations
ttgatgctcatgcctgacggacctatgaaactcagcttctatataagctngaaccatttatcaataaacacatgttgtatttttttctcagaatcacagtgcctctctcttatgttagcgagcagtgactcttctacattgtgagtgagtcatgaacacccatggggcatgaaagactatgtcagcccttgagagttgatctccgtggaaagagcaagaaccaccttcgttacgtcttcaaccttggtgggaaaagacctatatccctagcatcgcatttacggcggagagtgtctcgtgggatattctacatactcccactgcatataggtggttctacagcaccatttgaagattttgacgagaccgattcgctacttgtggaccaactcttgtgaagccagagtgcctgagtattgtctgcttaatacactggacgccacgcgtaagttacatttcggtgtctatgggcccattggtatctagccatttacataggccgct

SEQ ID NO: 5640 - DNA, 407 bp, Glycine max
agcttgaaagagcccgggtagtcaaatatatattcaagtccatagccatcaaagtctgaagagagtatgatgaactaagggacgtcaatatggccaccgatgaagccttggaatgagaaaccatgaaggcccgaaaggaagaacacgaccaaaacaagttttgaggggctttatatggcagcaatagtgagctcaagctccgaagaggtgaaaggaatcatcactggtcaaaggcatgatctggaaggatgagctaaaggcttgccttatgtctaaaagaaatttgtcctaacagttaaagtgagactgaagggaatatgtgggccatcatcgatgagtgcaaagagaagctaaatctagcggcgactcacgagcaaaggctagaggatgagtacgctaatatatta

SEQ ID NO: 5641 - DNA, 471 bp, Glycine max
tatgtacccaccatggtggctggaaatacaacaatatatattctcttagaagagtggtctgaagaagaaagaagattattgcagcacaatgtataggctaaaaaaatcattacttctgccttacgaatggatgaatattttatggtttcaaattgtaagagtgctaaggatatgtgggacactctacaagttacacatgagggaacaactaatgtcaaaagatctaggataaatactgtaactcatgagtatgaattatttacgatgaagacaaatgaaagtatactacatatgcagaacagattcacacatatagttaatcatcttgcatcattatgaagaacttttctaaatgaggatctcataaataaagtgttaagatgtttaagttgagagtggcaaccagaggttatagccatcacagaatctagagaattgtctattaatgctctcgctactctatttggaaaa

SEQ ID NO: 5642 - DNA, 432 bp, Glycine max
  unsure (1)..(432): unsure at all n locations
agcttactttacttggtcatgcttgctgtcatgtccttcaatntgggaatcttcatagctgctgtagctggccacaccttgggcttcttccttgccaagtctcgtgctttagctcttgccaatagagaacaagagtcctcctcggatgctcaaaaagtttgatagaaatgttatcaactcatctaagtgagttttatatcttatttaataaattattttttttattttgtaatttttaataaattctaactaataataaaatgtgtttgaaagaaagagtatgttaaaaattactatatgttgctagcatactcctcaaagtttaaatattctactaagcttatatcatgttttatatatagtttatttaagcatgttctctcttgtattgtagatgatcaatgagaggagcctccttgtgtttgtaactct

SEQ ID NO: 5643 - DNA, 459 bp, Glycine max
gctcttgcagagatacctatgttttgtaattagagagattattttgagttgcagagtgattgtgaaatgctgagaatatgaggagggatcccccttcttgtgtaagaagcaattattctctactcttaatctcattattgttaaggtttttctgtaatggctggctaaacacccttattggggatttctaaagaatagctgatgtaattactttaatatctaattgattgtgtttcttgtgttcaatgcttctttcagtgcttacattttgtatgctcttggtctgatcaaccatttgtgtgcatagttaggtgactctagcattgggaaatgtattgttgccttagaactttaatgaagcaggattggaacttagtcttaaatgagggatctgaggattaagttctggttttaaatatgttgctacaataatgtatgttggtctaagtctagtccaac

SEQ ID NO: 5644 - DNA, 389 bp, Glycine max
agcttgtctcagcgtttatgcgagacggagactaacatgctagctatcatcgccaagtaccaagaagagttaggtctagccgcggcccacgagcataggattgcggacgaatatgcccaagtatacgcggaaaaagaggctagaggaagggggatcgactctttacaccaagaggcaaccatgtggatggatcggtttgctcttaccttgaacgggagtcaagaacttccccgattgttagccaaggccaaggcgatggcagacacctactccgcccccgaagagattcatgggcttctcggctattgtcagcatatgatagacttaatggcccacataattagaaatcgttaggaaacttgtatggtctctcagaccttgactagata

SEQ ID NO: 5645 - DNA, 460 bp, Glycine max
  unsure (1)..(460): unsure at all n locations
tagagccaattcaaacgacaataactntttactcggatgtctgattgagactcgtaatataacgagacgctcgaagttaaatgtttaagctttgagccaattcaaacgacaataactttttactcggatgtttgattgagtcctgtcatatatcgagacactcgaaattgaatgttgaagctctgagccaattcaaacgacaataactttttactcggatgtgtgattgagtcccgtcatatatcgagacgctcaaaattgaatgttgaagctctgagccaattcaaacgacaataactttttactcggatgtctgattgagtctcgtaatatatcgagacgctcgaaattgaatgttgaacctctgagcaaattcaaacgacaataactntttactcggatgtctgattgagacccgtaatatatcgagacgctcgaaattgaatgttgaagctctgag

SEQ ID NO: 5646 - DNA, 427 bp, Glycine max
  unsure (1)..(427): unsure at all n locations
agctngngcaagatgactaaggcaccatggactgtggccctaagccagaggatatgtgcatgccaccaaagtgtgcctctttggcctgtaagagtaaagttatagacttatgcctggcccggttgaattgggcactgngttatgtatgctggcccatcagcccaacctgttctcaagtgtctgacaccattcatgttcaatttcaattcactttataatttttgcatacgtaatactaataactaatgaagaaagcactcactgcctatcagtttcgtatatacagttggtagttaatggtttaatttactggatattaaatcatgtaatttacaattcaattgatcaatgaagaccattagatcaatgaaactaaaacatatgggatgttcatttggtcttacgaaagatcatttcatttttcgtc

SEQ ID NO: 5647 - DNA, 392 bp, Glycine max
  unsure (1)..(392): unsure at all n locations
tcaattataggacaactnttcttaaagtgtttacgatttctttcttatatttttagtcaaattttaagctagtggagctgcacactaactatttagtgctatttagtgtgtgtttgattataattagaaaagttgaattaagtttatcttaactttctaaattgaagttgagtgaaaagtaagttcaatataacttgtttggatattaataatgaaaattgcgtttaaatctgtaatgactaaaatgcatatgaatttgatttaatttattattttaagtatatttacatcattattaataataataataattggtgttaaaataatgcatttaaattaaaaatgttaaaatatttaaataaaaaattattctatcaaccaagatataaaat

SEQ ID NO: 5648 - DNA, 321 bp, Glycine max
cgccacccagctcgcccaggcgagctatgttgttttctctataaacaaccgccttctggaggaatgttctggaaggcccaacagggcctgggcgctatttgcaccaacatctgcactaagaacgcccgcttgctctatggaggtgattctttttacggatcgtgactatacggtaccaattctgttacgatacttggtttctgtctcgtggtgttacaaaaccattcagatcacttaatcatccccttttttgccttccgaaactttacggatagcgctctaacacttgcttataattattggccttgcacgaaactatac

SEQ ID NO: 5649 - DNA, 262 bp, Glycine max
agcttcgaagtcctccttatcgataacttttttcttggagagccaatctaacccccgcgtgtgaattcttaaccatccatgataacctccgatgactccattactgatgcccctaatctccttgtcttacctctacgaacttctccacgccttgaggactctctggatcaccttgagactttgtgcgcctagattcctcacgaggaaaggcgacagacattcttctgttggcgctcccctcatggggtaccctatttgtcta

SEQ ID NO: 5650 - DNA, 476 bp, Glycine max
  unsure (1)..(476): unsure at all n locations
tgtaggattatggggtacccatcacatgtggttctatgttgtggacgggtgatggtgcacaacaagtatatccacatccacaaagcgcgcataaacccacacatacactgttgtccaccttcaactgagctcacgtactcccacatagcccatatcttcgttgctctcaacaccggagccccatcaatcctcccaagcttacctcaacattcatgtaagacaacatgcaaaccgcacaaactatcaaagcctataaaacaaggttaaggcagaaaactctgcccaaaacaccaaccagaatcacagcttttctcacttaaagaccccagtaacaattacttcgttcacgttcgttgactgaaggattgactctaaaattntactggaagtctctattacataagcctacatattgaccgatgggatctgctagcanacaaccagatctcattctgccctactctttccacaaccag

SEQ ID NO: 5651 - DNA, 197 bp, Glycine max
  unsure (1)..(197): unsure at all n locations
tttagagtttcatgtaagcatntagtatgtggttttttggccatgcttatgaaaatgagttacatcctattatattttctttntagctgtgtaaattagcttctttttcaagttgagctcttgttaaacaaggcttagttaagtttgttcatctaaacatggtcaaaagttgatccttttatttatatacattattg

SEQ ID NO: 5652 - DNA, 191 bp, Glycine max
  unsure (1)..(191): unsure at all n locations
atcttgagctgaataggtccttcatggtgatttttattatggactacagcanaagataaaggagaagaggttagaggagacgtcatccactaaagaataagtcatggaaggagaagcttcaccaccaagagagtggcttggataagaagcttaaagaggaagcttcaatggaggaagagaataccagagag

SEQ ID NO: 5653 - DNA, 446 bp, Glycine max
  unsure (1)..(446): unsure at all n locations
gtcacctgcngctgcaagctgaagtgtatattttaaggagaataccttcatcaaccaagatgggattaccactaccatcagtgataatgggctctggagttataattgtatagttatcaagataagggtattcaagttgggtaggtgtttatgtttggtcttggctgatggacggttggtcatgtgtttgtctttgggaaggttctgtttcagatgaagaagaaagttgggtaggttgaacatgctgtgatccagtcttcatcatccaagtcctcttgtaaggaatcattcttcttgtgatgttggccttttcaagagcgtntaccttggcctttgtcctttgtgaaacatgcctctgaccaatatgtntcttntttccaacgtgggcactagttntgaaatctttggtgtangggcctctttctcaanatcttcattttcttttc

SEQ ID NO: 5654 - DNA, 357 bp, Glycine max
  unsure (1)..(357): unsure at all n locations
caaagcaggtatcttgtagacagtttcacaactacaagattcatggcctccttaaatnttctgtttctggaaggaaattccatccataggccacccatatntaatggtgagggttaccactattggaaaatccgaatacanatctctattgaagccatagattaaacanttgggaagcaatagaaataggaccttacatacccaccatagtagatgtaagcactagcaccacaacacanaaacctatagataagttgactgatgaggatagaagaagaatccaatataatcttaaagacacanacattatcacttctaccctatgaatagatgaatattcacacatatagtcaatca

SEQ ID NO: 5655 - DNA, 339 bp, Glycine max
ctaaataaaaagatgcatatattggttagttctttaagattgtattgtccagataaattagaaagagaaaagtttgttaaaatcttaaaaatattcttttagtcgctcacctcaaatacaaatttgtattgtttaattgagttaaatacattgttgtcatccttacaatttttttttcattttcagattttattttaatttaacccttagcaatatatttatctaatttttcagttcagatgtttcagataagaatattctattggttaaaatattatttgtactctctaaaatactctaaggaaaacaaagcatatcttacaataattagaataaaaa

SEQ ID NO: 5656 - DNA, 277 bp, Glycine max
  unsure (1)..(277): unsure at all n locations
atctttacaaaactaacaaagatattctcaattcattngcagggttttgaacttgatggcattctcaacaatcatgaagacatatgacatggtctcatctggttctgaaagattatatatggcaacagtcttttcacttatgttctctagtacttgcttaattattgcttaccactntangtcactacaacaaatgtatgaagggagtatacttaaagggcggcgatatatttcttatcttctggttatacatgtctcatatatttcccattattta

SEQ ID NO: 5657 - DNA, 372 bp, Glycine max
  unsure (1)..(372): unsure at all n locations
cacctgcggcatgcaagctngttcgcacatcgttcacgtctatgatatccaatcgacaagggttgaagtagaggagaccttcaatcctataacgcaacgtggcggacataagtgggctgataacttgaatggccattattgtcaatgcgaaaagtantttgcgcttcactatccatgttcacacattattgcagcttgaggttacgtgagtatgaactactaccaatatatatatatatatatatggggtttacacaaatgagcacatcttgaaagcttactccagacaatggtggcatcttgtgaatgaagcgagaattcctacttctgatggcgcatggacacttatcctcgatccaactacaattcatg

SEQ ID NO: 5658 - DNA, 322 bp, Glycine max
  unsure (1)..(322): unsure at all n locations
cactagagagcttctaagtatatgacatgtccaacttgtacgttttatatctaatgtacattctacanaatcagaatctaaaaagcctgttaagtataaggaggtacctctgggataccacaaacctacattggttgtgcccttaagatacttaatgatccttttaacaacagataagtgaaattccttaggatttgattggtatcttgcacataagaaaacactaatcatgatatctaatctacntgtagttaggtagagaagtaatccaatcatacttctgaatcttgattcatgcactattttacctttctcatctaag

SEQ ID NO: 5659 - DNA, 318 bp, Glycine max
tgaccgatataaatacatctacttcaaccttactcactcttgactccatttcatcgaagcgcatatccacttgcgataccaaagtatcaaacatctcaccaacaaatgtctgaagaccatcaaacctctccaaaatcttcgaaagaaaagatgaatcttcttcctcatgtccttcttcaccaatatttctagcacccttctttacccatgatccatcatgctccttaatgtaaccaaaggatgctatgactgacgcgcctattaggaatgatctcttgattagaacataatgttcacaatcaacacggatgttgaaat

SEQ ID NO: 5660 - DNA, 346 bp, Glycine max
cagcttaagctggcaagctgctctaaccaaatattcctccagtgatcaagcattccataccaaaaaacaattcaagtatgagcaccaagccttatcaaaagcagcaagctgagatctgaaggtacaaagcttcatgcatggatgctgagacagactcttcatcagacacttgtattggaccatctagtataatctttatcaacaactcaaacatttggacaaactcttgtgcacatattgctagagaattctcacattctcccattccactgaaaacggcatctggatgacccaatatcatataaccacaaagaacaactctcacaggataccttgataacctaac

SEQ ID NO: 5661 - DNA, 265 bp, Glycine max
  unsure (1)..(265): unsure at all n locations
atgttcctagctactgtattgagagaaagaatgggatgtagtccctgccgccatatgaatgtgaacaacattactcttcattggtttgttgggccatntatattaacaatgagggttgcaagtaggtacctcttctttggtctgacaaggtgatcgacgccgcacccgaatcaaataaacatgaagatgcagtaactatgaagtgatcctatgtcgcttcccaacgagcagtgacaagccaaatgttataatatacttgcagtaa

SEQ ID NO: 5662 - DNA, 490 bp, Glycine max
  unsure (1)..(490): unsure at all n locations
atgactgacttcactcgngatccnganagnncacctgcaagcgtgcgagcttntttcatganacacgtgctgcgcttgagaatgtacttgttctatggtggtgacttcaaccggtcgatttcaatcttccctcttcccattttcttctgagacgacgcttctggagcctgatttggatctccatggtggaagctataatatattatccaatactactagtgctattattaataatgtttatcaaaaaataaagctatcataaaccaataactcagaaaaggaaaaacaaacaaaggggaatatatatgatgccctaaggctgggtgactgttttggctgcttactggcctaccattggaaagataatcataaccagattaggtgagagggcaataaaattatactataattgcttattgtgtgggtaccgactgagcaagatcaattgaagggtgctcacagattagcaaaaaacctcacatccactctg

SEQ ID NO: 5663 - DNA, 251 bp, Glycine max
ggatcttagcacgagctcactacaacgcaaggacttttggggacatcttggtccactgatgcatatatcggacgagaataactgtaagtttagatttaccaacttaacaattaaatcacaataaggattatttgcattttcaaaaatgataacaagttatctatataatcctgaccgtcttgaattaaacgccaattatgggtcagggagaaaatgaagctagggacttcactgaattatgtgtacttggt

SEQ ID NO: 5664 - DNA, 323 bp, Glycine max
  unsure (1)..(323): unsure at all n locations
gttatctcttttatctgagggagagtgattctcctaaattcttgagtgattcaagaacaccctggctgtatcaaaggactntcacaacctttgtgtgttgccctcgctggaaagagtgattctttccttcctatcatctccacccttggtctttcanaccacaattccagataatccacctctgtccaaaattatctcgtgaccataactcccatnttacacanctcatataagtgattcttgagcctaaatagaatntcaaaacgagacctctcacctcgttatggaatcacctcatttggagccctgtagcttccgttatt

SEQ ID NO: 5665 - DNA, 394 bp, Glycine max
  unsure (1)..(394): unsure at all n locations
gatctgactctcataatattgataatatctgctgttgtgtcactggcacttggaataaaaacagaggtgcaatcagtattcataattgctaanagatctaagatgaacctaccaggtctctatttggttgaacaatttctttcatatggagaactgtttaacaggataaaaacagtgagatgcattagcagcaagaaaagaacacacgtgaattatgaatgctcttataatgcattaaaaagttatttcttcacaatatacctaaatttagcagtttactttgtgcattntattttgtgacccctctgttctaatacaagctgtatcaatctatttcttagactggatttatatactctctatccaccannatattggttattaattcttatga

SEQ ID NO: 5666 - DNA, 334 bp, Glycine max
  unsure (1)..(334): unsure at all n locations
aaatatacaaagtgtaacttcagagaacttgtgctcattnttttcactngattatttntccttctcatgtttctggaaagggacgccttntatagactntattgaatgatgcattacatgatcaatgtcgaaccttgatatgaattgtgtctcatagttggaggaaaaacacatggcgcgctttggatggcgatgataggattaaaggtacaaactgcatgtgttccttcttcacaacaaaagcaacctttaaggaatattctgcanatactntctattctctttgattctgtcattttcttaaacttcaaatgttagcaattcaaataaagag

SEQ ID NO: 5667 - DNA, 330 bp, Glycine max
  unsure (1)..(330): unsure at all n locations
ctagatgagataagatctagatgaaataatatctagatgagatcacatctaaacaatatctagttaagataagataagatctaattttgtagaataaagtagtctgtcctctctaagtacaagcccaatgctggattcaagccctagcccaattctagattcaagcccaaggcttcattaattcctganattagatatataacatcaaattagctgaataagcgccaataatgaaactgcttaataaatgtgacaattaagactaatcagtattgtaaatggtgcacataacgctaagatatangagaaaataatggcgcatcacattat

SEQ ID NO: 5668 - DNA, 556 bp, Glycine max
  unsure (1)..(556): unsure at all n locations
ntgattgattcactcgcacccngatactcaaaggcacctgcagcatgcagcttgtacacttgcgagcacttagactccatctcttactatgtaangagangtcacgaaccatttggatcacccatatcttaaaagatagagcatcttataacactttatatattaattcccttccatccttaaaatatgtaggggtaaacatgctagnttggttattcatggacatatgcataagaatatagtgtagaacatgttagccaaacctctatattaatcaagcacaagaacattattatttaacattgaaattatactatagtgaattgtttaaattcaatgacaaatgaagtcaccaaatattggtnttacgcatactagttgacactttgtatatatatctgaaatattatgtaatcacgtttctaagtatgagaaacaactacattttatagtacaaatgatattttctatcattaaacacttaatattgatatcttttgtgtgagccatatatataacatactagcacctgaaactcggtgttacgtcgttgaat

SEQ ID NO: 5669 - DNA, 345 bp, Glycine max
  unsure (1)..(345): unsure at all n locations
cctcatcgtccctcacagtctntatatttgggagccaatccaatccttgtgttcggactctcagccacttatgatagccgccgatgatcccattactgctttccctaagctctttgtcctttcttcacgccgcatcccatgccttgcgaactccttggagtaccctcgcgttgtggtcactaaaaccccgtgcgatgaaaggcgtgatgctttctgctaatggcgctcctctgatggtgtagccaagctgtcttatggcgagaacgggattataattaatacaaccccttgttcccatcanaggaacatctggacatccttcgcatgaagatagaatcttgattc

SEQ ID NO: 5670 - DNA, 120 bp, Glycine max
cttacctaaccgcgccacaaggcatccttatcgcaccagatccaaatctagaacgatgggtgatcaagaggagacacaggaacagatgaaagccgacatgtcggctctgaaagaacaaat

SEQ ID NO: 5671 - DNA, 187 bp, Glycine max
  unsure (1)..(187): unsure at all n locations
ctatcgacattgtgctcactcaaagatagtacaatgttacgtaggtgcaccatagactttgtcatatcagcaataagtggctgctcagcattagtcaatcgcccaacatatggattgtccactaatgacttggccaattaatgattatgaatcncacacatgagcatcaccatacaattgtgcctca

SEQ ID NO: 5672 - DNA, 614 bp, Glycine max
  unsure (1)..(614): unsure at all n locations
acaagtattctactttcaatctagtacntatccttnttctnnnntacaaaaannccnnagttgatgactcgttgcacncggacnnaagnnaccgcagctgcagcnnagnnaagacctgctggacgcaacatatgagtttttgtttgtgnagcagcacacctgaaactcgagtaacattnattgtgagaatacattgggtctaagaagctatataccaaggcacaaaccgttttatgtaccgcacacgtacgtgaacaaggttcaagagataatgaatatgaactgcgcaaagattcctctgagaaagaattatacatgtctcgaacacgtagaataaatcaaagaggcataccgggcgatcatctcatgacaaattgtttctatagaaaaatatatattaactcttttgtcgcaaatgatctgatcacattatccttcttctgtctcacagcagactaactatatatnctccatgtcaatatgtgagtcctttcaaactactagcgttgaagtagtggaaaaccaattcaatcgtgtgtactactagaagaatgattatctgtgatatatactagagcactatcttaaagcaactacatgtacagacacacccn

SEQ ID NO: 5673 - DNA, 372 bp, Glycine max
  unsure (1)..(372): unsure at all n locations
tcgtgtatttcaataatgagatcttgtgctcaagaaagctttatctttccaacccgattctaggagcaagtggacgcctaattacgaatgcccatatgtcgtcaagagaaccttctctggtggtgcactgactcttacgactatggatggagatgagctccctcgttctgtgaatgcggatgcagtcaagaaatactttgtctaaaaataaaacaacagctcggtaagtcataacccgaaagggcggcttatgcanaaatgagcgtctcggtgggtcgaaaacccgaaagggcggcccaggcgaaaattatagacatcatacagaagaataatcagcctgatatgtcgaatacccgaaagggcgatctatgc

SEQ ID NO: 5674 - DNA, 410 bp, Glycine max
  unsure (1)..(410): unsure at all n locations
gaatacagagtgttattagcatttcactttgtttcaacacaagaagaatggtttagtatgaaaaaaacnaatttatggtcaggctgtctgcaactcacatggtagtgggggcagtttccacgtgattcaaaaccagactgccaatggaatcntgttacttgggccatccttacgttgggattctaatctcttgtttttttctgtctntagatctcctcgatttacttcttttctttctattctatttaatgggcattaatgcaacaaacttttaaaatataataatactattccattatttgatcactctcactattgtgttcttcttctataatacaccttagatcatgtccttgtgaagaaaaaaaaaagtaagaagtaacggaagtacctntatgttattaataatt

SEQ ID NO: 5675 - DNA, 253 bp, Glycine max
  unsure (1)..(253): unsure at all n locations
agcttctccctctcttcccttataatagggtgaggatggaagaacananacgntcaaccctcctggtatctgaggatcactcgaaattagtgaacaaaatcantttcgtgaagaaaatccaagtcgaggtgctttcataacgcgatcgaaacgtttccgtgggtgatttcgtgaagaatatacgccgcctctcgtccggtcttcgtcgatcttcggtcttcaacccgtaagatcccgaaatcgtactcttcaa

SEQ ID NO: 5676 - DNA, 485 bp, Glycine max
  unsure (1)..(485): unsure at all n locations
nnaatacgatcgnancgatgacnttncctngnnancnnntcncgcgnannnagaagggccattaaccattattaaanaatttattgccatcaaccaagggaattaagaaaggcttaatggctgagtgtaactgaatttgtggcaaccaaaagtcacccccaacagccaacaggtcagccaccattggtgctccaaaagctgatgcctaggttgcaattgcgcctatttcaacttgactaaactaactaagccttttagtgattacccaaacatatttggtagccactttcagggtgggcatattttacaactaaccttaaaataacaagggtcattagtctctcattggcctgatcaatacaactggacttttcttgaatgggttgtttaataatggaagactttgagagtcctggtttctgcttccttgtaagtcccaggctcaggatctgcctctttgatgccctaagattccttgatcttcg

SEQ ID NO: 5677 - DNA, 258 bp, Glycine max
agcctgggggaaagagggtgctctatgtgtcgggatgatttctccaaatgtacctgagtaaactttatcagagagaaatcagaaacctctgaagtattcatagagttgagtctaagacttcaaacagagaaagactgagtcatctagagaattacgagtgacctttgctgagaattagagtacagcaggatcactgaattctgcacatctgaatgcatcacacatgaattctcttgcagccttacaccaccacagaat

SEQ ID NO: 5678 - DNA, 314 bp, Glycine max
  unsure (1)..(314): unsure at all n locations
ggcttcttataccaatgtgacgaggagtgtggtggtcagattcataaagaacgaactgattngtcgatgcggactccctatgaagatcattactgacaatggcaccaatctgaacaacaaaatgatgcatgagatgttgccttntgccttgcatggacagggctgtggaggctgataataaatatattaagaagattataaagaagatgacggtgtcatacatagattggcatgagatgttgcctgttgccttgcattgatatcgaacctcggtacatacttctactggggcaacgccatacttctctgtttat

SEQ ID NO: 5679 - DNA, 348 bp, Glycine max
  unsure (1)..(348): unsure at all n locations
tcttttcttctactactaagcataagcacgggaatcaatntacgtaaattatttaagtttaacaaattattntattcgactcaaacatgatctcctccataagaggatatatgtgttcttaanaaaacttttcttcttttcttgtttcttttcattatatgttttntttacatcccaacaaaaccatgtttgctagcttgcttgtacggtggtttctcaaactcttatagntgatatattatntttagaatattcttttatagaactctcaatttccatctattntatagaaatnaaatagaaggaaataaanagacagagaataatatatatattnttatttatctg

SEQ ID NO: 5680 - DNA, 474 bp, Glycine max
  unsure (1)..(474): unsure at all n locations
tgcanaaaactngaatgcatccctcgacttcctgcatttctaanacaactattggcatttgatttccaatccattacaagagtgatgtcaaattcacttattcaattcccatcaaattccaaagagggcggtaaattcagcttttatttcaccaatggtcaacaacttgatccaggtgctcgtgctgatattgtggatgaggcaaggcttangatgaccgaggaagcatataggtctgtgttcttttgttttccagggagtgaagttcctcattggttcccttttcatggcaagggacattcaataactatacataccggttctctaaatnnttgcagtgatgataggctcattggtttcgctctgtgtgtcgttttccaactgccagataccaatgatattaaacgcagaaaccgtccttttagtacctcctaaactatgtatctgattatggcanacacattctacccaaca

SEQ ID NO: 5681 - DNA, 306 bp, Glycine max
cgtctcggtatattactcgactcaatcggatatcggagttaaatgttattgtcgcttgaatatgctcagagtttctaatctccatttcaagcgtctcgatatattacgggactcaatcggatatcggagtaaaaagttatcgtggtttgcatttgctacgagcttctatattcattttcgagcatctcgatatattaccggtttcatttggacatccgagttaaaagttattgtcggtggattcgctcaaactatagtctacaatttcgagcgccttgtatattacgagactctatcggatatctg

SEQ ID NO: 5682 - DNA, 452 bp, Glycine max
  unsure (1)..(452): unsure at all n locations
agttatgaccatttgaatntcttgagagcttctgttgttcaatttcgagcttcttcatatatcatgggccttaatcatacacccgagtcanaagttatggccgtttgaacttggccagagtttttgtgttccatttcaagcgtctcgatacattattggcctgaatcagacatccgagtcattagttatgacagttcgaatntgccaagagcttccatgttcaatttcgagcttctcgatatattatgtgccggaaacgcacattcgagtganaagttatgaccatttgaatntctcgtgagcttccattggtcaatattgtgcgtctcgatatatcataggcctcaatgaaatacccgagtcacaagttatggctgttngaatttgtcgagagcttctctttgtcaattcaagcatcttgatatattagttcgctgaatcgaacatccgag

SEQ ID NO: 5683 - DNA, 291 bp, Glycine max
  unsure (1)..(291): unsure at all n locations
gagttttactctctagtaatcgattaccagtttactgtaatcgattaccagtgacaagttntattntcaaanagctntcaactgaatttataatgtttcaatcaatttcaaaatggtgtaatcgattacaatatattggtaatcgattacaagtgtgtctgaacgttgaaattcaaattcaattgtgaagagtcacatcctttcacaaaaatgctgtgtcgtaatcgatacaatgatttggtaatcgactaccagtgataagttttgaatagaagtcaaaagatgtaactc

SEQ ID NO: 5684 - DNA, 285 bp, Glycine max
  unsure (1)..(285): unsure at all n locations
aagtaacctcagccactacattatagtgatgttattcacanaactagggaagttatgtcatgagatgttaataaataacatgtcggtgatgagnttanctgtacatatgtanttgtgcagtttccactcacaatccataagcagttctaaccaacctgttntgtttgttcaccaagtgcatatataggtgattttatatattttaattttaatatatgggttgacagagtagagcaaaatttaaattggtagtgagtgaagaggaaagttgagcctgacagtggt

SEQ ID NO: 5685 - DNA, 200 bp, Glycine max
caattgggtgaccacaacagcgctggggccggcaacggacaatggtctttcaaataaacctgttgtacatgaacaaacattatatcatgcgctgaccgtgccaaacgaaccagcgaagtcattgcataattgatacactaactatattcaatgtacctgaacaaaatgatgtccaaacacgtgaccgacacatatgatgc

SEQ ID NO: 5686 - DNA, 326 bp, Glycine max
tttgtttgcaggtttgcaatgcgttacctgaggctcaaaaggtcaggttctcattataataccagaagctaaagaggcatagtatctgttctaattatgagagtagactagtaaacactcagctatactatttcagtaagagcgaaaagcttttattttgaaaactcaatgactgtcttctctttattagcatgcatattatctccataaaaatatgattatattattacataaatgtatataaaatctataaagtattaaaacctcgttcctcattttgcccaacatgcacatcactaacctatggacactctctattatatttt

SEQ ID NO: 5687 - DNA, 256 bp, Glycine max
  unsure (1)..(256): unsure at all n locations
gtctcgatatattacggcactcaatcggacatccgagtaacaagttattgttgtttgaatttgctcagagctccagattccatttcgagcatctcgatatattacgggactcacacagacatccgagtnataagtcattgtcgctagaatttgctcatggcttcagtattccattatcgagcgtctcgaagtattatctggactcaatcagacattctagtaagaacgttctgcgtttgaattgctcagacttata

SEQ ID NO: 5688 - DNA, 212 bp, Glycine max
aagaaagagcttcactgccaagatagtaccttggattagaagcttagagaggaagcttcattggaggaaaagaaagagagagagaatgagagaggtgggagcacgaaattatagacgacaagaacgagtgaagttgaactttgaagtttgtctcacaagactcccattcatcatagttacacatgtgttacacatgctcttatttatagcct

SEQ ID NO: 5689 - DNA, 261 bp, Glycine max
  unsure (1)..(261): unsure at all n locations
gactacgtagaataatgacttgatagtctttttagccttgtttccctctccttgtgttgaagctcactactaaccttaagtgacacaccatgatattaccatatccttaaggaatattggagctatggaattgttctgggaataagtgtggagggtttgtgtttcattggacaactngctctgatgactatgcttcatgatgtattttgagccatacttgatgtacatagcatattggttaaatgttggacatgctgaatg

SEQ ID NO: 5690 - DNA, 355 bp, Glycine max
  unsure (1)..(355): unsure at all n locations
gatcatcctactatgacgactgagaaaactgcggcaaataaagagggtgaggatgagggagaaacccatgctgtgactgccatttctgtacggccaaattatccaccaacccaacaatatctttactcatccaataacatactgtctccttacccaccacccagttatccacaaaggccattcctanatcaaccacagaagtctgtctaccgcacttccaatgactaagaccacctttagcacaaaccatataacaccaataaaaaggagatttgcagcagaagcctgtataattcaccccaatcccagtgtcctatgctgactcgctcccatatctacttgataattcaatggt

SEQ ID NO: 5691 - DNA, 278 bp, Glycine max
gataagataagataagatctagatgaaataatatctagatgagatcaaatcttaataatatctagataagataagatctaattttatagaataaattagtctgccctcttcaagtccaagcccaattctagattcaagcgcaatgcttcattaattcctgaaattagattaaaaacatcaaattagctgaatgggcccaaataatataactgcctaattaattgacaattaagaccaatcaataattaaaatggtgcagaaagggtctatgaaataga

SEQ ID NO: 5692 - DNA, 287 bp, Glycine max
atgtggcacactcgatgtaactttgatgagtgagagtcttgtgagacacaactcacagttcaacttctctccctctatcttccttcaatgccaggccccacctctctctgtctctccctctatattttcctccattgaagcatactctccaagctccttcttccatgacttattccttaatggacggcgcctcctcttacctcattttctttgtcttccgctgcatctccatggtggaaaatcaccattaaaggaccgcattgaagctcatagatccagccttcata

SEQ ID NO: 5693 - DNA, 377 bp, Glycine max
  unsure (1)..(377): unsure at all n locations
atctctaacaagggactatatatgattngaaaataagtgtgcagtgaggtaatagatcctagatataactcacaaatctacgtagaaagatagcggcttaaaattaaccctcggtgttggatactcctatggatataaagaaatcctctgtgaccttagcatgtgcaatcangattcattanattcctctatggtagaagttgacattagctgaggttgctaatgagccaaaatcattttgtaaaccatattctctacactaatcaccattaactaggctgcttgaatctatatgaaatgtccatctgaccttgctagagccatgcaatgcattaaaatatctgaaatccatgcctttantctcatattcgctatat

SEQ ID NO: 5694 - DNA, 199 bp, Glycine max
  unsure (1)..(199): unsure at all n locations
tcttcatggatggatntgctcctttgacatctcgtggctctcagcaatacaaggccttgagtgtgccagagctgacacagcatatgtgggattcaaagaacatgatgtgagctgctgaccctcgacatggacgctacctcactgactcagccatgtttagaggcaagatgagcaccaaggaagtctacgaacatatgat

SEQ ID NO: 5695 - DNA, 184 bp, Glycine max
atatatatattgcgtctgcatcaaaatgttctaagcatcaacaatgcatatattagaatgcattcataagaagcttttcattacaagcctaattggtttgttaatggtgtatttgaactaaattatctctgagacaacaagatgtgtgtaaaatagttcaatcatatgcatcaaagtatgaaaa

SEQ ID NO: 5696 - DNA, 461 bp, Glycine max
  unsure (1)..(461): unsure at all n locations
accacaactttatctagcagctatacgatcaacatcgatgtgtgtcttcccaagtgctcttgctcggtcataacgaggaattacatcatataagctcttttctgcaagtntctcaatcaaactcacctattcatgagatatgtagtggaagttgagatacataaatagttttagtaccatttgcacaaatagtttcatgtgttatcagtattgaaaatctagaaagagttacgaagcaataacttatgacacatacaccatcctttctagattaatgggctcagactatggcatacaagttcccagtaaataaggatgagatagtctgaacatagacgaaagctcaacatgatctctataagatatccattcaacacttacactaattcattcacctcatctgcaatgtcaatgacactattagaaattggcaaatcctttactgtataatatgttcacca

SEQ ID NO: 5697 - DNA, 343 bp, Glycine max
tttataagcagcttacaaattattctaacatgtattaaactggtctttggaattctaattcgagacatgatttacttattaaatttctcaaagaaaatatgaaaatcactttcaaaataaaaattatgaagagttaatttcgaaaaaaatctagtctaaataagagttattctaaactacctattaaagaaaagaggatgatgtacagagcatccaccaagaaacattcatgccccaccctgatcttaattgggcctatctgttagcagagctatttttagggtcccacgaaaaatcattcctaacctattcagtctagtcttgaaaaaatgaagaggaatga

SEQ ID NO: 5698 - DNA, 325 bp, Glycine max
  unsure (1)..(325): unsure at all n locations
cccatttttacttagtacaccccctgccttttntttggtaattctttcttcgtaaaggtacggaaacttacgaatntcgtaacgatacttggtttctttctgtaatgttacggaaccttgcggattacataatcatcccctttttgacttacggaatgttacggaacctcactaattatgcaacgatgcttnncatttgattccggtgtgtacggaaccttacggattgtgcatcaatatttttctttgttttcggcatggtccggaatttacaaattgctaatgatggttgccagcacctacatggaccaataaagtccatgta

SEQ ID NO: 5699 - DNA, 342 bp, Glycine max
  unsure (1)..(342): unsure at all n locations
gcctacanaccacaagatcaagttttcagacatcacaaccttgtaagtaagacctaaacacatagtaaaacctcatcagacttaatattctgcaaaacttagcttcagccccctcccaaaattatntnttaaaaaatctgtagattagaaatgcttcaaaagataagtagcgagctttctggtgtaaacaaaatactaaaacaaatggcactagacctcccttggtggattacttcattgcgcttcacactcttatngcattccctntctcaaattcccatcagcaatatttaagaatggttatatatgataaatgaataataaaaccatcacacttttcaa

SEQ ID NO: 5700 - DNA, 368 bp, Glycine max
  unsure (1)..(368): unsure at all n locations
cacgaatcctcttgccaatcatggnggatcgacagttaatgctgtggaggagcatagaccttatgggccaaagcggatggaagatgtggtcacctcagggaggtttatattggaagcactgcatgaagcgggcttaatctgccttgacaggcacaagggagattcttgtttgatgcatccaggtgcatcacatgacatggaaacatgtccgacggcggattagctattacaaggaatgatggacatgggcctaattgaagttagcaatgcaaggaaggcggagtaagatgtgtgcatgcaatcgactgataagagcccgagcagactgaagccattggtgatccacttctccagagatgctgtcacac

SEQ ID NO: 5701 - DNA, 508 bp, Glycine max
  unsure (1)..(508): unsure at all n locations
tgaaggcatttgataaaatgcagcctacataccacaagatcaagttntcagacatcacaaccttggtagtaagacctaaacacatagtaaaacctcatcagacttaaaattctgcacaacttagcttcagccccctnccaaaattatatnttaaaaaacttgtagattagaaatgcttcanaagataagtagcgagctctctggtgtaaacaaaatactaaaacaaatggcactagacctcccttggtggatactcattgcgcttacactcttatgcagtttcctctcaaattcccatcgcaatattaagaatggtatatatgataatgaatataaaccatccactttcaatagttacagctgacaaacatcccatatagaggaaacagtgaagaatatcctatgttactagactgccatcggtaaatctgctgtcgctgcatagtgatgcttctagctgggatagtctcctgagaaaaggctgtctacagctgcacaagaaataaag

SEQ ID NO: 5702 - DNA, 180 bp, Glycine max
tgatacagattatttattaagcttaaaaatatataaataaatttaattatataccgttcatttgagtaccaagataagatgactataaacttaataatgaatagtcaatactataaatttaaactgacctactaaggggatggagatgggttttgtgatataatgcgtcaaccctaaatc

SEQ ID NO: 5703 - DNA, 380 bp, Glycine max
  unsure (1)..(380): unsure at all n locations
aactacgtacganagctatctagacatcgcccgtttctaatagctcatcacccttacggaagaatgaaaaaagaatttaatggaagtcaagagcacgaaactgcgcggataccgttaactggtgagcaggtcttccagcggattgaacaccttaatactatattgggacagacccaaaagaaggataaaagtaagagttgcatatggaagaagatgntccatttctttgatcttccgtactggtctgaactagatgttagacattgtattgatggtatgcatgtagagaaaaatgtatgtgacagcgtcattgggacactccttaacattcatggcaagacgaagaatggtctaaatacctgtcaagatctagctgacat

SEQ ID NO: 5704 - DNA, 501 bp, Glycine max
  unsure (1)..(501): unsure at all n locations
tgggtatcattatcataataaatggtacaagtgtggttgctnttgcactntggccgttatgcttatattatantttggctcttcttgtccctttagttgaaatatcatgacactggaagagagaaagaatacttgccacaagttggtcagtggaatatgatgaacaaggtcagctaagaatgaacaaataatgtttagatgtaattattttattgaaagaaaaganaagggaaaattacttgttccaacttactctaattctgggaaatctaatgcagaaagttataaatggaagtactggtagatattgggcatgtatcaacttctcacgaagtgtacagganagtgcagctcgtggattttgcaacagtaagtcagatgtgccaatctaggcatggaaagttcaattttgctatgcatgtatctgagtctcttattatttgattgcctcgatctgttcaatgtattactatcntcatatatatgacacacttactcatc

SEQ ID NO: 5705 - DNA, 429 bp, Glycine max
tgaactagctgaagacaaccccaacattgatgatgcggctttattttaattgttaggtatgcggggcaatgtatgcgtatctctgttattctacatgatattgatgcgactgttcttcaagcttatcgtgaataaaaattgcgtcatgcattcatactaaaaatattaaaaaccatatattcatgcacatatgctattagattatactagtcatttgattgacctaattatatgggtatcttggctctctgtttacagtaataaatcttaaaacttttgataaaagaagtctgctatccagacagagaaagaataatgtgatcttttataagaagaacatctaatccgttatgaattacaatcgctactttaattatttatgttcaaattaaatgttatcttcttatattcttcaggtcatctttaaaa

SEQ ID NO: 5706 - DNA, 317 bp, Glycine max
cgctatttgattatattgtatgaatgccaattacttgactttggctagaatctttgtttagtgaaatggggtttgtttaagtaactggatgatgttgttttacttttcgtaaggagatatatgttatgtggatatcagatttgcttcattgtttggttatctattctgggcggattgtacgttatgaagctgtggcttgagaggaaaatttttcctgaatccgttcttcgccattacatggatgatattggactttcaaatgatgatatgacagttagcttttctctcagacgtgcatctcgagcagagcgatctgt

SEQ ID NO: 5707 - DNA, 93 bp, Glycine max
tctctccacaatacggcgccggcgcgcctcttatttatatgggccccccaaaaaagttctgcgctcttatggggattgcattccgaaaagtgg

SEQ ID NO: 5708 - DNA, 503 bp, Glycine max
  unsure (1)..(503): unsure at all n locations
ttcttaggtagtgtgtagtgacccaattattagcttcttgtatagcactgataaattcttgatcactacctagaaagcctattgcaaaacatgctntcctaaatgtaccatataccacaccattgactgttctaatgtcatcgtaagactatgcatcnttggcagtggatagcatcattctaaggtaaaacaatgcaccaacttaaggtgggacccatatgagtctgcctattgtattccctcgcttacttggttgccaacatcatttgcggtcaacataaacaaatctcgagatatattgatgatcaggaagatctcatccataagaacatattctgtagaatgtatccagctcgtaacatgaattctttgattgtgttctttgttgagacttaacaatatgntgtcatctgtcagtaaacatgcaatgatttcaaggagaatatacccgtcactgctgggacgttcttcattcggatgcgacatattcaacatgctctggg

SEQ ID NO: 5709 - DNA, 509 bp, Glycine max
  unsure (1)..(509): unsure at all n locations
gtgtttttttactatgtnggcatcccttcggtttggaagtagcacaacccataataatcacaacacacatctgaattgatacatngataaacgaacacaccatgcaaagaataaaacaaaaactttgtttgtggggaattaaaaataccccacaaacgaacacaaatccagtccactcacagtgcttgcatcattaaacaaactaagaatattgtgatatgacacgaaaaagataataaaaatgtagacaaatttggtgccgcggttctattatactccagaaatgacantntgagaacgaagattcttaatagcgagtttgggagtggatggtaaccaaacacaagtcttatttgatgtgagaagagagaaaaatctctctactccgcgctcacgcagaaaaaattgaacgaagaaacggagtgcatgacacgaatgattccagtcgagagaggcgatgagagacatcttaacacctttccattaccagcgcaacgctacccactttn

SEQ ID NO: 5710 - DNA, 252 bp, Glycine max
  unsure (1)..(252): unsure at all n locations
ctgtggaaaataaacanatggaggatgtgtacaatatatttatgataatatctctttctccattgtatttatcatcttattacacatctgtgtctcttctcttactatgggttnctntgntggaacacacatgttattaattcactatgacaatataaatatgatttccctcaacacaattgccttcgggcagccaacaaatactatgggtttgtgccttccgatgggtgttgaacccataaaccaaatgaa

SEQ ID NO: 5711 - DNA, 341 bp, Glycine max
  unsure (1)..(341): unsure at all n locations
gcttctcgctagtcgtaatggcgacacccactgcaccgtgcttctcgccagtcataatggcgacaaccctgcacctctgtaaaagcctgtccctgcacgctgctgctctgcacgctcccagggctgtaccctgcatgcaaatcaccagtcaaactgacgtaacacgctgaccttaactcgccaactacagtggcgagaccactggctatttcgccagtggcagtggcgttatcgccatgtgttgcaccagagacgtttttccagtgacgctggcgttntgcatggcattntacgtaaaaaataatcccatgtagaaatttgttttaaaacagccccattct

SEQ ID NO: 5712 - DNA, 236 bp, Glycine max
  unsure (1)..(236): unsure at all n locations
ctatcaatagacctccaatcgttaatggagagggttaccactactgtataacccaatgcatattttatcgaggcaatagatctaaatatctgagaagccattgaaatanggccttatatccccaccacagtagaaagagtntcaatagatggtagttcatcaagtgaaagcataaccatagaaaaacctagagatagatggtctgaagaggatagaaaacgagtacaatacaacct

SEQ ID NO: 5713 - DNA, 525 bp, Glycine max
  unsure (1)..(525): unsure at all n locations
gaccaacatagttgctatcatcgccaagcaccaagaagagttatgtctagccacggaccaccagcatataatcgccgatgagtatgcccaactctactcggataaagacgctagaggaagggtgatctactctntacaccaagacgcaaccatgtggatggatcggnttgctcttaccgtgaacaggagtcaataacttcctcgattgttatcctanggcctatgcaatggcagacacctactcctccctcgaagagattcatgggcttctaggctattgtcagcatatgatagacgtaatgggccacataattatatatcgataagaaactcgtatgggctctcagaccatgactagatatgacttccttcatgaaataaatgagatggtccgatgttctactacataaagctcgcgctaatacatcacttctagcatgtattctagcatgcagtctattttatacccactctcacgttggggttntaagaatagcacatactatactcgctgatggatccttn

SEQ ID NO: 5714 - DNA, 325 bp, Glycine max
  unsure (1)..(325): unsure at all n locations
gttgtatggcttgaaacaagcaccgaggcagtggtacatagaagttaatgagtntatgagcaactcaggattcataagatgtgacatggaccattgctgctatgttaaaaaatatactaatagttatgttatccttgttgtgtatgtngatgacatgttgatngcaggatctagtatggcagaaattaacaggtngaagcagcagttggcagaaaactttgaaatgaatgatcttggtccagcttaacaaatccttggtatgagaattcttagaaacagatcagaanggaatttgaagctgtctcaggagaaatatatacacaag

SEQ ID NO: 5715 - DNA, 520 bp, Glycine max
  unsure (1)..(520): unsure at all n locations
cgncctaatttctttgttgctggggnatctaagctcttaaccttgacttggtagaacctcttgccggctngatttgttcccatgcttgctaaagtgagacaaaagctggtgcaaatcaaaactccaatatctcatgggtggaatggatgaatgcatgaaggaatgcatattacacagatgcaatctangaatgcggtggtccggggaattcgtcctcttcttagacacaacgtctatgggtagcatagtgccccaacgtacgtgttttagaaggtgacatggaccctccgttggtttgntacacaaaggatcaagacagaacccatatgcgatgcctatgcanaagacacaatgcgggaatgtacacagtatgacaatattcacttgacataagncaaagggtatatgatacttatgcatggcagtgtgaaaaatggacncagcgtgnttgtcttgcccttagggagagactactatgcttagtgtaccccaagtagcttntctttgatgtntatagatg

SEQ ID NO: 5716 - DNA, 578 bp, Glycine max
  unsure (1)..(578): unsure at all n locations
ntgatcactcgtcccagatctnanagncacctgangcatgcactcgtgtacatactacaacaatctgctgatagaggtcattactatatccatccacacaaactcttttgattagttgaatcacacaagatcttctcccattgactaccccataagataagaaactcacatcttgtactaactcgaagccaaggatggtatgcatagcaatgcgtccgtttcgcttcacatcgtacagctatgtcatggcgtcatgaagatcgacttactcactactaagcgattctagagctttgcagatgagaattgcatctctttgctggtggagaaagcaatcgctctaagttcatagcaggtgtaagaaatggtataaggctacatctcaattattgaaacagatgtcactatgtgtaattgtagccacctaccattggactccttccaataatgtcatggagaggtgacagcgcaacaaaattatattcccctacgaacacctttagcaggatgttaacatttttcatatttaacccatcaacattagtatatatgaataaaaactcttctctcactattcn

SEQ ID NO: 5717 - DNA, 339 bp, Glycine max
  unsure (1)..(339): unsure at all n locations
tgatgaggagcacatgcaatgggtgttcagcggaagatttgagatgaagactaatgaagtgagtgagaagaaagagtcncctgttgatctgtctcttccgacatanagacagcatatactcagcgagagttcgatgactcgtcaggtcacctgtcaggctatacacatgatgatgccttgtatcagggaatgcgagaggacccaaagtcatatgtggcctgtcgattcaaggctgagaaggatttggattctatggtttgaggtgtgcctgcaataaaccgttgagtgatatggcgagagtgtctgccccctgaactaacgtttgtaacgttgtgtctt

SEQ ID NO: 5718 - DNA, 371 bp, Glycine max
  unsure (1)..(371): unsure at all n locations
agatgggcctaatcaaggtccatccattccttttgagtagtcactctatatattacgtttatttagttatttagttacttaattttgtaaaaaatagaattagttacttattgtgcaaaatttctcttttctccctttntctgtcaactggtctccattcttcctcctctttccacttctgttctacccatttctggcacanaggttcatggctnttgaaatggtgattattatggaggactaaacaattaatcaatccaaggatccactccaagcataggtgaatntgagttctggtttagtatntntaatctntgtgaatgttcatctttctcttcaatcctactttntatttttattttatgagtatg

SEQ ID NO: 5719 - DNA, 350 bp, Glycine max
  unsure (1)..(350): unsure at all n locations
agagaagggcatttttatggtttagaatactagttatattttattaaagctataaataatatattaaaataaaatataanttatattaccgatcaattatgagttacctagattagattgactataaaccttaataatgtattagtccatccctataaattttaaaccttgatctacataaaggggcatgtgagatggtgtttgtgcatattatgctgtcatagcctaaattcattggctggagtctgagatgtagtgccgctttgtctacagtttcttgataaaggggcctcatggttctgagaggcttcactacttgacgggctttaagagtacttaacagtttactt

SEQ ID NO: 5720 - DNA, 295 bp, Glycine max
  unsure (1)..(295): unsure at all n locations
cctactctgacctctacaaactgcctacacactcaaaaggtagccctatgtgtatcaattcttttctacaagtagaattccacaaagtcaggcacaaatgccattgaggcatttcaccgagtacttggtggacgcatgtttaagcatgaatagcaagggaatggnggcaatatggcatgcccaaacatttcagaacacaacttatgcctaaggccattgcctacaactccctaactcaaacaaacaagcatgaattcaacgccgaattgctccacagaattgagcacattcatac

SEQ ID NO: 5721 - DNA, 605 bp, Glycine max
  unsure (1)..(605): unsure at all n locations
nnnnnnnccccnnnnaacaacggttaagagttgccanagatatccannnatnganancnnctncnnncnngngngcagnanaccncttactgtcagtcntccgtcatatattagnccncgcgaagctntcgggaggaggggtagtcttgtgcataagcgtagcatttctggtcgaacccgcccaacccaactaagatgaaccgaacctgacagacacatctttnttggggagggtactccgagtagtgggtacctcgtaagacctcgacccgcctactccggtcttgtatggatatgcaggaaggggtgctcctaggtgtatgtaggggttgtgtttattcgcgagaatggattcctcgtcaagtcacgtatgtggggtgtggacacacttgcgcgaattctggtaaaagctacatgggagatatcgataggatattgtcccaaccaggatggacgtaactcgtagctaccgagggagggatactcgccagttctattgtgaataaaagctgctcatccatattgataatagacatattatagtaggtgaactagtatgctatatcttcgacattnatagacacttcaacaatgtaccggtagcg

SEQ ID NO: 5722 - DNA, 139 bp, Glycine max
tgatatgcggcgatgatcccattactggcttgcctaagctatatgtactttgttgacgccgcataccatgccttgcgaactgcttggagtaccctcgcgttgaggacactaaaaccccgtgcgacgaaatgcgtgatgc

SEQ ID NO: 5723 - DNA, 544 bp, Glycine max
  unsure (1)..(544): unsure at all n locations
naaatcatacggtgcganagttcatcatgagnntcnncncgnnnnnnnnnnagannnanactactttatcaagcgtttatatcaccncgcaacgcctcaagaggaggtgtttgattggctncggcaagtgctataacctcacttcctattaagacataaatgatgcaattgatgtcattaagcgtacatacatgttccagactaagccagcccgattgcctactaacatggatttggcaactagtgatgtcaccatgcttagtctctaagtatggcattcaagctgtattttgacaatattacatattatctctacaaatcctaacgattcaccctgggaacgttgtgcagtcttaaaccatataacaagataatagcgccattnaactcgctcggttccaactggctataatactcgcctgacactgagtcgaagtctggttcacattaatagacttatgccgcggtcagaaacttaatggttggtcgacataaatatgtctgtgagatatctctcggataggtaagtagttagactctttac

SEQ ID NO: 5724 - DNA, 189 bp, Glycine max
  unsure (1)..(189): unsure at all n locations
attgaaactcaagtaaactattcaatgttgacgctcttagcgactagaatttaatgatgacagtgaaaattgtcactaataatatatcatntatcactaactnttatcttgtggctgatattatttataacaatgacgaatagacaagctgtcactacttcgtcacaatcgtattgtaaccctaatgtc

SEQ ID NO: 5725 - DNA, 343 bp, Glycine max
  unsure (1)..(343): unsure at all n locations
ttctggatgaatcttctggaacgcccaagtgggcctgtgtgctatctgcacccacattattactaattacaccccctgcctcttttggtgagtctatttacgaaacgttatgatactgtacgaaattcataacgatgcttgttgtctttcccgaatgttatgaaaccttacggattacgttatcatcccttttttgcctttcggaacgttacagaactttacgaatngcacactaacacttccttttaatttctggcatatcacggaacttcacggattgtgctacaatagcttcttttgacttctggcatgtcacggaacttcacgaatagcctaacgatgg

SEQ ID NO: 5726 - DNA, 169 bp, Glycine max
atgagccctgccctgaagagcttcaacaggtacctaccttgttctaagtagagttatctcaagaaatctaacatactcttgagatggaggtggcgcgctgtatacttccgtggccagattagcaacaacaacaggagcctcagtatcaaaattcaccttctctatgatg

SEQ ID NO: 5727 - DNA, 334 bp, Glycine max
  unsure (1)..(334): unsure at all n locations
cctcatttgatgggtcggatccattgagttggatctttaacattacccaattntntgagtatcattccatgtcgcttgaccattgcgtccttctacatggacgaccctgtgctggcatggtttcagtggatgacctataacggacaactagcttcttggccttccttcaacctttggaggcccgttttgcgctgtctcaatacgatgaccccacgggggccttgttcaatctgaaccaacgtggctctaccggtgactatctcttagagttcanatcgcttgcgaatcgtattattgggcttccgccccctttcctcttaagtttctttatctt

SEQ ID NO: 5728 - DNA, 335 bp, Glycine max
tacttgtatgggtaggatgttgaattctggttgtttctggtgcggagatgatggtacagcgggtgaaccagaagcggaagtttcttttggtgaggtagccatggaaaagcagagcagttggaatgatttcgtaaatttcagaaggctattgtgaaatgctggtgaaaacacgaatgccaagcagatataaatttgaatgaagaatgtagagggtcgtgtgaagcaacggtcgacatttccttggttcagtagtgaacgcgctattaatgttaagtgattcgttcgggcacgttcagattgctgtagttgctataattcctctagcacacaaatgc

SEQ ID NO: 5729 - DNA, 378 bp, Glycine max
  unsure (1)..(378): unsure at all n locations
gcttaagctccttcaactgcacaatgctcttaatatttgaagagtatccttgtgtaaccttcacccgacgaagacactgacaaatacttatcttctccttcttggacaaagtatggcaggctggggtgcaagtaaatttcttcccatcagacgttggatgcaactgtgatcgtatacccatatcagttagatctcgacgggtattcaagccatccttcgtcttgccttgaatggtaaggagcgtcccaatcacactatcacaaacatctttctccacatgaataacatcaatacaatgtctaacgtcaagatcacaccagtacggaagatcaaagaaaatggacctcttcttccatatgcaactctgactnttattct

SEQ ID NO: 5730 - DNA, 339 bp, Glycine max
  unsure (1)..(339): unsure at all n locations
agcttcanatcagacaatgactactcgacctcagtgtcttatatctnggcaaccgctatgaattcgtcaagatcaactcagatggcaactctatgggcaatctaggagcatcttgtggcgtccctaaataatgactgtgttaatagtaataaattaagtagcagacaccctgggacatcttttttcctcttatctctctgtggatatttttttgcactgttattcactttacgggcattgaattcaaaaggaacaatatcactatagagtcctgaatggccagttcacaactctattctgattcatttctttctgatcactcataacctctaaactatt

SEQ ID NO: 5731 - DNA, 91 bp, Glycine max
agagctgagctaaactatacacttacgaaatgatttaattttaaattctccctggacgaacaccacaagagctgacacaacccaattatcc

SEQ ID NO: 5732 - DNA, 354 bp, Glycine max
  unsure (1)..(354): unsure at all n locations
atcaaaaaccatcggtgagtctacaacaataccaataagatttccactctcccgtcgtcactctctatgaatcctcagttcttaatatatttatatctaactgtatatatatatatatatatatatatatatatatatatatatatatatatgctgagaggaaacatcttatatgtggagtattaacggttaatctaacattatcacatgatntatcaaaaaaataacatgaatgtttaagtgggtaatcggtcacatgacattaaatcttgatcattcatgtgtgattagacaagccacatttaatcttctaaccctcatataagatacattcctcatatatctatctatata

SEQ ID NO: 5733 - DNA, 279 bp, Glycine max
tcccattcactgtacgtacccatatccaaatacctctgaattgcatcagattgttcagcatgtctgccggattcctgtcacactgctagtttcaggccacaactgattatccaaacaataatgaacaataaacttttgaacatacctgacgcaagtcaagcttcattaacaccatgccaaaagtgcaactctttaatcagatcagctagtcaccatcagtagcacccagatcacatattgctgagaatgttagctaatgaaatctgccacttagaggta

SEQ ID NO: 5734 - DNA, 176 bp, Glycine max
  unsure (1)..(176): unsure at all n locations
atgtttgtattatagaagcaagttagagatagaatctaatgtaaaattatcgatccaattgagagtcacttaaagttcattaaatntaaaatcaaatttgcacacattcatttctagactcttcttcgacataaaatcatatgtgaaaatntatctctatctaaaacanaatttag

SEQ ID NO: 5735 - DNA, 336 bp, Glycine max
  unsure (1)..(336): unsure at all n locations
acacataatgagttagtagtgagcaatgctcagatgtagtataaggtaaactnttaaacctggctggtaagctggtctgccaagaaattttctgggaaattgacctgaaaggtaagcaatctagattactatcttagtaaaattttgaacaaaacaaggacacaagtgccttcttggaattctctctttctttaccttgtaaagaggagcacaaacacaatgaaatgcacactgaataatgaagaagcggctggatntatatatgatgttgaanggacaaaatgttatgagcagcagaacctgtaattacaaatcattagcttatagtcatatatg

SEQ ID NO: 5736 - DNA, 332 bp, Glycine max
  unsure (1)..(332): unsure at all n locations
ctatgtacccacggggggccacattgtgntttgtgtatttntattcccgtttcgtttactctttataccctctcttgacatgcttaagccattntacttaagtcatttctcgcttaacttaaaaataaaatcaatttccaccaaacgtttgaattgtattgtccgttaacttcggttaaaatgaattccgaccgttcggtcgtgccataaccacgttggaaatcaaaaaaagagggtaaaaaataatataattatcaaaaaaatatcttttagcaaaatacagcggaaaatcaatcggacgttttctctttgggatttctcattcttaatcg

SEQ ID NO: 5737 - DNA, 352 bp, Glycine max
  unsure (1)..(352): unsure at all n locations
gaccacacagtggtacctggagatatgtcgcggcggtcaagagaccttgtngacgtcatgtggggtgctattgcccaaaaccaagcttgaccaatcccgacccaacccgagcatagtcagtcagtgagaacctgtgacgtacctaaacaggcgagctcctggctgtcaaccgataaaagaacaaagaccacatagcaatgaggctcgtgtggtggttggccagcaatggatcttgagtaatatatggaatatggcccctggtaatcgattacaacggtgggtatcaattcaatgcttaaaatgaaggagaaagtaagatggctctggaatcgataccaagatgtgtaatcat

SEQ ID NO: 5738 - DNA, 433 bp, Glycine max
  unsure (1)..(433): unsure at all n locations
cttcctggcaatgatcaagtggtctgattaggtcctatacccggggccgtggaaccataggaggtggaggtgaatctgtgaccatgctaagtctccgactttcttgatgacagtgaaacctcctttagagtttntctcttttgataatatgatgtcgtggtagcccctaccaccaaacaattgatgtcaaagggaatgatatctctagaaaccatcgagagagatataaccgccttgtgagttatcactaaaagccttntagttgctcccatttaggttcctaaaataagggcacgcaacanacttactctggcatnttcctcgattgaatcattcatctcttcatggcattgcaatggacatatcattcccacatttgtcattngtcatattcgtgcattgcattttgcatgaatcactgcattaccacaca

SEQ ID NO: 5739 - DNA, 446 bp, Glycine max
  unsure (1)..(446): unsure at all n locations
ttaagtcacctgagctgcagctaagattcttactctttccgagattggatcaaacgattaatcttcttccactggaaggaatcagccagatggtggagtattccatcccaatctatcccatgtgcatgccatgtaagttatgttgcataatctgcattagcaaacaaacgcctaaaccttggaatgatcagaagatactattacacctttgctagggggcctttctttgtgctttcatcactgctgaactcatcatcatccttcactttgtaccatgataccccacacctggggcatntatggagttcttcaaactcatgtctgtgcaatatgcaatcattatagtattcatgtattttttatactccatacccattagacacaatatcttcttcgcctgataataactntntggcaacatgttttcctctggaacacatgctaca

SEQ ID NO: 5740 - DNA, 246 bp, Glycine max
  unsure (1)..(246): unsure at all n locations
cacctatctcttcatctctttctctcctccttaccacctgaaccagaacatatatcttctctagcccttgtgttctttatttgttgcttcatgaaacatatctctcttggcttcattagatatatgatatttatttattctggtncaaggagcataactcagaggttgccattctctcactttctctaactcaggaagggttcccatttttcttaattctaaccaatgatgttcaacagaaatgta

SEQ ID NO: 5741 - DNA, 189 bp, Glycine max
  unsure (1)..(189): unsure at all n locations
cgaatgaagaacgtcgtagaacggttganacctntgcgagattcttcacggaaaacgttacggatacgtttcggaagcgcctcggcttagatattcttcacggaaacaatctttccaagctaattctaaagagagagaagtgcctatagggctgaccccttccttcttgccttcctcccctatttatag

SEQ ID NO: 5742 - DNA, 282 bp, Glycine max
  unsure (1)..(282): unsure at all n locations
actaagctcgctccacacnatacctatgtcccctatactaatgtgccatttctttatgcgatgtcacacagatcacatgtgtgccgcaatgctcacattgctacagaaaagagtacttggcttgtttacatacaaccaagtgatccagagctcgtaagcgcaccacataatacaacctaatgcctcaaagctgtccactcatggctgaggtgtcttcatggaacatcccaagtctatccaatgttggaggaaccaagctttatgcactcacactgtcaaaga

SEQ ID NO: 5743 - DNA, 409 bp, Glycine max
tcatttctattgtttagtttatacaaatgaacgtgttgctattcttatagacttggagtgataacatgccatcctctcgaacccttatctctcactctttcgatatgacgagacttcgagacccaattgttttgcttggcatggctcgaacaaactcaaaacctcttgccatgtaccttaccataatgctttggaagaatgatcttgccaccctttatactcagtgtgtcaacgagctctcgtacatgggacacacatggttcccctaatgtcaataggaccatgagtaaaataagagaaatctctcactgacagaaaagagctctttgcctattagtgaagaggtacttgtctagcatgaaacaacgggagatgcgctggttttggaaatttctgacatacatgggcg

SEQ ID NO: 5744 - DNA, 381 bp, Glycine max
  unsure (1)..(381): unsure at all n locations
gcaaataaccaactgataattgccttctttttgtttccttatcaacggaagctgcccagtgtcttcaagcatcaaatcaatacaatgagctgcacaaggagtccaataaatatgttttcttntatccatcaacaacttacccgctaaaacatagttgctcccaatatcagttacaacttgaacaacattctcttctccaacttcctccacaataacatcaagcaactcaaaaaacttttcagctgtctntacaaaatcagaaccatcaacagacttcanaaacatggtaccagcttgagagtaataaacaaaattaatggatgcatctttcttccgatcacgtcatgcatcgaacataatagtacaaccatacttgaccca

SEQ ID NO: 5745 - DNA, 405 bp, Glycine max
  unsure (1)..(405): unsure at all n locations
atcttaagtcaccgccgctgcagcttgagtcttcttatctcttcccaaacttattctttcctatgccacccatgtaactngttgcaccaggaactnggagcatccactacaagaagcgaaagtaaagggtaaattgatttgatcaaagctactatagattcagagtattactaagtactaacaaggtagatacatacttgagcaaccttgattgaattatgagtggcaccttccagcacacaaacaaaaaagaaatagtagaagctgtcattatgacatatgcacttccactggtcattntataaagttggcttatgatatntaaatattaaagcaattatatagaatccaatactccggatctaatgcaatacctccaacaatggtgctcacattatatatttt

SEQ ID NO: 5746 - DNA, 170 bp, Glycine max
  unsure (1)..(170): unsure at all n locations
gaaactggaatccttgtatatgacanaatctcttgcaaatcggctatgcttgaagcaacaattgtgcacctttcagatgacaaaatcaagacagtcactgagcaattggctgagttcaatanaatccttgatgatgtggaaaatatcgaagtaaagctggaagaggaggc

SEQ ID NO: 5747 - DNA, 176 bp, Glycine max
tttgattcgtaccatgcttgctaaagtgagacagaagctggtgcgaatcaaaactccgatatctcatgggtggaatggatgaatgcatgatggaatgcatataacacacatgtgatctatgaatgcgggggaacggggaattcatccacttcttagacacactgtctaggggtagc

SEQ ID NO: 5748 - DNA, 150 bp, Glycine max
cgcccagtttataaactctttactccacagggcctgacatcttctaagggagtattaaccacaacgtgcagaccactcctttctctctttatagactattctgacacttaggccaatgtgtatacttaagtctaactgttgatgaaccct

SEQ ID NO: 5749 - DNA, 263 bp, Glycine max
tcagccccttacgcacttctctctctttcgaattcgctcggaaaaattgtttccatgaagaaaattctagccgaggcgctttcgaaacgtttccgtgaggaatctcgcaaaggtgtcgaccgttcttcgacgttcttcattcgttcttcgatcttcaacgggtaaggacctcgaaccaagcttttcgattcattctatgtacccgtggtggtccacattgtgtctcgtgtattcctattctcgtattatgtactttttatacc

SEQ ID NO: 5750 - DNA, 229 bp, Glycine max
ggcaaaaacggaaagacggagaaacctcacgattgctacgaaacatctcggagcttacgaagccctggctggtttctcacgaaacatttttctccaaacactgaagctaccagggatagcccctaaacacccctttgctttatggaaaagggagagtgccccacttctatgcacgggtgttccctaagagaaagctggacttgaagcctaatgaaattatttcccccat

SEQ ID NO: 5751 - DNA, 174 bp, Glycine max
tgtgaccacagagtggtacctggagaatatgtcgcggggtcaggagaccttggggacgtcatgtggggtgctatagcccaaaaccaagcttgaccaatcccgacccaacccgggcatattcggtcagtgagaacctgtgatgtacctaagcaggcgagctcctggcagtcaaca

SEQ ID NO: 5752 - DNA, 322 bp, Glycine max
  unsure (1)..(322): unsure at all n locations
catacaaccattggtgggccatttcatacactttcatggaatggtcaacaatantttatatcattcatagacgaatactccagatatgcataccttgttcttatacatgaaaagtcacaatctttggatgtattcaaaacaaattaaagtgaagttgaaaatcaactccacanaagaataaagtgtgtcagatctaaccatggtggtgaatactatggcagatatgacggttcaggtgaacaacatncngnngcctttgccaggtacctagaggaatgtggaatcgtccacagacaccatgtcngggcacctagcatgaatg

SEQ ID NO: 5753 - DNA, 345 bp, Glycine max
  unsure (1)..(345): unsure at all n locations
cctcatcgtctctcacagtctntagaattgtgagccaatccaatccttgtgttcggactctcagccacttatgatagccgccgatgatcccattactgcnttccctaagctctctgtcctttcttcacgccgcatcccatgccttgcgaactccttggagtaccctcgcgttgtggtcactaaaaccccgtgcgatgaaaggcgtgatgctttcgtctaatggcgctcctctcatggggtagccaagctgtcttatggtgagaacgagattataattaatacaaccncttgttcccatcaagggaacatttggacatccttcgcatgaagatagaatcctgattc

SEQ ID NO: 5754 - DNA, 344 bp, Glycine max
  unsure (1)..(344): unsure at all n locations
tgcaaatgcacatctaaattgtaggggtatggaagggtttatgacccttacaagcccatctcctcaagccgaaactcactaagcccacacaaacataagcatgcatcaccatgtaaataattaatgtactttaagcattaaatctaaatttaactacactggctaattaattaacaccacttaatcatacattatgaagaataggtttacaatactccataacaagaaaaattntgtcctcaacaattgcttgtgaagaanatntcataagcaccaatcaagcacgaaactacttcattntctagaggtcttgatctttcctccacaatctcttgtatagtcaa

SEQ ID NO: 5755 - DNA, 262 bp, Glycine max
ccttctggtgaggggtagctaggaagcctattactttcctaggattgacttgaatgtggatatggggattgtatgatacatgtgtgccgctatattatttgagctctatcaatgtatggaagtgactctattatgttttaagtcgaaaaattttaaattctaaacgtatgggttaaaatgtaattgtctcttataatttttctcttttttagtttaagcttccattctttcctggtactttctttctctgctgcctaactaa

SEQ ID NO: 5756 - DNA, 575 bp, Glycine max
  unsure (1)..(575): unsure at all n locations
atgatgcctcactcgccncggaactcaacgcagcggcgcctcagctgatttattaccatgagacattcgttgtataagngtcgaaccataagacttcatacttttcatttagcttggaaagagtgatacatgaacacaactcttgctcagcgcttatgtatcaaatacgtgatgatacattgaccagtcttcatcgtaaacatacgttaatcactctttctattatctgatacatgttagtacctcgtatctagctctttatttctagatgtgggaccacatatgtacgatgtgtaccacacgnttttctattataatatcaagtactaatattaacttgttgagacgagccacactcattcaccgagagtagttagtgctagagatacgtatgagtattaactttcgcacagcggaccgatgagtatagagcctctacttaagcgatctcttacgtctgagcgccagatgatcctgactacgagatgaatcgctaaggtaggatatagcatgatatgctgatgaccctggacccaatcagcaaaagccgttgtagattgtgtatcggctctgtn

SEQ ID NO: 5757 - DNA, 573 bp, Glycine max
  unsure (1)..(573): unsure at all n locations
attgtttgccttcgattacngctccngatactcanagtgcacctgcacgcatgcaagctcgctttaagactgtatatggagagatgtagtgtgcacactgtgtgttcctttccctcaactgagacacccattggttgcgtcatataaacattgtcctctaaaactacattaagaaaggcggttntcacattcattcgatgtagctccaagtcatagtgggctacctatgtcacgataatcatgaaagaatcttatcgtgagaccggagaaaacgtctctatatcatcaatgccatctctctgagcacatgtcgtagcaacaagtgtagcctgtgtacgttcaatggtgccatgaaagtcacgtncactcttgaagaccgccttacaaccaactctcttacaaccctttggtatactacaatgcccaacaccactatgtctgtaaattatctattcttcatgactgtaacactattccactatcacgctatatctggagacaaactgatcatgtataagctaagttgttttgtccgttgatatacaaacatacaataccgctcttctttgaact

SEQ ID NO: 5758 - DNA, 145 bp, Glycine max
tatggtcccctctagctggttatagcctaactgctgtactaaaagtatgaagagcaagagaactcgtgttaacatacagaactctcactaagaccccgtcatgtatgataccaagcaccagtagcctcgttgaaaatcaattacg

SEQ ID NO: 5759 - DNA, 299 bp, Glycine max
  unsure (1)..(299): unsure at all n locations
gatgtagttggacaagtggcctcaataacttaagaggaggggtcaattaagtcttacaaaatttcccaccaacaaatcttatcccccttttaaattatatatgataggctcagaatgcagaagaataagaagaaacaatccatttaacaatgttctcttacatgcgcaagataaagtaaactgcagtataataactgagataacggaagagagacatgcanactcaatntatactgtgttagccatttcccatacctatgtccagtcctcaagcaacccacttaagattttcactatct

SEQ ID NO: 5760 - DNA, 250 bp, Glycine max
  unsure (1)..(250): unsure at all n locations
attgtagttgcagacgtggatatagaagaacaaaatagaaacaattntaaacatcaaaacgaacagaaaggcataaccacagatgaggccagataaacagtagcaaactaaatcagaatcagacaaaggtcacgcattttttcagttnttcagtccaaagcaatataataaaaaacacataaaacataaaatgattacatgcaaaggaccgagaatgataaggaagcaaaatacataacaataagctaag

SEQ ID NO: 5761 - DNA, 243 bp, Glycine max
  unsure (1)..(243): unsure at all n locations
acaagtcacgcataagcacaccatccccagttgtccaccttctaatttagctcacgtgcacgcacgtagccttctcctcggttctctcagcccgggtccccgtcaaccccgccaagctttcacaatatgcaacaattcaattccatttgtcatgatactacgctagaccaagaaaacagagtggatgcagaanactttgcgcaagactcattctaattccacagntattgctactcacatacc

SEQ ID NO: 5762 - DNA, 132 bp, Glycine max
tcctagttaaccatgcgtgaggtacgcgtgtgcaattatggtgcttcttaagtgaaacagcttatgatcccaacatggttggctcgtggtgcctaacacatgagactaagaatgtagtgtgaagtttcacgc

SEQ ID NO: 5763 - DNA, 141 bp, Glycine max
  unsure (1)..(141): unsure at all n locations
tcggtcctaactctcactcggaagtcgattaggcgctcataaaacgacacgctctcgagatacctaacggacgcagcttttcaatcanatggccgatgcatgcgcataatatgggcaacctctcataatataactacggaa

SEQ ID NO: 5764 - DNA, 345 bp, Glycine max
  unsure (1)..(345): unsure at all n locations
ctatgcacccgtagtggtcctcattgagactcgcgcatatttagttctcatttgtttactttntatacccnctggtgacgtgcttaagccgntttacttaagtcatttctcgcttaacttataaataaaataaatttccaccgaacgtttgaattatattatccgttaacttcggttgaaataaattccgaccgttcggtcgtgccgtaaccacgttggaaatcaaaaagagggtaaatataatataataatcgaaaagacatctcttagtanaatagagcggaaaatcaatcggacggtttctctttgggatttctcattcttaatcgaattgattaaataact

SEQ ID NO: 5765 - DNA, 639 bp, Glycine max
  unsure (1)..(639): unsure at all n locations
atctcttcgtgtancgcctagtgantctnttgttttcatntattannnancnacttacaccantaggtttgatttccatccacttcatgctctgtatacacatctgcccgcttgcaagcttctcattcatagatcatattggcggagaagctctctctctaatggatgattacctcacgaaggcgccctacatatcacctcttcctcttagtctactactgcatntccatggaggagaatgaccaataacggacctcatcgacgctcaaatatccagtcttcatatagacccccaatcaccctcccatcaatgctgatgcgagcagcttgatgacatgcaagatccatttggttcctcacttataaagcatttcttgttttctctaagactcatagctatacagccggctgagaactacatcggtctctgcgcctttacgctttcacacgcggcaggccctattacatgctgacccatatgcgtcaacattctaacctctctagcactcttgactataatatgttgccccatagctccgtcgctttgttcatcgcaatcaacgcgtcgtctatgctcgcttacatttgaccgaccttcacacctaccttctctcaatcctactgacctccaaatttagc

SEQ ID NO: 5766 - DNA, 447 bp, Glycine max
  unsure (1)..(447): unsure at all n locations
gaacaatncacttgtcctgaagtgacgaatacagtggccaatcaaaagaaaatggtgtttgattcatcaaggacatcaaccatatcaactgaataccatggaatgcttaaatcaattacttctcacaagcatgcagttttttcaaagataagagcacaagtattagagtcacaactganataagctagttagcatgacataaatcaaggaaggatcatcaaccaaaacctcacagtcattgtttactcacactcaagtgtttaggcttattccatcataaataaccaacataagttccaacctttgcatttaatctcctatatacaacaatgaacacacacatatgaattctaaggactgtctatgattgatatgtggtaggctgtcaaaattcatggttctctagattcataactaatgtctacgaaacattcttcatatatacct

SEQ ID NO: 5767 - DNA, 278 bp, Glycine max
ggatcccatttctaccaactacaaaccctaagaaaactatattatctacacaaaaaagacacttctctatatctgcatagagggtgtttttcctaaagactgaaagaacttgcctgagatgtcctaagtgatcatctatgctcctactgtacactaaaatatcatcataataaacaactacaaatctacctatgaaatcccttaagacatgatgcataagcctcatagaggtgaatggtgcattagtgagcccataaggcatcactagccactcatca

SEQ ID NO: 5768 - DNA, 167 bp, Glycine max
  unsure (1)..(167): unsure at all n locations
gtcttccactgcatctccatggtagaaaatcaccattaaaggacctcatcgaagctcacagatccagccttcatagaagctccacaagcaagcttncatcataattaactttgtgctcattctcattctcatttatacgccggcctgctctagagctctcattgctt

SEQ ID NO: 5769 - DNA, 425 bp, Glycine max
  unsure (1)..(425): unsure at all n locations
gttttctattttgatgtatcagcgagactagcaagattgtgtggtttgtaatccgcgtctttccaaagcagccaatggggacatcattatacatttagtacattacccacttttaattntaaattgngtccagatgtggataagaacaactaaactaagtcatttaatgtattgcttttatataatgtatgtaaattattacttattgatctgagaaaaaatattatatcttactaacatatttaatgtggatagcatatactggccagttaaaagctgttacattgtcaatgatcaattaanaatattctttcgcatgactttcaaggtagttatcatcaaaacaaacaaacttatcatatatatatatatatatatttgtgagttgatgactctatgcaacatatgtacactactggtaatac

SEQ ID NO: 5770 - DNA, 358 bp, Glycine max
  unsure (1)..(358): unsure at all n locations
tcagatgatagaaagggaagagagatatgcacanaaattgttgtaataacagaatntacaatgaaggggttcaaaacaatctcaagctctctaaacctagaatatagagctccttataaaggagacaactattatctgtctaaccaaaaatagttacaacttaaaacaaannacaattatagttacaatacaacctatgttaatgaaccaccagactggatgctcccctttatatgactagatgctctaccagattaccaggagatagatgaccaacacanaagaccagagtatagactagacaccaacactgttatcacctatcttatcgtcatcatcaacaatcaacaatctcacc

SEQ ID NO: 5771 - DNA, 268 bp, Glycine max
  unsure (1)..(268): unsure at all n locations
atgctgtaaggttaacatgcactcttcaacaatgaatagttccttttgcgtgtgtgttctaaatatatgatattactttgtgaaaggatgcctcattgcctcttatttcaactgtataaagcccatgtgaattattgaatatattgcactgaatatcctttatatgtcaacatgtcaagagtattattctgtccttgggatgtcaagacatgctagtcaatctgaaattaagagcggtattntctattcggtcccttatctgttatat

SEQ ID NO: 5772 - DNA, 198 bp, Glycine max
  unsure (1)..(198): unsure at all n locations
tgtcaactgacaaatatcagtcgggctacttcacgaccgatgtcagctattgagttttctattcaatcccttaatgaaatatntatgatgtcggtaaggaaatgttcgatcggcgtcatgcggtgatgcttcttttntagacctccatcggtcatctttcttggcggacgtcgattggcatttntttcaatcaatatc

SEQ ID NO: 5773 - DNA, 269 bp, Glycine max
gtctctatttcattgtctacatgatgtgtttagacattctttattagtgagttagtctttctaaattgtcaaatcacatcaaagctctatgctcttgaattacaagaagtgagaatctacctaataccgagactatatgttcatatcacatcagagctctatcttctttggccatttaaactcttattgcctgtgtcttctagtttcgccgggatgcttctgttctaacgtgtgatgaatgtgacctattaagatccgcactttctata

SEQ ID NO: 5774 - DNA, 313 bp, Glycine max
  unsure (1)..(313): unsure at all n locations
acttatcagtgaattggagaattctcgggatgaagaagaaaaaagtanataggcaatggaaagcttagcttctgcattacatgaagtatctgcagaagctagagaagccaaagaatatctactaaacattcaagctgaacgtgaaagctatgatgcccagatcgaagacttatagttagtcttaaaagctactaatgaaaaatatgagtccatgcttaatgaggcacggcatgagattgatgttcttggatgtagtatggaaaattctaagagtgcctgtgagaactccaaggctgagtgggagcatagagag

SEQ ID NO: 5775 - DNA, 271 bp, Glycine max
  unsure (1)..(271): unsure at all n locations
tacctgaactcaggatgtgtctcatgcattttactcaacacctggttcacaccagtttgagaggaacttccaatgagctcttaanaaccgtggatactgcccaacaacatacctgccaacaaaaagatatattattaaaagaaacagaactaaacaagcaaaacacagcaagatggaatgtgtgaataatccttacatgatattactcgcaataaccagcttgttatcttnttcctttgtgatttcacatanggttaataaatcgcgaatg

SEQ ID NO: 5776 - DNA, 160 bp, Glycine max
tttcttcctacccgagactcattggtcgactcatatacctcaataacactcgtcccgacatcgcgtacgcaatacaacagcttatccaatacatgtctagtcccacggatgcccatctgcaagcagcctaccgcatattacaatacctcaagggcacacc

SEQ ID NO: 5777 - DNA, 316 bp, Glycine max
acacccgggggggtgccataatcacttgtgctactacaatcctaaccatgtgtgtttcgtgattgtcatactttgtattcgactcacctattgacaatccggacaaatcatgctctacagatcatatttctcattataatcacaacgagattacaattatagattagctaacatcatagtgaataagcacctttgcatgttatttggaaagtgttatccccctgcgtaattaaacaaatacctgctttaaaattatatcttttattctatctaaataaatttttatgtctctaaactatcaacaaatactgatagc

SEQ ID NO: 5778 - DNA, 509 bp, Glycine max
  unsure (1)..(509): unsure at all n locations
gagcaacatacccaggaggttgctccatataaatatcctcctcaagatcaccatggagaaagacattcttaatatcaagttgatggacggactagtgacagatagcagccataccaagaaacacacgaacagtgatgagtttggcgacaggagagaaagtgtcacagtaatcaatgccatatacctgtgtgtagcccttagccaccaagcgagccttaagccgctcaaccttaccattgggcccaactttaacagtgtatacccatctacaacccacagtggtcttaccaggaggaagaggaacaagctcccaagtaccaatatcttcaagagtctgcatnccatcaaccatagcctgtcttcaggcangatgatcaagtgcctcacggacagtggaaggaatttaatggacgccatgaaatacaacgaactatagaagagacaacatggtacttagagatataataggatgaggatacagagagcgatactttctgatgcatggcctg

SEQ ID NO: 5779 - DNA, 338 bp, Glycine max
  unsure (1)..(338): unsure at all n locations
agcttctagtgggacatcttgacttgctntccaatctgacattcaccacagattctgccttcttctattntcagatagagaatgcctctaacagcacctttgtcaatgattttcttcatgcctcttaagtgcagatgtccaaatctttgatgccatattctgacttcatcttctttggaggatagacatgtggaggagtagctggcttcttggggtgtccataggtaacaattgtgctttgatctgctgcccttcattagaacttcactcttctcatttgtcaccaagcattctgactgtgtgaagtttacattgaatccttcatcacacagctgact

SEQ ID NO: 5780 - DNA, 292 bp, Glycine max
  unsure (1)..(292): unsure at all n locations
tcttccagcatattttttggataatttaataaatttgacttccttaaaatgtatttattgttgggttaataacacatatatgtgtggaaaatttggaatagcagctatattattaataagtaatatatattgtacatattggattcttggtctatacacttaccatgttaagtaccctaaggttaaggtgtattgtggagagaaacaanggaaggcaacttangattntgatcccttagtgaaaggtgtnaccttatgtattattcgctgtacacatgacagcagggagcat

SEQ ID NO: 5781 - DNA, 449 bp, Glycine max
  unsure (1)..(449): unsure at all n locations
ntcttgttggtctctctatctagctgaagcaaactttctcatgttacttgtactgtatggatctcctagatccattggacccaagttcaataaggccagcccaattttgcattgcatatgagaatcctatacaatttactcttttctcatcatggcatcagaaagttcagtagtatttatatttttaataattctcatacaatacatcacgaaagcttgagttgaagcaaagcgggaaaaggcaccaaatccatgaaaatagaaatcaaattacatagcatataaaacaaaaataaaacacaaaaataaagaagaaaagtacataaatgaagcattaataacagcaccagatctgatacatacacaattgttttcatataaattcaacacaaaatgagactaaaacacaatacaatcacacagacaccttgtgaagaaacaacaaaaca

SEQ ID NO: 5782 - DNA, 458 bp, Glycine max
  unsure (1)..(458): unsure at all n locations
gcttgtgactctnggcaatatctttaaaactagtcacttttaaaaaaatcttcagaaacaagtcacttgaagaattgtgactttcggaaatgtatttttcgaaaccagtccctggtaatcgattaccattaaggtgtaatcgattacacatcagcaaatgggactcttcattttgaattttgaaaattaaaacgtttagaagctctggtaatcgattacaagtattgtgtaatcgattacactagtttaaaatgatttaaaactgttaaacacaagttgtaactcttgaaattngaaatcttaacgttttaaaacactggttatcgattactaccttctggtaatcgattaccagagagtaaaactctttggtaatgattttgtgaaaacttctcgtgctactaaatgttntggaaaactttcttagtacttatcttgattgagtcttctcttgattc

SEQ ID NO: 5783 - DNA, 337 bp, Glycine max
tggtatgcgcaggtcgtgctatggttataccactttgggaatggagactggaagatctttcccgagaccaccattgccaattggttagcgatgagagatggcatgagttccccatatgtcattgagatcacggcgaacatctgtgtctgccttggtgaaaagttccttgccgtgtttgtgccacagagagcattgttggtcgggtgacgccgagtcggagctggggtccagagaactccactctgtgggggtgtgggcgcccttggttgggtgagtgtcgtatccgaagagaccttggcacgagctcgaaaactcgggtgatgttgcgcatattggt

SEQ ID NO: 5784 - DNA, 450 bp, Glycine max
  unsure (1)..(450): unsure at all n locations
agcttgcccagagaaggaatctatggaggaaatgcttaccacctcgaaagactggaaagcggtttctaatgactcctctgcggcctccacataaggcatagaggatgggcagctcaccaagatgtcttcctcgcctaatacgatgaccagatgcccttccactacgaatttcaacttttggtggagtgtagagggaacaactcccactgagtggatccacggacaccccaacagacagctgtagggggggttaatgtccattattgggaaggtaacttggcatgtgtgagggcctatctgtactgggaggtcgatctctcccctaacctctctgcgggtgtcgtcgaaggcacgaaccaccattgaactcggctttaggtgggaggcattgaatggtaatttctccaaagtgctcttaagcatcacgtntaaactggaaccattatctat

SEQ ID NO: 5785 - DNA, 424 bp, Glycine max
ctactcacttcaagagtggtcactttcgcaaaaatcttcagaggcacgtcactcgaagaattatgacttttggtaatttatttttcgaaggcagtcactggtaatcaattaccattaatgtataatcgattacacatcaacagatgggactcttcattttaaattttgaaaattagaacatttagaagcactggtgatcgattacaagtattgtgtaatcgattacacaagtttaaaatgatttgaaaatgtttaaacacaagttgtaactcttgagatgtgaaatcttaatgttttaaaacactggtaatcgattactaccttctggtaatcgatcaccagagagtaaaactctatggtaatgattatgcgaaaacttcttgtgctactcaatgttgcgaaacaaaatgtagtacttatcttg

SEQ ID NO: 5786 - DNA, 432 bp, Glycine max
agcttggtagcaaattcgaacaacaataacttttcactcggaagtctgattgagtcgtgtaatatatcgtgacgctcgaattttaaaaccgaagctcgtagcaaattcgaacgacaataacatttcactcggaagtcctattgagtcccgtaatatatcgagacgctcgaattttaaaaccgaagctcgtagcaaattcgaacgacaataacatttcactcggaagtctgattgagtcccgtaatatatcgtgacgctcgaattttaaaaccgaagctcgtagcaaagtcgaacgacaataacatttcactcggaagtccgattgagtcccgtaatatatcgagacgctcgaatttttaaaccgaagctcgtagcaaattcgaacgacaataacaattcactcggaagtctgattgagtcccgtaatatatc

SEQ ID NO: 5787 - DNA, 448 bp, Glycine max
gacactataaatctcagcttggtttaaatttcgagcgtctcgatatattacgggactcaatctgacttccgagtgaaaagttattgtcgttagaattagctgcgagcttcggttttaaatttcgagcgtctcgatatattacgggactcaatcggacttccgagtgaaatgttattgtcgttcgaatttgctacgagcttcggttctaaatttcgagcgtctcgatatgttacgggactcaatcggacttacgagtgaaatgttattgtcgttagcatttgctgtgagcttcggttgtaaaatgcgagcgtctcgatatattacgggactcagtcagacttccgagtgaaatgttattgtcgatagcatttgctgcgagctacggttttaaattttgagcgtcttgatatattacaggactcaatcggactttcgagtgagatgttat

SEQ ID NO: 5788 - DNA, 449 bp, Glycine max
  unsure (1)..(449): unsure at all n locations
agcttctaaactntgtacaagaatgaagctctgataccacttgttagacaagtggcctcagatatcttaagaaggggggggttgaattaagatattccaaactgtttcccctaattgaaaatctatttttctttttacttaagttatgaattcccttaatgacaatcttcttaaatattaattcaaatgaagcaacttgaatatgaatataaagcaataataaataaaggagattaagggaagagaaaatgcaaactcagttttatactggttcggccacacccttgtgcctacgtccagtccccaagcaacccgcttgagagttccactaacttgtaaattccttttacaagttctaaacacacaaggacaacccttcctttgtgtttagatatctnttacaacaagagactcacagtctcttaatcccttagagaatgagaagaaga

SEQ ID NO: 5789 - DNA, 396 bp, Glycine max
tgtcgcctagctcgcccaggcgagcaaggttgcttcctccagaagcaacagacttctggaggaatcttctggagggcccaagtgggccttgttgctatttgcacccccctttttactaaatgcacccccttctatatttttttttgtaattctttttccataacgttacaaaactttacgaatttcgtaacaatacttattttccttccgcaagattacgaatccttacggattatgtatttactcttttttagctttcaaaggagttacggaaactcacggattgcgcaaaaacacctcttttcgatttccgccacattacggaatttcacggatcgcgcaagcctgcttcctttagatttctgagacgtctcgggacttcatttattgtgcaac

SEQ ID NO: 5790 - DNA, 415 bp, Glycine max
gcttgtttgaacagtgaaatgattgaatcatgtgtcagtggtttgttttatatgaaatgagtgtttgtgaatgacttgaatgagaaaatgtatgaacatgtgattagaagtatgactaaaaatgttagtcagtttgtcagattgatggtgaaggaatgcattgaccgtatctcggtgagagtgtgatccttaaattctgagagaaacgactatcatttagtactgatttttgcatgaatctctgatgtatggactgaatgcatgaattgaggatgatgaaggccatgtttgattgtgatagccacttagccaaaaagctaaccacgtgcttgaatgatttatccctcgcatccagtttgagttgaatgaaacattgattgattccttgagcctatatagtattatatcctactac

SEQ ID NO: 5791 - DNA, 449 bp, Glycine max
tataagaaccaaaatgccttaatcatttccaaatatgcatgtgaattaggacgcatcaacaagaatcaagccaaggctattgtgcaagcaatcaatggggcaaaacacaccaaatgattataatgatggatggctcaaattctcacaaaggtaaaatcatcactttcaaattgagctttcaaaactatcatgacatgtagagaagaatcaaggatttcaagtcacaaaatgtcaagaacttttattttcaaaacaattacccatttcttgaacatatcctataattcaaagaaaaacatgcaaagtcgtacgtgcacacgaaattgacccaaaatattaaactgaaaatccgacgaaactaacaatattaacaaattaacacaactaacaaattaacaaaacctacaaaactagcaaaaccaaagaacactccccccccatacttaaac

SEQ ID NO: 5792 - DNA, 354 bp, Glycine max
cactcatatttaaatcatgcttttattggacaagactaaatcaattatgatacgtcgatgtactccatacctttaaaacaagataaaactttgaatttcacaaaactatttgagatctttatacacatcattgaacctatgttgataatctctatacatgtcactaaacccaagaaaaaaaagagaagaacacaactttaaattccatgctcactccatctatcgtgcctccaagatggagatcccattataatagcgaaaattcttaaagtgaattttggtccattcattataaaatacaaacatttggttcctttcttttagaaaagttacaatttatatcaatcctcaatt

SEQ ID NO: 5793 - DNA, 445 bp, Glycine max
gtatgaaaggggatttggtcaaagagatgcaattgcagataacaagttatgagcttgagtgcgtttgagagtatggaagagaaacaacactatcattgtcttatcaaagctctgattcagtttgggtagggttaaacaatccaatactcctttgcatgttcatcctaaattcatacctctttaatccaatgctagttgcagaataaatcaacaaacttgttgaaacctagaatataaataatggctttctagtgtcaatctctgcaaaacatggcatgtcccttgtaataccttgaaaattaaaactcatattgtagaaagttatgtgttgtgtgaattatagaaatataattaacattgaaaattaatttcaatgaaagtttaagtcaagtagttaatttaaaattcaattatatgcatgctatctcatgtgaataatttagta

SEQ ID NO: 5794 - DNA, 414 bp, Glycine max
  unsure (1)..(414): unsure at all n locations
nnagcttatttttgctctagtctctgcagtgctgggaacatcatgatatggtttctgaaatctcttctcgcgtcgatcacaagagccccatccgtctgagaacctgccacctctgatgtaatgaaaatcacagaaacggcagtaactgtggtgagaatagagatcatttggaagatcgattaattcaaacaaccaaacgagacacgtactgcatgtatgcacgaatcacaaactcagcacgctgaacattacgattctcatcaaactcaatattcttgtccctgatttcataagaaatattgaagtaacaagatatctttctccaacctataaaaaagcatgccccgcctggttacatcagttgtatcattttcacagaagaagaagcaaactattgttacctgactttcttat

SEQ ID NO: 5795 - DNA, 439 bp, Glycine max
ccttgctctaaagataagttacagcctgtttattggtcacattatgatggatacgtgaatagggtttaatcatatcccatgttttggtgaacactagacactagataacatcattgagttatcatgtcctatatttgacgcggaccaaatatttataggataggatataaattatgttcaaatgaaaaaaataagatttcaataaaattacatataatttttaaaaatgcaacttttaatttaatttttacaaattataaaaagattacaatttaactaaattatacaaaattatttttaattatgtatgacgtaatttttaaagttatagaaaaaatttatataagatttttaaatttataattattgttcaaataagaaaaatatttgaataagaaatagttagtttttaatggaggttcattctctgtccaatggg

SEQ ID NO: 5796 - DNA, 377 bp, Glycine max
  unsure (1)..(377): unsure at all n locations
agctngtaaggtagccataaaggagcttgaatcccaccattcttgatgtggagaagaagtaggtgatgaagatactagttgcaggatcatttatcccatttcagatagcacttgggtttcacctgtccaagtggtccctaagaagtcgagcaccaccgttgtgaagaaccaggataatgagttgatcccgaatagagtggccaatagttgataagtttgaattgattataggagacttaactaggaaaattgtaaggaccacttccctctcccattcattgatcaggttctagagaggtttgtaataccctgagatattataagttataaatcaatgtttaattggatntattgtgttgcttgactatatgatagac

SEQ ID NO: 5797 - DNA, 389 bp, Glycine max
atcaagccgaggctattgtgcaatctatctatggggcaaaacacaccaaatgattataatgatggatggctcaaattctcacaaaggtaaaatcatcactttcaaattgagctttcaaaactatcatgacatgtagagaagaatcaaggatttcaagtcacaaaatgtcaagaacttttattttcaaaacaattacccatttcttgaacatatcctataattcaaagaaaaacatgcaaagtcgtacgtgcacactacattgacccaaaatattaaactgaaaatccgacgaaactaacaacattattaaattaacacaactaacaaattaacaaaaccaacaaaacaagcaaaaccaaagaacactcccccccatacttaaacaacac

SEQ ID NO: 5798 - DNA, 299 bp, Glycine max
tgatgatatggtcttcaccgacgaaatgatcaatgtgggtctaaaaaaaggcgaatttagtcatcctacttagacgaatgagaaaactggggcaaaagaagagggtgaggatgaaggagaagcccgtgctgtgactgccattccaatacagccaagtttcccaccaacccaacaatgtcattactcagccaataacaaaccttcttcttacccaccgcccagttatccacgaaggccatccctaaaatcaaccacaaagcctactctaccgcactttcaatgacaaacaccacctttag

SEQ ID NO: 5799 - DNA, 340 bp, Glycine max
gagaacacttacttggattgcagagaagattaagcacgaggaagcacagagaagcagagaatacaatggaagcacaatgcagatgagtgcaagaagtagtgagaaatgtgtatgtaattccacagaagaaaactacctaaggctgttaagccttatttttggcagtttcgactgcctcgcttagcgtgggtcactcgctaagtgagcactcaatgacttttgagttttcagaattcaaactcacgcgcttagtgggctgacttgctcaacccaattctaaaatatgacattccagagaagaaattgggcttagcgtgaagggtcgcgcttagcgagttct

SEQ ID NO: 5800 - DNA, 381 bp, Glycine max
  unsure (1)..(381): unsure at all n locations
tttgttntaagggtagcatttcttggtaaaactaactttccaaatgtttgcattcgcaggaaacggccccgaggaagcttgcctcaaagaggtccaggaaggacaaggcggccgaaggaactagttccgctcctgagtatgacagtcaccgctttaggagcgctgtacaccagcagcgcctcgaggccatcaagggatggtcgtttctccgggagcgacgcgtccagctcagggacgacgagtatactgatttccaggaggaaatagggcgccggcggtggacatcactggttactcccatggccaagttcgatccagaaatagtccttgagttttatgccaatgctnggccaacagaggagggcgtgcgtgacatgagat

SEQ ID NO: 5801 - DNA, 320 bp, Glycine max
tatacgatcaacttcgagcgtctcgatatcttacgagcctgtttcttacgacgcatcaacaagattctggcctttgctattgctcaaacgatcaacgtggcatacacacgtttgatattatcaggatgctcaacttccagaagtaacttatgactttgaattgagctttaccaactactttgacatgtaaacgaataatctatgataccgggctacatcatgcctacaacttttattttcaagacgattacacattcttagaacatatactatcattcatagagcgtcatgaatatgactgcgtgcacacaaaattgacc

SEQ ID NO: 5802 - DNA, 384 bp, Glycine max
  unsure (1)..(384): unsure at all n locations
agcttgtagaagcaaaaggccagctatggtcttcaaggtgtgatttgaaaaggcctatgactcagtctcatgggcttttttggattatatgctgtaaagaatgggtttttgtctcaaatggagacactggatttctgcctctctcaattcagcaaccatttcaattcttgtgaatggcagtcctacaaaggaatttgctcctactagctcctactagaggcttgaggcaaggggaccctttatatcccttactcttcaatatagttggagaaggcatcactggattgatgagggaagcaattcacaagaatttatatcgaagttacatggttggaaagaaaaaggaacccattaatattntgcagtatgcggatgacacagtat

SEQ ID NO: 5803 - DNA, 419 bp, Glycine max
  unsure (1)..(419): unsure at all n locations
gtgtcaccatatatttcaaattaaattaaaacttgcacattntatatattatttcacgttgaaagagctgttagaacttaataaattaatataactagtcagtagtcattgcatacaaaacttgttaatgctgtaggggtcagcaagccacatacatattagtgtttatgctgtgggagcatagtcataaaaaattaaacatcattatcattgtcaccttccacgcatgcaacaaggtttaagccagaatctccattcccgttacgattataatctcctccaatgcaaactttaggtgcataaacgtaccaatcatcaccattaatgtccgccatatgaattcttcttgcaccctaaatatttttccttggaaatggattctattttgcttctgggactagtaagaaaagtgaaatcta

SEQ ID NO: 5804 - DNA, 118 bp, Glycine max
atttcgagacacaaatgcaaaaatgatgattttgaaacttgtatgcaaaactggtcatgcatgcacctatgtggacactcacgcgtgctactattatggtcatgtgatgctaaggctc

SEQ ID NO: 5805 - DNA, 446 bp, Glycine max
ttaggagaaaccattaaaactaaagtagttcctaaacaaaattctattgagggagcttcgccaagtgtccccatcgaaattgaaaaacctttattcaaacctttcaaagttagtgagaaggctaaacgaaaaattagggaacttagaaaagctaaatccttaactgaaggcgtaggtgacaatcatagtgaattactaaacaagattggtagtttacttaaggtcattccagatactccccaagcctcggaaaatacttctaaaatggtaacaagaagtacctccaaattaattaatgttattaatgaagatagtgaccaaaactcagataacacaactgagataggatcactatcagaaaagaatataaatccaattaattccaaaaactggaaaacaccctccagattatattatcaacgtccaactgcccctgaccttctact

SEQ ID NO: 5806 - DNA, 418 bp, Glycine max
aacatcatttcacacacgtgttagagaacaaatcctggataattattgaataaatcatattaaaagaaaaatatttaatttatatgtgataaaaatatatcattatttttaacgaaacaattttgtattaatattatgattaagaaaaagttactttaatcacattattttgttttcacgtgatggcagtgatcttcaggacacacacatggtagcgtatctttccggacaaaatgcaatctttcttggttttatcaatttctcatttgcccatcagaaataaaatcagggtcccaattccatgccaaaacctagcacacatattaatgtttacaaattgtagcatttgtaaagttttgggagacatttatgtcgtgtaattggatttaagattcttctttttaattttcgagactat

SEQ ID NO: 5807 - DNA, 387 bp, Glycine max
gggaattctcatatgtagaagcaaagcttatggtgaatcaagaatgattcaaagatgttttgatgataacaaaagatgatgacaaaggtgatgactaaaagctcaaaggtcaatcaaagaatgagttcaaaatgttcaagatggaatcaagaacaattcaagactcaagaggaaaagttgaagaacacttcaagattcaagacaaaagttgaattcaagaatcaagattcaaggatcaagcttcaagaatcaagatcaagattcaagattcaagattcaagaatcaagagaagacttaatccagataagtatgaaaaggatttttcaaaaactgagtagcacatggattcttcacaaaacatgtttaccaaagaagttttactctct

SEQ ID NO: 5808 - DNA, 448 bp, Glycine max
  unsure (1)..(448): unsure at all n locations
gcttagccctgaagtaatgagcttgttcagtcgagttggttgcttagccatgaagctatttcatggcccagacgagctaaatgctaacctaggcgagttaaggtctggaaaaatccaaagaaaaagacccttttgcccccttccttggtatctttttgttttcttgatcaaaacactaagtgattccttgcttcgcacaataactggtgtcaaccaccataattcgactaataagaataaaaatatcagcgaacgatagtcctcggatgaaattagggtctgacacctcgacaactgtaaaaagaataaaaacatatatgttagtggtgttgggtatgttagagtanggtaaggtctgaaaacccctttcttgaccatcttcccataaaggaacatggttcctcaccaactcaatgagtggtgctacaagtatagaaaaatatgggac

SEQ ID NO: 5809 - DNA, 434 bp, Glycine max
  unsure (1)..(434): unsure at all n locations
atgatacatgtcggggttggggttgtctcaacgataaaagggatgccccacattatttccatgacacanatgcaaaaatgatgatttggaaattgtatgcgaaactgggcatgcatgcacctatgcggacactcaagtgtcagatttttatggtcatctgatgctatggctcaagattcatttcctctattataaatcaacccaatgtttccaaaatatgggcttttatgaatgtgtgcattcatccgagtccatttcacgcgtccggggaaattacacagcattcacccttcaggtgtagacacattttttgcaaaaattggttatgatcaatgaatcctttttcaaagaacagttggaagtcatctcttatcaaaagcatgtcggctcttcagctagacaacttatctttcttattccatcttatgttctta

SEQ ID NO: 5810 - DNA, 491 bp, Glycine max
  unsure (1)..(491): unsure at all n locations
tgtttgatttcgatgcgtncagtgcccgtgatactctgagtcacctgcaggctgcaagcttctatataagctgaaccattttatctattaacaccngttgatgttcattcagaaaactagagtttatctcttctatcctagtgagagtgattctcctaaattcttgagtgattcaagaacaccttggctggatcaaatgactgtcacaacctttgtgtgttgccctcgctggagaaagtgattagttccttcctttcatcatcacccttgttctttctaccgacattccagaaacttcacctccgcccagaattatgtacgtggcctcactcccattttaccccctagaataatattctgagccccaattgatttcgagccacactttcacgacgtattgaatcacctctcttgagcccgtgcttaggtgtggctctctatatgttgccagcccccttaactacgattactctccatcatccttattgccn

SEQ ID NO: 5811 - DNA, 444 bp, Glycine max
ctgcttcaccggatgacgccgatcgaacatttcctaaccgacgttatgcaaatttcgttcagggattgaattgaaaactcgttaggcgacatctgtcgtgaagtagcgaccgatatttttcagccgacattgcacaattctttttagaaaagctcgctggtcgataatggtctttttacggcagagtaagttttcttgttttggtgttgcataaaaaagttacaatgtacttcggctaggtttttcgtgcgagttcaaccgacattttgtttcggccaggaaaacattagcccacctctgcaaaaaaaatatttgctaaccgtcttcatgcatatttcattcaacgattgaatagaaaactcaatagccgacaacggtcgtgaaatagtcccgactgatatttctcagccggcattgcgcattttttattataaaaacgctcgc

SEQ ID NO: 5812 - DNA, 385 bp, Glycine max
  unsure (1)..(385): unsure at all n locations
agctggagaggatgcttccatggaggaaattattgagggagagaaagagagaggggggagcacgaaattgaaggaagaaaaagggagagaagttgaactttaagttgtgtctcacaagactctcattgatcaaaattacaacaagtgttacacatgcttctatttatagactaggtagcttccttgagaagctttcttgagaaaacttccttgagaagcttctttgagaaaacttccttgagaagctagagcttagctacacacacccctctcataactaagctcacctccttgagaagcttccttaagaagattcctaaagaagctagagcttagctacacatacctctctaatagctaagctcacctncttgagatgagaagc

SEQ ID NO: 5813 - DNA, 430 bp, Glycine max
  unsure (1)..(430): unsure at all n locations
ctcatcttggtggtgaagctccttcttctttgctcatcttttcctccattaagcatcctctagcttgctttttttgtgcttttcattgctttaattgttgaataatccttggaaatttgtcttgttaaaactctattggtttagttttcatttcatttttttttgtctttggttattgcttgtctctttgtttccttgcttgtgagttgccatatagggaattggaaaggagtattggtgccatatcttgaagaatttgagtaaagaagcaaggggccaaccaccttaagagctattggactaagaagcactccaaattgagtgaaacactaaagagagaatagtcaccacaattgaggacttttttttttgtaattntgtaattgacaatatgttttgctctcaaattttgtaacaaaaaggcctttca

SEQ ID NO: 5814 - DNA, 359 bp, Glycine max
  unsure (1)..(359): unsure at all n locations
agcttggtgaagaagtttccaaatagaacggtgagaanaagttaaaggttgaagctcgacatcatctgagggggagtaacaaagtctgaagagatccatttagggggagctcttatggctatttcttccctgaacattttattcaatacttaaaacacatcttcttgatgtgaaaatgtttatatgaataaaatgatatgttttctggtacctgttcaaactttaccttaaagtcttacgatgctntacgatttgtttatcatatatatcatttgcatctaataaggctaacttatgttctaaatgatatatcttataagtttacctttatcttntaacatatatctgcttgacatcat

SEQ ID NO: 5815 - DNA, 437 bp, Glycine max
tttgattacgacatacaatataaagctggcttctctttattggcgcaaactctctcttgcgcattgatcacaccggacaagcccagtgccttctcctctctggtccccaccacgagttcctcactcaactaaaacaagcccttttcgctagtcctgatgttcaaacaccgaagaaagctattcacgctcacccagaggatcacccccacttgaccatcgccaatgagctcattttcttcaagaatgccatctggattgactctcgcaatccattcattcctgcattattacatgagtaccacgcaacccctctcggaggtcactttggtgtctagaagaccctccaccatcttcgttctaatttccagtggaccaccatgattgctgaccgtaagtcctccatccgcgaatgtcgtgtctgccaacaagtcaagcac

SEQ ID NO: 5816 - DNA, 381 bp, Glycine max
  unsure (1)..(381): unsure at all n locations
gcttatctcagcaagggtgccactcttatattctatctacaaatttggtgtatgaaaattataagaaaattagtaaacaagacaattaagctnttaagacaatcaagaagaagagtatgtagaggcgtagagtagttcaactcactttttggttctcagaatgatgacacacccagtaactgaagtcttgatttgctaataggattaacagacagaaacatatcgatgtatgtggcaaatctgcctactcttcagattaagcaacaataaaagatatataaaactacatgtcagtaaaagactgtcgaattaatcaacaataaaagtataatcaatgaaggtgaaagctgacccttcttctcttgataacaatgtcccatc

SEQ ID NO: 5817 - DNA, 468 bp, Glycine max
  unsure (1)..(468): unsure at all n locations
aaataagacatcgtattacgngcacatagaatctcagcttgtagcttctattgtggaactcagctcatggtgaagctcttctttattagggaatgtgctcaaacacatggggctatttacgaaggtcttgctgctagattccgcggaattacgggattgatgagaaggccccaagcccatatagcattttgaaatcatggggcatgccacattgtccccctccttttgctattgtaccctagtcgcgctcccaactcgtgatccgtggaatgcctccatggaattagagcgtgattcttgatggaaacccccatggagcctttgcttagccacattttttgacaagcatttctgttccaagagctaactgattcttcccaaaaacctcgcctaagaacctaatcttcttgaaacaaaccacaacgggtggcattgcgaaaacaccctgtttgcaacaacacaattggg

SEQ ID NO: 5818 - DNA, 347 bp, Glycine max
  unsure (1)..(347): unsure at all n locations
agcttgtgataacagtatcttgtaggatgtactaattttcatgctcgggcctctacattaccacaaacttcccctttccctatgatatgcataactccaccttcaacccaacaagaaaaaccttttgaatccatggcacccacaaagactagattnttcttaagctctggagcatgatgagcattggttaaggctntagcaatcccatcacatatcttgatttatatggaacctataccgactgacttgtagagaaccttattacccattagaacattaccaccagacttctcctatgttacaaaccagcttttgtgtggacacatatgataagaacaatttaagta

SEQ ID NO: 5819 - DNA, 443 bp, Glycine max
  unsure (1)..(443): unsure at all n locations
gnaagctccttccacagcacacagctcttaagatttgtttgtatcctcgcggaaccttcacctgacgaagacactgacaaaaacttatcttctccttcttggacaaagtatggcaggctgggggcaagtaaattttcttcccatcacaccttggatgcaactgtgatcttatacccatatcagctagatcttgacgggtattcaagccatccttcgtcttgccttgaatgttaaggagcatcccaatcacactgtcacaaacatttttctccacatgcataacatcaatacaatgtctaacgtcaagatcacaccagtacggaagatcaaagaaaatggacctcttcttccatatgcaactctgactattatccttcttttgggtcttcccaaatacagtgttcaggtgttgaacccgctgatatacctgctcaccagtcaat

SEQ ID NO: 5820 - DNA, 406 bp, Glycine max
  unsure (1)..(406): unsure at all n locations
agcttgctgtcgtcacgggcccgagtcttcttgtctattgggttgacatcatgacccatttaaactttttttttccggtgaagacccatatcaaggttttttaaaaatatattttatgaattaatttaaaattaatggccccgtgacttttaagttattaacacaacactttaaccaactgaactaataagataattgtgttataaaataattaatgtcgttatatataacactaaaatttataatgtatatttaatacacatgcaaatntacataataaaatttaatgcaccaaaattaaatgtcacanaaattattatgtaaatntacatgtgcattatatatacattagaaataaaaaaaaataatttgtaaacatttttaannttttttttaaaatgaatcc

SEQ ID NO: 5821 - DNA, 530 bp, Glycine max
  unsure (1)..(530): unsure at all n locations
ccctccccttcgncccatcngntatcntaatggccaccctcccncccccaagtcagggcttgatgactcatgaaanacnccnnnnanaaactaagctncgcttgaaacgatgcaatataggagcgctttatctatttgacaagaagattgggcccaggacagatcggaagagcacgaccaaacatgccataacacgtcaaaccacaaggcccaatgtggcggataacagaaaaggcaccatctaacgaaggcacatacaaaaggcaaacaacaatgcagagcctcaagggattaacagtccatgcagatactattacttcctgcttgatcggccatgcgcacaacctcgaaaagatgaattaccatatgaccgataaacaactcgacaccgactcctgccgctttggagagaagggtgatactgggcatacacatcacctacacctataagaccacggcgggaccctcgggaatgccgcagttaatctcctgcatcacaaacgggacgctggacaacgagaaaacaaacn

SEQ ID NO: 5822 - DNA, 320 bp, Glycine max
  unsure (1)..(320): unsure at all n locations
ctgcagcttagaattcatntctagcgtctcaatatattactggagtcaatcagacatccgagccagacgttattgtccgttggattagctcaaaagctcagaattcaatttcgatcgtctcgatatattacgggtctcaatcagacatctgaggaaaaaagttattgtcgtttgaatttgctgagagcctcaacattcaattttgagcggttcgatggtttacgggactttatcagacatccgagtcaaaagttatctgtcgttgaatttgcttgaagctcaactttcaatttcgagcgcctcgatagtttacgggactc

SEQ ID NO: 5823 - DNA, 320 bp, Glycine max
  unsure (1)..(320): unsure at all n locations
gtcagcagattcaaacgancaataaattttactcggatgtcttatatatgtcccgaatacatcgagacgctcgaaattgaatgttgaagctctcagcaaattcaaacgacaataactttttactctgatgtctgattgagtcccgtaatatatcgagacgctcgaaattgaatgttgaagctctcagctaattcaaacgacaataactttttactcggatgtctgattaagtcccgtaatacatcgagacgctcgaaattgaatgttgaagctctcagcaaattcaaacgacaataactttttactccgatgtctgaatg

SEQ ID NO: 5824 - DNA, 425 bp, Glycine max
  unsure (1)..(425): unsure at all n locations
agcttgtagaattcaccccaattccagtgtcctatgctgacttgctcccatatctacttgataattcaatggtagccataaccctagccaaggttcatcaacctccatttctccgagaatacgactcaaacgccatgtgggcttggcacggagaagcctcggggcgttccattgagcattgtagggctctgaaacgtaaggtgcaaagtctaattgatgccggctggctgaaatttgaggagaattgcgtgtaaatcctgacattgacaagagatgccacacatggggcaattttgaaagctgttgttaggtgtccctaatgactcatcanggtttccaagtttatgccattattggtaaccacagctacaatgttaaatgaaatggataaagttgatatctttgtccctcatcctctcacaaac

SEQ ID NO: 5825 - DNA, 453 bp, Glycine max
  unsure (1)..(453): unsure at all n locations
tctatggaggttggatctttgagcttcaataaggtcctttatgtgtgantttcaaccatggagttgcagcanaagataaaggactagagctaagaagaggcgccatccactagagaatacgccatggaaggagaagcttcaccaccaagagagtgtcttggataagaagcttagagaggaagcttcaatggaggaagagaatgagagagagggggggcataggaattggaggagattagcctagcacatggaaagcttccttgagaagcaaggaaggtaacttccttgggaagctagaggaagaaagcttccttgagaagctagaggaggggctatgcacacccctccaatagctaagctcacccccatgccaagatacatganaatgcacaaaagtccctactataaagactactcanaatgccctaaaatacaaggctaaaaccctatact

SEQ ID NO: 5826 - DNA, 431 bp, Glycine max
  unsure (1)..(431): unsure at all n locations
agctttgagccaattcaaacgacaataactntttactcggatgtctgattgaggcccgtaatatatcgagacgctcgaaattgaatgttgaagctctgagacaattcaaacgacaataactatttactcggatgtctgattgagtcccgtcatatatcgagacgctcgaaattgaatgttgaagctctgaggaaattcaaacgacaataactttgtaccgagatgtctgattgagtctcgtcacatatcgagacgctcgagaatgaatgttgaagctctgagctaattcaaacgacaataactttctactcggatgtgtgattgagtcctgtcatatatcgagacgctcgaaattgaatgttgaagctctgagccaattcaaacgacaataactctttactcggatgtctgattgaggcccgtaatatatc

SEQ ID NO: 5827 - DNA, 433 bp, Glycine max
taaacattcaacttcgagcgtctcgatatattacgagtctcatatcatacatccgagaaaaaagttattgtcatttgaatttgctcagaggttcaacattcaatttcgagcgtctcgttatattacaggactcaatcagacattcgagtaaaaagttattgtcgtttgaattagctcagagcttccacattcaatttcgagcgtctcgatatattacgggcctcaatcagacatccgagtaaaacgttattgtcgtttggattggctcagagattcaacattcaatttcgagcgtctcgatatatgacgggactcaatcaaacatccgtgtaaaaagttattgtcgtttgaattggctcagagcttcaacattcaatttcgagcgtctcgatatattacaggactctatcagacatccgagtaaaaagttatt

SEQ ID NO: 5828 - DNA, 372 bp, Glycine max
  unsure (1)..(372): unsure at all n locations
agcttgcatttcttcgctttcctcagggacttcagctttcttcccacttaggccttttagctttgggagacaatntatttcttgcgtcctagacttcaaccacttttgataaccaccgatgatgccattgctacttcccctaagcttattatctttcctttccattgtattccatgcttaatggattctctgaagtatcttcgcattggcttcactgaaacctcacgcaacgaaaggcgtgatgatctcctctaacggtgcacctttcatagggtagcctagttgtcttatggccagcatgggaatataattaatataacccctcgttcccatcaaggggacgtttgggaatccttcacacgagcataacac

SEQ ID NO: 5829 - DNA, 469 bp, Glycine max
gacactataaaactcagcttaatggagcttgcatcatttactcagccccctcacgcctatttatagcaaaaaagggcacttggtggacttgcaactcgcccaggtgagttgttgcttcactctaaagtaacttggctcgcccaagtgagctggttacttcaaccctaagccatttgggggcccaggccagccagaggctagccaaggcgagccaaggtccaaaaaattgcttggaatgacccttttacccctccctttgggtattttctgcatccttaaccaaaacgtcgaacgatctttcgtcttgcatggtaaccgatgtcgaacggcttaattcggctagcgagaatcaaaatatccacgaatgatagtccctggacgaaattagggtctgacagtagcaaaggatatatacaagcatgatcgaaacaaagaataaaagaaatgagatcaaagcaaaatcttgaaa

SEQ ID NO: 5830 - DNA, 368 bp, Glycine max
attttcaatttcgagcgtctcaatatgttatgtccccgaatcaaacatcagggtgagaagttatgaccatttcaatttttctagagctatcgctgttcaaattcgagcgtctagatatggtatgcacttaaatcggacatccgagtgaaaagttatgaccatttgaatttctcaagagcttctgttgttgaatttcgagcatctcgatatattatgtccccgaatcggacatgcgagagacaagttgtgacaatttgaatttctatagagctttcgttgtgcaatttcaagtgtctcgatatattatgcgcctgaatctgacatccgagtgaagagttatgaccattggaatgtctcgagagctttcg

SEQ ID NO: 5831 - DNA, 339 bp, Glycine max
ctcttaaagaaaaagagtccaagttgtgtcttgagtattgatacaagtgctagggaaagagatactcttctcaagaactttcaggatttggcaaagaaactgaaagatctttaaaaggatttgaagaagctgaatgaacttcatgattataaaaaagaagaaagatatgatctatagagtgtagaagcaagcttcatgatgagtcaagattgattcaaagagttttgatgataacaaagatgatgacaaaaagctcaaaagtcaagaacacttcatgataacaaagatgatgatctcaagaatcaaagaatgagtttaagattgaatcaagtacacttc

SEQ ID NO: 5832 - DNA, 246 bp, Glycine max
catgacaattgggtggtatgcatgaacctatgctgagagaatcaatctatctttctccgaaaatacgacttatacgcaatgtgggcttgctgcagacaatctctctggcgtaccagtgaacgatgtatggctctgcaccgtaaggtgcaaggtgtaagtgacgcatactggattgaatgagaggacaatccctcgctggtcctgacatcgacatgagaggccacacatggggcaattttctaagct

SEQ ID NO: 5833 - DNA, 141 bp, Glycine max
tctcattccagcctgcatggagatattcaacaacaacatgggcaatgcttccaaccacatagacacagcgaaacgcgaagatgctgcttacttaactgaacatgacctgttgcagataccatatagagcccgctccatgga

SEQ ID NO: 5834 - DNA, 291 bp, Glycine max
caattctaacaaaaactcattggatttggtcgggaacatgaggtcatttcctagcatagatatgtcaagtatgctggctggattgataacctgatacatgaaaacgatgtgtataattatctaatacactttagattcaataatgaagattcttcattgataagttttcaaaataacttgttttaccatgtctggactgaatctaatccactttttcatgtattccataatatttaaaggctaatctacgtgacgttgatcttacctagagatataacatacttctaattg

SEQ ID NO: 5835 - DNA, 325 bp, Glycine max
  unsure (1)..(325): unsure at all n locations
agcttaaacattcaacttcgagcgtctcgatatattacgagtctcaatcagacatccgagtaaanagttatggtcgtttgaattggctcacagcttcaacattcaatttcgagcgtctcgatatatttcgggactcaatcagacatccgagtaaaaagttgttgtcgtttgaattcactcagaggttcaacattcaatnttgagcgtctcgatatatgacgggactcaatcagacatccgagtaaaaagttattgccgtttgaatttgctcagaggttctacattcaatttcgagcgtctcgttatattaaaggactcaatcata

SEQ ID NO: 5836 - DNA, 443 bp, Glycine max
  unsure (1)..(443): unsure at all n locations
gctctataagcgcgggttcgggagacaaaggcgaggcgttctcgatattcgaagatgatattccgagtactttggatttggtacgaccatgccctcctgatttccagctgggaaattggcgagtggaggaacgccccggcatttacgcaacaagcataatgtaaacctttacggttttaaaaagctctatagttgggcctatgctttagagttttcattttgttaaggctttgtgtcttttgtttttgaatttataatacaaggatctttcttcatctgttcctggtctctacccattctcattcatttgcatgtttacttctttttctggaacggcagatccgatgacgagtcccccgaaggtactaatacctgagacccgtctatcgacttcgagcaagagatgaatcaaacggaagatgaagganatgacggtgtgggac

SEQ ID NO: 5837 - DNA, 501 bp, Glycine max
  unsure (1)..(501): unsure at all n locations
ccccccccccaccgacttggagaaccccgcctntatcnnnnnnnnaagggaatgaccgagacgccnnnannaaccccggnnnggagagancaggggcgggtattaacaccccccgcaagagaggcgacaaacaacgggcaggaggccgccaccgacacgacagggaaaaccccgggagggcgcaaagcaaacggcgtgcgagacatacccccaacaccaactgagaggaaaacgaagagggcacagacgatcgcgcaagacaacagacgcgcaacccgaaaggcgaaaggcgcccgacggcggagaagccgccaaaacaacagagacggacgccacaccacagatggagcccgccaaaacaaagcagcgcggaaccacagaattaagccaaccccgagacccggcaacaaccggtgacccgaaaccgcgggagccgaataagagcaaaggccgaaagcaaaacaaaaaaggaatcccgagcagcctagcggaccaaagccg

SEQ ID NO: 5838 - DNA, 304 bp, Glycine max
  unsure (1)..(304): unsure at all n locations
agcttataaaaaaatattatcgtttgagacctttttatatgtatcaaactttattntattaaatatttattattgttcatttataaataatattattctaagaatattctcataaatcacaatatgttgcttgacatgctaatatacgtagtgcacaaccttgaagtgagttgtaacttatgtatcaacctaactcaaatattaaatataaaatgattaggtgggggtaaaattaacagatgtatcaaaagacaactcaacctaactgaactattttttattttaatatgcatgagttgacgtg

SEQ ID NO: 5839 - DNA, 352 bp, Glycine max
  unsure (1)..(352): unsure at all n locations
agcttatccgacctnccattaacaggtcttttattgagaagaactgcatgccaaggtaggcacaacaatcggggcaagaccaacagtagcagccggccacaaatgcaccaccgccacctctatagcagccacaatctctagagtccatctcaattcacatgcagaggatggagctctacatgcagcatttggttgaccaacaggcagccaaccataggggccaggtgcagttgaacgacaacttctactggtatatattgcaccagcagcgccaggaccccaacccttacccgtggcctactctcgagcagttcaaagccaccattgcatggcttggggataggcctaattt

SEQ ID NO: 5840 - DNA, 361 bp, Glycine max
  unsure (1)..(361): unsure at all n locations
agcttgtgggtggaggacgcatgaacganactactatttggngctcctaaaaagggttgaggatggatgaatgcactaagcaatcactacgcacggctccaagctccagggtggaggacgcatgaacgaaaaagcaattcatggggctccgaaaaagggttgaggatggagaattgcactaagcaatcactacaaacggctccaaactcgtgggtgaaggacgcatgaacgaaaacgccattcatggggctccgaaaaagggttgaggatggagaatngcactaagcaatcactacgcatggctccaagctcctgtgtggaggacgcatgaacgaaaatgcaattcatggggctcccaaaa

SEQ ID NO: 5841 - DNA, 451 bp, Glycine max
  unsure (1)..(451): unsure at all n locations
gtttcagcaccatatcctgcgaggacacatttgtgaagtttgtttacttganatcacaataaaggccaatccaactaaaatggtgcacactatcttctatcaaatgcaaatgtcaacatgtgattagaaaatactcgtgcattgatgcatgggtcattttatgatatatatatatatatatatatatatatatatatatatatatatatatatatatatatatatacatacatgcatatacatatattttgtggagaaaggcattttaacacacatacacacgtgtatatatgtacattttgtgacacgcatttacgcgctacatatacacacattatacacattgagagacgcatttttttttgtgtttgctgctccttatcaacacacatatatgtatcgcagtgcgattctttcgctacctacacaatatatatatatgtctagagan

SEQ ID NO: 5842 - DNA, 330 bp, Glycine max
acatttttaccagaatattggacttccacaattaatctcactattacatatggttttaaagtttattatcaccaaggtgcaagtagtcatcttttattggaagccttaaataaaaacattacccataattttaaatacaacaaattatttaaggaacaatagcatcaataggatctcaaccatggtgaaactaatggttttcaagaaaaagtatatctcaatgcacgtcttatgcccactaaataggtactacttaagagttgtgtagaatggcatcgcatttctttctgtggtttatatggatgatagactgaccaatattatttacac

SEQ ID NO: 5843 - DNA, 447 bp, Glycine max
  unsure (1)..(447): unsure at all n locations
ngcttctacaatttgtccttactctataggacatgctaagttccttccactacccttgacatcaaatttttgaaaggtgactntggatattccaaactcatgcttcttaatgccaagaaaaatggtggtgtttcatcaggtgagcaccacactntccttctgatgtggttttgtaggtacttcatctatattggctcagtgggattggtcagtgaacattgaaactttatgtcggctattacatctgatcatgacttggctttggatcccctacttctctccacactntataggggcattttctatcttcttaacaaccttgaaggtgatcgaacttagtacaatattctttctagttcaatttggttnttgaatccttgggcacgactatattttccatatgccatttatcctggagctagtttgttaaaaaccaaacaagaggac

SEQ ID NO: 5844 - DNA, 374 bp, Glycine max
  unsure (1)..(374): unsure at all n locations
agcttcttatgtcaaacccaataatgctctttgactgagagtaggcatgaaacttttggactagacagatcaccaagtttaatcttatacagatttccttgtctcttagcctagaagagtgaagagttttccttgttctcaatgatacacatatacttgttaaaagtgacattgtatccactatcacatatattacttatgctaagcaaactatgcttcaaccctttaacaagcaaaacattatctatagaaggataaggaggaatacatactttacctacaccaattatcagacctttctgattccgttcgaaagtgaccaccctactagacatagggcttagggatggaaacatacactnttcacttatcat

SEQ ID NO: 5845 - DNA, 449 bp, Glycine max
  unsure (1)..(449): unsure at all n locations
ctttgtgtganaggatgtgactcttcacttttgaatttgaattttatctgttaaaggcactgataatcgattaccaaaacactgtaatcgattacaactttttgaaaataattggaacgttgtaaattcaatttgaaaactttatcaaaataattttgctactggtaatcgattacaacaatttggtaatcggttactagagagtaaaaactctttggtaaagggttttgtcaaaaaatcatgtgctattcaaagttttgaaaaactttttaatacttatcttgattgagtcttctcttcattcttgaatcttgatcttgattcttgagattttgaaccttgaatcttgattctagattttcttcttgagtcttgaattnttcttgattcacttgagttgttctttgattgatctttgagctttttgtcatcacctttgtcatcatctt

SEQ ID NO: 5846 - DNA, 303 bp, Glycine max
  unsure (1)..(303): unsure at all n locations
agctnggttcgaggtacttacccgttgaagatctaagatcgatgaagaacgaatgaagaacgtcgaagaacagttgaaaccttggcgagattcctcacggaaaacgttacggaaacgtttcggaagcgcctcggcttagattttcttcacggaaacaatttttccaagcaaatttgaaagagagagaagtgcctaaagggctgggatccttttcttcttcattttctcccctatttatagcaaaataggggagatgcttgccgcccagctcgcccaggcgagctcagctcgcccaggcgagca

SEQ ID NO: 5847 - DNA, 451 bp, Glycine max
  unsure (1)..(451): unsure at all n locations
tccttganaagattcctaaagaagctagagcttagctacacacactcactctaatagctaagctcacctccttgagatgagaagctagaacttagctacacccccctataatagctaagctcacccccataacaaaatacatgaaaatacaaaaaaagtccctactacaaagactactcaaaatgtctcgaaatacaaggctaaaaccctatactactagaatggccaaaatacaaggcctaaatgaaggaaaaaaacctattctaatatttacaaagatatgcgggctcatacttagcccatgggctcaaaatctaccctaaggctcatgagaaccctagggccttcccttggatctctggcccgatctacttggagtcttctatccaatgcccttgtggggtaggattgcatcaggagtagaaaatatagagcatacaagaaaaactta

SEQ ID NO: 5848 - DNA, 398 bp, Glycine max
  unsure (1)..(398): unsure at all n locations
gcttctcaaggaagctacctagtctataaatagaagcatgtgtaacactcgttgtaactttgatgaatgagagtcttgtgagacacaactcaaagttcaacttctctccctttttttccttcaatttcgagctcccccctctctctttctctccttctttcttttcctccattgaagcaccctttccaagcttcttatccaaggctcatcttggtggtgaagctccttcttccatggcttattccctagtggatggcgcctcctctcacctcttctcctttgtcttccgctgcatctccatggtggaaaatcaccattaaaggacctcattgaagctcatagatccatcctccatagaaactccacaagcaagcttncatcaagtggtatcagagcac

SEQ ID NO: 5849 - DNA, 219 bp, Glycine max
ttctcatgttgctccccttatctctaataaaaccttcttgctcaattaaattaataatatgtgtgttaactcattggcaagtgcaccaaattatcacaagtagtaaagtaaaatgaaagtctgagtgtcgagtccacggggactttgtttgtacttaaattggtgtatttctaattttcaagcaattaaattgaattaaagatttgagagatgaaaaaa

SEQ ID NO: 5850 - DNA, 410 bp, Glycine max
ggatacttaagtcacctgcggcatgcaagcttcaggttgttcaattgcttcatattgttgcacagaagggcaaaggtctctgtggtggttggcagaggagcataaaccacagagtctagcgacaggtgcagattttttattcatggccagttgggttaccaagttaaccaaggcatctagtttacctttaagcttcttagtctcaactgatgaagatgaattcgtggctacttcatgcactcctctaatgacaatagcatcatttctggcactaaattgctgggagttggaagccatcttctcaattaaatttctggcttcaacaggggtcatgtctccaagggctccaccactggcagcatctatcatacttctctccatgttactgagtccttcataaaaatattgga

SEQ ID NO: 5851 - DNA, 437 bp, Glycine max
  unsure (1)..(437): unsure at all n locations
ttgctaagtgagcataacaacattngaagcctncaggtatatggctcacttaagcggngctaaaaggctcacttaagtgaggtcaatgaattttggacctcaaaattttggctcacttaagcgaggtcagttgagtggacttcgtgggtctttattcctcctctgttccattgagtgagcttcctactagttctccaaaggcacccttcaacaaaatccttcaaaactaaccaaaatgcaaatatcaagaagaaaaagtaacaaaactaaatttctaacttgaaaatgatttttcaaaattcaactaaatgaagtacgaacatatagcccaaatgtataatcagaaatactacaaaaatgcaagtataggtagcaattatcaaacttccttttggaaaaacagtttggataaattcttgaccaacttcgtttatata

SEQ ID NO: 5852 - DNA, 447 bp, Glycine max
atgcactgtggagtacccatatgatgcaggactacgtgtttttacttacgacggtgcacaacaggttgataacgtactcatagcgcgcataaaccatgcatccacagtggggaaccacaaactgaggtcacgtaccttcacgtaacccatatcctcgtttgtgtgatcaccgagtccctagcatatctaccatacaagcaaggcctcctctacaatgctatctaagccacacatactataccagacatgcatattatagaacacgccaataattatgtgccacacatagaccacattcacactctttactacttaatgacacggtagacccacctacgagccaagtctataaccgatggatcgactactgatttgctctggatgacaatactatatatagccactttgtcaacgtatgtagcatctatcaggcttacatatgtgaga

SEQ ID NO: 5853 - DNA, 195 bp, Glycine max
  unsure (1)..(195): unsure at all n locations
cgngcggaccagctacctcatcctatcgttgactgcctaccttaggatgtctgccttatgtgagctcattattctttatgaagacgttcatacaaggcgcttattgtctctctttcctgctttacaccattacgcctccccctccacccatgagttctttcgtattcattagtcattctgccacaagctccatcc

SEQ ID NO: 5854 - DNA, 76 bp, Glycine max
gaatgaattgttgtggattcacttgagttgttctttgattgatctttgagctttttgtcatcacctttgtcatcat

SEQ ID NO: 5855 - DNA, 308 bp, Glycine max
  unsure (1)..(308): unsure at all n locations
agctnggagcgctatccgcagactctacagatttcagttggggaagaaatcagaccatgtgcatgaatcttacacccagtgggttattgataggaccaagagctttggcctaccctaccacttacctagatacctatcgtccaccatcccaccatcatccttgcctatcccctttgacactaaggaagagtttcatgaacaattaaccaaagaaaggcaagaaaaagaaacttggaagaggagatgccaggagctcgagcgagagaatgaaactttgaaggggaagatagcccaacagagccgtgagc

SEQ ID NO: 5856 - DNA, 399 bp, Glycine max
  unsure (1)..(399): unsure at all n locations
agcttgccacccagctcgcccaggcgagcagggttgcttcctccagaagcaacagccttctggaggaatcttctggagggcccaagtgggccaagtttctatttgcacccccatttttactaaatacaccccctgccttttttggtgattctttttttcgtaaagttacggaaacttacgaattttgtaacgatacttgttttctttccgtaatgttacggaaccttgcggatcacataatcatcccctttttgacttacggaatgttacggaacctcactaattgtgcaacgatgcttccatttgatttctggtgtgtcacggaaccttacggattgtgcatcaatattttctttngatttccggcatgtcccagaacttcacaaattgcctaatgat

SEQ ID NO: 5857 - DNA, 379 bp, Glycine max
  unsure (1)..(379): unsure at all n locations
aacacaatggaatgtaccgagacagagacctaaagcgggtgacttattcggagcagacgtgagacacgcattttctgcggaggcagacgaggaaataagaaaaataccctaacccttgaaataaaaaactaaccctgaccataaaagatcagaatnaaaccctacccattaaaataataaaactaaccctaacccctaaaatgttcataactaaagcctaacacttataataaaaaaactaaccctacccctaaaaataagcactaaaccctaacacttaaaataacaacctaaccctaacccctagaatataagaactgagccctaacccataaaatataaaaactaaaccctaacgcttaaaacaaaaataactaac

SEQ ID NO: 5858 - DNA, 129 bp, Glycine max
tactctatatcatatcctatgcgcatcatgcatcatcgcgtgtgagtgaaaaaaaaattctgacgttgaaaaatgtcctcataaggccaaactctatgttttaatcgattacaaccttatcataatcga

SEQ ID NO: 5859 - DNA, 323 bp, Glycine max
  unsure (1)..(323): unsure at all n locations
atgactcttcttattnngaattgaatttcaacgttcaaaggcactggtaatcgattaccaaaacattgtaatcgattatagctttctgaaattaattggaacgttgtaaattcaacttgaaaactttttaaatccattttgctactggtaatcgattacaacaatctggtaatcaattaccaaagagtaaaaactctttggtaaacatgttttgagaaaaatccatgagctgactcaattttgagaaaaaccttttcatacttatcttgattaagccttttcttgattcttgaatcttgagtcttgaatcttgatcttgattc

SEQ ID NO: 5860 - DNA, 108 bp, Glycine max
caccgaatttagagcacaagctgcagattaacgactcgctcactagatccgctaaggtgtcagccatctcacaacacaggataatagctcccttcgatatttggcgct

SEQ ID NO: 5861 - DNA, 433 bp, Glycine max
gcattctactaatatatggaattgcccactggtttgcctgagaataacaattgcttgaccacaacaacgctggaggcggcaacggacaatggtctttcaaataaaccttgtgtacatgaacaaacattatatcatgcgctgaccgtgccaaacgaaccagcgaagtcattgcataattggtacactaactatattcaatgtacctaaacaaaatgatttccaaacacgtgaccgacacatatgatgcggtggccagaagagtcaggtggtggttgacttctaagagggaaaaatgtcatgctatgttgttgggacaacgatacaaggattacgttataccgtgaagcaatcacatatcccatgtctggtatatccatccacttgtccacactaacctgaatgaaccaaacatacacatgtaagtaatttaaac

SEQ ID NO: 5862 - DNA, 444 bp, Glycine max
  unsure (1)..(444): unsure at all n locations
tgtgccacctacatagcataggttnttcatggttgatcaacctatgctgtggttgctaatttgagaatctctcccatacccaaatatgaaccaagtagtaaaagtgtgaccaaagagttacctcttatcatcagccaaagtaactattgttttcttcaacaaacctaaatcattttatatgttggcttaaaatattggtcgtgtaacatcccaatttttgtaatctagattaaaaaggattgttatttataaataaatagagttttagaaaaatgatgagattttataaataaataaataaataaggagatataattattaattaaaataatgatttgagagaaaataaaacgggtattttatttatttgtttgatagaaaataaaatagagnttgtttttataaaataaataaatatagagcaaataataggctgaataccct

SEQ ID NO: 5863 - DNA, 429 bp, Glycine max
  unsure (1)..(429): unsure at all n locations
agctntcaagaatcaagatcaagattcaagactcatgattcaagaatcaagagaagacttaatcaagataagtatgaaaaggttttttcaaaaactgagtagcacatggatttttctcaaaacatgtttaccaaaaagttttgactcattggtaattgattactagattgttgtaatcgattaccagtagcaaaatgaatttgaaaaagttttcaaatgaatttacaatgtttcaattgatttcaaaaagttgtaatcgattgcaatgttntggtaatcgattatcagtgtctttgaacgttgaaattcaaattcaaatgtgaagagtcacatcctttcacataaaagcgttgtgtaatcgattacactgatttggtaatcgaataccagtgattggttctgaataaatcaaaagatgtaactcttcaa

SEQ ID NO: 5864 - DNA, 425 bp, Glycine max
  unsure (1)..(425): unsure at all n locations
tgagatgaggaagtgttgaagggtgaaacttcctgctnttattctttgaccacagagtggtacctggagatatgtcgcgggggtcaggagaccttggggacgtcaggtggggtgctattgcccaaaaccaagcttgaccaatcccgacccaacccgggcatagtcagtcagtgagaacctgtgatgtacctaaataagcgagctcctggcagtcaacagataaaaggaacaaagaccacaaagcaaggaggcttgtggtggctggccagctgtgaattntgtgtgatatatgggttgtggcctctggtaatcgattaccaagggtgggtaatcgattacaaggcttaaaaatgaagacaggaggctaagatggtctctggtaatcgattaccaaaggggtgtaatcgattaccaggtttgaaaac

SEQ ID NO: 5865 - DNA, 441 bp, Glycine max
  unsure (1)..(441): unsure at all n locations
agcttcattagagaatcgcaaattcacctcatgatggttgactagcatttagcaccattatcaatttcaaacaagatgaccaaccattatgaacaatgcaatatgtgaatacactcagacatgaagcaatatcatcaaggtcaactagcacattttcaaacacgaagcagaggtggttcttagagagcacattctcaagcactaacttggggaggaagtcgcgagggaacaagtcatgacaccaaatatgacttcaagttgtgaggtatcgagaagatgaaacgatgatggcctcacagcaaaacgcaggggagcaccttcgcgagtgatggtggtgagtcagggtcgtgagggagagaactgtcncgagactgcatggtgagagtgagagtgaaagcgggactgaatcgtcacgaacaaagagcgtgagagtcaaagtga

SEQ ID NO: 5866 - DNA, 399 bp, Glycine max
agaagctagagcttagctacacacacttcttctcataactaagctcacctccttgagaagcttccttaagaagattcctacagaagctagagcttagctacacatacctctctaatagctaagctcacctgcttgagaggagaagctagagcttaactacacaccccctataatagctaagctcacccccatgacaaaaaacatgagaataacaaaaaaagtccttattacaaagacaactcaaaatgccccgaattacaaggctaagaccctatactactaaaatggccaaaatagaaggcctagacgaaggagaaacctagtctaatatttacaaagatgagcgggctcatacttagcccatgggctcgaaatctaccctaggctcatgagaaccct

SEQ ID NO: 5867 - DNA, 403 bp, Glycine max
ctgcaagcttgaaatcttcatttagcatagtcacagtaagtataaacagcaaatacccccccccccccaaattaaaaggaaaaaaacaacaggaatatttgggtgatagttgatcaaaatgtcaaagccaatacctttagatactgcttgatcttgtctacctcaaggaaagaaaaatctatcttaactacaacagcaagaacattcttgtaggcattgacaaatagtgtggtgcagcagcaagtgttaggtatgagaaagccaatgaaagtgaactaacaatcgagacaccaacaatacaatcagttaaatagtaagaatataaataaattgaaaagtatgcaaatatcactttaccttgtacttagcaacctcctcactaacctccttcagttcacctttg

SEQ ID NO: 5868 - DNA, 323 bp, Glycine max
taccacaattcgcacccttctatctgtggctgctattaacgactgtcacttagaacaactagacgtccacgatgctttgcttcatggtgatctgcacgatgaagaatatctggatctgcctcctgcgttcatactgcctgcttcatcttctaatcaagcctgcacattacctaagtacttatacggactagctcatgctaccagacagcggttctcccagctatccaactgctattatctccctaggatacataccttcatctgatgaccgatctatgctcacacaactacataaatctcatttcactgctcttataatctat

SEQ ID NO: 5869 - DNA, 405 bp, Glycine max
  unsure (1)..(405): unsure at all n locations
agcttcanaatccaagttgcaaagggttgccatctggttctggcggtgaggtcaatcaataaaccacatccatcgaccagcctgttggtggatggaaggtcttcaactccagagaaggagtcgcaaaaacacttgagcgtcaccctggacctggaggatccattaacattaacactgagtgaagccacgtatggaatatctgcgaatgcgaaagcaaaacatatcaacatcaacccatgtatcatagagaagaaaatagcaataattaagtttgaagtattggaacaaagacattgagtgcataattgaaatttttagggtaccttgaatgagcgacatggaatcgacaaanaactggcggtaagcatctcgtgctccggagcgaagcaaggagagaagagaacc

SEQ ID NO: 5870 - DNA, 440 bp, Glycine max
  unsure (1)..(440): unsure at all n locations
ntgcataagtatgaaataagctactttagttagcttttcagtattcaccttttttaagagtttttttaaactacgtgtccgatctagcttttaactttaaggagaaaacaaaactataaaaaaatgggacaaacgttattatactaattatatcttgaagaaaattgtctgtgaaaaagaatatatataagaaagaaaaaaaataaatttaaagaaaaaatttgaacaacatctatagatcaatacacatttagaaaaagaagataaaaacattaatatatatatatatatatatatacatatattattttattttaaaatacaaatctaaatttaaagtattactaaaataaagttaaattcactatatatttttacaaacttgtaataatttttgggtacacttacagacatgtaatataactattggtatcttatat

SEQ ID NO: 5871 - DNA, 429 bp, Glycine max
  unsure (1)..(429): unsure at all n locations
agcttagcaacagtctcaaaacccaattntattctaaaccaagtgtcatgatttctatattaccatttttgctagatgttaatgttgaatcatagttttactctctcatctgcccttcgtctcatctctttaccttacaactcagtcaattctatcattaccctttttcaatatgcagaattagcaacatgcaaacatatctaatccagcaaatgctaccatcaatggccaagctatggtccagaaccaacaaaatgcctcatgtcccatttctttcatcttctaaatttattgtagcttctgcagaattaaaagaagcatttggttcttcatttcaacatgaatctactggttagtttataattcactcaattctgcctttagtcattttcaacattcagaactatcaacatgcaaagagatctaatt

SEQ ID NO: 5872 - DNA, 420 bp, Glycine max
taaagatggaatacttacttgttggtgataaataaaagctcttaacggaatcgaaaaatgcgaaaagtagagatcctacggctgcaaactcgtaaattccgtgggtatggctattgaatggggggaaaagaagtttttgaatgcaaaaacgtccccctttcgtcattttttatattttgtgcaggggttgctcgcccaggcgagctaacctgcactttttttttttttttttaggttaacgttcgcctactcaaacttacttaagttagaattaggcatcgttttacttatttaaaacaaaaaatagtaataatcattgtgaattcaaaggatactgggctgccttgcagcgacgttctctgcttgtccagcaccggaaagaaatgacgatcggtcagtcatgaccctatcctccatttg

SEQ ID NO: 5873 - DNA, 371 bp, Glycine max
cacaacaagtattgcacatgcacgaagcgcgcataaaccgaccatccgctgggggccacctcccactgagctcacgtactcccacgtagcccatatcctcgtttctctcaacaccggagccgcatcaatcctaccaagcttacacaacatccaagcaaaacatcattcgaacagcgcacgctatcacaggcaggctgaacagagcagacgcataagactctgctgagcacatcaaccagaagcacagctttactcacttaaagacgcacagtaacaattccttcgtgccaattcgtgaacacgtggagcgactacagactcttagtggaagtctctagtagataagcctacattttgaccgttgggatcta

SEQ ID NO: 5874 - DNA, 401 bp, Glycine max
gcttcctctctaagtagcttcttattcaatatactctcttggtggggaagcttcttcttccatggatgattccctagggatggcgcctcctctcaccttttatcctttatcttttgctgcaaatctatgattgaaaataaccattgaaggacctcattgaagctcaaagattcagcctccacagaagtttctcaagcaagcttccatcaaataatccttaatctttggattaaaaaagactaactgcaagtggtactatcaacgcattgatcaaacattggttataagtcttgtcaaagaaagggtgtctttggacactccattgctcatatggaatacttatatgatgatttcttcgatcaaatactgatcgtcttgaacattcattatgacatggaaat

SEQ ID NO: 5875 - DNA, 363 bp, Glycine max
  unsure (1)..(363): unsure at all n locations
agctngaaaagaggaagtgtagaaaggtgaaacttcttgcttttattcgttgaccacagagtggtacttggagatatgtcgcgggggtcaggagaccttggggatgtcaggtggggtgctattacccaaaaccaagcttgaccaatcccgacccaacccgggcatagtcagtcagtgagaacctgcgatgtacctaagcaagcgagctcctggcagtcaacagataaaaagaactaataccacaaagcatggaggcttgtgtggtggctggccagctgtgaatcttgtgtgatatatgggttatggcctctggtaatcgattaccaagggtgggtaatcgattacaagggctaataatgaaga

SEQ ID NO: 5876 - DNA, 424 bp, Glycine max
  unsure (1)..(424): unsure at all n locations
agcttcatgatgattcaaagaagttttgatgatgacaaaggtgatgacaaaaagctcaaagatcaagaacaattcatgataacaaagatgatgatctcaagaatcaaagaatgagttcaagattgaatcaagaacacttcaaggttcaagaggaaatttgatttcaagaatcaagtttcaagattcaagcttccaagaatcaagatcaagattcaagaatcaagagaagacttaatcaagataagtatgaaaaagttttttcaaaaactgagtagcacatggatttttcttaaaacctttttaccaaagagtttttactctctggtaatcgattactagattattgtaatcgattaccagtagcaaaatggttgtgaaaaagtnttctactgaatttacaacgttccaattgatttcaaaatgt

SEQ ID NO: 5877 - DNA, 392 bp, Glycine max
  unsure (1)..(392): unsure at all n locations
gaagaagatgctccaagtacttgggatatggtccgaccatgccctcctgagttccagctgggaaattggcgagtggaggaacgccccggcatttacgcaacaagcataatgtaaacctttacggttttaaaagctctatagttgggcctaggctttagagttttcattttgttaaggctttgtgtcttttgtttttgcgtttataatacaaggatctttgttcatctgttcctggtctctacccattctcattcatttgcatgtttacttctttttctgaaacggcagattcgatgacgtctcccccgaaggtactaatacctgngacccgtctatcaacttcgagcaagaaatgaaccaaacggaagatgaaggagatgatgatgtgggac

SEQ ID NO: 5878 - DNA, 387 bp, Glycine max
caagcaaggtatcctaactacatgcaagagataagaatgaaaattacaaaagggaaagaaaagttgtgttgcctcccagtaagcgctcttttaacgtcactagcttgatgcatcatcctgttatccaggatccaatagagttcctacttcaaggaccttcttctcatgtctcctttcctccatcacatgcactttaaaacagacattttggcttggtggatctttgtcctcatggaacaaatcaaagctgatcttctatgcctatctacagtatcttctttcccatgtccaccatgcagcttgcagtagacatgaatgggcggccaagaatgagaggaatgtcaacatcctcttctatgtctatgacaacaaaatcagctggaaata

SEQ ID NO: 5879 - DNA, 344 bp, Glycine max
  unsure (1)..(344): unsure at all n locations
agctttcaagaatcaagatcaagattcaagactcaagattcaagaatcaagagaagacttaatcaagataagtatgaaaagggtttttcaaaaactgagtagcacatggatttttctcaaaacatgnttaccaaagagttttgactcattggtaattgattactagattggtgtaatcgattaccagtagcaaaatgaatttgaaaaagttttcaaatgaatntacaatgtttcaattgatttcaaaaaagtgtaatcgattgcaatggtttggtaatcgattatcagtgtctttgaacgttgaaattcaaattcaaatgtgaagagtcacatcctttcacata

SEQ ID NO: 5880 - DNA, 130 bp, Glycine max
gcccaaaaccaaggcggaccaatcccgacccaacccgggcacaaacagtcagagagaacccgggatgcacccaaataggcgagctcccggcagtccacagataaaaggaacaaagaccacaaagcaagga

SEQ ID NO: 5881 - DNA, 394 bp, Glycine max
  unsure (1)..(394): unsure at all n locations
aactatgaacttcagttgagtgctcttgattgaggtgaagcatatcgtccatcttctgaattataaatgactcaaaaagacttcattgatgtgcaggctcttgtggagcttcaactttagcatcttcttccatttggtcaaaagttctagctaccggctctccagccattatccattcatgatcaataaacctcattctaagcttcttgagatgcctttcggtaatcccactaaacactntggtaaattccacaactcattaaagacatgaacatttaagtagtcaatgaatcttaaggcaagcacaacataaggaaattcataatccaccaggcagcaattctttaacataatgtcttcaatcaatagtacccagttcatcttgatacctaat

SEQ ID NO: 5882 - DNA, 454 bp, Glycine max
ctttcagataacctaacctggatattgaatcagagcctgtatactcaccattcttgtcaaacattgcaatcttttggacaggtccaaaggcagagaaaacctgccacagaaaacagagtaaagaaggtatatattatcagctaaagtgtaccattagtcagtaatgtcagaaataagcaactgccactgtgacttaaagtaccatgtgtaagacatccaaggttacagtatactgcatgttctcaatagatgcaagaagaacattactctcggcctccagtctcttcccatccaaacccaccatgggctgcaaaaattaaaaataataagttaagaacacattcctcattgaggaagtcagcatgaatggcaaccccttggtagtaggcacacctcactgatgtgtatgaggtgaatatcaagttacaataagcaattcggagggttccatttg

SEQ ID NO: 5883 - DNA, 482 bp, Glycine max
atcctcttagtcacctgcggcatgcaagcttctttgagaaaacttccttgagaagctagagcttagctacacacacccctctcataactaagctcacctccttgagaagcttccttaagaagattcctaaagaagctagagcttagctacacatacctctctaatagctaagctcacctccttgagatgagaagctagaacttagctacacacccctaataatagctaagctcacccccatgacaaaaaacatgaaaatacaaaaaaaaagtccttacaacaaagactactcaaaatgccccgaaatacaaggctaaaaccctatactactagaatggccaaaatacaaggcccaaccgaaggaaaaacctattctaatatttacaaagataagcgggctcatacttagcccatgggctcaaaatctaccctaaggctcatgagaaccctagggccttcccttgatctctagcccaatctac

SEQ ID NO: 5884 - DNA, 455 bp, Glycine max
ctaagcttagacaacttgttgcaatcgattatgacaactctgtaatcaatttaaacaaagagtttttgcctctgaagaaatttttctaacttagaaaattttcttcactcacactatgatgatgcacaatgcaacacaaatatcaaatgtactaagatgtaacaatcaagttaacaaccaatacaaatgccactcaaaggagttgagcatgtaaaagccaaaacttcttctaaaacttcttcaaacttttccttgagcttcaagctttagccttaggttgttccatgttgatgctcccttatctctaacacaaactactacacacttggatgcacaactttcttattaaaatcctttattaatatttattggacgctctttgaaaactatttttgaacttattaattgaaaataaattccatattttgtcttacacactatttaacccccattct

SEQ ID NO: 5885 - DNA, 446 bp, Glycine max
  unsure (1)..(446): unsure at all n locations
agcttcgatatcttgacttgagcttcaatagattccttggagaaggtatggcaattccttctttccttgggacaatgacttccttgactcacctcgacctctcttttactggattccaggggaagattcctcctcagattgggaatctctcaaatttggtgtatcttgacctgagatatgttgccaacggaacagtaccctctcagatcgggaatctctctaagcttcgatatcttgacttgagctacaatgattttgaaggtatggcaattccttctttcctttgagcaatgacctccttgactcatctcgacctctctcttactgaattctatgggaagactcctcctcagattgggaatctctccaattnggtctaccttgacctcggaggtattctggtttcaaccttctctgttgctgaaatgaaaatgggtataagtatg

SEQ ID NO: 5886 - DNA, 417 bp, Glycine max
gatgtaatctccatcttgactgtctcttatcaagttggagtggtatcacagcattgaactaagttgatcgttccaatgggatgatggttttgattgctgcatataaagtgtgtgattgtgagtttctggtcccatgagttaaactataaggattaaaaaaaatattgtcgtaactttaagggccaaaaggataattaaaccttttattttttttattattctttttaacaacgggttatatatatgtagcactttattctaaacaatggactacgtgtgaaatctttgaattctatgtaagaaatgttattgcaaacttctcatcagtcttcatgtcaatgatgacatgctccatttgaattctatgtctaattaagctctcggtcttccgtttttgcaactctatttcgtagaaag

SEQ ID NO: 5887 - DNA, 178 bp, Glycine max
agcttgacaacgatatacggtttacgtcgcttggcatcaatggtcatgacttatgcccacgagacccgaggtatgcactgcatgcatccccactccttttggtgtacctctgaagctgtatagaaacaccgatggtcctgactttatccatggtactccgattcgagagcttattatt

SEQ ID NO: 5888 - DNA, 474 bp, Glycine max
  unsure (1)..(474): unsure at all n locations
ntttgtcacgctattancngacctatgaatctcagcttccagcttatcccactagtgaccatgtatcatggagctgattgttcttactgcgccctagcaaggcagataatggacttcctggatgggagctccgccgtgcattgacttcatatcgtcaaaaggcccgacatggatatacattggtcgaaaatgagtggtttgtgctaagttaagatttagggtcttaggactcggaggcgtgaatcctctgatcattagccgctcgataatgggagatgcaaattcacactgttctgtgtccctagcnagacgttcagcacactctatagcctacttacagaggcgttgttttaacctacactaacgtggtgaatagcttaagcgagcccgtccttagcacagtgggagatctcacgtaatcgactatacgtcccgacggtgggtgatacgcggatttatccttgcttgactgag

SEQ ID NO: 5889 - DNA, 454 bp, Glycine max
  unsure (1)..(454): unsure at all n locations
agcttaaagtatgcccgagtcattcatccgtatgagatgttgttgaagtattggcgatcagaattgacattccttggattatagggttgaaccaaactcatgcttttacaaaaaggttcatcaagtcaagttgaaatatggaagtaaccgtcctgcaaaattggggcaaaagatgaattgagtcacatcactgcttcgtctactgccaaacatatttaggattgttgatgtccttgttacttccagtttcaccttgacaaagatgtcatggatcatgttgaaaatctaaattgattcaaccccatatcctgcgtaaaaattcgcaatacttcaactatacatcattcgcatacatccatgctnttcattggttgcattgctcattgcattctttccttgaaaaataaaataaaataaaatgaacttaatcattgttataaaaaagaaaaggaca

SEQ ID NO: 5890 - DNA, 323 bp, Glycine max
  unsure (1)..(323): unsure at all n locations
ntctagctgttcattggtgtattntgatctccttctggtgctctaaattgtgggaatgtgctcaaatatatggggcaattttgatttgttttcttgcttgattacgttgaattacgggtttgtatgagatggccctatgcctataatgcattttgaagtaatggggcatgccacattgtccccgttctcttgctattgacgcctaaacgcgcgcccaccaagtgttcggtgaaatgcctcaatggcattagcgcgtgatttttgtatggaaacaacccatggggcaatttggtttgcacatatttttgggacatgcattcatg

SEQ ID NO: 5891 - DNA, 368 bp, Glycine max
  unsure (1)..(368): unsure at all n locations
agcttgccttgccccttgatatattttatggtttcatggccactatgaatgacaaattccttgggataaatgtagtgttgccatgttttcaaagcccgtactaaggcatacaactccttatcataagttgaatagctaaaggtaggaccacttaacttttcactaaaataagcaattggatggccttcttgcatcaacacagccccaatcccaacattagaagcatcacactcaanttcaaaagatttttgaaagtttggcaacgcaagtatgggggcattagttagctcttgcttaagaacattgaaagcttcttcttgtttctctccccatatgaaaccaacattnttcttgagcacttcattgag

SEQ ID NO: 5892 - DNA, 358 bp, Glycine max
actcagctctatgcgaaacgatgtgactcttcacatatgaatttgtatttatcgttgaaaagcactggtaatcgattaccaagacattgggctcgaatatcgctttatgaaaatcattggaacgatggcatatcaatttgaatactgtgtcacaacaattttgctactggtaatcgatcacaaccctctgtgaattaattacccgagagtaagacactcttatggtacacatgtcttgagaaaaatcatgtgtgactcaatatctgagaaaaactgtctatacttatcttgattaagccttctcttgatccttgagtcttgaatcttgatcttgaatatcgcgaccctgaaccttgaa

SEQ ID NO: 5893 - DNA, 333 bp, Glycine max
attcaaataggggtgtttatgggaaagttaattacatatccatgatgtgagatccaatttcaaattttaattggaaagtaaagtaagcaaatctttccaactgaaaataacataaacatgtatcttgcaatttatattcttaatttgaaactcaaagcagcagaccaaaaatgcagaacataatggcagggaaattaaactcaaaacctcaaacattgacataattaacaaaaaaaaaaagaacttaaagagagctgttatagttacctcagtccaaggttaatgatggttagttgccaactattcttccttgctagaggtgctactttgatc

SEQ ID NO: 5894 - DNA, 447 bp, Glycine max
  unsure (1)..(447): unsure at all n locations
ntagcagaaacctcggtgcaagggagatagtaaccagctttttatctcagaagggaagctaagcttcatgttcatgaaaataaatcagatatttgaatggcagagctcaggaacttccttctcagaatctaagcaaagccaatcttatgcaccacagggcccagaggaaaattatatacagtagccatccatctgatgagggggaaagattatcaatgctgttcagtcttcagaaatacatgactaggaaattacacaactgcagatgctgttctgcgaagatcgggtactccattcccatattttgcactaaatgttgaacttctcaagctgccatgtcttacaggtcttggccgatatagacacaaaagcatttgctccagcttctgcactgtgtactttgcatattttgtagagctagcatcttgctcaaccaaaggaccataa

SEQ ID NO: 5895 - DNA, 353 bp, Glycine max
  unsure (1)..(353): unsure at all n locations
ttttatactctaactgngttcaaatataagcaacaaaagcccttttatttttggtctaaaatataaacaaatctctattaattntgccttatttaatactatcttcaaaatatccttcatttagtaaggtcaaagacttttatatacttgatatcaagttccaataaaagagtaattagaagaacaaactctatttttaattgaaactcgcatactttaatgagataattatttttcttaataaatgtgaagtatgttttttttgcttataatcaaaactagatgagtattaaagattgataagtctttaacaaattacaatatatntgtaattcgaattattaaacttatgt

SEQ ID NO: 5896 - DNA, 379 bp, Glycine max
  unsure (1)..(379): unsure at all n locations
agcttatccctctcttgatgagtggtttattgttgtgaaaaccttttgaatcgnatatatgcattggatgagtgtgcttctcttgatgcgtaggcgcatgactacttaactcccttcttttgtgtgtagtcatgaatgtagttgttgaagtttttgcttccttaatacatccttattgactatttaattcttacttcttatatgtgcgctatatacttgttataagaaccttataattctatgtatgcttgtagaatagggtttcgccttaattgcatagatattatggttgtttgtgatctccttgttcgtagcgatgctaatgccatatagtttgatgacttgtatcaagaatatatttataaggaatactcctttg

SEQ ID NO: 5897 - DNA, 367 bp, Glycine max
gatcttcttggaatcattacacatataggtacgctggatgcctatactttatacttgataatatataatatataatattatggccctaaaaacgatcatgggcttatagctataagaagaggttatgggcacaatgtacatatagaccaggacctagcaagtatgataagagagccatatactcaattgagcccatatacagtacaaatgtgaacaagtgcaaatttccaatgcacaatatatgtgtcgaaagtagtacgaatctaatcattcatgcgaggtgagaaaggtaatcattatcattacgggaagtgtaaagtctccaactaatcacatcagcagattaatatttaatttagtatataat

SEQ ID NO: 5898 - DNA, 372 bp, Glycine max
  unsure (1)..(372): unsure at all n locations
agcttcccttctgtcgcaacctacactacgaatgacgtgcgagcgaaaagcaaaagatgcatcttctaaatagaaaacgcatgggattctccaccaacgtttatttaagtaaaacatttgaaaaaccaagaagaggcatgccaattttgaaaataaaggtttgggagttgtttatgcatacgaaaggtattatcacctcatacgctcgtcacatgggacgatgacctttaatcgagtttgcacaacatgacttcaaaattatttattntccttcttgatattaattatttttttggggtcacaagggggctgcccttngtcctacgtatcctcaggtgcgatgaggaattcaaactcatgtagttctttatg

SEQ ID NO: 5899 - DNA, 397 bp, Glycine max
gtctactatcggcgctatcatgaatttcttcgtcattgagagaaacactagggctgccaagtccctccacctttgggcgtactctttgaaagatatgtgcccacttcttgcacatattctgtagtcgcatcctatccgaagccattatactaacactggctaacgaaggcaaccattaggtccttccaagaatgggctcgggaaggttccaagttagtgtaccaactacccgagtaagactttcttggaaggaatgtatcagcaattcctcatcttttgcatatgccaccatcttctgacaatacatctatagatggttcttgtggcaactagtccccttgtacttgtcgaagtccagcaccttgaacttgggaggggtgatgatattgggtactac

SEQ ID NO: 5900 - DNA, 259 bp, Glycine max
  unsure (1)..(259): unsure at all n locations
agctngatcacaaatgataacatggtcactgtctgccatgtntacaatcaactccatagcttcatcaagtttcttcagtntgatctttctaccattggaggcatcgagaagtggcttagaatggggtcacacgccatcaatgaatgtgttatctgaattgactcactaaacttatgggtaggagtcttccagagcaaaccatggaagcgttcaagagcttcactcaatgattcatcagggaattgatggaataacgaga

SEQ ID NO: 5901 - DNA, 514 bp, Glycine max
  unsure (1)..(514): unsure at all n locations
ccgccccccccccaccgcntgccagacgcctcgcgcccccccccncccccacccgagggtatgaacatgaaaacccaaaacagccacagacgacagaacaaaccaggcggtttttatacaagaaagacctcacagggagcacagcgagagagaaccacccaaagcccagagcgattaacgaacaccctggctgataagaggagacgcacaaccgcagagcgatgaccacaccggaaagacagaatacaaagctccctgcaactccacgccctggacataccagccaaaaggccagaaaagacaccaacacccaaagccagcggcggggcaaacacaccgtatgacacggtcagcagcagagctgactgagcccaagctgacagtcaaaacaagaccctccagcgagatccggacaacccacactaggaagccgggaaccggacacaaaggcatctaaatagatccgtgcaagctgcactaaagccacagaaaacccttcccaatcgcccattca

SEQ ID NO: 5902 - DNA, 365 bp, Glycine max
  unsure (1)..(365): unsure at all n locations
agcttatgtaagatggagccagtagttgttaggacatttattcatcatcttaactgatcatcgtagctggaaggaaatcatgagccaggtcattcaaacaccgaaaaagcatatctacctttcacgcctcgtggggtatgactacacgattcagtatcgctcaagtaaatgcaacataattgtggatgccactgtctcatgtnttttgaggattcacagggaacattctttattctctcggtacctcactttacttttttggaacagattaagcatgacttatcaattcaccctgaattcaatgctcttcgataggatatgttgtctaatcctatgcgcagatcagattatactatcaccacgta

SEQ ID NO: 5903 - DNA, 443 bp, Glycine max
agctgagcaatcgcctaaagtggccatagtagctaccttttctctcttatggacattgttctctccccgaaatgcatatcgtagacgtcttcatgtagttcttagagcacatagttagcctagtattggccaagaaatttgagtagaggggaggagaaccctctactatatagtttgtcggccactaagatgtacctaacaacttgtgttcttagcttttttggttttctctctgtttgttgggagtgtttcatgcttcaagtatttgactatttctctcttccaccttaaagagtttccttctttgatctagaaacatttgttacctgagatactaggtacaagaaccgagtgaataatgaaggttttcagttgcccaggtttatgtgaaagtgtcagttgagccaactcatcagcttggtcattgatctgtcggcttatta

SEQ ID NO: 5904 - DNA, 441 bp, Glycine max
  unsure (1)..(441): unsure at all n locations
agcttctaccaggtctagtggtagtctttactacctctttatttgnggaacccgaatccacaagtttttcacccaacaagggacttgttgtttgtagtggacttattttgtttgacagaagtagtagaggtaacaaattgagagttggaagcttcgtacattttagctaaggtaaaggcctttctcacagaatttggttgaaacattctgacaagcatctggatctccttctttaacccacctaaaaaatagctcagaatatggtcatacgataattgcaatcgtgaaatgatgtaatcgaaagcctcgtgatactcctccactgacgtcatattttcatcaaatccgccatagggtcatcaaaaacttcactaaatctttctattagcaactgggtaatcactaacaggaaaggaatgaatagatntcatgaatgcagta

SEQ ID NO: 5905 - DNA, 434 bp, Glycine max
  unsure (1)..(434): unsure at all n locations
tctcatatccatgctcttattcaattacacattttatgagatgcaatcatatgttcttttatggtatttccccctaacttctgcaaccacatatatgatggcagcagaaagaaaggataaaagctggtaatgcagctaacctaatttccaaacgaataaaacctgtgaagaagcaaccatactccaacttcagctatggtctgagtttcagttattccaccaacggtttggctcattattataatatgaaaattaatagagacaaaatataaaatataagggacaaaacagtgacaaaaacaccaaatgatattcatagttttattacttatagacactcatttggtacttcatatgtgtaataaaagaaataatgttgattntccttaattattttaacattaagagtaagttttaatgaaagagtaatatta

SEQ ID NO: 5906 - DNA, 394 bp, Glycine max
  unsure (1)..(394): unsure at all n locations
agctnttacaaaaaggttcatcaagtcaagttgaaatatggaagtaaccatcctgcaaaattggggcaaaagatgaatcgagtcacatcactgcttcgtctactgccaaacatatttaagattattgatgtccttgttacttccagtttcaccttgacaaagatgtcatggaccatgttgaaaatctataatgattcaaccccatatcctgcgtaaaaattcgcaatacttcgactgtacatcattcgcatgcatccatgcttttcattggttgcattgctcattgcattctttccttgaaaaataaaataaaataaaatgaacttatcaaaaagaaaaggaaacgctntacggcgtccttaccgaactcgtgctagagctagagtaatgggtg

SEQ ID NO: 5907 - DNA, 427 bp, Glycine max
  unsure (1)..(427): unsure at all n locations
ttatcaataaacacaagttgagttttatttagaaaattagagtttttctcttttatcttagtgagagtgattctcctaaattcttgagtgattcaagaacaccctggctgtatcaaaggactttcacaacctttgtgtgttgccctcgctggaaagagtgagtctttccttcctttcatcttcacccttgttctttcaaaccacaattccagaaaatccacctctacccagaattatctcgtggccgtaactcccattttacgcactcaaattaagtgattcttgagcctaaattgactttcaaaacgagacctttcacctcgttttggaatcacctcatttggagccctgtagcttcagttattgccatttctatatttctgtccagccaccacttaacctacattntaccatcccattcatccat

SEQ ID NO: 5908 - DNA, 361 bp, Glycine max
catcgaaccaaatcattttataaaattatatataatacatttgagagaatatgttttgatattattcctgatattatattattattagaatattctatttcctattaatcaataatggattgatcttgtaatcgatattgattcccttttccatattaaaaatagcatgaggtatgttctacattgacacacaacattacaataaaacactgttatatggtatcaaagcttaggttattcttgacagaggaataacgaaagtttgtctccaccaaggacaagaggtcctcgatggacctctctactagtagtcctatttcagcgacctatttccacatcccggtggacctctcttgtttgt

SEQ ID NO: 5909 - DNA, 457 bp, Glycine max
  unsure (1)..(457): unsure at all n locations
actcaagcttagggagttgttctaatagttntctgtgcatgtcttgctgatatagagagagagattaggaaactgagagccagtcagccagagaactaaatgtgtgtaaattgtcatatgatattatctgcagataatgctaatcaatgatattcatctgaccttccatggaactcaaactgttctgtggaaattgaagatttctgcaactctttcccagtcagtttctcccaaatttagactacctctctcttggataatatgttttctggcggccttatgtaaactgtcttgtttggagttctgggcattgcttaccctaaagaaaaactaagcattgcttattgatgtcatgtgctccttgctcatgatttgatcaatgtcccaaaatttctagatcatttgattaaatnttattttcaagtcgctagaagacaatgcaattcttatcatcatt

SEQ ID NO: 5910 - DNA, 476 bp, Glycine max
  unsure (1)..(476): unsure at all n locations
agtcacctgaggcatgcaagcttgcatgatttacattctcctcccttcttttctatattttaattcttcttgacatcatcaaaatcttcatgatttacattctccccctttttgatgatgacaaccacctgtaggttatgagcaacaacaaagaaaaaatatctatttgcatatagtttactcccccttggtttcgcaatgattgcttatatgaggcagatgaagaattcatattcttcatatgtaaaaaaatcgtctcataaagaatagataatctttcttactatgttatctgttatctttctctccccctgtggcaacatcagaaacaaatcatgaatagagaggagaaagatgttaccacttgttaattacatacatatattntatctgttatcttggtgactgaatgtatgagaatcaagtgataccgagaggcattaaaacatttcaatattaatcaagcaaaaacaagt

SEQ ID NO: 5911 - DNA, 293 bp, Glycine max
ccaatattatgaccagccttagaggtgcttcacctttggggacttgcagctatcacccacggtggaagaatctgacaaaatcctaagatgccctctgggaggaaggaaaccatacctattcatcggattctatccctctatagctagaatttctaagactagccaaatctcaacgcaggaattataccgcggaaagcatatcgaaaatggggtggttggagtaccaaggaaatatttggaagccaaagcatgagtcttagcacgtgaatgcgaatgggccccgttcatggaca

SEQ ID NO: 5912 - DNA, 372 bp, Glycine max
catttgtcgcccaagtttgctggtcttgcacatgaaaatcctcataatcatgctcaggagttccatagtgttggccccgtaatgtgatattactatgttgagaaccttaatcttattttttcatgtctgactcttacatgtaccacacctcttgcgtccttacctttaatgcttttaacggactaagtatggagactataatgcattaaggaactgactattgatatctttcaacgtttagagactacctagatggtctgccaacatttctatctagtgagcttttgtgccataatacttctaataaacacaagcaatgatgaactgctgacttattgactacttcacatgagccttacacttagctcttac

SEQ ID NO: 5913 - DNA, 403 bp, Glycine max
  unsure (1)..(403): unsure at all n locations
actggatgcatatgttaacttggtaacccatctagccttgaaccaaaaatcttgtcctgttgcaagggtctgtggtttgtgctcctctgctgaccaccatatataccttttgccttccatgcagcaacctggaacaattgagcagcccgaagcttatgctgcaaatatttacaataaacctcctcaaccttcgcagcaaaatcaaccacagcagaacaattatgacctcttcagctatagatacaaccctggatggaggaatcaccctaatctccgatggtctagccctcagcaacaacaacagcagcctgctcctttcttncaaaatgtngttgtcccaagcagaccatacattcctncaccaatccaacaacagcaacagccccaaaacaaaccaacagtg

SEQ ID NO: 5914 - DNA, 435 bp, Glycine max
ttcaattgctttcaaagaatcatcccaaggcatgttttgtcctttgtcatccttcaacctaggttcaaatttagaattggggtaggttttgctcttgtttggtttgatagatggtgtcctctaggtcctctctgtaatctggtttattatgttaatatatcttatgttaactagcaggttaaggatattcattctcgaggtgccctttgaacattacagtctctagtcttatcagtagcatttttatcaaccccaacatgaatgatactatcatttgggatgcttctgcgaatggtgcttattcaaccgaattagcctatgagtggatcactgaagcctactttacccgtaacaacctgttagatgatgaatccttggttaggcaacttccgctccctgacaatgttaaattgtgtcctagacataatgattttc

SEQ ID NO: 5915 - DNA, 387 bp, Glycine max
tgcacttatgcatttccttgtgttttctatagacatccagggttggtccatatgctgctgaagatatgattgagatgggtaaggatgctggcaaggagcttctgtctcgggctggacctaacttcttcagtagttagcagcagatgattaaagtgtgatcaggtacacacaggtttcatggtcagctttcggctattgcttcctaagttaattcattctttgacctgttgtaactttagagtagataaaatgttcaattgagtttgggaaagaggacctctcattatggtcaaattgttgtattatgaggatattataatgccaattttttacgtagcttgtataattaccacgatagtggacttttgagaatcacgctaaatacac

SEQ ID NO: 5916 - DNA, 369 bp, Glycine max
  unsure (1)..(369): unsure at all n locations
ctataaagaaaagnaccgaattttcataatacagaaagaagatgatatgatacattcttctcttcccatattaatctttgtattggataaactgagttaagcaggcattcctttcagtatattatggtactgattattagcatgataccaaagtatacttaaaaatctaagtagctaattgatacatatgtcaaatgcaaattatgtacctcttcttggccaatgacaccctggtttacacttaccctccgatgtctgcgtaatagctgcaaaagaagtttattatatactatggtaataaaagaaaacagtgataccctccagagttgttaggagaattgagtttcaagcatctaatgtacaaatatg

SEQ ID NO: 5917 - DNA, 199 bp, Glycine max
gcttctgtgttactctgcattggttcttctatttcataacatttcagacattcaggtgtgcttataaacgtacgaagtattacaatcatatgacttggtagcatctaatgccttgtgcgggcgaccctttaagaacaactcaaaaccgtctaaattatcttctcattattgtgaagttgctatcttacattgcttgatt

SEQ ID NO: 5918 - DNA, 422 bp, Glycine max
aagaaaatatcttaagatatttttttctattagtatgggtgagaattgattagatataaaaaaaatatactggaaatacatatatagttattaaactcttaaaaaattcttaataaatatcatatatctgcttatttatgtattgattatatcatttattgcacttaacaaataaactgttttcgcgactggccattatgtataagatggtatgtacgtacaagaatcttcacttagtacgtgtttcaattaatcccactgccgttgctttccatcgcacaaagtcacaaaccctaccatctctcccaacatcaatattgaacctcatttatctttctgtagaatgatttgacagcacacacatgatatgtagtgctctttgctggcacccacgtgcattctttatatggtggtttacgaac

SEQ ID NO: 5919 - DNA, 402 bp, Glycine max
  unsure (1)..(402): unsure at all n locations
atatattacgggggnnnannnnttgnataaatcatattttaaagaaacattctgtctctctattttgataaaacaagtattattactttataacacaacattttttgtattaataatatgattaaaaaaaatctacctttaatccccttatttttggttcacgtgatggctgtgatctttatgacacacacattgtagcgattttttctgacaaaatgcatcttttcttgatttatcaaaactctattgccatccaaaataaatcatggtgcatttcattcaatacctcgcacacatattaatttacaaattgggccttttggaattttggagacatttcgtcgtggattggatgttagatcatccttttaatcttcagactatttacgatcattctattag

SEQ ID NO: 5920 - DNA, 395 bp, Glycine max
  unsure (1)..(395): unsure at all n locations
tataagctgaaccatcttatcaagagagacattctgtttctatccagaaaactagaggccatttcgtttatcttagtgagagtgatcctcgcaagtccttgactcattcaagaacaccctggctgtatcaaaggactttcacaacctttgtgtgttgccctcgccggaaagagtgacattttccttcctttcatcttcaaccttgttctttagaaccacaattccagaaatccacttctgcccagaattatcttgatgaggacatgttcaagagcaagggcaaggatccacttgaaggactnggaggacctatgacaaaggctagagcaaggaaagccaacgaagctcttcaacaagtggtggccatactatttgaatacaagcccaagcttcaa

SEQ ID NO: 5921 - DNA, 331 bp, Glycine max
agcttgagcaaattctaacgactataactttttacttggatgttcgataaagtcacgtaatatatcgagtcgctcgaaatagaatccagaaggtgtgagaaaattctaacgtcaataactttttactctgatgtccgattgagtcacgtaatatatcgagacgcccgaaattcaattcataaactctgagcaaattctaacgacaataattgtttacttggatgtccaattgagtcccgtgatatttcgagacgctcgaagttgaatacataagctctgagcagattctaacgacaataacattttacttggatgttcgatatagtcacgt

SEQ ID NO: 5922 - DNA, 364 bp, Glycine max
  unsure (1)..(364): unsure at all n locations
agcttgtaggagagataacatgaattncaatatctcgagagattagtttntgattctttatcaaaaaatatcctgatttaaataaataaataanaaaagactcagagcttaggtgtatgataaacaagccaaaggatgggactttgtggcaattggaagtgtcaaataatcatattgcagcaaataaatgctttntatctcagttctgaggatatacattcatattgcttgaatgcatggaaggggcatgttgagacataaggtgacaagctttggaatgaagttgatggatcacataatcaagcccttttccacaatggagaccaactgttatcactggcctcccaaccaacgactacctaac

SEQ ID NO: 5923 - DNA, 457 bp, Glycine max
  unsure (1)..(457): unsure at all n locations
agcttngttacaactagtattntttgtcctatctagtcattgttggctctaatacaaataaaaaaatttgtttgtttgattgcataatgactaacactcaattgtcttatagatggacatacaatcttagcatgtagtcttttctctcaagataatcaaagtgttttgagaacaattctaaactttacaagaatttacacaaagagctttctacagaaagaatttgaatatgagcgctntagttagttgttcatgtcttcaaagtttttggtaggtataggcctccttcaatcaagtgtatgttgtctctaaacgaatatatttcttctcttaaacttgtgtttgaagaatgtggccattgngacattaagtgcgtgcattaaattcgtgtacttctttatactggaaaatcactcttcttcattggggtgttgaacactacaacataaaaccactt

SEQ ID NO: 5924 - DNA, 445 bp, Glycine max
  unsure (1)..(445): unsure at all n locations
ggctngtggngcttctatggaggctggatctttgagcttcaatgatgtcctttaatggtgattttacaccatggagatgcagcggaagacaaaggagaagaggtgagaggaggcgccatccactagggaataagccatggaagaaggagcttcaccaccaagatgagccttggataagaagcttggagagggtgcttcaatggaggaaaagaaagagggagagaaagagagaggggggagcacgaaattgaagaaaaagggagagaagttgaactttgagttgtgtctcacaagactcttattcatcaaagttacaacaagtgtcacacatgcttctatttatagactaggtagcttccttaagaagctttctcgagaaaacttccttcagaagcttctttgagataaccttcttgggaagctagagcttagctacacacacccc

SEQ ID NO: 5925 - DNA, 416 bp, Glycine max
  unsure (1)..(416): unsure at all n locations
agcttctttgaagtacaattnttgttgcatatcttctcatcaatgttgttaaaataagtggaccatttcacaggtagccatctaattctgcattctacatatgtaacaaagcaatcctaacaacccaccctaagtttaggcttggggttaaaatatatttgtgaaaaaaagataatttaataaaaaaattgaaggtatttgttcatacaaattagcatgttnggtacaacttcaaagaaatatttccaacttcctgagtgagatttggggaaaaaattattctccaaaaaatagtctatcccaatcaaataaataaagaaatttcttcaagatttatgattagacaaataaagcaggttactctcttcttgaactagggcatacatctgtgtgtgtgcatgcatatggtgcacaca

SEQ ID NO: 5926 - DNA, 439 bp, Glycine max
  unsure (1)..(439): unsure at all n locations
ntgtctcanacaaccacataatacaaaccttaaagcccctttcacaacatctgattcctttcttaatttcttatgccattacaatcttttactacaacgcgtcaaatgttggcttttaaagaaggtacaacttaaatgttacacgattgcatagaaaatcaatttagtctttagataaattattcaaaatttgctaaaggctagtgtaattctatctctgcagaatatttacaaggttcatactaaaagaaaaagaaaacagaatagtgagatacttatatgttaggtgcaagctacataaaatgaagatgccaataatttgttcacgtatggggaggaataatgccaactntacactttatgcaaagtgaagtagccattctcttctattgtttactgatgcaaagccaactaataaagaaatttgtgcaacaattaa

SEQ ID NO: 5927 - DNA, 458 bp, Glycine max
  unsure (1)..(458): unsure at all n locations
agctntaattccctagtctatggtatggatagttaaatataataactgttatcgtaagttcagatagaagtacaaattagcacgttattaactcatataaacaatacatgaaatgcctgaacctgatgggttccatataggagctgattacatgcctgacccacaatcaaggacttgcctgatatgttaaacaacaaactttaaattggatataaatagcaggaactccaaactacataaaattggaacttgtgggattgacgtcctccattagctaattccctcaattgggtaattntaaggtattgctatccactattcagttaaaggtggaagaacctgganagtgaaaaggaagtaattagtggagaaggaggataactcagtggaggcaattagctntttcaattnttcttttattttagctctcataagatttntaaatttagcaattattt

SEQ ID NO: 5928 - DNA, 429 bp, Glycine max
  unsure (1)..(429): unsure at all n locations
ntagatacattcctaatagttagagctcctggttagcaactgcttttttactataatatagaatcagacaattcgttttgcttttaaaaaaaagtgcattcattctgcttttaaaaaaaaagtgcccttcaaatggttcctgcatcctttctttgatatattggattttagataattacttaattgtatgattgttggctggaacttagaattgtccatagataattatattggagggaggactagaacctgatcagatgttaatttcatttcttttgcagccgtatctccaaagcacaagatactgaagatgactctgttgactatatggaaacaaattggtcatggaaccttcatacggtggataggtctgaaaggactgcagctttaggttcacctttgctagccacatatactcagagaaagaac

SEQ ID NO: 5929 - DNA, 471 bp, Glycine max
  unsure (1)..(471): unsure at all n locations
ggaccttaagcacctgggctgcagcttgtaaagcggagaaagganaccgttagtgatgagatgaagatgaaagcaagcaaaacaagaaatgaattgaaagcctcgggttcgagcacttacccattgaagaccaaagagcggatgaagaacgacgaaaaatcttcatggaatcacccacgaaaatgtcttagaagcgttatggaggcacctcggcttgtattttcttcacagaaacacgttttttcatccaaaacaattcaaatgcataacataggggtcaggacccttttactacacctctttgcccttatttatagccaaaacagggaggagcttgccgcccagctcgcccaggcgtgcctaggctntcttaggaagtttcctgatgcaccctcaaaattactaagttcaccnncccttttgtactntatggaaaagtttcggaacccttatggaagcattcggacttga

SEQ ID NO: 5930 - DNA, 428 bp, Glycine max
  unsure (1)..(428): unsure at all n locations
ctcagcttctanagaagcccgaggaagcttctggaggaagcctcttattgaatcttctagagaaagctacatggagctgcctcggtaaaaacgctgcccagacttcgttaaccgttggatcttctcgaaatttggtttgcaacttcacaagatacctttccatgatcttaccgttgggatctttgagaagatgtctagagtgtgctagaagcttccgttcccgtgagcatctcttatttaagcatttcagcctttgctttcgtgtagcttaggaaaaacgccatttcttcttctttctttcttccaaagccatttctaaagttccaagaactttctccatcacccacagccaccattagccaccacaaacgatcattggtcttcattganaacccacaccgagaggaacccttcaaccgaagcggaat

SEQ ID NO: 5931 - DNA, 321 bp, Glycine max
agcttgttgaacttggaagcatagttatcaatctcatcatagggtgtgtagcaaccagtcccaaaactgctatagtgtgatagagcatggcaaaatgaccactatttttaagtttataaatacaaattaactaatttaactactctcacacatatatgctcagaaataataaaaaagttatttaaaattgtttaggaataattaataatattcaaaatggtagttttctctaaaaataatagaacacatgaggataccctgccactctgaacgcgacatggaaagaaagtgagaaaagagaaaacacaacacatgctgaaa

SEQ ID NO: 5932 - DNA, 418 bp, Glycine max
  unsure (1)..(418): unsure at all n locations
agctntgcggatttggacttcgccaacagaatgatcaaagcgggtctgaaaagaggcaaatttaatcatcccacttggacgaatgagaaaactggggcaaatgaagagggtgagaatgagggagaagcccatgctgtgactgccattcctatacagccaagtttcccaccaacccaacaatttcattactcagccaataacaaaccttctccttacccaccgcccagttatccacaaaggccatccctaaatcaaccacaaagtctgtctaccgcacttccaatgacgaacatcacctttagcacaatccaaaaacaccaaccaagaaatgaattttgcagcgagaaagcctgtataattcaccccaattccagtgtcttatgctgacttgctcccatgtctacttgataattcaatg

SEQ ID NO: 5933 - DNA, 447 bp, Glycine max
  unsure (1)..(447): unsure at all n locations
ntgtccacagatccctcatgtaagactaggcctaaaccatacagcattattataacaacataattcaaaccaaaacttaacccgcaaatccctcatgtaagattaagtttcgatcctgcttcaatcaagttctaaggcaacagtacatttcccaatgctaaagtcacctaactgtgcacacaagtgggtgatcagaccgaaagcatacgaacattaagcattgaacacagaaaacataatcaattagatattaggtatttacatcagttgttcattagaaatccccaactagggtgtttagccagccattacaaagaaaccctaacaatagatgagattaaaaatagagaatgattgttccttacacaagaagggggattcctcctcctcttctcaacatctcacactcactctctactcaataatctctctcanatgacaaaacct

SEQ ID NO: 5934 - DNA, 144 bp, Glycine max
cttttattccgtgaccacagagtgagacctggatatatgttgcgggggtcaagaaaccttgcggacctcttgtggggtgctattgtccgaaaccaatcttgaccaatcccgacccaacccgggcatagtcagtcattgagaacc

SEQ ID NO: 5935 - DNA, 405 bp, Glycine max
tgtcggttatctcatgaagatctaccccttggttgagattctgtgctggctgaattctctgctccttgttgaattgatttcccagatggttcctccagctagagccttgtgtgaagatactcccttgattgaatctcggcggtcctccttggttgtagccttggaatccatggcgattctgtattcccatgtaattcacgtacctggaaggatcttcttggactatatacattatgctggctcatgtgctcctccacatatgtggcatccccctatctgcataactgaacagtgaaaaggacttaccgcttgtagttgttgtggaagctcgctgagggtttccgttacggcctctatctattgtgatcacagcttgttttaagccaaagttgcatcttgggttat

SEQ ID NO: 5936 - DNA, 421 bp, Glycine max
  unsure (1)..(421): unsure at all n locations
agcttgttagctagatgacttgncatatacattttcttgactagcatcaaatcagagaattaaacctggacatcttttagaaatgcttgctgaattaagacaggcagaaatccagtgtctccatttgggacaaaaacccattctttgcagcatataatccaaaatagcccatgagactgagtcataggccttttcaaaatccaccttgaaaaccatagctggccttttgcttctacaagcttcctcaatcacctcattaagaactagtacgccatgcaggatgtgtctgttttttatgaaagttgtctgcctctcatcaataagaccagatatcacttgtctcaatctatttgctaataacttagctatcaccttgtacatacatccaatcaaggagaatggtctgtagtcatcaaatgac

SEQ ID NO: 5937 - DNA, 283 bp, Glycine max
tgaattgctggatataatatatggaaagaaatccatccgatattactactcattactattatgattgaaattaatatttaatttagtatgtgagacttgaataaacataaaatcttaaaaattttagaataaaacatttttacaaattgtttttacatttttcaaataataataatactaatatagacatattataatttagtatttaatttctattctaaaatattaatgtaaaatattataataaataaagcgttactatctaatatcattattattaaaa

SEQ ID NO: 5938 - DNA, 403 bp, Glycine max
  unsure (1)..(403): unsure at all n locations
agcttatactacaaggaaaatgactnttacctacagttaatatctatcactagaagtccaaaatccgtaggtagatgtataaaggactttgtcctacagacattttttccgtcaactttgagggggtatacagtgacaactaatagtctgtcactataggctttacctacggatatatttttacctacagtcaaatttaactatcactataggtaacacctactatntcaaatgtgtaggtaaaagatattaatttatacctataatcactaactgtaggtaaaagtcaatttacttgtacctacggtcttctgtaggtaaatgtcatataataataataaaactagttcctaattacactnntgtgatcagtctttcctgtaccaggtggccccacaaccat

SEQ ID NO: 5939 - DNA, 291 bp, Glycine max
agccttatgtgtatctcttttgcgagaagaatatcccttcatttctctgacttacctctatgccgaggaaagaactcatcaaaccaaggtcaggcatctcagaggtcttcatcatgtcttctctaaactctatcatcatcttactattgattcccgtgtagataagatcatctacatatagagagagtaagagagtgtactgcccttgagacttgatgtaaagtgtaggctctctcttgctcctcctgaatcctcgatccatgaaatactgatcgattcttctataccatg

SEQ ID NO: 5940 - DNA, 365 bp, Glycine max
  unsure (1)..(365): unsure at all n locations
agctntgaaatccntatatctaatccaaggtagatgtttcataaatgggattcctttgcttgtgttgtttgattctggtgccacccattcctttatatcctgtttgtgtgtaggaaaacttaagctttctgtgtcttctttaaataaagatatagtagtagagacccctactagtggttctgtgttaacttctgatgtgtgtttgaattgttctgtggagatttctggtaggatattcttgattgatttgattngtttgcctttgagccagatngatgttattcttggtatggactggttatcttccaaccatgtcttgttgaactgttttgagaaaagtgtggtgtttgatgattctggagtga

SEQ ID NO: 5941 - DNA, 328 bp, Glycine max
cctttggccaccatttctgccccacatcgtgttttgttatcttttttggagtcgcgaagtgcgtggctacgagtgggacttcgaaatttcaggtttgggtggacttctttccctcttgattttcgcgggtatggggttttgggagatatgaggggtagttttgttagttttctgctgtgtgatgattatttgtgaagacatttgttgaaagcttgtcgaaattgccatgtttgggtgagttagacatacccattctgttttatggtttttgcgatgatgtttgcgatgtttatatgctcgaatagctgatggaaatctgttacagatg

SEQ ID NO: 5942 - DNA, 295 bp, Glycine max
agcttatataccaccatcatcaacgaattatggcggttgatggaacctctccaaatgcaagctttccgcaagacttacggaaagatcttagagttgaccttatcagaggtattcatagaagccattgcattactcacccaatactacgaccagcctttgagatgcttcacattcggagacttccaatttgtaccaaccattgaagaatgtgaggaacttctacgatgtcctctcgggggaagaaagccatatcgttcatccgggtgtctcccctctttgagcataattgcaactg

SEQ ID NO: 5943 - DNA, 501 bp, Glycine max
cggacttgatcgatgctttgatgcctcgtagaccaggatctcagagcacctgagctgcgctataacaatgactatctgattttttttcgaaacacctttgaacacggggtggctttacttgagatgtagctcactacaacccctaaatgaaaaaccatgatgtctccatacttcataaagagatttggagctatggaattgttctgagaattatagtggggagaattcgtttcattgtaaaactagcttcgttggcaatgcctgatgatgtaggttgagccaacttgactaacattgtatattggttaaacgttggacatgctgaatgaaatgttgtctctcaagcggcttgtgagttccacaaacttgtcgattccttatagaagtttctaacacacagcgactaacctttcttgtgtataacatatactgccacagcaagagacacaccacttggtatatccccttaaagagtgagaataattctatcgatccttctcg

SEQ ID NO: 5944 - DNA, 380 bp, Glycine max
  unsure (1)..(380): unsure at all n locations
agctnttacagccattaatcaacaatttaacttatatatgagatcatatttccttttcggaactgtactgatgcaatcctacctcgcaagggcattggctagaagactccaagtagattgggctagagatccaaggaaaggccctagggttctcatgagccttaggatagatttcgagcccatgggctaagtatgagcccgcttatctttgtaaatattagaataggtttttccttcgtctaggccttgtattttggccattctagtagtatagggttttagccttgtatttcggngaattttgagttgtctttgtaataaggacttttttttgtattttcatggtttttgcatggnggtgagcttagctattatagggg

SEQ ID NO: 5945 - DNA, 466 bp, Glycine max
  unsure (1)..(466): unsure at all n locations
taagctccttcaactgcacaaggctcttaatattngaagagtattcttgtggaaccttcacccgacgaagacactgacaaaaacttatcttctccttcttggacaaagtatggcaggctgggggcaagtaaattttcttcccatcagaccttggatgcaactgtgatcttatacccatatcagctagatcttgacgggtattcaagccatccttcgtcttgccttgaatgttaaggagcgtcccaatcacactgtcacaaacatttttctccacatgcataacatcaatacaatgtctaacgtcaagatcacactagtacggaagatcaaagaaaatggacctcttcttccatatgcaactctgnactttatccttctttggggtcttnccaaatacagtgttcaggtgttgaacctgctgatatacctgctcaccagtgaatggtatcggcacaatatcatgctc

SEQ ID NO: 5946 - DNA, 296 bp, Glycine max
agctcaaggagacgctgactcaatttatgtttatatccatgtccatttacaggagcacaaagtcatccatcaagaacttggagatacaagtaagacacttagccaaacaaatggttgagaagcccactagtagctttggagctaacatagagaagaacccgaaggaggaatgcaaggcgatgttgactataagccaaaggagagcacaaggtgaagaagagaaagctgaaggaaaccagtctgaggaaggaaagagcagacaaagaaggagagaaagagaaagaagagaagaagag

SEQ ID NO: 5947 - DNA, 500 bp, Glycine max
  unsure (1)..(500): unsure at all n locations
ggatgtgnnnttganncccttgannnccttgatacgctgcatnaccngacactatagatactcagcttgccaatgtgggctctacacttttatacaagggcaacatatctatgtacgcttctagtaggatagctatgtccaaagatgtcattattagatgaacatccacttacctatgaagcacgtgtggcggccggccacaagtgaagctcgagtgaatactggttcactgccttagctgtacatgagtctcggagggtaatccacttctaagctcatatcagactacaagacggatctactgaccctggtttgagttaccaaggggtgcaattgagtccacactagcaagcacgtctggatctatgaaaacgatacacaacgtacccaactctgatcatctggacactgcagtctgatgccttcctaagtgtatcaaccgaccttaatttccaccacctctctgtagaccaaaaatggcatcctgtggtacaagagct

SEQ ID NO: 5948 - DNA, 406 bp, Glycine max
agctcgcacattgctgtttaataaagaaagatttatactggaagccttggtacttcgacatcaaacgatgcatcataaacaaggaatacccgtaggaggcctctgacaacgacaacgaaggttggtggccagcttcttcctgagtgggaatatcctatacaagaggaaccatgacatggcactgcttcgatgtgtggatgccagagaggctaatcaaatgctggtagaggtgtatgaaggatcctttagcacgcatgccaatggacatgccttggcccgaaaaattctgagagtggggtattactggctcactatggagagcgattgttgcatccatgtgaggaaatgccataagttccaggcctttgcttgatatgttaatgctccacccataccctttacggct

SEQ ID NO: 5949 - DNA, 458 bp, Glycine max
  unsure (1)..(458): unsure at all n locations
tgagtagtttctataaaaaaaagtgatatctttatattgatggacttcttttagtttagtatcatctttggacaatttcttaaacttttttcgcaagattttgaaagaatagacaagtttgaaagtagttcacgacaaacatgttttgaagattcaaggtcatcgagatctacctcattttgttctaattctaattctntagaagttgtatcagtcattagacataggttggcttcttattttccttcttcatcaaaggtggtgtcatccaaatcctccaaagtgctcatgagacttttcttgtcctttgacttgtagtacttatccttggacttctctgttggatcagtccaataatctagaacgggggttggatagagtctttcaaaatctttaccaattcgttcttaacactgagtaaaaatacttctttaaatcaatcaaagtttcttcaaaga

SEQ ID NO: 5950 - DNA, 357 bp, Glycine max
cttgagatgatgaagtgtagaagggtgaatctttctacttttattctttgaccacagagtggtacctagagatatgtcgcgggggtcaagagaccttggggatgtcaagtggggtgctattgcccaaaaccaagcttgaccaatcccgacccaacccgggcatagtcagtcagtgagaacctgtgatgtacctaaacaggcgagctcctgacagtcaacagataaaaggaacaaagaccacatagcaaagaggctggtgtggtggctggccagctgtgaatcttgtgtgatatatgggttatggcctctggtaatcgattaccaagggtgggtaatcgattacaaggcttaaaaatg

SEQ ID NO: 5951 - DNA, 524 bp, Glycine max
  unsure (1)..(524): unsure at all n locations
tggaatatgggtttgatacccattgattaccnttgataccatagataaccttaaggaccaatcatttctcaatcaagaaataatctnttcattattggccttgatctctctatttgagacttccacttgcccgcttgtctgaggatggtaaggtgtagtgtgagtgactccataattcttcaatataaattcaatttgcctctcaatgaaatgagaaccaccattactaatcacagctcgtgggaccccaaacattggtgaaattatctacttgaacagctggatcacagtctttgcatcacaagtttgggagggaatttcctccatccattttgacacataatcaactgccacaagtatatatttagatccataaaaaggtgggaagggtcccatgcaatcaatgctccaaacatcaaatagttccacctcaagaatttccattaagggcatctcatgctcttgtgatatgtttctagttgtctgacatctaccacaagttgtggccactttcagtatctttn

SEQ ID NO: 5952 - DNA, 403 bp, Glycine max
  unsure (1)..(403): unsure at all n locations
agctnggctctaggtacttacccgttgaagatcgaagaacgatgaataacgaatgaagaacgtcgaagaacggttgaaacctttgcgaaattcttcacggaaaacgttacggaaacgtttcggaagcgcctcggcttagattttcttcacggaaacgatttttccaagcaaattcgaaagagagagaagtgccaaaggggctgaacccttttcttcttcacttcctcccctatttatagcaaaataggggaggtggttgccgcccagctcgcccaggcgagccaggttgcttcctccagaagcaacagccttctggaggaatattctggagggcccaagtgggcctgggtgctatttgcacccccatttttactaagtacacccacctctgctgttttttttg

SEQ ID NO: 5953 - DNA, 395 bp, Glycine max
  unsure (1)..(395): unsure at all n locations
atatcatcggcaaagatntcctgagccttcttccaaattgaacgacacattntaaatgatctaagaatcttcaaaatatctggctcaactgattgtcataacatagcgcagaaggagaaaactacagttccacagatttaggtcttttgtcgtttggaacggaatcagaagctttctccaagtggtcatggtgcccttgaccgagaaactacagttccacggaagcaaaccacgataggtaattcttccagtttagttntgcagtcgtgatggttggggtcccagagaaggagaaaacaggtccagagtaagccattgcagatcccaaacaaaaaaccctaacacaaaagagggagaacacaaaagggttgacaaaaaaactttgtggaagcgag

SEQ ID NO: 5954 - DNA, 352 bp, Glycine max
  unsure (1)..(352): unsure at all n locations
agcttaccaccncagagtgccttggatattaatctgagagcagaagcttccatagaggaagagaatgatggagagggagaaagagagagagtggcgtggaaattgaaggagaatatgaagtgatgcaatcctatcccccaagaagattggaccaaagatgcaagagaaggccctatgattctcataagccttagggtagattttgggcccatgggctaagcataagctcacttatctttgtacatattaaattaagaattcattattttcgggccttgtatttagggctccataatgtatggtcggtaccctactaatgtaggatgtttcagcctttgattttatggcacct

SEQ ID NO: 5955 - DNA, 446 bp, Glycine max
  unsure (1)..(446): unsure at all n locations
agagagagaaccctcttgtttaataagaaagacacattatgattaaggaaggactactccctctaagaagcacaccattagcatgaaactctcataaatctcatgatgtcctcctttaataaaggccaaaaagctttataataaatctgaaattaaaagcatttggtcttgggctcttatcattcccacaatcccacaccgcttcatttacctcttcctccacaaacataagccccaactcaccattcccctcctccaaatacttttaaaagatatctcatctaacttatctctcacttcctccttctcttggaatcttgattgaaaatacatttttacttcctctgtaaccctctntntggatcctccacccaactctaatcatgcttntcctccttctctactttaccaccgagtaaaagtatttggtgtttaatcaccctcca

SEQ ID NO: 5956 - DNA, 400 bp, Glycine max
  unsure (1)..(400): unsure at all n locations
agcttgtaatcgattacacacatactgtaatttattaccagaagagtttntcagaaaacattctcaacagtcacatctttttgtgtggctcttgaatggctatcataggcctatatatatgtgacttgagacacgaatttgacaagagtttttcagaacaaaaaaggtcttatcctcttataaagagaaatcgttttatcctcttacaaattccttgggcaaattacttgtgattcaataaggtattatttgagtgctcaaattgttcaatctatctcttgcaagagagatttcttcttctcttgttcttcattctgaaaagggattaagagaccgagggtctcttgttgtgaaagaattctaaacacaaaggaaggattgtccttgtgtgtttagaact

SEQ ID NO: 5957 - DNA, 445 bp, Glycine max
  unsure (1)..(445): unsure at all n locations
ngaccaatcccgacccaacccgggcatagtcagtcagtgataacctgcgatgtacctaagcaggcgagctcctggcagtcaacagataaaaagaactaagaccacaaagcaaggaggcttgtgtggtggctggccagctgtgaatcttgtgtgatatatgggttatggcctctggtaatcgattaccaagggtgggtaatcgattacaaggcttaaaaatgaagacaggaggctaagatggtctttggtaatcgattaccaaggggtgtaatcgattaccaggcttgaaaacgaggtctggaagctaggagagcttctggtaatcgattaccaggcttaaaaagggaactggaagattgtggaggcctcttgtaatcgattaccaatctgtgtattcgattacacagaggaatgggtcactggtaatcgagtaccatgtatgtgt

SEQ ID NO: 5958 - DNA, 147 bp, Glycine max
agcttataggatcattgtgcacgcgtcatatttggtactgcgtggcgatcgggcgatgcgacaaggaaactatcgcatggccacgagccaggcatatgcacaccatccccagctgcccacatttaaatgctagctcacgtgcacatg

SEQ ID NO: 5959 - DNA, 184 bp, Glycine max
  unsure (1)..(184): unsure at all n locations
ngcgctggattgggaatcttcttatggaagttactcaaggttgtgagcctagacatgacatgggagtgcgtagctaatctctagcttctgagggaaggcctctcaggatagcttcttaacggcgctacctattctagctatggaagcctgccactcactagtcgagactttgatgaatgagaga

SEQ ID NO: 5960 - DNA, 428 bp, Glycine max
tcctcagagtctacctgcctcatgcaagcttacactatggctattgctggatatgcttatagagaaacacaaaggaagggaatactcttgaactgcacgacaatattttaagccattcggatctaacacatcatatgatttttctagccatcactgtgactcaaacctgtaaagtcaagaaaagcaaccttaacattgtaacaaaaattacaaaaacatgatgaacttatgtcatttataaagtatctacgttccttatgcgcagtggaatgagtaaatataacataatcatacattacgtaatacaagcgacttatggaaatggtttcaataagtatagtgatatttattttaaaaaatgagtattaaaattgctacaagcagctccaggttactcatattaattgttatgaggtaggtgtgcatca

SEQ ID NO: 5961 - DNA, 423 bp, Glycine max
  unsure (1)..(423): unsure at all n locations
ctntacaaagataaaanaataattatggattaagataaaatttcattaacaatatttaccaattatatctctcttgcaacttcattntctaaatttctcccttctccatctctaacgttctctttagaaccctccatattccttcattatagataccaaccattgaaattattgaaataatccttgcattatagaggaaaatgacttttaacataaatccaaaattctcatcctcctcttccctaaaccccaaaattcatatgggtcaatccaagccatgtgtcccttttgccttgcttgtcacatcttgatgatgagtacattgatgtggtaatgctttcactttcatgatacttccaactcgtcacatattcttttatttttctgccttcnttatatggtaaatgttaaatgtntaaatat

SEQ ID NO: 5962 - DNA, 313 bp, Glycine max
tatgctttacgtgaaacacaatggaaaggaatgctcgggaacttaacgataatcttccaagccattcggagctaacacatcatcggagggagctagccaagaagagtgactcaaaaagcggaggttaagaacagcaaccttctcattggaacagccacctccgtgagatgaggaacttatgtcatttatacaccctctataatacttatgcgcagcggcgtgagcaaatataacataatgatacatcacgtggtcctatcgacaaacggaatcggaatgcgcccagatacagagggttcaccctataccatga

SEQ ID NO: 5963 - DNA, 353 bp, Glycine max
  unsure (1)..(353): unsure at all n locations
ngagatgaggaagtgttgaagggtgaaacttcctgcttttattgttgaccacagagtggtacctggagatatgtcgcgggggtcaggagaccttggggacgtcaggtggggtgctattgcccaaaaccaagcttgaccaatcccgacccaacccgggcatagtcggtcagtgagaacctgtgatgtacctaagcaggcgagctcctggcagtcaacagataaaaggaaaacaagaccacaaagcaaggaggcttgtggtggctggccagctgtgaattttgtgtaatatgtggattgtggcctctggtaatcgattaccaagggtgggtaatcgattacaaggcttaaaaatg

SEQ ID NO: 5964 - DNA, 461 bp, Glycine max
  unsure (1)..(461): unsure at all n locations
agaatgacctgaatgnactgaaacgccnntnaatgccctctgaccggacttattcacgccgagtttcttgactagatccctctgatgggcttacttaacccacaacttgtgggcaactattggaaccatacgtcttccgcagatccctcttgtgagactaagtttccattctgctttattcaagttctaaggccacaatacattttccaaagctaaaatcacctaactatgcacacaaatgggtgaccagaccaagagcatacacaatgtatgctctgagagaagcattggacacaagaaatacaagcaactagatattaaaataattacataagctattcattagaaatctccaacgagggtgtttagcaagccattacagaaaaacccctactaatgataatgagattacaaaacctaggtatctctacaaaagctgctcctcttgcttgctccagaga

SEQ ID NO: 5965 - DNA, 431 bp, Glycine max
  unsure (1)..(431): unsure at all n locations
ntgagggtgtcgcagcccaccatcttttatagtagagtatctataatgtgtctaccatcacgattatcgtctccctttccatcattgggggtaccacctgggccgccagatccctccaccttttgggcgtgttctttgaaagatccgtccccctttttgcacatgttctgtagttgcattctatctggaaccatatcaaaattgtactgatattgccaaacaaaggcaaccattaggtccttccaagaatggactcgggaaggttccaagttagtgtaccaggtaacagctaccccagtaagactctcatggaaggaatgtatcagcaattcctcatcttttgcgtattcccccatcttctgacaatacatncttagatgggtcttggngcaagtagtccccttgtacttgtcaaagtccagcaccttgaa

SEQ ID NO: 5966 - DNA, 262 bp, Glycine max
ctcagcttatatatatcgatacgctcgaaattaatcatcggaaactctctggaaattcaaatagtcataactattcacacggatgtccgattctgacgcttaatatgtcgagaggctcaaaattgaacaacggaagctcttgagaaattcaactggtattacttttcacaccgatgtcccaatcaagccaattacattttcgagacgcctcaaattgaaccaccgaagctcttgagaaattcaaatggtcataacattttac

SEQ ID NO: 5967 - DNA, 346 bp, Glycine max
gccattgtttgatttattaagtccactcttcaaataccttcatgcaacctcctcattatttacttaacctagttttgagttaggcatttgagtattggtgttgagaaccctcgtctgtaaaggtattccactattatgacatatcttgcttctttagttcttaaaactctggcttccaaggcattttctgggaggttactttagtaaggtaatcgaatatgtcgaccatccactccttctttttagatgagacattcatgaattggtttgagtgagtacttggtttcagtaatgtttcatgtatctatgttctcaactgaccaagctttcgatcacttgctaaact

SEQ ID NO: 5968 - DNA, 433 bp, Glycine max
  unsure (1)..(433): unsure at all n locations
ctgcattcatgcaagctccttactatnggactaattaactttgtttacgggtgcatgatttatttcacaaccaaattaaattgaattccattggtcacgagtcagtaacaacagtacgattaaatcactttatctttggttggtgcggaaggaaaagataagttatacctattgaatgacttgtgtcaataaacccaacttattttctttatgttattttgtttttacataaaatcccaaacgtttttactttcatggagacttataaaaaaatatagaattaaattcaataaatttttacagtcaattttttaatacattctaatatgtgtaccaaaagaaacatgatttcaattaacaaagttttacctttatactaatacattatttaatgaatntaaatttgtaacataattaaagtcattaatgtagt

SEQ ID NO: 5969 - DNA, 407 bp, Glycine max
  unsure (1)..(407): unsure at all n locations
tgtatataaattgaatttttatacaattctgaactatatactagaagcacgactcattaaatcaatgcatcaattactgcggagttattctgtcttaatctcaaattctaatttttgatatatatatatatatatatatatatatataactgtattacatatttgaaagaaatctttcatcatatataataatctcattaactcaaataaaattgttttatataaaatatatccgcagtctattaaaaaaatatgcgatacagtaaagcggcctttagacctttggatgttatntctctctcttttctttcggagactgttgaatttgcttaaataactgaaaacaatatgaatatggatttcactcccaaaacgagataataatgagacaggttcatcgttccatt

SEQ ID NO: 5970 - DNA, 356 bp, Glycine max
agttcgttcttgaggtttgcaccgctattatttctgtgcttatgccttagtacttgaattggcctgatgaggttgcattgaggagggtgaagagcgagtttgagggtgtttctgggatccctaatgttgtaggctctatgtacacctctcatgtgcctattatagctcctaagattagtgtggctgcttatttcaacaagaggcacactgagaggaaccagaagacttcttatagtattactgttcaaggggtggtggatcatagaggggtgttcactgatgtgtgcattggttggcctgtgtcaatgcctgatgatcaggtcgtggaaaaaagtgccctttttcaaagggctaat

SEQ ID NO: 5971 - DNA, 459 bp, Glycine max
ctcgtgtatcatacattatatcgatcaatgaggtgcttgagagtatttgtactgcctcgggtttaaaggtaagtattgaaaaatcaagattttatgcattcaagaatgtgtccaataccaagaggggtcaaatagctagcatcattaatttcccctacacctttaatttgggcaagtacctagggttccttatcttcactagccatgtcactaagagggaattcaacttcattctggatcacattcaagtcaaattggcaagctggaagtccaagctcctgagtagggttggcaaggtgactttagctcaattaatattggcctttatcccctcatatgtcatgcaaaactatcttcttttaaagggtactctgcaaagctatcgatactctaataagaaagttcatttggggtagcaactcttctcactttctcgattgagagactatttctaagcct

SEQ ID NO: 5972 - DNA, 442 bp, Glycine max
agcttgtgagatgtctctcaatcaagttcttgtgaaaagaaagaattctgaatggtgtgataaaaatactgagattgtgacaccctctaaactaaatgtgataccctctacccttacaattataactaattaactaaataaatcatacaaaatttatttaaaagtttataaacacaaaaaagaaaagaagaaaaaaaacataaaaaaataattaataatttttctttaaacatatttaatttaaatcaattcaaaaggagaaaaggttcacatccacttagtgaaaacataatagaattttttttttaataaaagataaaattatctcggctcagaacaaggtcgtccactataaataaataataattaacaaaactgaaatagaaaagtataatgccattatatcattcagtaaatcataatatgccgaaaatataatatg

SEQ ID NO: 5973 - DNA, 522 bp, Glycine max
  unsure (1)..(522): unsure at all n locations
cgggttttggananattgataaaccgttgctatcgtagactgaaccttgtgtggcgagatcaactagaggttctctgctttatgaaggttatcgctccatgacaaatctacttgggatagacatctcccaaaacctgctttaagggccgaacactatgagatacgtaaatagctcacagaggataactataactgtctctctctcgaggggatcactccatctctcatacagtctcactcggactataacaagtccttcgcggtgcctcactaccgtctctctgtagggagactattctatccgcctgatttggtcactacacactattgtgaaggatagaagnatatgaattgctttctcgtgatggtgcgcgaaatgaatctagttactgtagccgtcatgcactgcaatggagagctcttctatgatggcccacactatggccgaatngatcttcttgccctcacaatcacacgaccctaccgataccacatggagctcatgcgcttggcctacctagg

SEQ ID NO: 5974 - DNA, 378 bp, Glycine max
agctcgccttgacgacgctagcaaactgatgttttcgacgaatgccggtgagcggttacgaacccggaatgggattatgcaattacaacggcggcataactagcctgataaatgccaaaggaaaccgtgggaagtatgggttacgctataagcccactcaggcaaatataaagaggagcgttgccggaaggaacatcggaagtcaaggctcgcggttgacacaagaaggtgaaggaaacccaccctgccaaataagtaagagctttataagcgcgggtctgggggacgaatgtcaagtcgtcactatatatgaagatgatgttccgagtacgctggatttggtacgaccatgccctcctgatttccaactgggaaatt

SEQ ID NO: 5975 - DNA, 390 bp, Glycine max
  unsure (1)..(390): unsure at all n locations
aacatgggaccaactcattatatttcagatagtcgtatctagtcaagatctgagagaccatacaagtttcctagcggtttctaattatatgggccattaagtctatcatatgctgacaatagccgagaagcccatgaatttcttctggggcggagtaagtgtccgccattgacttggccttggctaacaatcggggaagttcttgacatcccgttcaaggtaaaagcaaaccggtccatccacatggtttcctcttggtgtaaagagtcgatcgcccttcctctagcctctttttccacgtatacttgggcatactcgtncgcgaccctatgctcgtgggccgtggctagacttaactctncttggtacttggcgatgatagctagcatg

SEQ ID NO: 5976 - DNA, 456 bp, Glycine max
tgaagctcctctcggcaaatcttcatatgatgggacattattaacaacatgccctggtggattaagaggatcacttgagtatggcgagtccctacgactcagtgatgagaattgcagcactcgcgctcatatgacactgtctactcgtaagcgtgaagagaattcctcgactctgtcaccttatgtttaattctacgtcagaaagtccttagtccacgaggtctatcatgataacaacatcgcaatatacccatggagagaccatgacgtaataacgccgtgccattacatatgtcatatttagcgtctatctttctgaccagcattagtggtgcaccttagtggctaacccctctgtgcaatagagttcaagaattctcgacgcgatatgttgagtgtgacctccttcaccttactcatatgatagaaaaacacgcgtttcgtcttgcaaatgct

SEQ ID NO: 5977 - DNA, 172 bp, Glycine max
  unsure (1)..(172): unsure at all n locations
cgcttctcttcttatctactatccttgnacctatatttccatgctcgtttttcctggtttgttttcttcttcaaaaccccgcggcagtattcggtggaaaacaacggtcatgagatatgaaaaaagatccccttttttattcttattttttcccccatgaaagctcttgact

SEQ ID NO: 5978 - DNA, 315 bp, Glycine max
  unsure (1)..(315): unsure at all n locations
ngaaaggattngtattttactttcttctcatgatggttacttcatcttgggcttgtagccaaagccagattttcaatccactcctactttgactcctcgaatcgagttctacttgatggcttcctaggtggtctaatggtaggttttctttttgtttatatgcgctctggtttgtgtatggcggacatcttttgtttgataaaacaagaaangttgttagataacaaaggtagagaagtacataaaaacagaggacaaaaatagatattaaagttcataaacagtgcttgaacctttagtgttgtagttttggat

SEQ ID NO: 5979 - DNA, 332 bp, Glycine max
agcttaaacattattctgtgagcgtctcgatatattacgggactcaatcagacatctgagtgaaacgctatcgccgcttgaattggctcagatgttcacatatcaatatcgagcgtctcgatatatatccggactcaatcagacatccgagttaagagttattgtcgtatgagatggatcagaggttcaacattcaattccgagcgtcccgatatactacttcactgaatctgacatccgaatgagaagttgtagacgttcgaatatgctctgagcattaacatttcagtttgagcgtctagaaatatacgggactcaatccgacgtcccac

SEQ ID NO: 5980 - DNA, 413 bp, Glycine max
  unsure (1)..(413): unsure at all n locations
ntaagccaattcatacgacaatttctttntactcggatgtctgattgagtcccgtaatataacgaaacgctcgaaattgaatgttgaagctctaaccctattcaaacaacaataacgttttactcggatgtctgattgagtctcgtaatatatcgacacgctcgaaattgaatgttgaagctctaagcctattcaaacaacaataacgttttactcggatgtccgattcagtgacgtaatatatcgagacggtcgaaattgaatgttgaacctatgagccaatttaaacgacaataactttntactcggatgtctgattgagtcccatcatatatcgagacgctcaaaaatgaatggtgaccctctgagccaattcaaacgacaataactttttactcggatgtctgattgag

SEQ ID NO: 5981 - DNA, 316 bp, Glycine max
agcttaagcttcttttctgcacaaggctcttattatttgaagagtatccttgtggaacctttacccgacgaagacactgacaaaaacttatcttcttctttttggacaaagtatggcaagctgggggcaagtcaattttcttcccatcagaccttggatgcaactgtgatcgaatactcatatcagctagatcttgacagatattcaagccatccttcgtattgccttgaatgttaaagagcgtcccaatgacactgtcacaaacatgtttcttcatatgcataacatcaatacaatggctaacgttcagtatgga

SEQ ID NO: 5982 - DNA, 452 bp, Glycine max
  unsure (1)..(452): unsure at all n locations
ngagctcgttgttgctgccccatatagcccctcgaaacttattcttgctccattcttcctttcaagccctttttgtttcccgctctaatgcttcgatcatagtcatgttgacatctctcagcacatcacactctttcctaaccctagtgactgtcgtctttagcttttccttgatcactcttgattctttgagctccactttcaaagcttgcacttcttcgctttcctcagggactttagcttctttcctacttaggccttttagctgtgggagccaagttatcccttgtgtcctagacttcaaccacttatgattgccgccgatgactccattgctacttcccctaagctctttatctttcctttccactatattccatgctttacaaattctctaaagtatctttgcattggtttcattgaaacctcatgcgatgaaaagcacgatgata

SEQ ID NO: 5983 - DNA, 108 bp, Glycine max
agcttaaacagtcaaagaaaagttcaaatcattggctcttacgatccgaaaggagaattccgaactgagggatgtaaatgtagctaccaccaaggccttggaacaaga

SEQ ID NO: 5984 - DNA, 457 bp, Glycine max
  unsure (1)..(457): unsure at all n locations
tataaatacataattgcctcaattatttccaaatatgcatgtgttttaagaagcatcaacaagaatcaagccaaggctattgtgcaagcaatcaatggggcaaaacacaccaaatgattatgatgatggatggctcaaattctcacaaaggtaaactcatcacttcaaattgagctntctaaactatcatgacatgttgaggagaatcaaggatttcaagtcacaaaatgtcaagaacttttattttcaaaacaattacccatttcttgaacatatcctataattcaaagaaaaacatgcaaagtcgtacatgcacacaaaattgacccaaaatattaaactaaaaatccgacgaaactaacaacattaacaaattaacacaacttacanattaacaaaaccaacaaaactagcataaccaaagaacacttccccccccccatactaaacaacacat

SEQ ID NO: 5985 - DNA, 362 bp, Glycine max
tatcttgatgtactaagtcttccaactccatattatcctttatatcactatgtagcccatgtaggaaacaagccatagtagcctctcgatcctccataacattagctctaataatggaaacctccatctccttgtaatactcatcaacacttctactaccttgtgtgagtctttgtagctttttatgaaggtctctttgataatgagaaggaacaaatcttcttttcatcaaccttttcatttcttcccaactatccactaagggttcttcatatcttgccttctctctttgtaattggctccactagatgagagcatagtcagtaagttccatgactgccaccttcatctttttatcctcg

SEQ ID NO: 5986 - DNA, 434 bp, Glycine max
  unsure (1)..(434): unsure at all n locations
tatcaaaattcaatgagaaatcatgagattcantttggcattatctattctttagaagattataaatgggaaccagagttacaaacctactatcaaaatgaggcagaaagaggtttcaatctggacaatttgttgatgcaattcaaggatacaattgaatcaattcaatgagcatttaaaagtacaaaaattcaagttggtaagctgtgagaagcaaagcttcatggtgaatcaaaggtgattcacaggtgttttgatgataacaatgatgatgacaaaggtgatgacaaaaagctcatagatcaatcatagaacaactcaagtgaatcaaagatcaatcaaagaacaactcaagtgaatcaagaacaattcaagagttcaagagaagaatcaagaagaattcatgactcatgaagaaagtctaaagtcaagaa

SEQ ID NO: 5987 - DNA, 231 bp, Glycine max
  unsure (1)..(231): unsure at all n locations
ttgatcanatgactaanattaattggtttttaagatatttagcagatagccaaaccaacttcactattcctagttagaaattccaatattctatattacctgctcattatctgtaggaggaaggccttcaacatacacccgcctaacatgtcatgtagcccgtaaattcagtacattatagataggccataatcaaggaaagtcatgctaaacataaaatgaaacttaaat

SEQ ID NO: 5988 - DNA, 429 bp, Glycine max
  unsure (1)..(429): unsure at all n locations
tgngtgatgttgcgcgtactgatgggtaccatgaggtgccttctgtggtttgacccatgcgggcgttgaagagacagcatgggtatctccttccttccttnttgcccccgttgtcccgattcttttggcattcgcactcgtgaaggaaacgtaatcgaactttcctcttttcaatcctaccttgattcttttcccggcgaacactatgtccgcgaagctggacgacatgtaacctactagcttctcatagtagaacactggcaacgtgtctaccatcatagtgatcatctctctctcgaccatcngaggagccacttgtgctgccaggtctctccaccgctgtgcgtattctttaaaggtttcgccctctttcttgaacatattctgcagctgagtgcgatcgggagccatatcggaattatactgata

SEQ ID NO: 5989 - DNA, 227 bp, Glycine max
agagttttcttgaggaacctgcacccgacgaagtttctgacaataacttatcgtcttccttgtggacaaagcctggcaagctgggggcaacgaaatattcttcccataagaccgtggatgccactgcgatcgtatccccatatcagctatatcttgacagagattcaacccatccttcgtattgccttgaattgtaatgagcgtgccaaacacactgtcacaaacat

SEQ ID NO: 5990 - DNA, 402 bp, Glycine max
  unsure (1)..(402): unsure at all n locations
atagagcccctcganactttttcttgctccattctttctttatgcccggtttgtttcccgctctaatgcttccatcatagtcatgttgacatctctcatcacatcacactctttcctaacgctagtgactgtcgtctttagcttttccttgatcactcttgtttctttgagctccactttcaaagcttgcacttcttcgcttcctcagggactttagcttcttttctacttaggctctttagctttgggagccaatgtatcccttgtgtcctagacttcaaccacttttgattgccgccgaagactccattgcttcttaccctaagctctttatctatcctttccactatattccatgctatacaaattctttaaagtatctttgcatcggattcatttgaa

SEQ ID NO: 5991 - DNA, 312 bp, Glycine max
gctcctctatcgcagaagattaatgtccctttacacataataaaattcttacataaactatagaagtagctaccgcccacatgctaccctctcacaacaaatgagagaataacttctaataacaagagtgcctttaccaaagagtaaaaaatattaaacaaatactagttttgctaatgtggtcttacaagatgaagattcattatatgcatatgcttcaagggtaattcattcgctagaactgcaaaagcaagctgcatctagactcagcgactatgtctactcaatgcaatgtgtgtgacaatgattttc

SEQ ID NO: 5992 - DNA, 345 bp, Glycine max
  unsure (1)..(345): unsure at all n locations
gaggatgctcttcagctgtntctgatagggagtgaaggtgttgctgtgccgatgcctgtgtcttcgcctgcgttgttgcacactccgcctatgtaaaatgtcgattcctggaccgatcaacagcctttgaggtagtaccatgactctgatgcactaactcaataattgtntggtctgtgtgttgttgctttataacttgcactcgtgtttattgaaccgaggaaggacgctgcggctgctaatgaaagtattggcctcaatgatgcggaagaggtgcgccctcccttgcctgaataagggaaactcttttcgacgacacgatgcttgatgggtatgctctgcttt

SEQ ID NO: 5993 - DNA, 489 bp, Glycine max
  unsure (1)..(489): unsure at all n locations
tgcaattgaaacatgagattggagccttgagagncacccgcatgctgcaatctctcttgcactacggaaaggcgcttctctccgcaancatttggcaaccaaagaaccgaaccaaacgtctttactgtgctgaagaaaaggaaaccacaatagctttgcgacgtgataatcataacatttagcgtagtgattagaattcacgtgagctggagacgcatctatccctgacttttgtaggatgagaattgaaactccaaatatgaatgctatgcgaattccatgcacgggatgttcatctataaagaaatcgcttgatatatctgtagactcgtctgagagccccatgctcttgaaagtataaccgtacaaagggatgttcaacaccggaggggtgtgcaatcatttatgcaatagcgaactcaatggccactaaatgaaaaagaataataccctcaaaccgaccggtgtttatatacgaacgaagagttt

SEQ ID NO: 5994 - DNA, 398 bp, Glycine max
  unsure (1)..(398): unsure at all n locations
atcacatgatttattataatcattaatcttattcctacatttcaattgaatattatacttattccatggataacttctataattataaaacaatggtccttgttatacattaattatatacttgatgctagtaaaaaatataacaaaattccactaaaatatttatgtgattaaattaaattctctaatttaattatcaaataaattattgtcttttgtaaatattgaaacactctgtgtgaccatgtaagatcaatataaagtaatcataattaatttatcaatcaaggtaagcatctagcaacactctntagcgtccggatagcatgaattaacatcgtttttctctacgaaccaatagaagaataatctaatatgtcctgccatcatttataact

SEQ ID NO: 5995 - DNA, 431 bp, Glycine max
  unsure (1)..(431): unsure at all n locations
agctntttcggtgctttatcatgtganaacttatttgcaacgttagtttacaaggaaatgccattgtaaagcacaatcaagcaaaaacagcatacaactccttccaacaaaacgcaaatataaatgtaaatctatagcaaactcatacaccaatgcacgtgtttttctgggacatacatttatgaacatacatgcatgcaagacattctgctacctatcttcacatatatgcgtttccaaagcattgtcgctaaatttacatacatgcatactcaaggtattttgggctacgaaaaattacatacatgcatattcaaggtgttcttgctaccaaaaatgacatatatgaatatccaaggtatttgtgctaccaaaacatcacattctatgcatatacacggtattattgctaccaaaaattacatacatgc

SEQ ID NO: 5996 - DNA, 452 bp, Glycine max
  unsure (1)..(452): unsure at all n locations
tagtactcgtctttctccctcttttgttggggactatatgttgcatggatgtgttctcaccatgctggagattttctgaggctttacgaatgacctcctggtatcagttataaataattaaattgttaagaactttattaaagtaaaattcaaggactatatagagagtattaagtgagaattatggaccattttcaaaaataaaaagaatgaatataaagtactagatgatatttgaggggaatacttagattcacttacctttatttgttttagaaagtcatcagaaagtctactcaagagatccatcttaattggttaggtcgaattttttttcctctgacacgtgaaagagattaaaagttctgaanaagatgaaanatatgactgtgagtgagatgccaagggtggagaacattgtcattaatataaacaaagaaaaagaaaaaaat

SEQ ID NO: 5997 - DNA, 407 bp, Glycine max
agcttccttgagaagcttccttgagaaactttcttgagaagctagagcttagctacccacacccctctaatagctaagctcgcctccttgagaagctagagcttaactacacacacccctctaatagctaagctcacctccttgagaagataagctagagcttagctacacatacccctctaatagctaagctaaccccatgcaaaaatacatgaaaatacaaaaagggccctactacaaagactactcaaaatgtcctaaaatacaaggctaaaaccctatactactagaatgatcaaaatacaaggcccaaacaaaggaaaacctattctaatatttacaaagaatagtagactcaacattggcccatgggctcaaaaatctaccctaaggttcatgagaaccct

SEQ ID NO: 5998 - DNA, 451 bp, Glycine max
  unsure (1)..(451): unsure at all n locations
tgtataaaagaagcatggttactgctagactacattcaattttaatcctcaatttatgactttatagaacaatactataagacttcatctattttagtatttcctatcaaagtaacacaactagaacattggttgctgcatttntgttggacgtgctcttagtaatgcctattgattgaatatggtcctttgcttcaaattttagtgttttgctcctgcatttctgtttttaacatctttctttgaaatatttatttctgatggttaggcctttgatataatgtctcaatcaagagctgcatcttcttcaaatgttagcaacaatgaaagtaagagtcaaatatttaaagaaaaactattattaccttaagaaaggtccattcacagagttaattcttaattngttattgagtatttaacaaanatattatgacaatntggtctgctcaca

SEQ ID NO: 5999 - DNA, 298 bp, Glycine max
agcttgagctcactgatgctgtcccacaaagtccctcaaaactgggggtggtcttattcttcctttctggccctcattgtttctcgttctaacacttcagttgtggccacattgacgtccctcagcttgtcacactcttttctaaccctaatggttgtcgtcttgaactattccttgaccacttgtgctctttcaagttccgccttcaaggcttgcaccttcttgctctcctcgggggtttcaacctcttccaaacttgaaatctttaacttctggaggcaagttatcttttgcattc

SEQ ID NO: 6000 - DNA, 411 bp, Glycine max
  unsure (1)..(411): unsure at all n locations
ntgtccatagatccctcttgtattactaggcttaacttanatagcattatcatcacaacatattcagaaaaccaaaaccccacaatccatccctggtaatgtagttatttagtgctgcttctatcaagttctaaggcaacagtacatttcccaatgcaaaagtcacctaatagtacacacaaatgggtgatcagaccaagagcatgcagtaattaagcattgaacacacaaaacacaatcaattagattttaaaagtaattacatcaactctntattagaaatccccaacttgggtgtttaaccagccataccaggaaccctaacgcanatgatatagaaagtatagagaaatngttgcttacacaagaaggnggatccctnctcgtcttcttggcaccttacaatctctc

SEQ ID NO: 6001 - DNA, 215 bp, Glycine max
  unsure (1)..(215): unsure at all n locations
atagataggttgatcctaatccctacacttaagggatagattcttgctcactgtatataaatattgcactcattatcataaanaatatcctaatccctaactcaaattcatttccatattgaaggggcgcattctggcaatgattgtgacttctgcccaaaactcatcatctccacttgcgacattcttaaggcacttcactacccccactctat

SEQ ID NO: 6002 - DNA, 258 bp, Glycine max
ttagtcttcatgttgcttccctatctctaacagttctcggttagttctaccgcgttatattggagttcattagaaacactctgagatagatagatagatatatatagagagagagagagtttccttgtattatgttcttcgttagtaataacatacacaacgtgcgctactctcttcttcttctttgacaatcttcttccttattctgaacttattttctcagccctaatcacaacaaatatcatgaatgacaacttt

SEQ ID NO: 6003 - DNA, 426 bp, Glycine max
  unsure (1)..(426): unsure at all n locations
gacagttataatactaagcttatgcttaactatgtatggcaatacattattactgntgtttattacatacaagtgagcttgtaacaaatcttctagacttggagtgatcacatgcagacctcttgaacccttaccacccactctgtcatcatgccgagactcgggaaggccaacaggtttagccttctcaatgtattctgaataaaattcaatgacttcttctacaatgtacctctcaacaatagatgcttcaggatgatatagattctttgtataccctattaagatcttcatgtatcgctcaactggatacatctatcgcaaataaacaagaccacaacatttgatttctctgtccaaatgcagaatcaagtgaatcatgatgtcaacgaaagcaagggggaaaatacatcntccaactggaac

SEQ ID NO: 6004 - DNA, 488 bp, Glycine max
  unsure (1)..(488): unsure at all n locations
atgacccttgagntcangactttgtaaacccccnattcggaatgagcacctttgacgnacacgnngacttntatagttgacctgcaggcacgctatctnggatatcctgagcgtagggaaactattctctcttagatggagccaaaccccatcactctcattaagaaccagatcttctcctcctctattgactatagttgaatacaccctcggaaggatcttatttggctcttaagcatctcatgcatctattttacaaattttgacctacaatccccctacttatgttaaaagaactccctacgagaagtgattaaagtctaatggagtacagggctaaaccccataaccacctctgaggggactgaccggccgttcttagacccccatgtgaaagctacacatactgaggacgcactcatgcccatactcatagaaaccatcctaagaccctgagaacggtggatcttactaaacacctaccccgc

SEQ ID NO: 6005 - DNA, 376 bp, Glycine max
  unsure (1)..(376): unsure at all n locations
tcttattcttgcaattcttggtggtgaagctccttctttcttggcttattccctagtggatggtgcctcccctctcctcttctcctttgccttccgctgcatctccatggtgaaaaatcaccattgaaggacctcattgaagcacaaagatccagcctccatagaagctccacaagcaagcttccatcattcttcaactcttgcttcattatctctaggctccatttgttttctttgtccaccttattcatctactcttcctttagacttccaataatatcagctagttgttgtgcatgatggatngtggggaactgttggagccacatgatgcccttccatagttcaactcttatactgattcttcggcaatttg

SEQ ID NO: 6006 - DNA, 366 bp, Glycine max
ttgtcgtaattgattacataggtttctttacaatgattgattcattcaggagtcttttctattatcgattagcatgtgctataatcgattacttctcttttaaaaagtgtttcagaagtgatcaagaacactttaattgattacattgaggatctaatcaattacattgttcttgaaagtctttcagtctttaggaagaacacttttaattgattgaaatgataatataatcgattacttctttaaaataattgattacattgtatatttaatcgattacatgtggttataactattttctctataaatagacacattgtgttctcacttctaacaacttcagtatacataaagttattaagtgca

SEQ ID NO: 6007 - DNA, 422 bp, Glycine max
  unsure (1)..(422): unsure at all n locations
ngatgtgctatcattttcttctattntctaaaccctntntgttccattttaattactgattggtcttaattgtcaattaattaggcaattttattatttgggcccatttagctaatttgatgtttttaatctaatttcaggaattaatgaaacattgggcttaatccggattttggttgtggacttgaagagggcaaataaagcagcgcataccttagttaatttctacttaggaaaatttcgcaatttattttatattgttcagtgtttatttcgttttgngccagagtattgtaatatggcccagtgactttaagtgactcttntaaatagcagccttgggattctgcatggcattctgttatgctatttcattattcagagcttgggtttaggttntcacgtttttctgttccttgtta

SEQ ID NO: 6008 - DNA, 427 bp, Glycine max
agcttatgtgtaactagtgattagtggtttgtttgtccaccgtctatcaattttttgcatgtctgttaacaaatcagctggtaaagcttccaatgatcaaagatttgttttgaagcagaataatagttattttaatattaacttgcttgatatataacagctttgttaattaactatttcgcattacaattaaaatagaagggtaataaattcaagattacaaaacccagtagattatgccttccttaatccttagtcctgacttcttttactatcataaagctgctgctccatagcctcccctcccctgtcccttaccatccccttgtaccagttcataagtgaaagcttgaaatctgtaatcatccctcaattttcttagcagaaaaaaataattaatggcctgtttgttaagtttttctagtaa

SEQ ID NO: 6009 - DNA, 462 bp, Glycine max
  unsure (1)..(462): unsure at all n locations
catatagatngaatcctagttcctctaaggacttatcataatatctgctggctgatcattagaattaatgaactcagtgataatctccttggacaataatttctctcaaatgaaatgacaatcaatctctatgtgcttagtcctctcatgaaaaatcggatttgaggcaatgtgaagagctgtttgattatcacagtataacttcatttgcaccactttacaaaatctcaattcttggacaaatagtttaatccacataagtncgcatgtaaccatagccataaatcgatattcggctcttgcactggatcgagtaacaacaagttgcttcttgcttttccaagagataatatttcttccaatgaaaacactatccagaggtagatctcctgtccatgggacaaccagcccaatccgcatcacaatatccagaggtagatctcctgtcttcatacaacaatc

SEQ ID NO: 6010 - DNA, 216 bp, Glycine max
ttcttaggttttctcccctaagattttttccatatagatctagagcctctaaattggcgaaggcattcatgttcaagttctgaagccgccgcaattcttcagatggaggaattctgcaaccgagaattatataacacttccagcttcattacgagggatagcatcccaagcacaatggtctgagatatttaagtgatcattccaccaaccgctttg

SEQ ID NO: 6011 - DNA, 346 bp, Glycine max
  unsure (1)..(346): unsure at all n locations
ttttgggtgaatgtgtactactttatcctgcattatcctgtacaatagctaaacttcattgtatgaacaagaaatttactacgtttcctttatatctattcaaatgaatgcttttgtgccttatntaattcgaaagttgagtattccttctctttgtatttatcagaatggagtgaggggcatgttactgagtacttggttgcaacatttggcgactatcttggtgatgtaaaaatgtgagtatatgtacttgtctcggaaatcagacattgcttattctaccatatgtgctagtccatatttcttctgccagcttacactggttctttttttggtagcagctact

SEQ ID NO: 6012 - DNA, 62 bp, Glycine max
gccgtgcatcgatgatgtggtctagtactgatgaaagggcgataagacccatacctgggact

SEQ ID NO: 6013 - DNA, 416 bp, Glycine max
  unsure (1)..(416): unsure at all n locations
gcttctatccaggcactctctnggtggtttagctccttcttctatggcttattccctagtgggtggcgcctcctctcacctcttctcctttatcttctgctacatctccgtggtggaaaatcaccattgaaggaccgcattgaagctcaaagatccagcctacatagaagcttcacaagcaagcttacatcaagtggttatcagagcacaagagcttcaagtaggtgctccttaaacctccattaattttcagctttaccttctcctccattgttgtttcttcattattctccatgtatctcctcacatgtcttgtgctaaatgttgttaacatgattctttataatttccaccgattaaacttgctatagaagctagatttaattntctatggatcacaattcttgttcttggtc

SEQ ID NO: 6014 - DNA, 449 bp, Glycine max
  unsure (1)..(449): unsure at all n locations
atgcgcatatttccttacgaacattcactcgcacaagatattcttctaactaagaaaaatgcacccatgcacaatcaaggcactttcgttacctacattatttgtatgtacttccaaggtgtactacctacaccacatgcatttccttggctaaatttacatacatgcatgctcaaagcctcttggctaccaaaagttgcacacatgcaaactttatgatgaatcttggctatctacacaataaggtgctacatttcatgctttattcaagtgtttttactaccaaaagccgcatgcaaattcaagtatattttcttttgccgactaanattgtattcaaattaaaaggtgtttttgtaaggtatnttctttacataacatgcaacatatntatatanttttgtgagacantttgactaccaaaaattatatgtacatacatccaagta

SEQ ID NO: 6015 - DNA, 89 bp, Glycine max
agcttctgatagtccacccgtatcggatcatttgatcacgagacccacccgtggtgactgccgagagagagatgtttatcacacacact

SEQ ID NO: 6016 - DNA, 269 bp, Glycine max
agaatagtcaattcttcagtgtgcttctagaactctaagaagaatccatcaatattcgcttattctgtgtagggtggaacatatcttgctaaagagcataagccctattcaaattattgaattttccataaatgatgttttttaaaaatcccacgattccttcactgtattacaatgggtgataacagattgagtctgtctatcagtggaattgacgagaaaggctgagattattattccaacatcctgccttagatccatctggacat

SEQ ID NO: 6017 - DNA, 389 bp, Glycine max
  unsure (1)..(389): unsure at all n locations
tcttatggattatcgaaatgcacttcttgcattgnatatatgattaatggtcgnacagctattgacattgtattccttcagagatagcagaatgtttcttggcttcaccatggacttcgtcatatcaacaataagtggtttttcagctctagtcaatcaccctgcatatggatgtccaactaatgacttggccaattcatgattatgcactccacaaatcaacttcaccatccaaccttctcctccaaccactggcttgccacgaagcttgaagggacaccaacatttcctagtcctagngtctcttctgataaattctttnttcctacacctatactccgcactctcttcacagccaattaacataaacgtagtccttcctctactac

SEQ ID NO: 6018 - DNA, 395 bp, Glycine max
  unsure (1)..(395): unsure at all n locations
cgcttaaagtatgccctagtcattcatcccttttagatgttgncgaagtattggcgatcataatcgccattccttggattatagggttgaaccaagctcatgcttttacaataagggtcatcaagtcaagttgaaatatggaagtaaccgccttgcaaaattggggcataagatgaattgagtcacatcactgcttcgtctactgccaaacatatttaggaatatggatgtccttgttacttccagtttcaccttgacaaagatgtcatggaccatgttgaaaatctaaattgattcaaccccatatcctgtgtaaaaatgcgcaatactttaactgtacatcattcgcatacatgcatgcttttattgggtgcattgctcatcgcattctttcg

SEQ ID NO: 6019 - DNA, 455 bp, Glycine max
  unsure (1)..(455): unsure at all n locations
ggggctctagcctcactcattgttcttttggtttcattnctatctatcttatacttatcccaagtttcagaatntctacacctagaccactccttgaaacactccttttttactctaactntgctctgaacattntcattccaccaccacgattctttacccctaggtccaaaacctctagattcacccaacgtctctttagccactttaataatctcttgggacatcttgttccacatatcatttgcacttccttgtgattgtccacaccaaccctcccatatcttttgttggaagattccttgtttctcacccttcaagtgccaccatttgatccttggtgctaccataggacttcttctctttgccctatctctaattcttacatccataaccaacactctatgttgggtagtcaagctctctcccgggataacctttacagtcaagcaata

SEQ ID NO: 6020 - DNA, 412 bp, Glycine max
agcttattggattattgtgcacccgtcataattggtactaggtggcgatcgggcgatggcacaaatcaactatcccatttccaccagccaggcataagcacaccatccccagttgcccacctttaaattttagctcacgtgcacatacgtagccttctcctcgttcctctcagcaccgggtccccatcaacccctccaagctttcacaaaatccaaaaaattcaattccatttttcatgaaactacctcacacaatgaaaaacagagtggaggcagaatctttgcacaagattcattcaaattccacagagtttttcctaccctcatacctcagcagaatcctcttcgttccaattcgttaaccattggatcgccttgaataatttactggaggttcctaatacagaaatct

SEQ ID NO: 6021 - DNA, 448 bp, Glycine max
  unsure (1)..(448): unsure at all n locations
ttagcttcttaggaatcttcttatgaagtttctcaaggttgtgagcttagttattagaggggtgtgtgtagctaagctctagcttctcaaggaagttttctcaagaaagcttctcaaggaagctacctagtctataaataaaagcatgtgtaacacttgttgtaactttgatgaatgagagtcttgtgagacacaactcaaagttcaacttctctccatttntcttccttcaatttcgtgctcccccctttctctttctctccctctttcttttcctccattgaagcatcctccccaagcttcttatccaaagctcatcttggtggtgaagctctttcttccatggctctatccctagtggatggcgcctcctctcacctcttctccttattctttcgctgcatctccatggtggaaaatcaccattaaaggacctcattgagctcaa

SEQ ID NO: 6022 - DNA, 316 bp, Glycine max
  unsure (1)..(316): unsure at all n locations
cgcttgtatgattattgngtacccatcacatttggtactangtggcggtcgggcgatggtgcacaacaagttntccacatccacaaagcgcgcataaacccaccatcccctgttgcccacctccaactgagctcacgtactcttacgtagcccatatactcgtttctctcaacaccgggtccacatcaatcctcccaagcttccacaacatccaagcaaaacaacattcaaacagcacaagctatcatagccaagcaaaacagagcaaaggcagaaaactctgccaaaacaccaaccaaatcacagcttttctcac

SEQ ID NO: 6023 - DNA, 457 bp, Glycine max
tgaccaggaattacttgtatggtttggatgttgaattctggttgttcctggcgcggagatgatggtacagcgggtgaaccagaagcggaagtttcttttggtgaggtagccatggaaaagcagagcgtttggaatgatttcgtaaatttcacaaggctattgggaaatgctggtaaaaacacgaatgccaagcagatataaatttgaatgaggaatgtatagggtcgtgtgaagcaacggtcgaattttccttggttcagtagtgaacgtgctattaatgttaagtgattcgtttgggcacgttcagattgctgtagttgctataattcctctagcacacaaatgcccagcttgcccctcacgttttcaaactgatttgcatccaaagcctttgtgaaaatatctgctatttgttcctcatcgtcaacatgcttcagtgtgatcactctatcatcaa

SEQ ID NO: 6024 - DNA, 232 bp, Glycine max
cgattcggtgttgcccacccccagctgagctcacgtactcggacggaggcgatatacctcggggctctcaacaccgggtccacatcaatcctccgaagcttgcacaacatccaagctaaacaacatgaaaacagcacaacgctatgcgtagctcaggcacgaacagagcactacgcacgataactgtgccaaaacaccaaccaaatcacagcttttctcacttagagacccc

SEQ ID NO: 6025 - DNA, 185 bp, Glycine max
ccataggcgcggattacaacacccatatggtgcacccgttgtcgatatgttctgatgacagatacctgagcgacgcatacacccgaaactgcatttgtgctacgctaaggtgaacttgttgtatttccaaaataatagcaatggagtcgttgatgagagacgtcagatcacaattggtttgaacg

SEQ ID NO: 6026 - DNA, 392 bp, Glycine max
  unsure (1)..(392): unsure at all n locations
tcctcaatttctctcattaagaatcaaagttccatgaagaatatgtctgtctttaatgaaagctgtntgtctttcatcaattaaggcaggtataacctgtctcaacctgcttgctagaagcttagctatcactttgtacatgcagcctatcaaggatattggtctataatcatttanggactgaggatggttaactttggggataagagccaagaaagaggcattgctgcctctatggaaacaactcgtgacatggaactcatccacaaatcttctgaactctggtgttagcacactccagaattcctttataaaattgaaattaaaaccgtccggcccagggcacttatctccaccacaactccacactgctttcttaagctcctggtctg

SEQ ID NO: 6027 - DNA, 370 bp, Glycine max
  unsure (1)..(370): unsure at all n locations
gccctgacccttatatagaggtcggacncgcaccgcacattaacccgccgacgacagttgcggattacatgagcgctcacaaacaccttagaaggctaaagtcttttctcatcttactctaccgtcctactcacttaatccttaccaatcttctctttcatacctgcttagcaacaccctgaaatatcatcttaaattatcccctacattgagaaagactataaattgtaagccaactcaactgcaaactaacttgtgaattcatgaaagacaccaatggtaggacaatcttacccctgaatctgtggacatacacataataaaaggcgcatgggttgcttgactaactactgaagattaactactggag

SEQ ID NO: 6028 - DNA, 312 bp, Glycine max
ctgagccattattctaactcaccataaatcttgacccagtgtgttaatgtcaatccttaccctcgggagcgaaaaataagagaatgaaaatttccaatcaaagaaaaaaaaaagagaaggaaaatttcctattcaagagaaagcgaaaaaaaaaaagagagaaggaaaattttcaatctaaggaaaaaagagaggaaaggaaattcccaattcaagagtgggagaaagcgaaaagaaaagaatgaaaattcccaaccaaagagtgggagaaagtaaaatgaatgatagagagctcctgatcaatgattgaaa

SEQ ID NO: 6029 - DNA, 352 bp, Glycine max
agctcatgatggaagaaacagctagttaaattatgattccaaattatttgctgcacatgcaacattttaatactactgggctctttttttgttccatgatattacatatagaagaaccatgttctaaaaacattcccttttttgttcttaaatcttgccactgtaacctttttctaggcaaaagtgatgttaatatgttagtcattagtcataactccacatgattagcacacaacatatacatttaatttgaatttcaaattgagagcaaataaattctgaggtcaaccactaaagatatgtttggatttcttccattcaaagctcacaatctagttacaacaatcacaaa

SEQ ID NO: 6030 - DNA, 104 bp, Glycine max
gctaacaaatgtgaggaagagaccatagcaaccaataaagcatagtagatggtctgttaaatctgatagggtagctaccaacctgtgatttataccattagttg

SEQ ID NO: 6031 - DNA, 435 bp, Glycine max
agctcgatctaaaccaataatagttgcacttgattggagtgaagatttcgagctaatgagtgatgccaacgactatgctgtgggtgtagtgctaggacagaggcaagataagatattccatgccatctactccaaggatttgctcctcttgtgcgcctcctctcttaccataacctcgatgacaatccctaccatgcatcttcctctttcatttttctgggttttgttgtttatatctgagatccatggctcctccttcctctctatgctcatcgcattttttttattatttctttttgtttgcgatttgaggttcttttagtttgttttgtgtttggggttgtttaattgtgtttctggtggtggtgaacaaaagagatgatggtcatggcgaagtgagaaaggaaacgaggaagagggggatgatgggcacat

SEQ ID NO: 6032 - DNA, 282 bp, Glycine max
agatggaccatttcaagtgcttgaaagaatctatgacaatgtttacatttttgagctgcccggtgagtataatgttagttccaccttcaatgtctctgatttatctctttttgatgcagatggagaatccgatttgaggacaaatccttttcaagagggagagaatgatgaggacatgaccaagagcaagggccatgatccacttgaaagacttggacgacctatgacaagggctagagcaaggaaagccaatgaagctcttcaacaagagttagccatact

SEQ ID NO: 6033 - DNA, 429 bp, Glycine max
cttttgatttcggagacgtctttggacatcatttattgtgcaaccaaggacgccaagtgtctcattgcggtcaatccaaggttgtatatcatcaaataataatccccggacgaagttagggtatgacaggagccaccagaaccaccttagatggtattgtcttttttctcttccttacttcctactccttctacttaccttcttctctttcttaccttctttgtgacaccctgaaatttcatcttaaattatgtcctacattgagaaagactagatggtgttagttcactctatgtaagatcactttgtgaatctatgaatttaatttattgtttggataattctaatccttgaattatgtgttataaatatatatataaatacgtgcatgtgtttgcttgacatatattagcctagatatataaacta

SEQ ID NO: 6034 - DNA, 462 bp, Glycine max
  unsure (1)..(462): unsure at all n locations
cgtggcatctgtgtgcaatacacaatgctcggtacaccacaacaaaatggtgtatcagaaaggtgtaatagaacattaatggatatgattaggagtatgttaatcaatttgactttaatcatatctttgtggatgtatgccttgaaaactgtcatgtatttgttgaataggattcctagtaaggcagttccaaagacacctttgaactgtggacaaataggacacctaatatgaggtacctgcatgtttggggttgccaagcagaaataaggatttataatctgcaagaaagaaaattggatgcaagaacaatcagtggctatttcattagttatccagagaaatcaaaggggtatatgttttattgtcctaatcataatatgagaatngtcgaaactggaaatgcaagaattcattgaaatggtgaaatcagtgggagtacagttccacgagaagtggaaa

SEQ ID NO: 6035 - DNA, 380 bp, Glycine max
  unsure (1)..(380): unsure at all n locations
agctccgttgggcaacaatggtggatgaagtatatngagaaaagcttcgtgagggagagggagagagagctgtctgaaatttttttctgttgagtgaagagagagagagttgctttttggttttaaaaggcttttccctcttttcttattattttatttaagctatgccacatgtctccatttgagtggagcaagaagggcccactttctcttttgattgtgacccatactcagccacaaaaagtgagaaaaatctgaccttgaaacgctaaaatcttgcctcggtttgcgtgccgtttctctggttccagttcctcacgtttctctgcgcccgtcggggtcagttttcgaaagtaatctatatatatatcaaaacgctc

SEQ ID NO: 6036 - DNA, 452 bp, Glycine max
  unsure (1)..(452): unsure at all n locations
cgccaatcaccggactntgttgttggcgaatttttctgagctatcatgagttaagatcgtttacccactcattaatacaactagcttattgctagaaaaatcgagtcatattcatagttctaatgctttcaatgttaatttccttattgtggtaatgcttcttctgatgatgagatggcttttgatctgtggatgaatcttctccaccccgaaaaggatcctgcagtgcaagattgaccaaagttgacccaaaaaagtcattcgtgtccatttttttacaaaggagtacacttttttgaatggaaatgaccttctaaggagactgcattccctactagcaatgtgtngattgatattttagccaaattctattgttaaagggtaaaatttgcaattntatctttattggtttttagtcaaattctatcgtttaagagaccatganaataccc

SEQ ID NO: 6037 - DNA, 368 bp, Glycine max
aacactcggcatttagaggtaatcggtgttgtacaatgtcagaactcttaccgggcatatcttggtacgaccaagcaaagatgtcttggtagtcttttagcagggctatcaattcttcacggatgggtgtggtcatacccgtgcctatctttacttcttttttcccactgtcggatcctaagtccaccagttccttctcttcttgatgaggccccatctcttggtcctcatggacgactatcttctccaactccgggggaagtcctacatcctcgtactcttcatcttccatccgattcgtttcttgctcgaaatcgatgggcaggtcccaggtcttagtaccttcgagggactcatcgccagatctg

SEQ ID NO: 6038 - DNA, 445 bp, Glycine max
aatggaatggtagcccaccaaacatggtaatgttattcaaccgactctgtattaatagactctgaaattggttctcgaaatgcaatcccctctgatctttgcatcgacattctagatgttctctctaattccatttcctttctcacttcgtcttccaactctcgtcgttgtgcaaaagccatctcacgagcaatgatttctctcctgattttttccttctctagctctcgccatatttgctctttctccaactctcgttggaatacttcgttgacattgatcggcatgaccattgggaaaactctaggcgctgaaacattgctaggaaagccacctgatgcaaagtcacaccctggaaattggattgtaatagaatgaattgggacaaaattttgttttaacaaaaaaacaaatgggctattgtgaaggaactaaagatagaaag

SEQ ID NO: 6039 - DNA, 401 bp, Glycine max
agcttagcgcgaaattctacgctaagcgcgttgtcagcatgaaaagtaagttaccttatgcctataataaggagtaagaaagcatgaaggaaaagacacaccgagtctcagagctctatacgaaagaaatctagagcccgagtctattccttagggaaaatcctccttcttatacattccctctttctttcttctagacatccaacaccttcttgcattcacattagcccctgaagtgtaaaacctttcatgactatgagaggctaaacccttattgttaggagtctgacatgccaaactcctataatgtaaatccgtacttattattcttctatgtgtcttttctggatattatgacctgaccattcatataatagttagagggtaatgcattgaaaaat

SEQ ID NO: 6040 - DNA, 405 bp, Glycine max
  unsure (1)..(405): unsure at all n locations
tctacgttttaaactttaattgtgtatgtgttcataccatcagtgtccgtgtcagagtatatacttatacttctgagagagaaacagctgcccttagaattntcttcaactttggatccgccttttgaagaagcaacttgcctcccacggattgaacagagtcacttggtggggaaggtggcgcttatgaaacttactttctgcactgtgtaacatactaacatatgcatgtgttactcaactcactatcacgagcccctaagcctccactctgcccaattaaactatcaatatataatccaacttcttttgtagagatcacataaatccttcaactaattctactttaaatattttaaaataatatatttagtgttacatagtgcttaacctatacttcacata

SEQ ID NO: 6041 - DNA, 232 bp, Glycine max
tctgacacacaacatgcgagatgtactatgctttctgctccatgcattaactaatctagtgcgccttatttcgctccctataattaaatcatgaatcgcctttaccgtatttggccgagccagaatacaattttggcgcaataattgacaactataggacagtcaaccgaaattggggacacactttaactaccagcatctaagaagaataccaactatagtgatacatgcc

SEQ ID NO: 6042 - DNA, 444 bp, Glycine max
  unsure (1)..(444): unsure at all n locations
cttgattaanatagtcaattcgtatatcataaagtgaaagactctttccacaatctttcgccggctctattctaagctctgcctcctctactccgtattttcgtttttacgttgcttgtgtttgttgctttgtttctggctccggtaacagggtttcaagcgttcttcatcacaatagcaacaacgttgacgcattattattggaatgaaaaaacaaattagaaaattaggccccgaaagcaaccccaacccgagtgtgcgcaagagagaaaaagtaggaccctctatattacgcaatgacaatgagaaaaataattcatggagggatagtggcacttccatcatctagataaacctaatggcgtattgaaagcgaatacatacatcacttggaccttaaccctccttatagtaactcaagtcatgagcaagaagtagaatact

SEQ ID NO: 6043 - DNA, 379 bp, Glycine max
agctttgagccataattctgactcaccatattccttgacccaaggtgagaatgtcaatccttaccctcggaagcaaaaaaaacaggagagaaggaaaatttccaatcaaaggaaaaaagagaggaaaggaaattcccaatcaaagggtgggagaaagcaaaaagaaaagaaaggaaattcccaatcaaagaatgggagaaagaaaaaagagaaggagaagaaggaaagaaagctcctgatcaaggatcgaaagagaacagaagaaatgtgcagagaggtctctggaccatacaatatctgaacaaatacagaattgtcaccaaatgaacaaaagaaagaaatggaaaccataacctataagtggttttctccctttgat

SEQ ID NO: 6044 - DNA, 428 bp, Glycine max
  unsure (1)..(428): unsure at all n locations
gaaggtgcgtagcccaccatcttttcatagtagagtatctatgatgtgtctaccatcacgagcatcggatacctttctgcacatgttctgtagttgcatcctatccgaaaccatatcagaataatactgatactgcctaacgaaggcaaccattangtccttccaagtatggactccggaaagttccaagttagtgtaccacgtaacagctaccccagtaagactttcttggaagagatgtattggcaattcctcatctttgcgtatgcccttatcttacgacaatacatctttggatggttcttggggcaagtagaccccttgtacttgtcaaagtccagcaccttgaacttgcgaggggtgatgatattgtgtactaggaacaactcttctacgttagcataggcataatctttacctccttcaat

SEQ ID NO: 6045 - DNA, 367 bp, Glycine max
  unsure (1)..(367): unsure at all n locations
ttttacttgcagaagtaaattgttttcattcactgttgtagcttgctacagatatttcctctactccaatctctttctggtgctgcctgtaactattacggatacatatcttatatctgaaatgttntatagatgagtgttatatatcttctgttgcaatatatatagagagtggctctagtgtgaattacttatataggtgatatacagatgaatcatcaattattactatcatatatatctatcaaatatataagttccgaaatttaagaaggataatcacttaattcaccggtaacttatttgaaaatccctgtttttttcttccacacaatctctcctccctcgtacttctattgctgattca

SEQ ID NO: 6046 - DNA, 425 bp, Glycine max
  unsure (1)..(425): unsure at all n locations
taagtgtagacataggtgacttaatgtacaagtcaatttcatcactccaatcagctgcgtcaataagtagtttctccaacagtggcatctcatttatcaaggaacacagagtctctntgtgttttcccctaaattctatcaccgacagttctcttaactgctttagctttccaacctctccaatgaccactccatcatcatctataatcactggaggtatctcttgtagggatgtcatgcctccaatatccttccattgaattgaagatatatactcactcagaagaagatgacgtagctntttaagcttactaatctcctctggcatctcagacacacatgtgtctcttatatccaaggtctccaaattctggagcttaccaatggagtttggtagacttgctatccatgtataccggaagctt

SEQ ID NO: 6047 - DNA, 447 bp, Glycine max
  unsure (1)..(447): unsure at all n locations
tctactgactaagggtggcttattcaatactcatgaccctattctgcttatcatatacaccattccccactctgtacatattcctccttatacagttgaagtcacctatgacacaccattttgttatagaacttgttgacctccttccacaagaatcttcctacaaccttcattttttttctagatcccctggataatatgtattagccactacaatgtttgaatttctcccacgccacactccttcaagaaggataaatcttccacccaccattctaacaaaaaattcaaaatcctattttctccatatacatagaactccccctccaccattaatagtgaaggccataacccaatcaatgtcataatgtcctcatagtgcataacatagttccctagatatactntgcttttagggttattgtaagcatagtagtngtaccctct

SEQ ID NO: 6048 - DNA, 525 bp, Glycine max
  unsure (1)..(525): unsure at all n locations
atttgacnncccantgnangntttcgangncnttttgnagannncnnaccngnntttcgngnaatttgacccctttgctagtacccgangatcttcgagtagtaacccgccgcatgctagcttgtgcaaatcaaatcactcctacatcttatctctagcatgcattttctttctttacccactcctcacgtttgggtttttaggaaagaacaccataactaaacgcgccgcaagggatccctatcgcaccagatccaatctataacgatgggtgatcangaggagacacaagaacagatgaaagccgacatgtctgctctgaaagaacaaatggcctccatgatggaggccactgtaggtttgacacagatcatggagaaaaacgcggccaccanccgcgctggcaatttcggtggcgaagcagacccgattcttttgggactacgcaacacccttccttaaatattaaaagacggggaaagggcaccactgttgaacgattgccaccctttacttgtgatttan

SEQ ID NO: 6049 - DNA, 440 bp, Glycine max
  unsure (1)..(440): unsure at all n locations
ngccacccatctcgcccaggcgagcaatgttgcttcctccataagcaacagccttctggaggaatcttctggagggcccaagtgggcctggttgctatttgcacccccatttttactaaatacaccccctgcctttttttggtgattcttttttcgtaaagttacggaaacttatgaatttcgtaaggatacttgttttctttccgtaatgttacggaaccttgcggattacataatcatcccttttttgacttacggaatgttacagaacctcactaattgtgcaacgatgcttccttttgatttccggtgtgtcacggaaccttacggattgtgcatcaatgttttcttttgatttccggcacgtcacggaatttcacaaattgcctaatgatgggtgccaagcaccttaaaatgaccaaacgcaagttgcatgccac

SEQ ID NO: 6050 - DNA, 205 bp, Glycine max
  unsure (1)..(205): unsure at all n locations
agcttcatgcttaactatgtatggcaaaactttattactgttgntcaagacatacaagtgagcttgtaacaaatcttctacacttggagtgatcacctacagtcctcttgaacccttaccacccactctatcatcatgccgagactcaggaagcccaacagctttagccttctctaagtattctgaacaaaattcaatggcttat

SEQ ID NO: 6051 - DNA, 509 bp, Glycine max
  unsure (1)..(509): unsure at all n locations
tggatttgaaaaccctttgaaaanccnntcgnngtcngttgattgactcccccttgcttanacgngacaccattgaatactcaagccctatncaattcataaaaattaaagatattttatatggatgatctatacaagtctctagtcttagaataggtatattaaatacgaggggaattccaactgaagtagccaaaggtttgacccaaaatgtttagtttaaaagatcttttcaacaagattactcctctggtcatctattaccaatggccaaaactgatttacaacaactatgtaaattataattcacagtttgcactgtgttatcaattcacatatatggtaatagattccagccatttttaacgtttaattcaatattataagctgtatccattcacacataccgcatttttaccacaggagtttcaaaaaatctcgaacccccatctttgtgggacttgaatgtaccaaagccaatcttaaagtcatctctataaacaaaattt

SEQ ID NO: 6052 - DNA, 443 bp, Glycine max
agtcacctgcctcatgcaagctcgcatttggaatcgcgaaagtttcacattattctcaggattattacctgacatctcaaacaaacaaatcattcgtaacatgacaattatagttgctgtttgaatacctcacccactcaagtgtatcacacaattatggcttttctctaatgaaacactcttgccttttaccactctaattccccttgagttcttacgcaattcaagagattatggccacaacaaagaacaattcaccaatatgtgtaaggtaaggctaaagagacaaggaaaaggttaaccaagaaaaaggctaacaatgtttttacgcacacatgaatgacataaaattcagaatttaggaattcaagtaacaatccttcatgcgaccaatatattaccttaaagagatatattttaaagttcttcaagcctgaaccatt

SEQ ID NO: 6053 - DNA, 397 bp, Glycine max
  unsure (1)..(397): unsure at all n locations
gtcttgtgtggnggtttctgctacaaaaggagagttcaaganatgattagccaatggttgatacatggacggagatgaaaaagatcatgaggaagcggtatgtgccggctagttactcaattgacttgaaattcaagctccaaaaactaacccaaggcaacaagggggttgaggagtatttcaaggaaatggatgtgctcatgattcaagcacatattgaagaagatgaggaggtaactatggctcgatttcttaatggtttgactaatgatatccgcgatattgttgagctgcatgagtttgttgaaatggatgatttgcttcacaaagcaattcaagtggagcaaccatttaaaaagaatggagtggcttagaagagtcttaccaactctggttc

SEQ ID NO: 6054 - DNA, 372 bp, Glycine max
  unsure (1)..(372): unsure at all n locations
agctcttcgattcattctatgtacccgtagtgttccacattgtgtttcgtgcatttttattttcgttttgtttactttttataccccctgttgacgtgcttaagtcattttacttaagtcatttctcgcttaacttaaaaataaaataaatttccaccgaacgtttgaattgtattatccgttaacttcggttaaaatgaattccgaccgtttggtcgtgccgtaaccacgttggaaatcaaaaagaggtaaaaaaataatataataataaaaaaaacatcttttagtaaaataaagcggaaaatcaatcggacattntctctttgggatttctcattcttaatcgaattgattaataactaaagtgaaact

SEQ ID NO: 6055 - DNA, 449 bp, Glycine max
acatgtggtactaggtggtggtcgggcgatggtgcactataagttttccacatccacaatgcgcgcataaacccaccatcccctgttgcccacctccaactgagctcacgtactcccacgtagctcatatcctcgtttctctcaacaccaggtccccatcaatcctcccaagcttccccaacatcaaagtaatacaacattcacacagcacaagctatcacagctaagcaaaacagggcaaaggcagaaaactctgcccaaaacaccaaccaaaatcacagcttttcacatacaaataccccagaaacatttccttcgttccaattcgttaaccgttgggatcgactcgaaaatttactggaagtctctagtacttaagcctacattgtgaccgctgggatctactagcaaacatccagaactcattctgcactacaattgccacaggc

SEQ ID NO: 6056 - DNA, 392 bp, Glycine max
atcattataatgaaaactcaaaaaattatatgctttaccacttttatttgcctttttcctctcttttcatggacttctagatgtccactccttgaacacatccactcttacttccaacccagactcacctgctcagtacttgattgaaagaaaacatttcaaaagcaggaaatatcaataaataaatgatattagatttgcagcataacatttcagactagaccatttctacaacaacataaactccaattacatgatgtgtagtcagaacaaaatccactaggaataactgaaaatgctaataaattaagatcaaagctgttctttcaactaaaaacaacaacatccttgcaaaaataaaagaaaatgacaaatcatcattggaacatagt

SEQ ID NO: 6057 - DNA, 461 bp, Glycine max
  unsure (1)..(461): unsure at all n locations
acactctntgtaccaccaagttcctaacttgttcacttttaaagtcctgctgagtgagtataaagtgacttgcaacaatttggtgagtaattaaacactcatctgtatgtcaaattttaaaatcatatacatatctaagatgaatttaatgttaattttagaatgtgtcgagtaccatgtactcatttatgaaagccgtatgtttcacctatctgaatttggatgggattacagagtgcaagattgtttataataattggaggaagactacaaaaattggaaatagatgaagcacttttgcacaatcataaaatttgcaagctggtatttgagttctcagatacaacttctaactnttttattttggaatttgttgtaattaaattacattatattatactattatctgtaaaattttgtttatatgtactctnggtggtatattttgtttataagtttgg

SEQ ID NO: 6058 - DNA, 369 bp, Glycine max
  unsure (1)..(369): unsure at all n locations
agctncgacaactcgtaagttgttntatgctttatttgcaaccaatttgaaccgttggattaataggaccgggtctgatcatgcctataggaatcataatttttgttgtagctgctgaagttaaaggcagacaaagaataacgaggaagaaatgagaaactattctccttaatatttgagtctatgtgatgaatgggaagaaaaacacagaacattatgcagcaacagaacaatatgcagaatcaaatgatgcagcaaaatcagagcatgaggtagaaccaaacaaggaagaatgccaaagggccaaaagggaaattaacaagccttattaccttaaggactttgtccgcaagtaatggagtgagcatg

SEQ ID NO: 6059 - DNA, 465 bp, Glycine max
  unsure (1)..(465): unsure at all n locations
gtcactatccataaagggagtgcataacgtttcatggtcctttnggtaatgtttctgttactcaaaagactgtcacaaagtatgaagcagcctccccactcacacttactcaccataaatagttgaaaacaatccgtgtttgtaccgaacagggactctctccccccttcccagaactaaaatcagatattgttagagccatgtttcaccaacataaagcaaatgacaaccacacactgttttattaccaccctccaagcgtgggacccaaatccaatggctattctaaaggctagctagctcacctacttcatttatatttacaccttttcttatttggatntgttatccagtccaatcactagctaaccgtccactctcgagcacattgcatgtgtggaaaatggaaataggaaacatcagtgtatagaaaataagaggatattatatctgttttaaaaaaca

SEQ ID NO: 6060 - DNA, 332 bp, Glycine max
ctcttacgaacaaagaggataggcttacaggctttagtgtccctcacctgagaagtgcttcacaggcagatgctcttccagtcattggagtcaatcttgtagaaagcataatactcctcctttgtgatctcctaaggctctgacatccaaatggccttatgcttgttcaccaacgagcattcatgtgacacttccttgctgaggaaaaaaaaatgtgacacttccttaatcttctttaaattactttcttccttctcgttcgtcttcgcaacatgctccacctaagtacattaaaaaattagatattgaagtcaaagtggtattcaaaaata

SEQ ID NO: 6061 - DNA, 436 bp, Glycine max
  unsure (1)..(436): unsure at all n locations
agaggcagactntggaaacaaagggttttcttttaagagtaggatagagtatatgcactccaattttagcaagttagagaggatttcagctcagaagtaaaattgagagatgtcatatcacaagtttctaattttaaagatctagaatcaatcatacaagatgatggtaaaattaatgagaatgtcacacatacgatacaagccggatgacttaaatggagaaaagtattaaatttttgtgatcacaaagtgcctaccagaactcaaaagcaagttttatgtaccactatatgtccaattatactatattacagtgaatgttgggctcttaagggacatgggagaaaaatatgagtaatgaaaatgttaagatggatgtaatcatacaagaaaagatagaatatgaaatgacattttacatagattggtataatat

SEQ ID NO: 6062 - DNA, 378 bp, Glycine max
  unsure (1)..(378): unsure at all n locations
agcttggatatatnttgtgtagtaatgctgtattaaactctgcatctcgcgagcatcactcttaaatatttatgtcttgagctcttcttctccagggtcaataatctcttggtggtccttgttcctggatagtagtagttgaaacttgggtctattgagagggctctatggtacaaaggatcgagctgccaatagggtgcactgcaagtgccagtggcatgtgattaagtggtcattggtgaggccagatgcttgcatgaatgaatgaaccactgttggaccaacgtacctaaagcccctcctcaccatgtctttgcttatgctctctgattttgatgtcttcactgaaatcttcgggccaaacttgtattgagtgga

SEQ ID NO: 6063 - DNA, 305 bp, Glycine max
  unsure (1)..(305): unsure at all n locations
ttcgagttacttaacaccattggtggtaatccatgaantcctaacattgcagaggcaaaaaagggattattgcacaatctgtaaggtttcgtgacattacggaaagaaaataagtgtcgttatgtaatccgtaaagtttcgtaacgttatggaaaaagaatcagaaaaaaaggcaaaaggggtattgtatctagtaaaaaggggtgtgcaaatagcaaccaggcccacttgggccttcanggtgttccaacagaaggcagtgccttctggtggaagcaacccatcttgcttgggcaaactgggcg

SEQ ID NO: 6064 - DNA, 283 bp, Glycine max
agcttgtcgtactatttcacacaaagcgcattctctcttgggttgtttcgtaatggttgctttgacctttcctttttccattccgcctctgggcatgctgttgcacagttctcgccaccactattgagacctttgccgcttttcttatttttctgcctcagtgcatgcttctccttcggcctcaaggagttcacggctgaacaatacccgacaatactacgggccttcattggctgtcgccaagccatgtgtatcgagctcaacaaccattgaaatcatcttt

SEQ ID NO: 6065 - DNA, 446 bp, Glycine max
tcttagtttcagatgatgcagatgggcttgtagctacctcatgcactcctctaatgactatggcatcatttctggcgctaaactgttgggagttggaagccatcttctcaattaaatttttggcttcagcaggagtcatgtctccaagggctccaccactggcagcatctatcatacttctctccatattgttgagtccttcataaaaatattggagaagaagctgctccgaaatctgatggtgagggcaactggcacatagtttcttaaatcgctcccagtactcatacaggctctctccactgagttgtctaatacatgagatatctttcctgatggctatggtcctggaagcagggaaaaaattttctaagaatactctcttaaggtcatcccagctcgtgatggaccttggagcaaggtaatacagccagtcctttgccact

SEQ ID NO: 6066 - DNA, 415 bp, Glycine max
agctttcaaaccggctcctgcttcaagctcttgtctctgcagatctttgcgcagcaaaatctctcataattctctagaacttgaatctttctctctctagaaaccctagacatgcaaagctctgaatccaagtccaaactctcttctaaaatctgattttaggcttatcccaatggtcttttttcatgcgcttagctggctcactagcttttcacttttatttgcttttgaccttgttacatcagcacactttattcttttttttaacatacaacttatttggtgtgtgtggtgaatctttacctttttctttgcattctaactgactttacacccccaaattagggggtaaatttgccttgaaccatatggctctctaaaatctaagcaaagtaccggagataatatttaaagt

SEQ ID NO: 6067 - DNA, 454 bp, Glycine max
  unsure (1)..(454): unsure at all n locations
nttcgattcattctatgtacctgttatggtccacattgtgtttcgtgcattnttattctcgttttgtttactttttataccccctgttgacgtgcttaagccattttacttaagtcatttctcgcttaacttaaaaataaaataaatttccaccgaacgtttgaattgtattatccgttaacttcggttaaaataaattccgaccgttcggtcgtgccgtaaccacgttggaaataaaaaaaaagaggtaaaaaataatatagtaatcaaaaaaacatcttttagtaaaataaagcggaaaatcaatcggacgttttctctntgggatttctcattcttaatcgaattgattaataactaaagtgaaactaaggctaanatcaactcgcctagtcaagctcgtccacaaaaataggctnttgaagttggcatttaatttctactaagaaaatgg

SEQ ID NO: 6068 - DNA, 164 bp, Glycine max
agcttggagtatcaatataccggaacatctttcttgtatttaagcaaataatgaccgtattttagatctccgaacggagtcagaatctatcactatgagtgtaagtctttggtaccagccaattcaaggcttcgagttagaaattaatagagtacgacttgctc

SEQ ID NO: 6069 - DNA, 445 bp, Glycine max
  unsure (1)..(445): unsure at all n locations
agaggatgctgaagatgaatcagtggagaggttcttgtgccatggaatgttgtatttgccatcaggattgggaatttgggtgtagtaaggggatgatgagccagggctnggattgtaggaagcacatggacttggatggtaagatgagcaagggcttgctgctgctgatgatccaccaactatctccatgccctctgaaggcttgcatccctaattgtacacaaaatatattttcattaactgatcataatatgtggcatgtaatacgatttccatcaccaaaatcttttcaaatataacaaataaatcatttgtaagacactctaataaactccttcatgttggttccagtaaatatgtggatgtttggtagatttattccaaatcagggaaactcagattaactcaaccaataaaaaaaatgtgttgaaaagaagtaatgcac

SEQ ID NO: 6070 - DNA, 348 bp, Glycine max
  unsure (1)..(348): unsure at all n locations
gtacccggccggactgggaagtcatgcangcttcggtggtgcaaccagctgtcgccccaagtcgagcaccgggccttcacaccggaagaggacgagaccattattcgggcccatgcccggtttggtaacaagtgggccaccattgcgcgcctcctctcgggccgcaccgataacgccatcaagaatcactggaactcaaccctaaaacgcaagtgcgcgtccttcatgatggcgggtgatgaagccgtcgccgtgagtccgaggccgctcaagcgatccttcagcgccggcgcggcggtgcctcctcccggaagcccctccggatccgatttcagcgagtccagcgct

SEQ ID NO: 6071 - DNA, 257 bp, Glycine max
  unsure (1)..(257): unsure at all n locations
tagcttgacaaataattntctgaggtagtgtgtattgccccaactattagcttctcataaagcaccaataaattcttgatcactacctagaaagtcttttgcaaaacatgcttccctaaatgtaccatacaccacatcatcgactgttctaatgtctcttgaagactatgcacctttggcagaggaaagcatattatgaaggtaaacaattcgtcagctgaaggttggacccatataagcctgcctattgattttct

SEQ ID NO: 6072 - DNA, 397 bp, Glycine max
  unsure (1)..(397): unsure at all n locations
taggagattataagacgcaagaagcaacagagatatgggaatttcaaaacagttgggggcaattggagttgaagaccacgggaggatggtggagaaaatcatgataatggaggatagagacaggaaagaggcagagaaaaaaaacattcaacagggggaaaaaacatccaacagtatcctgtgaggcgcaaccgacatctaactcagcagggggaatcctatgcatgtggagtgaaaaaacattcaaattagaaatgaaagttatcggaaatgggttcatttggctgacaggtcagtggattaaggaggcactgcangttcatattgtaaccatatactcaccatgtgacatgcagaataaaagaatcctatgggatgccatcaaacaattgaaaac

SEQ ID NO: 6073 - DNA, 330 bp, Glycine max
  unsure (1)..(330): unsure at all n locations
atcaaactctnttctctctttttctctcaattgntcttcattcttcttcctctttttactttcattcttccattttcttacacaaatttcattgctcttccactggtgatgataatggaaggctaagcactcaatcaatccaaggatctactccaaccaaggctaaatttcagttatggtttagtatttctattatttgngattgtttatctttttcttgaatcctattttttattttcatgattatgaatatgcttaggattgaaaatgaattacgttatggattcatttccttatttcacaatttaatcacaaattgtttgatgatac

SEQ ID NO: 6074 - DNA, 429 bp, Glycine max
  unsure (1)..(429): unsure at all n locations
ngtagaattatggtgtacccatcacatgtggtactaggtggttgtctggcgatggtgcacaacaagctttccacatccacaatgcgcgcataaacccaccatcccctgttgcccacctccaactgagctcacgtactcccacgtagcccatatcctcgtttctctcaacaccgggtccccatcaatcctctcaagcttccacaacatccaagcaaaacaacattcaaacagcacaagctatcacagccaagcaaaacagagccaaggcagaaaactctgctcaacacatcaaccaaaatcacagcttttctcacgtaaagaccacagtaacaattccttcgatccaattcgttaaaccgtggatcgactccaaaatttactggaagtctatagtgtataagcctgcattttgaccgttgggatatacta

SEQ ID NO: 6075 - DNA, 421 bp, Glycine max
  unsure (1)..(421): unsure at all n locations
ttcttcgcctaatctgtcaccattgtttntgtatactcgaagttaaattaatagaattgaattgggacacatgtgtgtgtgtgtcaaaacatgttttggatgttgttgaaaatctaagcacaacaacaaagatcacgtgtccttcttacactatcgcatccattgactccgatgcagccgacccattcagctaccaatctctaaacttgcatattggatgagaattagatattaccaaaatcattcagtgttttcttttttataacatggattatgttctatgataattaattttgtctaagagaattaatgtcagtattattctaattcacgactcgttaatatataaatttatttaaaatgtacattagatatacaaagaagtttttcaaagttattaagtatataaactctcttctat

SEQ ID NO: 6076 - DNA, 379 bp, Glycine max
  unsure (1)..(379): unsure at all n locations
tccttaagtcaatctttccttctagttagaaacatattcaagagagaagcaagcatggccttggtcccccttccttatgaccttttgtgtatgagnttttttttaaaaaaaatattaataaaggaaaatatatatatatgaaaaatatatttttgaattgttatttgctttaatttttttagtagtagatcatatatataattttattcatagaattaatagcaaatatttttaaaaattaattattattaaataattatttattaaaacttaaatatttaattaattatgtgaaaaaatctatatccttttaatatactctaagatatgtactgattcagattaactatgaaattaatctcggtcaaaatttaatcat

SEQ ID NO: 6077 - DNA, 405 bp, Glycine max
tgcaagcttcttcgactttgtgtcccaatcgcgagttttgacctccactttttcttcctacaacgcttttccttatgtccgcttgtgtgggtttatggcctaacccaaacttcccacggtttcctctggcgtttatcacgctggatatgccgccgttgtccttgcctaaacccattccgggctcgtaaccattccccaacatcactcgggccaccattactgccgtatcggacaggcaaggttgcccaaagaaggaatcaacagaggcaatgcttaccacctcataagactagaaggttgtatgtaatgactcctctgcgacttccacatatggcatagaggacgggcaactcaccaagatgtcttcctcgccaatacaataaccaaatggaccttactacgaat

SEQ ID NO: 6078 - DNA, 385 bp, Glycine max
  unsure (1)..(385): unsure at all n locations
cttgatgtcaccaattgctccaccattttttctgagcttccctgtttttataagtgaatctcccaattccttattatgttgttcaagttgaacaattatacgttccagttctgtcaccaccatctctntatgtcttattgagtttctcatctgtgctatttcttcatttatcagaattgtcaatagttgtatctatgacttctttcctactctactgagaactttaaaaagtggagtggttaaaaggttcaatgatatgtctatctgacaataacttcgtttaccttctgcagacagtaaagttgtttgatattaattacctctacataataacatgcgcactgactagcacacaatgtctgttgcacacctccagcacaatata

SEQ ID NO: 6079 - DNA, 400 bp, Glycine max
  unsure (1)..(400): unsure at all n locations
aggaattattttaatattntatattatattttaagcaaagttttttaaaagctaaaaatgaatatttttttaataatattagtgtgtccatccatatagaagtgttgactcaagtgtgtgaactgtgtagaggtgtcaacttaagtgtccaaggcaactaataaattgttttaatttgactcttaacaagaagaagtgtatgacaggtgtccgaaacatgtcggacattgtgacacttaaaacaagagaggaatttgttcttcatagattacgtgttttcattaataattacaaaagtatcatcttgttttcacatgttttacattttcaaaantttgcaatttgaacattttaaattgaaggatatatcatancttggaacatccaggtgcattacatt

SEQ ID NO: 6080 - DNA, 281 bp, Glycine max
gctctccctattttgctatgatatgggtagaagtgaagaagatatggttcacccccttaggcacttctctctctctcgaatttgctgaggaaaattattttcgccaagaaaatccaagccgaggcgcttccgtaacgtttacgtaacgtttccgtgagtaattacgcgaagattctcgaccgttcttcaagatccatcgttcgttcttcgttttcttcagcctacaacgggtaagtaccttacaccacgctcttcacttcgttcttatgtacccgtggtgg

SEQ ID NO: 6081 - DNA, 451 bp, Glycine max
  unsure (1)..(451): unsure at all n locations
tattcaggctcatctcggtggtgaagctccttcttctatggtttattccttagtggatggcacctcctcttacctcttctcctttgtcttccactgcatctccatggtggaaaatcaccattaaaggaactcattgaagctcaaagatccatcctccatagaagtcccacaagcaagcttccatcaagtggtaattagagcacaagagcttcaagtaggtgctccttaaacctccattaatttttttgctttaccttatcttccattgttgtntcttcatttttctccatgtatctcctcacatgtcttgtgctaaatgttgttaacatgattctttagagtttccaccaattaaacttgctatagaagcttgantttgatttctatggttcaaatttcttgttcttgttcttgaaccatgaattgtgtngagcttaggttcctttgagtt

SEQ ID NO: 6082 - DNA, 328 bp, Glycine max
  unsure (1)..(328): unsure at all n locations
acagcctttgtggatgaatcttctggagggttttagtgggcctggttgctatttgaacccccatttttactaagtacacccccggcctttttttggtgattcttttttcgtaaagntacggaaacttacgaatttcgtaacgatacttgttttctttccgtaatattacggaaccttgtggattacataatcatcccctttttgacttacggaatgttacggaacctcactaattgtgcaacgatgcttctatttgatttccggtgtgtcacggaaccttacggattgtgcatcaatattttcttttgctttcggcatgtcccggaat

SEQ ID NO: 6083 - DNA, 328 bp, Glycine max
  unsure (1)..(328): unsure at all n locations
gacgcgagactatcttgaagcgtgttccattttacgaatacgcgcggagtcgccaccaacgtttatttgaggaaaacgtcngaaaaaccagaaaagatgcgatctacgaacttttaagtgaaaggttcgggagttgtttttacgcacgacgaaggtattagcaccccacacgtccgtgccaagggacggtagcctttaatcgaatgtgcaaacatgactctgagtatctatgccccctttttatgtctctatatcctttataccctttgtatattattctctttctgtggtcgacaagggtgttatcctttgctcctacgtattcctc

SEQ ID NO: 6084 - DNA, 364 bp, Glycine max
  unsure (1)..(364): unsure at all n locations
agcttcagggaattctaattccgcctgacatataaaaaattaggttttattgtaagtcaattataaatcttggctgataaagaaaatcaaagaagcaaactaaaatacctgaatatcctcccaaatcatatccttctgagcagtagggacttccttccatgtctcgtatgtgatgtcaaccttatcatgagcgacaacccccaagtatgttcttaatttcttcttatggngaccatcggccttgctggttgtagggtcgatgttgaccactggtctctctgcccaaggtggtatagtggccaaagatcatagtcgtgtcactttgcgtgtccgattctgggtggacagagacattgatgctact

SEQ ID NO: 6085 - DNA, 425 bp, Glycine max
  unsure (1)..(425): unsure at all n locations
tcacatatccacaattccttattattgcctaactcacaatttataatccccagtggagtcgccaactgtcgcaacgtgcccttcgcgggcgagcgagggcgacgctcacgggtgcgcttcccaaaggaggaaagatgcacggagtcgccaccaacgtttatttgtgtaaaacgtcgggaaaaccgaaggaaaccggtcaaaatgaaaattctaagttcgggagttgtatttacgcttaaggaaggtattagcacctctcacgtttgtctcaaaggacaacaacctatttttcagaattgtggaaattgtgttatcttaacttttatttctttttattttttgagggcgacaaaagcggngctcttgctcctacgtatcctcctttggagaggaaatcagacctacgtagttcttccttatgcgtg

SEQ ID NO: 6086 - DNA, 368 bp, Glycine max
  unsure (1)..(368): unsure at all n locations
agcttgtaatctatttcacacatactatatattgattaccagaggagtttttcagaanacattctcaacagtcacatcttttcatctgtttcttaaatagccatcaaaggcatatatatatgtgacttgagatacgaatttgacaagagttttgaagaacacaaaggtcttatcctcttaacaagcacaattgttttatcctcttacacattccatggccaaaacacttgtgattcaatagagaattatttgagtgctcaaattgttcaatctatctctttcaagagagataacatcttctcttcttctttattttgaaaagggattacgagaccgatggtctcttgttgtgaaaggattctaaacac

SEQ ID NO: 6087 - DNA, 438 bp, Glycine max
  unsure (1)..(438): unsure at all n locations
ctttggtcaattggcttgtatatactaccatggccttcatcatgtccacattcatacatttcattctaaaattcagagattgatgcaaagactattactcaatgctagtcgttcactcacagtttaagatcacactcccaccggttatggttcaagcttttctttctcaatcaacatgtctactgactaaaaattctaattgcaagctcacattcttgttctttctttgtctaacatacacactagctcaaacttatgaagagaaacacaatcttcatcacaatcatgcattcaatccaaaatcagattataacacccatttcacaaaaagataaaagtgtttcactgcatattcatcaagatcaagtcaaactattccatatgcttcaaaacatgcatactctntccatanaaagcacaagtgtataattataaatg

SEQ ID NO: 6088 - DNA, 401 bp, Glycine max
agccttgtgtaatcgattacactgatttggttatcgattaccagtgattgtttctgaataaatcaaaagatgtaactcttcaaatggtttttgactttttcaaattggttttaagtttttctaaaagtcaaaactcttctaagtggttctcttgaccagacatgaagagtctataaaagcaaggctttgttttgcattttcaatcaatctttctatcaatccaattaatcttatacaatcctttacaagccttgaatcactttatacttcttcttcttctttgtgccaaaagctttccaaagttttctggttttctaaaccttgaaaacttgtgctattcattctttttcatctcttctccctttgccaaaaagaattcgccaaggactaaccgcctgaat

SEQ ID NO: 6089 - DNA, 461 bp, Glycine max
  unsure (1)..(461): unsure at all n locations
ntaaggttagatgaaataaaatgtatcccaagcanccatttttttttgttttaataatttgaggtcattaaagtttagatgaccatacctcaagtgctacagtatggactcatccatattctcacatttcaatgcattgttttgcccaaatggcataaatagaggaaatactttattaggagccattttgatagaaataatttggccctttcttttatgaatgatattacatttatcatcatcaaagatgactttataatttttatgaataagttgaccaacacttagaagattttgagtaagacctgncacataaaaaacatcatggatatatnntttgctaccatnttgagttttaacagcaatggtgccttttnctttcaacttttgaacattttcatcaccaagtgtaaactttgaatttattgtctcatctaattgcacaaagcaactttttgttt

SEQ ID NO: 6090 - DNA, 302 bp, Glycine max
tgtgcctcttcacgtctggaatatgaatgtagcatatagatcttaagacccttatgtgctttgctgatggcttcctcccgttccaagcttcaattggagtcttgtcttttacagacttagttggacatctgttgagtatgtaaacagcagtgtagactgctttagcccagaatgtgttaggtacttgagcatcgatctagccatctccataactgtgcgattctttctctcggacactccactttgttgaggaggatatgcgactgtaagttgtcgctcaattccttcatcctcacaaaatc

SEQ ID NO: 6091 - DNA, 152 bp, Glycine max
  unsure (1)..(152): unsure at all n locations
cttgcctcanagaggtccaggaaggatatgttggcctattgaactanttccgctcctgaatatgacagacaccgctttaggagcgctgtacaccagcagcgctttgaggccatcaagggatggtcgtttctccgggagcgacgtgttcagct

SEQ ID NO: 6092 - DNA, 441 bp, Glycine max
  unsure (1)..(441): unsure at all n locations
tgtccttggtttagacatgattgatacattatttgngacttgttatgattcgattgggcaaaattggatgaaggcaagagtggttttctaaatctgcactttatgcagaattttgctgttgaaatgtgcagcagaattttgtataagtgcagaaaaatgcttgtgtatggctggttgtgaaaagggtagtacatatggtgttttggacattttctagcagatcccaacggtcaaaatatagacttatgtactagagacttccagtaaaattttcgagtcgatccaacggttaacggactgtaatgaagagaatgttactggggtatttgaatgtgaaaagttgtgatatcggtttgcgttttacgtagagttttctgtctttgccctatcttctggctgtgtaggttgtgatgattgatgttgaatacttgatgttgtgga

SEQ ID NO: 6093 - DNA, 370 bp, Glycine max
  unsure (1)..(370): unsure at all n locations
tcntatcactgncagaatgcacacatgaacccacttagaggtaaaggatgagtttatcacaattgatgttagaataaacatgtataagagttcttnaaagaccaaatttggagtttattttgggatatttattgtatattcttcttgcatgattacgtgaaattgttgatgggtattactccgcgtggattgagagatatttttgaataatttgtttgcgttctgaataagaataagcgtatatgttattttgagattatgaaagtatgattgacaatgtgttataattgagtaaatggatatatgatgaaatgagaattatatttacctttgaaatattaatatggtatggagatggagtttaatgccg

SEQ ID NO: 6094 - DNA, 424 bp, Glycine max
  unsure (1)..(424): unsure at all n locations
ctataaatctcagcttgatacacttcttcatttacgaatctattcagaaaggaactctcggcatcgatttgatacaacttgatgtctttatgtgctgcatatgataagagtattattatggcttcaagcttgctactagtgtaaaggtttcttcatagtcaatcccttcttgttgattgcaccttcagcaactagtctagcctgtntgactacttctccttcttcattgagcttatttttgaacacccatttggtttcaatgactgactgattctttggaggggaacaagattccaaaccttgttcttagtgaattgactacatttctcttccataacaaacacctaagaatctngactcaatgcttcatcaatattcttaggctcaatggttgagaaaagagtcattattcctttttctctta

SEQ ID NO: 6095 - DNA, 517 bp, Glycine max
  unsure (1)..(517): unsure at all n locations
aggcccattgaaccccattgagnntcagggaccttntanagaccacnccgcnngcacgcaaatgacccctttgaggacccgggacttcgagtattgacctgcaggcatgtctaccttgcacctcttagtatcttttagagtttttagcgacgncnananggancanggagnctgtgtctcagngggatatcacgttccatcgcttacaattggtctcggcccaacatgaaaatcggtgttatgatcattcacgcaaggtcctatcatcggaacgttgctgcttctcgcaaaggattttcccgtgtcactagaatgcatgatcgatgcatcgatataggcctctatatgtacaagcaaatattcgctcaatggtatacacctctacaatctaaaacgaagttccttttttcttctaacgcgacaattgctgaatgtttaatcaacttgctgttgaacctgcatctaacgaccccttgaattttctatcgaaaagccggcccttttcccccatcaccct

SEQ ID NO: 6096 - DNA, 404 bp, Glycine max
  unsure (1)..(404): unsure at all n locations
ngtaaagaattgattgaataagtgtaaatgtgtattgaaaattctatcaaagccttgcttttatagactcttcatgtctggccaagaggatcatttataagagttataacttttagaaaaacttaaaaccaatttgaaaaagtcaaaaacctttttgaagaggtacatcttttgatttattagaaacagtcactggtaatcgattaccaaattagtgtaatcgattacacatagcttttgtgtgaaaggatgtgactcttcacttttgaatttgaatttcaatgttcacaggcactggtaattcgataccaaaacactgtaatcaatacaactttttgaaataatttaacattgtaattcaatttgaaactttttaaaacaattttctactggtatcgatacac

SEQ ID NO: 6097 - DNA, 329 bp, Glycine max
tttggttcatgtagattggttttgttatcattcatagataggatgatcctaatccctaaacttaagggatagattcttgctcactgtatataaatattgcactcattatcataaaaaatagcctaatccctaactcaaattcaataccatattgaggtggtgcattctggcaatgattgagacttctgcccaaaactcagcatctgcacttgagacattcttaaggcacttcactaccaccactctatggcgatacgaatgtagcatgccatacaaatgtaacaagccatacaaatgcagcaagcatatgcatactgtatcacatacat

SEQ ID NO: 6098 - DNA, 405 bp, Glycine max
atctctaacagttctcggtttgttataccccaatatattttagttcattataaacactctgagatagatcgatagatatatattgagagagagagagtctccttgtattatgtctttcgtcagtgataacatacacaacgtgtgctactctcttcttcttctttgacaatcatgttccttattctgaacttattgtctgagtcttaatcacaacaaatatcatgaatgacagatttgaacctatttaaaatataaaagaccgatatgaacgtgatcaaattcataaaagatcgatgtgaattaatttttaaaacataaacttcatttataccacattatcactttgcttccaccctctacagacataatgctatatgtggaaagaactaatgatcattttaaaat

SEQ ID NO: 6099 - DNA, 316 bp, Glycine max
tgcgagacagagtctctcatgtcagctattttcgccaagtaccgagaagagttaggtctagccacggcccacgagcatagcatggcggatgagtctgcccaagtatacgcggaaaaagaggctagaggaaaggtgagcgactctttacaccaagaggcaaccatgtggatggatcgggaagctcttaccttgaacgggagtcaagaacttccccgattgttagccaaggccaaggcgatggcagacacctactccgcccccgaaaagatgatgggcttatggctattgtcccatatgatagactaacggccacata

SEQ ID NO: 6100 - DNA, 434 bp, Glycine max
  unsure (1)..(434): unsure at all n locations
ctctaganaaagaagctagtaaccacactagttatttcggctcctaatngnggttaataatntgaattaatgtgtgatgctagtgactatacgataggagcagtattaggacaaaaatggaatggaagatttcatgttatccactatgccagtaaggtgctaaatggagcccagatcaactatgcaacaatggagaaggagatactagcagtgctttatgcccttaaatcaatcatatcatgtaggttcaaagattattgtgcacactgaccatttagctatataatatctactcaccaaagtggattccaagccaagttaattagatgggcccttctactacaagagtttgatctagatatccgagacagaaggggtgtgactgtgacaccctctaccccgacatatacataaataaataaaatatgtaatat

SEQ ID NO: 6101 - DNA, 326 bp, Glycine max
aaggtgttaggtttgagaacgaaagagaagagacctcttgcaagggaatcatcaacgatgagttgtgtgtatggttgaagcacgttacgagaattttcttcttatttataaatgcacattcattatcactatccattaatagtatggctctgcataattttaagttactatttgacgtgaatttgttgtgtctaaagatgtaaataactatgtttcaataaagcactatgaatatagaacaaaatatttgcttaattgtttaatcttctaaaattaatatgtagtttctttctttttctaatgcgattatcgcttaattgtttaat

SEQ ID NO: 6102 - DNA, 463 bp, Glycine max
  unsure (1)..(463): unsure at all n locations
atctatatatggttanaacaagcttcccgtcagtgttaccttaagtttcatgttataatttcttcatttggttntgatgaaaaccccatggatcaatgcatataccacaaggttagtgggagtaaaatatgctttcttgttttatatgtagatgatattttacttgcagccaatgatcggngtttgctacatgaggtgaaacaatttctctctaagaattttgacatgaaggatatgggtgatgcatcttatgtcatcggcattaagattcatagagatagatctcgaggtattttgggtctatcacaagaaacctatattaacaaaattctagagagatttcggatgaaagattgttcaccaagtgttgctcccattgtgaagggtgatagggttaatttgaaccaatgtccanagaatgactttgagaaggaacanatganaaacattccttatgcttcag

SEQ ID NO: 6103 - DNA, 468 bp, Glycine max
  unsure (1)..(468): unsure at all n locations
gagtccacctcgcatgtcatgcaagcttgagtacctgngtagaaacatctggagttgatgagaaggtgcttcaacagctattgcattgtggctattattgttgggatgagctcatacaaagtagtcgttccttagttgtataccttgcccgaaaatacaggggtatgggaatagcattggatgatttacttcaggtttgttccaaatgtcattgctcatgattttatttgtaatttgtgattgtttcttgtgaggacaagtttctgtttgtcttttacctatttgtgcactcatcatatacagttgtaagttatatcgcaaagaacccgagtttcctgattaatagtcgatattttttagagcttacaattaacaacttgtgagagttagaatcacagctaatacttcaaagatatcagtccaatgaaagaaaggtcatgtacagaggcatagcataagttacaacta

SEQ ID NO: 6104 - DNA, 525 bp, Glycine max
  unsure (1)..(525): unsure at all n locations
tgggaatgaaanccnatcgatnaccgnatcgatatcactagcataaccntganaggttgaataaaatacggtcaatcactgctgagaatctattgccatatgtcagtatttctattcacagtgcacacccgaatcacattaatagctgagtaaatcaatctggccactgctaatcgaggacatcctatggtgatctattacgagagagctactttgttgtaataacctccataacggatgaaaacatggccaaacctagtgcgacttcaactggaacccgcatgcgaactaatatacaccttcttaagactctacagacagactagagcatacatctagaatatatttggcgcgaatgcatgttataaaaccatgtgatatatgtatactcttcggcgatatcatcacatatagactgatcctcagctacagacagcgtttgattaactggcttcttctgcagacatcctcgcttgatcatacccatgtgacggcctgctaattgcactatcctacttatcgcct

SEQ ID NO: 6105 - DNA, 305 bp, Glycine max
  unsure (1)..(305): unsure at all n locations
ttcttcttgcgtagcctctcttggtgctaatataatcctttaaacaaatccctcttattactagctattttgaattctttagttcctgaatgtacaaccttcaaattggtgctcattcccctctttgtttcttgcaaaaaataaaataaaaaaaagtacctcagcaaaagataatttatattataattaagggtcagtactagatgtattgaagtgtacaacatatagcatatgcagtgagaaacattgcccanataagactgaatacaatgacaggatatgtcaccccccctaataaattccta

SEQ ID NO: 6106 - DNA, 140 bp, Glycine max
  unsure (1)..(140): unsure at all n locations
ctgcttatattgcacaactccttcattattttggcatagttcgttaattgctttattgcatccaacagaggtatgtttacctctacttttctaaacgnttccaagatctctttctcttcctcttccatttttttgttgga

SEQ ID NO: 6107 - DNA, 410 bp, Glycine max
  unsure (1)..(410): unsure at all n locations
cactattatttgagaaaccttcagggtgattcatataaacctcctcctctaaatcaccattaaggaaagctgttatcacatccatctgttgcaactcaaggtcaaaatgagcaactaatgccacgattataccaagagaatctctcttagatactggagaaaaagcctttttgtaatctattccttccttttgagtaaatcccttagcaacaagtcttgccttgtatctctcaatgttgcctaatgaatcctttttggtcttaaagacccatttacatccaatggccttcgccccattacgcaactctacaatgtntcaaacttttgtactctggatggaacccatctcattcttcatggcatcataccataaaattgacattttaccacccatggcttgaataaaaatg

SEQ ID NO: 6108 - DNA, 447 bp, Glycine max
  unsure (1)..(447): unsure at all n locations
tgtgcattcaatatcctgatgatggtattccatatgttcttttgactggactaatacatttgttgcccaagtttcatggtcttgtaggtgaagatcctcataaacatcttaaggagttccatattgtttgttccaccatgaaaccccctgacgtccaagaagatcatatctttctaaaggtttttcctcattctctagagggagtggcaaaagattggctatactaccttgctcccaggtctattttcagctgggatgaccttaatagggtgttcttggagaaattcttccctgcatctaggaccactgccatcagaaaagatatntcaggcatcangaaacttagtggagaaagctcgtatgagtactgggaaagaatcaagaaatngtgtgcaagctgccctcaccaccagaattctgagcaactccttcttcaatatttctatg

SEQ ID NO: 6109 - DNA, 299 bp, Glycine max
agcttatcatagaagtatcttttccctcgattatggccactaccacctcatttcgtgctttatcatggcttaactggtggatcgcgtgagcaatcattggaaggtggttatcgaaaggaaagactatagaaacagtttgaggaagtgggtacttttttatcacgtaacaattagtgctctctgaattcttatgttttttcaatttttaaaattatttatctccaaattcttatgtttgtgatattcaagtgaatctatttaaaaaaaaaacaaatgaaaaatatatttggttcttatct

SEQ ID NO: 6110 - DNA, 439 bp, Glycine max
  unsure (1)..(439): unsure at all n locations
tcatgatgaatccagattgattcatagaagttttgatgatatctaaggtaatgactaaaagctcaaaggtcaagaacactttatgataacaaagatgatgatctcaagaatcaaagaatgagatcaagatgttcaagattgaatcaagaacatttcaactttcaagagaaaatttgatttcaagaatcaagaatcaagattcaaggttcaagcttccaagaatcaagatcaagattcaagactcaagattcaagaatcaagagaagacttaatcaagataagtatgaaaaagttttttcaaaaactgagtagcacatggatttttctcaaaacttgtttaccaaagagtttttactctctggtnatcgattactagattattgtaatcgattaccagtagcaaaatggtttcaaaaagctttaaaatgaattacagcgt

SEQ ID NO: 6111 - DNA, 367 bp, Glycine max
agcttgatttgtgagttgattctagccttagttttactttggttattagtcaattcaatcaaggaaacttccaaagaaaaaacgtccgatcaattttttgattattctattgaaagatattttgattattttattattattatgccttttttttgtttaaccgaggttacatcgtgaacgatcggttagattttgttttaatagtgattaaacgagattacaatgcaaataatcggttgaaattcatttcatcatttattatgcgagaaaacggcttaaacgatcggttaaagctccgtaaaaatggaagaccatgtaaactgaaattgaccgatatcaagatgagagcagcaaaaaccccgaaatg

SEQ ID NO: 6112 - DNA, 397 bp, Glycine max
  unsure (1)..(397): unsure at all n locations
tgtaagttatatattcaatatattttatatgtgttatttatgtagatgtttatatnttgataaatgaatagttttaggtagtataagataacaattntgtatagtttagtttgaattgttaatgttatatatgccagattattttttgataaatgaatagttttaggtagtataagataataattttgtataatttattttgaattgttaatgttatatatgccagattatattttgataaatgaatagttttaggtagtataagataataattttgtatagtttagtttgaattattaatgttatatggtagattagatttaggtttatatgataaattagtgttgcaacctacccttcngcgggagggcgacacgtgactcgcgggatgcgtgtt

SEQ ID NO: 6113 - DNA, 133 bp, Glycine max
ttacattattcttgagttattagacgaatatgttaaactcaagttattctaatcacataatctaattgaaacattgtcatcctaagaactatcacttctatcacaacttctttgagctagctcagaaatccca

SEQ ID NO: 6114 - DNA, 447 bp, Glycine max
  unsure (1)..(447): unsure at all n locations
tcaagaaaaagatggcctcagctaattccttatttccagaagtgaattctatcaatagacctccaatctttaatggagagggttaccactactggaaaactcgaatgcaaaattttattgaggcaatagatctaaatatttgggaagccatagaaatagggccttatatacccaccacagtagaaagagttacaatagatggtagttcatcaagtgaaagcataactatagaaaaacctagagatagatggtctgaagagggtagaaaacgagtacaatacaacttaaaagccaaaaacataataacatctgccctgngaatggatgaatatttcagggtttcaaattgtaagagtgctaaggaaatgtgggacactcttcgataacacatgaaagactacagatgttaaagatctangataatgcactaactcatgagtatgaata

SEQ ID NO: 6115 - DNA, 523 bp, Glycine max
  unsure (1)..(523): unsure at all n locations
agcnncaaccgagnnntttgaaacctttgaaatcgcnnncnttngaganccngccanctttagaaatgacgccttcgagcactcgaagacctctagagtttatctgaangcacgctttcttgctaacccanggaagttcctaagatctcccacacttgttggggcgggccattcttggatggccttgatttactcaaggtccacttggacctcatttctaccaactacaaaccctaagaaaactatatgatctacactaaaaggacacttctctatatttgcatacagggtggttttcctaagaacagaaagaacttgcctgatgggtaaccttccatagtcatcacaaatagaacaacaaaaaaaattgctcaaaaagagaagaaccgagttgagaaagaataaactcaatgaacacgttagagaaaaagagagagaagaagttgatctaaacattcactacaaagccctaaaaatgggtngtttgacaaaaatgacttaacctaacaactaattactaact

SEQ ID NO: 6116 - DNA, 449 bp, Glycine max
gttgagtgatttcgttcccttctattttatcacacatctgtgttatttgagcattatcatatgttgtacattctattcactgtgctacttcatatcccatgcatgaataacatgcctataatctggttaaataatgatttgaaagtatgtcctctcttaaggaacaagtaaaacaaggttttaaattgtggttgttgtttgagactttgttgcaattcttggtattgcggaaaattgcagacaaaagtagcaaatatatccacaattgtgattgtagatacccaaaagtagtgactgaaaccttggttatagaccttttgaaattgttgtacgatagatcatagttaagactgaacccaaccattaggcacatgagaaaatgagcaaagaaatatgtcgagagtgacatttaggcaacaactatatccaaataatgttcagaaacacac

SEQ ID NO: 6117 - DNA, 441 bp, Glycine max
  unsure (1)..(441): unsure at all n locations
ntcataatgtccgtggaaaanactgtgctcttatcaacaatgtgtcatttctttgataccgaccgcttaaactactataatgtgactaattcaactaagcttgtaatggagaatgttgaactgtacatgaatgcacgtgtgtctccaacctctttgacctattatggattttgcttgggaaatggaaactacacagtnaaactccattttgcagaaataatgtttactgatgataaaacatatagcagtcatggaaggcgtgtatatgacatctacattcaggttcatatttttatcattttcctaaattggtcaaccacatgtaaattttgatcaaaattggtaaattctctttgggaacttcatgataccaaattcaaatacaacaaccacaacgactacaacgccttatccactatgtggggataccaaattcaatac

SEQ ID NO: 6118 - DNA, 366 bp, Glycine max
gatgtaagatattacaaatacacgtagcggagatgtgctatccacgtctagaaacctcaccctcgtctaaaactcattcaaagttcagcaagacggcttccccgaaaagcttagttgtttaatagctgctccacgctcaacaacttgctaaaaacctacctcccttaagaaaaagagattacgggtcagaggggctctcctgactgtcgaagcgagccatgcggctcactatccaagcacagccttctagaggatatactcagggcccacacggcctgggtgcttgaccactcatttctactactaccaccctatgctgatttttgacgagctatgaaaccattacaggacaccaaaataaactgg

SEQ ID NO: 6119 - DNA, 369 bp, Glycine max
  unsure (1)..(369): unsure at all n locations
cgcaattaacatgaatggccttcctaatattacaggaatgtttgtatcttcacaaatatccattaccacaaagtctatcgggaagataaaatgtttcactctaaccagcacatcttcaattactccatatggtctggtaatggagcggtcagcaagttggtaagtcatcttagtgggcatgatctccaactctcccaaccttttgcacatggagagtggcattaaattaatactggctcccaggtcaataagagcctttcacacagtgacttctccaattgaacaaggaatagttacactcccanggtcttgatgctggggttgaaggatcttttaatcacaacactacaatatcctttcactatgata

SEQ ID NO: 6120 - DNA, 107 bp, Glycine max
agggtgtccacatatttcatgacacacatcaacatgatgattgaaattttgcaaagtggcatgcatgccccatgtgacactcagcataagttttatggcatgtgaca

SEQ ID NO: 6121 - DNA, 475 bp, Glycine max
  unsure (1)..(475): unsure at all n locations
cgtatctactggcacaaanagcatgcagagatatgttaaattgatctcagttataccanaatatgaaagaagcatatgatgaaattcagactccattggttccccaaatgccaactacattntcaaaggtgtccataattcaagagctggatgcaacggcatacgaggaagcacctgctatcgctttcaacatgtcctttgaagtaagtagtttgaaccatactagtttaactntaaccaatattagattgagaacacactctcttattggttaacatttatagcaaactacaacaggagtgggaaattttttntatttccattatatttcaaccaatagtagagtgttaagaagtgtattactaacatttcttatatcagaatagtataaaaatgaagaagcatacagtgtntntgccttatttaagtganggtaatttattaagcctcaaaatcaacttattacttagttaca

SEQ ID NO: 6122 - DNA, 313 bp, Glycine max
  unsure (1)..(313): unsure at all n locations
aaaggtctgtgtggtgatcggcagaggagcataaattacagagtctggctacanggtgcagatttntattcatggccagttgggttaccaggttaaccaaggcatctagtttaccttcaagcttcttagtctcacctgatgaagatgaattcgtggctacctcatgcactcctctaatgacaatagcatcatttctggcactgaattgctgggagttggaagccatcttctcaattaaatttctggcttcagtaggggtcatgtcttcaagggctccaccactggtagcatctatcatacttctctttcatgt

SEQ ID NO: 6123 - DNA, 341 bp, Glycine max
  unsure (1)..(341): unsure at all n locations
gctcgagatgaggaagtgttgaaaggtgagacttcctgctnttattgttgaccacagagtggtacctggagatatgtcgcggtggtcaagagaccttggggacgtcaggtggggtgctattgcccaaaaccaagcttgaccaatcccgacccaacccgggcatagtcggtcagtgagaacctgtgatgtacctaagcaggcgagctcctgccaatcgacagataaaacgaatatagaccacaaagcaaggaggcttgtggtggctggccagctgtgaactttgattgatatgtgggttatggcctctggtaatcgattaccaagggtgggtaatcgattac

SEQ ID NO: 6124 - DNA, 352 bp, Glycine max
  unsure (1)..(352): unsure at all n locations
tatgcaagttcattgttggtcgtcaaaattaaatttctttgaacattatcgatattatttaacaattctaatattaaattntcttgagagtgattaaacctcctggtttggtctgcttcaaatcaaagaataaaaatgccattttgcaaacttctattaacttctaaatataatattnttttaattattgtgatcatccctggatcaccatgagtaatttatgaacatcaaattatagtgtaaagagtaaaatgccatggagagagaccgcanacatggngtcccatgatataaattctgagacagtcttagggcctctanatngcaatcaacagtatgcccatgaagaatg

SEQ ID NO: 6125 - DNA, 458 bp, Glycine max
atgaaagggtgagcaagaatggtacgatcattaatatctatagtggagaaaggagagcagttctcataaaaaataacatgtcaagacacttcaatggttcgtgtatggagattgtacacaaggtaacctttcttgtgggatttaaaacccagaaacacacaaggtaaggctctaggatcttgctttgttctgttagcactgagagtgctagtgtaacatagacagcaaacaactcaaagtaaattatatatcatataatgcaaaatagagtttttggtatggtgattcatttttctaaaaaggagtacgaataatgtgtatcaaggtagcagtatgaagtaaagcataggaccaaaatatgtttggaagggtagactgaaacaaaagggctcgagttacattgagtaaatgttgcgattttcgttcaacaatcacattttgttggcgaagttccacac

SEQ ID NO: 6126 - DNA, 470 bp, Glycine max
  unsure (1)..(470): unsure at all n locations
agcttcagctcttagcccanactctctttcacaaatctgatttcaggcttaaataggtggtcttgttcgtgctcatgcgcttagcacaattctggaccgattagcgcacattagtgaatttcggcttagcgcgtgtttttctcgcttagcggatggactgaagcggtgcgcttagtgagatgaagcggtgcgcttagcgaacttgtacaactcatcttcttccagattcttccttgcacttagccaatgagtgttgcgcttagcagacgctcgctaagccaactgattggcttagcaagaaggtgaaaaacaacacttttcanagcttgtctaattaacctgaaattgagagaanatgattattaaacacacaaaatggaagtactaagtatttattacctatacttaacagaaaattcttataacactacannaataaccataattggtgaaattttgatacaattaca

SEQ ID NO: 6127 - DNA, 392 bp, Glycine max
tattactgcctctagggaccactagatctattacatcatcaagctgagacatagtataattagtgacaaatcattgtaaaacaactaatttgaggatcttatttttactagtgatatccaaccttaagtaggtcaggaatctcatctctcgaagtcacaagcccaataagtttgtcaccaacagtatctggcatcactgaagtaatgacctacaataaaagaagaaatacagatgagagaaaatatgtgtaagtgaattaatgacaaagaaacaacagtcaattcagatccagaataatgtcataaaacaacaatctcaactaaaataaatagatattagatagtactaaccttgtgtaagattgcatgtgatcgtccggcttcctttccac

SEQ ID NO: 6128 - DNA, 617 bp, Glycine max
  unsure (1)..(617): unsure at all n locations
cgcatctatntnttttggttgagtcactcgacacgngcatcctctgagtcacctgcggcatgcaagctngctcgggtgatctactacgcttctagaactntggatgctgcccaagcaaattacactaccacagagaaggagctattagcgatagcttttgctcttgagaaatttcgttcatatttgcttggtactcgtgttattgtttatactgaccatgcagctctgaagtacctgttgaagaaggctgaatcaaagcctagattgatcaggtggatgtcttggatccaagagtttgatttggagatccgtgatcagagcggtacacaaaacctcatggctgaccacctgagtatgaatgagcgtgcgcctgaggactcacccattcgggatgaattttcagatgaccatctgtacattctgtataagatctctgattccttccncactccttggttngctaatattgtgaataatttggttgcttctggttttccttccttagcatctaaagctcaaactgataannataaaagcgatgctaagcattatattttgggataaccctacttgtggaaaagtgtgcatgaccangtgtcatactctaatnatgtccg

SEQ ID NO: 6129 - DNA, 402 bp, Glycine max
tatctatggctgctcggacttacccccggccacttggagattataccaagcccctactttcgaggggcaactcccaccttatgacgactatcccgggcaagacgatgaggaaggagatacccatcttggccccctgctccacctcaaagatccgtccccccatgaactaccccaactgaacataatccgccatatcccggcctcacccacacccgtaaaagaatctgttcccttcgcggaagataagggaaagattgaggcgcttgaagagaggttacgagcagtcgagggccttggcaattacccattctcggatttagcggatttatgtctcgtgcccaacatcgtcatcccttccaagttcaaagtaccagactttgacaaatacaaagggacaacatg

SEQ ID NO: 6130 - DNA, 264 bp, Glycine max
  unsure (1)..(264): unsure at all n locations
aatggttgcagcaacaaaatgagcttagcccanataggctaggcttagtgcatggctntcaacaaaaaaattgactaatttatctgggcttagcgagtcagccccgcttagccacaggtatctcattaagaagatgaatgtttatccacaaaagatgaactcgcttagtgcagtagacgcgcttangcgagttgtctganaacgcaaatattcaagcaattttgatgaacccacttagtgcagcatgcgcacttagcgaatgca

SEQ ID NO: 6131 - DNA, 242 bp, Glycine max
tgcactttgtcaccagctgattaaaatccgagatctgcatatagctaaccgactgttgaatctccaatcagagcccattctcaaactgagcacataaatcttcctcattccgagcatcttggtatagaggccaatactgtataagttcattaaattcggccgagtattccccaacggacatgttcccctgctttaaatccagaaattccctcgccttccgcttcctgagatctcgtggaaaa

SEQ ID NO: 6132 - DNA, 293 bp, Glycine max
tcgcgcgagcgcaaccgaagctgtgtttcggacgacactggcgtgttcccatgcactcggccaagaaaacattagcccagatcgaagagaaaaaaaagcattaatcaccgatattgatcggaaaaaatgctggttgacgtcggccaggaaagatgaccgatcgaggtcgaagaataagagaatcaccggatgacgccgatcgagcatgtcctaattgacatcatccgaatattatccagggatcggatagaagaaacaatagctgataccagtcgttatgtagtgccgactga

SEQ ID NO: 6133 - DNA, 347 bp, Glycine max
  unsure (1)..(347): unsure at all n locations
agcttctaaggaagttttctcaagaaagcttctcaaggaagctacctagtctataaatagaaacatgtgtaacacttgttgtaactntgatgaatgagagtcttgtgagacatacttcanagttccacttctctccctcttttattccttcaatttcgtgctcccccctctctctttctctccctctttcttttcctccattgaagcattcactccaagcttcttatccaaggctcatcttggtggtgaagctccttcttccatggcttattccttagtggatggcgcctcctctcacctcttctcctttgtcttccgctgcatctccatggtgaaaaatcaccatt

SEQ ID NO: 6134 - DNA, 237 bp, Glycine max
cttaaccatatttaattgaattgaatgaagttaagaacattttttaacatgagtcttcgtagcttaacctgttagacctgagactattttgaggtggagacccacacaccaagtgaggatacggatctattgttctgcccacaattcgtcgaactaaagaatatgcatcaatattttattaacatgaatacatatacttctgattaataaaggggataaataatatattgggtgcgg

SEQ ID NO: 6135 - DNA, 529 bp, Glycine max
  unsure (1)..(529): unsure at all n locations
acatnaatcaacagaccttcgtggaggaaatcttctatgagggcccaaattggtgctagctgctattatgcacctcgcatgtattactagaatacactactcatctgctctctctnttattagagtgatatctattctatcgtagagagttactggaaagacttacaagattgtctgcaactgatatcttagttattctattcatgtaattgttactagaaccattgcagatttcataactaatacctcttttatgactaacgaaacgttacggaacctcactatttgtgcaacgaaacttacatttaatattcggtgtgtcacaggaccttacggattgtgcatcaatacttatcattgctgctacccgcacatacgcgaactaacacatttgtttaatgatgggtgccaaactcctaataatgacacaattcacttgaataatccaaactacagtccctgacgaaatagggtatacagttgacctttttcttgcttatatcgatatataagaagtcaacagataccn

SEQ ID NO: 6136 - DNA, 340 bp, Glycine max
  unsure (1)..(340): unsure at all n locations
acccagctcgcccaggcgagcagggttgcttcctccagtatcaacagccttctggaggaatcttctggagggcccaagtgggcctggttgctatttgcacccccattcttactaagtacaccccctgctctntttggtgattctctcttcgtaaagttacggaaacttaccaatatcgtaacgatacttgttttctttccgtaatgttacagaaccttgcggagtacataatcatcccttttttgacttacggaatggtaccgaacctcactaattgtgcaacgatgcttccatttgatttccggtgtgtcacggaaccttatggatagtgcatcaatat

SEQ ID NO: 6137 - DNA, 380 bp, Glycine max
  unsure (1)..(380): unsure at all n locations
gctgtgtgctgagtgtgtgagcaggtcgtgtatagtggttcgatggaacctgtgtttatagtagtctgagcgtggatgctggtccttgtttgtaggggttgttgtatccttgtagatcattcccggcttatagataatagttgggagcttatagataatgttagagacaaacatttgaattataaataaaggtagaagataatcataccttgtagataatgtggcattatagataatttaatacctgccaatagataagatattcaaatacatttgaatattagttaggttagagataacctgtttgttgggaagcccgactactaagggtcacacgtctatgctcttgtagtanggctgacatggagggtggacacatg

SEQ ID NO: 6138 - DNA, 574 bp, Glycine max
  unsure (1)..(574): unsure at all n locations
nggacagattgtancatgagangcatgcgatnnaagngacactatagactcctcaagcttcgtcatcggagataagtacagctaggtgtccctcactgtgctttggtggattgtccaggcttgcttggtgatggattcactttaccaccattatagttcccattgttatgctgaatgaggaaattcctctcttagaaagtacttgttcaaggtacatgtttatagagtctcctcgaagcctaattaaaatgatgacatcaactttaatttcttatctccttccaagattgtggactccatttaaatgaggtaaactctcaaccactatgacaaatatagagagaagatcttggagtacctctagtttgatgaattttcctaccatgataactgtgtgcctatctccatatatatacacaccacaacctctattatatccttataagcgctctctgtgaggacaagcacacaaagacctcaaccttacacctgtgatagtggaaaatcaccacatttcacaaattgccaccacaccctctcaatatgaccaaggttacctagatgtagtgagtct

SEQ ID NO: 6139 - DNA, 328 bp, Glycine max
  unsure (1)..(328): unsure at all n locations
gtgaagctactatggaggctggatctttgagcttcaatgaggtccttcaatggtgatcttccaccatggagatgcatcagaagataaaggagaaaaggtgagaggagacgccatccactagggaataagtcatggaagaaggagcttcaccaccaagagagtgccttggataagaagcttaaagaggaagcttctatggatgaaaagaaatacagagagagatggtggagcacgantatgtaggaggaananagggagagaagttgaactgtgaagtgtgtctcacaagactctcattcatcaaacgtacaacaagtggtacacatgc

SEQ ID NO: 6140 - DNA, 365 bp, Glycine max
  unsure (1)..(365): unsure at all n locations
atgaagactctcccactatctagatgttaatctgggatctctatcagagactatgctagaatgaataccgtgtagtctaactatctcattgacatacaagctagtcaacctctctaacgagtatctaatgttaattacgatgaagtgagcagatatggtcaacctgtctacaataacctaaatggaatctaaacctttgggggtcctaggtaaccccaccatgaaatccatggagatactatcccacttccacttaggtatctctaaaggttgcaacttccctgaaggcttctggtgttctatcttagctntctgacacactgngcacacaaggacaaactcattaacttctttcttcataccct

SEQ ID NO: 6141 - DNA, 363 bp, Glycine max
  unsure (1)..(363): unsure at all n locations
agctngcttctatgtccctttcattgctntaatngttgaataatccttgaaaaattgtcttgttaaaactccattggtttagctntcattntcatttttntgtctttgtttattgcttgtctctttgtttcgttgtttgtgagttgccatatagggaattgcaaaggtggattggtgccatcctcatgcaagctccattggagcttgtaggcctaggatcttcttcatcaatggattcctttgcttcttggaagataaatggcagcggaatggagaacgaagagagagaggagatgccacttcaacgagaagatgagtctataagaagctcaccaccatatgaggccatggataatagctggg

SEQ ID NO: 6142 - DNA, 247 bp, Glycine max
gtccctctggatgctctgctatggtttccaagctttatagagaatgcgaacggattataatctcaatgtcactatctatgtgcgagaggaatatctctctctacatacattattttgcctatcccatcaataagaatgtgcaaaaatgagtcttgatagcggcgtccaaattacaggatgattcaataggtaaccacatcaagatcatacatttattgcgatagatctgcagatatacggtctgaag

SEQ ID NO: 6143 - DNA, 484 bp, Glycine max
  unsure (1)..(484): unsure at all n locations
ctagaactttgatgctgcccaagcaaattacactaccacagagaaggagctattagcgatagctcttgctctcgagaaatttcgttcatattngcttggtactcgcgttattgtttatactgaccatgcagctctgaagtacctgttgaagaaggcttgatcaaagctacaatgatcacgtcgatgctttggatacaaaagttgatttggagatccgtgatcagagcggtacaccaaacctcattgctgaccacctgagtaggattgagcgtgcgcctgaggactcacccattcnggatgaatnttcagatgaccatttgacattctgtatagatctctgatncttcccactccttggttggctataatgtgaatattttggtgctttctgtttcttccttacatctaagctcnactgataaaataaaacgatgctacatatatttggataccctattgtggaagtggcatgacagtgtatact

SEQ ID NO: 6144 - DNA, 396 bp, Glycine max
ctccggacttcacccccgtgccaccctggaagatttaagccaagcccctactttcgaggggcaactcccaccttatgacgactatcccgggcaagacgatgaggaaggagatacccatcttggccccctgctccacctcaaagatccgtccccccatgaactaccccaactgaacataatccgccatatcccggcctcacccacacccgtgaaagaatctgctcccttcgcggaagataagggaaagattgacgcgcttgaagagaggttacgagcagtcgagggccttggcaattacccattctcggatttagcggatttatgtctcgtgcccaacatcgtgatccctcccaagttcaaagtaccagactttgacaaatacaaagggacaacatg

SEQ ID NO: 6145 - DNA, 511 bp, Glycine max
  unsure (1)..(511): unsure at all n locations
atctctgagtcacctgcgggcatgcaagctttgatattcatcttcaattttgttgatggaagattcaacatgttacttanngttttaatttgatcatttgaatgtggcattgtatntattgttntagaactaggaatttaatctagttcatcatgcttaatagttaatcattagattagccaagttgattaactctagttnttggaatcacattgaattgtctacacttggtaatcgattacacaaaagttgattagttcatgaaacttgtttctattggaaccaagcttttatgttttgtcaaattaatcgattacaagcttctcttaattggttataaaggcttgttctattagaaggaaatntctagttgtcaatttaattggatacagttgatcataatcaattatattgttctttaggtaaacccaagtcaaataagaantatttaatcgactacatgctcagtttaatcgattaaatattttatattacaagaactttataatag

SEQ ID NO: 6146 - DNA, 456 bp, Glycine max
  unsure (1)..(456): unsure at all n locations
atgatacattcaagtcttgtctnttatatggctgcttcaagtagagccatgttcttcgtgaagtaagtataataaaaaatgttcttcgtgaagtaaatcagcccgcttaatcctgatcaattagctaagcagagtttatccatgtttattggttttaaggtttcttatgttgcacttgattttttgtatcttgctttattaacggataaggcctccatagccttaccacgtgaactttagcttgtgttgctatcatttccaacaacaacaaataaagataaatagaaatacttaaatggccaaaagaattggatgagataaatctcaagaatatagttcgaacattgctagtatttggttcatacaaaattgaaattcttatccaacanagtgtcattgaccattacatgaccgntgcttgtatttagtggtaacatatcaaaagaatatgttaag

SEQ ID NO: 6147 - DNA, 428 bp, Glycine max
  unsure (1)..(428): unsure at all n locations
aatataccttcttctgtatttgcatcanacttgcctaagttntctttcccgttgtttaacacaaagcatttacatccaaaaacatgaagatgagaaatgtttggttttcttcctctntacaattcatatggtgttttctttaagataggtgtaattaatgctctattcattatatagcatgcaatgttaatagcttcaacccanaaatacttaggaagatttgtatcattaagcaaacttctggctaattcttctaatgatctatttttcctctcaactactccattntttaaggagttctaggtgcagaaaagttatgttcaatgccattttcatcacanaataattcanaatatttattntcaaattcttcttcatgatcactcctaatggatgaaatattgagattttttgtatttaaatgattt

SEQ ID NO: 6148 - DNA, 453 bp, Glycine max
  unsure (1)..(453): unsure at all n locations
gcttaagaaacatggcgtcagcaaacttcttatttccagaaggaatttctatctgtatacctccaatctttaatggagagggttaccactactggaaaactcgaatgcacatttttattgaggcaatagacttaagtatttgggaagccatagaaatagggccttatatacccaccacagtagaaagaattacaatagatggaagcacatcaagtgaaagcataacaatagaaaaacctagagatagatggtctgaagaggatagaagacgagtacaatacaatttaaaagccaaaaacataataacatctgccctgngaatggatgaatgtttcagggtttcaaattgtaagagtgctaaggaaatgtgggacactctacaattaacacatgaaggaactacagatgttaaaagatctatgataaacacactaactcatgaatatgaactat

SEQ ID NO: 6149 - DNA, 435 bp, Glycine max
  unsure (1)..(435): unsure at all n locations
agtcacctgccgcatgcaagcttctgcttattagtgcacaactccttcaagaatttatcatatcttnggaatttctatattgcatccaacagaggtatgtttacctctacttttctaaatgtttccaagatctgatggtgagggcaactggcacatagttttttaaatctctcccaatattcatataggttctccccactgagttgtctaatacctgaaatatcctttctgatggttgtggtcctggaagaagggaaaattttttctaagaatactctcttgaggtcatcccagctcgtgatggaccttggagcaaggtaatatagccagtcctttgccactccctctaaagaatgaggaaaggccttcagaaatatatgatcctcctggacatctggtggtttcatggtgaagcagacaatatgaaattctttc

SEQ ID NO: 6150 - DNA, 395 bp, Glycine max
  unsure (1)..(395): unsure at all n locations
tactcagctcgctgactacattctccctctntcttaagcaaattcttcttgtcatcactcttatcttcatgatttacatgcgtgtcaatggatttgcttgcccctgattgacaaagggtgcagatgacgacgttagtctctgcatgctatcggactctgagtctgacggatagcagaagggtgtttatacggataaccacttaggtatttccgcctaccacctagctatacgcgtcaggattaacataaattgtttgtacggataaccacttcggtatatccgcatgccacatgacttcacaggtcatgattaacaaaaatcgtttgaacggataatcacttgggtatatctgcatgtcgtcaaactcgttgtctctggatgacaaaggttcaga

SEQ ID NO: 6151 - DNA, 497 bp, Glycine max
  unsure (1)..(497): unsure at all n locations
atctctaagtcacctgcggctgcaagcttaagaataagataagatcaagactcaagaatcattagaagacttaatcaagataagtatgagaaggagttttcaaaaactgagtagcacatgtaattttcacaaaacatgtttaccaaagagttnttactctttggtaattgattaccagattgctgtaatcgattaccagtagcaaaattgttgtgaaaaagttntcaaattgaatttacaacgttccaattaatttcaaaaagctataatcgattacaatgttttggtaatcgattaccagtacctctgaacgttgaaattcanattcaaatgtgaagagtcacatcctttcacantaaaagcttgtgtaatcgattacactgatttggtaatcgattaccagtgatggcttatgaataaatcanaaaatgtaactcttcanaaggttttgactnttcacnatggtttaagttttctaaaagtataactcttataat

SEQ ID NO: 6152 - DNA, 360 bp, Glycine max
gagaaaaagaaaagaagagaaaaggagaaaaggagaattcccgatcaaaagaatcggaagaaagcaaaaaaggaaagaaaattcccaatcaaagatcgggagataacagaagaaatatacagaaaggtctttggaccaaacgacatctgaacaaatacagagttatcaccaaagtaaatatagaaagaaaggaaaccacgacctatagtggtcccctccctttgattgccaaccaaaatcccgtgcgtcggtgacttgttcgcctcgcgctaaacaaaaacagaaaagaaaaaggccataaacactcaaagccaaattgtccaccaagaaaaagccattctcaagaaaaagtctaatgat

SEQ ID NO: 6153 - DNA, 259 bp, Glycine max
  unsure (1)..(259): unsure at all n locations
ctagttgatgttctgtgactgtgcacgatattaaattcactttttacaatctatatcaatatattattntacatctttaatatattattaattatttaacttaacatttaataattctatattagtaaatatgtcaataaatatataactatattttcatatacacatatgttatataaaagtnttattattgagatgattagtctttatacgaatccttttactctgatatttagtctgtacctttggattttctttt

SEQ ID NO: 6154 - DNA, 197 bp, Glycine max
  unsure (1)..(197): unsure at all n locations
atatgcaactaattgaagtgagctagacttgacccatcttctatctttatgtntaattctataaacccggactcaataccgaaattcaagaccagaacaataacaaagcatgtgattacgaaattacatttgtcatcctatgacanattattatatatatatatatatatatataaaagagatatcatttaagaaga

SEQ ID NO: 6155 - DNA, 580 bp, Glycine max
  unsure (1)..(580): unsure at all n locations
tgatgatactctatgancagctctcccagtcacctgaccgctgcatgttatataattttaagtagagagcgatgacgttttatattatcgattcatgtctcctttgaagagtctgacgctatctcttcataaaaggatctttcacatgatgatgcgcaatcttttcctcaaacgcacacttctggacattattctaacagataaggataaggaagcattggagatccttctctataagtcaacactcataatgatcatccacgagagtggaaagcctcaagagatcatcctcttgaccacattattggtgatatcttgaaaggagtgacaactacacactctcttcaaagatatatgtcataacatggattttgactctatgattggacacatgaaattaaatgagactcttatagatgacattcgataattgcttctctggaagaacacaccaatctgaagaatattagtggtgacgtaatcgcgaaaccttatanctactctattcatggaacaatatgggtgctatgaagcacatactaggaaatggcttagtcttacaaataacgtgtcatatccg

SEQ ID NO: 6156 - DNA, 512 bp, Glycine max
  unsure (1)..(512): unsure at all n locations
tgctatcgtctgattattcagacatagactcagctagcataatctaataacacattggattcaagtcttaatagttgtatttattntcatttaatcaaaataattaggaagtttgatttgtcttaagacataaatgtcttttgactcaatacttactgaataaaataacatgtgtatatcatatacatacatgtgacacactttaaaatatagttacaaactttcatttttataaacgttatcaatttaggcccctttcaggttggttgttagtttccggtttttggttttaaaatgcaatttcaaaacggaaacgcattgngctaaaatggngctaagttggaatttagttcttttcanaacaattttcacctcatttcaaaaaccaaaaaataggtttatgggtctttggtggtggtntaccctagaccaagagactaactttaccttcacgtgtttctctccncttcatgtngtctctgtccacttctatcatcttctttgtgggtctc

SEQ ID NO: 6157 - DNA, 470 bp, Glycine max
  unsure (1)..(470): unsure at all n locations
tacgcacatcgttcgcgtgtatgatatctactctacaaggttngaagtagatgagagcttcaaccctataacgcaacgtggcggacaaaagtgggcagtaaacttgaatggtcgtcattgtcaatgcggaaggtattctgcgcttcactatccatgttcacacattattgcagcttgtggttacgtgagcatgaactactaccaatatatagatgttgtttatacaaacgagcacatcttataagcttactccgcacaatggtggcctcttgggaatgaagcggctattcctccttctgatgacgcatggacacttatccctgacctcaactacaatcgtgcaaaaggtcngtcaanatcaacaaggataagatatgagatgaatggtgtcgaaccatctgagcactgaacaaaatgcaatagatgtggagccgaagggcataacagacgtcgctgttcaatgcaatctg

SEQ ID NO: 6158 - DNA, 361 bp, Glycine max
  unsure (1)..(361): unsure at all n locations
tagtgggacgccggagagttgctatatgtgttgagatgaacatataccanatcgcctagctggaaatggacgtcccgacggtggcgatcagcatggttcttcatacacatttgtgctctcaatacgcaattatgcagtatggtgtgcagagctctgacgggtggtaaaaatggagactgcagactcgaccgcagatgtgccggtagtatacggtgccaatgctagaggtggtttgccatacgatgatctcgtatggagacatgccggcagcagagcgggttgacgtgttgtatctccactcaatcaatgaaagagatgagtgccacatggcaggcctgtcatggacgaacgagcggaggtg

SEQ ID NO: 6159 - DNA, 368 bp, Glycine max
  unsure (1)..(368): unsure at all n locations
gcttgtagaacaccaaagatgtaagacanaattttgtatgtaagtgtaaatttgaaacaataagagctaatatacaatcagatacctgaaagtgataatttatgttgctatgatccctaacaatgtataattagtccctgttagattacatttatctttacatgatcttgtatatattattacacaaaaacttatgattctgattgatatgtaattacctaataatcagtaattgattgatatgtaatcaatattgattctgatttctccattataaataaagatgagatgtggtcatctaagacacaaaattacagtacaactaatacactgctatatggtatcaaagcttaagttattcttgacag

SEQ ID NO: 6160 - DNA, 346 bp, Glycine max
tcctgactcaccataaaccttgttccactgtgagaatgccaatccttaccctcggaagccaaaaaaataaagagagagagagagaagagaatgaaaatttccaatcaaaggaaaaaggagaaggaaaatttcaaatcaaaggaaaaaggaaaggaaattcccaatcatagagtgggagaaagcaaatagaaaagaaagaaaattcccaatcaaagaatgggagaaagacaaaaagagagaagtttaaaaagaagattgctcctggtcatagaaaccataagaaatgtgccgagaggtccttggaccatacaatatctaaacaatacagaattgcaccaaatgaata

SEQ ID NO: 6161 - DNA, 98 bp, Glycine max
  unsure (1)..(98): unsure at all n locations
ntaacctcatcgtccctacagtcttagattgtgagccaatcttatccttgtgttcggactctcagccacttatgataaccgccgatgatcccattact

SEQ ID NO: 6162 - DNA, 443 bp, Glycine max
  unsure (1)..(443): unsure at all n locations
tgccgcatgcaagctggtagaatggctagacatgatacatgtcatggtttggtttggttcaaggataaaagggatgccccacactatttccatgacacaaatgcaaaaatgatgatttggaaacttttatgcaaaactggtcatgcatgcacctatgtggacactcaagtgtcaaacttttatggtcatgtgatgctagggctcaggattcatttcctccattntaaatcaacccaatgtttccaaaatatgttcttttatcaatttgtgcattcctccaagtccatgtcgggcatccgggagaatttcacagcattcacccttcaggtgtagacacgttnttttcataaactagctatgatcagcgaacttttcttttanagaaaagttggaaatcatctcttttaacagcatgtcgatttttagctagacaacttaatttc

SEQ ID NO: 6163 - DNA, 119 bp, Glycine max
gatgaaggccatgattgtacgtacacacgccttttgaccactaagcttcacatgaatgataattgcattctttgctccccttttgagctgaatgatatcgtcaaaaatttgcaccctga

SEQ ID NO: 6164 - DNA, 429 bp, Glycine max
  unsure (1)..(429): unsure at all n locations
ttcttgatatcatcaaaatcttcatgatgtacattctcccccttttggatgatgacaaccacctgtatgttatgagcaacaacacagagaaaatatctattcgcatatagtttactcccnctcggttttgcaatgattgcttatatgagacagttgaagattcatanttttatatgtatcaaattgtctataaacaaaagataatttttttactatttatcctttatctttctctcccccttgcaacatcaaaacaaatatgaatagagagggaaagatgtaccacttgttgaatgtatagaataagtgaaccaaatgcattaaacaatcattaatataatcagcagaacaagtcatacgcatcatcaacacatcaatacatcatctcaatattaaatcaattattaataatatcactactatccataa

SEQ ID NO: 6165 - DNA, 413 bp, Glycine max
  unsure (1)..(413): unsure at all n locations
cgtcaacccttttatgctatgcacaacaagctgatgaatccattctttcacaaacaagatgatcctaactaaatgaaaaagtgaacagaacaacaataatttaaaaaaactaaaggaaaagccgggttgcctcccagtaagcacttctttaaagacattaacttgaacaagcttttcttccttgttgattctccttttagctagaaattccatgaacttcatgtattttggaagtatattccaattcattgtatgagaggtgttggtgatctatgaaagaatgacacttaacgttttctcatgttctccatgcctttcttccttaacaatcaggtgacgaggaaaggtattaacttggagaatactttcttgttgattntctaatgtngagtactcctcccattggtgcactt

SEQ ID NO: 6166 - DNA, 405 bp, Glycine max
  unsure (1)..(405): unsure at all n locations
agctngccgctggagctgacccatcaatcgccctaactctcttatactggtgatccctaggctcttgaccttgactggatagaacctctttntaagtgaaggcttntgacttgatcccatgttttactaaagtgaaataaaatctagtgcgaatcaaaactccgacatctatcatgggtggaatggatgaatgcatgaaggaatgcatatgacacagctgtaatttaagaatgcggnggcccgggacattgtctcctctttagacacaacgtctaggggtagcaaagtgccccaacgtatgtatttaaaacggtgacccggaccttccattgatttgtctatagaggggatcaagacagaacccgtatgcgaatgcatatgcaaaggcgcactagcatgacaata

SEQ ID NO: 6167 - DNA, 475 bp, Glycine max
  unsure (1)..(475): unsure at all n locations
ctaagctagccgaatcatatngaatngaagttagcttagctcaaccttgtccagcttattggaccaaatcaaccttatgcaagggttgggcgctaagcacttgagactcacaacttagcgcatgaaccgagatgcgcttagcgtaaggcttgcgcttagcgaaaggactatttttcagagaaaagttttctgttatttttcagtcctttttccaagaaattgaaacctttatgttaaacattcaaagataggttgatatactcctatgtacagatccgacagcaagttccaaatgattaaatgcatgaaaaacaaagataacaaaatttaaaactgggttgcctcccaggaagcgctttttaacgttattagcttgacgctattaccttactggatgatcttatgttatggttcttactttcagaacctgttgacctccttccattacctgtaagcaaacattgtgttctggagc

SEQ ID NO: 6168 - DNA, 388 bp, Glycine max
  unsure (1)..(388): unsure at all n locations
tctctgagtcacctgccgcatgcaagctngttctcatcacagcctcccncacctnggatcatccacaagtgagtgattcggcaatgcccccacataccaatacagcaggtccctctgataatccaaagaatgtccagactaatttatctgtccctcctcacaaaaaacatgttcttgttgcaaatcatgttcctatccttcagaattcttctgacctcaaagaaacagggaacattgagtttggtgatcctatagaagaagggtttgttcaggtgaaaacaaaacaccagaaaaaaggtaaaaaagtgcaactcanaagacaacccatattgaggatatgcaagctgatgtccaaagaggaagaaatcataaagctgtaactagggtc

SEQ ID NO: 6169 - DNA, 440 bp, Glycine max
  unsure (1)..(440): unsure at all n locations
ggccgaagtggagaaacaatgtggaaagcatattaagattatgagatccgatagaggtggagagtacaacggtagatacacgaagaatgaacaagcacctggtccatttgtgaaatttcttcaagaacataggattgttgtccattacactgtgcctttagatcaaaatgatgcggtaaaaagaagaaactaaactntaatggacatggtgaaaagtataaggagtaatagaaaacttcctcaattcttgtggattaaatctctaaaggcggttgtgtatatattaaatcgagtatcaaccaatgttgtctcaaagacanccttttgagctattcaaaggttggaaaccgagttngcgacatatatgcatttggngatgcccgtctgaagtgagaacttataacccacaagaaaagaaactagacccaatgactattagt

SEQ ID NO: 6170 - DNA, 478 bp, Glycine max
  unsure (1)..(478): unsure at all n locations
agcttatctntcagagtctngaaagctgccaagcattcatcatcaagcttgaagactgcctctntattcagcangttgctcaatggtttgacgaatttagagaagtccttgatgaacctctgatagaagcctgcgtattcgaggaaactcccgatacccttggcatttattggtggaggtaaattctcaatgacnatcaatttggctttgtccaccttaatgcctcaggctgaaatcttgtggcccaatattattccttcttggaccatgaaatgacacttctccttattcagcaccagaattgcttcaactcatcttcgcaatacgagctctagattagtcaagaagtagtcaaaggaaagcccaaaaattgagaaattgtccatgaagacctttatgcactnttctaccatgtcntgcaaaatagctagcacgtacctctagaaaagtngtggtgcattacataacccgaatgaca

SEQ ID NO: 6171 - DNA, 461 bp, Glycine max
  unsure (1)..(461): unsure at all n locations
gagtcatcgagtcacttttccattaagtatgaataaatgttatgttccttttgctntaatccattctgatgtatggtgtccatccccaaaatcttctatctctggttatcggtggtttgtgatatttgttgatgattgcactcgaatgacttggatttacttgttgaaacataaaaaaatgaagtggtacacatatttcaacaatttcataaaatgattcagactcaatattcaaagaagattaggatccttcgctctgataatggtggggagtttgtaaatcaccaattccatgagtatttcaaaaaacacggacttattcacgaaaccacgtgtccacaaactccacaacataatggtattgcagaacagaaaattccgcatatccttganactgctcgtgctcttttacatggagcacatgtgcctcaccaccattggactgatgttgttactacaac

SEQ ID NO: 6172 - DNA, 224 bp, Glycine max
  unsure (1)..(224): unsure at all n locations
tcgtgttcgggcaatgtatgttcgcatcgcattggaaactcaagcaacacaacagaaacttaagcaaaagcttgcatacaaagttcaagttcgagaaacagaagtaagggataaagagtaatgttctgtatatgacatcacatnttttatttgaaaatatcttcatctctttctctatagttataaaatttcagagcctcttggtagttttatacgttctttga

SEQ ID NO: 6173 - DNA, 342 bp, Glycine max
  unsure (1)..(342): unsure at all n locations
actaagcttctcaacgtgatcatacattcattggcatagattgaaggatgtagttgtggtgcgtcgatctgtttggtgtcacccagatgcagtaaagttatgcaatgcatgtcatctagtgttttttatagacagtacctacaaaacaaacaggtacagactcccactacttgactttgttggagtgacaccaacggcgatgacattctctgctgggtttgcatatctggaggctgagcgtgttaataatattgtatgggctgtggaacgatntcgaggcctatttttaagacacgatcgcctccctcttgttattgtcactgacagagacctagcactgat

SEQ ID NO: 6174 - DNA, 243 bp, Glycine max
aacatggaatcagaatcagaggtccaacagagcggggatctttcactgaaaccgcgaactcataccacaatcgacaactagtcaacaatagatgactagaggcagctctggtaaaataacgtcttaataagaaagagggtaaacgtagactatgcgttaccactaatgttatgatagtccaatcaataggcgagtgctgataagcgcacccaatagttgatgcaaaaatatctttgcactcct

SEQ ID NO: 6175 - DNA, 404 bp, Glycine max
  unsure (1)..(404): unsure at all n locations
agctnntacaacccgtgcacatattataaaacatttgttgactgtgtccaacatacatggttgatgcctntcaaggagatgtttgtacaagcatgggttcatcgggtcatgcatcttggaaacacaacaacaaataggtacataaattatttgacatttgttgttctagcttatgttttattttgttaaattaagagaagttntaacatttcattttgttccaacctcgaaggcacacatgtgagattaaaaaggttgcttcatgatagcatgagagaattatgtagttgttgggatgcaatgaataactagcttgtcttgcagcatacagtgattaacgcttcattgtagaaaagcatacatatggtcgaacatatgttcaataccctggtgaataaaaagtt

SEQ ID NO: 6176 - DNA, 556 bp, Glycine max
  unsure (1)..(556): unsure at all n locations
nggatggcactacaccatgcaaaccggacatagacactaagctgccatggccgctagcgagccatcacctcgttatctgttgtttgagcgcttaatgcatgctaacctcacttagcgataaacgcatatgcgctccaccagaggataggatctcgaatacgcttagagttatgcttacgctcctctatcagaccatgtatcacagccccgcaatatgtatgactcattacagctgcaataccccttactttgatgaaaaccttcatacatctgatgctatgcttgtatgaccagatgcgacgactcagaactgaggagcctacgcataagtgcttttttaccgtattagcttgctgcgttgacctccatgagtgacataatgcacgatggtgtctggcctctcatactctacagcatgatataatgtcaatgttcgaccattcaccacccatgtactgtcatggatctgctatatcgaacatgcagctctatagcattggagggctcaatgttcataatgacgaacagttctcactatttagactctagctcacct

SEQ ID NO: 6177 - DNA, 486 bp, Glycine max
caatgtattgttattaattaagcggcgataattcaggtagatcaatggtgatctatatctcatagaatacataaatggtacttaagtagaagagcttaaagtggagggccattgtcctaaatgactatacaactagtttaaaactacaatattcagttaattcagttgtgactaattagagcgtctcactatatgatgcagtaacattaacactaagtagagctgtaacatcctataaactacaaccacagagaaaactttgtgtcgcgtcacttggctatatgaattaacttcagaatcatatgactataatcatgaaactttgcgccatgaatgaatatatgcgtttatgatatatctagcacagctggagtgagaaacagaaatagctgatctcaattccatttggcaaaattgccactgccccagtccaatgaattgcctctgggtgttgaacccccttttcacataatataaaataaatcg

SEQ ID NO: 6178 - DNA, 389 bp, Glycine max
  unsure (1)..(389): unsure at all n locations
catttttattatagttataatttatatgttttaatgtaatgaaaaactgaatttntaagtcaaactctgtggatgaatatatttttattaaaagatgtatgaaattacacttaactcacggcgaagtaacaatatgcctcagactacatgtacaattaagctattagggagaaactatattattttatgaatntggacaataagttctttcattaagtatataatatgggtattcattgtaaaaaattattatagtaattcacatctataattgtataaaagtatacgtttgatgtatgatttatgataattttatgataaaatacttactaccaagaatattatttctgcacatatgggttataaagcttaccaatatatatatatat

SEQ ID NO: 6179 - DNA, 404 bp, Glycine max
  unsure (1)..(404): unsure at all n locations
agacttctccacgtnttcctctatacctaaaacttcttatccttcattctcactcaattcttcaccaaatcacgtcccgtaaagcccaatcttcctctatttcactcctctgtcacttccaccgatcaaaatccagaataacttcatcaaatggcagagccatcaaagaagagaaagggatcatcctccaccgctaccgctgctgcccatcgccgtcacggcccatccggagcacccacagcacctattcctccttctttgtcatctccaagatcatcaacactgtattcatccgatgatcaacgtctacggtacctttctcagttttcttctagaataatcttagaccctaaatacctagacgtagagttctntaatgatgaaacgtttgattgctatcaagt

SEQ ID NO: 6180 - DNA, 223 bp, Glycine max
ttatcgagacactcgaaattgaacaattcaagctctcgagaatttcatatggtcatatcctttcactgcgaggtccgatgcaggcgcataatataatgacgacgcatctaaattgaacaaccgaagctctcgagaaattcacatgtgcataaccattcacacggagggcatattaatgcgcataatatatcgatacgcatcatactgtacaacggtagctctg

SEQ ID NO: 6181 - DNA, 476 bp, Glycine max
  unsure (1)..(476): unsure at all n locations
atcctcagagtcacctgccgcatgcaagcttgaactatctgtgattccacaacttcaatgttttctcgtaaaatagttcatgtcattaataaatatagcaaaaacattgaatttcacccacaanaagggacttttcttcaacttanataggctntgtacatataaaagaaggatttatgagaaattgaatctaaccaccccccgaaatataaagtatcaacactgtaattatattctaattacccaaaatagttgaggacctcaattatttgatctgctaaatcttcagcagaaggaataggatcctcggcacaattggcagttgctcccaacttcaagaactcttgtggaagtttcagagggaaaactatatgaataataatattcagttctacatgcaatanaaaatacatncaaatcaaccaacttacanacctcatgtccaggaggactgatatgatatatgcanaagttgt

SEQ ID NO: 6182 - DNA, 379 bp, Glycine max
  unsure (1)..(379): unsure at all n locations
gatgcangtgttactgttaaggcgtgtggcggctgttatatgataacaatatagttgatacactntcatttagcatactgtcgcctcattgagtgttgcatccccgccaacaaagatttccttactatcatcgttcgaggtatgtatatgattctcacacttatgtgcttaagtattatagacaatggttgacatgttactattctttagtaggacattgcaattcattgagtgagccatagttccccgtttgagattgaatacaatgattaatacggaacagctggattaattgttgtattcaatcttgaattgtccatgtggacagcttgggaagacaaattgttcttacttcattttgacttataaagtaagtatg

SEQ ID NO: 6183 - DNA, 358 bp, Glycine max
  unsure (1)..(358): unsure at all n locations
tgtgaattaggaagcatcaacaagaatcaagccaaggctattgtgcaagcaatcaatggggcaaaatacaccaaatgattatgatgatggatagttcanattctcacaaaggtaaagtcatcactttcaaattgagctttcaaaactatcatgacatgtagagaagaatcaaggatttcaagtcacaaaatgtcaagaaactttattttcaaaacaattacccatttcttgaacatatcctataattcanagaaaaacatgcaaagttgtacatgcacacaaaattgacccanaatattatactaaaaatctgacganactaacaacattaacaaattaacacaactaactaattaac

SEQ ID NO: 6184 - DNA, 364 bp, Glycine max
  unsure (1)..(364): unsure at all n locations
gcttaagtgtntagtcttattccatcataaacaaccaacacatgttctcaaccttgcatttcatctcatatcataaaacaatgaacacacaaaattgaatctgaaggactttctaggcttgtaatggggttaagcttccaacaaatcatgttgtttctaggattcaaaagctttggttctaggaaagctttcatccatagataaaccttcacctttttcattcattcctaccccatactcgccctttatttaagcacttagctntcattcattattttgcagcatacacacttattaatttcatttgtacttacacgtttttttatcagaaaacattatatacataaacagtgtgtgtatacta

SEQ ID NO: 6185 - DNA, 349 bp, Glycine max
  unsure (1)..(349): unsure at all n locations
agcttccattgctcaatttcgagcatctcgatatattatgcgccttaataggacctccaagtgaaaatttatgacctattgaatngctcaagagcttccattgttcaatttcgagcgtctcgatatattatgcacctgaatcgtacctccgagttaaaggttaagaccatntgaaaatcttaagagcttccattgttcaatttcgagcgtcttgatatataatacgcctcaatcagacctccgagttaaaagttatgagcatttgaatttctagagagcttctgttgttcaatttcgagcgtctcgatatattatgtgcctgaatcggacatccgagtganaagttatg

SEQ ID NO: 6186 - DNA, 558 bp, Glycine max
  unsure (1)..(558): unsure at all n locations
tgggatgatccctgngancntcgntgcatcancngaccacagcantacgtcagcttgactcagcgtttctgcgagacataggccaactatgtangctcttctctcctagttcccatgagaggttagtctatccactgtcctcaagcatagtatcgcggctgagtatgctcaagcgtatgcggagaaggatgcctcacgagaggtgaacctctctcatctctctgaggctaccatgtggttggatcgcactgctcttaccttggacggtattacagagctggctcgattgtaaaccaaggctcttgccatggcaaacacctacttcgccctcgaagagatacatggtctggtcggctattgccagcatatgattgacctcttggcccacatagttaggagtcgatgagaaacttgtatgggctctcataccttgactagatcgactcctcttgtgaataaaatgagtcgaccatgctctactccaaagcttggccatgatgtacgtccgctttatctctgcatgcttgatgttggctcgcctatgcccgagagcagaag

SEQ ID NO: 6187 - DNA, 381 bp, Glycine max
  unsure (1)..(381): unsure at all n locations
attcatctgggtgtngcttctcacactgtggtgctgcggctccttggtgcacagcttggacaacactgctgctgcatgtgaatcattgaatatcttggttcaagatttgctttcaggtctctggtcaaacacaggcctcanactggtgctctatatgatgctcttcatccaaagaacctgtcgggtatggatgtttcattagtacgtctcagaagcataaagctctggaacacaggtgccaactttagttactatcatatcccaccaagaaccatgtccattctccatgtgaggaggttggctattgtctaccacaacttgggcaactggtcgtaccactactatcaattgccaggttactcactcatctcttctgttgtc

SEQ ID NO: 6188 - DNA, 393 bp, Glycine max
  unsure (1)..(393): unsure at all n locations
taacgcgaagaagacctacgaagagacctgactgtacacttagttcanagactgtgctaagcgcatgatcaccgttatacttatatgacacagttgacacacttactgcgaggtctcgcgtgaatgtctagctaagatcagctatagatagatgtgcttgatgaggtgatagacactttgatactcagagctttctactaaatacacaccacgaatctgagtatctcatatatgagatactcctgtcaccccttgtccagctctatacttattctttatctcttattcccattaacccatgtgttaagtctttcatgatgatgagatgctaaatctccattgttgggagtctagcgcacagattcttgtaatgtaattgtctcctactatcta

SEQ ID NO: 6189 - DNA, 462 bp, Glycine max
  unsure (1)..(462): unsure at all n locations
tctgagtcacctgcggcatgcaagcttagtcttcatgtntatctctaacaatctccctctttttgactntgatgatgccaaacttgaatggccatntgagtgcatatggagagtgatcgaggccgtacccgaatcaaataaacatggaaatgcagtaactaggaagtgatcctaggtcgtttcccaacaaacagtgacaaaccaaatgttcataatatacttgcagtaacagtaacgaatgggggggtttgtttgttttgtgattaaagagcagaacaagtaaactggaatacgaaactactaatattaaaaacgggttatttcctctgattcagaagccattctcttatcctgggttatggagaattcgtccctaacagtcaaccacttaatccaaccctatttcaattactaagcgaaaataacttatggtntcaatacgtgatanggaccacatacacc

SEQ ID NO: 6190 - DNA, 515 bp, Glycine max
  unsure (1)..(515): unsure at all n locations
actatgatactaagctcttgtttaaagataggttaactaaagcctttgaaatttaaagttcactttagttgttaagatgaaaggttaaaaaatttaatgtcatgattaaaagtagttttccagatttatgaaaaacaaagtcaagagggattccactcaggaatttaatctcacacatctatctaagattattataagctttgtaagcacaaatcagaagtaggtcgctctaacagagagggctgaagctgaaacacaaatttctcactcaaagatcttgcatatagtggttgttcagtgacatctaagggttttttaaaacaatttttcaaataagcacttggtgtaaaatgatgttagaaaaagataatatgaatacttaataaaataatatggagagaagtataacaacttgtattatatcggttcgctcaacttgacctacgtctagttcttctttactcactggtaangggtccactaatcaataactaattacatataagtattctaat

SEQ ID NO: 6191 - DNA, 422 bp, Glycine max
  unsure (1)..(422): unsure at all n locations
agctntataagtgcgggtctgggagacgaaggtcaagtgtttgcgatatgtgaagatgatgttccaagtactttcggattggtccgaccatgccctcctgatttccagctgggaaattggcgagtggaggaacgccccggcatttacgcaacaagcataatgtaaacctttacggttntaaaagctctatagttgggcctacgctttagagttttcantttgttaaggctntgtgtcttttggttttgcgtttataatacaaggatctttcttcatctgttcctggtctctacccattctcattcatttgcatgtttacttctttntctgaaacggcagattcgatgacgtctcccccgaaggtactaatacctgggacccgtctatcaacttcgagcaagaaatgaaccacacggaagatg

SEQ ID NO: 6192 - DNA, 394 bp, Glycine max
  unsure (1)..(394): unsure at all n locations
actgaggtgattatcctcgatttattcctctcatatccaagtacttgtaacaaagagtatcttgacgggaagtgtcttcataagagatatctcatcttagtcacctccagctttttgtctactagatctgggaatgtttctatccatgttgttcatctatcgactacttgtgataagcagggtcataatcaagaaacaaaagggtatgagatatgaagccaaagagcatgcaatgtacataacatgatagactaggggagataccattgtgttaaatcaaaagacatcgatgtcttanaaatgaatcaagactcctaattnttttgattagatgcaaataaatacaaatgataaaaattatgtctgatatgctattagatcatgatatgtctct

SEQ ID NO: 6193 - DNA, 410 bp, Glycine max
  unsure (1)..(410): unsure at all n locations
tctgagtcacctgcggcatgcaagcttctgcattaatggagagttctagagagagaaatgtctctgttccagagagtntgagagaaattgttgtgtgaagatctgcagagaccagagcttgaagaggaagccgttctgagagcttgagatgagtttgtgagtgattatgacgtcctagaggtggaggagacatccncactacttgtatttctgcaatctttcatctttctcttctctttgttgtaaaggaagctaagctntccagttatggaaagctaaatcctctgttggatcttccttgtacgtacttgatgtaaatatcttttttatctatttaatgatgtnttgtgtgttcactgtgctatcagaacttcattctaccatgcattgccttgatcatgtagatgcat

SEQ ID NO: 6194 - DNA, 428 bp, Glycine max
  unsure (1)..(428): unsure at all n locations
ctatacaaaagttagtcatatgaagcgactatcactttgtatagatttaatagataaaatgcatgaagttctaattctagatgcttgctttgatgcatgggcataatgctatcattctatgtctagcaatgattttattaagatacccttcctttttgttctactagaaactaccctctgtcaagcgactaattcctaaaaatgatgcatgcaaaactttccttgtattcttattaaggattaccatttgtcgagcacttgacccctaaaataatgcacggatgaatgatgcatgaaattaaaagtaagagaggataataggaaagaaaacacttgttgcattgataaatacaaggtgtacaatacatcttttggcttntaggcatgtcaggccctacctctcattgccataaggggccttacacttg

SEQ ID NO: 6195 - DNA, 377 bp, Glycine max
  unsure (1)..(377): unsure at all n locations
actatgtgttgtgttatggcaatcagttgagccgaatatcttggagatccttcgatcatttaaatcatgtcngttcttttggaagaaagccccagaaatctttgccaatgatattcaaagtttgtttgatgcaaccatgaaagttacaaccctcaagcaaaccagtcatgacatgatcgctcatgtgggtaaggctcgagctgccgtggaagagctgagaaagttccttgtagctgattcattggaagaagtgaataggaaacttgacaagttctacatggttcttatnttgagaagcttgcattcagactntgatcatgtgcgtgatcaagtacttgctagggactagattccatcaatggattccctcatcacta

SEQ ID NO: 6196 - DNA, 350 bp, Glycine max
  unsure (1)..(350): unsure at all n locations
ctaagcttataagcgcgggtctggggagacaaggtcaaagtgtcgcgtatgcgaagatgatgtaccgagtactttggatttggtacgaccatgccctcctgatttccggctgggaaattggcgagtggaagaacgccccggcatttacgcaacgagcataatgtaaacctttacggttttaaaagctctatagttgggcctaggctntagagtttttccttttgttaaggctntgtgtcttttggttttgaaattataatacaaggatctttcttcatctgttcctggtctctacccattctcattcatttgcatgtttacttctttttctgaaacggcagatccgatga

SEQ ID NO: 6197 - DNA, 249 bp, Glycine max
  unsure (1)..(249): unsure at all n locations
tattcatacaacaaggaagaattaagagaaagaataacaattcctaccttaattaatcccaaaatatacctatacatagccgntatcaaactccctcannnattaaaacttgcttgtcctcgactaattacactaagataaagtttagagtttatcaatcacaatacatgagataaatgcatacattccaaaaacttcataggccaattctcaagttcacaattgtcantaagtcatgaacggagcatg

SEQ ID NO: 6198 - DNA, 282 bp, Glycine max
  unsure (1)..(282): unsure at all n locations
ctgttcattgctactagcatcagtaatagtgcaggcttctcttccaatatagcaaggtcaagatccaaaacaccgagatgaaattgaacttgctcattccaatcagagaagttaagcccattaaaaattggtacagatgatacatgagaattcaatgagttgggaacaggtactgcataataaaacttcacataagcatattggtacatgaaacacaagtcatacatantaattactcagataacaatcaatgtatattgatgttctcctttgggtgacaca

SEQ ID NO: 6199 - DNA, 337 bp, Glycine max
  unsure (1)..(337): unsure at all n locations
tgcttggtgcattgcagctgaagcaggtaatacatctcgccattcagaaagaggtggttgtcgtcagaaggtcaagtcgtgtggcaaactcgccatctcctgtntacaaagaagatcagttttttttttttttttagatcttccttccatcagtcacttgtggggtacttttcttcatcttcctttcccctcacttttttttctgtttaatagatagttattgatcgcgtgacaatgcctagaagggtggacttggactctctcgctggctcgccctaagntaattacattttattactttattaagaagagaggatggatgacatgtttttgcatt

SEQ ID NO: 6200 - DNA, 365 bp, Glycine max
  unsure (1)..(365): unsure at all n locations
tcgtctgccctgcaaaagtgttccatgtgctntacacactcctttgtgcaattngagcagttggtcacctgtaagacttccacctgtacttagagagtcctcatctactgctgtcatagataaagaggagcatattcaggagccaatggatgctgatgtaatcgaacgatctggtgccacacaagcagaaccacagagtataacagatgatggggagcttccaactttgcttactanagtgtctaagcttgacctttccgcacaactgaacttaatttcacatagtatcattcccgcgctcaatataatcaggtcacaaagtttcaaaaagattgatgatagttctgatttcttgctggatattg

SEQ ID NO: 6201 - DNA, 445 bp, Glycine max
  unsure (1)..(445): unsure at all n locations
agcttcccgtggcttctttgagaagctntctcaagatgcttctttgagaagatagatccttatctacccacacctttctattaactaaattaacctccttgaaaataattacagataaaaataacacaacaaataataaaacatcaaacataattactaatatatatatatatatatatatatataagggtgttacaaacaatctatgcaaaaccccttattagcatggacgggttgtgtgaacgagccaaaggttaccttaataagtgccataatttagttattttttgaattaaaatgttagcacttataattttttattgtactagttttcttataagcttcccttagatctagttgttgtatatattgtacatttactaatgttgttggtaaatatgaaagatcatccatgaatttgtacggttttatggttgtctgtgga

SEQ ID NO: 6202 - DNA, 556 bp, Glycine max
gtgccctgtaccatgcatacggacctatgacactcagctcccagcagcttgcatatatccttctcacatgtatcaagagtttgctgtcatctacctcgatagagctctaccatatacgccataactctgataccagactgtagtacgctgaaaacacttacataggagatgaatcatgtgatggacaaacacctggtggttcgcaaactactaaaagcgtttcttacacagatatcagtggatgaatggcttgatacaagggggtccatatcactgtatgccttaggtaaccaatacacagaacttgaatacgctatggtcgaagtaacttacacaagcgtagtagctatatagaaacagtaaagaacacatatgtgttatatagtggttaacactaactcttgagctacacccatgcctccttctacacctgataggttcactaatcatatgcttatacacctgagttttctctatgtcacttatggatacaacgactactctctagacacactctagcactgcactaaatttcgccctagtaattaaaaaaccg

SEQ ID NO: 6203 - DNA, 389 bp, Glycine max
  unsure (1)..(389): unsure at all n locations
ctatgtgggagtgcgtgagctcagttgaaaggtgggcaactcgggatggtgtgtatatgtttgactcgtggaactgggagagttgtattgcaccatcgcccgatcgccacctagtaccacatatgacgggtgccccataatccaacaagcttgatgtgagaaagcgtggaagagttagtcttcctacttttgtttgtngaccacaaagtggtacctggagatatgtcgcggnggtcaggagaccttgnggacgtcaggtggtgtgctatntcccanaaccaatcttgaccaatcccgacccaacccggccatagtcagtcagtgagaacctttgacgtacctaaacaggcgagcatcttgcaatcaaccaatataagaacaaagttcac

SEQ ID NO: 6204 - DNA, 395 bp, Glycine max
  unsure (1)..(395): unsure at all n locations
agcttagttattagaggtgtgtgtgtagctatgctctagcttctctaggaagttntctcagagaagcttctcaaggaagttttctcaagaaagcttctcaaggaagctacctagtatataaataaaagcatgtgtaacacttgttataactgtgatgaatgagagtcttgtgagacacaactcaaagttcaacttctgtccctttgtcttccttcaattgcatgctcccccctctctctatctctccctctttcttttcctccattgaagcatcctctccaagcttcttatccaaagctcatcttggtggtgaagctccttcttccatggcttattccctagtggatggcgcctcctctcacctcttctcctttgtcttccgctgcatctccatg

SEQ ID NO: 6205 - DNA, 309 bp, Glycine max
  unsure (1)..(309): unsure at all n locations
cttcatcaattgttggatcttctcganatccgtcttaaacttcacaagacacttgtcaatcatctgatcattgtgatctttgagaagatgtctggagtgtgctagnaacctcttaatgaagcttctagagaaaactgcatgaagctgcctctgtagaaacgctgcccagccttcgttgaccgttggatcttctcatagtttggtttgccacttcacaagacactttaccatgatttaaccgttggtatcttcgagaaaatatcttgagtgtgctataagctctcgttcccgacagcatcttttatttag

SEQ ID NO: 6206 - DNA, 532 bp, Glycine max
  unsure (1)..(532): unsure at all n locations
tggatgtccctcaacattcattagcgaccttanaatctaagctatgaccatgtgaatatctggagagcgttcgtaattaatatttatcgctcgaatattatgcgcttgaatcggccctgcgagttaaatgtcaccccgaaatgttgtcacgagagctatcgctttgcaatttacacagcgtgcatatagtatgcccttgaggccgaactagctgtgtaaagggacgaccacttgagaggctttacagctgccaatgctcagtggcaagcgttttagaatatattgtgcatggatctgacttcatagggacatggtctctccatatgattagtcatagagctgtcaactgtcatttctgagcgggcagatctcttgacgagctgactcgaagctctaagtcatgagacccgcctatcgacttgagcaagacatgcatcatcagttacgactgactgatgtgtggacttcctcggactcgaggaaaggcttcacatgacatgatcagagctcttagaaaatcggctttgattag

SEQ ID NO: 6207 - DNA, 517 bp, Glycine max
  unsure (1)..(517): unsure at all n locations
agcttcagggttgggaaaccaagtctgtcggaaaaagctntacaccttgttctctatgtttcttgataagtcacatttctttgaaagcactcaaggcaaaacattagtaacaaaagtctaacatatttaaaattttcttctaaaagtttgttgtcattaaaacattcatctcattaagggttctgcttcaacactaagaatatcatattccatggtctattgaaagtgggttgtaataaatgttctcgaaagagtttctcanaaaaaggtaaattagtattggcaaaatatttctaaatacttaattcaccttttctcttttcttgagcaccatntaacccattttatttctacaacacatacatattatgaatcttgtacctggtggtgcctttgttcaacacttgcaattttggttgaatctagtgttggataaggagcccatacacanatgagctcaagtcaataagaataagatcatcatcatcatcatcatcatcatcatcatatcatcact

SEQ ID NO: 6208 - DNA, 409 bp, Glycine max
  unsure (1)..(409): unsure at all n locations
caatcacatttagcaactcagtggatatgttgtggattgatagaacataagtaatgtaaagtaaatatagtactttactagaaggaaaatgattgttgaacatatgttggtgcttgaaatttgactttccaaaagtaatcatccttagtagaatcatatgttgttgaattaggccaatagtattattacttaccctattctttaatttaggatatatntatcattaattatctttagattaaattatccttaattaatcgttatgacaaataattacaagacagaaaaatgtattaataatgataggggtatttttaaaaaatacaaatgtaattattttgatacaaatttaagacaattatacttcacttgaatgaaactgtaaatcaacattatttncagcatgata

SEQ ID NO: 6209 - DNA, 178 bp, Glycine max
gactcttgaaagaatcttacataacatgtcactcgaagaattgtgacttttggaaatgtactttttgaaatcacgcactggtaatcgagtaccgtgttatcgattacacattaacatatgtgactcttcatttgaattttgatataaaaacgttaaaatcttctgtaatcgattacaa

SEQ ID NO: 6210 - DNA, 384 bp, Glycine max
  unsure (1)..(384): unsure at all n locations
tgtccgtattgcanataaatatcttattaactacatcttacattgtttagaagttgctcaatcctatgacttgccaatacagatacacacagggtaatggatgggtttcaattgttttatacaattgtggggaatagataaatgtcatgtttaccctgngtatttattacctaactagctagttttgtctactaattgtagattntataacagaattaaagatgactggaataataaaagttgaaccttgtattgaaaaatgaaacaacagtatttgttttcaggtgcaaaatttggtgggtatggttcctttttcccaactcanaagcagtctgcaatgaaggttaatggtaatgttaaaaaaaagtaanagaaaaagtaatt

SEQ ID NO: 6211 - DNA, 458 bp, Glycine max
  unsure (1)..(458): unsure at all n locations
agtctttcanatggataaaaggctcacattcattntcttctacnatcatattcaaattgtccaaataaataataaagtcatctcgactcanagaaaatcatataagtctcatacaattaatatagaacctatattctaatgtcacatcctatcagagcgtggtgttcccgtgtcctctagcatgaggttcttcatagtcatccacctattcatctgctcccccgaacacaagttcaagatcatcacaggatccaaacacaacaacacacagggagtgagttatcacattcctagctaatagagaaacaagacaattaaatatacatattatataaatgagataccacttgcttaaacatagctcacgtaacttcaccacttcatcattcanaattcacttntcaattatcaatcacattacacaagagtcccacacttcgatcaagaataataacaca

SEQ ID NO: 6212 - DNA, 78 bp, Glycine max
agacatgaagaactagctcgccgaggcgagttgagctcttctgttcgagcatgttacttcaagcttaagccaccaact

SEQ ID NO: 6213 - DNA, 410 bp, Glycine max
  unsure (1)..(410): unsure at all n locations
ggagcgtctcgatatattactgtactcaatcggacatccgaataaaaagttattgtcgtttgaattngcttagagcttctgttntcaatgtggagcgtctcgatatattacgggactcaatcagacatccaagttaaaagttaatgtcgtgtgaatattatacgaggttccaatttcaatttggagcatcgcgatatattacgggactctattggagatccgagaacaaagttattgtcgtttgaatntgatacgagcttccgttttcaatttggagcgtctcgatatattacgggactcaatcggacatccgaataaaaagatattgtcgttagaatttgcttacagcttctgtttcaagttggagcatttgattattacgggactaatcagacaccaagttaaaagtt

SEQ ID NO: 6214 - DNA, 460 bp, Glycine max
  unsure (1)..(460): unsure at all n locations
agcttganngatatggngtacccatcacatgtggtactatgtggcggtcgggcgatggtgcacaacaagttttccacatccacaatgcgcgcataaacccaccatcccctgttgcccacctccaactgaactcacgtactcccacgtagcccatatcctcgtttctctccacccgggtccccatcaatcctcccaagcttccacaacatccaatcaaaacaacattcaaacagcacaagctatcacagccaagcaaaacagagcanaggcagaaaactctgctcaacacatcaaccaaaatcacagcttttctctcttaaggaccacagtaacaattccttcgatccaattcgttaaccggtggatcgaactccaaaatttactggaagtctatagtgcataagcctacattgtgaccgttgggatcgactagcaaacatccagaactcattctgactac

SEQ ID NO: 6215 - DNA, 397 bp, Glycine max
  unsure (1)..(397): unsure at all n locations
tgagcacacatcctgactcaccatanacctttgacccaggtgagaatgtctatccttaccctcggaagcaaaaaaggaagagaaggaaaatntccaatcaaaggaaaaaagagaggaaaggaaattcccaatcaaagagtgggagaaagcaaaaagaaaagaaagaaaattcccaatcaaagaatgggagaaagaaaaaaaaaagagaaggagaagaaggaaagaaagctcctggtcaaagatcgaaagaaaacagaagaaatatgcagagaggtctttggaccagacaatatctgaacaatacggaattgtcaccaaatgaacaaaagaaagaaaaggaaaccataacctaaaagtggtcttcttcctttgattaccaaccaaaatcatgtgcatc

SEQ ID NO: 6216 - DNA, 433 bp, Glycine max
  unsure (1)..(433): unsure at all n locations
agcttgtaggcctnggatcttcttcatcaatggattcctttgcttcttgagggtctgatgcagcagaatggagaaggagaaagatgaatggagacgccacttcaagtagaagatgagtctagaaaaagctcaccaccataggatgccatggataagagcttgaaggtagaagaagatgaatgaagggacaggataagaagagcacgaaatttagtgcctctaaagaagtctgaactttgaagtttaattctcaaaatgatcaaagttcanaanaatgcacacacatgacctctatntatagcctaagtgtcacacaaaattagagggagaattgaatttctattcaaatttcacttaaatnntgtggagccaaatttggagccaaaatttcactaatttatgatagtgaattttagttatggttcagcccact

SEQ ID NO: 6217 - DNA, 425 bp, Glycine max
  unsure (1)..(425): unsure at all n locations
gtgttacaacagaacctatcggtttctaattatatgggccattaaatctatcatgtgttgacagtaattgattagcccgtgaatttcctctggggctgaacatacttcggccatgacccttgctttggctagtagtcgcgggaggtcttgacttccatttaaggtcaaggcgaacctatccatccacatggtcgcttcttgatgcaatgcatcaatcaacctccctcttgcttccttctcggcgtatgcttgtgcgaaagtcctctactagctttgttcatgggtcaaagactggtttaactcttctttgtactgccctattatagttagcatgctttgcttcgtggtttctaagtgtttggccaaactnttcttggatcttgagcaagcagctaactcctcctttaagaccatgccatgtactc

SEQ ID NO: 6218 - DNA, 413 bp, Glycine max
  unsure (1)..(413): unsure at all n locations
agcttcctcaccatggaccctanatctatggctggccaacctattagatctggcattcctgttagctctgtaatgactggaagctagtaatggagtgctaccagttctagagaatcggtacgatgaataccggccctgtgttttcttccagaatttggtgcttaaaaattcagcaccaggtagcaggcaacaagtattcttaggagcatcagatttagatatccttccacttgatacagccaaatcataagagatctcatccaatgctaactccaggccatgcacacgagtctctaaagtatgcattccattttcagagttcctcatgaatttctgcataanaatatatggtggatattgtcagacatgcccatcattcgagagttggcatactctacatatatgtgcacata

SEQ ID NO: 6219 - DNA, 498 bp, Glycine max
  unsure (1)..(498): unsure at all n locations
tctggactataacgcccttatgacggtaacgtatacacttatactaaatcactgtcatataaattgttagaatttgtgccaaagcagatactatctaacctaatactttatagtatattatttgccatattagtgttagattatactgtggagtacctttcacatataatacaaatatatattacgtattagacatgacctgacctgcatattcccaatacccggtacatcgaacaaattaatatgtgattgaaaggaggaaagtaatgtatgattgaaaggatctcaccaaaatgttaatatgtgaataattaatatctaatgcatctaattaagggttatcggaagagtaaaagggtgtccattaatatacacagtattcgagtatatgttattgtgcagtttcaataccaagtaactgctacgacaattacattaactactcattacctatgtttggtaannataatgaatcattatcaattgcatatatacaat

SEQ ID NO: 6220 - DNA, 292 bp, Glycine max
tcttcaaaaacaagtcacttgaagaattgtgacttttggaaatgtagtttttgaaatcagtcactggtaatcaattaccattaaggtgtaatcgattacacatcaacagatgtgacttttcattttgaatattgaaaattaatatgtttacaagatctggtaatcgattacaagtattgtgtaatcgattacacaagtgtaaaatacgtttaaacagtataaacatacagtcgtactcttgaaatttgaaatctcgacattatagaacattggtaatcgaatactaccttct

SEQ ID NO: 6221 - DNA, 290 bp, Glycine max
cttggccttttgccacaactctcgtaaatgggagagaaatgttcatctaaagcatacaagtccctaatattatcaaatcctaaaatttgagctcctagggagcaaaacaatgtgtgtctcctatagagggcatcagctaccacattcgtttttccctttttgtatttgataacatatgaaaattgctctaggaactctacccattttgcatgcctcttgtttaacttgctttgccctctaatgtacttaagtgattgatgatcactatgaatgacaaattccttggaaac

SEQ ID NO: 6222 - DNA, 456 bp, Glycine max
  unsure (1)..(456): unsure at all n locations
agcttctttggaccttgaacaagcaattaactcctctttcagaaccatgctatgtgctcgcgactggtctctttcttcccttcgcaacttgagttcactattgctaccccatagagctccgcgaaatttgntccggccatactcttccttgcgagccctcttggtctcttgttcaagggctcttgcagtaattgcattctctttccgtaacccggcacactccttccgaacgtgtgtagcggccaacttgaacttctccttggcaagtgatgcctttcctaactacgctttgagagtatggacttcttcgtcctcttccggtgcttcaaaactctcttcgctgacgaactttaacttggcgagccaatctaaacctcgtatatgaactatcatccattcgtggacccacanatgatgccattacgaatgcctctaagctcttgatctttcttaacg

SEQ ID NO: 6223 - DNA, 333 bp, Glycine max
  unsure (1)..(333): unsure at all n locations
acactactcttaagacagaaatggcatacaacctcttctcatagatacaaacatcaatgtagatntagagcaagcttatgcgcataatttcttacgaacgttcacttgcacaagacattctgtttagctaagagaaatgcacccatatacaataaaggcggcttcgagacctagattatatacctgtacttacaaggtgtatatgtacatacgtcacacacatctccttggctgaacatacatacatgcatactcaaagcactttggggtaccaagaattgcacatgtgcacatgttggtatctctaatacctatacatacacaaacttcatg

SEQ ID NO: 6224 - DNA, 435 bp, Glycine max
  unsure (1)..(435): unsure at all n locations
agcttgtgactctcggcaatntctttaagaaactagtcagttaanaagttatgacttttgaaagaatcttcggaaacaagtcacttgaagaattgtgactcttggaaatgtatntttctaaatcagtcactggtaatcgattaccattaaggtgtaatcgattacacatcaacagatgtgactctttgtgataccctaatttcgtccggggattattacttgatgatatgcaacctttgattggccgcttcaaaatacttggcaccctttgttgcacgatatgtaagtcccgagacacgccggatatcatagggaagcaggtttacgcgatccgtgaaattccgtaatgaggcggaaaccataaggaggtgttgtcgcacaatccgtgagtttccgtaacttcttcgaaagctaaaaaaggagtnaatacatgat

SEQ ID NO: 6225 - DNA, 420 bp, Glycine max
  unsure (1)..(420): unsure at all n locations
atctgactcacacgaggctggatagactactcgtatatgactctctagttcccatgtggcgtcttctcctaatgcacctccctagatcaacttgactaatggattctgcttctctcttacgtgctttgtacgcatatactccatcctcanaggcaatgtttgatatgtcaagttctccttcacttgtatgtcatccaatttgatcacatgagatggatcatggatatacttacgagttaagacacaagaaagacattgtgaagattataaagagaccgnggtaatgcaatttggtatgccatgggactgactctnttagagaatatggaacggaccacgaaaatgaggtgtgagtctttgagatttacatgctcgaccaacccaagtgcacggagtgactctagagaatacatgatcacc

SEQ ID NO: 6226 - DNA, 435 bp, Glycine max
  unsure (1)..(435): unsure at all n locations
agcctgtgcttagagagagcttagactcttctttggttnntttgactaaaacaaaattgattctcatcaaggaagctattcctttatggagaatcctccttcggcttatcgattctttgtggattatggcgtcgttctgttcatattcttcatcttatccatattttctatttttctgttcttgagttctcggaaggtcaacaatggtggttcttggaattgcatccggaatgattcaaaccaagtgtccatggcttggattgcatcacatggtatcagagctcgaattcggagagcacatacaaaatatatcctcaattaggtgcagtttatcattntcattnnttgagtttttcagannaatgagaaactaactttcgtttgattcttgtttaattgtgtggttctcgtgtgggttttgagtaatcttgcatg

SEQ ID NO: 6227 - DNA, 339 bp, Glycine max
  unsure (1)..(339): unsure at all n locations
agaatgaatgagagagatagcgcgtgtggccattnantctatcntgtgttgacaatacttgattaccccgtgcatttcctctggggctgaacatacttcggccatgacccttgctttggctactattcgcgggaggtcttgacttccatttaaggtcaaggcgaacctatccatccacatggccgcttcttgatgcaatgcatcaatcaacctccctcttgcttccttcttgcgtatgcttgtgcgaagtcctttactaccttttgtcatggttcaaagactgtttaactcttcttagactgccctatatactaagcatgctttcttcgtggctctaat

SEQ ID NO: 6228 - DNA, 423 bp, Glycine max
  unsure (1)..(423): unsure at all n locations
actgaacatattctctaatgatatgatgatcaatgtcaatgtgcttggatcgttcatgatgagcagggtttgaagcaagacttatagcagatttattatcacaaaataacatcacagagggcacatcaacttcaaagtgaagaattaacttgcttaaccaaacaatntcactagtaacagaagacaagacacgatatttagcttcagtggatgatattgaaacagtggattgtttcttagaacgccaagaaagaagttattntccaaaaagacacataagtcagaagtggatcttctggtatcaacacaaccggcccaatcagcatctgcaaaggcagtgaggttgagagagttctgagcatggaaaaacatacctcgtccaagagcagaattgatatactgcantaaatgatgaacaacatg

SEQ ID NO: 6229 - DNA, 229 bp, Glycine max
  unsure (1)..(229): unsure at all n locations
agctngatgtgagaaagcgtggaagagtcagtcttcctacttttgtgtgttgaccacaaagcggtacctggagatatgtcgcgtgggtcgtcaggtggggtgctattgcccaaaaccaagcttgaccaatcccgacccaacccgggcatagtcagtcagtgagaacctgtgacgtacctaaacaggcgagctcctggcagtcaaccaataaaagaacaaagaccacaaa

SEQ ID NO: 6230 - DNA, 522 bp, Glycine max
  unsure (1)..(522): unsure at all n locations
ccattcagtagtaattcactactatctntaacctattaactttatcatctgattgaccaataaggtttatgcattcatgtgtccaacacagaaactttgtgctttgttattgggtaaccatgacctaagttatacctganaatggaaaaatatattaatattaacatgcacacaaaaataatgtgaactcaaaaaacctatcaattacctcaacacaggctgttgattatatgtgccacatgcacatgtgaatggcatattgtntatatcagttctttaccctacacactaaatcaatagacaccataaaatcctacaccctaaaccttagacactaaataataagacaccaaacctaaaccctaaacatctaacttccaactccagaataccgcaaccaaacttccaaangaacaaatcctaatacgcaaccgtgacccaacctactagcataatcacaacctcacacctaacaacaaagaggaacaatgaaaaacccatgtacaactgaagctcaatgct

SEQ ID NO: 6231 - DNA, 210 bp, Glycine max
  unsure (1)..(210): unsure at all n locations
agcttcacgccagtaacaatgacggcacccacgtatatatagacccctctggcaattgtntaaaacagactctattcggtaattgttttaaaacaagccccctacagtataattgcccctcttttaacaagaaatcctttctcatgacagtgaagttactcgagaatgtgccaaatgtatgattggggagggggggatagaggtgatggt

SEQ ID NO: 6232 - DNA, 403 bp, Glycine max
catcgttcagagcctgtgctttctcttccttaaccctctgaagttcagttgacagagcctcaacttcctttaatagagacagcttacatgtgctactcctgcacatgttccaatgctgtgcttggattaccatatgctagcttcggtggtttctacacatacacattgtggtgtgaaaatgcaagattctgtccatttttcagtttacaagaaattctaacacttatgatccttgaatcttgaggaccagatttccaattgatgcattcaccattaactagctaggaagtagaaactggaaaatctggcttatagttagaagtcttgacagtgatgtgaccaagaacaacacaataatcacttgaggaatcacagcatgatcatgccaaatggtctgattcat

SEQ ID NO: 6233 - DNA, 455 bp, Glycine max
  unsure (1)..(455): unsure at all n locations
agctngcaagtggcaaagcgttattttggcaaaggaataaccagngaagataatcctccnctgcaaaaaatgttgataaatatattntttttcttaggggtgatagtaattgaattatttggagcaatattttgttcagaaattacatcaattatagaggtggttgcaaatcataagtacaaaggaagttactagaaggaaaaatagaaagggaccgatcattctgaactgattccagatgcattatntcactttctctcgccgttcaactgcttacagacatggtgaaagttcggaatttcaaataatgaattttattttgctgcagtaaaacaatttaacctactatatctntatgtatttgattataggtgcangaaattagctcacaataattatttttaaacctangactnntaattatataaactgaatatatngaattagtctcttat

SEQ ID NO: 6234 - DNA, 432 bp, Glycine max
  unsure (1)..(432): unsure at all n locations
ctaagcttgcttataaattgttccaggttactgtttcaagcaatcttatttatttcttggtttgcttgatttgaaaaagttccatcactttagtagttnttgagaccatttggccaccttaaagagnttttggtgataaaataaaatgcttactacttaatgatatgtaagtattctatcatggaaaaagtttaatggagacccaaaagtctctgcaacacttagaaagacagtaaaaaaaatataaatatgatagaattttacgtgatacgaagagaaaaataatgaaaaatgagaccaatttaattacaaatgaatcattttctatggaatgttaaaataatagagtgtttgtgatgatactcttctactattaccattccatcatctccgctaaggattggtagtagaaagataaatgagaccatttaa

SEQ ID NO: 6235 - DNA, 392 bp, Glycine max
  unsure (1)..(392): unsure at all n locations
atcctctaagtcacctgccgcatgcaagctngatgattannattccttctttgacaacagcatattgatcttgtcatcaagttgcacaaacttcgaaggttcgtcgggaatccgcaaattcccttacgattccttactgaagcggattgtgatgcatgaatcgagaatcctgcatactaggcatgggaacagcaagaccaggttcttcttgcctggttgcaatcgactctatccacatagatcttatctcggatcattggatgcaatcattcctacgaagtttgggaacagatccatgattatttccacanacagacgcaagccagatgattcttgaagataagtcgatgcgcgagtttctgcttatgatcaaagctatttctgatgcactt

SEQ ID NO: 6236 - DNA, 439 bp, Glycine max
  unsure (1)..(439): unsure at all n locations
tgactgaagacattgaagtctntngagatgtaaatgaagacattgatagtcttgacaaaagactctgatagtctttgaaatgtaaagaagactttcatagtcttgataaaagactctgatagtcttttaaatgtaaagaagactttgatagtcttgacaaaagactctgatagtcttggaaaaataaagaagactttgatagtcttgacaaaagacattgaagtctctgaaacgtaaagaagactttgatagtcttaacaaaagacattgaagtctttgaaatgtaaatgaggacattgtagtctttagaatgcataaagatagaggactntgagtcctatgaaagataaagacaaaggactttgattcctatgaaagataaacgcgaggactntgagtcctatgaaagatataagagatgagtgtataatctcaacat

SEQ ID NO: 6237 - DNA, 348 bp, Glycine max
  unsure (1)..(348): unsure at all n locations
cttgagtcacctgccgcatgcaagctngaagtgagaaagtgtgganaagtcagtcttcctacttttattcgttgaccacagagtggtacctggagatatgtcgcgagggtcaggagaccttgnggatgtcaggtgtggtgctattgccaaaaaccaagcttgaccaatcccaacccaacccgggcatagtcagtcagtgagaacctgtgacgtacctaaacaggcgagctcctggtagtcaaccaataaaagaacaaagaccacaaagcaaggaggcttgtgtggtggctggccagctatgtgatttgagtgatatctagaatatggcctatggtaatcgattaccaa

SEQ ID NO: 6238 - DNA, 439 bp, Glycine max
actaagctcgaggaccatggggtacccatcacatgtggtactaggtggagtgtcgggctatggtgcacaacatattttccacatccacatgtcgtgcataaacccaccatcccctgtcgcccacctccaatggagctcacgtactcccacgtagcccatatcctcgtttctctcaacaccgggtccccatcaatcctcccaagcttccccaacatccaagtaattcaacattcaaacaacacatactatcacagccaagaaaatagggcaaaggcagataactctgcccaaaacaccaaccaaaatcacagcttttctcacttaaagaccccagtcacgagtccttcgttccaggtcgttaaccgttggatcgactcgaaaatctcactggaagtgtgtagacataatcctacatttgaccggtgggactactaaaaac

SEQ ID NO: 6239 - DNA, 413 bp, Glycine max
  unsure (1)..(413): unsure at all n locations
agcttctcatttcaatttcaagcgtctagatatattactggacacaatcggacatccgagtaaaatgttattgtcgtttgaatatgctcagagcatctgttatcaatttcgagcgtctcgatatataacgggactcaatccgacatccgagataanagttattgtcgttggaatttgcccagagcttcatatttcaatttcgagcgtctcaaaatattagagcactcaatcggacatcnttagtaaaagttattgtcgtttgaatttgctacgagcttctatattcaagtacgagcatctcgatatactactggtcccaatcggacatccgagtaaaaagttattgtcgttaatatattctaagagcttatgtattcaatttcgagcgtcactatatattacgggacttaatc

SEQ ID NO: 6240 - DNA, 370 bp, Glycine max
  unsure (1)..(370): unsure at all n locations
cgacaataacatnttactcggatgtctgattgngtcccgttatatatcgagacgctccanatngagaacggaagctctgagcaaaatcaaaagacaacaactttttacttggatgtccgattgtgtcccgctgtatgtcgcgacnctcgaaatttagaacagaagctctgagcaaaatcgaatgataataagattttactcggatgtccgaatgaatcccgtaatatatcaagacgctcgtaattgaaaacggaagctctgagcaaattctaacaacaataacgtcttactcagatgtctgattcagtctcgtaatatatcgtgacgctcgaaatcgaaacaaaagctctgaataaatcaaaagacaata

SEQ ID NO: 6241 - DNA, 71 bp, Glycine max
  unsure (1)..(71): unsure at all n locations
ctacctatgtctgngttatatatgcagtattggctacggatgagaagtacaatgaagctatttttagcact

SEQ ID NO: 6242 - DNA, 222 bp, Glycine max
  unsure (1)..(222): unsure at all n locations
cagctcgtccttatggttattaatgtatgaatcgttgcaattgcacctcttccttgtcaggcaatatatctgtttgcatttgggattccaattttcatcaacagtggttaccctactcctcacgtgaagtggaacttgtgggttatccacaagctgctgcttacccttgtttatggntccatactgtacatgtatcattctaggtggagagaaaggttacct

SEQ ID NO: 6243 - DNA, 407 bp, Glycine max
  unsure (1)..(407): unsure at all n locations
tgtgtatggcgaattgatcctatacttaactcatggaagaaggtgaattctatgtctacaggtagggcatattgtaagacaggtgtcttgaataacatgctntatgttgttggaggggttagtcaaggtcaagctggattgattcctcttcaatctgctgaagttnttgaccccttcaaggatacatggtccgacgtacctagtatgccattctcaagagctggagtcctgcccacagcttttttggctgacatgttaaagcctattgccaccgggttaagctcgtacaagggaacgttatatgttccccacagtatgtattcatggccatttcttgtgatgatgaggagaaaatatgatcctganacaaatcatggatggaaatgccacatggaatgggtgaggga

SEQ ID NO: 6244 - DNA, 315 bp, Glycine max
  unsure (1)..(315): unsure at all n locations
atgcgcgtgagcacagggagtcaagcgaggtaaagagttgactcataaatgaagagtcaagcgagggagatatgaacagtcaaggataacgccaaatntaaaattaaaatacacacacacaaaaacaacaacattttcatataaaaaattggcgccgatttgtgttccactaggacattctaaggcggcttcaagaaactgtcttagaatgtgtgtcatacaaaaataattattcttaattacagaactgccaccgcataacattctaaggcggttatgtataatcgtcttagaatgcgcgtcgtaaaaaaatga

SEQ ID NO: 6245 - DNA, 363 bp, Glycine max
  unsure (1)..(363): unsure at all n locations
agcttcggaagaaagtgatgaggtacaagccctatatgcanagctngaaagagccagggtagtcgaagagaagttcaagtccataaccatcatagtctgaaaagagtatgatgaactaagggacgtcaatatggccaccgctgaagccttggaacgagagaccaagaaggcccgataggaagaacacgaccaaagcaaagttttgaggggctntatatggcagcaatagtgagctcaagctccgaagaggtgaaaggaatcatcacnggtcataggcatgatcttgaaggacaagctaaaggcttgtcttangtcgaaaagaaatttgtcccaacagttaagcgagactgaagggaatatgtg

SEQ ID NO: 6246 - DNA, 170 bp, Glycine max
gcttctatggaggctggatctgtgagcttcagtgatgtccttcaatggcgattatctaccatggagatgcagcggaagataaatgagaataggtgagaggatgcactcatctctagggagtaaaccatggaatgaggagcttcaccaccaacagagtgcctcgggtaaaa

SEQ ID NO: 6247 - DNA, 310 bp, Glycine max
  unsure (1)..(310): unsure at all n locations
agcttccncgctctaatcacaactctntgtgaagccctatgggttgtctctgactctctcaccttcgagtccctcaatcttgcgacgatccatctacattcacaagaattgttggaaccccgatgatccatctatcaccttttcgaggtcccgcaaggccagggccagggcttcaatagaagcacccctagttggtcctccacctcctcggtggtgtctaccttctctttcacttcctcggatgagcttgagcccatgttgcagagtattcatcatggtctatgcctcgtgatccanaacattcaccacc

SEQ ID NO: 6248 - DNA, 453 bp, Glycine max
agactcttaatatatgaagagtattcttatggaaccttcacccgacgaagacactgacaaaaacttatcttctcctctttggacaaagtatggcaggctgctggcaagctaatattcttcccgtcagaccttggatgcaactgtgatcgtgtgctcatatcagctagatcttgacgggtatccaagccatccttcgtcttgcctagaatagtaagcagcgcaccaatcacactgtcgcaaacatttttctccacatgcataacatcaatacaatgtctaacgtcaagatcagactagtacggaagatcaaagaacatagacctcttctttcatatgcaactcttactcttatccttcttttgggtctttccacatacaatattcacgtgttgaacacgctcatatacctgctcaccagtcaacagtatcggcgcaatatcatgctcttgactt

SEQ ID NO: 6249 - DNA, 400 bp, Glycine max
  unsure (1)..(400): unsure at all n locations
agtcctctcacaaggtggagggtgagccatgttctcagtatgaaagttagtagtggaatgttcaagatcataagttcccaaaatttttgtctctctcaaatactgccacaccaagtgctctaggtatttntcacacaaaatattgatcaaaagaagctaccacacaaaaaatcagccaaaaataacaactttaactatcaaaacaaaaatcgctaaataaattcagcagtggtcacagcaaatcagccgctgaatcagtcgctaatcactgctcacactgttcacagcaaatcagccgctgaatcagtcgctaaatagggaatgcaactgatatgcanaatagaacgctacacanaataagatgactaaacactattatgaacctttggccactactcct

SEQ ID NO: 6250 - DNA, 214 bp, Glycine max
  unsure (1)..(214): unsure at all n locations
ccttctggtcctcctcatagattgtgcatgagataacatgctctattntcatctcccactccaagtaggcctccggatcattctttcctttaaatggaggaatgttgagtttaataccatcaattcggttgtgtctaggaacaccatcattccctcttctccttctttcttctttattatgaactctattctccatttgatcccacctctcatg

SEQ ID NO: 6251 - DNA, 284 bp, Glycine max
  unsure (1)..(284): unsure at all n locations
gtttcaatggagaaagagaatgagagagagaggctgatagggacgtggaaattgaaggaggatatggaatgaagttgtaacttcaaagtgtgtctcacacagttctcattcatcaaagatgtgacaagtgttacacatgtttatatntatagcctacgtcactagcaaatggaaagcttcattgagaagctagaaatgtagattcattgagaagctatgaagaaagctttcttgagaagctagacgggtggtggacacacacccctccaatagcttagctcacc

SEQ ID NO: 6252 - DNA, 419 bp, Glycine max
  unsure (1)..(419): unsure at all n locations
gctgccactattntcatataatagggggagaagtgattggaacatatatgttcagccctcctggtgtctctcttccgtaacgtttccgggacagttggcgagctcactgggaactatttttgagagttaacgccatttaatcttgtgcaatggttatcaaacacctccttgtggctcccttattctcttaaggcttggaaataacctttagctttaggtgtttaaagttgctgagtaacaatttattgtgccaccaacccccactattcgccccggatttaaaaagccctaccggtttggaacataagagggagtgattgtgaatcttgctcccttgttataaagaccctttaagtttcttgtaatactagcggattcccctgataatttcatggggtaccccaacaccaagaataccg

SEQ ID NO: 6253 - DNA, 382 bp, Glycine max
  unsure (1)..(382): unsure at all n locations
ctgcagcttttatccagggctcatctggtgggaagctccttcttccatggcttattccttaatggatggcgcctcctctcacctcttttcctttgtcttccgctgcatctccatggtggaaaatcaccattaaaggaccccattgaagctcatagatccagcctccatagaagccccacaagcaagcttccatcacaaaccctgtgatttcaatggatngattaaacagtaaactgctccatttccgtcactccagaatggtgaagtgactaaatcaaacagaacatacactctgagggagttcccagagagaattgcanatgataggataaggtgcattgaatatcacctctntcaaagtgaatatacaactttccataca

SEQ ID NO: 6254 - DNA, 404 bp, Glycine max
  unsure (1)..(404): unsure at all n locations
agctntatgaatatggctagtcacattgttcaagcctcacttctaagctgcttgtaaacaatataaaatataaaataatgttactttggatcggattgatcttgaaaaacaattgatctaagtactctgattntcttagttattcaggtttgatatgaaatttaaatctatttttttcatccatttggtggttcagacttcataagtttggtggacccaagtttgagcatgctctgaagcatgtagttcaattgttntccattgactttttttgtgttactttggggacaacttatgagagagagtaatgcccggngatcaaatataaggtttattctttaacacaagatatgccatatcttaccttgactatganaatgcgtctattgagaatgttttgagtg

SEQ ID NO: 6255 - DNA, 423 bp, Glycine max
gtctgtatggtggtcgagtgaggagcgcaaaccacagacccttgcaacacgtacatatttctggttcacggccaactaggttaccaaggtaaccaatgcgtccattttgacttcaagcttcttatgttcatatgatgcagctgagttagtagctacctcatgcactactctaatgactataacatcatttctggcgctatactgctgggagttggaagccatcttctcaattatatttctggcttcagcaggagtcatgtgatcaagggctccaccactggcagcatatatcatacttatcttcatatgactgagcgcttcataacaatattggagaagaagttgctccaaaatctgatggtgagggcaactggcacatagtctgttaaatctctcacagtactcataccatctctctccact

SEQ ID NO: 6256 - DNA, 427 bp, Glycine max
  unsure (1)..(427): unsure at all n locations
agctnngctttactattgaaattcagaatataaagtttaaacatccttaaaaatatgtgaggtctcatttatactnntttttntntggttgttgcataaatgtgggaacagctgcctgaaatcttcaggccccaccaaaagcaacccccaatcagctaccatatctacaccttttagattcagaagtgaagaaagagcagttaaacgcanagaggcaagttcttttccttgccccttacattagctgtgccaattatggtagaactataggtcttactggctttcccccccctttnttttgtatntcagttcttgcagaggatggatgaaactaaatccaaggaagaagagaaagttaagttgcaacggactctcaaggtgaatgaatttataataatagctcttctggtacatgaattaccttttc

SEQ ID NO: 6257 - DNA, 363 bp, Glycine max
ctttgctctgattgttctactaggaattccaagcgttagaaagatttaagggattgaagcctcagtttcactgtcttagtgcgaggaaaatttctctctgtacatatattaattttcacaaatcccaacggtgggaataagagaaattgagtatctaacgtggtgtccaaatgtcaaggtgatccaacatttatcatgtccaagaccgtatttttactaagacatgcttgagtgtatgcgaatataagagaggattctacaagatgaagaatagagaatgaatttgagaggaagagaaagcgtagaaacatgtcgtaaatatgataacttacctaatatgtctctatctatagtttggatatt

SEQ ID NO: 6258 - DNA, 445 bp, Glycine max
  unsure (1)..(445): unsure at all n locations
agctntattactattctgaccctacctagtatgttttctaccatactagtctcatgccttcattacatacaccaaccgtaacaacaaacaaacatgatgcacaccaaccacacacaataaacatttgaaataaacacacaaacacgacacgagtttgagaagcaaaacacccacctcgatccaggaaatcaaatgtcgccttctcctcccttaggtccaccaatgttgcactcgatcagtactatgaagacataaatntagtccaatggatgttgaatgctagggtttcaagttcatgttcaatgtntcatggagaatacgtaaagaaggataagtgtatntctaacactcaacctgtctcttttctaaaacgataattataaaataacatttaataaaacatatataatcttatttactaaagtaaataaatttaatctcttat

SEQ ID NO: 6259 - DNA, 495 bp, Glycine max
  unsure (1)..(495): unsure at all n locations
tgtctcagcgtntatgcgagacggagaccaacatgctagctattatcgccatgtaccaagaagagttaggtctagccacggcccacgagcatagaatcgcggacgagtatgctcaagtatacgcggaaaaagaggctagaggaagggtgattgactctttacaccaagaggcaaccatgtggatggatcggtttgctcttaccttaaacgggagtcaagaacttccccgcttgttagccaatgccaaggcgatggcagacacctactccgcccccgaagagattcatgggcttctcggctattgtcagcatatgatagacttaatggcccacataattagaaatcgttaggaaactcgtatgggctctcagaccttgactagatacgactatctttttatataaaatgaagtggtccatgttctacttcaaaagcttggcaatcaaatactctacatttatctctactgcatgtctttcttaccactcctacgtt

SEQ ID NO: 6260 - DNA, 424 bp, Glycine max
  unsure (1)..(424): unsure at all n locations
tatgttgcttatgttgctccccttatctctaacattagagacttaagaaataagtttaatggtgatatatgtgtcgatagcataaaattatntaaaattgtcaatcaattacaaatcagttttgttatgattntaaagataattattataaaataataaacttatcacatataatgagttgtaattggataacgatgtaaaacngttttactattgtcaatacatgaacctattttttagatgaaatttgaataaacttcttcaaaaacacttatagaaaaagaaaataagaagaaaaaatatataagtttctatataagaatttggttttgtctagacaacaagtatcttcaattagagacaatctcgttcgagtaagatagaactactatgaacaacaaaactcttctctcaagtatttaat

SEQ ID NO: 6261 - DNA, 434 bp, Glycine max
  unsure (1)..(434): unsure at all n locations
gcatgacttatgcctaggaatntattatttgtttntgaatgtaaaaaaggggcatgaatattaggacatgtttgagaggttntttaatttaaatttggctgccccatgaggaatatcttgcacttaggtagcatggaaaatacctttcaacggtatgcatatatgtgaatggcataaaaataccttgcaaagtgtgaattaatagtaaaaatgcctttcaaaatatgtatatttgtggataggtagtataaggagtctntcttttttaaaatgtacccatgtcaaaaatagcacggtgatgcttcccaaatgaatatatgatgtgggattgcccctcaagtgtatatagatgacatcgaaagtccttttcaaatgcaagcgtgtgcatgacgtgagattggctctccgatgtgcatgtgcatataaataatgtg

SEQ ID NO: 6262 - DNA, 439 bp, Glycine max
  unsure (1)..(439): unsure at all n locations
atcctctgagtcacctgccgcatgcaagcctggtgcttaattcatatatgtgaccaaatgtgcgtgactccaaggctntntacaagcatngacgtgttgataccataatatgatccttttataaaattagaataaagtcgttaataaattggtttgggaagttggtgcggatcacataattggatattgactctaataacgtgactctcttcagtgggactccgggtggtatgtaagaactatggggcttaagtgttgtacagaacattactataatattaagtattcatctttatattaattttctattgttaaagtcgtaaaattaattattcatattttatgattacgtaattctagtattagattattctcaatggccgtaattcaatcaatatatttcataatattgttgatattatatacgataaaatttatg

SEQ ID NO: 6263 - DNA, 450 bp, Glycine max
  unsure (1)..(450): unsure at all n locations
gctatagggaganactgcgagacacanaattgcaccaaacattgtctcaatgtcgttattccagcatttgacatcaagcaccttcaacccgccatctttaccagcttccaggttcatcccctcgatcttcaattctaagatgtagtttattatataaaataaaatataccacacttaattgttgtgagagaaaaaaaacatccatgataaaaaaatatgtttaattactattacacgccctaaattgtgaggatatgttatattagtctctgaacttttattaattcttgaattttgataaattatttttctagtcctaatataataaactattactttatgatgattcttttagcattttttgatatttaaaatacaaattcaagcacgtaacaaataatataatacaaaatatattcttgtaaccatttaatatatatcctgcttcat

SEQ ID NO: 6264 - DNA, 358 bp, Glycine max
  unsure (1)..(358): unsure at all n locations
gtgtggagcttcatggagaatgagggagaataatgcaacgtgagggagaaggagagagaaggcttctgcaatgtntactgctgagtgaagagagagagagttgcttcttggttattaacaggctctttcctctcttcttattatgttattcaagctctgccacatgtccctatttgattggagcaaanagggcccactctcttcttttgactgtgacccatactcagtcacataagtgagaaaaatctgacctttganacgctaaaatcctgcctcggtttgcgtgttgtttctctggttccagtttctcgcgtntctctgcgttcgtcngggccagtttttcaaagcaaggaatatg

SEQ ID NO: 6265 - DNA, 394 bp, Glycine max
  unsure (1)..(394): unsure at all n locations
tgagcatattcnacaacaatagcttcttactcagatgttcgattgagtcttgtaatatatcgagatgctaanaatcgaaaacggaagcttctataatactcaaacaacaatgactntntactcggatgtctgattgagtgttgtaatatatcgagacgctcgaaattgaatacgtaatcttcaagagaatccaaacaacaataactttttactcaaatgctcgattgtgtccccaaatatattgcgacgctaggaatcgataacggaagctctaagcaaattcaagcgacaataactgttttctaggaagtccgattgcatcccgtaatataccgagatgctcaaaatttaatatgaaagctttgagcaaacttaaacgataaaaactctatac

SEQ ID NO: 6266 - DNA, 306 bp, Glycine max
  unsure (1)..(306): unsure at all n locations
aaaatagtggtatactaacagactgcattctgatcaacattaacatattcttagagcaaggaagacaacatcttcattcgagtttagaagaataataccctatattgctgaattaacctattgatcaatcaacaacaggaactgaagagaaatctataaactagtgatcctagcctggttgtgactgcagaaggtcacaataaataataaataaatntcattatanatatattgcatacttactgagtaacactaaatacatttaatgtgtaacaatgtatcctattcataacatatagatctctc

SEQ ID NO: 6267 - DNA, 327 bp, Glycine max
atagagtagaagatagatcattgatccatcctccaccttgttgtgtataacacaacaatcatagagacttctcttgaatcctcgactggtgataaagctatcagacctcatgtaccattgccttggagattgtttcacaccatacaaggatctctgcagttgacaaacatacctttcttttccttgaacttcaaacccttcacgctggtttattagaatattctcttccaatctttcatggagaaaagaagtcttgacatcaagttgttcaagttccagatcttggtttgccactatagcaagcaaaatcctgatggatgcatgtct

SEQ ID NO: 6268 - DNA, 393 bp, Glycine max
atccttaagtcgaccgccgctgcagctttcttctttatgcactgagatttttccgatcttagatccacttcacctctttctcgtctcatttttgggtttttttttctttccagtctaagatctactccaccacatctccccctttcctatttttttttctaggttatttgttcagatcggggatccgcgattcctccctcgtcttttatgttcgcgatttgatattttcgtgtgtattattttatccggacgtgggtttgtgtttggtggtgtttgactgtgttttctgttgttattgacaaaggggatagagagaggagataataaaaaaagaggataacaagacgaggttggcggcgactgcgagaaactacagtggcgacaccgttgact

SEQ ID NO: 6269 - DNA, 153 bp, Glycine max
tgcttgcatcctaagacttagttgcatagatataagcgattgttgacatattacctaatagcgtatgcttaggagagtgcgttctgactgtgctactagtggatatgtcatgtaagagccataatgctgaaattttatatgtatctattcacc

SEQ ID NO: 6270 - DNA, 340 bp, Glycine max
  unsure (1)..(340): unsure at all n locations
agcttctagcanacaggttgagggtagtgctaccagttctaatagatganaggcagtcagccttcataaagaatatgcatatccttcatggaattctcattctcaatgaggtggtggatgaagctatttggaggaagaagcctgctatgatgtctaaagtggattttgaaaaagcctatgattcggtatcttggtctcttttggattatatgttgatgagattaggcttctgccttaaatggagaaaatggatttctacttgtctccaaacagctacaatttcagtcctagtaaatgggagccccacaaaggagttngttccttctagaggattgaggca

SEQ ID NO: 6271 - DNA, 260 bp, Glycine max
  unsure (1)..(260): unsure at all n locations
aagagatngtaaactccatgttactgtcaatctcaagactaagttctctcaacaccaacattatgtcgtatattccaacggtgagaatgaaggaaatggancctaacgtggtgtccaaatttcacgacaatccaacggttgacgagtccaggatcgttgttttactgggacaggttttgagtgtctactgngaaaaaaagctacgatgcgaaaggcatttgtctaaaaatcaattccaaacctggtgctcatatttcacg

SEQ ID NO: 6272 - DNA, 289 bp, Glycine max
  unsure (1)..(289): unsure at all n locations
caacggagaacaatggcggtccgtggcggctactggtggttatgggtggtgaagaagaagcttgggacattgtggaagggttttggaagagagaacgagatagaaatggcttgttttcatggctacacgaaataataaggctngcaacactcatgtgtttctgctctcgggaanagaagcatttctcacacaccagaagacatatcgcagatcgaacggccagatcatggacatttgtcctatgaacgtccagatcaacattcgagaagatccaatggtaaatgaatgt

SEQ ID NO: 6273 - DNA, 437 bp, Glycine max
  unsure (1)..(437): unsure at all n locations
agctnggatgatgttgcgcgtactgatgggtaccatgatatgtcgtgcggggctngacccatgcgggcgccgaagagacggcatgggtatctccttccttctcttttgccccagatgttccgattctcctagcattggcacttgtggaggagacgtaatcaaacttccctcttgttaaccctactttgattctttccccggcaaataccaagttcgcgaaactggaaggcatgtatcctaccaacttcttgtgaatgtatgtatacatgatattgatgatgtcaaaagaagaatcaaacaaggctcattntgcttcaagattaatacaagactggttcaacaaactaagcctcgattcaagaattcttcaagatcatgcctngcctcacaatgaaagggttcaagtcattcgaggcacatgtaatcgattaccaata

SEQ ID NO: 6274 - DNA, 252 bp, Glycine max
tcaatgatcatactacacatctagaggccttctaaagctaagcacactagaaggggttcgattaatcaaataaatcgcagatctcatagcctcactccatacatgagatgagacattaccatctatcataactgatcttgtcacctctaatatttgactatctttcctatcagccactccattatgttgtggcgaataaggacatgtggtttaatgcatgaatccattacagttcatgaactctattaattc

SEQ ID NO: 6275 - DNA, 361 bp, Glycine max
  unsure (1)..(361): unsure at all n locations
ngaagttntatctccgtcaactagaagaatgccaattaatatattcgcgaatataaagaattaaagagtagctgaattaccttgtataattattctttcattcttttaaagcattcattcgttgaatataaaaatattgttcaccatcattcgttatataattaagtattcatgtaaacgtttgatataatattaatttcttttatttatgttctctataagtgtaaagtccatggccatctcttatagaagagtgtaaactctaacaagaagtgtgcaagaatacttccgaacgtattcttatctttatgaaattatgcgaatagtgaaaatattgaattgtttcttaagaactacacat

SEQ ID NO: 6276 - DNA, 382 bp, Glycine max
  unsure (1)..(382): unsure at all n locations
tgaagctctgataccactggttagatatgtgttctcatatatcataagaaggtgggntgaattaagatattccaaactacttccacaattaagaatctatttcactttntattcaagttataaattcccttaataatgaacttcttaaatattgattcacataacacaatttgaatatgaatataaagcagtaataaacaaaggagattaagggaagagaaagtgcaaactcagatttatactggttcggccacacccttgtgcctacgtacagtccccaagcaacccgcttgagagttccactatcttgtagattccttctacaagttctaaacacacaacgacaatccttcctttgtgtttagaagtcctttacaacaag

SEQ ID NO: 6277 - DNA, 360 bp, Glycine max
  unsure (1)..(360): unsure at all n locations
agataatcgtcatactcagacatcaatgatgaatttaagttagcctcgatcttacgttntcctttagaagatgcccaaaatcattgcaatgtccttatcataattatttttaaaacatggcaaacgattgacttgtactgatccactgatatgaacaagacataacaatatatggatagtgtaaacaggctttgttaataatagaagatattgcgatgaggacaaaaagttagggtcgtccagctagttagcagcctagaaatccaagacaagtttgatggtaactccataacttgatcgttaatgaaaattctaaactttnttntatcttgatcaaagactaatcatgctcacatacat

SEQ ID NO: 6278 - DNA, 474 bp, Glycine max
  unsure (1)..(474): unsure at all n locations
tataaaataaattagagggtaccaataccaaaactggctataatctgcaagaccaaccactgcagtaattntatcatgttgtgtcttagaaagtaaccttatggtcacatttctgccaccagcatcaaggattcctgatgccaaaattgctcccatcttgctcatggtatcctcatgcttgtccagaataattttctccaattgtcgcctagaacacaattattgtaagaaaacaacaaatatatagcctcactgtccaaaataaataggacagacttacctaaatgttcccacacgtgagtcactagcttcactgatctgaaccatgaccatagccattgctataagggcaccttgacgaacaaaatcaacaacatccgatgtcaaaggctccaataaagaaatagcctcactgagacctgtacccgcacangagatacccacagcaagaagctgctcatatcgaacatgtgg

SEQ ID NO: 6279 - DNA, 356 bp, Glycine max
  unsure (1)..(356): unsure at all n locations
ttaagtcacctgccgcatgcaagcttctacttatgtggcagggcgggcttccttcaccttcttgtctccaacgcgaactntgaccattgttcttccttcccgcaatgcttcttttcatgtctgcctgagtgggcttatagcctaaaccatacttcccacgattcccttgagtatttatcaggctagttatgccgccgttgttntttcctaaacccatcccgggttcaaaaccgttccccaacataactcgggccatcattaccgctgcatcggacagacaaggttgcccaaagagggagtccacggaggaaatgctgaccacctcataagactggaaagcagtttctaacgattct

SEQ ID NO: 6280 - DNA, 466 bp, Glycine max
  unsure (1)..(466): unsure at all n locations
tctanactntatacaagaatgaagctctgataccacttgttagactagtggtctcagatatcataagaaggggggttgaattaagatattccaaactacttccccaattaaaaatctatttcactttttattcaagttataaattcccttaataatgaacttcttaaatattgattcaaataaaacaatttgaatatgaatataaagcaataataaacaaaggagattaagggaagagaaagtgcaaactcagatntatactggttcggccacacccttgtgcctacgtncagtccccaagcaacccgcttgagagttccactatcttgtaaattccttttacaagttctaaacacacaaggacaatccttgctttgtgtttagaattcctttacaacaagagacccacggtctcttaatcccttagagaatgaggagaagaagaagaatgaatctctctagaaag

SEQ ID NO: 6281 - DNA, 231 bp, Glycine max
cgtaaccaaccacaacgactctcttgtgcgaagaaaagcccgcattcacgactggacaccaatgattgtgggccacggctacatcattctctatcatcacttactctttctcacaaacgtcatcgttgttacacggcaagtactccctcaacctcatactctttcgcctcaccgaaaacctaaccctaaccctaaccctaaccctagcgagcctaaagtttaaagagaaag

SEQ ID NO: 6282 - DNA, 536 bp, Glycine max
  unsure (1)..(536): unsure at all n locations
attgcactgcgagcatgcgaactcagacactaggctcgcaggatgcagagactatgcctgcttggttcagactttgactatatacttttctctctatgcactcactgactatacccatataaacacataatacaatgcgggtctatcttccatgtgataatagtttaagaagctttcctacgtacgcaagaggtagggaggcgagatggcacatgggagatcactgatgggcaggagtgtggtgcacacaatttggaggtgatgactaggttttcattgtattataagaagcatcatgctatggctgatacaaagccatctcatggcatangctagttctacgaaattccattctatatacgcttaagggctaaaatcgctaatgtccggtttctgctcgagggaattattgaatacaaaatgcactatctcatcatttgaacacatgactcatgttggaagccttaccctacgtatagaacacctagtgacagactcaggacacttatactttcggatggacgactcctgaggcg

SEQ ID NO: 6283 - DNA, 391 bp, Glycine max
  unsure (1)..(391): unsure at all n locations
ataacaataatggagttgaaacaatcagagaatatttggagaagatggataatgaagtatgcattaaagtaagcattaggaatctgactngctcctttctacatgccacatgtatatgctctgacattatgcagctcaaccaactctgtttccctatttatgtcatagaacatatataactatttattgcttatgaatggcatgcagatgaatcttagatgaccataaaggaagtctacatcattggcaacattacgaagccctacattggtcataattctgcgaacaggactgggtcttgatgctataacgagtagttacaggaaaatatgactgatgcggccataattacgattagttgtgctgcacaattacaactgcagaatgctgt

SEQ ID NO: 6284 - DNA, 179 bp, Glycine max
  unsure (1)..(179): unsure at all n locations
tttttatgtggttcttgagtggctatcaaaggcctatatatatatgtgactcgacacacaaattgtaacagagtgcctcacaacataaaggtcttatcctcttatacagcagaatgattttattctcttacaacattctgggccaanacacttgtgattgaatgaagaattatttgagt

SEQ ID NO: 6285 - DNA, 465 bp, Glycine max
  unsure (1)..(465): unsure at all n locations
agaagctagagcttatctacacacaccacctataatagctaagctcacccgcatgacaaaatacatgataatatacaaaaaggtccctattacaaagactactcaaaatgccctgaaatacaaggctaanaccctatactactagaatggccaaaatacaaggcccaaaagaaggaaaaacctattctaacatttacaaagaagaatggatccaaccttgacccatgggctcanaaatctaccctaaggttcataagaaccctagggccttctntagtagctctagcccaagcctcttggagtcttctatccaataccctctgggggtaggatagcataaaaaaactccccctccccttgtgtttatgtntccaggtgcaagggtgctcgcccaggcgagctaaccttgtatatatatatatatatatatatatatanggaagacacatgtatgcgctctctatg

SEQ ID NO: 6286 - DNA, 315 bp, Glycine max
atcacagttatcatcttccttttcatcattgggggtgccacctgtgctgccaggtctctccaccattgggcgtattctttgcaagattcatgcacctttttgcacatgttctgtagttgcatcctatccggagccatatcagaattatactgatactgcctaacaaaggcaaccattaggtcctctcaaaaatggactcgagaaggttccaagttagtgtaccaggtaacaactaccccagtaagactatcttggaagatatgtatcagcagttcctcatcttttgcgtattcccccatcttctaacaatacatc

SEQ ID NO: 6287 - DNA, 288 bp, Glycine max
  unsure (1)..(288): unsure at all n locations
agccttattacatcttatgcattggtgtccattgtggtcttatctttgtttaacaattgaattggatatgtattatgtcatcgataggcatggagatgttggggtaaaagaaccaccttcttccattgctttctttatactttctagctctttctcttctctttnttctttctcttcaccatcacccatcaccttctctatagcctccttaacattntccctattcacttgaacacattcacccatctcagctacttgcacagtaaacttctcattgtanaacggatc

SEQ ID NO: 6288 - DNA, 413 bp, Glycine max
  unsure (1)..(413): unsure at all n locations
cacctattatttgtgcctcatctcttttacatcttcgatcactccccgtttttgtcgacgtttaagatgttacaccaaattgtgtaaactccatctagtttagagttcacatgactaacacgtgatctttgttttttttttaacaaagctcccctatgttatattttttttgttaaaaacgcaacacctttagcatacttttcactttcctcctttcatgtccatcattggccgnagactatcgtgcaccatatcggaaggtaatttttggcgacaatgttttgcctccctctctatttttctcttttccctttctttnttctttcttcaccaaatctacaaatcaatcttccaaaccaattatgtaaatcgaaaatgaaaccctcacttgcagaatgaataaattaaaaaca

SEQ ID NO: 6289 - DNA, 406 bp, Glycine max
  unsure (1)..(406): unsure at all n locations
agcttctatataagcctgaaccatttatcaataaacacaagttngagtttattcagaaaattagagtttatctctnttatcttagtgagagtgattctcctaaattcttgagtgattcaagaacaccttggctgtatcaaaggactntcacaacctttgtgtgttgccctcgctggaaagagtgattctttccttcctttcatcatcacccttgttctttcaaaccacaattccagaaaatccacctctgcccagaattatctcgtggccataactcccattttacgcactcaaattaagtgattcttgagcctaaattgaatntcanaacgagacctttcacctcgttntggaatcacctcatttggagccctgtagcttcagttatggccatttctatatttct

SEQ ID NO: 6290 - DNA, 190 bp, Glycine max
  unsure (1)..(190): unsure at all n locations
tggagatatggcacagtggagtngggtggttgggtggagtagggtgccgtagatatggaggtgaagacaaggtttttcttgagataagaaagggttcttgatgagggggtattttgaccaatctaggtttttcgattgtacaagaagtaaaccttagaataccatgtaaaccattaatatgctaatgctc

SEQ ID NO: 6291 - DNA, 151 bp, Glycine max
  unsure (1)..(151): unsure at all n locations
cgccagctngaatacatctatctacatcttatgtaaagaatatcttatttacaactattngactacacaactctacaatggcttgtagcttctaaatgacccctgcaactgcaagatggaacaactttctcaaaataccacaaagaaatta

SEQ ID NO: 6292 - DNA, 388 bp, Glycine max
ctgcaacgtgaattctgttcaactgataagatatctttctaattcagccaactaactaactatttctgttaaagctgtttatactgctaagagcctccctcaagctgggaatggatattcatcattcccagcttgttacaaaggagctgacatgtggctggtggcaaagccttggtgaatatgtccgggagttgcatggaagatgagaccggaaggagctctacaagacccgcaatgactttgtggcggataatatggccatcgatctcgatatgcttagtgccgtcatggaaaaccggattcgtggctatctgaatggcagattgattgtcacaatataacgtggctggctgaataaatgctacaccaatgtcatggagaatatacg

SEQ ID NO: 6293 - DNA, 279 bp, Glycine max
cgcgctcacttgagatgtgatttaaatcttcttttcagtggtcctgataaatacatctgatcagaatatatatattggaagtggaatattacgtaaggaacaagaactggaagatataattaattgatgccaattcaaagacataagacatggatgatagatacacgtgacctttcataattccatgactatgatcatcacttactgagatggtgacatcacaagtgaaactagcttaaacgtgcgcattttcaaattattcattactttgaactcatg

SEQ ID NO: 6294 - DNA, 340 bp, Glycine max
  unsure (1)..(340): unsure at all n locations
atcctctgagtcacctgcggctgcaagctggctgtgcnaggagganaatgagtgtccatgtgaaggcgagagccatttctagggtaaatagcgtgttgaggagtcaaatattgattcggtagagtattcgtcgtaaaaccagtttgagagagtttagattaatgttatatacttgtttgagatgagagtttgctccaaagttaccccattctcattttcacttctcagaccttgataatccactaaattgacgggttttagatacctagatattgagttgctttggtctaaagctgttcttctgtttagatatgatttatgcttgacttacgacttgtag

SEQ ID NO: 6295 - DNA, 420 bp, Glycine max
atgagcctacatcaaacaattggattattgatgtttctatcacaatcaagtgatagttgatatctccatatgtgcgtacactatgattatgtttttgtttctagaattcatttggaatgtctattgttgattctaaatgagtgatctctcttgatttaaaagttaccatctcctaatcatttaagtgttcattctgttatgggttgctcatattccaatcatgtctagttgaactgcttgataatctatctttgttacttctactacaaataaagagagacttcacccatgacaatcacgttaagatgttgtaagaggaaatacttgagtacgcatgatccttgttacctgtagatgaaagtcaaacttagtaagacgtgtacctgtgttccttgaggatatgcttagttaccacctatg

SEQ ID NO: 6296 - DNA, 380 bp, Glycine max
  unsure (1)..(380): unsure at all n locations
agcttatacaatattctcaattacactccctgttgcataataagtatgaacaaagaaattaattaaaaatagtggtatactaacagactacattctgatcaacattaacatattcttagagcaagganaacaacatcttcattcgagtttagaagaataataccctatattgctgaattaacctattgatcaatcaacaaaaggaactgaaaagaaatctataaactagtgatcctagcctggttgtgactgcagaaggtcacaataaataataaataaatntcattataaatatattgcatatttagtgattaaccattaaataaatttaatgtgtaaacaatgtatccttattcattaacataatagatactctccta

SEQ ID NO: 6297 - DNA, 341 bp, Glycine max
  unsure (1)..(341): unsure at all n locations
tgtcatctacatagagtagaagatagatcattgatccatcctccatcttgntgtgataaacacaacaatcatagagacttctcttgaatcctcgactggtgataaagctatcaaacctcatgtaccattgccttggagaatgtttcaaaccatacaaggatctctgcagttgacaaacatacctttcttttccttgaacttcaaacccttcacgctgtttcattagaatattttcttccaatcttccatggagaaaagaagtcttgacatcaagttgttcaagttccagatcttggtttgccactatagcaagcaaaatcctgatggatgcatgtctaacc

SEQ ID NO: 6298 - DNA, 389 bp, Glycine max
  unsure (1)..(389): unsure at all n locations
tcttggtggtgaagctccttcttccttgtcttatngcctagnggatggngcctncnctatcctcttctcctttgccttccgctgcatctccatggtgaagaatcaccattgaaggacctcattgaagctcaaagatccagcctccgtagaagctccacaagcaagcttccatcaagtggtaatcagagcacaagagcttcaagtaggtgctccttaaacctccattaattntttttctttaccttctcttccattggtgtttcttcatttttctccatgtatctcctcacatgtcttgttctaaatgttgttaacatgattctttagagtttccaccgattaaacttgctatagaagttagatttgattgtctatggttcaaatttctt

SEQ ID NO: 6299 - DNA, 330 bp, Glycine max
  unsure (1)..(330): unsure at all n locations
agctngacangaatgaagatgagaagaagaagcattattagttgaaggagaagtntgacaacccctgcaaagtgatcaaggatgacaaatctatgaaggatcttattctgtttctgtttgagactgctcttctcacttctagtttcagccgtgaaggatccacataatgtttaagcttggactgagcatcaatgaagatgcacgtgaagttgttgctgacatgcccccactagaggaggccgaagccgatgctgatggcagcaagatggagaaggttaattaaacttaaatatgatgtgtttcttattagtagcttatctaatgcgtatg

SEQ ID NO: 6300 - DNA, 455 bp, Glycine max
  unsure (1)..(455): unsure at all n locations
tanggatgtgggttacacctaactagataagggcttcgattgtgtataatattagtatgaaactagagaggtgataaaaaattganattgatattggtgcatgctagctggtcacaaaggacctatttcattggcttcctggagttttcatttccaacaatagaacacattaaattattttctgatacaatcgtttgagtagcagagaagggacaactcatttagatagtgctgtgaagaattatagttgatgtatttctgccgcacctcaataaaatattccatcattttcaaaataattctcatttaaattgttacacaagtattaaaaaattattaaatattcttaatttacaaaaaaagcataagttcatttgattgactatattatctgtttaatatattaataaggctactaaacagatgacaagaacagttagttatattttaatata

SEQ ID NO: 6301 - DNA, 374 bp, Glycine max
  unsure (1)..(374): unsure at all n locations
ctgtcctaagcaaaggtcccaatgtcctattaacaacttttgtttgcccatcggtttgtgggtgacaagtggttgaaaataacaatctagtgcccaacttgccccacaaagtcctcccaaaatggcttaagaacttagagtccctatcactaacaatgcttcttgtgcaaccatggagtctcacaatctccttgaaaaacatatcagccacatgggaagcatcatcaactttttttacatggaataaaatgagccattntagataacctatcaacaaccacaaaaatggaatctctaccactgcttggtgttggcagccccaaagcaaaatccatggataaatcaatccaaagatactccggaattggaatgga

SEQ ID NO: 6302 - DNA, 504 bp, Glycine max
  unsure (1)..(504): unsure at all n locations
nttgataccgatgcatntaccngacactatagaatactaatcctctgatgtctagagattcctatagagagataagtccaagttccttattgttnttgagagattatcgtgtgcgaagacttggcgagaacatacctctgggaggaagttgtctctagagcttgagatcatggctgggggagagtattatggttctttacgggtgaagagagatccccacttcttgtatttcttcaatccttcatttttctcttctttttgtggtaagaaagctttccagttatggagagctaaatcctctgctggttccttcctgtttgttcctgatgtgaatactcgtttttatctatttaatgatgctctgtgtgtcctcttggttttgagtatgccatttaagagttctttggcctcgatcacgttattgcctgctttgttacgatcttattactatggaacttggctgatccttgaagctgatacgactacattgttgcatttagtatt

SEQ ID NO: 6303 - DNA, 421 bp, Glycine max
  unsure (1)..(421): unsure at all n locations
ctccggacttcaccctccgtgccaccccggaagatgtaagccaagccccgactttcgaggggcaactcccaccttatgaagactatcccaggcaagacgatggngaaggagatacccatcttggccccctgctccacctcaaagatctgtccccgcatgaactaccccaaccgaacatagtccgtcataccccggcctcacccacacccgtaaaagaatctgttccctctgcggaagataagggaaagattgacgcgctcgaagagaggttgagagcactcgatggcctcggcaattacccattcttggatgtagcggatatatgtctcgtgcccaacatacgttgccctcccaagntcaaagtaccggactttgataagtacaaaagaacgacatgtccgaaggagcatcttctgatgta

SEQ ID NO: 6304 - DNA, 458 bp, Glycine max
  unsure (1)..(458): unsure at all n locations
tttcgctagcttacggtaaaatctaggacctagccatggtataagtctccacagaggccattgcctccctcgcccagtattatgatcagccattgaggtgctttacctttggggacttccaactgtcacccatggtggaagaatttgaagagatcctangatgtcctctatggggaagaagaccatgcctcttctcagggttctacccctcattagccagaatttctaaaatagtccaaatcttggcacaggaattagaccgccaaaagcaagtcgaaaatggggtggttggaataccgaganaatgtttggaggcaaaagcaagaatcttggcaggtaaaggcgaatgggccctgttcatagacattttcgcactgttgatctttggaggagtcctctttccaaatgtggatgggttggtggacctagcagcgattgacgctnttcttgcctatgat

SEQ ID NO: 6305 - DNA, 441 bp, Glycine max
  unsure (1)..(441): unsure at all n locations
atgttaaagaggggaaaatgaanaatttttatatactatcgtgcggtaaaaaaaggataanaataatggtatcataccttattgatggaggaagagaaaaaaaatatgaacttgggtgaaaaagaaaatataatagtatttaggaacgaggttttattgtctcattttgcatatatatatatatatatgtatatatatgtatatatgtatatatatatatagtatatatatatatatatatatatatatgggggggggaggagctctatatatctgaggggggagagaggtgccccctcattttagctatatgtgtgagaaaatgttatatgggggcgcgctcctgactgattggggtgtgaagataaataaaagcgctcgtggggtttcttgtgttggccccgcattagtttcatgtgagaaaaatatgttaccgccgtg

SEQ ID NO: 6306 - DNA, 428 bp, Glycine max
tattgtttatttgaattcagtttgatttttacttgtgagtaattcaatttagcttttttgttggattggtttaaaactataattattttaattcttttatttatttatttattttgtgaaataaaattaattaaaaaactaattatgtcaatttactattttatatcaatttagtaatattaacacatgtaaaattagaggatgaaattcatggagaaatgacactggctattggcgtgaagtgcgaaaacagccgaaaaacctgaactggacattttttgcaccaaaactagtacttaagtagtctttctgaacagttgttggtaaaggtggtcagaagttgttatgatcactatattattcaattggcattttattttttttggtaatgtgatctccaataaccatatttttactggattctcttg

SEQ ID NO: 6307 - DNA, 415 bp, Glycine max
gcgtctcgatattttacggggctctatccgacatccgagttaaaagttattgtcgtttgattattctaagagcttcccttttcaattacgagaatctcgatatattacgggacacaatcggacacccaagttaaaagttattggtcgttgaattttctcaaagcttctattttcaattacgagcgtctcgatatattacgggactcaatcggacatccgagtaaaaagttattggcgtttgaattttctcagagcttctgttttcaattacgagcgtcccgatatattacaggactcaatcggacatccgagtcaaaagttattgtcgcttgaatctgctcagagcttctgttttcaattacgagcgtctcgatatattacgggactcaatcggacattcgagttaaaagttatt

SEQ ID NO: 6308 - DNA, 423 bp, Glycine max
gaaatcacatgtttgtcatcatctttttggggagaatgtgaatgtatgtatacatgattttgatgatgtcaaagaagaatctaacaaggctgcttcaaatgataagcatttgcttcaagaataattcaagattgcttcaacaaacaaagccttgtttcaagattcactaaagaccaagccttgccttaaaacaaagtgctttcaagacatgcaaggctctggtaatcgattaccaggaagtgtaatcgattaccagaagacagggttgagaaatagctgttgaaaaatgttctgaatttgaattctcaacatgtaatcgattaccatatgtctgtaatcgattaccagcaacgaaactttggaaattcaaattcaaaagtcataacccttcaaattataattgtgtaatcgattacacaaaca

SEQ ID NO: 6309 - DNA, 458 bp, Glycine max
tcccgtatccgtacttggaaggatctgattaccgccttcctaggcagtatattacaattctgatatggctcctgaccgtactcaactgcagaatatgttcaaaaaagagggtgaaacctttaaagaatatgcgcagcgatggagggatttggcggcacaagtagctcctcccatggttgagagagagatgatcaccatgatggtagacactctgccagtattctactatgagaagctagtgggttacatgccgtccagctttgcggatctagtgtttgccggggaaagaatcgaggttggattgaaaagagggaagtttgattacgtttcctccacaaacgcgaatgccaaaagaatcggggcaacaggggcaaaaaggaaggaaggagatgcccatgccggctcttcaacacccgcgtgggtcaaaccccagcaaacacctcatggtacccatcagt

SEQ ID NO: 6310 - DNA, 350 bp, Glycine max
  unsure (1)..(350): unsure at all n locations
tttgggtctcttacctacagacacatcccagatgaaaagagtaaaaagctagatgataagagtgaagctcttatcctagttggatatcatccaactgatgcatacaaacttcacagccccttgaagcagcaagtggtgattaacgaagatgtcatggtagatgaaactgcagcctggaagtgggaaaatgagtctaaaattcccaactcatatattctcatggacagcccaagagccaaggatgttaaccctgctagctcaatgcaacctcttattataaggtcaaagagaacaagatttccctccataagacttgcagattacgagctgtacagtaacagntcaatctc

SEQ ID NO: 6311 - DNA, 113 bp, Glycine max
ctatgtcagtaaggactcgcagtttttcatgaggaaaaatacttgtacttgggggcatgtcactccgtttggaacttccttgagactcaagttaatcaccatggggggggggg

SEQ ID NO: 6312 - DNA, 324 bp, Glycine max
  unsure (1)..(324): unsure at all n locations
aaaaacaaaaattgtaacatttgttgcctcttagagttaatatgttagctaatgcaaataattattattaaaaatactcacaaaaagacggtgatggccattgaaaatgtgatttaagacgttcagctgatgaatcattcttatgagggggctcagcatgtgcaaatgctacattnggtaaaggactcaaagcaggaaccaaagaatgaaagccatgatgtgctgggggtccaactcctggtgaggcaacaggataatgtggaacattagtaggggaaactgcaggtgttagatgagcatgtgtttgagtattccggggagatc

SEQ ID NO: 6313 - DNA, 424 bp, Glycine max
  unsure (1)..(424): unsure at all n locations
tcccgacccaacccgggcatagtcggtcagtgagaacctgtgatgtacctaagcaggcgagctcctggcagtcaacagataaaaggaacaaagaccacaaagcaaggaggcttgtggtggctggccagctgtgaaacttgattgatatgtgagatatggtctctggtaatcgattaccaagggtgggtaatcgattacaaggcttaaaagtgaagacaggaggctaagatggtctctggtaatcgattaccaaggggtgtaatcgattaccaggcttgaaaacgaagtcaggaaactaatggagcctctggtaatcgattaccagcctgtgtaatcgattacacagagggatgggtcactggtaatcnattaccatgtatgttgcattgatcacacgaggcatttttgcatattccatgtcctg

SEQ ID NO: 6314 - DNA, 429 bp, Glycine max
  unsure (1)..(429): unsure at all n locations
caaatgatgcatatgattttgtagctacctcatgcactcctctaatgactatggcatcatttctggcgctaaactgctgggagttggaagccatcttcttaatcaagtttctagcttcagcaagagtcatgtctccaagggctccacccctggcagcatctatcatatttctcaccatattactgagtccttcataaaaatattggagaagaagctgctccgaaatttgatggtgagggcaactggcacatagttttttaaatctctcccagtattcatataggctctctccactgagttgtctaatacctgagatatccttcctgatggccgtggtcctggaagcaaggaaatnnttttctgagaatactctcttaaggtcatcccagctcgtgatggaccttggagcaaggtaatacagtcaatcat

SEQ ID NO: 6315 - DNA, 421 bp, Glycine max
tgaccaatcccgacccaacccgggcatagtcggtcagtgagaacctgtgatgtacctaagcaggcgagctcctggcagtcaacagataaaaggaacaaagaccacaaagcaaggaggcttgtggtggctggccagctgtgaaacttgattgatatgtgagatatggtctctggtaatcgattaccaagggtgggtaatcgattacaaggcttaaaagtgaagacaggaggctaagatggtctctggtaatcgattaccaaggggtgtaatcgattaccaggcttgaaaacgaagtcaggaaactaagggagcctctggtaatcgattaccagcctgtgtaatcgattacacagagggatgggtcactggttatcgattaccacgtatgtgtaatcgattacacagggcatttttgcatatt

SEQ ID NO: 6316 - DNA, 419 bp, Glycine max
aaggcattgactgtataaaaccttttctctagcatctttaaaggattcttttggttaaatagtgtaattttaagaaaatttatgttattttaagacttcccatttattgtattaattgtcttgtatttttggttaaattgattgaaacaacatgttgcaaaagtaacctttgttgcgtaaatttatttgattgaatttacatgaatgttgcatgaaattattcatatgaattgtgctcggcccaaaggaagacacaatttgacagaataatcacatgcttgcaatgataaacatgtggtgattataaatagtgtgattttccatgtgaataatgaaatgttcaaaggcaatcattatttgaccggaataatcattatataagttttccatgtgagcaatgcagtgtccaaagacaacct

SEQ ID NO: 6317 - DNA, 429 bp, Glycine max
  unsure (1)..(429): unsure at all n locations
ntgtcagcgcgggttagatgtgcaaagggtgggtcgccatgatacatgaagagaaccctcaagagcaaccaaattgggtgtggccgtaccctcctgagtttgaattggggaactggcgaattgtcaaacaacccagaatttttgtggcaagcacaatgtaattcgttagtcctaaccctattgctaggcctaggctttagggttctctccctgtttgggcttgtcttttgttaccacaaaataataaatatacaatctttcttcatttgttgcactntaatccattctcattcttctgcatgtttatttttgttgtgattaaatggtacagattcgataatgagtcctgtgaaggtaatgatactgaggacccagacgttgattatgagcaactggtaaatcaagctgaggataagcaagatgaggatt

SEQ ID NO: 6318 - DNA, 412 bp, Glycine max
  unsure (1)..(412): unsure at all n locations
gcacttatgaaacacaacagcaaataggtatgaaaattgtcatttttttattagggtttaggacttaatggataaaaacacttgtatttgtttattgattntttgtatttcatatgcaaggttgaatctgctcattcgactttaaaaagactattacagaatagcattggagatctatgtagtgtttaggaagccatgaacaatatgatcacgttgcaacacactgaaattaaggcatcttttgagacaattacacatgtggttggacatacttttaaagtttccttatacaagagactacttggcatggtatcaaggtatgctttaaattagattgttgctgagtttgagtgtgtacattatgctggcaaaaacccatctcgttgtggatgtgtcatgagaactactcacg

SEQ ID NO: 6319 - DNA, 352 bp, Glycine max
tagaggtcttgtgttcaaatccgagcagcatcacttcaatattttgcatcacttttggaaaagcaaaagttgggtgcatgtggatacgctgaatatctaaagaaattaaatcttgcatttgttgttttcatgaaagatgattatagactaagtttgtgattgtcctaatcgatcttcagctccttgtcatgttcttggtaaagcaaggagaataggttaatttcacatactacaacaattgagaacacaaattacactggccaaatctttttaacacaaagaacccaatgtgaaatggtactaatcacttagcaacggtaaagggtatgttcggacacggtaattatccaat

SEQ ID NO: 6320 - DNA, 226 bp, Glycine max
ccacagaccagcagagcgcaaaaactcacagacatgctgccctcaatgtatggttgggaagccactagaattactatggtgtagggtccacataaaattaagcagaaaatactatattcaagcgaaatgattaaaacatttgggctaaaaatcttgttaccaaaccttgtccaaaactgatgcgcgtggttctccaggcatctcttctcttggcctagctttcatc

SEQ ID NO: 6321 - DNA, 398 bp, Glycine max
  unsure (1)..(398): unsure at all n locations
tttggtccttcaaagttacatgcgcccccacattagatggtcgaatttagaaggtacaagctcactggaaaatatcccacgactttattaatgatagtagcaagtagtctcacttgacacacccgttatacaggggttatcaagtgagagcattatcttattataaaaggtggaagggactatatttgatcattcaatctcaaatggatagtcaaaattataagttacatacatattcgcttgaaaatatcctacaactttttttatgatagttgcaagtatatatattcatttcacataccacgagaagtgtgtgtccactgtccttaaagacacgaactntgcagttttgcaataatcccatgagtctttgagcttcgtttatgcttggaagcatg

SEQ ID NO: 6322 - DNA, 327 bp, Glycine max
  unsure (1)..(327): unsure at all n locations
gcctaacaagccaacttacaacatgcaagccccaagagactcagcataaggatgcacaggtcaaagttgagtatgtgaaaagattgtatgaccaagtgaaggtgcaaattgcaaagaagaatgaaagttatactaagcaagccaacaagaaaaggaaggaagtggtacttgaacccggtgatgatcctggacatttgaggacaaatgttttccaagaaggagggaatgatgagantcntnnnnccggccaaatacagtctaaatgcccaagtggagaaggacgaatgcccaagtggagaaagacatagcccccgagtggagaatgat

SEQ ID NO: 6323 - DNA, 425 bp, Glycine max
  unsure (1)..(425): unsure at all n locations
ntgtgaagctcctgttntagctntacccgattttactcaaccatttgaagttgaatgtgatgctagtggagttggcattggggctgttttgatacaaaacaaaaggcctatagcttatttctcggagaaattgggaggagccagattgaactattgcacctatgacaaagagttctatgccattgtgagagctcttgatcattggaatcattatttgcgttctaatcactttatattgcattcagatcatgagtcattgaagtatatcaatgggcagcagaagttgagtccaaggcatgctaaatgggttgaatttcttcaatcttttaatttctcttcaaaatacaaggatggtaagagtaatgtggtggctgatgcactntcaaggaggtatgctttaatttcaattcttgaaactcgtttac

SEQ ID NO: 6324 - DNA, 427 bp, Glycine max
tacatgttttaacataaaacccaacaccctcacatgcttcactgttggcttcctttgtgtccacacttcttcacgcactttattctttagcttcttagttggactctgattcagcatatagactgcaagggacacaacttctcccaaaaattctgatggcaggtgtttctccttcagcatacatctacccattgtcattacagtcctattcctcctttcagccagcctattatactgaggagtatatggagcagtaacttcatgcattatgccatgttggatacagaaaaattcgaaatcctttgatgtatactcccctccaccatctagtctaataaccttgattgctttccactatgttttactcaacactataaactccttgatatagaaagccttactcttgctttatcagtacaccactcat

SEQ ID NO: 6325 - DNA, 462 bp, Glycine max
  unsure (1)..(462): unsure at all n locations
cactatgaaactaagcttacatatatttgttctttattataatatactaagtttagttttatttccttttataactntaattnttatttgtacttcttcaatatgttgatatattagaggcatggaagttcattcaatatggatctaaaaaaactaactagagtgatattttaatcacatgtcacatttttatttgaattaaaaagaaaacataaaataaagtaaaaatttcaatttatttataaaaacaatatagaaaaaattattgcaaaactataatgtttttttttaaaaaaaaatagtttatttttagttgtgggtccaatgtcatggtacctctttggatgatgcttancattgacctgtcttgattggactgtttgaacgacacttagcattgacctggcttgattgaggagaaagagctagagttggagtctcattggtagcaataacaatctc

SEQ ID NO: 6326 - DNA, 403 bp, Glycine max
  unsure (1)..(403): unsure at all n locations
ttgtttgcattcgctgaacctttgatgtattatctgatatgttatcgaagattatcttgtttactaacttactctccctttatatctcaattatttatgtgtgcacgtgagctgatgagcatgccaatgactgattactactggtcgaattttacttgattgagatatatgaggtgaagatgtcgaccccggcaaagaagagactgatgagggattttaaaagattggcacaagatcctcctgctggcatcagaggggctccccaagacaataatattatgcttcggaatgctgntatctttgggtgtgtaagagtatatatatcatgaaattcttgttctcttaagagtgtgtttctctttactntgtgcgtttggatgatgtaaggtatgataacaatcta

SEQ ID NO: 6327 - DNA, 449 bp, Glycine max
tctttggtccatttaattaaactccataagtcaccaaagttattgttcattcttcctcttcttcatgagctggtcaagaggaaaggagacaccatttccacttttcttccaagcttttccaagtattcttgagcctttctttcatcaagcttatgtaaatgacccccattttcaactctaagcttgatttttacttcattttcttgctctattctcacttgtagtttcaagtcttattttagcactcttgaagattggaaactagaatctaaactcattcattcttccttctaaatttcgtggagactaaaagaggtaagggaggtctctccaacttattgaaccctatgtttgttgtaaacttccttgaacatgttgtcttgaaatttttgtgcttggtgccctattctggatatgtgtgctaagctgttttccttgagttttcaatg

SEQ ID NO: 6328 - DNA, 394 bp, Glycine max
  unsure (1)..(394): unsure at all n locations
aactactccagttgttacgtggcaacatgttattatcaatgagagttaattaaggcttctcctctctttgggatgttttaccgcgttttgggcaaacaattcgagccattggagacattctggtccagatgcacctgattgagggcgatggtgccaaagtcaaatgtagaatatgtaaccaaaaatctgcctaattttccaaattacatgaagatcgnttcttccttacgaatcaaattatgaaggtattcaatattcatgttttggagagttcctgaccaaaacaattatcaaagcattagtgagtagtacgataattgaatttcaaatgagagaatatatagcattgatatatattcgtttggtgatctataaaaatataatatatagacat

SEQ ID NO: 6329 - DNA, 440 bp, Glycine max
  unsure (1)..(440): unsure at all n locations
ttgagcgcgctgcanaatatgaagcacagttgaaagtaataatctggttcttatctattgacttangtgattagttctcccattattcatggtgaacttttaaaatttttcaggaaaaatatcatttacgacttaaagtgctagaggagagtttgagaggaaattctaacagtagtaatcgcggtacccccgatggaagaagtatgagcaatggcccttctcgtcgtcaatccctaggtggagctgataacttctcaaaactaacctcaaatgggtttttatctaaaagatcaccatcctctcaactgaggtcatccctatcctctagcacagttttgaagcatgctaaaggaacatctaaatcttttgatggtggtacaaggtcactgganaggagtaaaatgctgttgaatggaacacctccaagtgactcatttaac

SEQ ID NO: 6330 - DNA, 418 bp, Glycine max
  unsure (1)..(418): unsure at all n locations
tcccttccagttattatttcacgctctcttagttccaaatttggaatctttgatgcttccccgttcataaataactggtatttcattggataaatcattccactgagtaaaaagtgctttttttgttgttttatttttactattttgaagatttccgaggtttggtttgtggaatctcaggttgtaaactgtttggtcaggttattgagtttttttggatggagtgatctgagatcacatttggggttttgtgaatattgcgttactggtgtaattattgttacttttacaatttgtgtgtctccgtgtgttngtggtctatggtgagtgaagtgaagaggaggatgctaatatagtattgtgggaatgtaattgaaagggtgaggactgagaaacattgagattgatacttggtgtt

SEQ ID NO: 6331 - DNA, 449 bp, Glycine max
aaccaaatgctcaccactactagaggagaagccttcatgttgtttcatataaacctcctcgtctaaatcgccattaagaaaagttgttttcacatccatttgttgcaactcaaggtcaaaacgagcaactaatgccaagataatacgaagagaatctttcttagatactggagaaaaagtctctgtgtagtcgattccttctttttgagtaaatcccttagcaacaagtcttgccttgtatctctcaatgtttcctaatgaatcccttttggtcttaaagacccatttacatccaatggcctttgtcccattaggcaactctacaaggttccaaactttgttagtctgcatggaattcatctcatccttcatggcatcataccataaagttgactctttacaactcatggcttgatcaaaaatttcacgatcattatcagctcctatat

SEQ ID NO: 6332 - DNA, 442 bp, Glycine max
  unsure (1)..(442): unsure at all n locations
tcctgctaagttcctggtgtttgggtggaaactcctaagggataggctgccgacaagaaaaaacctgcagagaagacagattcctctaccagattctctttgtcctctctgcagaacccatcaagaggacgcatcccatctcttcttccattgcagcaaagttcaacccatatggtgggaaaccatgtcttggctgcaactcaagggtgcttttcctttaaacccaaagcagcactttcttcatcacttgggtcttcaacctgctggtgtgagaaatagtagatggcattgttggtggttagctttgacctcgtccatttggaaagttagaaatagcataatcttctctaacgcgactnttgatgctaacaagctgtntgatgaggccatattccttctctggtcttggcttangggttatgagaaagactttacagtgcat

SEQ ID NO: 6333 - DNA, 438 bp, Glycine max
aacaaaagagcttacaggattcattagtgccttgtaaggcgagtcatccaataacaatgtgtttgactcattaaactctcccttctcccatggtagatcaggttctgccttttcccacaacttccttatttccttcaacacaagtggcttgtctatattctcaacagtactaaactttgttttagtacagtgggactgattctacatatagcattatacagagattaatagtgtctagataaattccaagcagaagtgaattgataacagaaaacatctgcaagttgtaactgcatctataatgatgaaacaacaaattattttactaaaatgcaattatgatttacaacatcaatccaattccaatttgtccaaactgaaatccatccacagtccaccacacccatgcacatacacacaattcaagcaaatgacaac

SEQ ID NO: 6334 - DNA, 223 bp, Glycine max
ggaaaaattactgttaataaaaaacatattggacttggaaggtctgcttctctaggagaaggttggacttcctctgataaggaacctttcccttctcatgtgacccaaacccaacactggtcagtacattactccaggcctgtaagctctctggcataaccttcattcctactttgcaatttgtgccttcactttggtcatgcaatcctttcacatactcaac

SEQ ID NO: 6335 - DNA, 463 bp, Glycine max
  unsure (1)..(463): unsure at all n locations
actaagctgtcaaaaggaagcaagttaaaactcttttatatcaaaaatgttggttctacttgtcagactctaattttggtcgggtccaaacaaagaaagaaaaagcatgaaagaaagaaaacaagaaaaaacagagaataccataaaaaagaaaaaagaaaaaaaagaaaacgtataaaaagtgaaaaagaaaaaaagaaaggaaaataagaaagaaaacatgcgaaagaaaaaaagaagaagaaaatgtgaaaaaaaagaaaggaaaaaaagaaaacgtaaaagagaaaaaagtcgaagaagaagaagaagactatgaagaagagcgagncaaaagagaataaatatatttattgtgtgacctatntggctctcaaagggagcccattatgtcaacagagatgggacaatgcataanaagcgaanaggaacgtctctgataattattgcacagagcagcacg

SEQ ID NO: 6336 - DNA, 428 bp, Glycine max
  unsure (1)..(428): unsure at all n locations
attaaaccagcaatataatgaatacttcatcacaccattggagaatagcatttgccaaaacttgatcttaaccatttccaccatatcttcaagagattgatccttggctgaaagcacaaataaatttctgttcttccagattacccagatcacagaatacctgaccacgtaccacacacctgctttttccgtaaacaaaacactaaacctctaaattgtgtgaatagcctaatcaactctgatttcctgaagcaacaattggtggaggtagatactcacgattatatagtgatanttatagccataagtcactagttccagatttgagcttaatttcatggactataccaaactattaagcttcactgataaatataaaaagcagagtcactcacagatttgctttaatgctatagcatacttcacac

SEQ ID NO: 6337 - DNA, 427 bp, Glycine max
aatgatagctcatcggtgacaactgattataaaattaagtatcgagggatataagctaaaatatacttttgattccttatttttaaactaaattcgttttgggtttttataatttaaaatatttattttaaatttttatctctcaaatttgggtcaatgttatccttttgaattaattaggttttcgattttgagatacaattttttaataattccatacataaaacatgttctattacattcatattcataaaatttatataactcaatgtttgaacaaaaaaaataattctaaacatgatgaaaatcaagcaaaaagtgaattcttcaaacaatttaaacatagttaaatctttgtttatacatataaatcacgaatattatctataaagaacaatctaatttgagacaccatgggataagtctc

SEQ ID NO: 6338 - DNA, 391 bp, Glycine max
caatctcttggtggtgaagcatctccttccatgcttattctctagcgaatgacacatcctctcaccttttctcctttatcctccgctacaactccatggctgaaaagtaccattgaaagaccttattgaagttctaagatccaacctccatataagcttctcaagcaagctttcatcacttcctctctctccttactttttcctacacccttaagcttttttttttttgtttatctacaataggtagtttttattcgtgggagaattaagctcacgatttagttctttcttctttctccttttaccatccacccttaaactcttattctcaatcacgagactaagtttatatctccatctacatgcatttgttaatcttcagaaattcata

SEQ ID NO: 6339 - DNA, 368 bp, Glycine max
accttttctccccttggcacatcaaaagccaagaactcggaaatcaacacagttattacaatggagtagcaagatataagtatcagagtattaaatccaataagccatactcataatcaataacataatcataccagaattcaaataacataaaatgtcaacaatcacaaaatatccaagaccgaaacacaagaaaaataagcaaagtacttagcataataatgtaaattctaagaaactaaaagccaaaatacacggcttataaaagataaataagcagaatctaaaatctaagaagacggaggaggtggtggaagatcaaaactctgacgaatgtatccgacatcctcttcaagctgtgtaagacg

SEQ ID NO: 6340 - DNA, 445 bp, Glycine max
  unsure (1)..(445): unsure at all n locations
ntntggagtagaaacatgggaccaactcattntatttcaaatagaaagtcgtatctagtcaaggtctgagagaccatacaagtttcctaacgatttctaattatgtgggccattaagtctatcatatgctgacaatagccgagaagcccatgaatctcttcgggggcggagtaggtgtctgccatcgccttggccttggctaacaagcggggaagttcttgactcccgttcaaggtaagagcaaaccgatccatccacatggttgcctcttggtgtaaagagtcgatcacctttcctctagcctctttttccgcgtatacttgagcatactcgtccgtgatcctatgctcgtgggccgtggctagacctaactcttcttggtacttggcgatgatagctagcatgttggtctccgtctcgcataaacgctgagacaagcttcttt

SEQ ID NO: 6341 - DNA, 419 bp, Glycine max
atttcgagcgtctcgatattttacggagctctatccgacatccgagttaaaagttattgtcgtttgattattctaagagcttcccttttcaattacgagaatctcgatatattacgggacacaatcggacacccaagttaaaagttattgtcgtttgaattttctcagagcttctattttcaattacgagcgtctcgatatattacgggactcaatcggacatccgagtaaaaagttattgtcgtttgaattttctcagagcttctgttttcaattacgagcgtcctgatatattacgggactcaatcggacatccgagtcaaaagttattgtcgtttgatattgctcagagcttctgttttcaattacgagcgtctcgatatattacgggactcaatcggacattcgattaaaagtta

SEQ ID NO: 6342 - DNA, 437 bp, Glycine max
  unsure (1)..(437): unsure at all n locations
cgctctgagttacattgatgtttgtatttatgggatgaggttgtatgccatttgtgtactaagagtagtgtcccactggtaaaactaactttccaaatttttgccttcacaggaaatggccccgaggaagcttgcctcatagaggtccacgaaggacaaggcagccgaaggaactatttccgctccggagtatgacagtcaccgctttacgagcgctgtacaccatcagcgcttcgaggccatcaagggatggtcgtttctccgggagcgacgcgtccagctcatggacgacgagtatactgatttacacgatgaaatanggcgccggcggtgggcatcactggttactcccatggccaagtttgatccagaaatagtccttgagtgttatgcacatgcttggccaacagatgacggcgtgcgtgacatgagatcct

SEQ ID NO: 6343 - DNA, 274 bp, Glycine max
cgctggagctgacccatcaactgttctaactcttttagactggcgaccccaaggctcttgaccttgacttgatgaacctctttttaagcgaaggtgcctgactcgatcccatgttttactaaagtgaaacaaaaccctgtgcgaatcaagactccgacatttatcatgggtggagtggatgaatcatgaataaatgcgtatggcagagatgccatttacgaatatgggagcccgggagattgtctccttcttagatacaacattcgggcagcat

SEQ ID NO: 6344 - DNA, 410 bp, Glycine max
tctaatttctaagcttctaagcctcgtttctctccctctttggaaacatcaaaaaaccaaagtacatggtaagcaacataaggcagataataataatcaaatataactaaagttcacataatcattcataagtcaaaatcaaatataatttagtcataaaatactaagtgccaaatactgaaatataactaaagttcagagaataatgacttaaaaaaaacatagccaaatacacgacttaaaataaaagataataataatctaaatctatgaaggtggtggaaggtcgaagcaccgacgaagataactcacatcctcttcaagttgagtgatgcgggtattcattccttcaaagcgagcatcaatagcatcgatacgaccatccaaggaatcaaagcgttcaccaacat

SEQ ID NO: 6345 - DNA, 566 bp, Glycine max
  unsure (1)..(566): unsure at all n locations
ctccacgttgtggcgattatactgttgagtgattgtcgtntgctgctcgtctagttaaatatgtagattctttgtgccctatcttctactacatgagtcgagcaatcgatgattattgatcattatattctatacagttatggtatttagcgctgatgtgaactaaatgaccttccctaatttcgaccagggaccattcagtggtgggatgcgaccctcgtttgaccacttcgaggtatttggcacccatcattaagaaattagtgaagtttcgagacatgcccgaagtccaaaaataagctttgtaacacaatacgttaagttgtgtgacatgccgaaaattaaaaagaagtgttagtgcccaatccgagaagcttctaacattccggaaggcagaacaagaatgattacgttatccagaaggattctcaatattactgaaagaaaacaagcctcgtactacactagaagtgtcgaactttcgacaaaaatcccaaaataagtcgggtgtattagtaaaaggggttacataggcactaccccttggctttcagatgtcctccaag

SEQ ID NO: 6346 - DNA, 420 bp, Glycine max
gctggagggcctattaacctccgaggatgcttgtttgagccactggaaagaccacacccaagacttcaaaaagacaacgatacctgttgaacaatgatggacctaccgccacccttaataaaggaaaatcaacacttttgcaagcctgcacacttatgttgcacgagccttctgggttacgcaacttctgtttacactccatagcatcgacattaccggtagaagttatggaggagtgatatttcaagacatctgcccttacccgttcatagctagcaacgaacggaggaggtgaggacatcccaacactgcggctacacctactccgaggcgataccatagcgataccactgtgaccctatcctatagccgcggagcgagaagaaagaatgatactcatgatagggatgggctccccct

SEQ ID NO: 6347 - DNA, 335 bp, Glycine max
  unsure (1)..(335): unsure at all n locations
ctagtccaacaagagggatctaaggacgaagcttggattgattcggtctaacaagggatcgagggttagtaatttagactacaacatagaacacaagagcatgattgattagagaaatatatntatatgtatcaacttgtttgttaaaaagacccaacatttctacttactgctgtcacttntacttacttttcattttatagtattttagcgtaaaagttagtttaaattctgtttgacattatcaatcatacatgttctctcaacaatgcttcatttctgaacttaattcaggctaacattagttccctgtgttcgatactcagattcatctg

SEQ ID NO: 6348 - DNA, 461 bp, Glycine max
  unsure (1)..(461): unsure at all n locations
ctaagcttccatacatctggaaactntaatagctctntgtgtcaaaattattgattatttcgaaaccatggaagcttgagaagctctttgtgaaacgagataatcaagtaccacaatttgtaattgattaccatgtttttggaaatgcggaacaaagaggaaatttagcaaattaatcaattaccacatttgataattgatgaaatcagttttgtttgttaaaattataaataccatttcttgttctttcttattagtgacttttgattcgatcttatcttttagaaagtgctttttgagagtcatctatgtagacaaaggatcaagctgaatgttttgatgatgccaaagggaaagcttgccaaagggttacatgtttctcaaagctttattcaagacaaagatattcaagatggatgatcaagaaagtttctagagtcttagaaagagtatattaaaat

SEQ ID NO: 6349 - DNA, 424 bp, Glycine max
ctcttctattgcttttacttatgttgtgatgagaaaaggagtgaagataacttaccaaaagaaaaacgaaattaaatgcacaccggatagtaaagagtagggaagaaggagacaaacacacaagagtttttatactgagtcggcacaactcgtgcctacatccagtccctaagcgacctgcggtccttgagatttctttcaaccttgttaaaatccatttacaaacaaagatccataagggatgtaccctcccttgttctctttgaacctagtggatgtaccctccactagaactgatccacaagagatgtaccctcttttgttctcagtcaaacccatatagatgtaccctctacttgtaccacataggatgtaccctccaatgtgttaagacaaagatctcatgcggttgaacctttgatac

SEQ ID NO: 6350 - DNA, 438 bp, Glycine max
  unsure (1)..(438): unsure at all n locations
tctacaagctactcaggaagattgagtcattcctctccaccaacccccttcctttctactgtggcacctgcaagaattaccaaccaagaggtggctatgattaagcaacaaatgggaaaagagaatcatgatatgatgttgaggatgatacaccaggtggctactgttctcagctaaatgtacaagatggtcacaagtcttaagccaattgtcgagtcaacactaactaaaggcccatgacaagttcataagcttgtatactttgttaacatcaaaacctaagggatttacttgtttggtatagtccaaatgcgacttggacgcaactagacttagcaaactacattattcaaactgtctttagtttctattgtgtntaccatatttgtaacaagcttgactcatatcatacatatgctctagcttgaggaggagtaa

SEQ ID NO: 6351 - DNA, 404 bp, Glycine max
  unsure (1)..(404): unsure at all n locations
cccctcaatttaggggattttcaaggtttgagaagtgaaaatgagaatggggtaattttggagcaaactctcatctcacacaagcctataacattaatctaaactcgctcaaactggttttacgatgaaaactccaccgaatcaaaatttgacccctcaacgcccaatttactctagaaatggctcttgctttcactttggtcactcattntcctcattntctcagcccaagttttcccacaagtcctaaatgacattttaaactaagattaactcactgtaacctccaattaccactaaatccagaattagctgttcaaccctcaaagcatcacactgttccactcatatcactacattctcactttttaaccctagggtaactctacccttcatctctatca

SEQ ID NO: 6352 - DNA, 448 bp, Glycine max
  unsure (1)..(448): unsure at all n locations
tagaaacatgaaacactggatgaatntgagcacattcaggcaaaaccaactcataagcgactagaccaatgacacaattaatgcaataaggtctgaaataacacttgcccaacttgaccgagccataacccctcatagatgtttgacgataaagttataaaaggccatactaatgtaatccttccaaggaggggacccatcaccagagctagctaggatacttcaggaagattgggtcagggatgcaggagaagaccctaggattctcatgagccttagggtagattttgtgcctacgggcgaagtataaacccacttatctttgtatgtattagattagggtttcattattttttgggccttgtatttagggctccatagtgtagggagggtgccccacaagtttagggtaccctagtgatctaggatttttcagcccttgtatttt

SEQ ID NO: 6353 - DNA, 354 bp, Glycine max
tgggttcatgattgatcttaccaacactggtgtcatggacaagactcctaatgcattcaatgcaactatagctaatgaagttgaacataacgctctagagcttacattcaagctgtcaaaaaattcatatgacgctacttctatagataagggagcaccagatgttataattgtatactccaccaaatcaaaacctgctcctttaaactatgcacaacctgctactattatcggggatcaagtgcacgacatatagagctagcaatggaatccttcgccgaacgacaacgttaagacaataatcaattcaggctctccatgcagaattccatcacactcagttcttcaatcttg

SEQ ID NO: 6354 - DNA, 431 bp, Glycine max
tgtaatcgagtacacacatactgtaatcgattaccagaggattatttcataaaacattctcaacagtcacatctttttgtgtgattcttgaatgactatcaaaggcctatatatatgtgacttgagacacgaatttgctaatagtttttcacaacaaaaaggtcttatcctcttataaagcaaaatagctttatcctcttacaaattccttggccaaaacacttgtgattcaataaggaattatttgagtgctcaaattgttcaatctatctcttttaagagaggtttcttcttttcttcttcttcattctgaaaagggattaagagaccgagggtctcttgttgtgaaagaattctaaacataaaggaaggggtgcccttgtgtgctagaacttgtaaaggaattacaagatagtggaactctcaagtgg

SEQ ID NO: 6355 - DNA, 434 bp, Glycine max
  unsure (1)..(434): unsure at all n locations
ccataatgttttccagaagtggctttagaacttagcatctctatctgacacaatggtcctaggcaaaccatggagtctcacaacttccctaaaaaagggttttgagatatgggaagcatcatccaccttatggcatggtataaagtgtgccatcttgctaaacctatccaccactacaaagatagagtctacacctctttgggttctagggagcccaaggacaaaatccatactaatgtctacccaaggtgcagatggaatgggtaagggtgtgtatagcccatgaggcatcaccctagacttggctngtacacaacccacacacctgatgcaatgctgatggacatctttcttcatatggngccaatagaacttctctttgagtaagacaaaggtcttgtctatcccanagttgcccatgagcccactctcat

SEQ ID NO: 6356 - DNA, 447 bp, Glycine max
tacaatagtaggtcactttcacaaagagggttaaaactttatcacaaatttcctactcaaagatctagcacagtgtgttgtagatttagaatgcttcaacttgttcttcgtagctttcaaaaatgcctcttaaagctctcaagaagaccattttagtgggctgcacatagctaatacacttttggagcaagttggttcactttcaagttgtcatgatatgatagtagacataaccattctgaggttctcattctaaagagcctttttaatggtcattctgaagaaccatcaaaattgtcattctaatgtttgcttagaatgaatccatactttgatgaactcccttgattaacgtcatattgatatctcattccgatgtagtgcagtttcatcactcttaaacacttctttataacttcaaaatattctaaagttgattacatcata

SEQ ID NO: 6357 - DNA, 385 bp, Glycine max
  unsure (1)..(385): unsure at all n locations
ccccattcttctttatcttttcacttccattctaccattttcttgcaccaaattttgtgggttctccattggtgatgatcatggagggctaaacaattaatcaatccaaggatctactccgagcaaggctaaatttgagttctggtattgttattctactctttgtgaatgttcttctttctcttcaatccctatttcatttttcatgattgtgattatgtttaggattgaaaatggattangttatggattcatttcctaatttcaaaaattaatcacagattatttggatgactgtccactctaacttgtgatttcaaacaatttaaagattgattggttgaactttctctatgcatgtgagtgaactttcacattgaacatc

SEQ ID NO: 6358 - DNA, 398 bp, Glycine max
  unsure (1)..(398): unsure at all n locations
acgcacaatcacgactcttcatcatgtcctcattcatacatttcattctaaaattcagatattgatgcaaagattatttctcacagctagtcgttcactcacagtttaagttcacactctcaccgattttggttcaagcttttctttcacaatcaatctgtctactgactaacaattctaattgcaagttctcattcttgttctttctttgtctaacatacacacttgctcaaactcatgaaaagaaacacaaactccatcacaatcatgcattcaattcaaaaccaaatcatacaccaatnttcacaaaaagataaaagtgttttactgccatattatcaaaatcaagtcaaactgttccatatgcttcaaaatgagcaaaccaactacccataaat

SEQ ID NO: 6359 - DNA, 419 bp, Glycine max
ttggtcttcgccgatgaaatgatcaaagtgggtctggaaaaaggcaaatctgatcatcctgatttgatgaatgtgaaaacttgggcaaatgaagaggatgcgaatgatggagaaacccttgctatgactgccattcctacacggtcaaatttcccatcagcccaacaatgtcattactcaaccaataacagtccctctcacccaatcatccgcaaaagccatccccaaatcagccacaaggcttgcctacttaccacaagcccaattcccaaacaccacctttagcgcaaacaccccaaattctagtgtcatatgctaacttgctcccatatctacttgataatgcaatggtagcgataatcccagcaagggttgatgcaagctccattggagcttgaggcctaaatcttcttcatcat

SEQ ID NO: 6360 - DNA, 335 bp, Glycine max
  unsure (1)..(335): unsure at all n locations
atgaagaacgtctaataacggttgaaagctgtgcgagatttctcaccgaaaacgttactgaaaccgttcggaagcgcctcggcttatattttcttcacggaaacaatatttccaagcaaattccaaagagggagaagtgcctaaagggctgagatccttttcttcttcattttctcccctatttatagcaaaataggggagatgcttgccgcccagctcgcccaggcgagcagggttgcttcctccagaagcaaccgccttctggaggaatcttctggagggcccaagtgggcctgggtgctatttgcacccccattntaactaaatacaccccc

SEQ ID NO: 6361 - DNA, 434 bp, Glycine max
  unsure (1)..(434): unsure at all n locations
gggttcgaggtacttacccgttgaagatcgaagaacgatgaataacgaatgaagaacgtcgaagaacggttgaaagctttgcgagattcctcacggaaaacgttacggaaacgtttcggaagcgcctcggcttagatattcttcacggaaacaaattttccaagcaaattccaaagagggagaagtgcctaaagggctgagatccttttcttcttcattttctcccctatttatagcaaaataggggagatgcttgccgcccagctcgcccaggcgagcagggttgcttcctccagaagcaaccgccttctggaggaatcttctggagggcccaagtgggcctgggtgctatttgcacccccatttttactaaatacacccnctctgctgtntttttttggtgattctnttttcgtaaagttacggaaacttac

SEQ ID NO: 6362 - DNA, 373 bp, Glycine max
  unsure (1)..(373): unsure at all n locations
cgcgctctctgatttgcacatcttcatgttaccaattccattcatcatcgctcccccctctctttagggggggtttttttttttacaacaaaagcgtaatcaaattgtgttgccaaaatgatataacttcttaagagaaattaagaacgtgtctctcttgctaaataaatattgctgagtgatggatttattatatacacgattcaagaatatataagcctttttcttttaatttcgggctgggagtttattcggaaagcgactcttcgatgaaaacctagattcagctcccatattttgaacccccgcggtttctaatccacctatntttgtttagccgtggtttctgggtggcggaaagctctaactttaa

SEQ ID NO: 6363 - DNA, 433 bp, Glycine max
taaaccatagccaataatccaatatgacattcacctgcagatgcacctgcacctcgttctcggtacctctattcccatattatatataatatatttctcttacctgacatatttatatttatttatgtcacagagaaaccaagtaattaaagtgcaggtgcaaatgcagataaaggcaacatatcggcatcaacgtatataataatgacctgctgctacataatatagtaagaaagttgctcgcagccaacatttttataataggaaattcctgttgaaaagggattatgagagagaggactgagagtgattcactcaaatattttggaccaattcttgtagaggcatgatctatctagatagatggcatatgcccttccctccgatgaaataatgataatattcacacgcttgtgccttaatttatcttctt

SEQ ID NO: 6364 - DNA, 432 bp, Glycine max
  unsure (1)..(432): unsure at all n locations
acacctcanaagtcttactcaacatactttgcagaatgtaattcataggactagtttagtaattcttttggaataatattgttaacgagtagagttaaaaaaaaagtataaataactaaagggtatttgaaaaagaatatatagagattatttgaactcaaaaaaataaattatgactcctaagaatatatgactccaatgaatattttcaacttataatttcaatagttttttttttccggtaactgttcaaaataagttcattttaatttatttcaataaatttcatgatcaaattcatgaaataaaccctcatatgataagaattnntttaataaacggttaattaagtggttttgttagttaaaatacagcctaagttaagcaatttatagtctgacattgaaatgacgcatctnttttccttctaag

SEQ ID NO: 6365 - DNA, 581 bp, Glycine max
  unsure (1)..(581): unsure at all n locations
gcgcgcgccaggctaatacgagattatggtgacgtaaaatattgtcgatangaatgagttgtattgntgataacatcgtaggaatatagctcgtaaatgnacggtgatcgtaagtcatacacatacttcgttgtgaatannatnaatagccaaacggtcttatcttgaattaantacgttgagaaccctgttgagcctagttaccctttccttgttatgaagctcactacaagccttaagagaaaaaccatgatgttaccatatccttaaagaaatgtgaggctttgcaagagtattgggaatgagagtgagggggttttgttcattggacaacttgtcttgttggctattcttatgatgtaatttgggccatacttgatagacattggatattggctaaatgtcggacttgctgaatgaaatgttgttcttatacgctatagattctgtgataaagaagtaaaaaagacagtctttaatgtgaggggatgagaacttatatggccaagattgatggaactctctggtgtactctacaggtaaatacataccttaactagtataattgtttttgagaagcg

SEQ ID NO: 6366 - DNA, 315 bp, Glycine max
  unsure (1)..(315): unsure at all n locations
tctagtctcaattttgagcgtctcgatatatttctcctgttcattcggacatccgagtaaaaagttattgtcgtttgaatntcctaccagcttccgttttcaatgtgcagcgtctcgatatattacaggactcaaccggacatccatgtataaaattattgtcaattcaattttctcagagcttcggatctaaatattgagcgtctcgatatattacgggactgaatcaaacatccgagtaaaaagtttttgtctattgaatttgatacgagcttccgttttcaatttggagcatctctcgataaattatgacaa

SEQ ID NO: 6367 - DNA, 336 bp, Glycine max
aagaaataaatgtggagatggataaagataagaatggctctcacatttatgatcaaattactatgtgcagacttgtgcaacactaagagaaggagagccattggcagacaaagattaaccccacgaagatgatcagaagacataaaccttaacaggttatcaacccactgagatattcacaaatgcatgaaccagatagagacattaatatctaaacagtaacatggcaaaacacactgaaagaagtaaaatagggtaataagggacagaaagtttagaagagacacactatcgtagataaagttactacatcttgaacaacaaccacattgatga

SEQ ID NO: 6368 - DNA, 433 bp, Glycine max
  unsure (1)..(433): unsure at all n locations
tccatggatntcaaattcgatgtcattgctttctattgtattcagccaacttttcccatcttcttcctgtgcaaagtcatcaccaaacagcagataccacaccgtgtccccttcccatgacagtttcccatctctccgttaacgccaagcaccatgcaccctcccccatcccggggccatcagtcaccggttccgcacggaatcccccggccgctgcattcttccctccgaccttcgcttctcccttttcgttgtgtttgtggctatggtcacggacacgaatctcgattaccccttcctcttcaccgtcttctttgccattctcgtcgctcgctgccaaatggctctgctagaatcttcattcactcattcctaccccactntaatttggaacgcactttaatttggaatgcatgattgagtaacttatgca

SEQ ID NO: 6369 - DNA, 95 bp, Glycine max
  unsure (1)..(95): unsure at all n locations
ngttcgcacatcgttcacgtgtatgatatccactccacatgttatattgtagaggagaccttcaaccctataacgcaacgtggcggccaaaagtg

SEQ ID NO: 6370 - DNA, 77 bp, Glycine max
ttttgtgggttgatgctcttaagacagctacgtttatattaatccgagttccaaccaaggctggctcattgacacct

SEQ ID NO: 6371 - DNA, 473 bp, Glycine max
ccgcgcgagcacagagcggggagacggcgagagaggaaagagagcgaggaacggagagagcacccccggacgagcgaaacgaaaggagagcaagagacacagaggggcacagctacaagggggggggaaccggagaggaggacgaacaacccccccccccccccacacggaaggaagagggggggaagaacggaagcggagggcaagaagcgagggggcagacagagaaagaagaaaggaaggaggaaaaagagaaaaggcgaaggaacagcagaaacgagagaagaaaaggcaaggggaacgagaggagaccaaacgacaacgagagcagacgagaaaaagacggcagaaaaggaacaaagggaaggaaaagaggcaccacaaaggggaagaacgggagaccacaaggcgggagaagaggcgggacggaaaggaggagggacagcagcccgaagcaaaaaaggagggagggg

SEQ ID NO: 6372 - DNA, 240 bp, Glycine max
  unsure (1)..(240): unsure at all n locations
actatgatactaagcttacagcagatntagtaatgacccactgacctagaataaaaaaaaaacttaatggctgagtgtaactgaaattgtggcaaccaaaagtcacccccaacagccaacaagtcagccaccatttggtctcccaaaaggctgatgcctaggttgccaattgggcccttattacaacttgaactaaacctactaaagctcttttagtgtgttaacccaaaacatattttt

SEQ ID NO: 6373 - DNA, 570 bp, Glycine max
  unsure (1)..(570): unsure at all n locations
ccccctccccaccacccactccacccgactgcatcgcatgacatcgctccagatgcaacggacgcacaggtcgcggcgacnnnaanannnnntacatcacgactactgacctatagaaacncaagctaagcnacnnngagaaaaaagacttgagaagccagagccnagttactacacaccgcccgcacaaccaagctgaccgccctgagaagcctgctcaagaagacccccacagaagctagagcccaactacacacaccgctctaagacgaaagcccacctccgtgagaggagaagctagagcgtacccacacaccccccataatagcgaaggccacccccaggagcaaatacacgagaataccgaagaacaacccgacacagagaccactcaaagagccccggaaaacacggcgccaaccctacgccactagaacggcgcgaagacaagggccaaccgacggcaaaccccagccaagactgacagcgggaccgagccccactacgccagggcgcaaaacaaccgaggccagggaacccagggcgcctaggacccgacgaccgagcggc

SEQ ID NO: 6374 - DNA, 122 bp, Glycine max
aacaagaaaagccgaaagggagaagagaaggagagacgacagaaacggagaaagggcaaccaaaagaagaggggcagcgggaggaggggctgggataagaggggagagaacgggggaggaaa

SEQ ID NO: 6375 - DNA, 483 bp, Glycine max
  unsure (1)..(483): unsure at all n locations
gacgaaaagaaaaaaagagaagaagaaagaagaaaaaagaaaggaggacaaagagnnnnaanacagcagaagagagannnanaagnngnagaaanagaaaacagagagggaaaaaaaaaaaggggagganggaggggggaagaaaaagaaacccccccccccccgcacgggacaaaaggagaggagaagnagggaaacaacagggacaagaaggggacggagacaagaaaagaggaaaaaaaaaaccaggagaaaaaagaaagaaaagaaagaaaaacagaaaaacgaaaagaaagaagggaaaaaagaagaaaagagacacaaaggaaaaaagaggagcagaagaaacgagagaggaaaagaaggaaagagaaaggagagggaagaaggagagcagagaaaaaaagaagaaaggacagaaacaaaaagcggaagaaagcaaacgaaagaacngaaagaaggaaaagagggggaggaagggag

SEQ ID NO: 6376 - DNA, 410 bp, Glycine max
agtctcacgattgtcacgtgctcatgcaacaattgttagccgtggctatacgagacatctttccaaacaaagtcaggttagccataactcgcctgtgctttttcttccatgctatatgtagctaagtcattgatcctgtgaagtttgatgagctggaaaatgaggccgcaattatactgtgccagttggagatgtattttccccctgctttctttgacatcatgattcacttgattgtgcatctagtcagagaaatcaaatgttgtggtccagtttatctacggtggatgtacccggttgagcgatacatgaagatcttaaaagggtatacaaaaaatctatatcgtccagaagcatctattgttgagaggtacatagcggaagaagccattgaattttgttcagaatac

SEQ ID NO: 6377 - DNA, 158 bp, Glycine max
ctaagcttgagccaaatcctgactatcataaaccatgacttagttttttttgacgcaactacctcctaccgcagggtttgatcagtcactgaggtgctccagctatagagacttccactttgcaccacaggcagaagaatttgaacatatcctaggat

SEQ ID NO: 6378 - DNA, 82 bp, Glycine max
  unsure (1)..(82): unsure at all n locations
ttgacttgagtcatcaagagattaaaaatgtgaccatggttgagttncaaaactatcaactatctgtgaattatcaatcgtt

SEQ ID NO: 6379 - DNA, 305 bp, Glycine max
  unsure (1)..(305): unsure at all n locations
aaccaaatgctcatcactgctnatgatgaagcttcaagttgtttcatataaatctcctcctctaaatcaccattaagaaagattggtttcacatccatttgnttcaactgaaggtcaaaatgagaaactaatgccaacataatacaaagagaatattacttatatacaagagaaaaagtcttagtgaaatccattccttcttgggagaaaatcccttagcaacgagtcctgccttgattctttcaaagaagcctaatgaatccttcttggtcataaagatctatgtaatactcatcgaatgcatc

SEQ ID NO: 6380 - DNA, 121 bp, Glycine max
  unsure (1)..(121): unsure at all n locations
tgttcttgattntttcaaagttctttaacaaccttagaactaaatactcgtccttcatttaattatctttgggcttgtcgaccacgatcaacaaagtactttcgacaggtactatatgttg

SEQ ID NO: 6381 - DNA, 434 bp, Glycine max
  unsure (1)..(434): unsure at all n locations
cacattaataaagtgagaaattcagtgattcatgaagttatgaatacctttctccttctttggggtatatctttattaactaccataaatcattgggttttcatgaatgttagttcttcaactctatcaatttttttttgttgtactacattattttggaattccaataactaaaagtactagatttttttggtggtggagattgaactttcttgtaatttctattagacaaatttgacatacattttaatttcttgttgcttctttggttcaggtccaaagaaggaaatgtggtattttgttataggtattacattttctagtgcactcttgtctctttttgacatttttctctgatagaagagattataatcattctgttctgtctattttaatcaattntgtttataaaaaatattacaggtattataata

SEQ ID NO: 6382 - DNA, 446 bp, Glycine max
  unsure (1)..(446): unsure at all n locations
aatcgtttcagttggaaaaaatcccttgtgcatgaagatcaaaggatattatcacacaaagatacatcaccaaaaaaataaaataatgaaagatataaatttaaagcagatatcttttatctacattcacacaaacatctaaacaatattcactatctcaaattttaatttgacaatgaattacatttatcctctatttaataatgtcaaaataacaataaattgatatcttgacagaactataattataataagagtttaaaataattttacattatcatctactcatcaatcattgttgttatgatttttaaaataattnttatcaaagtcaacaaacttatatcataaatgatgattgaatgataatgtaattttacattatataatattntttctcttataataacctaagcaaaggataaatgcacacattgatccgatgc

SEQ ID NO: 6383 - DNA, 426 bp, Glycine max
  unsure (1)..(426): unsure at all n locations
ttttggagtaaattagaaataaatcttgttttatggttaacgttgtctctagaacatttccattggatttaatgatgaaatttgtgcattttcaagtgaaaaagaggctaagttttgaattgcaaaaagtaacaattgggctaagctcagcagttgggctaagcgcttatccaccgcttagcgcanaggataatctggcagagcatcatcatcaaagccgcgtgctaagtgcaagatcagtgtgctaagcgcagcaagtgccttcagccaggcttagcgcaatactggcgctaagcccaaagtcacgaattctgaacctatttaaagcttgttntgtgcagaattagggtacacaccttttgagacttggcacagaattttcagaggcattggtgcacagcattccatagtgcctattttgggaaa

SEQ ID NO: 6384 - DNA, 459 bp, Glycine max
tatgaaatggatttaagtgcaacaattaaataggtgttatcgtgttcaattttacttaaacacttactgcaccccgttgatcgagccaaatggctccggattcagtgggcaagatcgagagtgtatgttcttgaaaagtaaaagacacaacacaggaggttaagatgcaaatcatccatatttattagtgctacgatcatggtttgcaaaggattttaagactttggagatcccaatgagtccttggagaataatcatgtatttaaccttctagcttccctaggcgttatgcataatattgtttgacgatatcggaattcacgggtgaaggaaattcttcatcatccatactggcaagcaacaatgcccctcccgaaaatgccttcttcacaataaaaggtcctttataattcggagcccacttccccctatggtccttttgagcttgtgatactttct

SEQ ID NO: 6385 - DNA, 380 bp, Glycine max
tattgcttgcagcggtactccttgtaactatagatgtaccctgtatcaccaagaagaagagcgatatcaaactcgtttcccgctcttctacatgtagaacctgaatgaccacattggcgaagaactagcaaaatatccttcgcggaaagccctagtgagggtaaagaactagtgcaaaggagagctaatttgaagacactcgtcaattgtaccgcataacattcatctttgatatcctcatcgaatgcatcggtaaggctcttcccttcactaaaatgatcccacgcccattcaactaggctgcatgcatgctcaccttctttattaggctttctttctgtcacaagctctaagacacaacctctaagctatatacatcg

SEQ ID NO: 6386 - DNA, 445 bp, Glycine max
catcagtataacccttcagtttcaattcagagtctccataaatgaggttttggtctttagttcttcttaagtacttaagtatggtcttaaccattttccaatgttcttcaccagggtttgcttgatattgactagttacacctaatgcataagcgacatcaagatgtgtacaagtcctggtgtacatgatagctcccactacactagcatatggtactctacttatgcgttttctttcttcaggagttgttggacaattctccttactaagagtaattccaacacctacaagcaaatagcctcgtttggaattatccatgttatatctctttaagatagtatcaatgtacatagattggaagagtccaagcaaccttttagatctatctctataaatctttatacctagaatataaattggttctcccaaatccttcatggagaa

SEQ ID NO: 6387 - DNA, 414 bp, Glycine max
  unsure (1)..(414): unsure at all n locations
ggtgaaacttcctgcttttattgttgaccacagagtggtacctggagatatgtcgcgggggtcaagagaccttggggacgtcaggtggggtgctattgcccaaaaccaagcttgaccaatcccgacccaacccgggcatagtcggtcagtgagaacctgtgatgtacctaagcaggcgagctcctggcagtcaacagataaaaggaaaacaagaccacaaagcaaggaggcttgtggtggctggccagctggtgaatttgtgtaatatgtgagatatggcctctggtaatcgattaccaagggtgggtaatcgattacaaggcttaaaaatgaagacaggaggctaagatggtctctggtaatcgattaccaggggatgtaatcgattaccangcttggaaacggagtcaggaa

SEQ ID NO: 6388 - DNA, 406 bp, Glycine max
actcttggagaaaggatgttcagtgaattcagttaaaggttctctagaaatccatggcaaagcaaagagattggtgatgaaagctccattggccaagaatagaaccttcaaggtaagcctaaacaccattgaatctaagtgtctttccgctgcaactttgtcagatgattcatggttatggcaccttagactaggccacttaaattttagagatatgagcctcttgagatccaaagaaatgttaattggtctccctccaattaaaattcctaagaagatatgtgacaattgcttaatcaacaaacaacccaggaattccttaagcaattttactacttctaaggctagtgaaatattgcatgttgtttactcagatatctgtggacctcttgacactccatcatta

SEQ ID NO: 6389 - DNA, 413 bp, Glycine max
  unsure (1)..(413): unsure at all n locations
agatgatgacaaaagcccaaagaatgatttcgagaatgagtcaacaagttcaagatcaagtttaatttcaagattcatgagaagaaatcaagaagattcaagaatcaagagaagattgatttcaagattcaagagaagatgaattcaagattcaagagaagaaatcaagaagacttcacaagggaagtattggaaagatttttcaaaaaacaacatagcacagttttatttttcaaaagagtttttctcaaaattttctaagttaccagagtttttactctctggtaatcgattacgcgtttcctggtatcgattaccagtggcaaagtttgatttcaaaagcttttaactgaatntgcaacgttccaattgatttcaaaatggtggtaatcgatacaagatattggtaatcg

SEQ ID NO: 6390 - DNA, 364 bp, Glycine max
aatctgggacctagccatggtataagtctccacagaggccactgcctccctcgcccagtattatgatcagccactgaggtgcttcacctttggggacttccagctgtcacccatggtagaagaatttgaagagatcctatgatgtcctctatggggaaggagaccatacctcatctcacggttctatccctcattagctagaatttctaagatagtccaaatctcggcgcaggaattagaccacagaaagcaagtcaaaaatgaggtggttggaataccgagaaaatatttggaggcaaaagcaagaatcttggcaggtaaaggcaaatgggcctcgttcatagacattctcacactgttgatc

SEQ ID NO: 6391 - DNA, 579 bp, Glycine max
  unsure (1)..(579): unsure at all n locations
ctacccacctatagcntcactcagtctgtatataacagattgtgtgatcatatacatagacgtgcttggtatnagatttgacgcgactcattcactatgtctcacatacagaccgagaacactacatataactgcagcatacaaatggtagtatttgacgtccgattatctattgcaactggacatgnnacatgtctacaagccactttacgatatagctcgctctactggtattcaagtatactcccgtgactaccgggagggaatgtgaagctattacactccatagctcatggctgacattgataagttacctgaatggatagatattcaacgatttaccaaccgacttggattaagaataaacaatatatcttgttgatatttgtgcattgactagaaacttaaatggcatgagattctttcaatcttacaacatcattaatatgtgcgcgatggcatcgtgaacttaattctttttgaagaaaatcttataatcatatattcttatgataatttaaactacgtaatgttttatcgcccaatagatctaaaattcaaacagtacttctaattacg

SEQ ID NO: 6392 - DNA, 449 bp, Glycine max
agtaggatatacgctcgtataagcaccgtgttcaccgtacttttgttcggcatgcatcatctcctactcttggaaaatatggagcattatcaagggatacccgtgactcgatcggtgaaattagatctcctctctaaacagcatgtgttttttaccattgtatacagaaaatatgttgtcgcgactgaacatgatatctgcagattgtcactactgtaaatcataattatagatacaggccttgttcacgctcaaagagagactctcgttcctaatcacgctcatgcgatcttgtttataccagaatctacaccaatttgctgtatacgtttacatagtatatcggccattatagcctgcgatactctgacttgatgtatgctccatttcggcgtggaagctatcgatctgaatatattcctgttgcgatggacatatgtgaaatatcg

(The sequence listing continues in the following parts.)

We claim:

1. A substantially purified nucleic acid molecule, said nucleic acid molecule capable of specifically hybridizing to a second nucleic acid molecule having a nucleic acid sequence selected from the group consisting of SEQ ID NO: 1 through SEQ ID NO: 304905 or complement or fragment thereof.

2. The substantially purified nucleic acid molecule according to claim 1, wherein said nucleic acid molecule comprises a microsatellite sequence.

3. The substantially purified nucleic acid molecule according to claim 1, wherein said nucleic acid molecule comprises a region having a single nucleotide polymorphism.

4. The substantially purified nucleic acid molecule according to claim 1, wherein said nucleic acid molecule comprises a nucleic acid molecule having a nucleic acid sequence selected from the group consisting of SEQ ID NO: 1 through SEQ ID NO: 304905 or complement thereof.

5. The substantially purified nucleic acid molecule according to claim 4, wherein said nucleic acid molecule further comprises a bacterial ORI site.

6. The substantially purified nucleic acid molecule according to claim 1, wherein said nucleic acid molecule has a promoter or partial promoter region.

7. The substantially purified nucleic acid molecule according to claim 6, wherein said promoter region comprises a CAAT cis element and a TATA cis element and an additional cis element.

8. A substantially purified nucleic acid molecule comprising a nucleic acid molecule or fragment thereof having a pair of defined ends, wherein said pair of defined ends are selected from the defined ends in Table A.

9. The substantially purified nucleic acid molecule according to claim 8, wherein said molecule comprises a nucleic acid molecule having one or two of said defined ends.

10. The substantially purified nucleic acid molecule according to claim 9, wherein said molecule comprises a nucleic acid molecule having two of said defined ends.

11. A substantially purified protein or fragment thereof encoded by a first nucleic acid molecule which specifically hybridizes to a second nucleic acid molecule, said second nucleic acid molecule having a nucleic acid sequence selected from the group consisting of SEQ ID NO:1 through SEQ ID NO:304905 or complements thereof.

12. A transformed plant having a nucleic acid molecule which comprises:
(A) an exogenous promoter region which functions in a plant cell to cause the production of a mRNA molecule; which is linked to
(B) a structural nucleic acid molecule, wherein said structural nucleic acid molecule is selected from the group consisting of SEQ ID NO:1 through SEQ ID NO:304905 or complements thereof or fragment of either; which is linked to
(C) a 3′ non-translated sequence that functions in a plant cell to cause termination of transcription and addition of polyadenylated ribonucleotides to a 3′ end of said mRNA molecule.

13. The transformed plant according to claim 12, wherein said structural nucleic acid molecule is in the antisense orientation.

14. The transformed plant according to claim 12, wherein said plant is a dicot.

15. The transformed plant according to claim 12, wherein said plant is a monocot.
